United States Patent Application Publication US 2005/0244851 A1 - sequence listing, part 129

SEQ ID NO: 5034546 - DNA, 25 bp, Homo sapien
aaccaggacaaagcacttgcattac

SEQ ID NO: 5034547 - DNA, 25 bp, Homo sapien
actgttacagatttgacattgtgtg

SEQ ID NO: 5034548 - DNA, 25 bp, Homo sapien
cattcccatgaagtatagatttaaa

SEQ ID NO: 5034549 - DNA, 25 bp, Homo sapien
aggactgttacagatttgacattgt

SEQ ID NO: 5034550 - DNA, 25 bp, Homo sapien
gctgcattcccatgaagtatagatt

SEQ ID NO: 5034551 - DNA, 25 bp, Homo sapien
tactggctttgttgagcacgtccat

SEQ ID NO: 5034552 - DNA, 25 bp, Homo sapien
tggagtactggctttgttgagcacg

SEQ ID NO: 5034553 - DNA, 25 bp, Homo sapien
agcagagtcttggagtactggcttt

SEQ ID NO: 5034554 - DNA, 25 bp, Homo sapien
caaacttcctgttttgactagatgg

SEQ ID NO: 5034555 - DNA, 25 bp, Homo sapien
ggaattagatcctggactgaatatt

SEQ ID NO: 5034556 - DNA, 25 bp, Homo sapien
tgtcaagtgacgtggtgtgttcctt

SEQ ID NO: 5034557 - DNA, 25 bp, Homo sapien
tccagagagcggtttccattcaaaa

SEQ ID NO: 5034558 - DNA, 25 bp, Homo sapien
ccttaaggttaatcagctgtttagg

SEQ ID NO: 5034559 - DNA, 25 bp, Homo sapien
tgtgtgttattgactgtagtgcttc

SEQ ID NO: 5034560 - DNA, 25 bp, Homo sapien
caagcctaggaaatcgttaatctaa

SEQ ID NO: 5034561 - DNA, 25 bp, Homo sapien
cacacaccgccatagtggtatctgg

SEQ ID NO: 5034562 - DNA, 25 bp, Homo sapien
tgaagacattctatgagccattatt

SEQ ID NO: 5034563 - DNA, 25 bp, Homo sapien
gaaaacttaagattaagacagcctc

SEQ ID NO: 5034564 - DNA, 25 bp, Homo sapien
tgtgggattcctggataacccacat

SEQ ID NO: 5034565 - DNA, 25 bp, Homo sapien
tccaaaagctgcaagtacattaaat

SEQ ID NO: 5034566 - DNA, 25 bp, Homo sapien
ctggataacccacattaaggactgt

SEQ ID NO: 5034567 - DNA, 25 bp, Homo sapien
aagagaaatgttgtgttccaaaagc

SEQ ID NO: 5034568 - DNA, 25 bp, Homo sapien
ggtatacctatcaaagtgtcttcac

SEQ ID NO: 5034569 - DNA, 25 bp, Homo sapien
aacatgtcacaccaccgtatttttc

SEQ ID NO: 5034570 - DNA, 25 bp, Homo sapien
tatactttgtcccacggtataccta

SEQ ID NO: 5034571 - DNA, 25 bp, Homo sapien
ttttggcctgttctctattaaacaa

SEQ ID NO: 5034572 - DNA, 25 bp, Homo sapien
tccagcatcgggcaggaaggacaac

SEQ ID NO: 5034573 - DNA, 25 bp, Homo sapien
gaaggacaaccaaaggcaattaaca

SEQ ID NO: 5034574 - DNA, 25 bp, Homo sapien
cagcatcgggcaggaaggacaacca

SEQ ID NO: 5034575 - DNA, 25 bp, Homo sapien
ttccagcatcgggcaggaaggacaa

SEQ ID NO: 5034576 - DNA, 25 bp, Homo sapien
atttctgtccgtgatggtacccaca

SEQ ID NO: 5034577 - DNA, 25 bp, Homo sapien
aaatgaaaaaaggtagccttgtgca

SEQ ID NO: 5034578 - DNA, 25 bp, Homo sapien
ttttcatttctgtccgtgatggtac

SEQ ID NO: 5034579 - DNA, 25 bp, Homo sapien
tagccttgtgcatatggagaatggg

SEQ ID NO: 5034580 - DNA, 25 bp, Homo sapien
tggcaaaacttcctccataatgcga

SEQ ID NO: 5034581 - DNA, 25 bp, Homo sapien
caactggtgaactgtccagttacca

SEQ ID NO: 5034582 - DNA, 25 bp, Homo sapien
gcgatacttagtgactgttctgtgg

SEQ ID NO: 5034583 - DNA, 25 bp, Homo sapien
tgtggtctaacagatttaatgtccc

SEQ ID NO: 5034584 - DNA, 25 bp, Homo sapien
tcagagcatgtgaggtttcccccat

SEQ ID NO: 5034585 - DNA, 25 bp, Homo sapien
gactgcagagtggttgtagagggtc

SEQ ID NO: 5034586 - DNA, 25 bp, Homo sapien
ggttgtagagggtctctgactccat

SEQ ID NO: 5034587 - DNA, 25 bp, Homo sapien
gagtggttgtagagggtctctgact

SEQ ID NO: 5034588 - DNA, 25 bp, Homo sapien
ccagggatggggactgcagagtggt

SEQ ID NO: 5034589 - DNA, 25 bp, Homo sapien
ttagtataaagaacaatggcttgca

SEQ ID NO: 5034590 - DNA, 25 bp, Homo sapien
tttagtataaagaacaatggcttgc

SEQ ID NO: 5034591 - DNA, 25 bp, Homo sapien
tagtataaagaacaatggcttgcat

SEQ ID NO: 5034592 - DNA, 25 bp, Homo sapien
ttttagtataaagaacaatggcttg

SEQ ID NO: 5034593 - DNA, 25 bp, Homo sapien
gaacatcctgttttggatcctatga

SEQ ID NO: 5034594 - DNA, 25 bp, Homo sapien
gatcctatgaggtgcctgtgggtta

SEQ ID NO: 5034595 - DNA, 25 bp, Homo sapien
tgaatattggcagttgaagcaggcg

SEQ ID NO: 5034596 - DNA, 25 bp, Homo sapien
caggcggagttctattggaggacaa

SEQ ID NO: 5034597 - DNA, 25 bp, Homo sapien
tcaggcacagattatagaggcatac

SEQ ID NO: 5034598 - DNA, 25 bp, Homo sapien
tctgccaaaacaggtggtaagccgg

SEQ ID NO: 5034599 - DNA, 25 bp, Homo sapien
caggcctacctacatgaagtcagag

SEQ ID NO: 5034600 - DNA, 25 bp, Homo sapien
caaagccttttgtggtgcacggaga

SEQ ID NO: 5034601 - DNA, 25 bp, Homo sapien
tagttaagatgtataaggtaacctc

SEQ ID NO: 5034602 - DNA, 25 bp, Homo sapien
ggtgataggtacatgagaggcccaa

SEQ ID NO: 5034603 - DNA, 25 bp, Homo sapien
ctctagagaagccactaagaaaata

SEQ ID NO: 5034604 - DNA, 25 bp, Homo sapien
caaaaagacatggagccatttagaa

SEQ ID NO: 5034605 - DNA, 25 bp, Homo sapien
agggtacagcccaagctaactttgg

SEQ ID NO: 5034606 - DNA, 25 bp, Homo sapien
agaatagaaggtatctgaaaccacc

SEQ ID NO: 5034607 - DNA, 25 bp, Homo sapien
gaagtttgacttagttgactccatc

SEQ ID NO: 5034608 - DNA, 25 bp, Homo sapien
tctttggttttatccagggtacagc

SEQ ID NO: 5034609 - DNA, 25 bp, Homo sapien
gaacattggatatagggtcctggaa

SEQ ID NO: 5034610 - DNA, 25 bp, Homo sapien
acatataaccgttctgagccaggac

SEQ ID NO: 5034611 - DNA, 25 bp, Homo sapien
ggataagaagaacattggatatagg

SEQ ID NO: 5034612 - DNA, 25 bp, Homo sapien
gtttctcacatataaccgttctgag

SEQ ID NO: 5034613 - DNA, 25 bp, Homo sapien
cacgtaaaagaggtcctagagccac

SEQ ID NO: 5034614 - DNA, 25 bp, Homo sapien
gatgaccacgtaaaagaggtcctag

SEQ ID NO: 5034615 - DNA, 25 bp, Homo sapien
cagaatggctactgatgaccacgta

SEQ ID NO: 5034616 - DNA, 25 bp, Homo sapien
tagagccactggagaatttccagca

SEQ ID NO: 5034617 - DNA, 25 bp, Homo sapien
cctgtctgtttatggctgctgtgcc

SEQ ID NO: 5034618 - DNA, 25 bp, Homo sapien
tatacattggctcctcctgtctgtt

SEQ ID NO: 5034619 - DNA, 25 bp, Homo sapien
cttcttatacattggctcctcctgt

SEQ ID NO: 5034620 - DNA, 25 bp, Homo sapien
cctcctgtctgtttatggctgctgt

SEQ ID NO: 5034621 - DNA, 25 bp, Homo sapien
cagcatctctaagagtgtcatggag

SEQ ID NO: 5034622 - DNA, 25 bp, Homo sapien
gcatctctaagagtgtcatggagaa

SEQ ID NO: 5034623 - DNA, 25 bp, Homo sapien
gcagcatctctaagagtgtcatgga

SEQ ID NO: 5034624 - DNA, 25 bp, Homo sapien
cagcagcatctctaagagtgtcatg

SEQ ID NO: 5034625 - DNA, 25 bp, Homo sapien
gagttggtaataacaacatgccaag

SEQ ID NO: 5034626 - DNA, 25 bp, Homo sapien
gcaacatcatagtccccagatttct

SEQ ID NO: 5034627 - DNA, 25 bp, Homo sapien
tccacaactgcaacatcatagtccc

SEQ ID NO: 5034628 - DNA, 25 bp, Homo sapien
taacaacatgccaagctgcttttct

SEQ ID NO: 5034629 - DNA, 25 bp, Homo sapien
cacagtggttgtgcctctgatgggt

SEQ ID NO: 5034630 - DNA, 25 bp, Homo sapien
cacattgcaggctttgctcccttca

SEQ ID NO: 5034631 - DNA, 25 bp, Homo sapien
tcatccaccccagttgtggttctgg

SEQ ID NO: 5034632 - DNA, 25 bp, Homo sapien
ttctggtgagtctggatgtggcaca

SEQ ID NO: 5034633 - DNA, 25 bp, Homo sapien
gataattagttgatctcgcagtgca

SEQ ID NO: 5034634 - DNA, 25 bp, Homo sapien
tttgcatccaaaggaaccacttcag

SEQ ID NO: 5034635 - DNA, 25 bp, Homo sapien
ggtctacgtgactggctctaatggc

SEQ ID NO: 5034636 - DNA, 25 bp, Homo sapien
gcttatcttagtaatgggccatctg

SEQ ID NO: 5034637 - DNA, 25 bp, Homo sapien
tccaagaggtagagaatagaggctg

SEQ ID NO: 5034638 - DNA, 25 bp, Homo sapien
tgcttgcaccgttattattgccagg

SEQ ID NO: 5034639 - DNA, 25 bp, Homo sapien
tgtttgtggccttcagtacaggcag

SEQ ID NO: 5034640 - DNA, 25 bp, Homo sapien
caggtgttgtaaaggtggccatcac

SEQ ID NO: 5034641 - DNA, 25 bp, Homo sapien
tccagtggtcttcacatttatctca

SEQ ID NO: 5034642 - DNA, 25 bp, Homo sapien
gcattccagtggtcttcacatttat

SEQ ID NO: 5034643 - DNA, 25 bp, Homo sapien
gtggtcttcacatttatctcatcca

SEQ ID NO: 5034644 - DNA, 25 bp, Homo sapien
cattccagtggtcttcacatttatc

SEQ ID NO: 5034645 - DNA, 25 bp, Homo sapien
ttcttcctactgatacttctggtct

SEQ ID NO: 5034646 - DNA, 25 bp, Homo sapien
acaataatataagttccagtggaga

SEQ ID NO: 5034647 - DNA, 25 bp, Homo sapien
caataatataagttccagtggagac

SEQ ID NO: 5034648 - DNA, 25 bp, Homo sapien
ctgttcttcctactgatacttctgg

SEQ ID NO: 5034649 - DNA, 25 bp, Homo sapien
aagcgagtctgagcccaaaagctga

SEQ ID NO: 5034650 - DNA, 25 bp, Homo sapien
aaggaagcgagtctgagcccaaaag

SEQ ID NO: 5034651 - DNA, 25 bp, Homo sapien
gaggctaagccagtcaagtgttttc

SEQ ID NO: 5034652 - DNA, 25 bp, Homo sapien
taagccagtcaagtgttttcacgtt

SEQ ID NO: 5034653 - DNA, 25 bp, Homo sapien
gggagggagaactacattgataatc

SEQ ID NO: 5034654 - DNA, 25 bp, Homo sapien
gggagaactacattgataatcccca

SEQ ID NO: 5034655 - DNA, 25 bp, Homo sapien
ggagaactacattgataatccccac

SEQ ID NO: 5034656 - DNA, 25 bp, Homo sapien
gagggagaactacattgataatccc

SEQ ID NO: 5034657 - DNA, 25 bp, Homo sapien
gaactctaatctccaggatacgccc

SEQ ID NO: 5034658 - DNA, 25 bp, Homo sapien
ggatacgcccttatctcgcctattg

SEQ ID NO: 5034659 - DNA, 25 bp, Homo sapien
tgcttttggtagatccaatgaactc

SEQ ID NO: 5034660 - DNA, 25 bp, Homo sapien
gcctattgtcaatagtggtaatgaa

SEQ ID NO: 5034661 - DNA, 25 bp, Homo sapien
cctaccctattaccacaaaggtatg

SEQ ID NO: 5034662 - DNA, 25 bp, Homo sapien
gcttcccaaccttggcaccttggct

SEQ ID NO: 5034663 - DNA, 25 bp, Homo sapien
atcatcacagggcaccctaccctat

SEQ ID NO: 5034664 - DNA, 25 bp, Homo sapien
ttcccaaccttggcaccttggctat

SEQ ID NO: 5034665 - DNA, 25 bp, Homo sapien
gcacattattagcaggtccttcctc

SEQ ID NO: 5034666 - DNA, 25 bp, Homo sapien
tggtgtcagctgcactgtttgaagt

SEQ ID NO: 5034667 - DNA, 25 bp, Homo sapien
gtggtgtcagctgcactgtttgaag

SEQ ID NO: 5034668 - DNA, 25 bp, Homo sapien
ggtgtcagctgcactgtttgaagtc

SEQ ID NO: 5034669 - DNA, 25 bp, Homo sapien
tgtggtgtcagctgcactgtttgaa

SEQ ID NO: 5034670 - DNA, 25 bp, Homo sapien
ggaagtcgtttagcccagtgctgcc

SEQ ID NO: 5034671 - DNA, 25 bp, Homo sapien
gaagtcgtttagcccagtgctgccc

SEQ ID NO: 5034672 - DNA, 25 bp, Homo sapien
ctctaagcccaagtttgtagagcca

SEQ ID NO: 5034673 - DNA, 25 bp, Homo sapien
agtttgtagagccatctatagacaa

SEQ ID NO: 5034674 - DNA, 25 bp, Homo sapien
cgtacttctctaagcccaagtttgt

SEQ ID NO: 5034675 - DNA, 25 bp, Homo sapien
tttgtagagccatctatagacaatt

SEQ ID NO: 5034676 - DNA, 25 bp, Homo sapien
tggtgctgtctgagccacatttcac

SEQ ID NO: 5034677 - DNA, 25 bp, Homo sapien
ctggtgctgtctgagccacatttca

SEQ ID NO: 5034678 - DNA, 25 bp, Homo sapien
ttggttttttccatgagcagtcctt

SEQ ID NO: 5034679 - DNA, 25 bp, Homo sapien
tagcaattggttttttccatgagca

SEQ ID NO: 5034680 - DNA, 25 bp, Homo sapien
ttttttccatgagcagtcctttgtc

SEQ ID NO: 5034681 - DNA, 25 bp, Homo sapien
ggttttttccatgagcagtcctttg

SEQ ID NO: 5034682 - DNA, 25 bp, Homo sapien
gcaccttgactcatgtccataatgt

SEQ ID NO: 5034683 - DNA, 25 bp, Homo sapien
tccccatggaactaagtagagtact

SEQ ID NO: 5034684 - DNA, 25 bp, Homo sapien
ccaaactcttgcagccaaaacgcaa

SEQ ID NO: 5034685 - DNA, 25 bp, Homo sapien
agagtacttttaggcttgcttgtgc

SEQ ID NO: 5034686 - DNA, 25 bp, Homo sapien
tcacctccagttttaaatcttggaa

SEQ ID NO: 5034687 - DNA, 25 bp, Homo sapien
cttcacctccagttttaaatcttgg

SEQ ID NO: 5034688 - DNA, 25 bp, Homo sapien
tatgtaccaaatcaatcttttgaaa

SEQ ID NO: 5034689 - DNA, 25 bp, Homo sapien
cagaagttatgtaccaaatcaatct

SEQ ID NO: 5034690 - DNA, 25 bp, Homo sapien
gaatgaggccctcctttaccagtta

SEQ ID NO: 5034691 - DNA, 25 bp, Homo sapien
ttttagatcagaccctgagcaaggc

SEQ ID NO: 5034692 - DNA, 25 bp, Homo sapien
tgacattcttccatggaaccgtggg

SEQ ID NO: 5034693 - DNA, 25 bp, Homo sapien
gaaaactatgtaacaagccgtgcct

SEQ ID NO: 5034694 - DNA, 25 bp, Homo sapien
aggctgaaaggctatggcacagagc

SEQ ID NO: 5034695 - DNA, 25 bp, Homo sapien
attgtaatgtgcaccagagctgcag

SEQ ID NO: 5034696 - DNA, 25 bp, Homo sapien
gtaagtataagcttccattgtaatg

SEQ ID NO: 5034697 - DNA, 25 bp, Homo sapien
ctgaaaggctatggcacagagcagc

SEQ ID NO: 5034698 - DNA, 25 bp, Homo sapien
tccatagatttcttccaccggttgt

SEQ ID NO: 5034699 - DNA, 25 bp, Homo sapien
cagagggagcccttcagcgacagag

SEQ ID NO: 5034700 - DNA, 25 bp, Homo sapien
cggttgtgattttgtcccaggagaa

SEQ ID NO: 5034701 - DNA, 25 bp, Homo sapien
ctggctaacattgtcttggtatctt

SEQ ID NO: 5034702 - DNA, 25 bp, Homo sapien
ctaaatctggatgtcatcataagtg

SEQ ID NO: 5034703 - DNA, 25 bp, Homo sapien
cacagcacgcagctctgttcacaca

SEQ ID NO: 5034704 - DNA, 25 bp, Homo sapien
tgtcgtgcattgtaaaagtccctgc

SEQ ID NO: 5034705 - DNA, 25 bp, Homo sapien
cacacactgtcgtgcattgtaaaag

SEQ ID NO: 5034706 - DNA, 25 bp, Homo sapien
ctctgttcacacactgtcgtgcatt

SEQ ID NO: 5034707 - DNA, 25 bp, Homo sapien
gaagagctccttcacacaatgggag

SEQ ID NO: 5034708 - DNA, 25 bp, Homo sapien
ccccttctcagactaaatggaggaa

SEQ ID NO: 5034709 - DNA, 25 bp, Homo sapien
ccttcacacaatgggaggaggagca

SEQ ID NO: 5034710 - DNA, 25 bp, Homo sapien
ccttctcagactaaatggaggaaga

SEQ ID NO: 5034711 - DNA, 25 bp, Homo sapien
tcacattagaagtttcccaacaata

SEQ ID NO: 5034712 - DNA, 25 bp, Homo sapien
tccactgaagggcatggccaggagc

SEQ ID NO: 5034713 - DNA, 25 bp, Homo sapien
ccaggagcaggtggtaaatagaaca

SEQ ID NO: 5034714 - DNA, 25 bp, Homo sapien
tcatttcaagagaaaccaaagcagt

SEQ ID NO: 5034715 - DNA, 25 bp, Homo sapien
gctatttctagactctgtgattaga

SEQ ID NO: 5034716 - DNA, 25 bp, Homo sapien
tgtgattagagtcaagtcagtgttt

SEQ ID NO: 5034717 - DNA, 25 bp, Homo sapien
tgtaagatacgagaaagaacatagg

SEQ ID NO: 5034718 - DNA, 25 bp, Homo sapien
tccatttcttagatctgctatttct

SEQ ID NO: 5034719 - DNA, 25 bp, Homo sapien
tgagaatcacaggatccttacaggg

SEQ ID NO: 5034720 - DNA, 25 bp, Homo sapien
tccggcccgtaaagcatttcttata

SEQ ID NO: 5034721 - DNA, 25 bp, Homo sapien
gggtaatttgaactggcatctgtcc

SEQ ID NO: 5034722 - DNA, 25 bp, Homo sapien
caggatcttattgtctgaaagttga

SEQ ID NO: 5034723 - DNA, 25 bp, Homo sapien
cctcattcaaaccaggtctgtgaat

SEQ ID NO: 5034724 - DNA, 25 bp, Homo sapien
ctcattcaaaccaggtctgtgaatc

SEQ ID NO: 5034725 - DNA, 25 bp, Homo sapien
acttactaggactgcaaacacatga

SEQ ID NO: 5034726 - DNA, 25 bp, Homo sapien
cacttactaggactgcaaacacatg

SEQ ID NO: 5034727 - DNA, 25 bp, Homo sapien
cttactaggactgcaaacacatgaa

SEQ ID NO: 5034728 - DNA, 25 bp, Homo sapien
ccacttactaggactgcaaacacat

SEQ ID NO: 5034729 - DNA, 25 bp, Homo sapien
tcctggaggtactcagataggcctt

SEQ ID NO: 5034730 - DNA, 25 bp, Homo sapien
gacttcttatggttgtggctccagc

SEQ ID NO: 5034731 - DNA, 25 bp, Homo sapien
tgagaaggtttagtgcagccacaga

SEQ ID NO: 5034732 - DNA, 25 bp, Homo sapien
gggcccagaatgtggaccgacttct

SEQ ID NO: 5034733 - DNA, 25 bp, Homo sapien
tggagtgtgagcactctcgaggtgg

SEQ ID NO: 5034734 - DNA, 25 bp, Homo sapien
gtgagcactctcgaggtggccaaga

SEQ ID NO: 5034735 - DNA, 25 bp, Homo sapien
tgtgagcactctcgaggtggccaag

SEQ ID NO: 5034736 - DNA, 25 bp, Homo sapien
agtgtgagcactctcgaggtggcca

SEQ ID NO: 5034737 - DNA, 25 bp, Homo sapien
gagtatcgcctgagcaactggctca

SEQ ID NO: 5034738 - DNA, 25 bp, Homo sapien
cctcattctgtattcctgcaatcat

SEQ ID NO: 5034739 - DNA, 25 bp, Homo sapien
tcatcctcattctgtattcctgcaa

SEQ ID NO: 5034740 - DNA, 25 bp, Homo sapien
gggagtatcgcctgagcaactggct

SEQ ID NO: 5034741 - DNA, 25 bp, Homo sapien
taactggctagtatatgagactctg

SEQ ID NO: 5034742 - DNA, 25 bp, Homo sapien
tgagctctttgaggtaagggccctg

SEQ ID NO: 5034743 - DNA, 25 bp, Homo sapien
cagtgactaagtgctcacggccaac

SEQ ID NO: 5034744 - DNA, 25 bp, Homo sapien
cacggccaacactttacagctatgc

SEQ ID NO: 5034745 - DNA, 25 bp, Homo sapien
ggagccataaaccaggcaagcctgg

SEQ ID NO: 5034746 - DNA, 25 bp, Homo sapien
ttttctgggcagtaatgacggccac

SEQ ID NO: 5034747 - DNA, 25 bp, Homo sapien
gtaatgacggccacgaggtgggagc

SEQ ID NO: 5034748 - DNA, 25 bp, Homo sapien
gagccataaaccaggcaagcctggg

SEQ ID NO: 5034749 - DNA, 25 bp, Homo sapien
tcaaaccacaacaagcaacagagta

SEQ ID NO: 5034750 - DNA, 25 bp, Homo sapien
ccacaacaagcaacagagtactcac

SEQ ID NO: 5034751 - DNA, 25 bp, Homo sapien
accacaacaagcaacagagtactca

SEQ ID NO: 5034752 - DNA, 25 bp, Homo sapien
aaaccacaacaagcaacagagtact

SEQ ID NO: 5034753 - DNA, 25 bp, Homo sapien
gagggcctctctgtacccgaagcat

SEQ ID NO: 5034754 - DNA, 25 bp, Homo sapien
taggtttctgaactcatggggcata

SEQ ID NO: 5034755 - DNA, 25 bp, Homo sapien
gaagcatgatagcatgtgaatacag

SEQ ID NO: 5034756 - DNA, 25 bp, Homo sapien
gcaatttcctggtctaaacttccca

SEQ ID NO: 5034757 - DNA, 25 bp, Homo sapien
attttattttctgcaaccaactcac

SEQ ID NO: 5034758 - DNA, 25 bp, Homo sapien
gcattttattttctgcaaccaactc

SEQ ID NO: 5034759 - DNA, 25 bp, Homo sapien
aaagcattttattttctgcaaccaa

SEQ ID NO: 5034760 - DNA, 25 bp, Homo sapien
aagcattttattttctgcaaccaac

SEQ ID NO: 5034761 - DNA, 25 bp, Homo sapien
cccagattggagtttcattccactt

SEQ ID NO: 5034762 - DNA, 25 bp, Homo sapien
atgcccagattggagtttcattcca

SEQ ID NO: 5034763 - DNA, 25 bp, Homo sapien
tgcccagattggagtttcattccac

SEQ ID NO: 5034764 - DNA, 25 bp, Homo sapien
gcccagattggagtttcattccact

SEQ ID NO: 5034765 - DNA, 25 bp, Homo sapien
cagtgtcacttggattctgtgtcca

SEQ ID NO: 5034766 - DNA, 25 bp, Homo sapien
acagtgtcacttggattctgtgtcc

SEQ ID NO: 5034767 - DNA, 25 bp, Homo sapien
atatggcactaaccatgccactgtt

SEQ ID NO: 5034768 - DNA, 25 bp, Homo sapien
agattgcttcggaatatggcactaa

SEQ ID NO: 5034769 - DNA, 25 bp, Homo sapien
tggaaccatctgtgcatattctcca

SEQ ID NO: 5034770 - DNA, 25 bp, Homo sapien
ggaaccatctgtgcatattctccat

SEQ ID NO: 5034771 - DNA, 25 bp, Homo sapien
ttggaaccatctgtgcatattctcc

SEQ ID NO: 5034772 - DNA, 25 bp, Homo sapien
tttggaaccatctgtgcatattctc

SEQ ID NO: 5034773 - DNA, 25 bp, Homo sapien
cagttctgtaagtgccagagaagca

SEQ ID NO: 5034774 - DNA, 25 bp, Homo sapien
gagagatctattgcactgtgtagcc

SEQ ID NO: 5034775 - DNA, 25 bp, Homo sapien
gcatgctgaactcaatgatttgtga

SEQ ID NO: 5034776 - DNA, 25 bp, Homo sapien
ctccctcttgtacctgttgtgtgaa

SEQ ID NO: 5034777 - DNA, 25 bp, Homo sapien
gatttcataacacggtgctattggc

SEQ ID NO: 5034778 - DNA, 25 bp, Homo sapien
tgatatggactgaattacccccaag

SEQ ID NO: 5034779 - DNA, 25 bp, Homo sapien
taatgacggcagagttacaaaatag

SEQ ID NO: 5034780 - DNA, 25 bp, Homo sapien
tacccccaagaagtaatgacggcag

SEQ ID NO: 5034781 - DNA, 25 bp, Homo sapien
tcagaaggaacttctggatggaaaa

SEQ ID NO: 5034782 - DNA, 25 bp, Homo sapien
cctcatttccccatgctctgggttt

SEQ ID NO: 5034783 - DNA, 25 bp, Homo sapien
tctggatggaaaaggctttggtcca

SEQ ID NO: 5034784 - DNA, 25 bp, Homo sapien
tctgggtttctcagaaggaacttct

SEQ ID NO: 5034785 - DNA, 25 bp, Homo sapien
atgaatattttcgaattagtatgtg

SEQ ID NO: 5034786 - DNA, 25 bp, Homo sapien
tgtacctctggggtaacaagttcca

SEQ ID NO: 5034787 - DNA, 25 bp, Homo sapien
gtatcttcattttgtacctctgggg

SEQ ID NO: 5034788 - DNA, 25 bp, Homo sapien
gaatattttcgaattagtatgtgta

SEQ ID NO: 5034789 - DNA, 25 bp, Homo sapien
accttcttcgtgcatggatacatca

SEQ ID NO: 5034790 - DNA, 25 bp, Homo sapien
attgaaaaccttcttcgtgcatgga

SEQ ID NO: 5034791 - DNA, 25 bp, Homo sapien
aaaaccttcttcgtgcatggataca

SEQ ID NO: 5034792 - DNA, 25 bp, Homo sapien
tgaaaaccttcttcgtgcatggata

SEQ ID NO: 5034793 - DNA, 25 bp, Homo sapien
taatgccgcatatctacaactatct

SEQ ID NO: 5034794 - DNA, 25 bp, Homo sapien
ctaagccaaaagaacaaagctggag

SEQ ID NO: 5034795 - DNA, 25 bp, Homo sapien
aagagtccgcatccccaagtcaatc

SEQ ID NO: 5034796 - DNA, 25 bp, Homo sapien
ccaaaaaagagtccgcatccccaag

SEQ ID NO: 5034797 - DNA, 25 bp, Homo sapien
tagaagtgacacctcctaggaataa

SEQ ID NO: 5034798 - DNA, 25 bp, Homo sapien
tcttggctaccgaaacagtttactg

SEQ ID NO: 5034799 - DNA, 25 bp, Homo sapien
cgaggcttggctttcccgtttatat

SEQ ID NO: 5034800 - DNA, 25 bp, Homo sapien
gaataagaagtcttggctaccgaaa

SEQ ID NO: 5034801 - DNA, 25 bp, Homo sapien
tatgttcctttcaacagcagcgcta

SEQ ID NO: 5034802 - DNA, 25 bp, Homo sapien
ttttcaaggagcacaaactgtaatg

SEQ ID NO: 5034803 - DNA, 25 bp, Homo sapien
tcttggcaagattcccctgcaaata

SEQ ID NO: 5034804 - DNA, 25 bp, Homo sapien
agcagcgctattgacacaccatggg

SEQ ID NO: 5034805 - DNA, 25 bp, Homo sapien
cactccatggcagcatactctctac

SEQ ID NO: 5034806 - DNA, 25 bp, Homo sapien
tcactccatggcagcatactctcta

SEQ ID NO: 5034807 - DNA, 25 bp, Homo sapien
caggattcagaaacattggcttgaa

SEQ ID NO: 5034808 - DNA, 25 bp, Homo sapien
ttttagtgaaagtgagtggtctgcg

SEQ ID NO: 5034809 - DNA, 25 bp, Homo sapien
ttgataaggactgcgactttcttcc

SEQ ID NO: 5034810 - DNA, 25 bp, Homo sapien
tctgtcttatagagatgtagccctc

SEQ ID NO: 5034811 - DNA, 25 bp, Homo sapien
taaattgccatcaactgtaatatca

SEQ ID NO: 5034812 - DNA, 25 bp, Homo sapien
tccaattaaattgccatcaactgta

SEQ ID NO: 5034813 - DNA, 25 bp, Homo sapien
ccaaaaatgaagacttcgatctgca

SEQ ID NO: 5034814 - DNA, 25 bp, Homo sapien
gacttcgatctgcaattccaattaa

SEQ ID NO: 5034815 - DNA, 25 bp, Homo sapien
tggttccctctgttgtaatctcctg

SEQ ID NO: 5034816 - DNA, 25 bp, Homo sapien
taatctcctgtagggtgtatgccac

SEQ ID NO: 5034817 - DNA, 25 bp, Homo sapien
ttataaatggaagccaagcttgtgc

SEQ ID NO: 5034818 - DNA, 25 bp, Homo sapien
tccagggacaaaagcactagttaac

SEQ ID NO: 5034819 - DNA, 25 bp, Homo sapien
ccagatggacacttcattgagtgta

SEQ ID NO: 5034820 - DNA, 25 bp, Homo sapien
gatggacacttcattgagtgtacat

SEQ ID NO: 5034821 - DNA, 25 bp, Homo sapien
ggacacttcattgagtgtacatgtt

SEQ ID NO: 5034822 - DNA, 25 bp, Homo sapien
ttgccagatggacacttcattgagt

SEQ ID NO: 5034823 - DNA, 25 bp, Homo sapien
gagaaagcctggttaccatatcaag

SEQ ID NO: 5034824 - DNA, 25 bp, Homo sapien
cactttagggtggtaggtcacactg

SEQ ID NO: 5034825 - DNA, 25 bp, Homo sapien
tgccaatgcagttaccactttaggg

SEQ ID NO: 5034826 - DNA, 25 bp, Homo sapien
cccagtgctcccaaagatgtgtcat

SEQ ID NO: 5034827 - DNA, 25 bp, Homo sapien
tgcatatcaattggtctactgactt

SEQ ID NO: 5034828 - DNA, 25 bp, Homo sapien
gcttctaagtagtaggcaaagtctc

SEQ ID NO: 5034829 - DNA, 25 bp, Homo sapien
gggctgaacgtatagaactttaatc

SEQ ID NO: 5034830 - DNA, 25 bp, Homo sapien
cacagtcggttgaactggaagttaa

SEQ ID NO: 5034831 - DNA, 25 bp, Homo sapien
gcagccttaattgagcaagagcaca

SEQ ID NO: 5034832 - DNA, 25 bp, Homo sapien
tccacctgacataggaggaagggat

SEQ ID NO: 5034833 - DNA, 25 bp, Homo sapien
cagcagagcccgtagaaaagaacac

SEQ ID NO: 5034834 - DNA, 25 bp, Homo sapien
gcaaagcgactgagaaggacgcaga

SEQ ID NO: 5034835 - DNA, 25 bp, Homo sapien
gacttccgcgttgagcagatcacag

SEQ ID NO: 5034836 - DNA, 25 bp, Homo sapien
gataaagtatgtttacaaagatgaa

SEQ ID NO: 5034837 - DNA, 25 bp, Homo sapien
tatagccttcactccgtgaaaaagc

SEQ ID NO: 5034838 - DNA, 25 bp, Homo sapien
aaagcatttcatgttgataaagtat

SEQ ID NO: 5034839 - DNA, 25 bp, Homo sapien
actctctctctttataccttgcttc

SEQ ID NO: 5034840 - DNA, 25 bp, Homo sapien
ccactctctctctttataccttgct

SEQ ID NO: 5034841 - DNA, 25 bp, Homo sapien
tttccactctctctctttatacctt

SEQ ID NO: 5034842 - DNA, 25 bp, Homo sapien
tctctctctttataccttgcttcat

SEQ ID NO: 5034843 - DNA, 25 bp, Homo sapien
gctacaaggcaaggtcaatcgtgta

SEQ ID NO: 5034844 - DNA, 25 bp, Homo sapien
gcagctttttcttaggcaggataga

SEQ ID NO: 5034845 - DNA, 25 bp, Homo sapien
taaaactggataatggaggccttgc

SEQ ID NO: 5034846 - DNA, 25 bp, Homo sapien
tgaaaaaattgcactacctttggcc

SEQ ID NO: 5034847 - DNA, 25 bp, Homo sapien
gactgcaaacgtcaaaacatggaag

SEQ ID NO: 5034848 - DNA, 25 bp, Homo sapien
tacagcccctagaggaactaaggtg

SEQ ID NO: 5034849 - DNA, 25 bp, Homo sapien
caaaacactttcaggcggatgcaca

SEQ ID NO: 5034850 - DNA, 25 bp, Homo sapien
catgataacccacataaagcatggc

SEQ ID NO: 5034851 - DNA, 25 bp, Homo sapien
taatcgcttcgtaggtcatccacaa

SEQ ID NO: 5034852 - DNA, 25 bp, Homo sapien
tgcaattgcaaacatcttggcggga

SEQ ID NO: 5034853 - DNA, 25 bp, Homo sapien
gattttatgagacctactagctgga

SEQ ID NO: 5034854 - DNA, 25 bp, Homo sapien
tgtacagccattctcggaagtagga

SEQ ID NO: 5034855 - DNA, 25 bp, Homo sapien
gtcaaattacctccattgatatttg

SEQ ID NO: 5034856 - DNA, 25 bp, Homo sapien
gacaatattggaaaaccacttatcc

SEQ ID NO: 5034857 - DNA, 25 bp, Homo sapien
gaaaaccacttatccattctttgcc

SEQ ID NO: 5034858 - DNA, 25 bp, Homo sapien
tcaataacaaatgatggacaatatt

SEQ ID NO: 5034859 - DNA, 25 bp, Homo sapien
cacctccaaccatgggatcttcttc

SEQ ID NO: 5034860 - DNA, 25 bp, Homo sapien
aacacctccaaccatgggatcttct

SEQ ID NO: 5034861 - DNA, 25 bp, Homo sapien
cccaacacctccaaccatgggatct

SEQ ID NO: 5034862 - DNA, 25 bp, Homo sapien
caacacctccaaccatgggatcttc

SEQ ID NO: 5034863 - DNA, 25 bp, Homo sapien
tctttagtaggaggcaaggtcatct

SEQ ID NO: 5034864 - DNA, 25 bp, Homo sapien
aaagcactagacttacaggcgtcag

SEQ ID NO: 5034865 - DNA, 25 bp, Homo sapien
caaggattcggctgcaactggaaac

SEQ ID NO: 5034866 - DNA, 25 bp, Homo sapien
ttatttgaacagctacagggccgag

SEQ ID NO: 5034867 - DNA, 25 bp, Homo sapien
gaccaattgcgttacgtgttgcgag

SEQ ID NO: 5034868 - DNA, 25 bp, Homo sapien
gaccatgacaactttaatcccaggg

SEQ ID NO: 5034869 - DNA, 25 bp, Homo sapien
taggcagcgatgcaaagggcaactg

SEQ ID NO: 5034870 - DNA, 25 bp, Homo sapien
cagggtaggttagccttttcacaga

SEQ ID NO: 5034871 - DNA, 25 bp, Homo sapien
tcagatgatactcttggttaaccat

SEQ ID NO: 5034872 - DNA, 25 bp, Homo sapien
taatataatcagatgatactcttgg

SEQ ID NO: 5034873 - DNA, 25 bp, Homo sapien
tataatcagatgatactcttggtta

SEQ ID NO: 5034874 - DNA, 25 bp, Homo sapien
ctgtaatataatcagatgatactct

SEQ ID NO: 5034875 - DNA, 25 bp, Homo sapien
gcagtaggataatactctacacaga

SEQ ID NO: 5034876 - DNA, 25 bp, Homo sapien
gctgtatgcagtaggataatactct

SEQ ID NO: 5034877 - DNA, 25 bp, Homo sapien
aaggctgtatgcagtaggataatac

SEQ ID NO: 5034878 - DNA, 25 bp, Homo sapien
taatttaaggctgtatgcagtagga

SEQ ID NO: 5034879 - DNA, 25 bp, Homo sapien
cgggtacagtacaagcaactcaggt

SEQ ID NO: 5034880 - DNA, 25 bp, Homo sapien
taatatgcatttgtcagcacgtcca

SEQ ID NO: 5034881 - DNA, 25 bp, Homo sapien
tctatttacccgactcaggtgatat

SEQ ID NO: 5034882 - DNA, 25 bp, Homo sapien
tgataaagggattcgactccgggta

SEQ ID NO: 5034883 - DNA, 25 bp, Homo sapien
ggatgatactttagttacaatattt

SEQ ID NO: 5034884 - DNA, 25 bp, Homo sapien
taggggggatgatactttagttaca

SEQ ID NO: 5034885 - DNA, 25 bp, Homo sapien
acaaataggggggatgatactttag

SEQ ID NO: 5034886 - DNA, 25 bp, Homo sapien
gggggatgatactttagttacaata

SEQ ID NO: 5034887 - DNA, 25 bp, Homo sapien
ctcatacagaccctcctttcagacc

SEQ ID NO: 5034888 - DNA, 25 bp, Homo sapien
cctcctttcagacccgccctcctgt

SEQ ID NO: 5034889 - DNA, 25 bp, Homo sapien
ttcagacccgccctcctgttcacag

SEQ ID NO: 5034890 - DNA, 25 bp, Homo sapien
atacagaccctcctttcagacccgc

SEQ ID NO: 5034891 - DNA, 25 bp, Homo sapien
gctgggcgggaactgccgtgacgaa

SEQ ID NO: 5034892 - DNA, 25 bp, Homo sapien
gcgggaactgccgtgacgaattccc

SEQ ID NO: 5034893 - DNA, 25 bp, Homo sapien
cgttcatcggctgggcgctcgagac

SEQ ID NO: 5034894 - DNA, 25 bp, Homo sapien
caaggtgttgattatccatcccaac

SEQ ID NO: 5034895 - DNA, 25 bp, Homo sapien
ccacgcacgccctgcctccgggcgg

SEQ ID NO: 5034896 - DNA, 25 bp, Homo sapien
gcggtgccacgtcggaattggctct

SEQ ID NO: 5034897 - DNA, 25 bp, Homo sapien
ctctggggacgccgcagctgccgaa

SEQ ID NO: 5034898 - DNA, 25 bp, Homo sapien
agagaagcgccggcgtgcgcggtgc

SEQ ID NO: 5034899 - DNA, 25 bp, Homo sapien
ctgctgctccggaagatgcaaaatg

SEQ ID NO: 5034900 - DNA, 25 bp, Homo sapien
aaaaagcctgtggaagactcagcag

SEQ ID NO: 5034901 - DNA, 25 bp, Homo sapien
gatgaatttgagacgaccggccaaa

SEQ ID NO: 5034902 - DNA, 25 bp, Homo sapien
tcaagtctctggttcaatgggctgc

SEQ ID NO: 5034903 - DNA, 25 bp, Homo sapien
taaagtcgtcctcagcctgtctgtg

SEQ ID NO: 5034904 - DNA, 25 bp, Homo sapien
gatttccctgaactcccgcgttaca

SEQ ID NO: 5034905 - DNA, 25 bp, Homo sapien
tcttggatttccctgaactcccgcg

SEQ ID NO: 5034906 - DNA, 25 bp, Homo sapien
tgtggcgctgaagtaatttgtttta

SEQ ID NO: 5034907 - DNA, 25 bp, Homo sapien
cctccaagcgataaactccctgtgg

SEQ ID NO: 5034908 - DNA, 25 bp, Homo sapien
gaacacagtgtaattcgggacaaga

SEQ ID NO: 5034909 - DNA, 25 bp, Homo sapien
caagctaggctttcttcaaaaacgg

SEQ ID NO: 5034910 - DNA, 25 bp, Homo sapien
cagcacttcgttggaggattcaaga

SEQ ID NO: 5034911 - DNA, 25 bp, Homo sapien
gaaggcttgaataagagctcccagg

SEQ ID NO: 5034912 - DNA, 25 bp, Homo sapien
cagttgacatgcagccttgtttatg

SEQ ID NO: 5034913 - DNA, 25 bp, Homo sapien
tgagaaaccaatggaccacactgag

SEQ ID NO: 5034914 - DNA, 25 bp, Homo sapien
aattgtgcgtcagttgacatgcagc

SEQ ID NO: 5034915 - DNA, 25 bp, Homo sapien
caaaagcagataaattgtgcgtcag

SEQ ID NO: 5034916 - DNA, 25 bp, Homo sapien
ctagtccctttcctttgagacccat

SEQ ID NO: 5034917 - DNA, 25 bp, Homo sapien
gagtaaaaccatcatctagtccctt

SEQ ID NO: 5034918 - DNA, 25 bp, Homo sapien
agtaaaaccatcatctagtcccttt

SEQ ID NO: 5034919 - DNA, 25 bp, Homo sapien
tctagtccctttcctttgagaccca

SEQ ID NO: 5034920 - DNA, 25 bp, Homo sapien
tcctgtgaatgagggtagtaaccat

SEQ ID NO: 5034921 - DNA, 25 bp, Homo sapien
cagtggcattcacacggatttgctg

SEQ ID NO: 5034922 - DNA, 25 bp, Homo sapien
agtggaagtgccgataactgctcct

SEQ ID NO: 5034923 - DNA, 25 bp, Homo sapien
ttttaatccagtggcattcacacgg

SEQ ID NO: 5034924 - DNA, 25 bp, Homo sapien
tatctcctaaactcaggtcactcct

SEQ ID NO: 5034925 - DNA, 25 bp, Homo sapien
ggttctactatctcctaaactcagg

SEQ ID NO: 5034926 - DNA, 25 bp, Homo sapien
tcaggtcactcctctcaagtcttgg

SEQ ID NO: 5034927 - DNA, 25 bp, Homo sapien
catgatctaggtgggttctactatc

SEQ ID NO: 5034928 - DNA, 25 bp, Homo sapien
tagattccaatgtcactaacggttt

SEQ ID NO: 5034929 - DNA, 25 bp, Homo sapien
ctagattccaatgtcactaacggtt

SEQ ID NO: 5034930 - DNA, 25 bp, Homo sapien
agattccaatgtcactaacggtttt

SEQ ID NO: 5034931 - DNA, 25 bp, Homo sapien
gggaggaagcaaagtgaagaacaca

SEQ ID NO: 5034932 - DNA, 25 bp, Homo sapien
cacagatgggatgcctggctcaaat

SEQ ID NO: 5034933 - DNA, 25 bp, Homo sapien
cagatgggatgcctggctcaaattc

SEQ ID NO: 5034934 - DNA, 25 bp, Homo sapien
atgggatgcctggctcaaattccag

SEQ ID NO: 5034935 - DNA, 25 bp, Homo sapien
ttccacatcttcatcgatacttcac

SEQ ID NO: 5034936 - DNA, 25 bp, Homo sapien
acatcttcatcgatacttcacacct

SEQ ID NO: 5034937 - DNA, 25 bp, Homo sapien
cttcatcgatacttcacacctccct

SEQ ID NO: 5034938 - DNA, 25 bp, Homo sapien
tccacatcttcatcgatacttcaca

SEQ ID NO: 5034939 - DNA, 25 bp, Homo sapien
tattcttttgaccaatgccaatggg

SEQ ID NO: 5034940 - DNA, 25 bp, Homo sapien
tatgtcttagaccactggtgtctga

SEQ ID NO: 5034941 - DNA, 25 bp, Homo sapien
tgaccagaactctgaatatgtctta

SEQ ID NO: 5034942 - DNA, 25 bp, Homo sapien
agaatattcttttgaccaatgccaa

SEQ ID NO: 5034943 - DNA, 25 bp, Homo sapien
agaggtcctggctgagtggcagtaa

SEQ ID NO: 5034944 - DNA, 25 bp, Homo sapien
gcacaggcaaatggacagaggtcct

SEQ ID NO: 5034945 - DNA, 25 bp, Homo sapien
tggacagaggtcctggctgagtggc

SEQ ID NO: 5034946 - DNA, 25 bp, Homo sapien
ctgcacaggcaaatggacagaggtc

SEQ ID NO: 5034947 - DNA, 25 bp, Homo sapien
actgggcagatgtagggatccccgt

SEQ ID NO: 5034948 - DNA, 25 bp, Homo sapien
tgggcagatgtagggatccccgtgt

SEQ ID NO: 5034949 - DNA, 25 bp, Homo sapien
tcactgggcagatgtagggatcccc

SEQ ID NO: 5034950 - DNA, 25 bp, Homo sapien
ggcagatgtagggatccccgtgtac

SEQ ID NO: 5034951 - DNA, 25 bp, Homo sapien
tggccttgtttgtgattagtggggc

SEQ ID NO: 5034952 - DNA, 25 bp, Homo sapien
tgtttgtgattagtggggccccgag

SEQ ID NO: 5034953 - DNA, 25 bp, Homo sapien
gccttgtttgtgattagtggggccc

SEQ ID NO: 5034954 - DNA, 25 bp, Homo sapien
cttgtttgtgattagtggggccccg

SEQ ID NO: 5034955 - DNA, 25 bp, Homo sapien
tgactcgcctgcatactgctgtgct

SEQ ID NO: 5034956 - DNA, 25 bp, Homo sapien
gtttgcagagggatgactcgcctgc

SEQ ID NO: 5034957 - DNA, 25 bp, Homo sapien
taggagggcggagtgtgcggccaag

SEQ ID NO: 5034958 - DNA, 25 bp, Homo sapien
tgttttgtaggagggcggagtgtgc

SEQ ID NO: 5034959 - DNA, 25 bp, Homo sapien
cattatccactgatatcccatcata

SEQ ID NO: 5034960 - DNA, 25 bp, Homo sapien
tgctgatgacatttcagctagtgaa

SEQ ID NO: 5034961 - DNA, 25 bp, Homo sapien
tcatacccattctgtgaagactggc

SEQ ID NO: 5034962 - DNA, 25 bp, Homo sapien
tgaaaagagccacgggcagtaataa

SEQ ID NO: 5034963 - DNA, 25 bp, Homo sapien
tctgctttctgatgaaggacatgat

SEQ ID NO: 5034964 - DNA, 25 bp, Homo sapien
ctttctgatgaaggacatgatgttg

SEQ ID NO: 5034965 - DNA, 25 bp, Homo sapien
ctgatgaaggacatgatgttggtga

SEQ ID NO: 5034966 - DNA, 25 bp, Homo sapien
ttctgatgaaggacatgatgttggt

SEQ ID NO: 5034967 - DNA, 25 bp, Homo sapien
ttctgtgacccctggttgagctttc

SEQ ID NO: 5034968 - DNA, 25 bp, Homo sapien
cattctgtgacccctggttgagctt

SEQ ID NO: 5034969 - DNA, 25 bp, Homo sapien
acattctgtgacccctggttgagct

SEQ ID NO: 5034970 - DNA, 25 bp, Homo sapien
attctgtgacccctggttgagcttt

SEQ ID NO: 5034971 - DNA, 25 bp, Homo sapien
ttggagagcagacagtccctttcca

SEQ ID NO: 5034972 - DNA, 25 bp, Homo sapien
ttccagtgtttggcttgagagctat

SEQ ID NO: 5034973 - DNA, 25 bp, Homo sapien
tgttaatggaagaaaggcttggaga

SEQ ID NO: 5034974 - DNA, 25 bp, Homo sapien
ctgttaatggaagaaaggcttggag

SEQ ID NO: 5034975 - DNA, 25 bp, Homo sapien
atatatttgcccttaaaaactgtgg

SEQ ID NO: 5034976 - DNA, 25 bp, Homo sapien
tgcccttaaaaactgtggaagaggc

SEQ ID NO: 5034977 - DNA, 25 bp, Homo sapien
tatagatatatttgcccttaaaaac

SEQ ID NO: 5034978 - DNA, 25 bp, Homo sapien
catatagatatatttgcccttaaaa

SEQ ID NO: 5034979 - DNA, 25 bp, Homo sapien
ccaagatcatatcctggttttccag

SEQ ID NO: 5034980 - DNA, 25 bp, Homo sapien
tctttcccctaggtagattccaaga

SEQ ID NO: 5034981 - DNA, 25 bp, Homo sapien
tgtaaaatattgtacagatgttaaa

SEQ ID NO: 5034982 - DNA, 25 bp, Homo sapien
gaggacattgtctttcccctaggta

SEQ ID NO: 5034983 - DNA, 25 bp, Homo sapien
aacaatgtggttgaactacctattc

SEQ ID NO: 5034984 - DNA, 25 bp, Homo sapien
caatgtggttgaactacctattccc

SEQ ID NO: 5034985 - DNA, 25 bp, Homo sapien
aatgtggttgaactacctattccca

SEQ ID NO: 5034986 - DNA, 25 bp, Homo sapien
agcaacaatgtggttgaactaccta

SEQ ID NO: 5034987 - DNA, 25 bp, Homo sapien
tctctatggctgttatgcatacgca

SEQ ID NO: 5034988 - DNA, 25 bp, Homo sapien
cgcattgatcatactttttgccaac

SEQ ID NO: 5034989 - DNA, 25 bp, Homo sapien
caaacacatcaactgtacgctatct

SEQ ID NO: 5034990 - DNA, 25 bp, Homo sapien
taagtcttctcttaagttctgcaga

SEQ ID NO: 5034991 - DNA, 25 bp, Homo sapien
cagctgcttggacggcgacacgcaa

SEQ ID NO: 5034992 - DNA, 25 bp, Homo sapien
caaagctgccaggagcgtacagagg

SEQ ID NO: 5034993 - DNA, 25 bp, Homo sapien
tggagcagctcacgtgcccagctgc

SEQ ID NO: 5034994 - DNA, 25 bp, Homo sapien
cggcgacacgcaaggcagctgtgca

SEQ ID NO: 5034995 - DNA, 25 bp, Homo sapien
ctgcaaatcatcaccctcaatgctg

SEQ ID NO: 5034996 - DNA, 25 bp, Homo sapien
gtcaagctgggaaaggtctggagtc

SEQ ID NO: 5034997 - DNA, 25 bp, Homo sapien
acactgagaggtcaagctgggaaag

SEQ ID NO: 5034998 - DNA, 25 bp, Homo sapien
aaggtctggagtctgcaaatcatca

SEQ ID NO: 5034999 - DNA, 25 bp, Homo sapien
tgtatggtagacttgtcagaggcat

SEQ ID NO: 5035000 - DNA, 25 bp, Homo sapien
tttgcattggccaaatcatttacta

SEQ ID NO: 5035001 - DNA, 25 bp, Homo sapien
gccatgtaaaccaaattagttagct

SEQ ID NO: 5035002 - DNA, 25 bp, Homo sapien
actaacatttattcactgagtgaga

SEQ ID NO: 5035003 - DNA, 25 bp, Homo sapien
ctggacaacattcggcataaaatct

SEQ ID NO: 5035004 - DNA, 25 bp, Homo sapien
tcagtatctgcattataggcatagt

SEQ ID NO: 5035005 - DNA, 25 bp, Homo sapien
gtaattgtccattaactggacaaca

SEQ ID NO: 5035006 - DNA, 25 bp, Homo sapien
tttcttaaagggctcaagtcagtat

SEQ ID NO: 5035007 - DNA, 25 bp, Homo sapien
gtgtaagtaagatcaatcttcctca

SEQ ID NO: 5035008 - DNA, 25 bp, Homo sapien
tgtaagtaagatcaatcttcctcat

SEQ ID NO: 5035009 - DNA, 25 bp, Homo sapien
tgtgtaagtaagatcaatcttcctc

SEQ ID NO: 5035010 - DNA, 25 bp, Homo sapien
tacggattgtctgactttaggcaaa

SEQ ID NO: 5035011 - DNA, 25 bp, Homo sapien
tacaatcactgagactggcctaaga

SEQ ID NO: 5035012 - DNA, 25 bp, Homo sapien
taaatgaacactctatcacctggga

SEQ ID NO: 5035013 - DNA, 25 bp, Homo sapien
gcagccatggctttgaattatactt

SEQ ID NO: 5035014 - DNA, 25 bp, Homo sapien
atttgactctgatgtagaccaagtc

SEQ ID NO: 5035015 - DNA, 25 bp, Homo sapien
tctaggaaatctgatatccaactca

SEQ ID NO: 5035016 - DNA, 25 bp, Homo sapien
ggaaatctgatatccaactcacaat

SEQ ID NO: 5035017 - DNA, 25 bp, Homo sapien
tgtagaccaagtcaatggccttaaa

SEQ ID NO: 5035018 - DNA, 25 bp, Homo sapien
aacaacagctaaaagcttccttctt

SEQ ID NO: 5035019 - DNA, 25 bp, Homo sapien
aatgttgcccacaccgctcagtatg

SEQ ID NO: 5035020 - DNA, 25 bp, Homo sapien
ggcacaacatagaaattgtataaca

SEQ ID NO: 5035021 - DNA, 25 bp, Homo sapien
gcttccttcttacgttgcaatgagg

SEQ ID NO: 5035022 - DNA, 25 bp, Homo sapien
tgtccctccagatatagcaacccac

SEQ ID NO: 5035023 - DNA, 25 bp, Homo sapien
tagcaacccacccactaaatgcaga

SEQ ID NO: 5035024 - DNA, 25 bp, Homo sapien
cagatatagcaacccacccactaaa

SEQ ID NO: 5035025 - DNA, 25 bp, Homo sapien
cccactaaatgcagataacttgtcc

SEQ ID NO: 5035026 - DNA, 25 bp, Homo sapien
caggaattcaagtggagagactttc

SEQ ID NO: 5035027 - DNA, 25 bp, Homo sapien
tagggttctgccgtggctgcagttt

SEQ ID NO: 5035028 - DNA, 25 bp, Homo sapien
tgctgtagccaagtcaaatgagcca

SEQ ID NO: 5035029 - DNA, 25 bp, Homo sapien
tccttcctgtataggatgtagggaa

SEQ ID NO: 5035030 - DNA, 25 bp, Homo sapien
agcacaggctacacaggttgtaagt

SEQ ID NO: 5035031 - DNA, 25 bp, Homo sapien
tctgcaacatccctcaaatccacac

SEQ ID NO: 5035032 - DNA, 25 bp, Homo sapien
gctacacaggttgtaagttaattct

SEQ ID NO: 5035033 - DNA, 25 bp, Homo sapien
taagtgaccccttccatggttctgc

SEQ ID NO: 5035034 - DNA, 25 bp, Homo sapien
caaggccacattagagcaaaaggga

SEQ ID NO: 5035035 - DNA, 25 bp, Homo sapien
aaacttcaaggccacattagagcaa

SEQ ID NO: 5035036 - DNA, 25 bp, Homo sapien
ttcaaggccacattagagcaaaagg

SEQ ID NO: 5035037 - DNA, 25 bp, Homo sapien
gccacattagagcaaaagggagaaa

SEQ ID NO: 5035038 - DNA, 25 bp, Homo sapien
tgtcttcttcagtcctgaagctcat

SEQ ID NO: 5035039 - DNA, 25 bp, Homo sapien
cctgggtcattgcttgagtgtcttc

SEQ ID NO: 5035040 - DNA, 25 bp, Homo sapien
gagtgtcttcttcagtcctgaagct

SEQ ID NO: 5035041 - DNA, 25 bp, Homo sapien
ttgagtgtcttcttcagtcctgaag

SEQ ID NO: 5035042 - DNA, 25 bp, Homo sapien
gtgttcgataaatgcgtcttgatta

SEQ ID NO: 5035043 - DNA, 25 bp, Homo sapien
ccctgttggggctttctcgtagcag

SEQ ID NO: 5035044 - DNA, 25 bp, Homo sapien
tgttcgataaatgcgtcttgattat

SEQ ID NO: 5035045 - DNA, 25 bp, Homo sapien
cataattctttgtaaccccctgttg

SEQ ID NO: 5035046 - DNA, 25 bp, Homo sapien
ctttgtaatcatcaacaattcggac

SEQ ID NO: 5035047 - DNA, 25 bp, Homo sapien
aatcatcaacaattcggacattttc

SEQ ID NO: 5035048 - DNA, 25 bp, Homo sapien
acaattcggacattttctactgtaa

SEQ ID NO: 5035049 - DNA, 25 bp, Homo sapien
tcaacaattcggacattttctactg

SEQ ID NO: 5035050 - DNA, 25 bp, Homo sapien
tggccttccaagtaggctcctggta

SEQ ID NO: 5035051 - DNA, 25 bp, Homo sapien
ggccttccaagtaggctcctggtaa

SEQ ID NO: 5035052 - DNA, 25 bp, Homo sapien
gccttccaagtaggctcctggtaaa

SEQ ID NO: 5035053 - DNA, 25 bp, Homo sapien
gtatccagggaaactttctgtcctc

SEQ ID NO: 5035054 - DNA, 25 bp, Homo sapien
tgtatccagggaaactttctgtcct

SEQ ID NO: 5035055 - DNA, 25 bp, Homo sapien
ttgtatccagggaaactttctgtcc

SEQ ID NO: 5035056 - DNA, 25 bp, Homo sapien
cttcgtggattgcacccactgtcca

SEQ ID NO: 5035057 - DNA, 25 bp, Homo sapien
tggctcacacttcgtggattgcacc

SEQ ID NO: 5035058 - DNA, 25 bp, Homo sapien
acgtcagcaatggtggacccccctc

SEQ ID NO: 5035059 - DNA, 25 bp, Homo sapien
cacacttcgtggattgcacccactg

SEQ ID NO: 5035060 - DNA, 25 bp, Homo sapien
acatgtctgaaagaagccaatagtc

SEQ ID NO: 5035061 - DNA, 25 bp, Homo sapien
aaattacaattggactttcacaaat

SEQ ID NO: 5035062 - DNA, 25 bp, Homo sapien
cttttcttcagggatctggcttctt

SEQ ID NO: 5035063 - DNA, 25 bp, Homo sapien
gctgtcctcattcacccaaatcctt

SEQ ID NO: 5035064 - DNA, 25 bp, Homo sapien
agatttcttagcttgtctatatttg

SEQ ID NO: 5035065 - DNA, 25 bp, Homo sapien
tctatatttgtgacttgctaggaga

SEQ ID NO: 5035066 - DNA, 25 bp, Homo sapien
tatttgtgacttgctaggagatgtt

SEQ ID NO: 5035067 - DNA, 25 bp, Homo sapien
gacttgctaggagatgttttttagc

SEQ ID NO: 5035068 - DNA, 25 bp, Homo sapien
catctgaccaagtagttcacagtct

SEQ ID NO: 5035069 - DNA, 25 bp, Homo sapien
tgacagcaaacccaacatagacttt

SEQ ID NO: 5035070 - DNA, 25 bp, Homo sapien
aacttcctgtggagactccttaagg

SEQ ID NO: 5035071 - DNA, 25 bp, Homo sapien
tatgcacgaccttctctatctatga

SEQ ID NO: 5035072 - DNA, 25 bp, Homo sapien
aggttgcgatgagctaagatcacgc

SEQ ID NO: 5035073 - DNA, 25 bp, Homo sapien
ttgcgatgagctaagatcacgccat

SEQ ID NO: 5035074 - DNA, 25 bp, Homo sapien
gcgatgagctaagatcacgccattg

SEQ ID NO: 5035075 - DNA, 25 bp, Homo sapien
gcctgggcaacaagagaaactctgt

SEQ ID NO: 5035076 - DNA, 25 bp, Homo sapien
catcctcataggatataaaggctaa

SEQ ID NO: 5035077 - DNA, 25 bp, Homo sapien
cttgttgtctgtacattctgaccca

SEQ ID NO: 5035078 - DNA, 25 bp, Homo sapien
taaatagctgcatgcaagttgttgc

SEQ ID NO: 5035079 - DNA, 25 bp, Homo sapien
aagttgttgctacatcttgttgtct

SEQ ID NO: 5035080 - DNA, 25 bp, Homo sapien
ggtagtgatggtagtaggggtggag

SEQ ID NO: 5035081 - DNA, 25 bp, Homo sapien
gtagtgatggtagtaggggtggagc

SEQ ID NO: 5035082 - DNA, 25 bp, Homo sapien
cctatgttgttcttcgtacttggct

SEQ ID NO: 5035083 - DNA, 25 bp, Homo sapien
gatccctatgttgttcttcgtactt

SEQ ID NO: 5035084 - DNA, 25 bp, Homo sapien
ctctaaaactgggatctagctttat

SEQ ID NO: 5035085 - DNA, 25 bp, Homo sapien
atacctctaaaactgggatctagct

SEQ ID NO: 5035086 - DNA, 25 bp, Homo sapien
ttcctggaaataatcacaaccagaa

SEQ ID NO: 5035087 - DNA, 25 bp, Homo sapien
catcaaattttgcaacactctggga

SEQ ID NO: 5035088 - DNA, 25 bp, Homo sapien
aagcatcaaattttgcaacactctg

SEQ ID NO: 5035089 - DNA, 25 bp, Homo sapien
ctcttcctggaaataatcacaacca

SEQ ID NO: 5035090 - DNA, 25 bp, Homo sapien
gtcattagagttttcctgcttgtca

SEQ ID NO: 5035091 - DNA, 25 bp, Homo sapien
ccttcagtgagtctgcttccatggt

SEQ ID NO: 5035092 - DNA, 25 bp, Homo sapien
taagtcattagagttttcctgcttg

SEQ ID NO: 5035093 - DNA, 25 bp, Homo sapien
gcttccatggtaaatccgaaacata

SEQ ID NO: 5035094 - DNA, 25 bp, Homo sapien
gctgagtgtcggcttttaaaagctg

SEQ ID NO: 5035095 - DNA, 25 bp, Homo sapien
tctgctgagtgtcggcttttaaaag

SEQ ID NO: 5035096 - DNA, 25 bp, Homo sapien
tgagtgtcggcttttaaaagctggg

SEQ ID NO: 5035097 - DNA, 25 bp, Homo sapien
gatgaagcctactgtctgctgagtg

SEQ ID NO: 5035098 - DNA, 25 bp, Homo sapien
tatccattcaattgttgacgaatac

SEQ ID NO: 5035099 - DNA, 25 bp, Homo sapien
tcacatatggtttcaattcctttgg

SEQ ID NO: 5035100 - DNA, 25 bp, Homo sapien
caattgaacatgagagtgtgaatgt

SEQ ID NO: 5035101 - DNA, 25 bp, Homo sapien
gacgaatactttggttgtgcaccca

SEQ ID NO: 5035102 - DNA, 25 bp, Homo sapien
ggtatgaagccaaaatatcttgaga

SEQ ID NO: 5035103 - DNA, 25 bp, Homo sapien
cttcatcatagggttgttggtatga

SEQ ID NO: 5035104 - DNA, 25 bp, Homo sapien
tgtgacctaggcaacatacttaacc

SEQ ID NO: 5035105 - DNA, 25 bp, Homo sapien
cgcacccggacattccattcatttt

SEQ ID NO: 5035106 - DNA, 25 bp, Homo sapien
gactaatgtatacagatagggtgtc

SEQ ID NO: 5035107 - DNA, 25 bp, Homo sapien
tactacaaactgtaacttctgcagg

SEQ ID NO: 5035108 - DNA, 25 bp, Homo sapien
tgccacaatgcctattttaaagttt

SEQ ID NO: 5035109 - DNA, 25 bp, Homo sapien
gttcttcactggcagagactcttct

SEQ ID NO: 5035110 - DNA, 25 bp, Homo sapien
gaccataataacgaaggcccaatat

SEQ ID NO: 5035111 - DNA, 25 bp, Homo sapien
ctgtggtatcacttccctggaactc

SEQ ID NO: 5035112 - DNA, 25 bp, Homo sapien
cgaaggcccaatatccctgtggtat

SEQ ID NO: 5035113 - DNA, 25 bp, Homo sapien
aaatccaaggaccataataacgaag

SEQ ID NO: 5035114 - DNA, 25 bp, Homo sapien
tcagaggactgcaccggaatctgaa

SEQ ID NO: 5035115 - DNA, 25 bp, Homo sapien
tccctgaaactcgtatcattttaca

SEQ ID NO: 5035116 - DNA, 25 bp, Homo sapien
tgttccggctgctttgtccttgggc

SEQ ID NO: 5035117 - DNA, 25 bp, Homo sapien
tctgaaagggaagcggtgtcatgcc

SEQ ID NO: 5035118 - DNA, 25 bp, Homo sapien
ttctaacaggaggtctcttgcagag

SEQ ID NO: 5035119 - DNA, 25 bp, Homo sapien
aactgaaaagcattctgtggggacg

SEQ ID NO: 5035120 - DNA, 25 bp, Homo sapien
tgaaagcacaagttctaacaggagg

SEQ ID NO: 5035121 - DNA, 25 bp, Homo sapien
acttctatgctcttgatgaaagcac

SEQ ID NO: 5035122 - DNA, 25 bp, Homo sapien
gggcatgacctttgaaatcagccat

SEQ ID NO: 5035123 - DNA, 25 bp, Homo sapien
acaggggcatgacctttgaaatcag

SEQ ID NO: 5035124 - DNA, 25 bp, Homo sapien
ctcacaggggcatgacctttgaaat

SEQ ID NO: 5035125 - DNA, 25 bp, Homo sapien
caggggcatgacctttgaaatcagc

SEQ ID NO: 5035126 - DNA, 25 bp, Homo sapien
gcttttccaatcagaaggtgagcta

SEQ ID NO: 5035127 - DNA, 25 bp, Homo sapien
tgacaataggaccacatatactccg

SEQ ID NO: 5035128 - DNA, 25 bp, Homo sapien
gaaaatagcccagtgtgacaatagg

SEQ ID NO: 5035129 - DNA, 25 bp, Homo sapien
tatactccggatgctttaccgatcc

SEQ ID NO: 5035130 - DNA, 25 bp, Homo sapien
tgagagaccaaatataaggaagggc

SEQ ID NO: 5035131 - DNA, 25 bp, Homo sapien
ggctgtttctcgcagtgccagtggt

SEQ ID NO: 5035132 - DNA, 25 bp, Homo sapien
ggcagaaacctccactacacaggct

SEQ ID NO: 5035133 - DNA, 25 bp, Homo sapien
gcttctttgccagatagtgtatgag

SEQ ID NO: 5035134 - DNA, 25 bp, Homo sapien
aggtaaagttaggtgcagtgtttca

SEQ ID NO: 5035135 - DNA, 25 bp, Homo sapien
aaaattttaatcttcagagctgctg

SEQ ID NO: 5035136 - DNA, 25 bp, Homo sapien
aatgaggtaaagttaggtgcagtgt

SEQ ID NO: 5035137 - DNA, 25 bp, Homo sapien
ctggttttgtgcagggaatgaggta

SEQ ID NO: 5035138 - DNA, 25 bp, Homo sapien
tttccactctgggaagtgttgtaca

SEQ ID NO: 5035139 - DNA, 25 bp, Homo sapien
ttccactctgggaagtgttgtacat

SEQ ID NO: 5035140 - DNA, 25 bp, Homo sapien
ggagtttccactctgggaagtgttg

SEQ ID NO: 5035141 - DNA, 25 bp, Homo sapien
agtttccactctgggaagtgttgta

SEQ ID NO: 5035142 - DNA, 25 bp, Homo sapien
cagagctgaagaatgtagatttgga

SEQ ID NO: 5035143 - DNA, 25 bp, Homo sapien
ttcactagagggcaggtaacccaat

SEQ ID NO: 5035144 - DNA, 25 bp, Homo sapien
aggcagagctgaagaatgtagattt

SEQ ID NO: 5035145 - DNA, 25 bp, Homo sapien
aggtaacccaatgcgaccacagacc

SEQ ID NO: 5035146 - DNA, 25 bp, Homo sapien
caggatccagtgtaaccatcagaag

SEQ ID NO: 5035147 - DNA, 25 bp, Homo sapien
tcagaaggacaagaagcgaaactca

SEQ ID NO: 5035148 - DNA, 25 bp, Homo sapien
gacaccatcgtatttcactggccag

SEQ ID NO: 5035149 - DNA, 25 bp, Homo sapien
ctgtgataatgctaaaggatttctc

SEQ ID NO: 5035150 - DNA, 25 bp, Homo sapien
cacaggcaccatttctgagcagggt

SEQ ID NO: 5035151 - DNA, 25 bp, Homo sapien
gattaacagaggtaaacagcggctt

SEQ ID NO: 5035152 - DNA, 25 bp, Homo sapien
ctctcctgggagctagttgaaacat

SEQ ID NO: 5035153 - DNA, 25 bp, Homo sapien
gggtgtcactaacccactgcagtgt

SEQ ID NO: 5035154 - DNA, 25 bp, Homo sapien
acatacagctgatatactttgaaca

SEQ ID NO: 5035155 - DNA, 25 bp, Homo sapien
actgagctgttaccttaaggaaaca

SEQ ID NO: 5035156 - DNA, 25 bp, Homo sapien
gagatgcctttaatcattgactgag

SEQ ID NO: 5035157 - DNA, 25 bp, Homo sapien
ttctttgagtaaagcactgagagca

SEQ ID NO: 5035158 - DNA, 25 bp, Homo sapien
aatatactttactctcaataatatc

SEQ ID NO: 5035159 - DNA, 25 bp, Homo sapien
tactttactctcaataatatcaaca

SEQ ID NO: 5035160 - DNA, 25 bp, Homo sapien
taacaggcatctctaaccctttgtg

SEQ ID NO: 5035161 - DNA, 25 bp, Homo sapien
tttaacaggcatctctaaccctttg

SEQ ID NO: 5035162 - DNA, 25 bp, Homo sapien
tgtctcaggataatcagggagccac

SEQ ID NO: 5035163 - DNA, 25 bp, Homo sapien
tttcagtgactatatttacttcatc

SEQ ID NO: 5035164 - DNA, 25 bp, Homo sapien
catcatatgtctcaggataatcagg

SEQ ID NO: 5035165 - DNA, 25 bp, Homo sapien
tacttcatcatatgtctcaggataa

SEQ ID NO: 5035166 - DNA, 25 bp, Homo sapien
aatgccaagtattgtttgtgagaca

SEQ ID NO: 5035167 - DNA, 25 bp, Homo sapien
caggattgtggatgccacataccca

SEQ ID NO: 5035168 - DNA, 25 bp, Homo sapien
caggctgctgatgaaaatgccaagt

SEQ ID NO: 5035169 - DNA, 25 bp, Homo sapien
catctgcggctttacaagtctgttg

SEQ ID NO: 5035170 - DNA, 25 bp, Homo sapien
taacatctatccctattacaatgac

SEQ ID NO: 5035171 - DNA, 25 bp, Homo sapien
tgtcctcaacataacatctatccct

SEQ ID NO: 5035172 - DNA, 25 bp, Homo sapien
ctcaattagcttacaacagagaacc

SEQ ID NO: 5035173 - DNA, 25 bp, Homo sapien
tccctattacaatgacctcaattag

SEQ ID NO: 5035174 - DNA, 25 bp, Homo sapien
ccatgggaatgtgcttcagcattgg

SEQ ID NO: 5035175 - DNA, 25 bp, Homo sapien
cttggaatagttatgattggaaaag

SEQ ID NO: 5035176 - DNA, 25 bp, Homo sapien
aatagttatgattggaaaaggatcc

SEQ ID NO: 5035177 - DNA, 25 bp, Homo sapien
tggaatagttatgattggaaaagga

SEQ ID NO: 5035178 - DNA, 25 bp, Homo sapien
tctcacataatctggtcaaagtttt

SEQ ID NO: 5035179 - DNA, 25 bp, Homo sapien
cctatgggctctggctaggtgttgc

SEQ ID NO: 5035180 - DNA, 25 bp, Homo sapien
cagaatacattccaatcaatgccgg

SEQ ID NO: 5035181 - DNA, 25 bp, Homo sapien
taggtgctgaaactttaataaacag

SEQ ID NO: 5035182 - DNA, 25 bp, Homo sapien
actcttcccccacaaatctagatgt

SEQ ID NO: 5035183 - DNA, 25 bp, Homo sapien
tcttcccccacaaatctagatgtct

SEQ ID NO: 5035184 - DNA, 25 bp, Homo sapien
ctactcttcccccacaaatctagat

SEQ ID NO: 5035185 - DNA, 25 bp, Homo sapien
tactcttcccccacaaatctagatg

SEQ ID NO: 5035186 - DNA, 25 bp, Homo sapien
gagacttggttctcttaaggggtga

SEQ ID NO: 5035187 - DNA, 25 bp, Homo sapien
atggagacttggttctcttaagggg

SEQ ID NO: 5035188 - DNA, 25 bp, Homo sapien
cttgggcatatatggcatccaggac

SEQ ID NO: 5035189 - DNA, 25 bp, Homo sapien
tctcaatatgggtagctgctggtgc

SEQ ID NO: 5035190 - DNA, 25 bp, Homo sapien
gatgggtacaccacctgagcgatgc

SEQ ID NO: 5035191 - DNA, 25 bp, Homo sapien
tgcagggcaataatggaagaatcct

SEQ ID NO: 5035192 - DNA, 25 bp, Homo sapien
ctgaacagctgtttaaggtagggac

SEQ ID NO: 5035193 - DNA, 25 bp, Homo sapien
ggacttccaggtgggctgaacagct

SEQ ID NO: 5035194 - DNA, 25 bp, Homo sapien
ctgtttaaggtagggactgagcttg

SEQ ID NO: 5035195 - DNA, 25 bp, Homo sapien
acagctgtttaaggtagggactgag

SEQ ID NO: 5035196 - DNA, 25 bp, Homo sapien
ttctgagaaccaaattctgcattaa

SEQ ID NO: 5035197 - DNA, 25 bp, Homo sapien
tccattctgagaaccaaattctgca

SEQ ID NO: 5035198 - DNA, 25 bp, Homo sapien
ctccattctgagaaccaaattctgc

SEQ ID NO: 5035199 - DNA, 25 bp, Homo sapien
tctccattctgagaaccaaattctg

SEQ ID NO: 5035200 - DNA, 25 bp, Homo sapien
atagatcaattttgatatggataac

SEQ ID NO: 5035201 - DNA, 25 bp, Homo sapien
ggataacacacttatatgccctaac

SEQ ID NO: 5035202 - DNA, 25 bp, Homo sapien
atatggataacacacttatatgccc

SEQ ID NO: 5035203 - DNA, 25 bp, Homo sapien
acacacttatatgccctaacatcca

SEQ ID NO: 5035204 - DNA, 25 bp, Homo sapien
ccagatatattccaataattaactt

SEQ ID NO: 5035205 - DNA, 25 bp, Homo sapien
ataattaactttgccaggtgaatgt

SEQ ID NO: 5035206 - DNA, 25 bp, Homo sapien
caataattaactttgccaggtgaat

SEQ ID NO: 5035207 - DNA, 25 bp, Homo sapien
gaatgtagccagactctgaaatatc

SEQ ID NO: 5035208 - DNA, 25 bp, Homo sapien
taggccctttattacagactcaatc

SEQ ID NO: 5035209 - DNA, 25 bp, Homo sapien
aactggactcagatcttttttatgg

SEQ ID NO: 5035210 - DNA, 25 bp, Homo sapien
tatgtgggtgtttagtcctgtaaac

SEQ ID NO: 5035211 - DNA, 25 bp, Homo sapien
caatgctaggttgttcaactgagac

SEQ ID NO: 5035212 - DNA, 25 bp, Homo sapien
taaccatgttgaatacagaggactg

SEQ ID NO: 5035213 - DNA, 25 bp, Homo sapien
catgacgacaaagcagagggatgga

SEQ ID NO: 5035214 - DNA, 25 bp, Homo sapien
gcatgaagcctatgatgaactggga

SEQ ID NO: 5035215 - DNA, 25 bp, Homo sapien
ggtgcatgatatgtccaatggagcc

SEQ ID NO: 5035216 - DNA, 25 bp, Homo sapien
taaagttctgttgcattaagtataa

SEQ ID NO: 5035217 - DNA, 25 bp, Homo sapien
tactccacagatatggaatcataca

SEQ ID NO: 5035218 - DNA, 25 bp, Homo sapien
tgaaattccaatcccattaaacact

SEQ ID NO: 5035219 - DNA, 25 bp, Homo sapien
actgttctctatgagttggattact

SEQ ID NO: 5035220 - DNA, 25 bp, Homo sapien
acctgtgtaacaaacattcacatgt

SEQ ID NO: 5035221 - DNA, 25 bp, Homo sapien
caaacattcacatgtaccaccaaac

SEQ ID NO: 5035222 - DNA, 25 bp, Homo sapien
ctgtgtaacaaacattcacatgtac

SEQ ID NO: 5035223 - DNA, 25 bp, Homo sapien
aacaaacattcacatgtaccaccaa

SEQ ID NO: 5035224 - DNA, 25 bp, Homo sapien
tttcaggggttgaacaatccctaga

SEQ ID NO: 5035225 - DNA, 25 bp, Homo sapien
tagacttccgttcaataactcacca

SEQ ID NO: 5035226 - DNA, 25 bp, Homo sapien
tggtctgttttcaggggttgaacaa

SEQ ID NO: 5035227 - DNA, 25 bp, Homo sapien
gaacaatccctagacttccgttcaa

SEQ ID NO: 5035228 - DNA, 25 bp, Homo sapien
ggatatccaattcttgtcctaggtt

SEQ ID NO: 5035229 - DNA, 25 bp, Homo sapien
ggaatacatttggtgaggaaacaca

SEQ ID NO: 5035230 - DNA, 25 bp, Homo sapien
gaaatacacagttgaatcatctgct

SEQ ID NO: 5035231 - DNA, 25 bp, Homo sapien
aaaggaagctccacttgccaaagag

SEQ ID NO: 5035232 - DNA, 25 bp, Homo sapien
tcatctaaatcagattcgagtttag

SEQ ID NO: 5035233 - DNA, 25 bp, Homo sapien
tcagcaacttgaatacagtttctct

SEQ ID NO: 5035234 - DNA, 25 bp, Homo sapien
tttaggtgagactcgtgagtgtagc

SEQ ID NO: 5035235 - DNA, 25 bp, Homo sapien
tcgtgagtgtagcttcttggtttca

SEQ ID NO: 5035236 - DNA, 25 bp, Homo sapien
catggctgggagacctcaggaagcg

SEQ ID NO: 5035237 - DNA, 25 bp, Homo sapien
gctgggagacctcaggaagcgtaca

SEQ ID NO: 5035238 - DNA, 25 bp, Homo sapien
tggctgggagacctcaggaagcgta

SEQ ID NO: 5035239 - DNA, 25 bp, Homo sapien
acatggctgggagacctcaggaagc

SEQ ID NO: 5035240 - DNA, 25 bp, Homo sapien
gaaccacaataggtcttcaagtcca

SEQ ID NO: 5035241 - DNA, 25 bp, Homo sapien
agctgcccagtgattccctccatcc

SEQ ID NO: 5035242 - DNA, 25 bp, Homo sapien
tagggggtcctctcagaataccaaa

SEQ ID NO: 5035243 - DNA, 25 bp, Homo sapien
ttgtgatgaagcttagggggtcctc

SEQ ID NO: 5035244 - DNA, 25 bp, Homo sapien
ctgtagagaatgttgggaagcagca

SEQ ID NO: 5035245 - DNA, 25 bp, Homo sapien
gcagcaggtttgagagggtaagcat

SEQ ID NO: 5035246 - DNA, 25 bp, Homo sapien
tgggaagcagcaggtttgagagggt

SEQ ID NO: 5035247 - DNA, 25 bp, Homo sapien
tgtagagaatgttgggaagcagcag

SEQ ID NO: 5035248 - DNA, 25 bp, Homo sapien
atttatttcccctatgcacggcagc

SEQ ID NO: 5035249 - DNA, 25 bp, Homo sapien
gaatcactacccaaggctagctgca

SEQ ID NO: 5035250 - DNA, 25 bp, Homo sapien
ctatgcacggcagctatcagctctg

SEQ ID NO: 5035251 - DNA, 25 bp, Homo sapien
tgcacccccactatgcagacatatt

SEQ ID NO: 5035252 - DNA, 25 bp, Homo sapien
tgaaggacgttaagactggccctcc

SEQ ID NO: 5035253 - DNA, 25 bp, Homo sapien
gagtacagccagtgggagacacact

SEQ ID NO: 5035254 - DNA, 25 bp, Homo sapien
tgaattgatgacatcagtgggcccc

SEQ ID NO: 5035255 - DNA, 25 bp, Homo sapien
agtctatgtgggttggcactatccc

SEQ ID NO: 5035256 - DNA, 25 bp, Homo sapien
caggcagcgatgagatgtgcttttc

SEQ ID NO: 5035257 - DNA, 25 bp, Homo sapien
cctgggggagcctctgaaaggagtc

SEQ ID NO: 5035258 - DNA, 25 bp, Homo sapien
accaggcagcgatgagatgtgcttt

SEQ ID NO: 5035259 - DNA, 25 bp, Homo sapien
tctggttgcaaaacaacctgccctg

SEQ ID NO: 5035260 - DNA, 25 bp, Homo sapien
ttcaaccatggcctgcaggggttga

SEQ ID NO: 5035261 - DNA, 25 bp, Homo sapien
aggggttgaagtgggctgcacagca

SEQ ID NO: 5035262 - DNA, 25 bp, Homo sapien
gggctgcacagcagaccaagttgct

SEQ ID NO: 5035263 - DNA, 25 bp, Homo sapien
caaccatggcctgcaggggttgaag

SEQ ID NO: 5035264 - DNA, 25 bp, Homo sapien
tggtgaagggccttgtctagaatgc

SEQ ID NO: 5035265 - DNA, 25 bp, Homo sapien
gctctagtgatagggtatggctgcc

SEQ ID NO: 5035266 - DNA, 25 bp, Homo sapien
cccagggtatacaatgaaaaggctt

SEQ ID NO: 5035267 - DNA, 25 bp, Homo sapien
gggagaagggtatctctgcagcatg

SEQ ID NO: 5035268 - DNA, 25 bp, Homo sapien
ccacaagaagagctgtgagcacagc

SEQ ID NO: 5035269 - DNA, 25 bp, Homo sapien
tgttgtagccacaagaagagctgtg

SEQ ID NO: 5035270 - DNA, 25 bp, Homo sapien
tgtagccacaagaagagctgtgagc

SEQ ID NO: 5035271 - DNA, 25 bp, Homo sapien
gtgagcacagcctggtggcacctca

SEQ ID NO: 5035272 - DNA, 25 bp, Homo sapien
ctgaaacctttatcctcaccagcat

SEQ ID NO: 5035273 - DNA, 25 bp, Homo sapien
tggctgcgctgatctgggctgttta

SEQ ID NO: 5035274 - DNA, 25 bp, Homo sapien
gtggctgcgctgatctgggctgttt

SEQ ID NO: 5035275 - DNA, 25 bp, Homo sapien
gctgcgctgatctgggctgtttatt

SEQ ID NO: 5035276 - DNA, 25 bp, Homo sapien
gcgctgatctgggctgtttattcat

SEQ ID NO: 5035277 - DNA, 25 bp, Homo sapien
cagtgttatgggctggattgcgtcc

SEQ ID NO: 5035278 - DNA, 25 bp, Homo sapien
tgtcttgaatataatgggctcccaa

SEQ ID NO: 5035279 - DNA, 25 bp, Homo sapien
tggaccaagaaaacaccgtgtgaga

SEQ ID NO: 5035280 - DNA, 25 bp, Homo sapien
gggctcccaactactatttgatgaa

SEQ ID NO: 5035281 - DNA, 25 bp, Homo sapien
gggacattggagcacatcttcatca

SEQ ID NO: 5035282 - DNA, 25 bp, Homo sapien
tcttcatcaaggaacatagctgtcc

SEQ ID NO: 5035283 - DNA, 25 bp, Homo sapien
gccattgccagagacagctgtccag

SEQ ID NO: 5035284 - DNA, 25 bp, Homo sapien
cataggtacagcatacgagttgttc

SEQ ID NO: 5035285 - DNA, 25 bp, Homo sapien
gaatgaatctatatagtactcctct

SEQ ID NO: 5035286 - DNA, 25 bp, Homo sapien
tgaatctatatagtactcctctctg

SEQ ID NO: 5035287 - DNA, 25 bp, Homo sapien
gaatctatatagtactcctctctga

SEQ ID NO: 5035288 - DNA, 25 bp, Homo sapien
aatgaatctatatagtactcctctc

SEQ ID NO: 5035289 - DNA, 25 bp, Homo sapien
cataagactgttctgtctacattga

SEQ ID NO: 5035290 - DNA, 25 bp, Homo sapien
caccttgcactgtgttatagagtca

SEQ ID NO: 5035291 - DNA, 25 bp, Homo sapien
cagggtcttgcggataacttgctgc

SEQ ID NO: 5035292 - DNA, 25 bp, Homo sapien
ctagatgccttagcccctgacaaga

SEQ ID NO: 5035293 - DNA, 25 bp, Homo sapien
tccagatggtcagaggcctttgcac

SEQ ID NO: 5035294 - DNA, 25 bp, Homo sapien
catatgtgacttctttgccacggaa

SEQ ID NO: 5035295 - DNA, 25 bp, Homo sapien
tgccctccgtaggaaaactctagcc

SEQ ID NO: 5035296 - DNA, 25 bp, Homo sapien
acaatgaacagaggccgctgctcca

SEQ ID NO: 5035297 - DNA, 25 bp, Homo sapien
tagcatttttacacaagttacccca

SEQ ID NO: 5035298 - DNA, 25 bp, Homo sapien
tgaccctggtcacaaggcttttttc

SEQ ID NO: 5035299 - DNA, 25 bp, Homo sapien
gagcatgaatactaaagaccagacc

SEQ ID NO: 5035300 - DNA, 25 bp, Homo sapien
tgaaggtcttaaagcgggtcagtga

SEQ ID NO: 5035301 - DNA, 25 bp, Homo sapien
tctgtgcacagtttaagaggagcca

SEQ ID NO: 5035302 - DNA, 25 bp, Homo sapien
ggcttcatagatctgctgtgtgatg

SEQ ID NO: 5035303 - DNA, 25 bp, Homo sapien
ccagagtctgtgcacagtttaagag

SEQ ID NO: 5035304 - DNA, 25 bp, Homo sapien
aggagccagaatgcccaccatggct

SEQ ID NO: 5035305 - DNA, 25 bp, Homo sapien
ctgtcctgatccttcccttaggacc

SEQ ID NO: 5035306 - DNA, 25 bp, Homo sapien
ggccgggatcatgattaggctcctg

SEQ ID NO: 5035307 - DNA, 25 bp, Homo sapien
gacgtgaggcattgctcttgtggcc

SEQ ID NO: 5035308 - DNA, 25 bp, Homo sapien
tgtccattgctgaaggacgtgaggc

SEQ ID NO: 5035309 - DNA, 25 bp, Homo sapien
caacctccaaagtcaaacatctggg

SEQ ID NO: 5035310 - DNA, 25 bp, Homo sapien
gagcccagagagcaactggccttat

SEQ ID NO: 5035311 - DNA, 25 bp, Homo sapien
gggattggaaaccaggtactcacag

SEQ ID NO: 5035312 - DNA, 25 bp, Homo sapien
tgagtctacgctgctcactgctgag

SEQ ID NO: 5035313 - DNA, 25 bp, Homo sapien
cactgctgagtagcttccctgaaat

SEQ ID NO: 5035314 - DNA, 25 bp, Homo sapien
ttcccatattgacatccgcagagca

SEQ ID NO: 5035315 - DNA, 25 bp, Homo sapien
ccagccttcaaggttcaactcttta

SEQ ID NO: 5035316 - DNA, 25 bp, Homo sapien
ccgcagagcacagcttgatttctca

SEQ ID NO: 5035317 - DNA, 25 bp, Homo sapien
tgtacagctttccttggagtcccca

SEQ ID NO: 5035318 - DNA, 25 bp, Homo sapien
tccaaggtcaaagagccacatctgg

SEQ ID NO: 5035319 - DNA, 25 bp, Homo sapien
aggtcaaagagccacatctggcaaa

SEQ ID NO: 5035320 - DNA, 25 bp, Homo sapien
aaagagccacatctggcaaaggcct

SEQ ID NO: 5035321 - DNA, 25 bp, Homo sapien
tcaaagagccacatctggcaaaggc

SEQ ID NO: 5035322 - DNA, 25 bp, Homo sapien
tattaatgcgtacgttttttggcca

SEQ ID NO: 5035323 - DNA, 25 bp, Homo sapien
taatgcgtacgttttttggccaggc

SEQ ID NO: 5035324 - DNA, 25 bp, Homo sapien
caggccaaggtaacccaagtgttag

SEQ ID NO: 5035325 - DNA, 25 bp, Homo sapien
gacacagagacaggccaaggtaacc

SEQ ID NO: 5035326 - DNA, 25 bp, Homo sapien
tcatacacagccagaaatggctgtc

SEQ ID NO: 5035327 - DNA, 25 bp, Homo sapien
tgcatcctgcacacgagaactttct

SEQ ID NO: 5035328 - DNA, 25 bp, Homo sapien
tgtaacaaagtcaccaatggcctgt

SEQ ID NO: 5035329 - DNA, 25 bp, Homo sapien
tttggaatcagaagaacattcgggc

SEQ ID NO: 5035330 - DNA, 25 bp, Homo sapien
tctatgcagcttagcaaaacaaggt

SEQ ID NO: 5035331 - DNA, 25 bp, Homo sapien
cctagagtgaagataatgtggaaca

SEQ ID NO: 5035332 - DNA, 25 bp, Homo sapien
gctttggtcagtgaaatgtgatgga

SEQ ID NO: 5035333 - DNA, 25 bp, Homo sapien
agaccatcaatagctccagagggag

SEQ ID NO: 5035334 - DNA, 25 bp, Homo sapien
tgctttatcagcttgggtcctagag

SEQ ID NO: 5035335 - DNA, 25 bp, Homo sapien
tccagatacttgcatggctgactcc

SEQ ID NO: 5035336 - DNA, 25 bp, Homo sapien
ctcattccaacatcagggatcttgc

SEQ ID NO: 5035337 - DNA, 25 bp, Homo sapien
cttgcatttgctgaaccctctgact

SEQ ID NO: 5035338 - DNA, 25 bp, Homo sapien
ggatgtttgtcctccagatacttgc

SEQ ID NO: 5035339 - DNA, 25 bp, Homo sapien
tgtccgagcatgagatgtgcctccc

SEQ ID NO: 5035340 - DNA, 25 bp, Homo sapien
gatgatcgggtgttcatgtccgagc

SEQ ID NO: 5035341 - DNA, 25 bp, Homo sapien
catggagtctgggaaatgagaacgt

SEQ ID NO: 5035342 - DNA, 25 bp, Homo sapien
aaaccttgttgtgacgttggcacat

SEQ ID NO: 5035343 - DNA, 25 bp, Homo sapien
gaccagcgccgggtgtgtagctttc

SEQ ID NO: 5035344 - DNA, 25 bp, Homo sapien
aagggagagccactgggacgtgagg

SEQ ID NO: 5035345 - DNA, 25 bp, Homo sapien
tcagcatgaccagcgccgggtgtgt

SEQ ID NO: 5035346 - DNA, 25 bp, Homo sapien
ggtgtgtagctttctgtgacccatc

SEQ ID NO: 5035347 - DNA, 25 bp, Homo sapien
ttctccacgatggaatcaaaggatc

SEQ ID NO: 5035348 - DNA, 25 bp, Homo sapien
tctccacgatggaatcaaaggatct

SEQ ID NO: 5035349 - DNA, 25 bp, Homo sapien
ctccacgatggaatcaaaggatctt

SEQ ID NO: 5035350 - DNA, 25 bp, Homo sapien
tccacgatggaatcaaaggatctta

SEQ ID NO: 5035351 - DNA, 25 bp, Homo sapien
tcctcggctggtaagatggctgtcc

SEQ ID NO: 5035352 - DNA, 25 bp, Homo sapien
tgccattatagctgcccctgtgata

SEQ ID NO: 5035353 - DNA, 25 bp, Homo sapien
gtctatccccggactgctgcaggga

SEQ ID NO: 5035354 - DNA, 25 bp, Homo sapien
tctacaatgggtgtgactgcctatg

SEQ ID NO: 5035355 - DNA, 25 bp, Homo sapien
ccaacctccgctttcgttcttatgt

SEQ ID NO: 5035356 - DNA, 25 bp, Homo sapien
gctttcgttcttatgtcttctctct

SEQ ID NO: 5035357 - DNA, 25 bp, Homo sapien
cctccgctttcgttcttatgtcttc

SEQ ID NO: 5035358 - DNA, 25 bp, Homo sapien
tccgctttcgttcttatgtcttctc

SEQ ID NO: 5035359 - DNA, 25 bp, Homo sapien
gaattcttccttgtatagtaattgg

SEQ ID NO: 5035360 - DNA, 25 bp, Homo sapien
tggctgaattccctgagtcagctga

SEQ ID NO: 5035361 - DNA, 25 bp, Homo sapien
cagctggattctcttgtggctgaat

SEQ ID NO: 5035362 - DNA, 25 bp, Homo sapien
aggcaagaaattccactaatgatgc

SEQ ID NO: 5035363 - DNA, 25 bp, Homo sapien
ccatccccttttattggagatttct

SEQ ID NO: 5035364 - DNA, 25 bp, Homo sapien
cccttttattggagatttctgcctc

SEQ ID NO: 5035365 - DNA, 25 bp, Homo sapien
tccccttttattggagatttctgcc

SEQ ID NO: 5035366 - DNA, 25 bp, Homo sapien
tatcccatccccttttattggagat

SEQ ID NO: 5035367 - DNA, 25 bp, Homo sapien
aatcagtcttgggagctggcacggc

SEQ ID NO: 5035368 - DNA, 25 bp, Homo sapien
caagcagcttcatgggaacgctctc

SEQ ID NO: 5035369 - DNA, 25 bp, Homo sapien
aacgagagtgggtgtttgctgacaa

SEQ ID NO: 5035370 - DNA, 25 bp, Homo sapien
tcacaggttgggagtgtagccctga

SEQ ID NO: 5035371 - DNA, 25 bp, Homo sapien
actccataaggtagtttggctcctg

SEQ ID NO: 5035372 - DNA, 25 bp, Homo sapien
gggcgccctctgaaatctcgtcagg

SEQ ID NO: 5035373 - DNA, 25 bp, Homo sapien
gacaccctgtgaattcctgccacta

SEQ ID NO: 5035374 - DNA, 25 bp, Homo sapien
caattcctgcacaagaagtttcagc

SEQ ID NO: 5035375 - DNA, 25 bp, Homo sapien
cagattttcacgtggttctcgccaa

SEQ ID NO: 5035376 - DNA, 25 bp, Homo sapien
caggatatgcataaggaaaggagga

SEQ ID NO: 5035377 - DNA, 25 bp, Homo sapien
catcatttctagtacctctgtctac

SEQ ID NO: 5035378 - DNA, 25 bp, Homo sapien
ttctctcctacaatagcattagagg

SEQ ID NO: 5035379 - DNA, 25 bp, Homo sapien
gcattagaggaactttcatcatttc

SEQ ID NO: 5035380 - DNA, 25 bp, Homo sapien
tctctgcccattactgggtttgtca

SEQ ID NO: 5035381 - DNA, 25 bp, Homo sapien
tttctgcatcggcacacacagacct

SEQ ID NO: 5035382 - DNA, 25 bp, Homo sapien
ctgcccattactgggtttgtcatgc

SEQ ID NO: 5035383 - DNA, 25 bp, Homo sapien
ccattactgggtttgtcatgcaacc

SEQ ID NO: 5035384 - DNA, 25 bp, Homo sapien
tatccccacttgaaacaggctcctt

SEQ ID NO: 5035385 - DNA, 25 bp, Homo sapien
tttccctagaatgactgctccatgc

SEQ ID NO: 5035386 - DNA, 25 bp, Homo sapien
gacaccatgattgaatctcccaccg

SEQ ID NO: 5035387 - DNA, 25 bp, Homo sapien
tgaaagccaagcgaaaggaacttcc

SEQ ID NO: 5035388 - DNA, 25 bp, Homo sapien
gaagtttcctctttcgagtgagtcc

SEQ ID NO: 5035389 - DNA, 25 bp, Homo sapien
gccccatgactaagcgctggtcctg

SEQ ID NO: 5035390 - DNA, 25 bp, Homo sapien
aaacaggaggtactgccacagcaaa

SEQ ID NO: 5035391 - DNA, 25 bp, Homo sapien
gggcacacgtcccaaggcaacatga

SEQ ID NO: 5035392 - DNA, 25 bp, Homo sapien
gcacaagaacatcgtcaggcttcat

SEQ ID NO: 5035393 - DNA, 25 bp, Homo sapien
tgatgacggtgtgccgagttctgcc

SEQ ID NO: 5035394 - DNA, 25 bp, Homo sapien
aggcacctatgggacagtgttcaag

SEQ ID NO: 5035395 - DNA, 25 bp, Homo sapien
tgttcaaggccaaaaactgggagac

SEQ ID NO: 5035396 - DNA, 25 bp, Homo sapien
gcctcggattctgtcacagccgcaa

SEQ ID NO: 5035397 - DNA, 25 bp, Homo sapien
tcttccagctgctaaaaggcctcgg

SEQ ID NO: 5035398 - DNA, 25 bp, Homo sapien
ttttgacagttgcaatggtgatctc

SEQ ID NO: 5035399 - DNA, 25 bp, Homo sapien
caatgtgctacgcagggacctgaag

SEQ ID NO: 5035400 - DNA, 25 bp, Homo sapien
ctgactttggcctgtctcgagcctt

SEQ ID NO: 5035401 - DNA, 25 bp, Homo sapien
gtctcgagcctttgggatccccatc

SEQ ID NO: 5035402 - DNA, 25 bp, Homo sapien
gactttggcctgtctcgagcctttg

SEQ ID NO: 5035403 - DNA, 25 bp, Homo sapien
tggcctgtctcgagcctttgggatc

SEQ ID NO: 5035404 - DNA, 25 bp, Homo sapien
acgtccattgacttgtggtcagctg

SEQ ID NO: 5035405 - DNA, 25 bp, Homo sapien
gggccaagctgtactccacgtccat

SEQ ID NO: 5035406 - DNA, 25 bp, Homo sapien
aagctgtactccacgtccattgact

SEQ ID NO: 5035407 - DNA, 25 bp, Homo sapien
tgtactccacgtccattgacttgtg

SEQ ID NO: 5035408 - DNA, 25 bp, Homo sapien
gccaatgctggatggcctctttttc

SEQ ID NO: 5035409 - DNA, 25 bp, Homo sapien
tccaggcaatgacgtcgatgaccag

SEQ ID NO: 5035410 - DNA, 25 bp, Homo sapien
gctggccaatgctggatggcctctt

SEQ ID NO: 5035411 - DNA, 25 bp, Homo sapien
cgatgaccagttgaagaggatcttc

SEQ ID NO: 5035412 - DNA, 25 bp, Homo sapien
ggtgaacatcgtgcccaaactcagt

SEQ ID NO: 5035413 - DNA, 25 bp, Homo sapien
cggccacaacatccctggtgaacat

SEQ ID NO: 5035414 - DNA, 25 bp, Homo sapien
taagctgtacccattgtacccggcc

SEQ ID NO: 5035415 - DNA, 25 bp, Homo sapien
tgccagactataagctgtacccatt

SEQ ID NO: 5035416 - DNA, 25 bp, Homo sapien
gaagactaccacacctcctaaagct

SEQ ID NO: 5035417 - DNA, 25 bp, Homo sapien
caatgagttgtaagtgaaagtggca

SEQ ID NO: 5035418 - DNA, 25 bp, Homo sapien
ttcaaaagatctgacacaaggttgt

SEQ ID NO: 5035419 - DNA, 25 bp, Homo sapien
tcattgcatccaaagcaatcacagg

SEQ ID NO: 5035420 - DNA, 25 bp, Homo sapien
gtcagaaattagagccctagggcag

SEQ ID NO: 5035421 - DNA, 25 bp, Homo sapien
gagccctagggcagaacttacaaaa

SEQ ID NO: 5035422 - DNA, 25 bp, Homo sapien
tgcaaaggatttctggggagtcaag

SEQ ID NO: 5035423 - DNA, 25 bp, Homo sapien
aaaaggtcacccagcgcatccgcca

SEQ ID NO: 5035424 - DNA, 25 bp, Homo sapien
gagttcgttctaattccccagagca

SEQ ID NO: 5035425 - DNA, 25 bp, Homo sapien
gcgcccacagccgagttgcaaacgg

SEQ ID NO: 5035426 - DNA, 25 bp, Homo sapien
caaacggccgctagagttcgttcta

SEQ ID NO: 5035427 - DNA, 25 bp, Homo sapien
agtccgggtcctcgccattggcctc

SEQ ID NO: 5035428 - DNA, 25 bp, Homo sapien
tacaagttcatggttccgagccggc

SEQ ID NO: 5035429 - DNA, 25 bp, Homo sapien
tctttagccgagcactgtggcagga

SEQ ID NO: 5035430 - DNA, 25 bp, Homo sapien
ccgaagtgtacccagatcccgaatt

SEQ ID NO: 5035431 - DNA, 25 bp, Homo sapien
ttgccgcctgagatcccgaagtgta

SEQ ID NO: 5035432 - DNA, 25 bp, Homo sapien
gaattccagcgaactcgggctctac

SEQ ID NO: 5035433 - DNA, 25 bp, Homo sapien
ttggagtcccagttgcgaaagcgac

SEQ ID NO: 5035434 - DNA, 25 bp, Homo sapien
tagcttccgagggacttctctgcga

SEQ ID NO: 5035435 - DNA, 25 bp, Homo sapien
gctctaccagagtttaagtcggccc

SEQ ID NO: 5035436 - DNA, 25 bp, Homo sapien
tctcattatcattccgggagtaaaa

SEQ ID NO: 5035437 - DNA, 25 bp, Homo sapien
ggtaccgccagagccgggcctgcaa

SEQ ID NO: 5035438 - DNA, 25 bp, Homo sapien
gtaaaatgtgtctcgctcaacatag

SEQ ID NO: 5035439 - DNA, 25 bp, Homo sapien
gtggtcaagatcaacagtttgttga

SEQ ID NO: 5035440 - DNA, 25 bp, Homo sapien
tactgggctcagacttttaagttaa

SEQ ID NO: 5035441 - DNA, 25 bp, Homo sapien
taaccagcgcctttagggctagcct

SEQ ID NO: 5035442 - DNA, 25 bp, Homo sapien
atattcaatgatctcgctcgcgcct

SEQ ID NO: 5035443 - DNA, 25 bp, Homo sapien
gcagaaattccaccgagtccgttac

SEQ ID NO: 5035444 - DNA, 25 bp, Homo sapien
tcactttgtaactttctgcggaacc

SEQ ID NO: 5035445 - DNA, 25 bp, Homo sapien
tgctgacgttacagatcatgtgggt

SEQ ID NO: 5035446 - DNA, 25 bp, Homo sapien
ctcgggtggtggtatcgtatgcaaa

SEQ ID NO: 5035447 - DNA, 25 bp, Homo sapien
tcatgtgggttttggcgtagattcc

SEQ ID NO: 5035448 - DNA, 25 bp, Homo sapien
aggtaagaaacttcgcctcggcgcg

SEQ ID NO: 5035449 - DNA, 25 bp, Homo sapien
tcgacagggcgttacgtagacccga

SEQ ID NO: 5035450 - DNA, 25 bp, Homo sapien
aaaatatggcgtccgctttcgacag

SEQ ID NO: 5035451 - DNA, 25 bp, Homo sapien
cgcggctcccgaaaatgtgttgtta

SEQ ID NO: 5035452 - DNA, 25 bp, Homo sapien
aggacttgtatcctcggctttgcaa

SEQ ID NO: 5035453 - DNA, 25 bp, Homo sapien
ggagtagccaaattgagttagctct

SEQ ID NO: 5035454 - DNA, 25 bp, Homo sapien
gaagagggttatgaatgagagttcc

SEQ ID NO: 5035455 - DNA, 25 bp, Homo sapien
ccttgtcctggttggatgcctgcaa

SEQ ID NO: 5035456 - DNA, 25 bp, Homo sapien
agaaggagcctgctattgaggcaga

SEQ ID NO: 5035457 - DNA, 25 bp, Homo sapien
tcctcctcggatctggagagaagga

SEQ ID NO: 5035458 - DNA, 25 bp, Homo sapien
gaaggaatccccgtgggctgaaagc

SEQ ID NO: 5035459 - DNA, 25 bp, Homo sapien
gaatcataacacgtctgcctatggc

SEQ ID NO: 5035460 - DNA, 25 bp, Homo sapien
tgaaagctgcaaagttggagccgga

SEQ ID NO: 5035461 - DNA, 25 bp, Homo sapien
gttcccgctgttcttaaaatatgag

SEQ ID NO: 5035462 - DNA, 25 bp, Homo sapien
tgagactgggctgaattgctctaag

SEQ ID NO: 5035463 - DNA, 25 bp, Homo sapien
ggctgaattgctctaaggacaaagc

SEQ ID NO: 5035464 - DNA, 25 bp, Homo sapien
cttaaaatatgagactgggctgaat

SEQ ID NO: 5035465 - DNA, 25 bp, Homo sapien
tgggcacatttaacccctcctgccc

SEQ ID NO: 5035466 - DNA, 25 bp, Homo sapien
tcaagcctgggcacatttaacccct

SEQ ID NO: 5035467 - DNA, 25 bp, Homo sapien
cctgggcacatttaacccctcctgc

SEQ ID NO: 5035468 - DNA, 25 bp, Homo sapien
agcctgggcacatttaacccctcct

SEQ ID NO: 5035469 - DNA, 25 bp, Homo sapien
taacagcaaggatgggtgtgcattc

SEQ ID NO: 5035470 - DNA, 25 bp, Homo sapien
tggctgagccacaatccagcacgga

SEQ ID NO: 5035471 - DNA, 25 bp, Homo sapien
cacaccgtagcccatgtcatttgca

SEQ ID NO: 5035472 - DNA, 25 bp, Homo sapien
catggattagaacctgtggctgagc

SEQ ID NO: 5035473 - DNA, 25 bp, Homo sapien
cctgggcacgggcaggtcacttaga

SEQ ID NO: 5035474 - DNA, 25 bp, Homo sapien
caagtagctgattgggagccctgcc

SEQ ID NO: 5035475 - DNA, 25 bp, Homo sapien
ggtgactgcccactttagttcccca

SEQ ID NO: 5035476 - DNA, 25 bp, Homo sapien
agacacaggatctcgggtgactgcc

SEQ ID NO: 5035477 - DNA, 25 bp, Homo sapien
ttgtgggggtgaacacagagatggc

SEQ ID NO: 5035478 - DNA, 25 bp, Homo sapien
cacagagatggccataccgctgccc

SEQ ID NO: 5035479 - DNA, 25 bp, Homo sapien
aacacagagatggccataccgctgc

SEQ ID NO: 5035480 - DNA, 25 bp, Homo sapien
cagagatggccataccgctgcccct

SEQ ID NO: 5035481 - DNA, 25 bp, Homo sapien
taagtccctataggttgagggacag

SEQ ID NO: 5035482 - DNA, 25 bp, Homo sapien
ctctaagtccctataggttgaggga

SEQ ID NO: 5035483 - DNA, 25 bp, Homo sapien
tgtgaggatacctctaagtccctat

SEQ ID NO: 5035484 - DNA, 25 bp, Homo sapien
cctgtgaggatacctctaagtccct

SEQ ID NO: 5035485 - DNA, 25 bp, Homo sapien
ttacacagtaaaaggcaaggctggg

SEQ ID NO: 5035486 - DNA, 25 bp, Homo sapien
ggtctgagtgacatctgatcccata

SEQ ID NO: 5035487 - DNA, 25 bp, Homo sapien
gattctgtgttaaggccaggcgcga

SEQ ID NO: 5035488 - DNA, 25 bp, Homo sapien
gatcccatatacttgccctgtcaca

SEQ ID NO: 5035489 - DNA, 25 bp, Homo sapien
tgatcaggagggaccctacagtgct

SEQ ID NO: 5035490 - DNA, 25 bp, Homo sapien
gccagaccggtctagctgattctaa

SEQ ID NO: 5035491 - DNA, 25 bp, Homo sapien
tgcaggaaatattcgagcccctact

SEQ ID NO: 5035492 - DNA, 25 bp, Homo sapien
tgctacgcctatgcattcgaggaat

SEQ ID NO: 5035493 - DNA, 25 bp, Homo sapien
aggagcgagcatgacagaatgtttc

SEQ ID NO: 5035494 - DNA, 25 bp, Homo sapien
aaggagcgagcatgacagaatgttt

SEQ ID NO: 5035495 - DNA, 25 bp, Homo sapien
ggagcgagcatgacagaatgtttca

SEQ ID NO: 5035496 - DNA, 25 bp, Homo sapien
cagaactgtcatgacgtttccgtgg

SEQ ID NO: 5035497 - DNA, 25 bp, Homo sapien
tttccgtggaaagcccgcatggtgt

SEQ ID NO: 5035498 - DNA, 25 bp, Homo sapien
tctggaccttgtatgtaaggacttg

SEQ ID NO: 5035499 - DNA, 25 bp, Homo sapien
ctagctcccttgtatagcctgttga

SEQ ID NO: 5035500 - DNA, 25 bp, Homo sapien
gccattggaactcaagtgaggtgta

SEQ ID NO: 5035501 - DNA, 25 bp, Homo sapien
tgtgccaattatggccaggcattgt

SEQ ID NO: 5035502 - DNA, 25 bp, Homo sapien
acatggctgacatttaccttgtgcc

SEQ ID NO: 5035503 - DNA, 25 bp, Homo sapien
gttctaagcatggtaacccacatca

SEQ ID NO: 5035504 - DNA, 25 bp, Homo sapien
ttctcaataatgaatctgtcttatg

SEQ ID NO: 5035505 - DNA, 25 bp, Homo sapien
tacaaatattagctcagtcattttc

SEQ ID NO: 5035506 - DNA, 25 bp, Homo sapien
ccatctttatactgatacagttgta

SEQ ID NO: 5035507 - DNA, 25 bp, Homo sapien
ctacaaaacgaaagtgcctagggct

SEQ ID NO: 5035508 - DNA, 25 bp, Homo sapien
gacctttgcccactcaggatcagtt

SEQ ID NO: 5035509 - DNA, 25 bp, Homo sapien
tcaggatcagttgccgtatgaggca

SEQ ID NO: 5035510 - DNA, 25 bp, Homo sapien
cagacctttgcccactcaggatcag

SEQ ID NO: 5035511 - DNA, 25 bp, Homo sapien
cctttgcccactcaggatcagttgc

SEQ ID NO: 5035512 - DNA, 25 bp, Homo sapien
agatgttatgctctctgtattgccc

SEQ ID NO: 5035513 - DNA, 25 bp, Homo sapien
ctacctcctcagcatgggaaaaggg

SEQ ID NO: 5035514 - DNA, 25 bp, Homo sapien
gaggctgcaaccagatgttatgctc

SEQ ID NO: 5035515 - DNA, 25 bp, Homo sapien
actacctcctcagcatgggaaaagg

SEQ ID NO: 5035516 - DNA, 25 bp, Homo sapien
tcgtgtctgcaaggcgaatatgacc

SEQ ID NO: 5035517 - DNA, 25 bp, Homo sapien
ccctcgtgtctgcaaggcgaatatg

SEQ ID NO: 5035518 - DNA, 25 bp, Homo sapien
gtctgcaaggcgaatatgaccatgt

SEQ ID NO: 5035519 - DNA, 25 bp, Homo sapien
tgtctgcaaggcgaatatgaccatg

SEQ ID NO: 5035520 - DNA, 25 bp, Homo sapien
ggttggcgagactgccatggacctc

SEQ ID NO: 5035521 - DNA, 25 bp, Homo sapien
ggacctcagtcacatcacgatggaa

SEQ ID NO: 5035522 - DNA, 25 bp, Homo sapien
tgccatggacctcagtcacatcacg

SEQ ID NO: 5035523 - DNA, 25 bp, Homo sapien
gagactgccatggacctcagtcaca

SEQ ID NO: 5035524 - DNA, 25 bp, Homo sapien
acattgtgctcacccagcagagggt

SEQ ID NO: 5035525 - DNA, 25 bp, Homo sapien
gggcaatgttctcgcgaattctaga

SEQ ID NO: 5035526 - DNA, 25 bp, Homo sapien
cacagccgttcacatctgggtagca

SEQ ID NO: 5035527 - DNA, 25 bp, Homo sapien
ctgcatggacgggaactagagttct

SEQ ID NO: 5035528 - DNA, 25 bp, Homo sapien
tcgtctaaccatgggttaaatgtac

SEQ ID NO: 5035529 - DNA, 25 bp, Homo sapien
taaccatgggttaaatgtactctcc

SEQ ID NO: 5035530 - DNA, 25 bp, Homo sapien
aaaggccatctcgtctaaccatggg

SEQ ID NO: 5035531 - DNA, 25 bp, Homo sapien
gcctgcaaaggccatctcgtctaac

SEQ ID NO: 5035532 - DNA, 25 bp, Homo sapien
atcagcgtgaatccagggcagctgg

SEQ ID NO: 5035533 - DNA, 25 bp, Homo sapien
gaatcagcgtgaatccagggcagct

SEQ ID NO: 5035534 - DNA, 25 bp, Homo sapien
tgcagaatcagcgtgaatccagggc

SEQ ID NO: 5035535 - DNA, 25 bp, Homo sapien
ggagagtatgtgcagtgcttttcca

SEQ ID NO: 5035536 - DNA, 25 bp, Homo sapien
actttctactccgactgtctccatg

SEQ ID NO: 5035537 - DNA, 25 bp, Homo sapien
gttctcagaagcagtcctgcaagat

SEQ ID NO: 5035538 - DNA, 25 bp, Homo sapien
ccaggtcttgggactctgaagatcc

SEQ ID NO: 5035539 - DNA, 25 bp, Homo sapien
ctcagaagcagtcctgcaagatgct

SEQ ID NO: 5035540 - DNA, 25 bp, Homo sapien
gctctgctcagaaaagaagcccatt

SEQ ID NO: 5035541 - DNA, 25 bp, Homo sapien
gacttgggctctgctcagaaaagaa

SEQ ID NO: 5035542 - DNA, 25 bp, Homo sapien
ctcagaaaagaagcccattattccc

SEQ ID NO: 5035543 - DNA, 25 bp, Homo sapien
gcaggacttgggctctgctcagaaa

SEQ ID NO: 5035544 - DNA, 25 bp, Homo sapien
cttcactagagggaaaatgggccat

SEQ ID NO: 5035545 - DNA, 25 bp, Homo sapien
aagggagtacaaagaaacacttgag

SEQ ID NO: 5035546 - DNA, 25 bp, Homo sapien
agggagtacaaagaaacacttgagc

SEQ ID NO: 5035547 - DNA, 25 bp, Homo sapien
ccagagagctcctcatgctctgtgt

SEQ ID NO: 5035548 - DNA, 25 bp, Homo sapien
accagagagctcctcatgctctgtg

SEQ ID NO: 5035549 - DNA, 25 bp, Homo sapien
cagagagctcctcatgctctgtgta

SEQ ID NO: 5035550 - DNA, 25 bp, Homo sapien
catgagttcatctaaacccttcttc

SEQ ID NO: 5035551 - DNA, 25 bp, Homo sapien
tttccaccctcggtgtgaagtggca

SEQ ID NO: 5035552 - DNA, 25 bp, Homo sapien
ttagctggtacagcctctcgggccc

SEQ ID NO: 5035553 - DNA, 25 bp, Homo sapien
tgcccggctcgtatcctcagatgac

SEQ ID NO: 5035554 - DNA, 25 bp, Homo sapien
gcattacgtactgctgccaggtgga

SEQ ID NO: 5035555 - DNA, 25 bp, Homo sapien
gccaggtggagcgttgctggttcct

SEQ ID NO: 5035556 - DNA, 25 bp, Homo sapien
gcagcagcattacgtactgctgcca

SEQ ID NO: 5035557 - DNA, 25 bp, Homo sapien
tttagcagcagcattacgtactgct

SEQ ID NO: 5035558 - DNA, 25 bp, Homo sapien
catttgggtggaaacggtgaactgc

SEQ ID NO: 5035559 - DNA, 25 bp, Homo sapien
tatagcattctgagccatttgggtg

SEQ ID NO: 5035560 - DNA, 25 bp, Homo sapien
gaaagaactgttggcaccggatcgc

SEQ ID NO: 5035561 - DNA, 25 bp, Homo sapien
cactttagtgggtttctgcctcggt

SEQ ID NO: 5035562 - DNA, 25 bp, Homo sapien
cgtccttctctggcggagagcaggt

SEQ ID NO: 5035563 - DNA, 25 bp, Homo sapien
ttgactaaatgctttctgtgaactg

SEQ ID NO: 5035564 - DNA, 25 bp, Homo sapien
actgagtgagctagaatgctgccgc

SEQ ID NO: 5035565 - DNA, 25 bp, Homo sapien
gttccccaaacatgcgtccttctct

SEQ ID NO: 5035566 - DNA, 25 bp, Homo sapien
tgtgaaattcttccgtcctctgtgt

SEQ ID NO: 5035567 - DNA, 25 bp, Homo sapien
gaaattcttccgtcctctgtgtgag

SEQ ID NO: 5035568 - DNA, 25 bp, Homo sapien
gtccttgtgaaattcttccgtcctc

SEQ ID NO: 5035569 - DNA, 25 bp, Homo sapien
acaggaagcctcctgccagggctgg

SEQ ID NO: 5035570 - DNA, 25 bp, Homo sapien
tgcctgtcaccttccagtcctccac

SEQ ID NO: 5035571 - DNA, 25 bp, Homo sapien
aaatctctgcacttctcccgtcaag

SEQ ID NO: 5035572 - DNA, 25 bp, Homo sapien
tgagcccactgtccaggaccactct

SEQ ID NO: 5035573 - DNA, 25 bp, Homo sapien
caacaggtttctccaattgggagca

SEQ ID NO: 5035574 - DNA, 25 bp, Homo sapien
ttcctggaacgcctgagagtacctc

SEQ ID NO: 5035575 - DNA, 25 bp, Homo sapien
catgccctttattccaaagctggcg

SEQ ID NO: 5035576 - DNA, 25 bp, Homo sapien
tggtgttgaccagtctccgccctct

SEQ ID NO: 5035577 - DNA, 25 bp, Homo sapien
tttattccaaagctggcgccagggc

SEQ ID NO: 5035578 - DNA, 25 bp, Homo sapien
ctgaggaaccaggagtgtgacttcc

SEQ ID NO: 5035579 - DNA, 25 bp, Homo sapien
agaaacagttgaggggagacaggca

SEQ ID NO: 5035580 - DNA, 25 bp, Homo sapien
gaggaaccaggagtgtgacttccct

SEQ ID NO: 5035581 - DNA, 25 bp, Homo sapien
tgaggaaccaggagtgtgacttccc

SEQ ID NO: 5035582 - DNA, 25 bp, Homo sapien
gcaatttctagttggctggcagcgg

SEQ ID NO: 5035583 - DNA, 25 bp, Homo sapien
aatggacaatcgctgtttcttcaga

SEQ ID NO: 5035584 - DNA, 25 bp, Homo sapien
ggaggatgttttgcctggattccca

SEQ ID NO: 5035585 - DNA, 25 bp, Homo sapien
ttctgaggccggcagcgtgccctgc

SEQ ID NO: 5035586 - DNA, 25 bp, Homo sapien
aagaggaggctgtttcggaatccag

SEQ ID NO: 5035587 - DNA, 25 bp, Homo sapien
agagattttcagcatgggtatcatg

SEQ ID NO: 5035588 - DNA, 25 bp, Homo sapien
tcagcatgggtatcatggaaagagg

SEQ ID NO: 5035589 - DNA, 25 bp, Homo sapien
tttcggaatccagactctacgcagt

SEQ ID NO: 5035590 - DNA, 25 bp, Homo sapien
tcactaggtgagttataaagactca

SEQ ID NO: 5035591 - DNA, 25 bp, Homo sapien
agactcatcatcatgatactctcca

SEQ ID NO: 5035592 - DNA, 25 bp, Homo sapien
gtgccatcactaggtgagttataaa

SEQ ID NO: 5035593 - DNA, 25 bp, Homo sapien
tataaagactcatcatcatgatact

SEQ ID NO: 5035594 - DNA, 25 bp, Homo sapien
tgaggtgaggtgctttaggccacac

SEQ ID NO: 5035595 - DNA, 25 bp, Homo sapien
cacagtgttatgatgcccattgtac

SEQ ID NO: 5035596 - DNA, 25 bp, Homo sapien
cagtgttatgatgcccattgtacag

SEQ ID NO: 5035597 - DNA, 25 bp, Homo sapien
ggtgctttaggccacacagccccag

SEQ ID NO: 5035598 - DNA, 25 bp, Homo sapien
cacccattcttcatggacgaggaca

SEQ ID NO: 5035599 - DNA, 25 bp, Homo sapien
gctggcaatttccacccattcttca

SEQ ID NO: 5035600 - DNA, 25 bp, Homo sapien
atggacgaggacaaacaccgccttc

SEQ ID NO: 5035601 - DNA, 25 bp, Homo sapien
tcttcatggacgaggacaaacaccg

SEQ ID NO: 5035602 - DNA, 25 bp, Homo sapien
aaacctggcccactgagcgtgagaa

SEQ ID NO: 5035603 - DNA, 25 bp, Homo sapien
attgcgcttgggagggtctgaataa

SEQ ID NO: 5035604 - DNA, 25 bp, Homo sapien
tgaataatgagcacacgggttcctt

SEQ ID NO: 5035605 - DNA, 25 bp, Homo sapien
tatcacatactccagtggccaaaac

SEQ ID NO: 5035606 - DNA, 25 bp, Homo sapien
aactggtgctaacggaggagccaca

SEQ ID NO: 5035607 - DNA, 25 bp, Homo sapien
caactggtgctaacggaggagccac

SEQ ID NO: 5035608 - DNA, 25 bp, Homo sapien
acctgtgcttagcaggtctgaccac

SEQ ID NO: 5035609 - DNA, 25 bp, Homo sapien
gaggagccacaggacctgtgcttag

SEQ ID NO: 5035610 - DNA, 25 bp, Homo sapien
tgacacgattgagccttttagcggg

SEQ ID NO: 5035611 - DNA, 25 bp, Homo sapien
caggaagggtgatctaatgccaaac

SEQ ID NO: 5035612 - DNA, 25 bp, Homo sapien
tggaatagctccaagggtcctgaca

SEQ ID NO: 5035613 - DNA, 25 bp, Homo sapien
catacggtgattcggctattccaca

SEQ ID NO: 5035614 - DNA, 25 bp, Homo sapien
agcagcatcagagcgggcatgcaga

SEQ ID NO: 5035615 - DNA, 25 bp, Homo sapien
ccctcgtcctgcggccggtgcagga

SEQ ID NO: 5035616 - DNA, 25 bp, Homo sapien
tggttgagcagcatcagagcgggca

SEQ ID NO: 5035617 - DNA, 25 bp, Homo sapien
gcagagaagggcccctcgtcctgcg

SEQ ID NO: 5035618 - DNA, 25 bp, Homo sapien
gaaagagtagacaaggagttgaatc

SEQ ID NO: 5035619 - DNA, 25 bp, Homo sapien
tagacaaggagttgaatctgtgact

SEQ ID NO: 5035620 - DNA, 25 bp, Homo sapien
gaaccatgcgttgagatcactgact

SEQ ID NO: 5035621 - DNA, 25 bp, Homo sapien
ctgtgactgcctgtgaaccatgcgt

SEQ ID NO: 5035622 - DNA, 25 bp, Homo sapien
catctgatttgggtgtagtagctaa

SEQ ID NO: 5035623 - DNA, 25 bp, Homo sapien
cactgagacaatggaggttagaact

SEQ ID NO: 5035624 - DNA, 25 bp, Homo sapien
caaaagtagatgttggcttcggctc

SEQ ID NO: 5035625 - DNA, 25 bp, Homo sapien
tctaccaggttccagaaatctgtgg

SEQ ID NO: 5035626 - DNA, 25 bp, Homo sapien
tacattatgatctgccagaacccct

SEQ ID NO: 5035627 - DNA, 25 bp, Homo sapien
tttgtctccacctactgtggcgtgg

SEQ ID NO: 5035628 - DNA, 25 bp, Homo sapien
cccacgcagtgttataattatgacc

SEQ ID NO: 5035629 - DNA, 25 bp, Homo sapien
gacctgcgtttctcagggctcccag

SEQ ID NO: 5035630 - DNA, 25 bp, Homo sapien
aatgctccatgggtatgctctctga

SEQ ID NO: 5035631 - DNA, 25 bp, Homo sapien
gacagattcctgtcgataaccacca

SEQ ID NO: 5035632 - DNA, 25 bp, Homo sapien
tgagagcagaactaagaggcaggac

SEQ ID NO: 5035633 - DNA, 25 bp, Homo sapien
gaatcagttaggtgggccttcccca

SEQ ID NO: 5035634 - DNA, 25 bp, Homo sapien
gccagagtttgtgcggtaggcctca

SEQ ID NO: 5035635 - DNA, 25 bp, Homo sapien
cacagtcgtgcatgaggctccacgc

SEQ ID NO: 5035636 - DNA, 25 bp, Homo sapien
tccaggagccacgagtattatgcag

SEQ ID NO: 5035637 - DNA, 25 bp, Homo sapien
tacactgctgcctgcgtgagaaggg

SEQ ID NO: 5035638 - DNA, 25 bp, Homo sapien
cccattcccaagaaagagcagctca

SEQ ID NO: 5035639 - DNA, 25 bp, Homo sapien
cccaagaaagagcagctcagcttct

SEQ ID NO: 5035640 - DNA, 25 bp, Homo sapien
tgcccattcccaagaaagagcagct

SEQ ID NO: 5035641 - DNA, 25 bp, Homo sapien
attcccaagaaagagcagctcagct

SEQ ID NO: 5035642 - DNA, 25 bp, Homo sapien
gccacaaacgccttgtaacagtggt

SEQ ID NO: 5035643 - DNA, 25 bp, Homo sapien
aaacgccttgtaacagtggtgaagc

SEQ ID NO: 5035644 - DNA, 25 bp, Homo sapien
tgtaacagtggtgaagctcctctca

SEQ ID NO: 5035645 - DNA, 25 bp, Homo sapien
ccttgtaacagtggtgaagctcctc

SEQ ID NO: 5035646 - DNA, 25 bp, Homo sapien
tggttgaccttgactaatgaatagc

SEQ ID NO: 5035647 - DNA, 25 bp, Homo sapien
ccccaaatcttgtggttgaccttga

SEQ ID NO: 5035648 - DNA, 25 bp, Homo sapien
ccagtgccctatggaccttcttgat

SEQ ID NO: 5035649 - DNA, 25 bp, Homo sapien
gaatagcgcaggttacctctaaaag

SEQ ID NO: 5035650 - DNA, 25 bp, Homo sapien
tcagagcggcatgaccaggtgagat

SEQ ID NO: 5035651 - DNA, 25 bp, Homo sapien
agatgagctagcagaagtacgcagc

SEQ ID NO: 5035652 - DNA, 25 bp, Homo sapien
tacgcagcacctgatacagtgcctg

SEQ ID NO: 5035653 - DNA, 25 bp, Homo sapien
gctagcagaagtacgcagcacctga

SEQ ID NO: 5035654 - DNA, 25 bp, Homo sapien
ggctttgaccctcccttgcctgcag

SEQ ID NO: 5035655 - DNA, 25 bp, Homo sapien
ttgaatccaagacccctctgtttcc

SEQ ID NO: 5035656 - DNA, 25 bp, Homo sapien
aaaatcccaactccctggcgtggca

SEQ ID NO: 5035657 - DNA, 25 bp, Homo sapien
tggcgtggcattccaggctcttcgc

SEQ ID NO: 5035658 - DNA, 25 bp, Homo sapien
caagatgtgcccgaggaagtagaca

SEQ ID NO: 5035659 - DNA, 25 bp, Homo sapien
ccaaagagaaaggaatcggcacacc

SEQ ID NO: 5035660 - DNA, 25 bp, Homo sapien
cacagacaggcagcatggctagcaa

SEQ ID NO: 5035661 - DNA, 25 bp, Homo sapien
gaaaatctacaactccatgcatggt

SEQ ID NO: 5035662 - DNA, 25 bp, Homo sapien
gcctggaaaaccaaaagcggatgcc

SEQ ID NO: 5035663 - DNA, 25 bp, Homo sapien
cgtgtgtgcagaatgtaacttcaca

SEQ ID NO: 5035664 - DNA, 25 bp, Homo sapien
gaaaccaccaaccatgtcgtgtcca

SEQ ID NO: 5035665 - DNA, 25 bp, Homo sapien
tctgggatctcggtgagtaaaaccc

SEQ ID NO: 5035666 - DNA, 25 bp, Homo sapien
gagatcgactcctggttctcggaga

SEQ ID NO: 5035667 - DNA, 25 bp, Homo sapien
gacacggtcgcacgtatcatgcgta

SEQ ID NO: 5035668 - DNA, 25 bp, Homo sapien
tacccaagcagaactggatcggcta

SEQ ID NO: 5035669 - DNA, 25 bp, Homo sapien
cggaagcttcgagacagcatggaac

SEQ ID NO: 5035670 - DNA, 25 bp, Homo sapien
cacgtgtggcaacatcagatatctc

SEQ ID NO: 5035671 - DNA, 25 bp, Homo sapien
gatgctaagatctgttccacgtgtg

SEQ ID NO: 5035672 - DNA, 25 bp, Homo sapien
ttaattatggtaaatgccccacctg

SEQ ID NO: 5035673 - DNA, 25 bp, Homo sapien
gccccacctgtgagctagaaaacat

SEQ ID NO: 5035674 - DNA, 25 bp, Homo sapien
ggttttgatcagttgcatcactatt

SEQ ID NO: 5035675 - DNA, 25 bp, Homo sapien
acttccacgtatttgtataattttg

SEQ ID NO: 5035676 - DNA, 25 bp, Homo sapien
caagagcgtatcatttaacttccac

SEQ ID NO: 5035677 - DNA, 25 bp, Homo sapien
caaggatcattcaagagcgtatcat

SEQ ID NO: 5035678 - DNA, 25 bp, Homo sapien
gatttctcggcaggaagggctgaaa

SEQ ID NO: 5035679 - DNA, 25 bp, Homo sapien
tttctaaataccagcagaagaggct

SEQ ID NO: 5035680 - DNA, 25 bp, Homo sapien
caggcccctgtctcaacttggagag

SEQ ID NO: 5035681 - DNA, 25 bp, Homo sapien
gacagacggcagatcttccaaatca

SEQ ID NO: 5035682 - DNA, 25 bp, Homo sapien
catccacgtggccaaaagtccactt

SEQ ID NO: 5035683 - DNA, 25 bp, Homo sapien
tgtctcaggcaacagtccagggtgg

SEQ ID NO: 5035684 - DNA, 25 bp, Homo sapien
aaaagtccacttctacattccagcc

SEQ ID NO: 5035685 - DNA, 25 bp, Homo sapien
caggcgccttccatctctagatcag

SEQ ID NO: 5035686 - DNA, 25 bp, Homo sapien
agtctccctgactggtgctctcagg

SEQ ID NO: 5035687 - DNA, 25 bp, Homo sapien
aatatagtcttgaagcctcagtctc

SEQ ID NO: 5035688 - DNA, 25 bp, Homo sapien
tcaatatagtcttgaagcctcagtc

SEQ ID NO: 5035689 - DNA, 25 bp, Homo sapien
tcagtctccctgactggtgctctca

SEQ ID NO: 5035690 - DNA, 25 bp, Homo sapien
actcatctcattcttggggcttccc

SEQ ID NO: 5035691 - DNA, 25 bp, Homo sapien
ttgaggatgtactcatatctccctc

SEQ ID NO: 5035692 - DNA, 25 bp, Homo sapien
ctctgtctggtagaaattcttctga

SEQ ID NO: 5035693 - DNA, 25 bp, Homo sapien
tgtctggtagaaattcttctgaacc

SEQ ID NO: 5035694 - DNA, 25 bp, Homo sapien
cctctgtctggtagaaattcttctg

SEQ ID NO: 5035695 - DNA, 25 bp, Homo sapien
tctgtctggtagaaattcttctgaa

SEQ ID NO: 5035696 - DNA, 25 bp, Homo sapien
tggaaagacagctgcccttgctctg

SEQ ID NO: 5035697 - DNA, 25 bp, Homo sapien
taggctcccaggacgccatctccac

SEQ ID NO: 5035698 - DNA, 25 bp, Homo sapien
gcctggacagtcttctaggctccca

SEQ ID NO: 5035699 - DNA, 25 bp, Homo sapien
tgctctggaaagacagctgcccttg

SEQ ID NO: 5035700 - DNA, 25 bp, Homo sapien
caaaacgggccgacatattggcata

SEQ ID NO: 5035701 - DNA, 25 bp, Homo sapien
tccaggagagtggatagtcttcctt

SEQ ID NO: 5035702 - DNA, 25 bp, Homo sapien
tatatcccctgaggatttcttcaaa

SEQ ID NO: 5035703 - DNA, 25 bp, Homo sapien
tattggcatatgtgccccgggtgtt

SEQ ID NO: 5035704 - DNA, 25 bp, Homo sapien
cttgcatgctctagtgggccaggta

SEQ ID NO: 5035705 - DNA, 25 bp, Homo sapien
caggtagggctctttaggcagccag

SEQ ID NO: 5035706 - DNA, 25 bp, Homo sapien
tcacaggaggcccaacatgtggctt

SEQ ID NO: 5035707 - DNA, 25 bp, Homo sapien
ttaggcagccagcatccgtttcctc

SEQ ID NO: 5035708 - DNA, 25 bp, Homo sapien
gaggcaccaggtccaagctgggtca

SEQ ID NO: 5035709 - DNA, 25 bp, Homo sapien
gtttttccctgaattcctagccaca

SEQ ID NO: 5035710 - DNA, 25 bp, Homo sapien
ggtcagtgagtcttgggagtcaaat

SEQ ID NO: 5035711 - DNA, 25 bp, Homo sapien
ggtccaagctgggtcagtgagtctt

SEQ ID NO: 5035712 - DNA, 25 bp, Homo sapien
catgtgagggttctcagcaggccct

SEQ ID NO: 5035713 - DNA, 25 bp, Homo sapien
cccagcaagggatgtgatgagatca

SEQ ID NO: 5035714 - DNA, 25 bp, Homo sapien
tcaaagacgaagctggtttagccca

SEQ ID NO: 5035715 - DNA, 25 bp, Homo sapien
tgatgagatcaatgcctactgcctg

SEQ ID NO: 5035716 - DNA, 25 bp, Homo sapien
gtgggtctctctggccgtgatgaca

SEQ ID NO: 5035717 - DNA, 25 bp, Homo sapien
gcacctagatttaattctgtactcc

SEQ ID NO: 5035718 - DNA, 25 bp, Homo sapien
gccttgcacctagatttaattctgt

SEQ ID NO: 5035719 - DNA, 25 bp, Homo sapien
gatttaattctgtactccctgtggg

SEQ ID NO: 5035720 - DNA, 25 bp, Homo sapien
gcagggacatggaaacttaacacag

SEQ ID NO: 5035721 - DNA, 25 bp, Homo sapien
gggtacttcctaaatgctcttcaag

SEQ ID NO: 5035722 - DNA, 25 bp, Homo sapien
ttatgtgatatctaagagacagcag

SEQ ID NO: 5035723 - DNA, 25 bp, Homo sapien
gctcttcaagagataattggttaca

SEQ ID NO: 5035724 - DNA, 25 bp, Homo sapien
catgaacattttgccctgaactgaa

SEQ ID NO: 5035725 - DNA, 25 bp, Homo sapien
ggtaagagggtacaccagagactcc

SEQ ID NO: 5035726 - DNA, 25 bp, Homo sapien
aatgagtctccacgcctgtacaatg

SEQ ID NO: 5035727 - DNA, 25 bp, Homo sapien
aaaatgactgctcgcaggcagctga

SEQ ID NO: 5035728 - DNA, 25 bp, Homo sapien
catttcctaggataacacacatcac

SEQ ID NO: 5035729 - DNA, 25 bp, Homo sapien
gtgtgacagccactcaatactgctc

SEQ ID NO: 5035730 - DNA, 25 bp, Homo sapien
tactgttagagcacaatgtttcctg

SEQ ID NO: 5035731 - DNA, 25 bp, Homo sapien
caagtaaactttattgtggccacag

SEQ ID NO: 5035732 - DNA, 25 bp, Homo sapien
tctgataggaaaagcccacctacga

SEQ ID NO: 5035733 - DNA, 25 bp, Homo sapien
cagagcttgtacattcatgactcaa

SEQ ID NO: 5035734 - DNA, 25 bp, Homo sapien
aataacacaccctcaaacccaaatg

SEQ ID NO: 5035735 - DNA, 25 bp, Homo sapien
tttaagctggtctgattcacagagc

SEQ ID NO: 5035736 - DNA, 25 bp, Homo sapien
catgttattcccttagatgtgctta

SEQ ID NO: 5035737 - DNA, 25 bp, Homo sapien
ggtctctcctcctttactcaatgaa

SEQ ID NO: 5035738 - DNA, 25 bp, Homo sapien
aaatgatctacgtgcagagaggagc

SEQ ID NO: 5035739 - DNA, 25 bp, Homo sapien
ttaaatagcgtatgagggtctctcc

SEQ ID NO: 5035740 - DNA, 25 bp, Homo sapien
tgaaatggaatcaatgcccaggagc

SEQ ID NO: 5035741 - DNA, 25 bp, Homo sapien
gaacgcagttgttaagtgcacccag

SEQ ID NO: 5035742 - DNA, 25 bp, Homo sapien
gagaaaacgcttcatccgctgcttg

SEQ ID NO: 5035743 - DNA, 25 bp, Homo sapien
gagcatctccctgtagccaacatga

SEQ ID NO: 5035744 - DNA, 25 bp, Homo sapien
agcagctcgcctcatgctagcaggg

SEQ ID NO: 5035745 - DNA, 25 bp, Homo sapien
tcactggtctccaagtcgaaagccc

SEQ ID NO: 5035746 - DNA, 25 bp, Homo sapien
gggggcacaccaaatcctgatactc

SEQ ID NO: 5035747 - DNA, 25 bp, Homo sapien
tggtctccaagtcgaaagccctggc

SEQ ID NO: 5035748 - DNA, 25 bp, Homo sapien
ggcagctagctttacttaccgagaa

SEQ ID NO: 5035749 - DNA, 25 bp, Homo sapien
gaaaagacaccccactaacctgtga

SEQ ID NO: 5035750 - DNA, 25 bp, Homo sapien
ccccagacggttagatgatttccca

SEQ ID NO: 5035751 - DNA, 25 bp, Homo sapien
cacttgctggagaaaatgctagggc

SEQ ID NO: 5035752 - DNA, 25 bp, Homo sapien
aactgaggtgtggatagaaaatttc

SEQ ID NO: 5035753 - DNA, 25 bp, Homo sapien
tgaggtgtggatagaaaatttcttc

SEQ ID NO: 5035754 - DNA, 25 bp, Homo sapien
aaaaactgaggtgtggatagaaaat

SEQ ID NO: 5035755 - DNA, 25 bp, Homo sapien
actgaggtgtggatagaaaatttct

SEQ ID NO: 5035756 - DNA, 25 bp, Homo sapien
tgtccaaccagatttccaataagct

SEQ ID NO: 5035757 - DNA, 25 bp, Homo sapien
aaataaagatgtccaaccagatttc

SEQ ID NO: 5035758 - DNA, 25 bp, Homo sapien
taaagatgtccaaccagatttccaa

SEQ ID NO: 5035759 - DNA, 25 bp, Homo sapien
gatgtccaaccagatttccaataag

SEQ ID NO: 5035760 - DNA, 25 bp, Homo sapien
gagcctccgatgatatagttgaatc

SEQ ID NO: 5035761 - DNA, 25 bp, Homo sapien
gatatagttgaatccaaggataacc

SEQ ID NO: 5035762 - DNA, 25 bp, Homo sapien
ccgatgatatagttgaatccaagga

SEQ ID NO: 5035763 - DNA, 25 bp, Homo sapien
tgaatccaaggataacccagggtaa

SEQ ID NO: 5035764 - DNA, 25 bp, Homo sapien
gatacaatcatgtctctgttcagct

SEQ ID NO: 5035765 - DNA, 25 bp, Homo sapien
gcccagacataaagtactgacatga

SEQ ID NO: 5035766 - DNA, 25 bp, Homo sapien
agctgggcccagacataaagtactg

SEQ ID NO: 5035767 - DNA, 25 bp, Homo sapien
aatgatacaatcatgtctctgttca

SEQ ID NO: 5035768 - DNA, 25 bp, Homo sapien
tgcatatccattgctaagccagtaa

SEQ ID NO: 5035769 - DNA, 25 bp, Homo sapien
ctgcatatccattgctaagccagta

SEQ ID NO: 5035770 - DNA, 25 bp, Homo sapien
gcatatccattgctaagccagtaat

SEQ ID NO: 5035771 - DNA, 25 bp, Homo sapien
ggacctgagacatcgagagctgctg

SEQ ID NO: 5035772 - DNA, 25 bp, Homo sapien
catctgtaagagtcctgcagttgga

SEQ ID NO: 5035773 - DNA, 25 bp, Homo sapien
tctgtaagagtcctgcagttggagg

SEQ ID NO: 5035774 - DNA, 25 bp, Homo sapien
cctgcagttggagggctgctgacaa

SEQ ID NO: 5035775 - DNA, 25 bp, Homo sapien
agagtcctgcagttggagggctgct

SEQ ID NO: 5035776 - DNA, 25 bp, Homo sapien
ccagagctgggtacttcacagaggg

SEQ ID NO: 5035777 - DNA, 25 bp, Homo sapien
aagcagagaaacgtactgtgtccct

SEQ ID NO: 5035778 - DNA, 25 bp, Homo sapien
agctgggtacttcacagagggactg

SEQ ID NO: 5035779 - DNA, 25 bp, Homo sapien
tcccttcccagagctgggtacttca

SEQ ID NO: 5035780 - DNA, 25 bp, Homo sapien
gaaaaggatgctggttgtaaattaa

SEQ ID NO: 5035781 - DNA, 25 bp, Homo sapien
aaggatgctggttgtaaattaattt

SEQ ID NO: 5035782 - DNA, 25 bp, Homo sapien
agaaaaggatgctggttgtaaatta

SEQ ID NO: 5035783 - DNA, 25 bp, Homo sapien
aaaaggatgctggttgtaaattaat

SEQ ID NO: 5035784 - DNA, 25 bp, Homo sapien
atgaataaatagtctgctggcctcc

SEQ ID NO: 5035785 - DNA, 25 bp, Homo sapien
catgaataaatagtctgctggcctc

SEQ ID NO: 5035786 - DNA, 25 bp, Homo sapien
gcatgaataaatagtctgctggcct

SEQ ID NO: 5035787 - DNA, 25 bp, Homo sapien
tatgctctcctaactgaattccagt

SEQ ID NO: 5035788 - DNA, 25 bp, Homo sapien
ctgagtaaggttaatctatgctctc

SEQ ID NO: 5035789 - DNA, 25 bp, Homo sapien
gagtaaggttaatctatgctctcct

SEQ ID NO: 5035790 - DNA, 25 bp, Homo sapien
aatctatgctctcctaactgaattc

SEQ ID NO: 5035791 - DNA, 25 bp, Homo sapien
aaagaccagtgaggccccccaagct

SEQ ID NO: 5035792 - DNA, 25 bp, Homo sapien
tgagccctgtatcccaaagaccagt

SEQ ID NO: 5035793 - DNA, 25 bp, Homo sapien
ccagagaaagtacagtcaattccac

SEQ ID NO: 5035794 - DNA, 25 bp, Homo sapien
attccacagcttctgagccctgtat

SEQ ID NO: 5035795 - DNA, 25 bp, Homo sapien
ctgtttcaagtcgcgtagaatactg

SEQ ID NO: 5035796 - DNA, 25 bp, Homo sapien
gtttcaagtcgcgtagaatactgat

SEQ ID NO: 5035797 - DNA, 25 bp, Homo sapien
tcaagtcgcgtagaatactgatata

SEQ ID NO: 5035798 - DNA, 25 bp, Homo sapien
tttcaagtcgcgtagaatactgata

SEQ ID NO: 5035799 - DNA, 25 bp, Homo sapien
aggtggcagtgattggcctccaaat

SEQ ID NO: 5035800 - DNA, 25 bp, Homo sapien
cccacagggaaataaaaggtggcag

SEQ ID NO: 5035801 - DNA, 25 bp, Homo sapien
aataaaaggtggcagtgattggcct

SEQ ID NO: 5035802 - DNA, 25 bp, Homo sapien
agggaaataaaaggtggcagtgatt

SEQ ID NO: 5035803 - DNA, 25 bp, Homo sapien
cacaaaagctgagtatcttactgcc

SEQ ID NO: 5035804 - DNA, 25 bp, Homo sapien
ttagagttgtctatagagctatctc

SEQ ID NO: 5035805 - DNA, 25 bp, Homo sapien
actgggcctagcctagtttctattc

SEQ ID NO: 5035806 - DNA, 25 bp, Homo sapien
gatattgatataattcccagccaag

SEQ ID NO: 5035807 - DNA, 25 bp, Homo sapien
cactagcatgtaccaagcacaaaag

SEQ ID NO: 5035808 - DNA, 25 bp, Homo sapien
tggcccctgaattcctcagagtagt

SEQ ID NO: 5035809 - DNA, 25 bp, Homo sapien
gatatgtgtctatctcattgcacac

SEQ ID NO: 5035810 - DNA, 25 bp, Homo sapien
acatggcccctgaattcctcagagt

SEQ ID NO: 5035811 - DNA, 25 bp, Homo sapien
gctgatgaggccgagtttgccgacc

SEQ ID NO: 5035812 - DNA, 25 bp, Homo sapien
agtttgccgaccaagggcacggcga

SEQ ID NO: 5035813 - DNA, 25 bp, Homo sapien
gggatgctcctgaaccagtctccga

SEQ ID NO: 5035814 - DNA, 25 bp, Homo sapien
tggcggcgaaccaatagcgcgtgat

SEQ ID NO: 5035815 - DNA, 25 bp, Homo sapien
cggctccgcgactgttaggtgtcta

SEQ ID NO: 5035816 - DNA, 25 bp, Homo sapien
gcggacgacgtgaccagaagtcccg

SEQ ID NO: 5035817 - DNA, 25 bp, Homo sapien
ggtagccaagatgcacaagaccgcc

SEQ ID NO: 5035818 - DNA, 25 bp, Homo sapien
gaattcggaccagcgaggcagcctt

SEQ ID NO: 5035819 - DNA, 25 bp, Homo sapien
cagacactaggtgcaagctgagggt

SEQ ID NO: 5035820 - DNA, 25 bp, Homo sapien
tcagatgacactcccagcattggtg

SEQ ID NO: 5035821 - DNA, 25 bp, Homo sapien
gggtcctagaaacagcctcacttta

SEQ ID NO: 5035822 - DNA, 25 bp, Homo sapien
caagcactgttgacgcagggagtcg

SEQ ID NO: 5035823 - DNA, 25 bp, Homo sapien
gatcagccctttgtacagaaaaatg

SEQ ID NO: 5035824 - DNA, 25 bp, Homo sapien
gaatgcatgtcaccttgagacggtc

SEQ ID NO: 5035825 - DNA, 25 bp, Homo sapien
gagacctattttgcaatcagtgaca

SEQ ID NO: 5035826 - DNA, 25 bp, Homo sapien
gaaagtgagaaatcttcgccagaga

SEQ ID NO: 5035827 - DNA, 25 bp, Homo sapien
tcagtggtgctaaataagttattaa

SEQ ID NO: 5035828 - DNA, 25 bp, Homo sapien
cacattgggctacatttggaaagtt

SEQ ID NO: 5035829 - DNA, 25 bp, Homo sapien
caggttgagcaagatttcggcattt

SEQ ID NO: 5035830 - DNA, 25 bp, Homo sapien
tccaatatgaattcagtggtgctaa

SEQ ID NO: 5035831 - DNA, 25 bp, Homo sapien
gccccgtgtgaggatcgaactcacg

SEQ ID NO: 5035832 - DNA, 25 bp, Homo sapien
gtgccccgtgtgaggatcgaactca

SEQ ID NO: 5035833 - DNA, 25 bp, Homo sapien
gacgcgctacctactgcgctaacga

SEQ ID NO: 5035834 - DNA, 25 bp, Homo sapien
tgtgaggatcgaactcacgaccttc

SEQ ID NO: 5035835 - DNA, 25 bp, Homo sapien
agacagtggcacattgaggatttgt

SEQ ID NO: 5035836 - DNA, 25 bp, Homo sapien
ggatttgtacttttcgccgtatgta

SEQ ID NO: 5035837 - DNA, 25 bp, Homo sapien
ttttcgccgtatgtacatttatacg

SEQ ID NO: 5035838 - DNA, 25 bp, Homo sapien
tgtacatttatacggcgtttatacg

SEQ ID NO: 5035839 - DNA, 25 bp, Homo sapien
tcaacttttctgtttgtctgaagtt

SEQ ID NO: 5035840 - DNA, 25 bp, Homo sapien
cacggcacaactctgtcaacttttc

SEQ ID NO: 5035841 - DNA, 25 bp, Homo sapien
tgtttgtctgaagtttttccttaga

SEQ ID NO: 5035842 - DNA, 25 bp, Homo sapien
tcacggcacaactctgtcaactttt

SEQ ID NO: 5035843 - DNA, 25 bp, Homo sapien
acagcaggcaccacaattgctgagg

SEQ ID NO: 5035844 - DNA, 25 bp, Homo sapien
caccacaattgctgaggataggcga

SEQ ID NO: 5035845 - DNA, 25 bp, Homo sapien
ctgaggataggcgaagaggaatctc

SEQ ID NO: 5035846 - DNA, 25 bp, Homo sapien
cgaagaggaatctcggagtggatgg

SEQ ID NO: 5035847 - DNA, 25 bp, Homo sapien
gatcccacggtctagggtgggaagc

SEQ ID NO: 5035848 - DNA, 25 bp, Homo sapien
tctgccagcctcgggaagcgcgcat

SEQ ID NO: 5035849 - DNA, 25 bp, Homo sapien
acccagtcctcgggaagctcctgga

SEQ ID NO: 5035850 - DNA, 25 bp, Homo sapien
gccagcctcgggaagcgcgcatcca

SEQ ID NO: 5035851 - DNA, 25 bp, Homo sapien
ggcttactccctggtaaggttgctg

SEQ ID NO: 5035852 - DNA, 25 bp, Homo sapien
cttactccctggtaaggttgctggg

SEQ ID NO: 5035853 - DNA, 25 bp, Homo sapien
gcggactgcggactgggagtgtcac

SEQ ID NO: 5035854 - DNA, 25 bp, Homo sapien
gtcacctagatccagctgtttctcc

SEQ ID NO: 5035855 - DNA, 25 bp, Homo sapien
cgcgccactagccggtacagggtac

SEQ ID NO: 5035856 - DNA, 25 bp, Homo sapien
gaatgaaactcgaacggcttcccag

SEQ ID NO: 5035857 - DNA, 25 bp, Homo sapien
atttcgctccgtaaagtgtctccag

SEQ ID NO: 5035858 - DNA, 25 bp, Homo sapien
tctgagccttcgagtggaatgaaac

SEQ ID NO: 5035859 - DNA, 25 bp, Homo sapien
agaatcccggcaggagcggagactc

SEQ ID NO: 5035860 - DNA, 25 bp, Homo sapien
aggcctttgcaccggcagctctagg

SEQ ID NO: 5035861 - DNA, 25 bp, Homo sapien
ctttgcaccggcagctctaggcctg

SEQ ID NO: 5035862 - DNA, 25 bp, Homo sapien
gcaccggcagctctaggcctgatgt

SEQ ID NO: 5035863 - DNA, 25 bp, Homo sapien
ccggcagctctaggcctgatgtgtc

SEQ ID NO: 5035864 - DNA, 25 bp, Homo sapien
ctggactgtgggctgcatctggcct

SEQ ID NO: 5035865 - DNA, 25 bp, Homo sapien
acagcctggctttcttgaaacagtt

SEQ ID NO: 5035866 - DNA, 25 bp, Homo sapien
caggtcactgtctccatctgcttgg

SEQ ID NO: 5035867 - DNA, 25 bp, Homo sapien
tgaaacagttctctgcaggggctgc

SEQ ID NO: 5035868 - DNA, 25 bp, Homo sapien
tgtactccccagaccttagcctcat

SEQ ID NO: 5035869 - DNA, 25 bp, Homo sapien
cctgtactccccagaccttagcctc

SEQ ID NO: 5035870 - DNA, 25 bp, Homo sapien
tactccccagaccttagcctcatca

SEQ ID NO: 5035871 - DNA, 25 bp, Homo sapien
tccccagaccttagcctcatcaccg

SEQ ID NO: 5035872 - DNA, 25 bp, Homo sapien
agttactgccgttcccaccggatca

SEQ ID NO: 5035873 - DNA, 25 bp, Homo sapien
gatttctcagttactgccgttccca

SEQ ID NO: 5035874 - DNA, 25 bp, Homo sapien
accggatcacaagcaccaggcacac

SEQ ID NO: 5035875 - DNA, 25 bp, Homo sapien
catgcggtacccactgtgcagagcc

SEQ ID NO: 5035876 - DNA, 25 bp, Homo sapien
ctagagctctgacaccccttacagg

SEQ ID NO: 5035877 - DNA, 25 bp, Homo sapien
agctagagctctgacaccccttaca

SEQ ID NO: 5035878 - DNA, 25 bp, Homo sapien
tccagctagagctctgacacccctt

SEQ ID NO: 5035879 - DNA, 25 bp, Homo sapien
agagctctgacaccccttacaggca

SEQ ID NO: 5035880 - DNA, 25 bp, Homo sapien
ctgggctccgacacatgctctgagc

SEQ ID NO: 5035881 - DNA, 25 bp, Homo sapien
cctgggctccgacacatgctctgag

SEQ ID NO: 5035882 - DNA, 25 bp, Homo sapien
tgataaggatttttcaaggtatgaa

SEQ ID NO: 5035883 - DNA, 25 bp, Homo sapien
tgtcactgagggctccttgataagg

SEQ ID NO: 5035884 - DNA, 25 bp, Homo sapien
caaggtatgaacgtgcagttcaaca

SEQ ID NO: 5035885 - DNA, 25 bp, Homo sapien
cagctggccagacttcctggttcag

SEQ ID NO: 5035886 - DNA, 25 bp, Homo sapien
tcttcaatggcacatggcagttgcc

SEQ ID NO: 5035887 - DNA, 25 bp, Homo sapien
gccacctcatgctcaggagaaaacg

SEQ ID NO: 5035888 - DNA, 25 bp, Homo sapien
taatgaactcaggaactggtcactg

SEQ ID NO: 5035889 - DNA, 25 bp, Homo sapien
gaagcaatatctaaagccacctcat

SEQ ID NO: 5035890 - DNA, 25 bp, Homo sapien
ggaacctctgcggtctctgcaaaca

SEQ ID NO: 5035891 - DNA, 25 bp, Homo sapien
gacaatgacaaacacttgagagggc

SEQ ID NO: 5035892 - DNA, 25 bp, Homo sapien
tcggctcgttctccagacagtgttc

SEQ ID NO: 5035893 - DNA, 25 bp, Homo sapien
gaagcgttggcctgagaactggaac

SEQ ID NO: 5035894 - DNA, 25 bp, Homo sapien
ttgttagcctgatgtgcagcccagg

SEQ ID NO: 5035895 - DNA, 25 bp, Homo sapien
tgactagggtcaccagctctccaat

SEQ ID NO: 5035896 - DNA, 25 bp, Homo sapien
catgcagggccgtctgtgtttactg

SEQ ID NO: 5035897 - DNA, 25 bp, Homo sapien
ggaaggctgccacagccggaataca

SEQ ID NO: 5035898 - DNA, 25 bp, Homo sapien
gggagaacaggacaccaacagtgat

SEQ ID NO: 5035899 - DNA, 25 bp, Homo sapien
ccttgacattcaaaggtgacctgct

SEQ ID NO: 5035900 - DNA, 25 bp, Homo sapien
tctccccttagagttgtttccagta

SEQ ID NO: 5035901 - DNA, 25 bp, Homo sapien
gggatcatcttcactgggaccagtc

SEQ ID NO: 5035902 - DNA, 25 bp, Homo sapien
ttcctccgctgaggctagagggctg

SEQ ID NO: 5035903 - DNA, 25 bp, Homo sapien
tccaggaggtcggtgccattggctg

SEQ ID NO: 5035904 - DNA, 25 bp, Homo sapien
cttgaaggatgagaattattcagcc

SEQ ID NO: 5035905 - DNA, 25 bp, Homo sapien
gatcagcaggagctaaggaagtgct

SEQ ID NO: 5035906 - DNA, 25 bp, Homo sapien
gtactcgccactgctcctaggaaca

SEQ ID NO: 5035907 - DNA, 25 bp, Homo sapien
tcatcctggcttctaattggcctcc

SEQ ID NO: 5035908 - DNA, 25 bp, Homo sapien
aacaacagcaagacatcatcctggc

SEQ ID NO: 5035909 - DNA, 25 bp, Homo sapien
gccatccatgggttttctctcccag

SEQ ID NO: 5035910 - DNA, 25 bp, Homo sapien
ggcttcactcccatcatgatttgga

SEQ ID NO: 5035911 - DNA, 25 bp, Homo sapien
cagcttccagatcattgcctcagag

SEQ ID NO: 5035912 - DNA, 25 bp, Homo sapien
tctttcgagtcgcagggcctttgca

SEQ ID NO: 5035913 - DNA, 25 bp, Homo sapien
gctgttcatgccctccgtcggagag

SEQ ID NO: 5035914 - DNA, 25 bp, Homo sapien
tgaacttgattagccgagattgtaa

SEQ ID NO: 5035915 - DNA, 25 bp, Homo sapien
aaagcacattgggttctgaccattc

SEQ ID NO: 5035916 - DNA, 25 bp, Homo sapien
cagtgtcctgaaagaatgcagtttt

SEQ ID NO: 5035917 - DNA, 25 bp, Homo sapien
gattgtaaatgacatgaggtcaggg

SEQ ID NO: 5035918 - DNA, 25 bp, Homo sapien
cggtacccgaagtgtgtccgcgtct

SEQ ID NO: 5035919 - DNA, 25 bp, Homo sapien
ggtgccgaggctgactccaacctgg

SEQ ID NO: 5035920 - DNA, 25 bp, Homo sapien
catggttcaatgttcccaggcccca

SEQ ID NO: 5035921 - DNA, 25 bp, Homo sapien
aaagacccacctcaacgacgagtgg

SEQ ID NO: 5035922 - DNA, 25 bp, Homo sapien
tagactggacctaggagcttgagtt

SEQ ID NO: 5035923 - DNA, 25 bp, Homo sapien
cacagcctagctgagtgcaaagaaa

SEQ ID NO: 5035924 - DNA, 25 bp, Homo sapien
tggaactaggtcctgagggcacagc

SEQ ID NO: 5035925 - DNA, 25 bp, Homo sapien
gaggccccagaacccgttatctatg

SEQ ID NO: 5035926 - DNA, 25 bp, Homo sapien
agcctgtgcctgtgtcgagctcagt

SEQ ID NO: 5035927 - DNA, 25 bp, Homo sapien
gcctgtgcctgtgtcgagctcagtc

SEQ ID NO: 5035928 - DNA, 25 bp, Homo sapien
cagcctgtgcctgtgtcgagctcag

SEQ ID NO: 5035929 - DNA, 25 bp, Homo sapien
ccagagctacattggtgccacagac

SEQ ID NO: 5035930 - DNA, 25 bp, Homo sapien
tcataagagcccagagaccaaaggt

SEQ ID NO: 5035931 - DNA, 25 bp, Homo sapien
tgccacagacagtccaagggcacag

SEQ ID NO: 5035932 - DNA, 25 bp, Homo sapien
aaaggtatctctctggacccacagg

SEQ ID NO: 5035933 - DNA, 25 bp, Homo sapien
tcagtcctccctggttgaacactgg

SEQ ID NO: 5035934 - DNA, 25 bp, Homo sapien
tccctggttgaacactggtgaggag

SEQ ID NO: 5035935 - DNA, 25 bp, Homo sapien
tggttgaacactggtgaggagcttt

SEQ ID NO: 5035936 - DNA, 25 bp, Homo sapien
tcctccctggttgaacactggtgag

SEQ ID NO: 5035937 - DNA, 25 bp, Homo sapien
aataatcagataccccagaccacct

SEQ ID NO: 5035938 - DNA, 25 bp, Homo sapien
ctacaggggagacgaataatcagat

SEQ ID NO: 5035939 - DNA, 25 bp, Homo sapien
tagtcttcgtgctgaccctgctagc

SEQ ID NO: 5035940 - DNA, 25 bp, Homo sapien
tgcctcgccttcacttagtcttcgt

SEQ ID NO: 5035941 - DNA, 25 bp, Homo sapien
tcctcttgaagagtgtctctgtgtt

SEQ ID NO: 5035942 - DNA, 25 bp, Homo sapien
tatttcgtttgacccaggcattgct

SEQ ID NO: 5035943 - DNA, 25 bp, Homo sapien
ggatgtaaatactgcagacacacgt

SEQ ID NO: 5035944 - DNA, 25 bp, Homo sapien
cttgctgttgttcactgtatttcgt

SEQ ID NO: 5035945 - DNA, 25 bp, Homo sapien
aaagcaagggccaagttggcaagtg

SEQ ID NO: 5035946 - DNA, 25 bp, Homo sapien
cagaagatgaaacgctcaaagcaag

SEQ ID NO: 5035947 - DNA, 25 bp, Homo sapien
tgaagaccacttgggcattcaggat

SEQ ID NO: 5035948 - DNA, 25 bp, Homo sapien
tgtgagtaggatctgtgaagaccac

SEQ ID NO: 5035949 - DNA, 25 bp, Homo sapien
tgattagcaatggatcctgtctgaa

SEQ ID NO: 5035950 - DNA, 25 bp, Homo sapien
gattagcaatggatcctgtctgaag

SEQ ID NO: 5035951 - DNA, 25 bp, Homo sapien
catgattagcaatggatcctgtctg

SEQ ID NO: 5035952 - DNA, 25 bp, Homo sapien
ccatgattagcaatggatcctgtct

SEQ ID NO: 5035953 - DNA, 25 bp, Homo sapien
ttttcaaatggacagaaatggtctt

SEQ ID NO: 5035954 - DNA, 25 bp, Homo sapien
acagaaatggtctttgatctttctg

SEQ ID NO: 5035955 - DNA, 25 bp, Homo sapien
ttcaaatggacagaaatggtctttg

SEQ ID NO: 5035956 - DNA, 25 bp, Homo sapien
ggacagaaatggtctttgatctttc

SEQ ID NO: 5035957 - DNA, 25 bp, Homo sapien
accaaggcagtcagggctacggagc

SEQ ID NO: 5035958 - DNA, 25 bp, Homo sapien
gggctacggagccaacacacttcac

SEQ ID NO: 5035959 - DNA, 25 bp, Homo sapien
tacagtcaccaaggcagtcagggct

SEQ ID NO: 5035960 - DNA, 25 bp, Homo sapien
aggcagtcagggctacggagccaac

SEQ ID NO: 5035961 - DNA, 25 bp, Homo sapien
gcagtactatttggcttaccaggag

SEQ ID NO: 5035962 - DNA, 25 bp, Homo sapien
gaaagcttgtacctgaacccactaa

SEQ ID NO: 5035963 - DNA, 25 bp, Homo sapien
tagttatcaactgcgaaggctttca

SEQ ID NO: 5035964 - DNA, 25 bp, Homo sapien
aatcagccgggtatggcagcactca

SEQ ID NO: 5035965 - DNA, 25 bp, Homo sapien
acaacacactattcccaaaagaggg

SEQ ID NO: 5035966 - DNA, 25 bp, Homo sapien
gcaagactaggcatttgacatgata

SEQ ID NO: 5035967 - DNA, 25 bp, Homo sapien
cttaagtctaatatagggagaactc

SEQ ID NO: 5035968 - DNA, 25 bp, Homo sapien
gacagataggcacaatatttacagg

SEQ ID NO: 5035969 - DNA, 25 bp, Homo sapien
actcaagtatccatcaaaagatgag

SEQ ID NO: 5035970 - DNA, 25 bp, Homo sapien
tatttagccatagaaggtatgaagt

SEQ ID NO: 5035971 - DNA, 25 bp, Homo sapien
acatacttatatgctaatgttcata

SEQ ID NO: 5035972 - DNA, 25 bp, Homo sapien
ccatagaaggtatgaagttttgata

SEQ ID NO: 5035973 - DNA, 25 bp, Homo sapien
ccaggttaaccacctagtaggcaat

SEQ ID NO: 5035974 - DNA, 25 bp, Homo sapien
taggcaattaatctgatgtgagaca

SEQ ID NO: 5035975 - DNA, 25 bp, Homo sapien
taatcaataattatcccaggttaac

SEQ ID NO: 5035976 - DNA, 25 bp, Homo sapien
caggaagtgttctgatgagtagttc

SEQ ID NO: 5035977 - DNA, 25 bp, Homo sapien
gcctcaattctagctctactcaact

SEQ ID NO: 5035978 - DNA, 25 bp, Homo sapien
gagcctcaattctagctctactcaa

SEQ ID NO: 5035979 - DNA, 25 bp, Homo sapien
ctgaaaatctgaccgcaggcaagtc

SEQ ID NO: 5035980 - DNA, 25 bp, Homo sapien
cccactgaaaatctgaccgcaggca

SEQ ID NO: 5035981 - DNA, 25 bp, Homo sapien
gacaagtacatgaaacacagcccct

SEQ ID NO: 5035982 - DNA, 25 bp, Homo sapien
tgatgatgttcaggcaggcaggtgc

SEQ ID NO: 5035983 - DNA, 25 bp, Homo sapien
ttcagcactgaaacaaacaattatt

SEQ ID NO: 5035984 - DNA, 25 bp, Homo sapien
gaatgccgatcaagaggccgccttg

SEQ ID NO: 5035985 - DNA, 25 bp, Homo sapien
aggagggagacaagtccttcagtag

SEQ ID NO: 5035986 - DNA, 25 bp, Homo sapien
ggagggagacaagtccttcagtaga

SEQ ID NO: 5035987 - DNA, 25 bp, Homo sapien
gaggagggagacaagtccttcagta

SEQ ID NO: 5035988 - DNA, 25 bp, Homo sapien
aaaaaatgctatcagagccagggaa

SEQ ID NO: 5035989 - DNA, 25 bp, Homo sapien
cagagccagggaaaatatctatgat

SEQ ID NO: 5035990 - DNA, 25 bp, Homo sapien
ttataaaaaatgctatcagagccag

SEQ ID NO: 5035991 - DNA, 25 bp, Homo sapien
taaaaaatgctatcagagccaggga

SEQ ID NO: 5035992 - DNA, 25 bp, Homo sapien
tcacataaacccgagggatacactc

SEQ ID NO: 5035993 - DNA, 25 bp, Homo sapien
acataaacccgagggatacactcac

SEQ ID NO: 5035994 - DNA, 25 bp, Homo sapien
cacataaacccgagggatacactca

SEQ ID NO: 5035995 - DNA, 25 bp, Homo sapien
cagctatcaacagcaaagtgtcttc

SEQ ID NO: 5035996 - DNA, 25 bp, Homo sapien
ctcagctatcaacagcaaagtgtct

SEQ ID NO: 5035997 - DNA, 25 bp, Homo sapien
tctttgaagctgaaccctttcattt

SEQ ID NO: 5035998 - DNA, 25 bp, Homo sapien
tgagtccttaagttcctctccaaag

SEQ ID NO: 5035999 - DNA, 25 bp, Homo sapien
aggttgggtaaactgaagcagaagc

SEQ ID NO: 5036000 - DNA, 25 bp, Homo sapien
ctgaggttgggtaaactgaagcaga

SEQ ID NO: 5036001 - DNA, 25 bp, Homo sapien
gaggttgggtaaactgaagcagaag

SEQ ID NO: 5036002 - DNA, 25 bp, Homo sapien
tgaggttgggtaaactgaagcagaa

SEQ ID NO: 5036003 - DNA, 25 bp, Homo sapien
gtctcaatgcgtggcgaaaagtccc

SEQ ID NO: 5036004 - DNA, 25 bp, Homo sapien
caatgcgtggcgaaaagtcccaacg

SEQ ID NO: 5036005 - DNA, 25 bp, Homo sapien
gaaaagtctcaatgcgtggcgaaaa

SEQ ID NO: 5036006 - DNA, 25 bp, Homo sapien
tgaaaaaccgaaaagtctcaatgcg

SEQ ID NO: 5036007 - DNA, 25 bp, Homo sapien
tgagataccaggcaagctacgagct

SEQ ID NO: 5036008 - DNA, 25 bp, Homo sapien
cacagtaacctcttcagatgcggcg

SEQ ID NO: 5036009 - DNA, 25 bp, Homo sapien
tacgagctacctgatgaggaaccag

SEQ ID NO: 5036010 - DNA, 25 bp, Homo sapien
cacacttgtggcctcatggaatgaa

SEQ ID NO: 5036011 - DNA, 25 bp, Homo sapien
cgcgactcggtacttcaagcctaaa

SEQ ID NO: 5036012 - DNA, 25 bp, Homo sapien
tcaccttcgttacccctttgatgta

SEQ ID NO: 5036013 - DNA, 25 bp, Homo sapien
agcattcaccttcgttacccctttg

SEQ ID NO: 5036014 - DNA, 25 bp, Homo sapien
tctggatatactccaggcacccgcg

SEQ ID NO: 5036015 - DNA, 25 bp, Homo sapien
gccttccaccccaaatcggctctgc

SEQ ID NO: 5036016 - DNA, 25 bp, Homo sapien
tccaccccaaatcggctctgctcat

SEQ ID NO: 5036017 - DNA, 25 bp, Homo sapien
tgccttccaccccaaatcggctctg

SEQ ID NO: 5036018 - DNA, 25 bp, Homo sapien
cttccaccccaaatcggctctgctc

SEQ ID NO: 5036019 - DNA, 25 bp, Homo sapien
atccacctgtgcatcctcgagagac

SEQ ID NO: 5036020 - DNA, 25 bp, Homo sapien
taaatcacaggttttggccaggcgc

SEQ ID NO: 5036021 - DNA, 25 bp, Homo sapien
cagatgtcctatctcagcggaaggc

SEQ ID NO: 5036022 - DNA, 25 bp, Homo sapien
gagactctgcagagactcttccggt

SEQ ID NO: 5036023 - DNA, 25 bp, Homo sapien
caataggtatcccagagtcatgagg

SEQ ID NO: 5036024 - DNA, 25 bp, Homo sapien
ggtcagaccgcttgcaagagttcag

SEQ ID NO: 5036025 - DNA, 25 bp, Homo sapien
ggttcctacagggaccattcagcag

SEQ ID NO: 5036026 - DNA, 25 bp, Homo sapien
caggttcatccacttagcatcagca

SEQ ID NO: 5036027 - DNA, 25 bp, Homo sapien
tcccgggttcagcgattcccctgcc

SEQ ID NO: 5036028 - DNA, 25 bp, Homo sapien
cacgtgccaccatgcccagctaatt

SEQ ID NO: 5036029 - DNA, 25 bp, Homo sapien
ctcccgggttcagcgattcccctgc

SEQ ID NO: 5036030 - DNA, 25 bp, Homo sapien
gcacgtgccaccatgcccagctaat

SEQ ID NO: 5036031 - DNA, 25 bp, Homo sapien
aaagaggcacatgctttcagctgag

SEQ ID NO: 5036032 - DNA, 25 bp, Homo sapien
tttctgagatgacgcaagtgctgct

SEQ ID NO: 5036033 - DNA, 25 bp, Homo sapien
aaatagcaagctggaggtagagtac

SEQ ID NO: 5036034 - DNA, 25 bp, Homo sapien
taaagagctctcaggcaaggtttca

SEQ ID NO: 5036035 - DNA, 25 bp, Homo sapien
aatggtctgtgttggttgctttatt

SEQ ID NO: 5036036 - DNA, 25 bp, Homo sapien
taaatggtctgtgttggttgcttta

SEQ ID NO: 5036037 - DNA, 25 bp, Homo sapien
ggttaaatggtctgtgttggttgct

SEQ ID NO: 5036038 - DNA, 25 bp, Homo sapien
cgtggttaaatggtctgtgttggtt

SEQ ID NO: 5036039 - DNA, 25 bp, Homo sapien
tgttcgaatcttgatggccaccccg

SEQ ID NO: 5036040 - DNA, 25 bp, Homo sapien
tgtgaaaagacagtaaccaccgtca

SEQ ID NO: 5036041 - DNA, 25 bp, Homo sapien
gagctagtaacaaaaggcgagggtc

SEQ ID NO: 5036042 - DNA, 25 bp, Homo sapien
caatgttacatactgcgacaggtcc

SEQ ID NO: 5036043 - DNA, 25 bp, Homo sapien
gatgcacagttctgaaagtccaggg

SEQ ID NO: 5036044 - DNA, 25 bp, Homo sapien
gacagtcctgcccaacaggttgcca

SEQ ID NO: 5036045 - DNA, 25 bp, Homo sapien
cgcaaggtccgctgagatcatgtgt

SEQ ID NO: 5036046 - DNA, 25 bp, Homo sapien
caggaaatgagaatgccgtgcagac

SEQ ID NO: 5036047 - DNA, 25 bp, Homo sapien
gagccaccgaaacagattccctaag

SEQ ID NO: 5036048 - DNA, 25 bp, Homo sapien
agcaccggagacctggcatcggctg

SEQ ID NO: 5036049 - DNA, 25 bp, Homo sapien
tggcatcggctgattggcaacagat

SEQ ID NO: 5036050 - DNA, 25 bp, Homo sapien
gattggcaacagatccttctctgag

SEQ ID NO: 5036051 - DNA, 25 bp, Homo sapien
gaaggaaccagagatgacccaaccc

SEQ ID NO: 5036052 - DNA, 25 bp, Homo sapien
aataaagtgtcataaagtgtccctt

SEQ ID NO: 5036053 - DNA, 25 bp, Homo sapien
aaagagcggcgtcctgcccaggcct

SEQ ID NO: 5036054 - DNA, 25 bp, Homo sapien
ccttccccaaagagcggcgtcctgc

SEQ ID NO: 5036055 - DNA, 25 bp, Homo sapien
cctcatggccctggggcctcaataa

SEQ ID NO: 5036056 - DNA, 25 bp, Homo sapien
ctggacatcccttttcatggcaaaa

SEQ ID NO: 5036057 - DNA, 25 bp, Homo sapien
agatactggaatactcctgcagtgc

SEQ ID NO: 5036058 - DNA, 25 bp, Homo sapien
catatgcctacccaggtgagccaga

SEQ ID NO: 5036059 - DNA, 25 bp, Homo sapien
agtttgcagcaatctccagcgcctc

SEQ ID NO: 5036060 - DNA, 25 bp, Homo sapien
cttcatggcagtatggaaatggact

SEQ ID NO: 5036061 - DNA, 25 bp, Homo sapien
tcatggcagtatggaaatggactaa

SEQ ID NO: 5036062 - DNA, 25 bp, Homo sapien
ttcttcatggcagtatggaaatgga

SEQ ID NO: 5036063 - DNA, 25 bp, Homo sapien
atttcttcatggcagtatggaaatg

SEQ ID NO: 5036064 - DNA, 25 bp, Homo sapien
ttctgggaccaaatatactaggctt

SEQ ID NO: 5036065 - DNA, 25 bp, Homo sapien
tacagagccaagcagaaaagaacgg

SEQ ID NO: 5036066 - DNA, 25 bp, Homo sapien
aagaacggaaacttgggagcctcag

SEQ ID NO: 5036067 - DNA, 25 bp, Homo sapien
taactgataaaacaagagcccactt

SEQ ID NO: 5036068 - DNA, 25 bp, Homo sapien
actcttgtcgtctgtaggccaggtc

SEQ ID NO: 5036069 - DNA, 25 bp, Homo sapien
ctgatactcttgtcgtctgtaggcc

SEQ ID NO: 5036070 - DNA, 25 bp, Homo sapien
gatactcttgtcgtctgtaggccag

SEQ ID NO: 5036071 - DNA, 25 bp, Homo sapien
atactcttgtcgtctgtaggccagg

SEQ ID NO: 5036072 - DNA, 25 bp, Homo sapien
cttggcgcagtaggacgcgggcggt

SEQ ID NO: 5036073 - DNA, 25 bp, Homo sapien
tccggcctctcctcgaacaccgagt

SEQ ID NO: 5036074 - DNA, 25 bp, Homo sapien
agtcctcgaactcgccgccgaacaa

SEQ ID NO: 5036075 - DNA, 25 bp, Homo sapien
cgaacaaccagcacccggaatccat

SEQ ID NO: 5036076 - DNA, 25 bp, Homo sapien
acttgtagtctttgagggcgacgcg

SEQ ID NO: 5036077 - DNA, 25 bp, Homo sapien
gagctgagatgattatctgacccac

SEQ ID NO: 5036078 - DNA, 25 bp, Homo sapien
tatctgacccactaactgaccgaac

SEQ ID NO: 5036079 - DNA, 25 bp, Homo sapien
ggagtagtggttgagctgagatgat

SEQ ID NO: 5036080 - DNA, 25 bp, Homo sapien
aggagatggacagaatgatccttac

SEQ ID NO: 5036081 - DNA, 25 bp, Homo sapien
tcaggagatggacagaatgatcctt

SEQ ID NO: 5036082 - DNA, 25 bp, Homo sapien
gtgtcaggagatggacagaatgatc

SEQ ID NO: 5036083 - DNA, 25 bp, Homo sapien
ctgtgtcaggagatggacagaatga

SEQ ID NO: 5036084 - DNA, 25 bp, Homo sapien
cactcccccaggtttcagaatccat

SEQ ID NO: 5036085 - DNA, 25 bp, Homo sapien
ctaatccactcccccaggtttcaga

SEQ ID NO: 5036086 - DNA, 25 bp, Homo sapien
aatccactcccccaggtttcagaat

SEQ ID NO: 5036087 - DNA, 25 bp, Homo sapien
tccactcccccaggtttcagaatcc

SEQ ID NO: 5036088 - DNA, 25 bp, Homo sapien
ggtggtgcagcactgtgaatataat

SEQ ID NO: 5036089 - DNA, 25 bp, Homo sapien
tggtgaaggtggtgcagcactgtga

SEQ ID NO: 5036090 - DNA, 25 bp, Homo sapien
taatggttccgagtttctgtctggg

SEQ ID NO: 5036091 - DNA, 25 bp, Homo sapien
tggcaaatagtatgtgatatatatt

SEQ ID NO: 5036092 - DNA, 25 bp, Homo sapien
ggtcacaatcaaccagaagagggtt

SEQ ID NO: 5036093 - DNA, 25 bp, Homo sapien
tattgcaagggaaacaactatattc

SEQ ID NO: 5036094 - DNA, 25 bp, Homo sapien
tatcaggcctataaaagagatgagg

SEQ ID NO: 5036095 - DNA, 25 bp, Homo sapien
taaaagctagcaaacgtcagagaag

SEQ ID NO: 5036096 - DNA, 25 bp, Homo sapien
ttcagtctcctgatacggcaagagt

SEQ ID NO: 5036097 - DNA, 25 bp, Homo sapien
gtgtgtatgccccaaaacgttttca

SEQ ID NO: 5036098 - DNA, 25 bp, Homo sapien
gaaggatccaattattaagggccag

SEQ ID NO: 5036099 - DNA, 25 bp, Homo sapien
acaaagccagctgtctgagtgagga

SEQ ID NO: 5036100 - DNA, 25 bp, Homo sapien
taagggacagtgataccacaaaatc

SEQ ID NO: 5036101 - DNA, 25 bp, Homo sapien
ctaggctttgtgtgcaactcatcta

SEQ ID NO: 5036102 - DNA, 25 bp, Homo sapien
gtcttccataatacactaggctttg

SEQ ID NO: 5036103 - DNA, 25 bp, Homo sapien
tattctcttgagattacctgccaca

SEQ ID NO: 5036104 - DNA, 25 bp, Homo sapien
gggatactcatgcaaaaagccaagg

SEQ ID NO: 5036105 - DNA, 25 bp, Homo sapien
gggctgcacttcaggataaagctgt

SEQ ID NO: 5036106 - DNA, 25 bp, Homo sapien
gatgctatttggactactgacagac

SEQ ID NO: 5036107 - DNA, 25 bp, Homo sapien
tgatttaatcttggctgagtgcaca

SEQ ID NO: 5036108 - DNA, 25 bp, Homo sapien
caaatacaatgttagtgctggtagc

SEQ ID NO: 5036109 - DNA, 25 bp, Homo sapien
catagagattgggtaactttccttc

SEQ ID NO: 5036110 - DNA, 25 bp, Homo sapien
ttgtttgtgaatcccctcaacctgc

SEQ ID NO: 5036111 - DNA, 25 bp, Homo sapien
gacagatgccgcctaagcaaacatg

SEQ ID NO: 5036112 - DNA, 25 bp, Homo sapien
cttgagtaaggaccagaccaggctg

SEQ ID NO: 5036113 - DNA, 25 bp, Homo sapien
cttgcctgaaggacacgaagctgct

SEQ ID NO: 5036114 - DNA, 25 bp, Homo sapien
tattttgacttggaacgcctgccac

SEQ ID NO: 5036115 - DNA, 25 bp, Homo sapien
tcttccaagcataacgggtgtcccc

SEQ ID NO: 5036116 - DNA, 25 bp, Homo sapien
tacattgggatgttccgaatccaca

SEQ ID NO: 5036117 - DNA, 25 bp, Homo sapien
aaggtctggatcttgttcactggca

SEQ ID NO: 5036118 - DNA, 25 bp, Homo sapien
tgtaagcacaggaggaccttcatcc

SEQ ID NO: 5036119 - DNA, 25 bp, Homo sapien
ccgtgctggcagtacttggatgtat

SEQ ID NO: 5036120 - DNA, 25 bp, Homo sapien
aaagcatcgaggcttaaaactgttc

SEQ ID NO: 5036121 - DNA, 25 bp, Homo sapien
ggaaaagctcagtggtgattaaaaa

SEQ ID NO: 5036122 - DNA, 25 bp, Homo sapien
ccatttttgtgctcaacaagtctca

SEQ ID NO: 5036123 - DNA, 25 bp, Homo sapien
taaagagcttattgttggcagataa

SEQ ID NO: 5036124 - DNA, 25 bp, Homo sapien
aactctggattgagccaaggaactt

SEQ ID NO: 5036125 - DNA, 25 bp, Homo sapien
gagccaaggaactttgtatcttcaa

SEQ ID NO: 5036126 - DNA, 25 bp, Homo sapien
ccaaactctggattgagccaaggaa

SEQ ID NO: 5036127 - DNA, 25 bp, Homo sapien
tggattgagccaaggaactttgtat

SEQ ID NO: 5036128 - DNA, 25 bp, Homo sapien
ttgagaaaggcacatttcacacata

SEQ ID NO: 5036129 - DNA, 25 bp, Homo sapien
gtcacacaggtaatgtgccagtgtc

SEQ ID NO: 5036130 - DNA, 25 bp, Homo sapien
acacaggtaatgtgccagtgtcata

SEQ ID NO: 5036131 - DNA, 25 bp, Homo sapien
aaggcacatttcacacataagcatg

SEQ ID NO: 5036132 - DNA, 25 bp, Homo sapien
ggccatcattaccaacaggtccaaa

SEQ ID NO: 5036133 - DNA, 25 bp, Homo sapien
gaagggtatcccttctagttagatg

SEQ ID NO: 5036134 - DNA, 25 bp, Homo sapien
agttagatgtttagctcaggccatc

SEQ ID NO: 5036135 - DNA, 25 bp, Homo sapien
tgaaatggaagggtatcccttctag

SEQ ID NO: 5036136 - DNA, 25 bp, Homo sapien
gaaaagggctgtggaattcctgctc

SEQ ID NO: 5036137 - DNA, 25 bp, Homo sapien
cccaaagttgggacatggcctggcc

SEQ ID NO: 5036138 - DNA, 25 bp, Homo sapien
tcccagggcttcgtcacaatcgtaa

SEQ ID NO: 5036139 - DNA, 25 bp, Homo sapien
ttacagttacccacggaggagagag

SEQ ID NO: 5036140 - DNA, 25 bp, Homo sapien
gcggactctgcgctccagttcccac

SEQ ID NO: 5036141 - DNA, 25 bp, Homo sapien
tcgcggagccggctcgcgccactac

SEQ ID NO: 5036142 - DNA, 25 bp, Homo sapien
ctttcccgtgccggccgcggactct

SEQ ID NO: 5036143 - DNA, 25 bp, Homo sapien
tccgggcccgctggtcgcggagccg

SEQ ID NO: 5036144 - DNA, 25 bp, Homo sapien
ttttcagggagtcaactctgacctg

SEQ ID NO: 5036145 - DNA, 25 bp, Homo sapien
gccgccatcttgcatttcaaaccgg

SEQ ID NO: 5036146 - DNA, 25 bp, Homo sapien
gggagtcaactctgacctgtgaacc

SEQ ID NO: 5036147 - DNA, 25 bp, Homo sapien
ttgcatttcaaaccggctgcacttt

SEQ ID NO: 5036148 - DNA, 25 bp, Homo sapien
aatggccccgccctttgcctgcgac

SEQ ID NO: 5036149 - DNA, 25 bp, Homo sapien
ctgtcaacagaagccccgccccaga

SEQ ID NO: 5036150 - DNA, 25 bp, Homo sapien
ccctagtccggggattggcgcaccg

SEQ ID NO: 5036151 - DNA, 25 bp, Homo sapien
cttcccagggctcgaaatggccccg

SEQ ID NO: 5036152 - DNA, 25 bp, Homo sapien
ttggacgctcgagcgctcctgggcc

SEQ ID NO: 5036153 - DNA, 25 bp, Homo sapien
tgggccccttgacgttcactcccca

SEQ ID NO: 5036154 - DNA, 25 bp, Homo sapien
atcccagtcgcggaccctttgtgca

SEQ ID NO: 5036155 - DNA, 25 bp, Homo sapien
acacgccgggccttggacgctcgag

SEQ ID NO: 5036156 - DNA, 25 bp, Homo sapien
agaggatatagcctgaacagaagcc

SEQ ID NO: 5036157 - DNA, 25 bp, Homo sapien
ttattgctggcagaggatatagcct

SEQ ID NO: 5036158 - DNA, 25 bp, Homo sapien
ttgctggcagaggatatagcctgaa

SEQ ID NO: 5036159 - DNA, 25 bp, Homo sapien
tggcagaggatatagcctgaacaga

SEQ ID NO: 5036160 - DNA, 25 bp, Homo sapien
aaagtcaggaagtgagttctctcct

SEQ ID NO: 5036161 - DNA, 25 bp, Homo sapien
gacctatatgtctaaccttatgcct

SEQ ID NO: 5036162 - DNA, 25 bp, Homo sapien
ttttgggctattcagggtaccttgc

SEQ ID NO: 5036163 - DNA, 25 bp, Homo sapien
cattagctattctcagatagggatc

SEQ ID NO: 5036164 - DNA, 25 bp, Homo sapien
gactggcattgctttatgcattaca

SEQ ID NO: 5036165 - DNA, 25 bp, Homo sapien
cctcaaaaggtttccaacagaagct

SEQ ID NO: 5036166 - DNA, 25 bp, Homo sapien
aaaatgagaatgtgtatctccagga

SEQ ID NO: 5036167 - DNA, 25 bp, Homo sapien
tagatgaccattccttattcccctc

SEQ ID NO: 5036168 - DNA, 25 bp, Homo sapien
tgatactcaagtacagaattgtggt

SEQ ID NO: 5036169 - DNA, 25 bp, Homo sapien
gaagacgagggaatctcaaggcaga

SEQ ID NO: 5036170 - DNA, 25 bp, Homo sapien
gagccctcccgcaaatcatgacttg

SEQ ID NO: 5036171 - DNA, 25 bp, Homo sapien
cactctggcttttaagtgaagacga

SEQ ID NO: 5036172 - DNA, 25 bp, Homo sapien
taaagaatactcgataccatgacat

SEQ ID NO: 5036173 - DNA, 25 bp, Homo sapien
tcatactacatcaattaggcggaca

SEQ ID NO: 5036174 - DNA, 25 bp, Homo sapien
taggcggacatgacaaaaatgactt

SEQ ID NO: 5036175 - DNA, 25 bp, Homo sapien
taaagatgcagggtttcatactaca

SEQ ID NO: 5036176 - DNA, 25 bp, Homo sapien
aactgaagttttctacctcttgctc

SEQ ID NO: 5036177 - DNA, 25 bp, Homo sapien
acaactgaagttttctacctcttgc

SEQ ID NO: 5036178 - DNA, 25 bp, Homo sapien
caactgaagttttctacctcttgct

SEQ ID NO: 5036179 - DNA, 25 bp, Homo sapien
tttatcatggtccttgcgatgccga

SEQ ID NO: 5036180 - DNA, 25 bp, Homo sapien
aataagtgatgttttatcatggtcc

SEQ ID NO: 5036181 - DNA, 25 bp, Homo sapien
tgcgatgccgataaatacattggct

SEQ ID NO: 5036182 - DNA, 25 bp, Homo sapien
aatacattggctgattactgcatac

SEQ ID NO: 5036183 - DNA, 25 bp, Homo sapien
ggttccagatgtaggttcaccgtta

SEQ ID NO: 5036184 - DNA, 25 bp, Homo sapien
tgttggttgaggagataagaccgtt

SEQ ID NO: 5036185 - DNA, 25 bp, Homo sapien
ccctgaggagcttacaaaagtaatt

SEQ ID NO: 5036186 - DNA, 25 bp, Homo sapien
caagtgttacagatatggcaagaag

SEQ ID NO: 5036187 - DNA, 25 bp, Homo sapien
gacagggtttcacactgttggccag

SEQ ID NO: 5036188 - DNA, 25 bp, Homo sapien
ctgcgcccagcctaattttttattt

SEQ ID NO: 5036189 - DNA, 25 bp, Homo sapien
atgagtcactgcgcccagcctaatt

SEQ ID NO: 5036190 - DNA, 25 bp, Homo sapien
ttagtaaagacagggtttcacactg

SEQ ID NO: 5036191 - DNA, 25 bp, Homo sapien
ctgagaaagaattgccaaagccttt

SEQ ID NO: 5036192 - DNA, 25 bp, Homo sapien
gctcatgatccacaacaagtgaggg

SEQ ID NO: 5036193 - DNA, 25 bp, Homo sapien
caaagccttttcaacagtgatgagc

SEQ ID NO: 5036194 - DNA, 25 bp, Homo sapien
cctgggaacgtctagctcgagtcat

SEQ ID NO: 5036195 - DNA, 25 bp, Homo sapien
ttcctgatatcgaagcaagtacctg

SEQ ID NO: 5036196 - DNA, 25 bp, Homo sapien
gcctgaccgtgaagagagacttttc

SEQ ID NO: 5036197 - DNA, 25 bp, Homo sapien
ttttctaaggatatacatctaattg

SEQ ID NO: 5036198 - DNA, 25 bp, Homo sapien
taattgttgtgagagccaggataag

SEQ ID NO: 5036199 - DNA, 25 bp, Homo sapien
tctatggcattctggctatcatcct

SEQ ID NO: 5036200 - DNA, 25 bp, Homo sapien
tgtagtcttcctagagtcttcaagc

SEQ ID NO: 5036201 - DNA, 25 bp, Homo sapien
tatggtgcctaagtaccagtttgac

SEQ ID NO: 5036202 - DNA, 25 bp, Homo sapien
tagaagcatctccattacaagcaat

SEQ ID NO: 5036203 - DNA, 25 bp, Homo sapien
ggataaatagtgagaaaccacagta

SEQ ID NO: 5036204 - DNA, 25 bp, Homo sapien
tgaaaggataaatagtgagaaacca

SEQ ID NO: 5036205 - DNA, 25 bp, Homo sapien
aatagtgagaaaccacagtattttg

SEQ ID NO: 5036206 - DNA, 25 bp, Homo sapien
atagtgagaaaccacagtattttgt

SEQ ID NO: 5036207 - DNA, 25 bp, Homo sapien
ggagtgctgcaagccacaggagtac

SEQ ID NO: 5036208 - DNA, 25 bp, Homo sapien
tggcatcacatggtagtaagacggg

SEQ ID NO: 5036209 - DNA, 25 bp, Homo sapien
cttttatcaccaacaagagtggaat

SEQ ID NO: 5036210 - DNA, 25 bp, Homo sapien
caggagtactcggtgtctttagctt

SEQ ID NO: 5036211 - DNA, 25 bp, Homo sapien
ttatggcataggcagtatctcttaa

SEQ ID NO: 5036212 - DNA, 25 bp, Homo sapien
gtatctcttaaagcacaggctctat

SEQ ID NO: 5036213 - DNA, 25 bp, Homo sapien
caggctctatgcctaataagacgat

SEQ ID NO: 5036214 - DNA, 25 bp, Homo sapien
aagcacaggctctatgcctaataag

SEQ ID NO: 5036215 - DNA, 25 bp, Homo sapien
tagatgcgataggtgaaagcagaag

SEQ ID NO: 5036216 - DNA, 25 bp, Homo sapien
tacaggcacagactgcacatgaagt

SEQ ID NO: 5036217 - DNA, 25 bp, Homo sapien
tagtagtttcctatactaatcaatc

SEQ ID NO: 5036218 - DNA, 25 bp, Homo sapien
caatctaactaacaagcaccaccaa

SEQ ID NO: 5036219 - DNA, 25 bp, Homo sapien
tactgattacagatgaaaggtccat

SEQ ID NO: 5036220 - DNA, 25 bp, Homo sapien
tacagattagatcaatatctctcaa

SEQ ID NO: 5036221 - DNA, 25 bp, Homo sapien
cacagtcagatacttgtgtagatca

SEQ ID NO: 5036222 - DNA, 25 bp, Homo sapien
tctggattgtattctaaggcattac

SEQ ID NO: 5036223 - DNA, 25 bp, Homo sapien
ttattacagtgacataatcaggaac

SEQ ID NO: 5036224 - DNA, 25 bp, Homo sapien
gttgctttattacagtgacataatc

SEQ ID NO: 5036225 - DNA, 25 bp, Homo sapien
tggttgctttattacagtgacataa

SEQ ID NO: 5036226 - DNA, 25 bp, Homo sapien
ctttattacagtgacataatcagga

SEQ ID NO: 5036227 - DNA, 25 bp, Homo sapien
gcaagcctatgtgtaacatttctta

SEQ ID NO: 5036228 - DNA, 25 bp, Homo sapien
ggtggtgctactgggagtacctcca

SEQ ID NO: 5036229 - DNA, 25 bp, Homo sapien
cactcggaatcgcttgtcaatagca

SEQ ID NO: 5036230 - DNA, 25 bp, Homo sapien
tagtcgtttcacttcttctgctgtc

SEQ ID NO: 5036231 - DNA, 25 bp, Homo sapien
aaatctctccataatcacggataaa

SEQ ID NO: 5036232 - DNA, 25 bp, Homo sapien
taatcacggataaacaattcttgca

SEQ ID NO: 5036233 - DNA, 25 bp, Homo sapien
tctttatccggtaactggacattaa

SEQ ID NO: 5036234 - DNA, 25 bp, Homo sapien
ttttgatataggaggcttagcagct

SEQ ID NO: 5036235 - DNA, 25 bp, Homo sapien
agtgctacaattacacgcatatgcc

SEQ ID NO: 5036236 - DNA, 25 bp, Homo sapien
ccagaaggtaagtgtgggctacaag

SEQ ID NO: 5036237 - DNA, 25 bp, Homo sapien
cgtgcctggtcctgatacttaaaag

SEQ ID NO: 5036238 - DNA, 25 bp, Homo sapien
aaactcagtggactgctggtaagaa

SEQ ID NO: 5036239 - DNA, 25 bp, Homo sapien
tcacaaacgtcaggaggtgaagatg

SEQ ID NO: 5036240 - DNA, 25 bp, Homo sapien
tataacagaagttaccgagggctgt

SEQ ID NO: 5036241 - DNA, 25 bp, Homo sapien
cccaaacgtctgtcaccagatgaat

SEQ ID NO: 5036242 - DNA, 25 bp, Homo sapien
tgcccaacattgtaaatgcacttaa

SEQ ID NO: 5036243 - DNA, 25 bp, Homo sapien
tgagtgtttgaatgactgcatagca

SEQ ID NO: 5036244 - DNA, 25 bp, Homo sapien
ttaatagccctaatgaatataccat

SEQ ID NO: 5036245 - DNA, 25 bp, Homo sapien
gacaaacttgccaatgtaatcaacc

SEQ ID NO: 5036246 - DNA, 25 bp, Homo sapien
cctgcctagtattgttaaagtgagt

SEQ ID NO: 5036247 - DNA, 25 bp, Homo sapien
tactgaggccttacctagcctattt

SEQ ID NO: 5036248 - DNA, 25 bp, Homo sapien
cctagcctatttaacactgtaacct

SEQ ID NO: 5036249 - DNA, 25 bp, Homo sapien
ctgtaacctacccatactcttttgg

SEQ ID NO: 5036250 - DNA, 25 bp, Homo sapien
ttaacactgtaacctacccatactc

SEQ ID NO: 5036251 - DNA, 25 bp, Homo sapien
gaaaaaccatgcagctcttaaagag

SEQ ID NO: 5036252 - DNA, 25 bp, Homo sapien
cagaagcagtatggccttttgttca

SEQ ID NO: 5036253 - DNA, 25 bp, Homo sapien
tattggcagttgtctaaattggcac

SEQ ID NO: 5036254 - DNA, 25 bp, Homo sapien
tacaaggatgctcactgtaagagtc

SEQ ID NO: 5036255 - DNA, 25 bp, Homo sapien
ggcatataataccatttttcaagag

SEQ ID NO: 5036256 - DNA, 25 bp, Homo sapien
actgcacccggcatataataccatt

SEQ ID NO: 5036257 - DNA, 25 bp, Homo sapien
gttaccaatggtatatttgataaga

SEQ ID NO: 5036258 - DNA, 25 bp, Homo sapien
taccatcttgcccaatgagcacata

SEQ ID NO: 5036259 - DNA, 25 bp, Homo sapien
gaaagtataatgataccgccccaca

SEQ ID NO: 5036260 - DNA, 25 bp, Homo sapien
taagttatgattattgtggtagaaa

SEQ ID NO: 5036261 - DNA, 25 bp, Homo sapien
agtataatgataccgccccacataa

SEQ ID NO: 5036262 - DNA, 25 bp, Homo sapien
tttttgaaagtataatgataccgcc

SEQ ID NO: 5036263 - DNA, 25 bp, Homo sapien
gaggaacatacactatacttggtgc

SEQ ID NO: 5036264 - DNA, 25 bp, Homo sapien
caccacacgtggatatgaggaacat

SEQ ID NO: 5036265 - DNA, 25 bp, Homo sapien
cagaagttgcaagtagtaaaactgg

SEQ ID NO: 5036266 - DNA, 25 bp, Homo sapien
taaatgtggctttaagtgtcggtcc

SEQ ID NO: 5036267 - DNA, 25 bp, Homo sapien
ggatgtagtactaactccaaaaaga

SEQ ID NO: 5036268 - DNA, 25 bp, Homo sapien
ggtgccaagtgagaaccttgcccaa

SEQ ID NO: 5036269 - DNA, 25 bp, Homo sapien
tgtatatacagtaaacttttccaaa

SEQ ID NO: 5036270 - DNA, 25 bp, Homo sapien
tccaaagcatgaatgacagctggtg

SEQ ID NO: 5036271 - DNA, 25 bp, Homo sapien
cataaactgatggaacatcatcatc

SEQ ID NO: 5036272 - DNA, 25 bp, Homo sapien
tcatcatcactgtaagccaagtcac

SEQ ID NO: 5036273 - DNA, 25 bp, Homo sapien
tttcataaactgatggaacatcatc

SEQ ID NO: 5036274 - DNA, 25 bp, Homo sapien
tcataaactgatggaacatcatcat

SEQ ID NO: 5036275 - DNA, 25 bp, Homo sapien
ttttgcaggagtggtttcacaacgg

SEQ ID NO: 5036276 - DNA, 25 bp, Homo sapien
ttcacaacggtggacagtgcctgcc

SEQ ID NO: 5036277 - DNA, 25 bp, Homo sapien
taattgaagagagatccaactgcag

SEQ ID NO: 5036278 - DNA, 25 bp, Homo sapien
tgcatagctacctcgaaatccttag

SEQ ID NO: 5036279 - DNA, 25 bp, Homo sapien
attgatttaatatctgctccacagt

SEQ ID NO: 5036280 - DNA, 25 bp, Homo sapien
agcgtcgtcgtaaagcacataaagc

SEQ ID NO: 5036281 - DNA, 25 bp, Homo sapien
gatttaatatctgctccacagtatc

SEQ ID NO: 5036282 - DNA, 25 bp, Homo sapien
ctgtgggtagcgtcgtcgtaaagca

SEQ ID NO: 5036283 - DNA, 25 bp, Homo sapien
ccagccgaccaaacaaagaaacaca

SEQ ID NO: 5036284 - DNA, 25 bp, Homo sapien
agtggtttgggattccaatccctgg

SEQ ID NO: 5036285 - DNA, 25 bp, Homo sapien
cctggtgtgaatctttagaatctct

SEQ ID NO: 5036286 - DNA, 25 bp, Homo sapien
ccagtggtttgggattccaatccct

SEQ ID NO: 5036287 - DNA, 25 bp, Homo sapien
tccctggtgtgaatctttagaatct

SEQ ID NO: 5036288 - DNA, 25 bp, Homo sapien
gagctagcagggtggaaacaataga

SEQ ID NO: 5036289 - DNA, 25 bp, Homo sapien
tctagcctgttcgtagcaccaatga

SEQ ID NO: 5036290 - DNA, 25 bp, Homo sapien
aaagaggaattctctatcaaagcga

SEQ ID NO: 5036291 - DNA, 25 bp, Homo sapien
ggccttcgtaaagcaggatctatag

SEQ ID NO: 5036292 - DNA, 25 bp, Homo sapien
ggagagctgtcctgtacgtgtaaga

SEQ ID NO: 5036293 - DNA, 25 bp, Homo sapien
ctattatatccccacaggaggcacc

SEQ ID NO: 5036294 - DNA, 25 bp, Homo sapien
tggcatcatccctggttaaaaaacg

SEQ ID NO: 5036295 - DNA, 25 bp, Homo sapien
caatcagtgggttgagtttcggtca

SEQ ID NO: 5036296 - DNA, 25 bp, Homo sapien
tactggattgtgattgcttctaggc

SEQ ID NO: 5036297 - DNA, 25 bp, Homo sapien
tcagtgttacaatccgccatctctc

SEQ ID NO: 5036298 - DNA, 25 bp, Homo sapien
gcttctaggcctgtttaaagtgtcc

SEQ ID NO: 5036299 - DNA, 25 bp, Homo sapien
ctatcagggtttcaggtcaagtggg

SEQ ID NO: 5036300 - DNA, 25 bp, Homo sapien
gttgaagtgccatcaagcaagtttt

SEQ ID NO: 5036301 - DNA, 25 bp, Homo sapien
gaagaaacgttgaagtgccatcaag

SEQ ID NO: 5036302 - DNA, 25 bp, Homo sapien
gaaataggaagaaacgttgaagtgc

SEQ ID NO: 5036303 - DNA, 25 bp, Homo sapien
tatatactggggttctactaccaaa

SEQ ID NO: 5036304 - DNA, 25 bp, Homo sapien
tgtgaatctgatcttgcctgcttga

SEQ ID NO: 5036305 - DNA, 25 bp, Homo sapien
aaaataattgatgggcgcatctgat

SEQ ID NO: 5036306 - DNA, 25 bp, Homo sapien
tcttgcctgcttgaccgtactggag

SEQ ID NO: 5036307 - DNA, 25 bp, Homo sapien
cgtactggagccagaccatcaattt

SEQ ID NO: 5036308 - DNA, 25 bp, Homo sapien
gattctcctacccatttacttagac

SEQ ID NO: 5036309 - DNA, 25 bp, Homo sapien
ccatttacttagacaatcagcacct

SEQ ID NO: 5036310 - DNA, 25 bp, Homo sapien
agtgctctggcaaccagagtctttc

SEQ ID NO: 5036311 - DNA, 25 bp, Homo sapien
ccccttgactgcactcattggcaag

SEQ ID NO: 5036312 - DNA, 25 bp, Homo sapien
tggataaagtaatggaaacaccacc

SEQ ID NO: 5036313 - DNA, 25 bp, Homo sapien
gataaagtaatggaaacaccaccat

SEQ ID NO: 5036314 - DNA, 25 bp, Homo sapien
ttctggataaagtaatggaaacacc

SEQ ID NO: 5036315 - DNA, 25 bp, Homo sapien
taaagtaatggaaacaccaccatct

SEQ ID NO: 5036316 - DNA, 25 bp, Homo sapien
ggccaccaacactatcaaatcgtac

SEQ ID NO: 5036317 - DNA, 25 bp, Homo sapien
aggccaccaacactatcaaatcgta

SEQ ID NO: 5036318 - DNA, 25 bp, Homo sapien
tcattcgatctttataaatgccttt

SEQ ID NO: 5036319 - DNA, 25 bp, Homo sapien
ggcttgctccaattttcattcgatc

SEQ ID NO: 5036320 - DNA, 25 bp, Homo sapien
tgaagaatctagttgcattggatca

SEQ ID NO: 5036321 - DNA, 25 bp, Homo sapien
gatcaacatcggcaaggcttgctcc

SEQ ID NO: 5036322 - DNA, 25 bp, Homo sapien
gaggaagatgaagtcgagtcactac

SEQ ID NO: 5036323 - DNA, 25 bp, Homo sapien
gatagccctattacgactccttttc

SEQ ID NO: 5036324 - DNA, 25 bp, Homo sapien
tcgagtcactactgtggattgcatg

SEQ ID NO: 5036325 - DNA, 25 bp, Homo sapien
tattgatagccctattacgactcct

SEQ ID NO: 5036326 - DNA, 25 bp, Homo sapien
tgcattctatacattactatactga

SEQ ID NO: 5036327 - DNA, 25 bp, Homo sapien
ctgtcattgatagtgtcagaattca

SEQ ID NO: 5036328 - DNA, 25 bp, Homo sapien
tacagttagggccagtgtggcttcc

SEQ ID NO: 5036329 - DNA, 25 bp, Homo sapien
tagtaggctcaatttacagttaggg

SEQ ID NO: 5036330 - DNA, 25 bp, Homo sapien
tggtcctgcggaagataatcggtat

SEQ ID NO: 5036331 - DNA, 25 bp, Homo sapien
ataatcggtatcttggtcttgcagg

SEQ ID NO: 5036332 - DNA, 25 bp, Homo sapien
cactataaaatatgttgggctttct

SEQ ID NO: 5036333 - DNA, 25 bp, Homo sapien
ctgttcattcgtttacagtaaggac

SEQ ID NO: 5036334 - DNA, 25 bp, Homo sapien
ccaatggagcctgatagtaaacagt

SEQ ID NO: 5036335 - DNA, 25 bp, Homo sapien
ttccaatggagcctgatagtaaaca

SEQ ID NO: 5036336 - DNA, 25 bp, Homo sapien
tttctctgtctaagataatatcgct

SEQ ID NO: 5036337 - DNA, 25 bp, Homo sapien
aagataatatcgcttctgattctct

SEQ ID NO: 5036338 - DNA, 25 bp, Homo sapien
cttggtcttcaccctcttcagatga

SEQ ID NO: 5036339 - DNA, 25 bp, Homo sapien
tggtcttcaccctcttcagatgact

SEQ ID NO: 5036340 - DNA, 25 bp, Homo sapien
ttggtcttcaccctcttcagatgac

SEQ ID NO: 5036341 - DNA, 25 bp, Homo sapien
cctcttgtgtacatattaagattgc

SEQ ID NO: 5036342 - DNA, 25 bp, Homo sapien
ctgttttcctcttgtgtacatatta

SEQ ID NO: 5036343 - DNA, 25 bp, Homo sapien
gccttcttgattatcagttgtttct

SEQ ID NO: 5036344 - DNA, 25 bp, Homo sapien
cacactgccttcttgattatcagtt

SEQ ID NO: 5036345 - DNA, 25 bp, Homo sapien
tggatcctccaatcttgtttaaaat

SEQ ID NO: 5036346 - DNA, 25 bp, Homo sapien
aactcttacatttccagcagtaact

SEQ ID NO: 5036347 - DNA, 25 bp, Homo sapien
ccagcagtaactaatgactgatcaa

SEQ ID NO: 5036348 - DNA, 25 bp, Homo sapien
gatatttacagccataaactcttac

SEQ ID NO: 5036349 - DNA, 25 bp, Homo sapien
tgtttcattaaacactcccaagtct

SEQ ID NO: 5036350 - DNA, 25 bp, Homo sapien
tttcattaaacactcccaagtcttc

SEQ ID NO: 5036351 - DNA, 25 bp, Homo sapien
tacaccactataacgacttctaatc

SEQ ID NO: 5036352 - DNA, 25 bp, Homo sapien
gacgcacttcaacatcaccattatc

SEQ ID NO: 5036353 - DNA, 25 bp, Homo sapien
taagtttgtcaaacagcatggactg

SEQ ID NO: 5036354 - DNA, 25 bp, Homo sapien
gacttctaatcctacaacttcgacg

SEQ ID NO: 5036355 - DNA, 25 bp, Homo sapien
ttttttttatcagcctgctgtctgg

SEQ ID NO: 5036356 - DNA, 25 bp, Homo sapien
tctttttttttatcagcctgctgtc

SEQ ID NO: 5036357 - DNA, 25 bp, Homo sapien
ttttatcagcctgctgtctggccaa

SEQ ID NO: 5036358 - DNA, 25 bp, Homo sapien
ttatcagcctgctgtctggccaact

SEQ ID NO: 5036359 - DNA, 25 bp, Homo sapien
ttagattaattcaaaataattgaca

SEQ ID NO: 5036360 - DNA, 25 bp, Homo sapien
tagattaattcaaaataattgacat

SEQ ID NO: 5036361 - DNA, 25 bp, Homo sapien
attagattaattcaaaataattgac

SEQ ID NO: 5036362 - DNA, 25 bp, Homo sapien
tgtaaaatgcctgccattagcaagt

SEQ ID NO: 5036363 - DNA, 25 bp, Homo sapien
tctcaaaactagaatctgaagaatt

SEQ ID NO: 5036364 - DNA, 25 bp, Homo sapien
gcaagttgctccgttatttccacat

SEQ ID NO: 5036365 - DNA, 25 bp, Homo sapien
gcacgtgtccggtggtaggtttcaa

SEQ ID NO: 5036366 - DNA, 25 bp, Homo sapien
tacaagttagtatctagaaaaacca

SEQ ID NO: 5036367 - DNA, 25 bp, Homo sapien
acaaatatcagcaatgtctatgaag

SEQ ID NO: 5036368 - DNA, 25 bp, Homo sapien
tgtatctccccaagaaactacaagt

SEQ ID NO: 5036369 - DNA, 25 bp, Homo sapien
ccaaagagtattctctgattacaag

SEQ ID NO: 5036370 - DNA, 25 bp, Homo sapien
catacaccgctctgagatcatatag

SEQ ID NO: 5036371 - DNA, 25 bp, Homo sapien
tagactagaggctaagttaatgggc

SEQ ID NO: 5036372 - DNA, 25 bp, Homo sapien
tagaggttctgtcataaagtattcc

SEQ ID NO: 5036373 - DNA, 25 bp, Homo sapien
aagtattccaaagttcatacaccgc

SEQ ID NO: 5036374 - DNA, 25 bp, Homo sapien
gactctcccctagcaatgtcttcag

SEQ ID NO: 5036375 - DNA, 25 bp, Homo sapien
gcaagagtatgtaataagcacccat

SEQ ID NO: 5036376 - DNA, 25 bp, Homo sapien
cagacacatgaactaattgggtggg

SEQ ID NO: 5036377 - DNA, 25 bp, Homo sapien
tgcaaccgatacacaaaaacacagt

SEQ ID NO: 5036378 - DNA, 25 bp, Homo sapien
cattacagctatacaggtttccact

SEQ ID NO: 5036379 - DNA, 25 bp, Homo sapien
tatttttctactgttattgatgagc

SEQ ID NO: 5036380 - DNA, 25 bp, Homo sapien
ctatttttctactgttattgatgag

SEQ ID NO: 5036381 - DNA, 25 bp, Homo sapien
attacagctatacaggtttccactg

SEQ ID NO: 5036382 - DNA, 25 bp, Homo sapien
aaggtggggcataatatatatatca

SEQ ID NO: 5036383 - DNA, 25 bp, Homo sapien
taaagagaactgactgttgagggaa

SEQ ID NO: 5036384 - DNA, 25 bp, Homo sapien
aaagagaactgactgttgagggaag

SEQ ID NO: 5036385 - DNA, 25 bp, Homo sapien
aaataaagagaactgactgttgagg

SEQ ID NO: 5036386 - DNA, 25 bp, Homo sapien
tatggcttgaaccagcatggcaaca

SEQ ID NO: 5036387 - DNA, 25 bp, Homo sapien
gagtggccattaactaaaactgacg

SEQ ID NO: 5036388 - DNA, 25 bp, Homo sapien
cactggatgtgaggagtcaacaaca

SEQ ID NO: 5036389 - DNA, 25 bp, Homo sapien
tggcaacactggaggacatataaag

SEQ ID NO: 5036390 - DNA, 25 bp, Homo sapien
acgtttatggcgcagacagaaagca

SEQ ID NO: 5036391 - DNA, 25 bp, Homo sapien
ccccaacgtttatggcgcagacaga

SEQ ID NO: 5036392 - DNA, 25 bp, Homo sapien
gtttatggcgcagacagaaagcagt

SEQ ID NO: 5036393 - DNA, 25 bp, Homo sapien
cagtcaggggatgcgtgttgcctcc

SEQ ID NO: 5036394 - DNA, 25 bp, Homo sapien
gcactccgctgtggcgggcttcgat

SEQ ID NO: 5036395 - DNA, 25 bp, Homo sapien
tccgatcccgagagcttccatttta

SEQ ID NO: 5036396 - DNA, 25 bp, Homo sapien
gaccaaatgcttagtcctctcccgg

SEQ ID NO: 5036397 - DNA, 25 bp, Homo sapien
ggcttcgatttcctcttgcgtaaaa

SEQ ID NO: 5036398 - DNA, 25 bp, Homo sapien
gctccaagctgctgcggagaaccac

SEQ ID NO: 5036399 - DNA, 25 bp, Homo sapien
ccgcggagtggttgtgcagctccaa

SEQ ID NO: 5036400 - DNA, 25 bp, Homo sapien
tccggccgatgtgctccagactgag

SEQ ID NO: 5036401 - DNA, 25 bp, Homo sapien
tggtcgccgcgggtttcttctgcgc

SEQ ID NO: 5036402 - DNA, 25 bp, Homo sapien
gtgcgcgaccggagagagatccagc

SEQ ID NO: 5036403 - DNA, 25 bp, Homo sapien
tggcctcggcgtgcgcgaccggaga

SEQ ID NO: 5036404 - DNA, 25 bp, Homo sapien
tccctactggcctcggcgtgcgcga

SEQ ID NO: 5036405 - DNA, 25 bp, Homo sapien
cttctctccctactggcctcggcgt

SEQ ID NO: 5036406 - DNA, 25 bp, Homo sapien
tcccatttgtagagcgaaggaggcc

SEQ ID NO: 5036407 - DNA, 25 bp, Homo sapien
tatagaggacctgagcggagagtcc

SEQ ID NO: 5036408 - DNA, 25 bp, Homo sapien
tagaacagcaggctcgaaactctcc

SEQ ID NO: 5036409 - DNA, 25 bp, Homo sapien
gaacacaggccgacagtatagagga

SEQ ID NO: 5036410 - DNA, 25 bp, Homo sapien
gctgagtgcagaagcgtggattttc

SEQ ID NO: 5036411 - DNA, 25 bp, Homo sapien
ggaaagcgtcctcgatgcggtcata

SEQ ID NO: 5036412 - DNA, 25 bp, Homo sapien
ttttcgagccaatagctacaggcct

SEQ ID NO: 5036413 - DNA, 25 bp, Homo sapien
cggagattcacagcaaagcgccatt

SEQ ID NO: 5036414 - DNA, 25 bp, Homo sapien
ccatggcccattgctctgtgaatct

SEQ ID NO: 5036415 - DNA, 25 bp, Homo sapien
cccataaaaggtgcccataaaatgt

SEQ ID NO: 5036416 - DNA, 25 bp, Homo sapien
atgcccataaaaggtgcccataaaa

SEQ ID NO: 5036417 - DNA, 25 bp, Homo sapien
ggccatggcccattgctctgtgaat

SEQ ID NO: 5036418 - DNA, 25 bp, Homo sapien
ctagaggtcctcaaagatgtctttg

SEQ ID NO: 5036419 - DNA, 25 bp, Homo sapien
ctgtactctcttactctcttgaaag

SEQ ID NO: 5036420 - DNA, 25 bp, Homo sapien
actctcttactctcttgaaagccct

SEQ ID NO: 5036421 - DNA, 25 bp, Homo sapien
tgtactctcttactctcttgaaagc

SEQ ID NO: 5036422 - DNA, 25 bp, Homo sapien
tactctcttactctcttgaaagccc

SEQ ID NO: 5036423 - DNA, 25 bp, Homo sapien
tggctatgatactgccacacgcaaa

SEQ ID NO: 5036424 - DNA, 25 bp, Homo sapien
ggctatgatactgccacacgcaaag

SEQ ID NO: 5036425 - DNA, 25 bp, Homo sapien
attggctatgatactgccacacgca

SEQ ID NO: 5036426 - DNA, 25 bp, Homo sapien
ctatgatactgccacacgcaaagct

SEQ ID NO: 5036427 - DNA, 25 bp, Homo sapien
tggtctccacttagggcttcagcag

SEQ ID NO: 5036428 - DNA, 25 bp, Homo sapien
gccttggtctccacttagggcttca

SEQ ID NO: 5036429 - DNA, 25 bp, Homo sapien
tcagccttggtctccacttagggct

SEQ ID NO: 5036430 - DNA, 25 bp, Homo sapien
ttggtctccacttagggcttcagca

SEQ ID NO: 5036431 - DNA, 25 bp, Homo sapien
tggtgagggaaagatggtgattgag

SEQ ID NO: 5036432 - DNA, 25 bp, Homo sapien
agatggtgattgagtccatgcacac

SEQ ID NO: 5036433 - DNA, 25 bp, Homo sapien
agggaaagatggtgattgagtccat

SEQ ID NO: 5036434 - DNA, 25 bp, Homo sapien
gaaagatggtgattgagtccatgca

SEQ ID NO: 5036435 - DNA, 25 bp, Homo sapien
cgtccctgccgccatggctgcttgg

SEQ ID NO: 5036436 - DNA, 25 bp, Homo sapien
ctccgtccctgccgccatggctgct

SEQ ID NO: 5036437 - DNA, 25 bp, Homo sapien
gtccctgccgccatggctgcttggt

SEQ ID NO: 5036438 - DNA, 25 bp, Homo sapien
tgccgccatggctgcttggttcgtg

SEQ ID NO: 5036439 - DNA, 25 bp, Homo sapien
tgggcactgtcggtgacttgcacag

SEQ ID NO: 5036440 - DNA, 25 bp, Homo sapien
cactgtcggtgacttgcacagagga

SEQ ID NO: 5036441 - DNA, 25 bp, Homo sapien
ggtgacttgcacagaggagtcagtc

SEQ ID NO: 5036442 - DNA, 25 bp, Homo sapien
cttgcacagaggagtcagtccacat

SEQ ID NO: 5036443 - DNA, 25 bp, Homo sapien
gaaatatgtaactggctagagtggc

SEQ ID NO: 5036444 - DNA, 25 bp, Homo sapien
ctctttgccgtctgtccatttgggc

SEQ ID NO: 5036445 - DNA, 25 bp, Homo sapien
gtctgtccatttgggcatgggatcc

SEQ ID NO: 5036446 - DNA, 25 bp, Homo sapien
gccgtctgtccatttgggcatggga

SEQ ID NO: 5036447 - DNA, 25 bp, Homo sapien
tccatttgggcatgggatccaagcc

SEQ ID NO: 5036448 - DNA, 25 bp, Homo sapien
tgagtggaggaggattatggcgcat

SEQ ID NO: 5036449 - DNA, 25 bp, Homo sapien
tatgggttataatcgaacactgtca

SEQ ID NO: 5036450 - DNA, 25 bp, Homo sapien
tggacttaggaaccaagatcttggc

SEQ ID NO: 5036451 - DNA, 25 bp, Homo sapien
cattaggagcttaaacaggttggct

SEQ ID NO: 5036452 - DNA, 25 bp, Homo sapien
tctttgccccaaccatggaattgat

SEQ ID NO: 5036453 - DNA, 25 bp, Homo sapien
ccccagttgcgttgatagccttgag

SEQ ID NO: 5036454 - DNA, 25 bp, Homo sapien
gagccctcccatggttcctgtgatt

SEQ ID NO: 5036455 - DNA, 25 bp, Homo sapien
ctgaatccccagttgcgttgatagc

SEQ ID NO: 5036456 - DNA, 25 bp, Homo sapien
ccctggtaatctggatatgaaaccc

SEQ ID NO: 5036457 - DNA, 25 bp, Homo sapien
gaatatcaggaggatactcaatgcc

SEQ ID NO: 5036458 - DNA, 25 bp, Homo sapien
ctgggaatggaatgagtaggatcaa

SEQ ID NO: 5036459 - DNA, 25 bp, Homo sapien
gataaaccctgtatggaggtggctg

SEQ ID NO: 5036460 - DNA, 25 bp, Homo sapien
gaggtggctggctccaactattgaa

SEQ ID NO: 5036461 - DNA, 25 bp, Homo sapien
cgtatctggcggtcaaaataagtct

SEQ ID NO: 5036462 - DNA, 25 bp, Homo sapien
catggacagaggctgacaccgcttg

SEQ ID NO: 5036463 - DNA, 25 bp, Homo sapien
tgtctagcttttgcactgccacgta

SEQ ID NO: 5036464 - DNA, 25 bp, Homo sapien
tgccacgtatctggcggtcaaaata

SEQ ID NO: 5036465 - DNA, 25 bp, Homo sapien
gattttaggccagcatccagtcaga

SEQ ID NO: 5036466 - DNA, 25 bp, Homo sapien
gagaatgaacatccgctgggctaga

SEQ ID NO: 5036467 - DNA, 25 bp, Homo sapien
tactcatcgtgaaaggcagacgctc

SEQ ID NO: 5036468 - DNA, 25 bp, Homo sapien
ggaaacgttaacagccacatgccca

SEQ ID NO: 5036469 - DNA, 25 bp, Homo sapien
gacagtccacagcaggcaatgtttc

SEQ ID NO: 5036470 - DNA, 25 bp, Homo sapien
cagagatcaccagttggtggcaaca

SEQ ID NO: 5036471 - DNA, 25 bp, Homo sapien
aatgtttctgcgactgcaaacctga

SEQ ID NO: 5036472 - DNA, 25 bp, Homo sapien
cctgaaggcgacgaggagtttctac

SEQ ID NO: 5036473 - DNA, 25 bp, Homo sapien
gtcaaaagttccagagctctctcag

SEQ ID NO: 5036474 - DNA, 25 bp, Homo sapien
taatggttcgtgaccttccaaagct

SEQ ID NO: 5036475 - DNA, 25 bp, Homo sapien
tggagaaattctggcgtagcacaaa

SEQ ID NO: 5036476 - DNA, 25 bp, Homo sapien
tgaggagcactaaacagtaggttcc

SEQ ID NO: 5036477 - DNA, 25 bp, Homo sapien
taactctaaggagggccctgtttgc

SEQ ID NO: 5036478 - DNA, 25 bp, Homo sapien
cccagcccggaagcaagtttaagat

SEQ ID NO: 5036479 - DNA, 25 bp, Homo sapien
cacatgcgttgtcagagagggcact

SEQ ID NO: 5036480 - DNA, 25 bp, Homo sapien
tatttgcctcgtaagatccccttgg

SEQ ID NO: 5036481 - DNA, 25 bp, Homo sapien
cctagggaactataagagagtttct

SEQ ID NO: 5036482 - DNA, 25 bp, Homo sapien
ccattttcaccgctgaaatagaatt

SEQ ID NO: 5036483 - DNA, 25 bp, Homo sapien
cacattgtaaacaaagcgtcctatt

SEQ ID NO: 5036484 - DNA, 25 bp, Homo sapien
gagtttctgtgaccattaagaggac

SEQ ID NO: 5036485 - DNA, 25 bp, Homo sapien
tgtcctctccatgacttatctctga

SEQ ID NO: 5036486 - DNA, 25 bp, Homo sapien
taccaattctagtgagaagttcaca

SEQ ID NO: 5036487 - DNA, 25 bp, Homo sapien
gcttttccataccaattctagtgag

SEQ ID NO: 5036488 - DNA, 25 bp, Homo sapien
tatctctgaagtttcgagccaatgt

SEQ ID NO: 5036489 - DNA, 25 bp, Homo sapien
tgaagtgtccaaatgccatattccc

SEQ ID NO: 5036490 - DNA, 25 bp, Homo sapien
gtgtccaaatgccatattcccagct

SEQ ID NO: 5036491 - DNA, 25 bp, Homo sapien
aagtgtccaaatgccatattcccag

SEQ ID NO: 5036492 - DNA, 25 bp, Homo sapien
aatgaagtgtccaaatgccatattc

SEQ ID NO: 5036493 - DNA, 25 bp, Homo sapien
tattggcagtgcacggatggtcagt

SEQ ID NO: 5036494 - DNA, 25 bp, Homo sapien
acttgaacaagttgataaagtcctg

SEQ ID NO: 5036495 - DNA, 25 bp, Homo sapien
ctctgggttattggcagtgcacgga

SEQ ID NO: 5036496 - DNA, 25 bp, Homo sapien
agctctctgggttattggcagtgca

SEQ ID NO: 5036497 - DNA, 25 bp, Homo sapien
gaatcagtttaccctcactttcagc

SEQ ID NO: 5036498 - DNA, 25 bp, Homo sapien
atcagtttaccctcactttcagctg

SEQ ID NO: 5036499 - DNA, 25 bp, Homo sapien
aatcagtttaccctcactttcagct

SEQ ID NO: 5036500 - DNA, 25 bp, Homo sapien
ctgacagaattaatcgtttgcggat

SEQ ID NO: 5036501 - DNA, 25 bp, Homo sapien
ctctttccttgggtaacatcggaca

SEQ ID NO: 5036502 - DNA, 25 bp, Homo sapien
aatccagctgccctttgtctgacag

SEQ ID NO: 5036503 - DNA, 25 bp, Homo sapien
tccaggaaaggatgtgacagtgttt

SEQ ID NO: 5036504 - DNA, 25 bp, Homo sapien
gcatgatgttcagttgtaggcacaa

SEQ ID NO: 5036505 - DNA, 25 bp, Homo sapien
ccgtcgctcagcctctgcatgatgt

SEQ ID NO: 5036506 - DNA, 25 bp, Homo sapien
agccggtcttcgctgagcacgtgca

SEQ ID NO: 5036507 - DNA, 25 bp, Homo sapien
ggcaggtcagtgaaggtgaggcctt

SEQ ID NO: 5036508 - DNA, 25 bp, Homo sapien
agagagaagggtgacaataggtggg

SEQ ID NO: 5036509 - DNA, 25 bp, Homo sapien
agagaagggtgacaataggtggggg

SEQ ID NO: 5036510 - DNA, 25 bp, Homo sapien
cagagagaagggtgacaataggtgg

SEQ ID NO: 5036511 - DNA, 25 bp, Homo sapien
tgcagagagaagggtgacaataggt

SEQ ID NO: 5036512 - DNA, 25 bp, Homo sapien
cagtggagaatcgtctccatccgat

SEQ ID NO: 5036513 - DNA, 25 bp, Homo sapien
ctgccagtggagaatcgtctccatc

SEQ ID NO: 5036514 - DNA, 25 bp, Homo sapien
gagaatcgtctccatccgatacacc

SEQ ID NO: 5036515 - DNA, 25 bp, Homo sapien
tggagaatcgtctccatccgataca

SEQ ID NO: 5036516 - DNA, 25 bp, Homo sapien
atgttcccgaccagcacagacttgc

SEQ ID NO: 5036517 - DNA, 25 bp, Homo sapien
cccgaccagcacagacttgccgact

SEQ ID NO: 5036518 - DNA, 25 bp, Homo sapien
taatgttcccgaccagcacagactt

SEQ ID NO: 5036519 - DNA, 25 bp, Homo sapien
gttaatgttcccgaccagcacagac

SEQ ID NO: 5036520 - DNA, 25 bp, Homo sapien
agtagttcccttattagtctaatgt

SEQ ID NO: 5036521 - DNA, 25 bp, Homo sapien
ctttggaccagtgtacataaggatg

SEQ ID NO: 5036522 - DNA, 25 bp, Homo sapien
tacataaggatgtgtagagggtctg

SEQ ID NO: 5036523 - DNA, 25 bp, Homo sapien
ctaatgttttgctggtcttcaagga

SEQ ID NO: 5036524 - DNA, 25 bp, Homo sapien
gtgactttgctatcagctccaacag

SEQ ID NO: 5036525 - DNA, 25 bp, Homo sapien
tcttttgggcgatgccactcaggga

SEQ ID NO: 5036526 - DNA, 25 bp, Homo sapien
gaagttcttttgggcgatgccactc

SEQ ID NO: 5036527 - DNA, 25 bp, Homo sapien
tttgggcgatgccactcagggatgt

SEQ ID NO: 5036528 - DNA, 25 bp, Homo sapien
ctgaggataaaaatagaagttgcca

SEQ ID NO: 5036529 - DNA, 25 bp, Homo sapien
gaaagacgccaatcacaggaagaga

SEQ ID NO: 5036530 - DNA, 25 bp, Homo sapien
tattagctccgtgatgatgggcaag

SEQ ID NO: 5036531 - DNA, 25 bp, Homo sapien
tgatgtcactgtggctaaaaacttg

SEQ ID NO: 5036532 - DNA, 25 bp, Homo sapien
cataaagccctcagcaagtacctgg

SEQ ID NO: 5036533 - DNA, 25 bp, Homo sapien
tctgctgaaagaggcgggaaatcaa

SEQ ID NO: 5036534 - DNA, 25 bp, Homo sapien
cgagtgtctgctgaaagaggcggga

SEQ ID NO: 5036535 - DNA, 25 bp, Homo sapien
aaatcaaaacaccagtagagaccat

SEQ ID NO: 5036536 - DNA, 25 bp, Homo sapien
tgaaagaggcgggaaatcaaaacac

SEQ ID NO: 5036537 - DNA, 25 bp, Homo sapien
cctgtgctagcatcgtggtaggtga

SEQ ID NO: 5036538 - DNA, 25 bp, Homo sapien
tgatgaagacacatgatccctacac

SEQ ID NO: 5036539 - DNA, 25 bp, Homo sapien
gctcttcagcctagagtgtaagtca

SEQ ID NO: 5036540 - DNA, 25 bp, Homo sapien
ctgtggagtcaggagaaagaaccct

SEQ ID NO: 5036541 - DNA, 25 bp, Homo sapien
gcctgctacaaagaatatactcgat

SEQ ID NO: 5036542 - DNA, 25 bp, Homo sapien
tgtgtcagcaactgcagctaagcac

SEQ ID NO: 5036543 - DNA, 25 bp, Homo sapien
caacccagtgagatagcttctccat

SEQ ID NO: 5036544 - DNA, 25 bp, Homo sapien
caggaaatagtgagttaacagggca

SEQ ID NO: 5036545 - DNA, 25 bp, Homo sapien
tcttgatccactagcacatacgggt

SEQ ID NO: 5036546 - DNA, 25 bp, Homo sapien
cagatagcaccagtttaaagcccag

SEQ ID NO: 5036547 - DNA, 25 bp, Homo sapien
taatgaccccagtaccaagatgtgg

SEQ ID NO: 5036548 - DNA, 25 bp, Homo sapien
ccaggcgcggttctacagcatttac

SEQ ID NO: 5036549 - DNA, 25 bp, Homo sapien
gatagtaaatactctaggcttgcag

SEQ ID NO: 5036550 - DNA, 25 bp, Homo sapien
aaaaacaggcggcaggctattgacc

SEQ ID NO: 5036551 - DNA, 25 bp, Homo sapien
cagaccttcaaggtagagtcagatc

SEQ ID NO: 5036552 - DNA, 25 bp, Homo sapien
caatatctaatgagtgagcgtagct

SEQ ID NO: 5036553 - DNA, 25 bp, Homo sapien
attccatcttatcccaataatgcag

SEQ ID NO: 5036554 - DNA, 25 bp, Homo sapien
tgtactcagcaataacagatactaa

SEQ ID NO: 5036555 - DNA, 25 bp, Homo sapien
ggaggagtgtaagtttgaattcaag

SEQ ID NO: 5036556 - DNA, 25 bp, Homo sapien
cagatactaaataacggttgctttc

SEQ ID NO: 5036557 - DNA, 25 bp, Homo sapien
tgtagtctaacaagcttcgaaggtg

SEQ ID NO: 5036558 - DNA, 25 bp, Homo sapien
cagtctgactggcttggcctctgga

SEQ ID NO: 5036559 - DNA, 25 bp, Homo sapien
tgaaaactgattgggatcaccaggc

SEQ ID NO: 5036560 - DNA, 25 bp, Homo sapien
taattaaatcggaagctccagaggt

SEQ ID NO: 5036561 - DNA, 25 bp, Homo sapien
caactcaactgaaaagcgttttagg

SEQ ID NO: 5036562 - DNA, 25 bp, Homo sapien
aacattagcggctgactttgcacag

SEQ ID NO: 5036563 - DNA, 25 bp, Homo sapien
tgccagattcaccaattagtttttt

SEQ ID NO: 5036564 - DNA, 25 bp, Homo sapien
cagcagatagattctagtgtccaaa

SEQ ID NO: 5036565 - DNA, 25 bp, Homo sapien
ggttaagctgatttgctttactacc

SEQ ID NO: 5036566 - DNA, 25 bp, Homo sapien
gctgatttgctttactaccttcatc

SEQ ID NO: 5036567 - DNA, 25 bp, Homo sapien
aataataatgtgacagtcatggtta

SEQ ID NO: 5036568 - DNA, 25 bp, Homo sapien
gacagtcatggttaagctgatttgc

SEQ ID NO: 5036569 - DNA, 25 bp, Homo sapien
ggacatgggactgaatactgttatc

SEQ ID NO: 5036570 - DNA, 25 bp, Homo sapien
cacaaaacacggaggtgctttaatt

SEQ ID NO: 5036571 - DNA, 25 bp, Homo sapien
cacggaggtgctttaattcatccag

SEQ ID NO: 5036572 - DNA, 25 bp, Homo sapien
aagcaacagatccagtcagattttt

SEQ ID NO: 5036573 - DNA, 25 bp, Homo sapien
tgagaatgccttgggggtcccccag

SEQ ID NO: 5036574 - DNA, 25 bp, Homo sapien
gagaatgccttgggggtcccccaga

SEQ ID NO: 5036575 - DNA, 25 bp, Homo sapien
agaatgccttgggggtcccccagag

SEQ ID NO: 5036576 - DNA, 25 bp, Homo sapien
ctgagaatgccttgggggtccccca

SEQ ID NO: 5036577 - DNA, 25 bp, Homo sapien
ctgtgacatgttcccacgtatccac

SEQ ID NO: 5036578 - DNA, 25 bp, Homo sapien
tgttgccagggccagcgttgcctgt

SEQ ID NO: 5036579 - DNA, 25 bp, Homo sapien
ctctcttgctaaggctgttgccagg

SEQ ID NO: 5036580 - DNA, 25 bp, Homo sapien
cagtgagaacagtcagagatacagg

SEQ ID NO: 5036581 - DNA, 25 bp, Homo sapien
tggcagttgagaagtccagtctgtt

SEQ ID NO: 5036582 - DNA, 25 bp, Homo sapien
cccccagggtgcaatatccatggcg

SEQ ID NO: 5036583 - DNA, 25 bp, Homo sapien
ccggaccacgtagttaaatcttctg

SEQ ID NO: 5036584 - DNA, 25 bp, Homo sapien
cacgtagttaaatcttctggaatcc

SEQ ID NO: 5036585 - DNA, 25 bp, Homo sapien
catgcagaggtcacccaagtaagaa

SEQ ID NO: 5036586 - DNA, 25 bp, Homo sapien
tggattttgccgaatgagcttgatg

SEQ ID NO: 5036587 - DNA, 25 bp, Homo sapien
caaaggcacagaagttactcctgcc

SEQ ID NO: 5036588 - DNA, 25 bp, Homo sapien
gaatgagccagttagaacaacccaa

SEQ ID NO: 5036589 - DNA, 25 bp, Homo sapien
tacttcctttgtgaacatagatcca

SEQ ID NO: 5036590 - DNA, 25 bp, Homo sapien
atagatccatttttcttggtggaaa

SEQ ID NO: 5036591 - DNA, 25 bp, Homo sapien
ctctttagtacttcctttgtgaaca

SEQ ID NO: 5036592 - DNA, 25 bp, Homo sapien
tagtacttcctttgtgaacatagat

SEQ ID NO: 5036593 - DNA, 25 bp, Homo sapien
tttttcatccaagaaccaatcataa

SEQ ID NO: 5036594 - DNA, 25 bp, Homo sapien
ctgaagttcaaaacaaatggcttac

SEQ ID NO: 5036595 - DNA, 25 bp, Homo sapien
tttctgaagttcaaaacaaatggct

SEQ ID NO: 5036596 - DNA, 25 bp, Homo sapien
gaaccaatcataactatcttcaaac

SEQ ID NO: 5036597 - DNA, 25 bp, Homo sapien
ggttttgctattcagcatgtccttc

SEQ ID NO: 5036598 - DNA, 25 bp, Homo sapien
catcatagttcaggctgttgaaaag

SEQ ID NO: 5036599 - DNA, 25 bp, Homo sapien
tcttggctgcaacatcatagttcag

SEQ ID NO: 5036600 - DNA, 25 bp, Homo sapien
gaaaagattctccttattgtatacc

SEQ ID NO: 5036601 - DNA, 25 bp, Homo sapien
tcacaggtcactgaaggatgggcag

SEQ ID NO: 5036602 - DNA, 25 bp, Homo sapien
atgggcaggctcatctcgggccaga

SEQ ID NO: 5036603 - DNA, 25 bp, Homo sapien
ctaattcacaggtcactgaaggatg

SEQ ID NO: 5036604 - DNA, 25 bp, Homo sapien
catctcgggccagacgcttatttgc

SEQ ID NO: 5036605 - DNA, 25 bp, Homo sapien
gaagcaacttctagtatctttttgt

SEQ ID NO: 5036606 - DNA, 25 bp, Homo sapien
catctgttgggtacaattatgtaca

SEQ ID NO: 5036607 - DNA, 25 bp, Homo sapien
gcattgtgtaaatggtagaagagaa

SEQ ID NO: 5036608 - DNA, 25 bp, Homo sapien
tttcagatatacatctgttgggtac

SEQ ID NO: 5036609 - DNA, 25 bp, Homo sapien
tcagaggcaccttcaaaagcaagcc

SEQ ID NO: 5036610 - DNA, 25 bp, Homo sapien
gagcctgggccatagattgtgatca

SEQ ID NO: 5036611 - DNA, 25 bp, Homo sapien
taggtttcagatagagtcctgcaga

SEQ ID NO: 5036612 - DNA, 25 bp, Homo sapien
ggtccatgatgtaccacagctgaga

SEQ ID NO: 5036613 - DNA, 25 bp, Homo sapien
catttaagaaagctgtgacgtgccc

SEQ ID NO: 5036614 - DNA, 25 bp, Homo sapien
tactgacgcatttctagatcgccac

SEQ ID NO: 5036615 - DNA, 25 bp, Homo sapien
gatttctacaccaatttactgacgc

SEQ ID NO: 5036616 - DNA, 25 bp, Homo sapien
actcacaaggctagcacccggaatg

SEQ ID NO: 5036617 - DNA, 25 bp, Homo sapien
taaatctcagtaagcgggaacctgg

SEQ ID NO: 5036618 - DNA, 25 bp, Homo sapien
tgaaagtcaactgtcgaggtcaggg

SEQ ID NO: 5036619 - DNA, 25 bp, Homo sapien
caggaaaaggctcccaagggtgact

SEQ ID NO: 5036620 - DNA, 25 bp, Homo sapien
tcaccgggctaaatgctgagagtct

SEQ ID NO: 5036621 - DNA, 25 bp, Homo sapien
aggaagcgcttccagccgtcggccg

SEQ ID NO: 5036622 - DNA, 25 bp, Homo sapien
tgaggtcgctcacgaaactgccgct

SEQ ID NO: 5036623 - DNA, 25 bp, Homo sapien
ccgtcggccgtcttcacccagttct

SEQ ID NO: 5036624 - DNA, 25 bp, Homo sapien
ctgctgaggtcgctcacgaaactgc

SEQ ID NO: 5036625 - DNA, 25 bp, Homo sapien
tgccgcagtatttatccccgcagcc

SEQ ID NO: 5036626 - DNA, 25 bp, Homo sapien
tgcgcggcagtagctgccgcagtat

SEQ ID NO: 5036627 - DNA, 25 bp, Homo sapien
ccgcagctctttgttgccggaagag

SEQ ID NO: 5036628 - DNA, 25 bp, Homo sapien
gagaggatctcaagcgttgcaggct

SEQ ID NO: 5036629 - DNA, 25 bp, Homo sapien
tattcccatgtctttacctgttgac

SEQ ID NO: 5036630 - DNA, 25 bp, Homo sapien
gctgttattcccatgtctttacctg

SEQ ID NO: 5036631 - DNA, 25 bp, Homo sapien
gttattcccatgtctttacctgttg

SEQ ID NO: 5036632 - DNA, 25 bp, Homo sapien
gaaggctgttattcccatgtcttta

SEQ ID NO: 5036633 - DNA, 25 bp, Homo sapien
ttactcttcaaagtcaaccagaatc

SEQ ID NO: 5036634 - DNA, 25 bp, Homo sapien
gctgctgcttattctgggacacgtt

SEQ ID NO: 5036635 - DNA, 25 bp, Homo sapien
ctctagtgattggagaagcgttttc

SEQ ID NO: 5036636 - DNA, 25 bp, Homo sapien
agtgtgtttccttgtatgagtcagc

SEQ ID NO: 5036637 - DNA, 25 bp, Homo sapien
cactgcatgttttgactggttgact

SEQ ID NO: 5036638 - DNA, 25 bp, Homo sapien
cagggatgcatcatgccattgctat

SEQ ID NO: 5036639 - DNA, 25 bp, Homo sapien
cattcattgtctcaacagggatgca

SEQ ID NO: 5036640 - DNA, 25 bp, Homo sapien
tgatcctggtgctcttctaaagcag

SEQ ID NO: 5036641 - DNA, 25 bp, Homo sapien
gctaagcaataggaatgcctatctt

SEQ ID NO: 5036642 - DNA, 25 bp, Homo sapien
tcagtgggttctctgcctttaccaa

SEQ ID NO: 5036643 - DNA, 25 bp, Homo sapien
ggctggccatccagtcccctaactg

SEQ ID NO: 5036644 - DNA, 25 bp, Homo sapien
tcttactgtctggtaacctctgctc

SEQ ID NO: 5036645 - DNA, 25 bp, Homo sapien
agcctctgatcctgtctgcacctcc

SEQ ID NO: 5036646 - DNA, 25 bp, Homo sapien
acagccccttctggcagcgctaggg

SEQ ID NO: 5036647 - DNA, 25 bp, Homo sapien
ataagtaacatggcttctcagtgct

SEQ ID NO: 5036648 - DNA, 25 bp, Homo sapien
agcgctagggggctctgattttgac

SEQ ID NO: 5036649 - DNA, 25 bp, Homo sapien
ccacagccccttctggcagcgctag

SEQ ID NO: 5036650 - DNA, 25 bp, Homo sapien
tcctgctgccacatgtttccatatg

SEQ ID NO: 5036651 - DNA, 25 bp, Homo sapien
aatagctccattcctttgcagctgc

SEQ ID NO: 5036652 - DNA, 25 bp, Homo sapien
catatggatgtcctacgagagccat

SEQ ID NO: 5036653 - DNA, 25 bp, Homo sapien
agctgccactcaaagagagcaagct

SEQ ID NO: 5036654 - DNA, 25 bp, Homo sapien
tggcaggggccttatcagttatgat

SEQ ID NO: 5036655 - DNA, 25 bp, Homo sapien
caatcacaggaatttgtcgctccat

SEQ ID NO: 5036656 - DNA, 25 bp, Homo sapien
ttcaatcacaggaatttgtcgctcc

SEQ ID NO: 5036657 - DNA, 25 bp, Homo sapien
tacagactgtgtaagattcaatcac

SEQ ID NO: 5036658 - DNA, 25 bp, Homo sapien
ccttgttgcaccagttgctaggtag

SEQ ID NO: 5036659 - DNA, 25 bp, Homo sapien
caggtatccagctttggtccaatta

SEQ ID NO: 5036660 - DNA, 25 bp, Homo sapien
tggtctcagattggttcaggtatcc

SEQ ID NO: 5036661 - DNA, 25 bp, Homo sapien
ctcgggccaaaccagacccttgttg

SEQ ID NO: 5036662 - DNA, 25 bp, Homo sapien
tgtgttgtgcaaattgtgctattct

SEQ ID NO: 5036663 - DNA, 25 bp, Homo sapien
tgcaaattgtgctattctgtctttg

SEQ ID NO: 5036664 - DNA, 25 bp, Homo sapien
gttgtgcaaattgtgctattctgtc

SEQ ID NO: 5036665 - DNA, 25 bp, Homo sapien
gtggttgtgttgtgcaaattgtgct

SEQ ID NO: 5036666 - DNA, 25 bp, Homo sapien
tctgttaacctcttcaggcttggtt

SEQ ID NO: 5036667 - DNA, 25 bp, Homo sapien
gaaggcatccccgaatatcacgggc

SEQ ID NO: 5036668 - DNA, 25 bp, Homo sapien
cacgaaggagtcacaacgtctctgt

SEQ ID NO: 5036669 - DNA, 25 bp, Homo sapien
gacttctatgagagcagggcacgaa

SEQ ID NO: 5036670 - DNA, 25 bp, Homo sapien
gcctacatctgttgagtaatttaca

SEQ ID NO: 5036671 - DNA, 25 bp, Homo sapien
ttgcctacatctgttgagtaattta

SEQ ID NO: 5036672 - DNA, 25 bp, Homo sapien
ttgcggtgtctggtcctgtactcat

SEQ ID NO: 5036673 - DNA, 25 bp, Homo sapien
taatttacatttgcggtgtctggtc

SEQ ID NO: 5036674 - DNA, 25 bp, Homo sapien
ggtacagccaccctgatggccggag

SEQ ID NO: 5036675 - DNA, 25 bp, Homo sapien
ctggtacagccaccctgatggccgg

SEQ ID NO: 5036676 - DNA, 25 bp, Homo sapien
agccaccctgatggccggagcatga

SEQ ID NO: 5036677 - DNA, 25 bp, Homo sapien
tggcaccaccctgctggtacagcca

SEQ ID NO: 5036678 - DNA, 25 bp, Homo sapien
tgggacaacctggaaacgtgtagga

SEQ ID NO: 5036679 - DNA, 25 bp, Homo sapien
tattcatcaccaaatatattccagg

SEQ ID NO: 5036680 - DNA, 25 bp, Homo sapien
aatgagtcgtcatctcccgcctgtg

SEQ ID NO: 5036681 - DNA, 25 bp, Homo sapien
tgcttgtcctcaatgcagcttatgt

SEQ ID NO: 5036682 - DNA, 25 bp, Homo sapien
gtatttattgctgtgccgaggaggc

SEQ ID NO: 5036683 - DNA, 25 bp, Homo sapien
gccgaggaggcccattgcacaagtc

SEQ ID NO: 5036684 - DNA, 25 bp, Homo sapien
cattgcacaagtcctcctaaaagag

SEQ ID NO: 5036685 - DNA, 25 bp, Homo sapien
cagttctggaactactggtatttat

SEQ ID NO: 5036686 - DNA, 25 bp, Homo sapien
cacttgagaactatgaggtaggtat

SEQ ID NO: 5036687 - DNA, 25 bp, Homo sapien
gtctcgtcaagtatccagggtcatt

SEQ ID NO: 5036688 - DNA, 25 bp, Homo sapien
tacttagcttttgactgttgccttc

SEQ ID NO: 5036689 - DNA, 25 bp, Homo sapien
ggtgaaagcgcttctatgtatgact

SEQ ID NO: 5036690 - DNA, 25 bp, Homo sapien
cacctgaggacctgagttcattcag

SEQ ID NO: 5036691 - DNA, 25 bp, Homo sapien
tcaaacttctgtctcgtcattccca

SEQ ID NO: 5036692 - DNA, 25 bp, Homo sapien
tctacttcatcgtgagtcctcacct

SEQ ID NO: 5036693 - DNA, 25 bp, Homo sapien
ggctcgagtgccgactcctcaaact

SEQ ID NO: 5036694 - DNA, 25 bp, Homo sapien
tgggctccacacaagggtctgagag

SEQ ID NO: 5036695 - DNA, 25 bp, Homo sapien
gaccagctctgaatgtggttgatgc

SEQ ID NO: 5036696 - DNA, 25 bp, Homo sapien
agggacacccactcagatggcagct

SEQ ID NO: 5036697 - DNA, 25 bp, Homo sapien
cagcagacgagcaccatctttttgg

SEQ ID NO: 5036698 - DNA, 25 bp, Homo sapien
ggttgggacacaaagtcattctcag

SEQ ID NO: 5036699 - DNA, 25 bp, Homo sapien
cttagtggggtttgtaggcttgtct

SEQ ID NO: 5036700 - DNA, 25 bp, Homo sapien
ctgttgcttagtggggtttgtaggc

SEQ ID NO: 5036701 - DNA, 25 bp, Homo sapien
taggcttgtctttgggggcaacaaa

SEQ ID NO: 5036702 - DNA, 25 bp, Homo sapien
tgtgtggtctgtagcaagtcagtga

SEQ ID NO: 5036703 - DNA, 25 bp, Homo sapien
cagtgagggttggaacccctacatc

SEQ ID NO: 5036704 - DNA, 25 bp, Homo sapien
tagcaagtcagtgagggttggaacc

SEQ ID NO: 5036705 - DNA, 25 bp, Homo sapien
gctgtgtggtctgtagcaagtcagt

SEQ ID NO: 5036706 - DNA, 25 bp, Homo sapien
aatcccagttcgtgagccattggca

SEQ ID NO: 5036707 - DNA, 25 bp, Homo sapien
cgcagggtacacgtgagagctgata

SEQ ID NO: 5036708 - DNA, 25 bp, Homo sapien
gaatgtaatggttaagtccagccag

SEQ ID NO: 5036709 - DNA, 25 bp, Homo sapien
tcagcttagccttaagaagatggcc

SEQ ID NO: 5036710 - DNA, 25 bp, Homo sapien
tgccaacaagggttaggagagtgct

SEQ ID NO: 5036711 - DNA, 25 bp, Homo sapien
cctgattctctatgctgtctctatg

SEQ ID NO: 5036712 - DNA, 25 bp, Homo sapien
tctctatgcttgtcagtgatccaaa

SEQ ID NO: 5036713 - DNA, 25 bp, Homo sapien
tccaaacaagagaactgccaacaag

SEQ ID NO: 5036714 - DNA, 25 bp, Homo sapien
catacatagacactgggtttttccc

SEQ ID NO: 5036715 - DNA, 25 bp, Homo sapien
tgcgtttcacatacatagacactgg

SEQ ID NO: 5036716 - DNA, 25 bp, Homo sapien
tctgctgcgtttcacatacatagac

SEQ ID NO: 5036717 - DNA, 25 bp, Homo sapien
gtttcacatacatagacactgggtt

SEQ ID NO: 5036718 - DNA, 25 bp, Homo sapien
cccatttctgcaaagacgccagaaa

SEQ ID NO: 5036719 - DNA, 25 bp, Homo sapien
atggggtatggtgtccctgtacgac

SEQ ID NO: 5036720 - DNA, 25 bp, Homo sapien
tatggtgtccctgtacgactggaat

SEQ ID NO: 5036721 - DNA, 25 bp, Homo sapien
ggtgtccctgtacgactggaatgga

SEQ ID NO: 5036722 - DNA, 25 bp, Homo sapien
ggtatggtgtccctgtacgactgga

SEQ ID NO: 5036723 - DNA, 25 bp, Homo sapien
cagtgtggtcttcggccagattcct

SEQ ID NO: 5036724 - DNA, 25 bp, Homo sapien
tttaaatgacgggtcttttgtggca

SEQ ID NO: 5036725 - DNA, 25 bp, Homo sapien
aaactcggggttcggagcctgatgc

SEQ ID NO: 5036726 - DNA, 25 bp, Homo sapien
cagattccttgcctctcttgagaga

SEQ ID NO: 5036727 - DNA, 25 bp, Homo sapien
tccaattatgcaactggcccagagg

SEQ ID NO: 5036728 - DNA, 25 bp, Homo sapien
cagaggcccgcattgtggtacaacc

SEQ ID NO: 5036729 - DNA, 25 bp, Homo sapien
tcagcaagttcgaagtggtgtcagg

SEQ ID NO: 5036730 - DNA, 25 bp, Homo sapien
cctggtacagcatgatctcttggta

SEQ ID NO: 5036731 - DNA, 25 bp, Homo sapien
ggttcctgccacgatggttctcttt

SEQ ID NO: 5036732 - DNA, 25 bp, Homo sapien
tggttcctgccacgatggttctctt

SEQ ID NO: 5036733 - DNA, 25 bp, Homo sapien
aatggttcctgccacgatggttctc

SEQ ID NO: 5036734 - DNA, 25 bp, Homo sapien
atggttcctgccacgatggttctct

SEQ ID NO: 5036735 - DNA, 25 bp, Homo sapien
catatttactctttcagcatccttc

SEQ ID NO: 5036736 - DNA, 25 bp, Homo sapien
tctggactaaggtcaaggatgattg

SEQ ID NO: 5036737 - DNA, 25 bp, Homo sapien
ggaagatggactgaccatcacctct

SEQ ID NO: 5036738 - DNA, 25 bp, Homo sapien
gaccatcacctctgttcatatttac

SEQ ID NO: 5036739 - DNA, 25 bp, Homo sapien
tcatcacctctagtgaggagctggg

SEQ ID NO: 5036740 - DNA, 25 bp, Homo sapien
aaggagttgagtatggtgtggtctc

SEQ ID NO: 5036741 - DNA, 25 bp, Homo sapien
tgatggacacagagatatgaggcct

SEQ ID NO: 5036742 - DNA, 25 bp, Homo sapien
ggacaaggacaagtgcccataccct

SEQ ID NO: 5036743 - DNA, 25 bp, Homo sapien
cacaaggtagcaaaaacttggacat

SEQ ID NO: 5036744 - DNA, 25 bp, Homo sapien
actaggttggaacaagatgccagcc

SEQ ID NO: 5036745 - DNA, 25 bp, Homo sapien
ccccaggaggagaatctgaagtaca

SEQ ID NO: 5036746 - DNA, 25 bp, Homo sapien
tacattgttaggctcagacgggctg

SEQ ID NO: 5036747 - DNA, 25 bp, Homo sapien
tacagctggagtgaactctggtgcc

SEQ ID NO: 5036748 - DNA, 25 bp, Homo sapien
tcaatgttgcagtccgtggtcagcc

SEQ ID NO: 5036749 - DNA, 25 bp, Homo sapien
caaagagcttgtgcggcagctgtcc

SEQ ID NO: 5036750 - DNA, 25 bp, Homo sapien
tagcaatcgaaggaggcggagtcct

SEQ ID NO: 5036751 - DNA, 25 bp, Homo sapien
gagtttgtttcccatcactgtggcc

SEQ ID NO: 5036752 - DNA, 25 bp, Homo sapien
aatgacaatccgctccccaagcacc

SEQ ID NO: 5036753 - DNA, 25 bp, Homo sapien
cattttgaaccacgagtttctggaa

SEQ ID NO: 5036754 - DNA, 25 bp, Homo sapien
gatcattcttgtctccattttgaac

SEQ ID NO: 5036755 - DNA, 25 bp, Homo sapien
gggcacacacgttcttgatcattct

SEQ ID NO: 5036756 - DNA, 25 bp, Homo sapien
tctttggtctttcacagcgactgcg

SEQ ID NO: 5036757 - DNA, 25 bp, Homo sapien
gagtctttggtctttcacagcgact

SEQ ID NO: 5036758 - DNA, 25 bp, Homo sapien
tttggtctttcacagcgactgcggg

SEQ ID NO: 5036759 - DNA, 25 bp, Homo sapien
tcctccaaagagatagagtctttgg

SEQ ID NO: 5036760 - DNA, 25 bp, Homo sapien
tatacacgtaggagacgatctggtc

SEQ ID NO: 5036761 - DNA, 25 bp, Homo sapien
tgcttgatccaaaccatgagggcct

SEQ ID NO: 5036762 - DNA, 25 bp, Homo sapien
gggccaactggctctgcaagtacga

SEQ ID NO: 5036763 - DNA, 25 bp, Homo sapien
gagatagtccctcaactccaaggca

SEQ ID NO: 5036764 - DNA, 25 bp, Homo sapien
cccatgatgtttgcggatgtcacca

SEQ ID NO: 5036765 - DNA, 25 bp, Homo sapien
agtgctcctattccattccccatga

SEQ ID NO: 5036766 - DNA, 25 bp, Homo sapien
ccaagaccagtgctcctattccatt

SEQ ID NO: 5036767 - DNA, 25 bp, Homo sapien
cagagtcagcaagagtcaaaccttt

SEQ ID NO: 5036768 - DNA, 25 bp, Homo sapien
gatattgtgtagggaagattggaaa

SEQ ID NO: 5036769 - DNA, 25 bp, Homo sapien
atattgtgtagggaagattggaaag

SEQ ID NO: 5036770 - DNA, 25 bp, Homo sapien
ggatattgtgtagggaagattggaa

SEQ ID NO: 5036771 - DNA, 25 bp, Homo sapien
attgtgtagggaagattggaaagga

SEQ ID NO: 5036772 - DNA, 25 bp, Homo sapien
ttgccttttgcagcaacccgagggc

SEQ ID NO: 5036773 - DNA, 25 bp, Homo sapien
gacatgtgactttccagttgccttt

SEQ ID NO: 5036774 - DNA, 25 bp, Homo sapien
cttttgcagcaacccgagggcctgc

SEQ ID NO: 5036775 - DNA, 25 bp, Homo sapien
atgacatgtgactttccagttgcct

SEQ ID NO: 5036776 - DNA, 25 bp, Homo sapien
cccctgggaaggcaactcagaattt

SEQ ID NO: 5036777 - DNA, 25 bp, Homo sapien
tgcaggactccttagccagaatcgg

SEQ ID NO: 5036778 - DNA, 25 bp, Homo sapien
cactcatgtgtggtaatctagctcc

SEQ ID NO: 5036779 - DNA, 25 bp, Homo sapien
gctcaactagtgcaatggtcttcca

SEQ ID NO: 5036780 - DNA, 25 bp, Homo sapien
tcaaatgcttgctgagcagattggc

SEQ ID NO: 5036781 - DNA, 25 bp, Homo sapien
aagaggcccaatcccgtcgcaaaag

SEQ ID NO: 5036782 - DNA, 25 bp, Homo sapien
tcccttgtgtggtattaacattgac

SEQ ID NO: 5036783 - DNA, 25 bp, Homo sapien
ggactggtcaaaagctagcttcctt

SEQ ID NO: 5036784 - DNA, 25 bp, Homo sapien
taatccacaactttaattaacaatg

SEQ ID NO: 5036785 - DNA, 25 bp, Homo sapien
cacaactttaattaacaatgaggct

SEQ ID NO: 5036786 - DNA, 25 bp, Homo sapien
tgctcttgacaaaggcggttccacc

SEQ ID NO: 5036787 - DNA, 25 bp, Homo sapien
tgcgccacttaagctgccaagaaag

SEQ ID NO: 5036788 - DNA, 25 bp, Homo sapien
taagggttttcgtgcgggagtctca

SEQ ID NO: 5036789 - DNA, 25 bp, Homo sapien
tgctaagccagagttcaaggtgccc

SEQ ID NO: 5036790 - DNA, 25 bp, Homo sapien
ggaggtatctgagcgaaccatgtca

SEQ ID NO: 5036791 - DNA, 25 bp, Homo sapien
gggctactagcagtttccggaagtc

SEQ ID NO: 5036792 - DNA, 25 bp, Homo sapien
cagagagagacttctgatacttctc

SEQ ID NO: 5036793 - DNA, 25 bp, Homo sapien
cggaagtccccggaggtatctgagc

SEQ ID NO: 5036794 - DNA, 25 bp, Homo sapien
tcatcgacttgtacagacgttcagc

SEQ ID NO: 5036795 - DNA, 25 bp, Homo sapien
tcggccctggtcacgactatgcgaa

SEQ ID NO: 5036796 - DNA, 25 bp, Homo sapien
gactatgcgaatcaacgtctcctca

SEQ ID NO: 5036797 - DNA, 25 bp, Homo sapien
gacgttcagcaaaatagtcctcaca

SEQ ID NO: 5036798 - DNA, 25 bp, Homo sapien
ctcctgagaacaacccaaaagctgc

SEQ ID NO: 5036799 - DNA, 25 bp, Homo sapien
gattggtggttcaggggaaacttgc

SEQ ID NO: 5036800 - DNA, 25 bp, Homo sapien
aagaaacaatgtctggcctctttct

SEQ ID NO: 5036801 - DNA, 25 bp, Homo sapien
aaaagctgctggattggtggttcag

SEQ ID NO: 5036802 - DNA, 25 bp, Homo sapien
ccttctgcaagtcgcctgatgtttc

SEQ ID NO: 5036803 - DNA, 25 bp, Homo sapien
tctgcaagtcgcctgatgtttcttc

SEQ ID NO: 5036804 - DNA, 25 bp, Homo sapien
ctgcaagtcgcctgatgtttcttct

SEQ ID NO: 5036805 - DNA, 25 bp, Homo sapien
cttctgcaagtcgcctgatgtttct

SEQ ID NO: 5036806 - DNA, 25 bp, Homo sapien
gctcgtaactgcttgtagctcctct

SEQ ID NO: 5036807 - DNA, 25 bp, Homo sapien
attgaacgcaagctcatcagtgccc

SEQ ID NO: 5036808 - DNA, 25 bp, Homo sapien
taggcttgaaaggtggctcgtaact

SEQ ID NO: 5036809 - DNA, 25 bp, Homo sapien
ccaggacttcattgaacgcaagctc

SEQ ID NO: 5036810 - DNA, 25 bp, Homo sapien
ctgaccagctagatctttgtccacg

SEQ ID NO: 5036811 - DNA, 25 bp, Homo sapien
tagatctttgtccacgtcatctcct

SEQ ID NO: 5036812 - DNA, 25 bp, Homo sapien
tctttgtccacgtcatctccttcat

SEQ ID NO: 5036813 - DNA, 25 bp, Homo sapien
cagctagatctttgtccacgtcatc

SEQ ID NO: 5036814 - DNA, 25 bp, Homo sapien
gtttccacttgtatcacctttgaca

SEQ ID NO: 5036815 - DNA, 25 bp, Homo sapien
ttccacttgtatcacctttgacatc

SEQ ID NO: 5036816 - DNA, 25 bp, Homo sapien
tccacttgtatcacctttgacatct

SEQ ID NO: 5036817 - DNA, 25 bp, Homo sapien
taggtttccacttgtatcacctttg

SEQ ID NO: 5036818 - DNA, 25 bp, Homo sapien
ctttggtaggcctctttaatggcga

SEQ ID NO: 5036819 - DNA, 25 bp, Homo sapien
ttggtaggcctctttaatggcgatg

SEQ ID NO: 5036820 - DNA, 25 bp, Homo sapien
tggtaggcctctttaatggcgatga

SEQ ID NO: 5036821 - DNA, 25 bp, Homo sapien
gcctttggtaggcctctttaatggc

SEQ ID NO: 5036822 - DNA, 25 bp, Homo sapien
tgagcagcgtgaacgtggcccagca

SEQ ID NO: 5036823 - DNA, 25 bp, Homo sapien
ccctggcggcacttcaggaaaagag

SEQ ID NO: 5036824 - DNA, 25 bp, Homo sapien
ctgagaggcctcaagaatgttgggc

SEQ ID NO: 5036825 - DNA, 25 bp, Homo sapien
tgccccattctgctgtcatgtgtgg

SEQ ID NO: 5036826 - DNA, 25 bp, Homo sapien
cgtactcgctgggacggtccagaag

SEQ ID NO: 5036827 - DNA, 25 bp, Homo sapien
tcaatgaggacggactcatctgtgc

SEQ ID NO: 5036828 - DNA, 25 bp, Homo sapien
tcatctgtgcccagacccttcatag

SEQ ID NO: 5036829 - DNA, 25 bp, Homo sapien
aagggccaacgctgtcttctcgaag

SEQ ID NO: 5036830 - DNA, 25 bp, Homo sapien
gcttgatttgttgcctctcatctga

SEQ ID NO: 5036831 - DNA, 25 bp, Homo sapien
tctcatctgatgtcctgcccgataa

SEQ ID NO: 5036832 - DNA, 25 bp, Homo sapien
cctgcccgataagatttcaatgatg

SEQ ID NO: 5036833 - DNA, 25 bp, Homo sapien
tacgttgccttgtacttttgcttga

SEQ ID NO: 5036834 - DNA, 25 bp, Homo sapien
ttcaacactgggattcacgttgtcc

SEQ ID NO: 5036835 - DNA, 25 bp, Homo sapien
cactgggattcacgttgtcctcctt

SEQ ID NO: 5036836 - DNA, 25 bp, Homo sapien
gggattcacgttgtcctccttcatt

SEQ ID NO: 5036837 - DNA, 25 bp, Homo sapien
ggtttcaacactgggattcacgttg

SEQ ID NO: 5036838 - DNA, 25 bp, Homo sapien
gctgccatataagaagtccctctgc

SEQ ID NO: 5036839 - DNA, 25 bp, Homo sapien
tacaccaggattgcatgaactgcac

SEQ ID NO: 5036840 - DNA, 25 bp, Homo sapien
gacttgcgttagctcggaatacaca

SEQ ID NO: 5036841 - DNA, 25 bp, Homo sapien
tgcccggccgatctacttctacatg

SEQ ID NO: 5036842 - DNA, 25 bp, Homo sapien
tgcaggctttgttcagctttttggc

SEQ ID NO: 5036843 - DNA, 25 bp, Homo sapien
ccattcctttgcaggctttgttcag

SEQ ID NO: 5036844 - DNA, 25 bp, Homo sapien
ctttgcaggctttgttcagcttttt

SEQ ID NO: 5036845 - DNA, 25 bp, Homo sapien
cattcctttgcaggctttgttcagc

SEQ ID NO: 5036846 - DNA, 25 bp, Homo sapien
aaccctgaggactgctcgctttagc

SEQ ID NO: 5036847 - DNA, 25 bp, Homo sapien
cacatcaaaaccctgaggactgctc

SEQ ID NO: 5036848 - DNA, 25 bp, Homo sapien
tcaaaaccctgaggactgctcgctt

SEQ ID NO: 5036849 - DNA, 25 bp, Homo sapien
catcaaaaccctgaggactgctcgc

SEQ ID NO: 5036850 - DNA, 25 bp, Homo sapien
tactgatggtatcctcaggagtgta

SEQ ID NO: 5036851 - DNA, 25 bp, Homo sapien
tacctgaaggtactgatggtatcct

SEQ ID NO: 5036852 - DNA, 25 bp, Homo sapien
tgaaggcccttcaatatgctgtgcc

SEQ ID NO: 5036853 - DNA, 25 bp, Homo sapien
taaactggtgggcaccattgtacct

SEQ ID NO: 5036854 - DNA, 25 bp, Homo sapien
catgggctaacagttttgagaaaaa

SEQ ID NO: 5036855 - DNA, 25 bp, Homo sapien
gaggataagggtcaatcttcaggag

SEQ ID NO: 5036856 - DNA, 25 bp, Homo sapien
tcatgggctaacagttttgagaaaa

SEQ ID NO: 5036857 - DNA, 25 bp, Homo sapien
tcaacaggaggataagggtcaatct

SEQ ID NO: 5036858 - DNA, 25 bp, Homo sapien
agaagaaatcagtgtagggacatgc

SEQ ID NO: 5036859 - DNA, 25 bp, Homo sapien
cagtgccaaggacgaatgtgccaag

SEQ ID NO: 5036860 - DNA, 25 bp, Homo sapien
ttgtgaacatcccagcctataccgg

SEQ ID NO: 5036861 - DNA, 25 bp, Homo sapien
caagcctctggtggtaaacggcaca

SEQ ID NO: 5036862 - DNA, 25 bp, Homo sapien
ggcaacgtgcccaagtgacatctct

SEQ ID NO: 5036863 - DNA, 25 bp, Homo sapien
gctattttagccgatgagggtggag

SEQ ID NO: 5036864 - DNA, 25 bp, Homo sapien
ttgctattttagccgatgagggtgg

SEQ ID NO: 5036865 - DNA, 25 bp, Homo sapien
tgctattttagccgatgagggtgga

SEQ ID NO: 5036866 - DNA, 25 bp, Homo sapien
gcctggtgttcacctgccacaagtc

SEQ ID NO: 5036867 - DNA, 25 bp, Homo sapien
tctggatctatttccccacttgtca

SEQ ID NO: 5036868 - DNA, 25 bp, Homo sapien
cacttgtcatgcagctttcagatgt

SEQ ID NO: 5036869 - DNA, 25 bp, Homo sapien
gtgttcacctgccacaagtcccaaa

SEQ ID NO: 5036870 - DNA, 25 bp, Homo sapien
ggagtcccctttaggcaactgttga

SEQ ID NO: 5036871 - DNA, 25 bp, Homo sapien
tccattccgtgatgggtggctgaga

SEQ ID NO: 5036872 - DNA, 25 bp, Homo sapien
cacgactgtcgagggttgggagtcc

SEQ ID NO: 5036873 - DNA, 25 bp, Homo sapien
cttctgagagggtgtacgactggct

SEQ ID NO: 5036874 - DNA, 25 bp, Homo sapien
tatttcatcaagagatcagtcctcc

SEQ ID NO: 5036875 - DNA, 25 bp, Homo sapien
atcaagagatcagtcctcctacagg

SEQ ID NO: 5036876 - DNA, 25 bp, Homo sapien
tgtatttcatcaagagatcagtcct

SEQ ID NO: 5036877 - DNA, 25 bp, Homo sapien
tttctgtatttcatcaagagatcag

SEQ ID NO: 5036878 - DNA, 25 bp, Homo sapien
ccatgtccaggaacgccttctgtga

SEQ ID NO: 5036879 - DNA, 25 bp, Homo sapien
tctgctcgcgcactcatgcaatttc

SEQ ID NO: 5036880 - DNA, 25 bp, Homo sapien
caggaacgccttctgtgaatcttct

SEQ ID NO: 5036881 - DNA, 25 bp, Homo sapien
acattcaatatctgctcgcgcactc

SEQ ID NO: 5036882 - DNA, 25 bp, Homo sapien
ccctggccgcggcatcatgaacata

SEQ ID NO: 5036883 - DNA, 25 bp, Homo sapien
agtgtgggtcgcggtggcggccccg

SEQ ID NO: 5036884 - DNA, 25 bp, Homo sapien
caggcgggaggcgtagtgtgggtcg

SEQ ID NO: 5036885 - DNA, 25 bp, Homo sapien
tgaacatagacgtggagttccacat

SEQ ID NO: 5036886 - DNA, 25 bp, Homo sapien
tttattttcatttctttgagacaga

SEQ ID NO: 5036887 - DNA, 25 bp, Homo sapien
aaactctgcttcttgggttcaagcg

SEQ ID NO: 5036888 - DNA, 25 bp, Homo sapien
tatttttattttcatttctttgaga

SEQ ID NO: 5036889 - DNA, 25 bp, Homo sapien
cagagtctcctgttgcccaggctgg

SEQ ID NO: 5036890 - DNA, 25 bp, Homo sapien
gctgacatgggtgttccacttcctg

SEQ ID NO: 5036891 - DNA, 25 bp, Homo sapien
aatattggatattcacacagagccc

SEQ ID NO: 5036892 - DNA, 25 bp, Homo sapien
tcagaatggagtggacggtcacctt

SEQ ID NO: 5036893 - DNA, 25 bp, Homo sapien
caagtttgctttcacagtcatcgtg

SEQ ID NO: 5036894 - DNA, 25 bp, Homo sapien
gacatactcttaagcaatctggatc

SEQ ID NO: 5036895 - DNA, 25 bp, Homo sapien
aactgtaaccaaacgaactggtcag

SEQ ID NO: 5036896 - DNA, 25 bp, Homo sapien
gatgttttcaaaccaaggattgtga

SEQ ID NO: 5036897 - DNA, 25 bp, Homo sapien
agtttagtttagctcctcttacagg

SEQ ID NO: 5036898 - DNA, 25 bp, Homo sapien
tagaaggtagaaaccatgtgtatgt

SEQ ID NO: 5036899 - DNA, 25 bp, Homo sapien
tctactttgtcttatagaaggtaga

SEQ ID NO: 5036900 - DNA, 25 bp, Homo sapien
atgcagtaacggttagttttctact

SEQ ID NO: 5036901 - DNA, 25 bp, Homo sapien
tgtttgaggtaaatgcagtaacggt

SEQ ID NO: 5036902 - DNA, 25 bp, Homo sapien
gaagacctctggtcctcttaaggag

SEQ ID NO: 5036903 - DNA, 25 bp, Homo sapien
taatcatctgattccgagctgaaga

SEQ ID NO: 5036904 - DNA, 25 bp, Homo sapien
gaaaagctgatgtttgcgccttgct

SEQ ID NO: 5036905 - DNA, 25 bp, Homo sapien
catttgtagttgttggcagtgaacc

SEQ ID NO: 5036906 - DNA, 25 bp, Homo sapien
gctcccagctgttaggatctgcagg

SEQ ID NO: 5036907 - DNA, 25 bp, Homo sapien
caggtgttctatgggtccaggcaat

SEQ ID NO: 5036908 - DNA, 25 bp, Homo sapien
aggcaatgttacatgtcagtaataa

SEQ ID NO: 5036909 - DNA, 25 bp, Homo sapien
tcagtaataatggtacaatgtggga

SEQ ID NO: 5036910 - DNA, 25 bp, Homo sapien
ggagacatcaaggagggagccttca

SEQ ID NO: 5036911 - DNA, 25 bp, Homo sapien
atgactgggctctggacactcaggg

SEQ ID NO: 5036912 - DNA, 25 bp, Homo sapien
agcttcctactaggatggcctgtga

SEQ ID NO: 5036913 - DNA, 25 bp, Homo sapien
taaggaaagcataggctcgccacct

SEQ ID NO: 5036914 - DNA, 25 bp, Homo sapien
accaataagcttcctactaggatgg

SEQ ID NO: 5036915 - DNA, 25 bp, Homo sapien
tctcaatttgcataaggctagcata

SEQ ID NO: 5036916 - DNA, 25 bp, Homo sapien
agagtaagcagaattcatttatatt

SEQ ID NO: 5036917 - DNA, 25 bp, Homo sapien
ttaaccctcatttctatcagggact

SEQ ID NO: 5036918 - DNA, 25 bp, Homo sapien
agtcttgttaacctgttggtgagtt

SEQ ID NO: 5036919 - DNA, 25 bp, Homo sapien
aatggcagcgacctactccaaaggc

SEQ ID NO: 5036920 - DNA, 25 bp, Homo sapien
gccaggtcacttccagcagtaatga

SEQ ID NO: 5036921 - DNA, 25 bp, Homo sapien
ggcatctcaaacaagcccaataggg

SEQ ID NO: 5036922 - DNA, 25 bp, Homo sapien
taagggctcggcattgaaacaataa

SEQ ID NO: 5036923 - DNA, 25 bp, Homo sapien
tggggctgtctgcatctgttgccat

SEQ ID NO: 5036924 - DNA, 25 bp, Homo sapien
caaggaggagtagtagctcgatgta

SEQ ID NO: 5036925 - DNA, 25 bp, Homo sapien
tccaggtacttatgctgggctgctt

SEQ ID NO: 5036926 - DNA, 25 bp, Homo sapien
agtagctcgatgtatttttgctaaa

SEQ ID NO: 5036927 - DNA, 25 bp, Homo sapien
aaaccatttgggctctcggggcaag

SEQ ID NO: 5036928 - DNA, 25 bp, Homo sapien
ctctcagaagagctttcaaggtggc

SEQ ID NO: 5036929 - DNA, 25 bp, Homo sapien
gccagagctgggctctctcagaaga

SEQ ID NO: 5036930 - DNA, 25 bp, Homo sapien
gctctctcagaagagctttcaaggt

SEQ ID NO: 5036931 - DNA, 25 bp, Homo sapien
ctgcactgatggacagtgggccaga

SEQ ID NO: 5036932 - DNA, 25 bp, Homo sapien
ttctctttgagacagttccgctgca

SEQ ID NO: 5036933 - DNA, 25 bp, Homo sapien
tctgtagcagtgttattataactgc

SEQ ID NO: 5036934 - DNA, 25 bp, Homo sapien
tttgagacagttccgctgcaggatc

SEQ ID NO: 5036935 - DNA, 25 bp, Homo sapien
attcatgaaggtcataggagagaaa

SEQ ID NO: 5036936 - DNA, 25 bp, Homo sapien
tccacgtgagtgatgccagactcct

SEQ ID NO: 5036937 - DNA, 25 bp, Homo sapien
tgagtgatgccagactcctgctggc

SEQ ID NO: 5036938 - DNA, 25 bp, Homo sapien
cattctccacgtgagtgatgccaga

SEQ ID NO: 5036939 - DNA, 25 bp, Homo sapien
agaaacattctccacgtgagtgatg

SEQ ID NO: 5036940 - DNA, 25 bp, Homo sapien
catgtcaggacatgtttgctgaggt

SEQ ID NO: 5036941 - DNA, 25 bp, Homo sapien
gtggaagagcaagtacaggtgagtt

SEQ ID NO: 5036942 - DNA, 25 bp, Homo sapien
tcaaacatgtcaggacatgtttgct

SEQ ID NO: 5036943 - DNA, 25 bp, Homo sapien
gcaagtacaggtgagttgatgtgca

SEQ ID NO: 5036944 - DNA, 25 bp, Homo sapien
acagcttcatctcggatctctgctg

SEQ ID NO: 5036945 - DNA, 25 bp, Homo sapien
gaaacttagattcattgccacaaaa

SEQ ID NO: 5036946 - DNA, 25 bp, Homo sapien
tgtggttgcagtcacagtcactttc

SEQ ID NO: 5036947 - DNA, 25 bp, Homo sapien
tgtgtagcatgtcaactcaaatgtg

SEQ ID NO: 5036948 - DNA, 25 bp, Homo sapien
tatcttctgtccctttattaccaag

SEQ ID NO: 5036949 - DNA, 25 bp, Homo sapien
atggggattgggacagagggccaat

SEQ ID NO: 5036950 - DNA, 25 bp, Homo sapien
caggggaccgaagggtatcttctgt

SEQ ID NO: 5036951 - DNA, 25 bp, Homo sapien
gaggtgttcccatttcaggaatgtg

SEQ ID NO: 5036952 - DNA, 25 bp, Homo sapien
ccttggggatgggctctcagcagaa

SEQ ID NO: 5036953 - DNA, 25 bp, Homo sapien
aagcagcttgagcagaggtgactgt

SEQ ID NO: 5036954 - DNA, 25 bp, Homo sapien
ccttgacaagcgtgggaaagacagt

SEQ ID NO: 5036955 - DNA, 25 bp, Homo sapien
ggtatcctcattgacacagtgcctg

SEQ ID NO: 5036956 - DNA, 25 bp, Homo sapien
tgatgcatcactgggcaagctgggc

SEQ ID NO: 5036957 - DNA, 25 bp, Homo sapien
cccactattgcggtgtgatgcatca

SEQ ID NO: 5036958 - DNA, 25 bp, Homo sapien
ctaccctgttcctactgccggaatt

SEQ ID NO: 5036959 - DNA, 25 bp, Homo sapien
tgaggttctaccctgttcctactgc

SEQ ID NO: 5036960 - DNA, 25 bp, Homo sapien
cttcctgaggttctaccctgttcct

SEQ ID NO: 5036961 - DNA, 25 bp, Homo sapien
caggttcttggaggccaccgccctt

SEQ ID NO: 5036962 - DNA, 25 bp, Homo sapien
tgtgagtgaggtgtcaggttcccct

SEQ ID NO: 5036963 - DNA, 25 bp, Homo sapien
ctgtgagtgaggtgtcaggttcccc

SEQ ID NO: 5036964 - DNA, 25 bp, Homo sapien
aggttccccttcctgcaggcatccc

SEQ ID NO: 5036965 - DNA, 25 bp, Homo sapien
ccccttcctgcaggcatccccacat

SEQ ID NO: 5036966 - DNA, 25 bp, Homo sapien
ctgtgcttccaaaatcgcaaaataa

SEQ ID NO: 5036967 - DNA, 25 bp, Homo sapien
taattttctctggttgatgctattt

SEQ ID NO: 5036968 - DNA, 25 bp, Homo sapien
tgcttccaaaatcgcaaaataattt

SEQ ID NO: 5036969 - DNA, 25 bp, Homo sapien
aataattttctctggttgatgctat

SEQ ID NO: 5036970 - DNA, 25 bp, Homo sapien
tggtagcctcatcttgcttgaatct

SEQ ID NO: 5036971 - DNA, 25 bp, Homo sapien
caaacaccttcagcagtgggcatga

SEQ ID NO: 5036972 - DNA, 25 bp, Homo sapien
gaatctacgtctctcaagacttgga

SEQ ID NO: 5036973 - DNA, 25 bp, Homo sapien
cagtttggggaaccgttctctgaga

SEQ ID NO: 5036974 - DNA, 25 bp, Homo sapien
gttctttactgaagtcgatttatcg

SEQ ID NO: 5036975 - DNA, 25 bp, Homo sapien
aaattattgcggttctttactgaag

SEQ ID NO: 5036976 - DNA, 25 bp, Homo sapien
aagctgataaattattgcggttctt

SEQ ID NO: 5036977 - DNA, 25 bp, Homo sapien
tattgcggttctttactgaagtcga

SEQ ID NO: 5036978 - DNA, 25 bp, Homo sapien
ggctgattgagcatattcatggagc

SEQ ID NO: 5036979 - DNA, 25 bp, Homo sapien
tctcaagttgtgtcagagcaaaagg

SEQ ID NO: 5036980 - DNA, 25 bp, Homo sapien
caataatgtagattacgggtcctgt

SEQ ID NO: 5036981 - DNA, 25 bp, Homo sapien
atttcttccacaggtcccgacagac

SEQ ID NO: 5036982 - DNA, 25 bp, Homo sapien
tgtaacaagatacgcagagtcaaat

SEQ ID NO: 5036983 - DNA, 25 bp, Homo sapien
cagctcagtgtaacaagatacgcag

SEQ ID NO: 5036984 - DNA, 25 bp, Homo sapien
gatacgcagagtcaaatttacaaag

SEQ ID NO: 5036985 - DNA, 25 bp, Homo sapien
caaagagtgttattgatgttctgtg

SEQ ID NO: 5036986 - DNA, 25 bp, Homo sapien
ctgttcatctgagaaagcatggctt

SEQ ID NO: 5036987 - DNA, 25 bp, Homo sapien
gagaaagcatggcttcttccttgtt

SEQ ID NO: 5036988 - DNA, 25 bp, Homo sapien
agaaagcatggcttcttccttgttt

SEQ ID NO: 5036989 - DNA, 25 bp, Homo sapien
tcatctgagaaagcatggcttcttc

SEQ ID NO: 5036990 - DNA, 25 bp, Homo sapien
tttgcctgcatagggctggaaatgt

SEQ ID NO: 5036991 - DNA, 25 bp, Homo sapien
tttgttggacaacctttagttggca

SEQ ID NO: 5036992 - DNA, 25 bp, Homo sapien
taagcttttggtgattttgcctgca

SEQ ID NO: 5036993 - DNA, 25 bp, Homo sapien
tagttgtggtccagtatctgatggg

SEQ ID NO: 5036994 - DNA, 25 bp, Homo sapien
tccaggccccttgcaaggagccttt

SEQ ID NO: 5036995 - DNA, 25 bp, Homo sapien
ctggaaacaagccaacatgcacccg

SEQ ID NO: 5036996 - DNA, 25 bp, Homo sapien
gagcctttttcatggccaactggaa

SEQ ID NO: 5036997 - DNA, 25 bp, Homo sapien
cagtgtaaatccctcagagccgtgc

SEQ ID NO: 5036998 - DNA, 25 bp, Homo sapien
gcgtgacagaaggtaacatctgtgg

SEQ ID NO: 5036999 - DNA, 25 bp, Homo sapien
tgcgtgacagaaggtaacatctgtg

SEQ ID NO: 5037000 - DNA, 25 bp, Homo sapien
ctgcgtgacagaaggtaacatctgt

SEQ ID NO: 5037001 - DNA, 25 bp, Homo sapien
tggagagataaggagaatttccgtc

SEQ ID NO: 5037002 - DNA, 25 bp, Homo sapien
ctggagagataaggagaatttccgt

SEQ ID NO: 5037003 - DNA, 25 bp, Homo sapien
gagagataaggagaatttccgtctg

SEQ ID NO: 5037004 - DNA, 25 bp, Homo sapien
ggagagataaggagaatttccgtct

SEQ ID NO: 5037005 - DNA, 25 bp, Homo sapien
gagccagaggcccaagcaggtgttt

SEQ ID NO: 5037006 - DNA, 25 bp, Homo sapien
ccaagcaggtgttttgcaccaactc

SEQ ID NO: 5037007 - DNA, 25 bp, Homo sapien
gctatgcagcgtggtgataatgaca

SEQ ID NO: 5037008 - DNA, 25 bp, Homo sapien
cacatttctgccgaataagctgcta

SEQ ID NO: 5037009 - DNA, 25 bp, Homo sapien
acttggttgcgtactgttcacctcc

SEQ ID NO: 5037010 - DNA, 25 bp, Homo sapien
gatggtgcaagcagccacactttcc

SEQ ID NO: 5037011 - DNA, 25 bp, Homo sapien
aaggctgctagatggtgcaagcagc

SEQ ID NO: 5037012 - DNA, 25 bp, Homo sapien
tcctcttcacttggttgcgtactgt

SEQ ID NO: 5037013 - DNA, 25 bp, Homo sapien
gacacatttgagtggtccttctgaa

SEQ ID NO: 5037014 - DNA, 25 bp, Homo sapien
gctccatgtacagctacattatttg

SEQ ID NO: 5037015 - DNA, 25 bp, Homo sapien
tgctttgcttacaaacatcagctcc

SEQ ID NO: 5037016 - DNA, 25 bp, Homo sapien
gaaaacatgggactctttgtttgac

SEQ ID NO: 5037017 - DNA, 25 bp, Homo sapien
gaaaggttggcctgcggccagctct

SEQ ID NO: 5037018 - DNA, 25 bp, Homo sapien
agctctgggagttcgtcaccgggaa

SEQ ID NO: 5037019 - DNA, 25 bp, Homo sapien
agattgtctggctcccgtgcacaag

SEQ ID NO: 5037020 - DNA, 25 bp, Homo sapien
cacaaggacccgagtgtgcataggg

SEQ ID NO: 5037021 - DNA, 25 bp, Homo sapien
tttggaattcaccaatggccttggg

SEQ ID NO: 5037022 - DNA, 25 bp, Homo sapien
cagtgtgaatccgtgagtttggaat

SEQ ID NO: 5037023 - DNA, 25 bp, Homo sapien
gagtttggaattcaccaatggcctt

SEQ ID NO: 5037024 - DNA, 25 bp, Homo sapien
tggaattcaccaatggccttgggaa

SEQ ID NO: 5037025 - DNA, 25 bp, Homo sapien
ctttcagcaaatggtgtaggtctgg

SEQ ID NO: 5037026 - DNA, 25 bp, Homo sapien
ttcagcaaatggtgtaggtctggct

SEQ ID NO: 5037027 - DNA, 25 bp, Homo sapien
caaatggtgtaggtctggctgttcc

SEQ ID NO: 5037028 - DNA, 25 bp, Homo sapien
cagcaaatggtgtaggtctggctgt

SEQ ID NO: 5037029 - DNA, 25 bp, Homo sapien
gagggctctggacagctctaaagct

SEQ ID NO: 5037030 - DNA, 25 bp, Homo sapien
ggctctggacagctctaaagctcat

SEQ ID NO: 5037031 - DNA, 25 bp, Homo sapien
ggagggctctggacagctctaaagc

SEQ ID NO: 5037032 - DNA, 25 bp, Homo sapien
ctggagggctctggacagctctaaa

SEQ ID NO: 5037033 - DNA, 25 bp, Homo sapien
tagaggctcctacaccattgccagc

SEQ ID NO: 5037034 - DNA, 25 bp, Homo sapien
tcctacaccattgccagcccacagg

SEQ ID NO: 5037035 - DNA, 25 bp, Homo sapien
actttagaggctcctacaccattgc

SEQ ID NO: 5037036 - DNA, 25 bp, Homo sapien
gcactttagaggctcctacaccatt

SEQ ID NO: 5037037 - DNA, 25 bp, Homo sapien
ataaaacatattggcggcccctcct

SEQ ID NO: 5037038 - DNA, 25 bp, Homo sapien
gcggcccctcctctcaagatctgct

SEQ ID NO: 5037039 - DNA, 25 bp, Homo sapien
atattggcggcccctcctctcaaga

SEQ ID NO: 5037040 - DNA, 25 bp, Homo sapien
ggcccctcctctcaagatctgctct

SEQ ID NO: 5037041 - DNA, 25 bp, Homo sapien
ggaagcccttggagatgccactctt

SEQ ID NO: 5037042 - DNA, 25 bp, Homo sapien
gaagcccttggagatgccactcttc

SEQ ID NO: 5037043 - DNA, 25 bp, Homo sapien
gatttctaaatatcgtacatgctaa

SEQ ID NO: 5037044 - DNA, 25 bp, Homo sapien
tcggttagggagaagatacatattc

SEQ ID NO: 5037045 - DNA, 25 bp, Homo sapien
taagccctgggtttatagtcaataa

SEQ ID NO: 5037046 - DNA, 25 bp, Homo sapien
caggcatactaccttggaaagtaaa

SEQ ID NO: 5037047 - DNA, 25 bp, Homo sapien
tgttcaagttcaaagagcactgggt

SEQ ID NO: 5037048 - DNA, 25 bp, Homo sapien
ttaaagtcaatcagcctcggaatgg

SEQ ID NO: 5037049 - DNA, 25 bp, Homo sapien
tgtctaggactctcaactcaatgga

SEQ ID NO: 5037050 - DNA, 25 bp, Homo sapien
cagactgtggactccttgagaaggc

SEQ ID NO: 5037051 - DNA, 25 bp, Homo sapien
atgtactctcactgatctcctttaa

SEQ ID NO: 5037052 - DNA, 25 bp, Homo sapien
atctcctttaatccattcaaagttt

SEQ ID NO: 5037053 - DNA, 25 bp, Homo sapien
ctcactgatctcctttaatccattc

SEQ ID NO: 5037054 - DNA, 25 bp, Homo sapien
tcctttaatccattcaaagtttcaa

SEQ ID NO: 5037055 - DNA, 25 bp, Homo sapien
gtcgtcgatttcacatgcattcaaa

SEQ ID NO: 5037056 - DNA, 25 bp, Homo sapien
gatttcacatgcattcaaatgggtg

SEQ ID NO: 5037057 - DNA, 25 bp, Homo sapien
cttgagaaagtcgtcgatttcacat

SEQ ID NO: 5037058 - DNA, 25 bp, Homo sapien
gagaaagtcgtcgatttcacatgca

SEQ ID NO: 5037059 - DNA, 25 bp, Homo sapien
ttcactcgtgcttgtggactaacta

SEQ ID NO: 5037060 - DNA, 25 bp, Homo sapien
tagagtgctgtatccatcttaattt

SEQ ID NO: 5037061 - DNA, 25 bp, Homo sapien
tgttcagtaatttcactcgtgcttg

SEQ ID NO: 5037062 - DNA, 25 bp, Homo sapien
tgtggactaactattgcttcttgac

SEQ ID NO: 5037063 - DNA, 25 bp, Homo sapien
tgagggatgaagctgcacaggaaca

SEQ ID NO: 5037064 - DNA, 25 bp, Homo sapien
catgtgacatgtgaaggtaagggag

SEQ ID NO: 5037065 - DNA, 25 bp, Homo sapien
gcttcctgttcccccaaactgttca

SEQ ID NO: 5037066 - DNA, 25 bp, Homo sapien
ttggacccgaggtcaaggcaagctt

SEQ ID NO: 5037067 - DNA, 25 bp, Homo sapien
gccatgtgacatgtgaaggtaaggg

SEQ ID NO: 5037068 - DNA, 25 bp, Homo sapien
aatattccttacacttgcattttgc

SEQ ID NO: 5037069 - DNA, 25 bp, Homo sapien
tgccagtggaatcgaagttgctcaa

SEQ ID NO: 5037070 - DNA, 25 bp, Homo sapien
tggttgaacttagactgccagtgga

SEQ ID NO: 5037071 - DNA, 25 bp, Homo sapien
gctcaatagtcagagaatacaaggt

SEQ ID NO: 5037072 - DNA, 25 bp, Homo sapien
ccaaagttgaggagccgtatctgat

SEQ ID NO: 5037073 - DNA, 25 bp, Homo sapien
taatatgctcgctcaggcctctctt

SEQ ID NO: 5037074 - DNA, 25 bp, Homo sapien
gaggtccaaagttgaggagccgtat

SEQ ID NO: 5037075 - DNA, 25 bp, Homo sapien
gggtggagcatgctaatatgctcgc

SEQ ID NO: 5037076 - DNA, 25 bp, Homo sapien
gacagcccctgtctttgggtcaagg

SEQ ID NO: 5037077 - DNA, 25 bp, Homo sapien
gcttgttgcttcgacgcctttcaca

SEQ ID NO: 5037078 - DNA, 25 bp, Homo sapien
taaagcaacctgcaactgtacccag

SEQ ID NO: 5037079 - DNA, 25 bp, Homo sapien
caaagacgtttgtgtgctgaaccct

SEQ ID NO: 5037080 - DNA, 25 bp, Homo sapien
ccattcagtaatggcttttcctggc

SEQ ID NO: 5037081 - DNA, 25 bp, Homo sapien
gccctttatggagaaattcagctga

SEQ ID NO: 5037082 - DNA, 25 bp, Homo sapien
ttcctggcccaaccctaagtcaagc

SEQ ID NO: 5037083 - DNA, 25 bp, Homo sapien
caaccctaagtcaagccctttatgg

SEQ ID NO: 5037084 - DNA, 25 bp, Homo sapien
gcatgtggatctcatacatactgag

SEQ ID NO: 5037085 - DNA, 25 bp, Homo sapien
tcttgtcactgtatttggagtgggc

SEQ ID NO: 5037086 - DNA, 25 bp, Homo sapien
tgcttcctgacagccgacttaataa

SEQ ID NO: 5037087 - DNA, 25 bp, Homo sapien
taagcactgtcagaggtaagtagcc

SEQ ID NO: 5037088 - DNA, 25 bp, Homo sapien
tgctgctgcctcataaggaccctca

SEQ ID NO: 5037089 - DNA, 25 bp, Homo sapien
agccagacagcttcttcaagtctct

SEQ ID NO: 5037090 - DNA, 25 bp, Homo sapien
ttctggtttctagggatggcctgca

SEQ ID NO: 5037091 - DNA, 25 bp, Homo sapien
caagataaactcctcattccaagag

SEQ ID NO: 5037092 - DNA, 25 bp, Homo sapien
cattgtcttatctctgtgcatgcca

SEQ ID NO: 5037093 - DNA, 25 bp, Homo sapien
ttaacttttgtaccctgtgtgccac

SEQ ID NO: 5037094 - DNA, 25 bp, Homo sapien
tgggactagggtcatgcatgaccct

SEQ ID NO: 5037095 - DNA, 25 bp, Homo sapien
gtaagtgatagagcccaagtaacca

SEQ ID NO: 5037096 - DNA, 25 bp, Homo sapien
tcaggagccccaggataaaacatat

SEQ ID NO: 5037097 - DNA, 25 bp, Homo sapien
aaaagcacatctagaggcagcccct

SEQ ID NO: 5037098 - DNA, 25 bp, Homo sapien
ggtgatgctcgcaggctaaattgct

SEQ ID NO: 5037099 - DNA, 25 bp, Homo sapien
taactttcccagtgaggtgatgctc

SEQ ID NO: 5037100 - DNA, 25 bp, Homo sapien
ttgccatcctcattatttaccagct

SEQ ID NO: 5037101 - DNA, 25 bp, Homo sapien
gatctgggctggtgtatcctgcagc

SEQ ID NO: 5037102 - DNA, 25 bp, Homo sapien
taattagcttaaccacatctgctgt

SEQ ID NO: 5037103 - DNA, 25 bp, Homo sapien
gcctattgcgcatttgcagtgtctg

SEQ ID NO: 5037104 - DNA, 25 bp, Homo sapien
gtgaaaacagaatggtgatatattt

SEQ ID NO: 5037105 - DNA, 25 bp, Homo sapien
cagaatggtgatatatttgcatttt

SEQ ID NO: 5037106 - DNA, 25 bp, Homo sapien
aaaacagaatggtgatatatttgca

SEQ ID NO: 5037107 - DNA, 25 bp, Homo sapien
ctgtgaaaacagaatggtgatatat

SEQ ID NO: 5037108 - DNA, 25 bp, Homo sapien
gctggaaacattacttttgttggca

SEQ ID NO: 5037109 - DNA, 25 bp, Homo sapien
ctggaaacattacttttgttggcaa

SEQ ID NO: 5037110 - DNA, 25 bp, Homo sapien
gatgaggtggttgtgtggcactgtt

SEQ ID NO: 5037111 - DNA, 25 bp, Homo sapien
taagctggaaacattacttttgttg

SEQ ID NO: 5037112 - DNA, 25 bp, Homo sapien
tgagcaaataccgagtggaggtacg

SEQ ID NO: 5037113 - DNA, 25 bp, Homo sapien
tcctgccaacattcggccggtgctg

SEQ ID NO: 5037114 - DNA, 25 bp, Homo sapien
tacgggtcagcggaggagctgagtt

SEQ ID NO: 5037115 - DNA, 25 bp, Homo sapien
agacatcacccagatctacccggtt

SEQ ID NO: 5037116 - DNA, 25 bp, Homo sapien
gagcaggtctaacttttccacacag

SEQ ID NO: 5037117 - DNA, 25 bp, Homo sapien
aacacagcgtggttctcagggagca

SEQ ID NO: 5037118 - DNA, 25 bp, Homo sapien
gcagtggccccacctgaattgtagg

SEQ ID NO: 5037119 - DNA, 25 bp, Homo sapien
gatccagagctacaagaacaacccg

SEQ ID NO: 5037120 - DNA, 25 bp, Homo sapien
tgttttagggtttcagatgtccact

SEQ ID NO: 5037121 - DNA, 25 bp, Homo sapien
gttttagggtttcagatgtccacta

SEQ ID NO: 5037122 - DNA, 25 bp, Homo sapien
ttttagggtttcagatgtccactag

SEQ ID NO: 5037123 - DNA, 25 bp, Homo sapien
ctcactgtgtgctccgggagggccc

SEQ ID NO: 5037124 - DNA, 25 bp, Homo sapien
gctggaaccgttgccatttcccaag

SEQ ID NO: 5037125 - DNA, 25 bp, Homo sapien
gggtgacaatgcctctctccacact

SEQ ID NO: 5037126 - DNA, 25 bp, Homo sapien
tcatcccatggtcctgaagagattt

SEQ ID NO: 5037127 - DNA, 25 bp, Homo sapien
cagttccacggagcttcctttccaa

SEQ ID NO: 5037128 - DNA, 25 bp, Homo sapien
caaagcaggaccaacctcagttcca

SEQ ID NO: 5037129 - DNA, 25 bp, Homo sapien
accactgtgggtcgctgacctccag

SEQ ID NO: 5037130 - DNA, 25 bp, Homo sapien
tgacctccagcgtcaaacaaagcag

SEQ ID NO: 5037131 - DNA, 25 bp, Homo sapien
agctggttccagtgagaggcctcat

SEQ ID NO: 5037132 - DNA, 25 bp, Homo sapien
aagctggttccagtgagaggcctca

SEQ ID NO: 5037133 - DNA, 25 bp, Homo sapien
ccaaagctggttccagtgagaggcc

SEQ ID NO: 5037134 - DNA, 25 bp, Homo sapien
tgctccatgactgccaaagctggtt

SEQ ID NO: 5037135 - DNA, 25 bp, Homo sapien
agttctcacttaggatttgtgtggc

SEQ ID NO: 5037136 - DNA, 25 bp, Homo sapien
tagaaaacttggcatctagcagatg

SEQ ID NO: 5037137 - DNA, 25 bp, Homo sapien
aacagtctggttaataagaagggtg

SEQ ID NO: 5037138 - DNA, 25 bp, Homo sapien
tctggccttacaagacaagaaaaca

SEQ ID NO: 5037139 - DNA, 25 bp, Homo sapien
tgacttagctttaagccttcccacc

SEQ ID NO: 5037140 - DNA, 25 bp, Homo sapien
ggaagaggaggtccgtctttctgct

SEQ ID NO: 5037141 - DNA, 25 bp, Homo sapien
tgctccctactctcactgttcattg

SEQ ID NO: 5037142 - DNA, 25 bp, Homo sapien
tcaggcctgctttggtgaatgggca

SEQ ID NO: 5037143 - DNA, 25 bp, Homo sapien
gacagtttttgcttagtaatgacca

SEQ ID NO: 5037144 - DNA, 25 bp, Homo sapien
gtggaagtatggaaataggacagtt

SEQ ID NO: 5037145 - DNA, 25 bp, Homo sapien
gaaataggacagtttttgcttagta

SEQ ID NO: 5037146 - DNA, 25 bp, Homo sapien
gcttagtaatgaccacaccctctgg

SEQ ID NO: 5037147 - DNA, 25 bp, Homo sapien
catgacgttaaaccaggtaaaggcg

SEQ ID NO: 5037148 - DNA, 25 bp, Homo sapien
ttctctccacctatcatgacgttaa

SEQ ID NO: 5037149 - DNA, 25 bp, Homo sapien
ttcgtcttcattgtcgttgtaaagc

SEQ ID NO: 5037150 - DNA, 25 bp, Homo sapien
caaaacacattcgtcttcattgtcg

SEQ ID NO: 5037151 - DNA, 25 bp, Homo sapien
ctgctgtgagacttggtagttgctg

SEQ ID NO: 5037152 - DNA, 25 bp, Homo sapien
gacttggtagttgctgtgaagaatc

SEQ ID NO: 5037153 - DNA, 25 bp, Homo sapien
tggtagttgctgtgaagaatcaaac

SEQ ID NO: 5037154 - DNA, 25 bp, Homo sapien
tgctgtgagacttggtagttgctgt

SEQ ID NO: 5037155 - DNA, 25 bp, Homo sapien
cagaagcgtacacgtctcacgtagc

SEQ ID NO: 5037156 - DNA, 25 bp, Homo sapien
ttaacaggaagcagggtagccggct

SEQ ID NO: 5037157 - DNA, 25 bp, Homo sapien
acaggaagcagggtagccggcttca

SEQ ID NO: 5037158 - DNA, 25 bp, Homo sapien
gaatcacagcggaaggtgaaacaga

SEQ ID NO: 5037159 - DNA, 25 bp, Homo sapien
gagtcagggtagcacctagtgtctc

SEQ ID NO: 5037160 - DNA, 25 bp, Homo sapien
gagcagagggtgtctctttcagagt

SEQ ID NO: 5037161 - DNA, 25 bp, Homo sapien
agagggtgtctctttcagagtcagg

SEQ ID NO: 5037162 - DNA, 25 bp, Homo sapien
agagtcagggtagcacctagtgtct

SEQ ID NO: 5037163 - DNA, 25 bp, Homo sapien
attccagcccaaaacttatctcaat

SEQ ID NO: 5037164 - DNA, 25 bp, Homo sapien
tcgtggtttcctaaattccagccca

SEQ ID NO: 5037165 - DNA, 25 bp, Homo sapien
ttctggaagaattcgtggtttccta

SEQ ID NO: 5037166 - DNA, 25 bp, Homo sapien
tctggaagaattcgtggtttcctaa

SEQ ID NO: 5037167 - DNA, 25 bp, Homo sapien
tctgatctagaccacactatctgga

SEQ ID NO: 5037168 - DNA, 25 bp, Homo sapien
gtaactttgaagctaatacccactg

SEQ ID NO: 5037169 - DNA, 25 bp, Homo sapien
cagttatctcctactttaaaggcag

SEQ ID NO: 5037170 - DNA, 25 bp, Homo sapien
tcacacagtgttttcagttcccagt

SEQ ID NO: 5037171 - DNA, 25 bp, Homo sapien
tcaaacggtattaagagttctggta

SEQ ID NO: 5037172 - DNA, 25 bp, Homo sapien
cacagcctcactggtatctgttgtt

SEQ ID NO: 5037173 - DNA, 25 bp, Homo sapien
tagtgctgcgatgaaaatacaagcg

SEQ ID NO: 5037174 - DNA, 25 bp, Homo sapien
caccattgatgggaacttaagttga

SEQ ID NO: 5037175 - DNA, 25 bp, Homo sapien
caccatgggactcaggcaaagtctc

SEQ ID NO: 5037176 - DNA, 25 bp, Homo sapien
tcagctgtggctatgacctatggaa

SEQ ID NO: 5037177 - DNA, 25 bp, Homo sapien
gcagcacggctcaggatttccagat

SEQ ID NO: 5037178 - DNA, 25 bp, Homo sapien
gtgtaatgaagacctgcgctgcctg

SEQ ID NO: 5037179 - DNA, 25 bp, Homo sapien
ttatgcctcacaacatgggagcttt

SEQ ID NO: 5037180 - DNA, 25 bp, Homo sapien
gacatgtgggcctttttatgcctca

SEQ ID NO: 5037181 - DNA, 25 bp, Homo sapien
acctccaagctcagtcacgtggtcg

SEQ ID NO: 5037182 - DNA, 25 bp, Homo sapien
gcttccctgagggatgatccacctc

SEQ ID NO: 5037183 - DNA, 25 bp, Homo sapien
actattgctattgctagagctgtgg

SEQ ID NO: 5037184 - DNA, 25 bp, Homo sapien
caccagattcacctgccatttatgc

SEQ ID NO: 5037185 - DNA, 25 bp, Homo sapien
tattgctattgctagagctgtggcc

SEQ ID NO: 5037186 - DNA, 25 bp, Homo sapien
caaaggaaggtgaagtgtgattgac

SEQ ID NO: 5037187 - DNA, 25 bp, Homo sapien
cccattcatggtccaccctgccaca

SEQ ID NO: 5037188 - DNA, 25 bp, Homo sapien
tattcaagagtctcaaatcttgaca

SEQ ID NO: 5037189 - DNA, 25 bp, Homo sapien
aagagtctcaaatcttgacagcatt

SEQ ID NO: 5037190 - DNA, 25 bp, Homo sapien
ttcaagagtctcaaatcttgacagc

SEQ ID NO: 5037191 - DNA, 25 bp, Homo sapien
ctgcagagaaatcactcaaaactcc

SEQ ID NO: 5037192 - DNA, 25 bp, Homo sapien
gcagagaaatcactcaaaactccca

SEQ ID NO: 5037193 - DNA, 25 bp, Homo sapien
cacagcatcaggctctgccaagttt

SEQ ID NO: 5037194 - DNA, 25 bp, Homo sapien
tcaggctctgccaagtttttgtcct

SEQ ID NO: 5037195 - DNA, 25 bp, Homo sapien
tgtggtggaagccactcccgtggca

SEQ ID NO: 5037196 - DNA, 25 bp, Homo sapien
tcatctccccacaacacccaggaca

SEQ ID NO: 5037197 - DNA, 25 bp, Homo sapien
tcccgtggcagccccgtgatccgga

SEQ ID NO: 5037198 - DNA, 25 bp, Homo sapien
tccaggtaggatccagactcatctc

SEQ ID NO: 5037199 - DNA, 25 bp, Homo sapien
ttgattaaataacccacttccagat

SEQ ID NO: 5037200 - DNA, 25 bp, Homo sapien
aagcaagtagcaagggacccatttc

SEQ ID NO: 5037201 - DNA, 25 bp, Homo sapien
ttcttgttgtatccatcatctcttt

SEQ ID NO: 5037202 - DNA, 25 bp, Homo sapien
ttcccaagcaagtagcaagggaccc

SEQ ID NO: 5037203 - DNA, 25 bp, Homo sapien
atttaactccttgccagtattttca

SEQ ID NO: 5037204 - DNA, 25 bp, Homo sapien
ttcaaggtctccataatctgattaa

SEQ ID NO: 5037205 - DNA, 25 bp, Homo sapien
ccataatctgattaatatttaactc

SEQ ID NO: 5037206 - DNA, 25 bp, Homo sapien
gtattttcatcacccaaccccttca

SEQ ID NO: 5037207 - DNA, 25 bp, Homo sapien
ttccatagctcaaggaaagcctcct

SEQ ID NO: 5037208 - DNA, 25 bp, Homo sapien
gcctcctcctgtagaagtaaacaag

SEQ ID NO: 5037209 - DNA, 25 bp, Homo sapien
gctggtctattaccccatgagaagg

SEQ ID NO: 5037210 - DNA, 25 bp, Homo sapien
gaggagcgcattgaacaaaccaact

SEQ ID NO: 5037211 - DNA, 25 bp, Homo sapien
cacaattcatcatatgggtcagagg

SEQ ID NO: 5037212 - DNA, 25 bp, Homo sapien
aggaaatatctgtcagaaccccagc

SEQ ID NO: 5037213 - DNA, 25 bp, Homo sapien
ggaaatatctgtcagaaccccagca

SEQ ID NO: 5037214 - DNA, 25 bp, Homo sapien
aattcatcatatgggtcagaggaaa

SEQ ID NO: 5037215 - DNA, 25 bp, Homo sapien
tgttggacaccaaatacatcatggg

SEQ ID NO: 5037216 - DNA, 25 bp, Homo sapien
tccgataccataagagtctcaagag

SEQ ID NO: 5037217 - DNA, 25 bp, Homo sapien
tatagccaggattcagcttagagct

SEQ ID NO: 5037218 - DNA, 25 bp, Homo sapien
cactgtgaactttgtgggtcactca

SEQ ID NO: 5037219 - DNA, 25 bp, Homo sapien
catctgtgatcgttgcaaagggaaa

SEQ ID NO: 5037220 - DNA, 25 bp, Homo sapien
tataaggcataacctggaagggcaa

SEQ ID NO: 5037221 - DNA, 25 bp, Homo sapien
gacagtgcaatatctaggacccggg

SEQ ID NO: 5037222 - DNA, 25 bp, Homo sapien
tattcattaggtacccgactgccac

SEQ ID NO: 5037223 - DNA, 25 bp, Homo sapien
gaagtggtaagagcatacaccctca

SEQ ID NO: 5037224 - DNA, 25 bp, Homo sapien
gaaacatgtattggtactggtagct

SEQ ID NO: 5037225 - DNA, 25 bp, Homo sapien
tagttttcagcgaacaggtctcaca

SEQ ID NO: 5037226 - DNA, 25 bp, Homo sapien
ccttattacactggctagaagtggt

SEQ ID NO: 5037227 - DNA, 25 bp, Homo sapien
ggtgacataagaatccaatggctat

SEQ ID NO: 5037228 - DNA, 25 bp, Homo sapien
ggccctgctctcttgtgctttacaa

SEQ ID NO: 5037229 - DNA, 25 bp, Homo sapien
tatcctccatatatctctagagaga

SEQ ID NO: 5037230 - DNA, 25 bp, Homo sapien
caatagcttcaactaacagctgtgt

SEQ ID NO: 5037231 - DNA, 25 bp, Homo sapien
tcttgccagtgaactccaatatgtg

SEQ ID NO: 5037232 - DNA, 25 bp, Homo sapien
catgcctccaatacatgcttcagta

SEQ ID NO: 5037233 - DNA, 25 bp, Homo sapien
tactgacctgtcttgtagttcacta

SEQ ID NO: 5037234 - DNA, 25 bp, Homo sapien
tactttggccccattctattccaag

SEQ ID NO: 5037235 - DNA, 25 bp, Homo sapien
cactgcccctctcgcacatgtgagg

SEQ ID NO: 5037236 - DNA, 25 bp, Homo sapien
gccacggccattaacgacacactgc

SEQ ID NO: 5037237 - DNA, 25 bp, Homo sapien
atgtcccagcactacaggagcagcc

SEQ ID NO: 5037238 - DNA, 25 bp, Homo sapien
tctcgcacatgtgagggccggacag

SEQ ID NO: 5037239 - DNA, 25 bp, Homo sapien
tgcatgtgtgtcatcatttatatat

SEQ ID NO: 5037240 - DNA, 25 bp, Homo sapien
cacttttatgtctattggagcacta

SEQ ID NO: 5037241 - DNA, 25 bp, Homo sapien
taagtgaccatcaactgaagctgga

SEQ ID NO: 5037242 - DNA, 25 bp, Homo sapien
tatatcaaaaagagacctacacttt

SEQ ID NO: 5037243 - DNA, 25 bp, Homo sapien
gagcaccagggtttaaggcagaaag

SEQ ID NO: 5037244 - DNA, 25 bp, Homo sapien
tatgaagtcccgctagtgacgctgg

SEQ ID NO: 5037245 - DNA, 25 bp, Homo sapien
tacacagactatacattggagccat

SEQ ID NO: 5037246 - DNA, 25 bp, Homo sapien
caaaacaggttcttaaggcagacag

SEQ ID NO: 5037247 - DNA, 25 bp, Homo sapien
ccagccaataggaggctataagtaa

SEQ ID NO: 5037248 - DNA, 25 bp, Homo sapien
cataattacacgtagtgtgcctgcc

SEQ ID NO: 5037249 - DNA, 25 bp, Homo sapien
tctgctaccactaagagcaagacca

SEQ ID NO: 5037250 - DNA, 25 bp, Homo sapien
tctgtgccattttcacctactgctg

SEQ ID NO: 5037251 - DNA, 25 bp, Homo sapien
tgtatctcaggtgcagattccaggg

SEQ ID NO: 5037252 - DNA, 25 bp, Homo sapien
caggactaaagtagctcatgttgca

SEQ ID NO: 5037253 - DNA, 25 bp, Homo sapien
caaaagccctttctaaagtcacagg

SEQ ID NO: 5037254 - DNA, 25 bp, Homo sapien
tgtggcaaagcaccatactagggta

SEQ ID NO: 5037255 - DNA, 25 bp, Homo sapien
taataagaagttaagcaccacagta

SEQ ID NO: 5037256 - DNA, 25 bp, Homo sapien
tatggaagatacaaaccgaaattct

SEQ ID NO: 5037257 - DNA, 25 bp, Homo sapien
gaaaacagagtggactgccatcaat

SEQ ID NO: 5037258 - DNA, 25 bp, Homo sapien
cacaagttagggacaaaagaaagca

SEQ ID NO: 5037259 - DNA, 25 bp, Homo sapien
tctttgtgattaaccctctggccct

SEQ ID NO: 5037260 - DNA, 25 bp, Homo sapien
gatgtcctaagaagatcaagccaca

SEQ ID NO: 5037261 - DNA, 25 bp, Homo sapien
cacggtttcatgtagcagggagacc

SEQ ID NO: 5037262 - DNA, 25 bp, Homo sapien
tatcagggaacaacgaaaaatgctt

SEQ ID NO: 5037263 - DNA, 25 bp, Homo sapien
aatgcagccaatagtcaccccaaca

SEQ ID NO: 5037264 - DNA, 25 bp, Homo sapien
agaatgcagccaatagtcaccccaa

SEQ ID NO: 5037265 - DNA, 25 bp, Homo sapien
tagaatgcagccaatagtcacccca

SEQ ID NO: 5037266 - DNA, 25 bp, Homo sapien
ctagaatgcagccaatagtcacccc

SEQ ID NO: 5037267 - DNA, 25 bp, Homo sapien
gtcaaactctgtactgggtgtacca

SEQ ID NO: 5037268 - DNA, 25 bp, Homo sapien
ccaggaacttctagttaggtacaca

SEQ ID NO: 5037269 - DNA, 25 bp, Homo sapien
gtaccatggagatggactaatctta

SEQ ID NO: 5037270 - DNA, 25 bp, Homo sapien
gtttcatttcctcatacaaatattt

SEQ ID NO: 5037271 - DNA, 25 bp, Homo sapien
ctttggtgtgagatcaggaattgac

SEQ ID NO: 5037272 - DNA, 25 bp, Homo sapien
gaattgacaggcctaacctggaagc

SEQ ID NO: 5037273 - DNA, 25 bp, Homo sapien
cgtgtttgccacatgtcaacttgct

SEQ ID NO: 5037274 - DNA, 25 bp, Homo sapien
aaatgtgtactaagacgtgtttgcc

SEQ ID NO: 5037275 - DNA, 25 bp, Homo sapien
caagtccagctagatctgacacaag

SEQ ID NO: 5037276 - DNA, 25 bp, Homo sapien
gatctgacacaagatttcccaaagc

SEQ ID NO: 5037277 - DNA, 25 bp, Homo sapien
gtccagctagatctgacacaagatt

SEQ ID NO: 5037278 - DNA, 25 bp, Homo sapien
gctagatctgacacaagatttccca

SEQ ID NO: 5037279 - DNA, 25 bp, Homo sapien
ctgccatagttgaaattcccaaaat

SEQ ID NO: 5037280 - DNA, 25 bp, Homo sapien
tcccaaaataattccaatagacatt

SEQ ID NO: 5037281 - DNA, 25 bp, Homo sapien
caatagacatttcaatatgggttcc

SEQ ID NO: 5037282 - DNA, 25 bp, Homo sapien
aataattccaatagacatttcaata

SEQ ID NO: 5037283 - DNA, 25 bp, Homo sapien
taattgcattatccaaaaagccaaa

SEQ ID NO: 5037284 - DNA, 25 bp, Homo sapien
aagccaaaccctatgaaaggtatcg

SEQ ID NO: 5037285 - DNA, 25 bp, Homo sapien
gaaaggtatcgcattgtggatgaat

SEQ ID NO: 5037286 - DNA, 25 bp, Homo sapien
tgcattatccaaaaagccaaaccct

SEQ ID NO: 5037287 - DNA, 25 bp, Homo sapien
tggggtgggtggtggagcttccaat

SEQ ID NO: 5037288 - DNA, 25 bp, Homo sapien
tcctggggtgggtggtggagcttcc

SEQ ID NO: 5037289 - DNA, 25 bp, Homo sapien
atatctcagctgtcctggggtgggt

SEQ ID NO: 5037290 - DNA, 25 bp, Homo sapien
catatctcagctgtcctggggtggg

SEQ ID NO: 5037291 - DNA, 25 bp, Homo sapien
caggaagtagacatgacaacacaaa

SEQ ID NO: 5037292 - DNA, 25 bp, Homo sapien
gcaggaagtagacatgacaacacaa

SEQ ID NO: 5037293 - DNA, 25 bp, Homo sapien
cacaaaagtgcaggaagtagacatg

SEQ ID NO: 5037294 - DNA, 25 bp, Homo sapien
aaagtgcaggaagtagacatgacaa

SEQ ID NO: 5037295 - DNA, 25 bp, Homo sapien
tgtaagactgtactataccaaagct

SEQ ID NO: 5037296 - DNA, 25 bp, Homo sapien
acttccttcgcaagcttcacaatgg

SEQ ID NO: 5037297 - DNA, 25 bp, Homo sapien
gggtctctgctgaggatacttcctt

SEQ ID NO: 5037298 - DNA, 25 bp, Homo sapien
caatctcaggtttgggatatctgca

SEQ ID NO: 5037299 - DNA, 25 bp, Homo sapien
caaacttgactcttactctggagct

SEQ ID NO: 5037300 - DNA, 25 bp, Homo sapien
ctggagctccagagttgatatatac

SEQ ID NO: 5037301 - DNA, 25 bp, Homo sapien
tctggagagctttcctataggttaa

SEQ ID NO: 5037302 - DNA, 25 bp, Homo sapien
ctgaaaatgaactcaaagtctggag

SEQ ID NO: 5037303 - DNA, 25 bp, Homo sapien
tgactctactctgacacactggttg

SEQ ID NO: 5037304 - DNA, 25 bp, Homo sapien
tgacacactggttgaaggatttggg

SEQ ID NO: 5037305 - DNA, 25 bp, Homo sapien
ggggcaagctaatcttcgcatcagt

SEQ ID NO: 5037306 - DNA, 25 bp, Homo sapien
tactctgacacactggttgaaggat

SEQ ID NO: 5037307 - DNA, 25 bp, Homo sapien
tcagaagtgcgatccaaagtcgagc

SEQ ID NO: 5037308 - DNA, 25 bp, Homo sapien
gaaacaagcggccaagtgaggtacc

SEQ ID NO: 5037309 - DNA, 25 bp, Homo sapien
gggtgcttctctctaggattccaaa

SEQ ID NO: 5037310 - DNA, 25 bp, Homo sapien
taatcattaactggcctggatccag

SEQ ID NO: 5037311 - DNA, 25 bp, Homo sapien
tgaacagggattccataagaaagcc

SEQ ID NO: 5037312 - DNA, 25 bp, Homo sapien
gtccaagatctctagtgaacaggga

SEQ ID NO: 5037313 - DNA, 25 bp, Homo sapien
aaatgcaagctaattgagacctaac

SEQ ID NO: 5037314 - DNA, 25 bp, Homo sapien
gtcaacgtcctcttatactatatgg

SEQ ID NO: 5037315 - DNA, 25 bp, Homo sapien
tatgagcatccctgactttcgaagc

SEQ ID NO: 5037316 - DNA, 25 bp, Homo sapien
ctatgagcatccctgactttcgaag

SEQ ID NO: 5037317 - DNA, 25 bp, Homo sapien
tgagcatccctgactttcgaagcta

SEQ ID NO: 5037318 - DNA, 25 bp, Homo sapien
gcatccctgactttcgaagctacac

SEQ ID NO: 5037319 - DNA, 25 bp, Homo sapien
gcagcactttctcggagcaggcaca

SEQ ID NO: 5037320 - DNA, 25 bp, Homo sapien
tacgtcttcatttgataaccgttca

SEQ ID NO: 5037321 - DNA, 25 bp, Homo sapien
cacgctcgcaagaaagcagcaaggg

SEQ ID NO: 5037322 - DNA, 25 bp, Homo sapien
agcatgccacctgcacgggtgcacg

SEQ ID NO: 5037323 - DNA, 25 bp, Homo sapien
cccagccgtcccaggcgtggggcca

SEQ ID NO: 5037324 - DNA, 25 bp, Homo sapien
tggggccagacaggcgaggggggcg

SEQ ID NO: 5037325 - DNA, 25 bp, Homo sapien
ccagacaggcgaggggggcggaagg

SEQ ID NO: 5037326 - DNA, 25 bp, Homo sapien
ccgcccccagccgtcccaggcgtgg

SEQ ID NO: 5037327 - DNA, 25 bp, Homo sapien
gcaatggcaatagactcgaagcggt

SEQ ID NO: 5037328 - DNA, 25 bp, Homo sapien
tctccgtggagtgcaggctgtagat

SEQ ID NO: 5037329 - DNA, 25 bp, Homo sapien
tcgaagcggtgcagctctttgagca

SEQ ID NO: 5037330 - DNA, 25 bp, Homo sapien
tgtagatgaagtcgcgcgcgccctg

SEQ ID NO: 5037331 - DNA, 25 bp, Homo sapien
ccggcaagccgccggggggcgcgag

SEQ ID NO: 5037332 - DNA, 25 bp, Homo sapien
cccggcctcaggctgcgcgcggtcc

SEQ ID NO: 5037333 - DNA, 25 bp, Homo sapien
cggcaagccgccggggggcgcgagc

SEQ ID NO: 5037334 - DNA, 25 bp, Homo sapien
ttccagaggatgagtcagccacgca

SEQ ID NO: 5037335 - DNA, 25 bp, Homo sapien
aaggcggtttctggcgcggctgagg

SEQ ID NO: 5037336 - DNA, 25 bp, Homo sapien
tgtgtctctgtcagtctgatcttcc

SEQ ID NO: 5037337 - DNA, 25 bp, Homo sapien
gtcctcctgccaggcagccgaggcg

SEQ ID NO: 5037338 - DNA, 25 bp, Homo sapien
cactctgtaaggttcccgagccctc

SEQ ID NO: 5037339 - DNA, 25 bp, Homo sapien
gccctcaaagcagccgcgctcccga

SEQ ID NO: 5037340 - DNA, 25 bp, Homo sapien
gatcggaatagggaaaacgagctct

SEQ ID NO: 5037341 - DNA, 25 bp, Homo sapien
ggaaaacgagctctggacccctcgc

SEQ ID NO: 5037342 - DNA, 25 bp, Homo sapien
gcccgccagggtagtacagctgcca

SEQ ID NO: 5037343 - DNA, 25 bp, Homo sapien
tcgcccgccagggtagtacagctgc

SEQ ID NO: 5037344 - DNA, 25 bp, Homo sapien
gcaggccggctctaatgcagtcgct

SEQ ID NO: 5037345 - DNA, 25 bp, Homo sapien
cttgttctgaaaggtgccccggcgt

SEQ ID NO: 5037346 - DNA, 25 bp, Homo sapien
agctgcgcccttcgccaagtcagcg

SEQ ID NO: 5037347 - DNA, 25 bp, Homo sapien
cggcgctctgctccggaacgaagcg

SEQ ID NO: 5037348 - DNA, 25 bp, Homo sapien
ccccaaagagaaagcgaagccagtt

SEQ ID NO: 5037349 - DNA, 25 bp, Homo sapien
ctgggcgccccaaagagaaagcgaa

SEQ ID NO: 5037350 - DNA, 25 bp, Homo sapien
caaagagaaagcgaagccagttcca

SEQ ID NO: 5037351 - DNA, 25 bp, Homo sapien
agagaaagcgaagccagttccaccc

SEQ ID NO: 5037352 - DNA, 25 bp, Homo sapien
ctagtggaccctttaatcatttctt

SEQ ID NO: 5037353 - DNA, 25 bp, Homo sapien
tagtggaccctttaatcatttcttc

SEQ ID NO: 5037354 - DNA, 25 bp, Homo sapien
tttcttctgcccatatttttgcaat

SEQ ID NO: 5037355 - DNA, 25 bp, Homo sapien
atttcttctgcccatatttttgcaa

SEQ ID NO: 5037356 - DNA, 25 bp, Homo sapien
ccagctgctcagctaagcgggagcc

SEQ ID NO: 5037357 - DNA, 25 bp, Homo sapien
aaagtgcataggagccatgagcagg

SEQ ID NO: 5037358 - DNA, 25 bp, Homo sapien
gggtaacaattagtggccccacaca

SEQ ID NO: 5037359 - DNA, 25 bp, Homo sapien
cgggagccaaagtgcataggagcca

SEQ ID NO: 5037360 - DNA, 25 bp, Homo sapien
gcctgcagcttgtacatgtctctcc

SEQ ID NO: 5037361 - DNA, 25 bp, Homo sapien
tcatcaaaatgcagcttgcgacttc

SEQ ID NO: 5037362 - DNA, 25 bp, Homo sapien
gactccaaaactgtgtggtgtgaca

SEQ ID NO: 5037363 - DNA, 25 bp, Homo sapien
catacaagtgactgaacgcttcctg

SEQ ID NO: 5037364 - DNA, 25 bp, Homo sapien
ctgggtagtttagccaaatggcgcc

SEQ ID NO: 5037365 - DNA, 25 bp, Homo sapien
caagagctgggtagtttagccaaat

SEQ ID NO: 5037366 - DNA, 25 bp, Homo sapien
aacaagagctgggtagtttagccaa

SEQ ID NO: 5037367 - DNA, 25 bp, Homo sapien
gagctgggtagtttagccaaatggc

SEQ ID NO: 5037368 - DNA, 25 bp, Homo sapien
aagggctggcccgcctgctgtctgc

SEQ ID NO: 5037369 - DNA, 25 bp, Homo sapien
cgttctgccgctcaggccagtgtgg

SEQ ID NO: 5037370 - DNA, 25 bp, Homo sapien
agagtgtaggtagacagtgtcctgc

SEQ ID NO: 5037371 - DNA, 25 bp, Homo sapien
taaaaacaaaacgttctgccgctca

SEQ ID NO: 5037372 - DNA, 25 bp, Homo sapien
ttggtcacctgtggcgagatttccc

SEQ ID NO: 5037373 - DNA, 25 bp, Homo sapien
tgtggcgagatttcccaactttcca

SEQ ID NO: 5037374 - DNA, 25 bp, Homo sapien
gtcacctgtggcgagatttcccaac

SEQ ID NO: 5037375 - DNA, 25 bp, Homo sapien
cacctgtggcgagatttcccaactt

SEQ ID NO: 5037376 - DNA, 25 bp, Homo sapien
caacatgtaaagaaaggtatcaacc

SEQ ID NO: 5037377 - DNA, 25 bp, Homo sapien
tgccaatcttcttctgggtacgacc

SEQ ID NO: 5037378 - DNA, 25 bp, Homo sapien
gcttttaggcaacctgaatctggga

SEQ ID NO: 5037379 - DNA, 25 bp, Homo sapien
tattgttgctgtaaagatgggccat

SEQ ID NO: 5037380 - DNA, 25 bp, Homo sapien
cctggtgagccgactctgaggagat

SEQ ID NO: 5037381 - DNA, 25 bp, Homo sapien
taagaccgggaatttagtcagcctg

SEQ ID NO: 5037382 - DNA, 25 bp, Homo sapien
aggcagtccctgtatgctcacgcag

SEQ ID NO: 5037383 - DNA, 25 bp, Homo sapien
gaaactctttgatacacagcaccgt

SEQ ID NO: 5037384 - DNA, 25 bp, Homo sapien
tcaggctgtagccataaaagcacag

SEQ ID NO: 5037385 - DNA, 25 bp, Homo sapien
aaagtgatagatactcaataatggg

SEQ ID NO: 5037386 - DNA, 25 bp, Homo sapien
gaagcttagttactagaccacaggc

SEQ ID NO: 5037387 - DNA, 25 bp, Homo sapien
taatgggattcgttccctgaacagg

SEQ ID NO: 5037388 - DNA, 25 bp, Homo sapien
cagcactgggtaaatagagataggt

SEQ ID NO: 5037389 - DNA, 25 bp, Homo sapien
tcaaggttgaatcaagggtaaacga

SEQ ID NO: 5037390 - DNA, 25 bp, Homo sapien
tggtcacacagaatttcagagagat

SEQ ID NO: 5037391 - DNA, 25 bp, Homo sapien
agataggtggatagactgtctcagt

SEQ ID NO: 5037392 - DNA, 25 bp, Homo sapien
tattcctggtcatcaactgtgtgtg

SEQ ID NO: 5037393 - DNA, 25 bp, Homo sapien
caatgggagaatcacaaggtcgact

SEQ ID NO: 5037394 - DNA, 25 bp, Homo sapien
ccagttttcagtgggatccatagca

SEQ ID NO: 5037395 - DNA, 25 bp, Homo sapien
aaaatggactgctactgccctacag

SEQ ID NO: 5037396 - DNA, 25 bp, Homo sapien
tttccccataatggcctctctcctt

SEQ ID NO: 5037397 - DNA, 25 bp, Homo sapien
tagtactcacctatctcctctaccc

SEQ ID NO: 5037398 - DNA, 25 bp, Homo sapien
taaaaattagaggaaagcccatgaa

SEQ ID NO: 5037399 - DNA, 25 bp, Homo sapien
tcctctacccaacttgtgttttaga

SEQ ID NO: 5037400 - DNA, 25 bp, Homo sapien
tgataaaggatagccacccacatgg

SEQ ID NO: 5037401 - DNA, 25 bp, Homo sapien
gaatgcacttgagctgggagcccaa

SEQ ID NO: 5037402 - DNA, 25 bp, Homo sapien
taattacacggataggcaagaaagc

SEQ ID NO: 5037403 - DNA, 25 bp, Homo sapien
gaagttgtgagtttcaggtagccct

SEQ ID NO: 5037404 - DNA, 25 bp, Homo sapien
agtcgctatctccttgccattagta

SEQ ID NO: 5037405 - DNA, 25 bp, Homo sapien
gttcttgcccttcagtcgctatctc

SEQ ID NO: 5037406 - DNA, 25 bp, Homo sapien
gccattagtaaaatgcggccgatga

SEQ ID NO: 5037407 - DNA, 25 bp, Homo sapien
aaatgcggccgatgaatgtcctcac

SEQ ID NO: 5037408 - DNA, 25 bp, Homo sapien
ggtgacgtgcaaatggatgggagga

SEQ ID NO: 5037409 - DNA, 25 bp, Homo sapien
gacgtgcaaatggatgggaggaacc

SEQ ID NO: 5037410 - DNA, 25 bp, Homo sapien
acgtgcaaatggatgggaggaaccc

SEQ ID NO: 5037411 - DNA, 25 bp, Homo sapien
tgacgtgcaaatggatgggaggaac

SEQ ID NO: 5037412 - DNA, 25 bp, Homo sapien
gactcccgagggtgggataaatcga

SEQ ID NO: 5037413 - DNA, 25 bp, Homo sapien
gcaagcgctccataaacgcacacag

SEQ ID NO: 5037414 - DNA, 25 bp, Homo sapien
tcgcgggatttctcctggcgtcggc

SEQ ID NO: 5037415 - DNA, 25 bp, Homo sapien
tggcgtcggctttcagactcccgag

SEQ ID NO: 5037416 - DNA, 25 bp, Homo sapien
ttttgatccgcggaagcaccgactc

SEQ ID NO: 5037417 - DNA, 25 bp, Homo sapien
tgatccgcggaagcaccgactcgct

SEQ ID NO: 5037418 - DNA, 25 bp, Homo sapien
ctaataattttgatccgcggaagca

SEQ ID NO: 5037419 - DNA, 25 bp, Homo sapien
aataattttgatccgcggaagcacc

SEQ ID NO: 5037420 - DNA, 25 bp, Homo sapien
ggctaccgaaaagcgcatgcgccac

SEQ ID NO: 5037421 - DNA, 25 bp, Homo sapien
aagctgcaactccaacgccggaaag

SEQ ID NO: 5037422 - DNA, 25 bp, Homo sapien
ccgaatctgcgagggtgaagctgca

SEQ ID NO: 5037423 - DNA, 25 bp, Homo sapien
caacgccggaaagcgcggctaccga

SEQ ID NO: 5037424 - DNA, 25 bp, Homo sapien
cctggtgtggcagcggctcatggcg

SEQ ID NO: 5037425 - DNA, 25 bp, Homo sapien
tctgggcggcgctcgaagtggcgct

SEQ ID NO: 5037426 - DNA, 25 bp, Homo sapien
cctgcctttacatcatcgacgccat

SEQ ID NO: 5037427 - DNA, 25 bp, Homo sapien
cggattccagccaaagccggttctg

SEQ ID NO: 5037428 - DNA, 25 bp, Homo sapien
ccatgggtcgagtatgtgtctttgg

SEQ ID NO: 5037429 - DNA, 25 bp, Homo sapien
tacgtcccgggacggctatgcgggc

SEQ ID NO: 5037430 - DNA, 25 bp, Homo sapien
aactacagtttcatccctcaaaggg

SEQ ID NO: 5037431 - DNA, 25 bp, Homo sapien
gctatgcgggccgagacgttccccg

SEQ ID NO: 5037432 - DNA, 25 bp, Homo sapien
gcgtcctatgcgacagccttcgaaa

SEQ ID NO: 5037433 - DNA, 25 bp, Homo sapien
tttattaccaaatgccgagtacttg

SEQ ID NO: 5037434 - DNA, 25 bp, Homo sapien
cagtctcgtcgtgtgtgaccttgga

SEQ ID NO: 5037435 - DNA, 25 bp, Homo sapien
acccgagggtccacaggatcgtgaa

SEQ ID NO: 5037436 - DNA, 25 bp, Homo sapien
tttgaatgtcagaccttgaaaccat

SEQ ID NO: 5037437 - DNA, 25 bp, Homo sapien
agacagggttttgaatgtcagacct

SEQ ID NO: 5037438 - DNA, 25 bp, Homo sapien
gggttttgaatgtcagaccttgaaa

SEQ ID NO: 5037439 - DNA, 25 bp, Homo sapien
cagggttttgaatgtcagaccttga

SEQ ID NO: 5037440 - DNA, 25 bp, Homo sapien
tggagtgattcagcacacaggcgca

SEQ ID NO: 5037441 - DNA, 25 bp, Homo sapien
catgcactttgccttcggaaatggc

SEQ ID NO: 5037442 - DNA, 25 bp, Homo sapien
tctactacgttcgttcaacaggcag

SEQ ID NO: 5037443 - DNA, 25 bp, Homo sapien
ggctactataatgtcctctgggaaa

SEQ ID NO: 5037444 - DNA, 25 bp, Homo sapien
taatttctttattgaaactatcagg

SEQ ID NO: 5037445 - DNA, 25 bp, Homo sapien
atttctttattgaaactatcaggaa

SEQ ID NO: 5037446 - DNA, 25 bp, Homo sapien
aatttctttattgaaactatcagga

SEQ ID NO: 5037447 - DNA, 25 bp, Homo sapien
catctctcactgctgacattatctc

SEQ ID NO: 5037448 - DNA, 25 bp, Homo sapien
ctttaatagtattgttatatagtgt

SEQ ID NO: 5037449 - DNA, 25 bp, Homo sapien
ctcactgctgacattatctccaata

SEQ ID NO: 5037450 - DNA, 25 bp, Homo sapien
gctaattccagtggatcctcatctc

SEQ ID NO: 5037451 - DNA, 25 bp, Homo sapien
aaatggttaaatctccaagtataca

SEQ ID NO: 5037452 - DNA, 25 bp, Homo sapien
catttagttctaaagctatataata

SEQ ID NO: 5037453 - DNA, 25 bp, Homo sapien
tataatatttttccacacaaaggaa

SEQ ID NO: 5037454 - DNA, 25 bp, Homo sapien
agtatacatttagttctaaagctat

SEQ ID NO: 5037455 - DNA, 25 bp, Homo sapien
taatataataaagcttaacagttat

SEQ ID NO: 5037456 - DNA, 25 bp, Homo sapien
cacacctttaatataataaagctta

SEQ ID NO: 5037457 - DNA, 25 bp, Homo sapien
cctttaatataataaagcttaacag

SEQ ID NO: 5037458 - DNA, 25 bp, Homo sapien
gcacacctttaatataataaagctt

SEQ ID NO: 5037459 - DNA, 25 bp, Homo sapien
gactttgtcagctcaagcatgttaa

SEQ ID NO: 5037460 - DNA, 25 bp, Homo sapien
ttttttacccctcatgaagacacag

SEQ ID NO: 5037461 - DNA, 25 bp, Homo sapien
gatggtgcatatgcaatgaatagtc

SEQ ID NO: 5037462 - DNA, 25 bp, Homo sapien
tataagtatgcccaattgtctgaat

SEQ ID NO: 5037463 - DNA, 25 bp, Homo sapien
tttctgtcttttaagcagtgcccac

SEQ ID NO: 5037464 - DNA, 25 bp, Homo sapien
cttttgactccacaccaaggtgcat

SEQ ID NO: 5037465 - DNA, 25 bp, Homo sapien
tatattttgatccagcatgtgtact

SEQ ID NO: 5037466 - DNA, 25 bp, Homo sapien
ttaagcagtgcccactttcccactt

SEQ ID NO: 5037467 - DNA, 25 bp, Homo sapien
tcctgactgcccaaggaaatgaatg

SEQ ID NO: 5037468 - DNA, 25 bp, Homo sapien
tctccagaatggctcagtcttgact

SEQ ID NO: 5037469 - DNA, 25 bp, Homo sapien
tccatggtataaggagagccttgac

SEQ ID NO: 5037470 - DNA, 25 bp, Homo sapien
caacctcctgagttatattctggca

SEQ ID NO: 5037471 - DNA, 25 bp, Homo sapien
ttcactaggaattgacttcaaaact

SEQ ID NO: 5037472 - DNA, 25 bp, Homo sapien
taggaattgacttcaaaacttccaa

SEQ ID NO: 5037473 - DNA, 25 bp, Homo sapien
caatcattaatttttcactaggaat

SEQ ID NO: 5037474 - DNA, 25 bp, Homo sapien
ttttcactaggaattgacttcaaaa

SEQ ID NO: 5037475 - DNA, 25 bp, Homo sapien
cttctgaagtctcaacttattaaaa

SEQ ID NO: 5037476 - DNA, 25 bp, Homo sapien
taagtttgattaaattaggacacaa

SEQ ID NO: 5037477 - DNA, 25 bp, Homo sapien
ttccagttgtctcagtggcatacat

SEQ ID NO: 5037478 - DNA, 25 bp, Homo sapien
taggacacaaatgagaggcccacac

SEQ ID NO: 5037479 - DNA, 25 bp, Homo sapien
taaggcagccatggatgcccaatgc

SEQ ID NO: 5037480 - DNA, 25 bp, Homo sapien
gattccctagcttcgtccaatggtg

SEQ ID NO: 5037481 - DNA, 25 bp, Homo sapien
ggtatttttgtgatctaaggcagcc

SEQ ID NO: 5037482 - DNA, 25 bp, Homo sapien
taattcaccaggagctagaaaatgc

SEQ ID NO: 5037483 - DNA, 25 bp, Homo sapien
tgatgagcaactacacgattctgaa

SEQ ID NO: 5037484 - DNA, 25 bp, Homo sapien
tgagctcacccaactacagaacatt

SEQ ID NO: 5037485 - DNA, 25 bp, Homo sapien
gtggcaggaccatcacttgaactcc

SEQ ID NO: 5037486 - DNA, 25 bp, Homo sapien
gactggttacgcctatagctctagc

SEQ ID NO: 5037487 - DNA, 25 bp, Homo sapien
gagttatcagtctagtatgcccaag

SEQ ID NO: 5037488 - DNA, 25 bp, Homo sapien
ggaagacaagcagaaagtaacttta

SEQ ID NO: 5037489 - DNA, 25 bp, Homo sapien
gaaaaagcaacaccaggcgtgatga

SEQ ID NO: 5037490 - DNA, 25 bp, Homo sapien
gatgaaaaccatcaacacacacctt

SEQ ID NO: 5037491 - DNA, 25 bp, Homo sapien
gtcagatatgacgtgtatatgtata

SEQ ID NO: 5037492 - DNA, 25 bp, Homo sapien
gaataaaccgttcgtccatagtcag

SEQ ID NO: 5037493 - DNA, 25 bp, Homo sapien
cgtccatagtcagatatgacgtgta

SEQ ID NO: 5037494 - DNA, 25 bp, Homo sapien
ctgtcacagaataaaccgttcgtcc

SEQ ID NO: 5037495 - DNA, 25 bp, Homo sapien
aatcctatataaagatccaagtcaa

SEQ ID NO: 5037496 - DNA, 25 bp, Homo sapien
aagatccaagtcaatcaaagcagct

SEQ ID NO: 5037497 - DNA, 25 bp, Homo sapien
tataaagatccaagtcaatcaaagc

SEQ ID NO: 5037498 - DNA, 25 bp, Homo sapien
tcctatataaagatccaagtcaatc

SEQ ID NO: 5037499 - DNA, 25 bp, Homo sapien
tctaaggcaggtttccaaaggagtc

SEQ ID NO: 5037500 - DNA, 25 bp, Homo sapien
tacgcataaaactgtcaacgtcagg

SEQ ID NO: 5037501 - DNA, 25 bp, Homo sapien
aacgtcaggccgcatgggaatgcaa

SEQ ID NO: 5037502 - DNA, 25 bp, Homo sapien
caaaggagtccatgatcgaagagac

SEQ ID NO: 5037503 - DNA, 25 bp, Homo sapien
tccccctacacaccgatctctattt

SEQ ID NO: 5037504 - DNA, 25 bp, Homo sapien
cactccccctacacaccgatctcta

SEQ ID NO: 5037505 - DNA, 25 bp, Homo sapien
cctacacaccgatctctatttcttt

SEQ ID NO: 5037506 - DNA, 25 bp, Homo sapien
cccctacacaccgatctctatttct

SEQ ID NO: 5037507 - DNA, 25 bp, Homo sapien
cagcatgtgagtttcgacaatgaag

SEQ ID NO: 5037508 - DNA, 25 bp, Homo sapien
tgtgagtttcgacaatgaagaaaca

SEQ ID NO: 5037509 - DNA, 25 bp, Homo sapien
tcagcatgtgagtttcgacaatgaa

SEQ ID NO: 5037510 - DNA, 25 bp, Homo sapien
gcatgtgagtttcgacaatgaagaa

SEQ ID NO: 5037511 - DNA, 25 bp, Homo sapien
tctttgggacaaaactgcagtcggt

SEQ ID NO: 5037512 - DNA, 25 bp, Homo sapien
ggacaaaactgcagtcggtcaaaat

SEQ ID NO: 5037513 - DNA, 25 bp, Homo sapien
gagttgagtatctttgggacaaaac

SEQ ID NO: 5037514 - DNA, 25 bp, Homo sapien
ttgggacaaaactgcagtcggtcaa

SEQ ID NO: 5037515 - DNA, 25 bp, Homo sapien
ttagcaactcctttaagtaaagatc

SEQ ID NO: 5037516 - DNA, 25 bp, Homo sapien
accacatcttgtaggatgacatcca

SEQ ID NO: 5037517 - DNA, 25 bp, Homo sapien
caagatttagcaactcctttaagta

SEQ ID NO: 5037518 - DNA, 25 bp, Homo sapien
cagttttcagaaagacttcttcaaa

SEQ ID NO: 5037519 - DNA, 25 bp, Homo sapien
tttcagaaagacttcttcaaaatta

SEQ ID NO: 5037520 - DNA, 25 bp, Homo sapien
tttggtaaaagaaatatgaggatac

SEQ ID NO: 5037521 - DNA, 25 bp, Homo sapien
aagcagttttcagaaagacttcttc

SEQ ID NO: 5037522 - DNA, 25 bp, Homo sapien
tttgtttgtgccaaatgcagtgcat

SEQ ID NO: 5037523 - DNA, 25 bp, Homo sapien
atttgtttgtgccaaatgcagtgca

SEQ ID NO: 5037524 - DNA, 25 bp, Homo sapien
catttgtttgtgccaaatgcagtgc

SEQ ID NO: 5037525 - DNA, 25 bp, Homo sapien
tcattctaggtacaacttagggaga

SEQ ID NO: 5037526 - DNA, 25 bp, Homo sapien
aacggcaagacaagagggcatcatc

SEQ ID NO: 5037527 - DNA, 25 bp, Homo sapien
tataaaataacgatgatgggcctgg

SEQ ID NO: 5037528 - DNA, 25 bp, Homo sapien
tagctattgcatatccattccggaa

SEQ ID NO: 5037529 - DNA, 25 bp, Homo sapien
ttttaacaccaatctcgacagctct

SEQ ID NO: 5037530 - DNA, 25 bp, Homo sapien
tttaacaccaatctcgacagctctc

SEQ ID NO: 5037531 - DNA, 25 bp, Homo sapien
tttttaacaccaatctcgacagctc

SEQ ID NO: 5037532 - DNA, 25 bp, Homo sapien
ctttttaacaccaatctcgacagct

SEQ ID NO: 5037533 - DNA, 25 bp, Homo sapien
tgatgcttttgaacccccctataaa

SEQ ID NO: 5037534 - DNA, 25 bp, Homo sapien
tgaacccccctataaattcctctga

SEQ ID NO: 5037535 - DNA, 25 bp, Homo sapien
ttgatgcttttgaacccccctataa

SEQ ID NO: 5037536 - DNA, 25 bp, Homo sapien
cttgatgcttttgaacccccctata

SEQ ID NO: 5037537 - DNA, 25 bp, Homo sapien
gacgcccgggacaagtcagaaagac

SEQ ID NO: 5037538 - DNA, 25 bp, Homo sapien
cttggtgaccgacgcccgggacaag

SEQ ID NO: 5037539 - DNA, 25 bp, Homo sapien
tgccggagggcgcaattcctgggtc

SEQ ID NO: 5037540 - DNA, 25 bp, Homo sapien
gccggagggcgcaattcctgggtcc

SEQ ID NO: 5037541 - DNA, 25 bp, Homo sapien
gactgcgcatggaggacctccccag

SEQ ID NO: 5037542 - DNA, 25 bp, Homo sapien
gcatggaggacctccccagcggaag

SEQ ID NO: 5037543 - DNA, 25 bp, Homo sapien
actgcgcatggaggacctccccagc

SEQ ID NO: 5037544 - DNA, 25 bp, Homo sapien
ctgcgcatggaggacctccccagcg

SEQ ID NO: 5037545 - DNA, 25 bp, Homo sapien
atctagtggttctttatttataacg

SEQ ID NO: 5037546 - DNA, 25 bp, Homo sapien
ttagagccaacaggaatctgcaggg

SEQ ID NO: 5037547 - DNA, 25 bp, Homo sapien
tgggctaaaccacaggcactactgt

SEQ ID NO: 5037548 - DNA, 25 bp, Homo sapien
gaaatgtgccctgttatgacctgac

SEQ ID NO: 5037549 - DNA, 25 bp, Homo sapien
caagtgaaaagctgtaccaaggtac

SEQ ID NO: 5037550 - DNA, 25 bp, Homo sapien
gatgcatttaccatgaagctaccag

SEQ ID NO: 5037551 - DNA, 25 bp, Homo sapien
gagattctacgactgcccagaggca

SEQ ID NO: 5037552 - DNA, 25 bp, Homo sapien
cagaagaaattcaacctacgaggct

SEQ ID NO: 5037553 - DNA, 25 bp, Homo sapien
ggctatgttgacgatgtacccctcc

SEQ ID NO: 5037554 - DNA, 25 bp, Homo sapien
aattcttatctaaaggtgtcgagta

SEQ ID NO: 5037555 - DNA, 25 bp, Homo sapien
ttaattcttatctaaaggtgtcgag

SEQ ID NO: 5037556 - DNA, 25 bp, Homo sapien
tcttatctaaaggtgtcgagtactt

SEQ ID NO: 5037557 - DNA, 25 bp, Homo sapien
tatctaaaggtgtcgagtactttca

SEQ ID NO: 5037558 - DNA, 25 bp, Homo sapien
attccccaccggcgcatttcttgtg

SEQ ID NO: 5037559 - DNA, 25 bp, Homo sapien
cagttcattccccaccggcgcattt

SEQ ID NO: 5037560 - DNA, 25 bp, Homo sapien
tgaaacagttcattccccaccggcg

SEQ ID NO: 5037561 - DNA, 25 bp, Homo sapien
ccccaccggcgcatttcttgtgaac

SEQ ID NO: 5037562 - DNA, 25 bp, Homo sapien
gctgagcgatcgtttgtcgtggtct

SEQ ID NO: 5037563 - DNA, 25 bp, Homo sapien
ttcttcagtttcacgccccttcgga

SEQ ID NO: 5037564 - DNA, 25 bp, Homo sapien
tatcccttgggctcaggtctgcagg

SEQ ID NO: 5037565 - DNA, 25 bp, Homo sapien
ggcgttcagcatgtcttctccttgt

SEQ ID NO: 5037566 - DNA, 25 bp, Homo sapien
ggttaacggaagcttggccgctcca

SEQ ID NO: 5037567 - DNA, 25 bp, Homo sapien
gacttgtcgaactcctgctgatctg

SEQ ID NO: 5037568 - DNA, 25 bp, Homo sapien
ggatagttgcaacccctggagtgac

SEQ ID NO: 5037569 - DNA, 25 bp, Homo sapien
gcttggcttggaacatccgtcggta

SEQ ID NO: 5037570 - DNA, 25 bp, Homo sapien
ggaagggatggtgtcctcagagcag

SEQ ID NO: 5037571 - DNA, 25 bp, Homo sapien
tagccgctggagcactgaagcgagt

SEQ ID NO: 5037572 - DNA, 25 bp, Homo sapien
tggagcactgaagcgagtcccggct

SEQ ID NO: 5037573 - DNA, 25 bp, Homo sapien
gtgctgtagccgctggagcactgaa

SEQ ID NO: 5037574 - DNA, 25 bp, Homo sapien
cagctactgagaacaagagcatcac

SEQ ID NO: 5037575 - DNA, 25 bp, Homo sapien
ggctattgacttgcttgggtcccac

SEQ ID NO: 5037576 - DNA, 25 bp, Homo sapien
cccgtgagcactacatgtctgtggg

SEQ ID NO: 5037577 - DNA, 25 bp, Homo sapien
gttgctggccagaatgtgatcccca

SEQ ID NO: 5037578 - DNA, 25 bp, Homo sapien
ctggtggcagccgatacagtcatgc

SEQ ID NO: 5037579 - DNA, 25 bp, Homo sapien
gatacagtcatgctccgtggtctct

SEQ ID NO: 5037580 - DNA, 25 bp, Homo sapien
ctccgtggtctctgagcctcctcag

SEQ ID NO: 5037581 - DNA, 25 bp, Homo sapien
ggccgctggcggtagtgggtcctcc

SEQ ID NO: 5037582 - DNA, 25 bp, Homo sapien
ggtcatagggcccaggcttagccca

SEQ ID NO: 5037583 - DNA, 25 bp, Homo sapien
ctggtcatagggcccaggcttagcc

SEQ ID NO: 5037584 - DNA, 25 bp, Homo sapien
tggtcatagggcccaggcttagccc

SEQ ID NO: 5037585 - DNA, 25 bp, Homo sapien
tgcggggaccccatagacagctccc

SEQ ID NO: 5037586 - DNA, 25 bp, Homo sapien
tgcaaaacaagtgcggtcaggagcc

SEQ ID NO: 5037587 - DNA, 25 bp, Homo sapien
gagaaggcagctggtccccttaagg

SEQ ID NO: 5037588 - DNA, 25 bp, Homo sapien
gggaacctccggctgggacaagcca

SEQ ID NO: 5037589 - DNA, 25 bp, Homo sapien
gctagggatctgagatgacgggaac

SEQ ID NO: 5037590 - DNA, 25 bp, Homo sapien
cttccagctagggatctgagatgac

SEQ ID NO: 5037591 - DNA, 25 bp, Homo sapien
tccagctagggatctgagatgacgg

SEQ ID NO: 5037592 - DNA, 25 bp, Homo sapien
tagggatctgagatgacgggaacat

SEQ ID NO: 5037593 - DNA, 25 bp, Homo sapien
gccgggcccaatggtgtaataatga

SEQ ID NO: 5037594 - DNA, 25 bp, Homo sapien
aataatgagcgtagtctggaaggtg

SEQ ID NO: 5037595 - DNA, 25 bp, Homo sapien
ggacagaggtgacccgagggagcag

SEQ ID NO: 5037596 - DNA, 25 bp, Homo sapien
tggtgtaataatgagcgtagtctgg

SEQ ID NO: 5037597 - DNA, 25 bp, Homo sapien
tgcacccgtgggccccacgtgggac

SEQ ID NO: 5037598 - DNA, 25 bp, Homo sapien
ctgcacccgtgggccccacgtggga

SEQ ID NO: 5037599 - DNA, 25 bp, Homo sapien
ctatagtgagaaaacccgttagaca

SEQ ID NO: 5037600 - DNA, 25 bp, Homo sapien
tatagtgagaaaacccgttagacaa

SEQ ID NO: 5037601 - DNA, 25 bp, Homo sapien
tcaggagcacattctcaatcaaggg

SEQ ID NO: 5037602 - DNA, 25 bp, Homo sapien
aaatcatcgcattgctcaggagcac

SEQ ID NO: 5037603 - DNA, 25 bp, Homo sapien
catggctcatccaacggtctggtgg

SEQ ID NO: 5037604 - DNA, 25 bp, Homo sapien
tgatcagtgccctcaatttgtggcc

SEQ ID NO: 5037605 - DNA, 25 bp, Homo sapien
agcttccaggttgccgcggctgtga

SEQ ID NO: 5037606 - DNA, 25 bp, Homo sapien
ggttgccgcggctgtgagggctgtc

SEQ ID NO: 5037607 - DNA, 25 bp, Homo sapien
caggttgccgcggctgtgagggctg

SEQ ID NO: 5037608 - DNA, 25 bp, Homo sapien
tgagcttccaggttgccgcggctgt

SEQ ID NO: 5037609 - DNA, 25 bp, Homo sapien
tggacacccaggcacccatggtgga

SEQ ID NO: 5037610 - DNA, 25 bp, Homo sapien
actggcaggtttccgaggcttcgga

SEQ ID NO: 5037611 - DNA, 25 bp, Homo sapien
acccatggtggagcccgagctgaca

SEQ ID NO: 5037612 - DNA, 25 bp, Homo sapien
tgcactcgctcactgactggcaggt

SEQ ID NO: 5037613 - DNA, 25 bp, Homo sapien
tctgtcacgtaagttgggtctcctg

SEQ ID NO: 5037614 - DNA, 25 bp, Homo sapien
tgcatccatgcagaggctttcgagc

SEQ ID NO: 5037615 - DNA, 25 bp, Homo sapien
cccttgaaaagaagcgtgcgacccg

SEQ ID NO: 5037616 - DNA, 25 bp, Homo sapien
tatttattgcatgagggcggacccc

SEQ ID NO: 5037617 - DNA, 25 bp, Homo sapien
tcggctttcatctcagacctgtgtt

SEQ ID NO: 5037618 - DNA, 25 bp, Homo sapien
cctgtgttactcagtagagaaatga

SEQ ID NO: 5037619 - DNA, 25 bp, Homo sapien
tgccttcaggagattgtaccctctg

SEQ ID NO: 5037620 - DNA, 25 bp, Homo sapien
ggctcctgcgcctcctagatgtatg

SEQ ID NO: 5037621 - DNA, 25 bp, Homo sapien
ggcacccagcattctgtatgtagag

SEQ ID NO: 5037622 - DNA, 25 bp, Homo sapien
aaaaatgctaatgggagcgctgagc

SEQ ID NO: 5037623 - DNA, 25 bp, Homo sapien
gcagagctctgacatgggtttccca

SEQ ID NO: 5037624 - DNA, 25 bp, Homo sapien
tcaagcactctcaaactatagccgt

SEQ ID NO: 5037625 - DNA, 25 bp, Homo sapien
cgctggaccgggagtcactgctgtt

SEQ ID NO: 5037626 - DNA, 25 bp, Homo sapien
cactgctgttgacactgttcaggct

SEQ ID NO: 5037627 - DNA, 25 bp, Homo sapien
ccaggttggagctgcggtagcggta

SEQ ID NO: 5037628 - DNA, 25 bp, Homo sapien
ggcatcctgggatatgaatcctgag

SEQ ID NO: 5037629 - DNA, 25 bp, Homo sapien
cagaacctttcaagtccagaatcac

SEQ ID NO: 5037630 - DNA, 25 bp, Homo sapien
agggtggcgtctgatacgaccagct

SEQ ID NO: 5037631 - DNA, 25 bp, Homo sapien
ccagctgtaatcagaacctttcaag

SEQ ID NO: 5037632 - DNA, 25 bp, Homo sapien
gatacgaccagctgtaatcagaacc

SEQ ID NO: 5037633 - DNA, 25 bp, Homo sapien
cagcgacgtgttcttaggagggttg

SEQ ID NO: 5037634 - DNA, 25 bp, Homo sapien
gcgacgtgttcttaggagggttgac

SEQ ID NO: 5037635 - DNA, 25 bp, Homo sapien
agcgacgtgttcttaggagggttga

SEQ ID NO: 5037636 - DNA, 25 bp, Homo sapien
cgacgtgttcttaggagggttgact

SEQ ID NO: 5037637 - DNA, 25 bp, Homo sapien
gatcttccgagatggtctgaaggtg

SEQ ID NO: 5037638 - DNA, 25 bp, Homo sapien
ggttatttcccctagcattgagatt

SEQ ID NO: 5037639 - DNA, 25 bp, Homo sapien
ggctttttagatcttccgagatggt

SEQ ID NO: 5037640 - DNA, 25 bp, Homo sapien
gagggcagtttgtgagggtccatgg

SEQ ID NO: 5037641 - DNA, 25 bp, Homo sapien
tgaaggtacagaatcggccacgttc

SEQ ID NO: 5037642 - DNA, 25 bp, Homo sapien
agccttccggacagcctgcttttct

SEQ ID NO: 5037643 - DNA, 25 bp, Homo sapien
gacatcttggagagcactgtccaac

SEQ ID NO: 5037644 - DNA, 25 bp, Homo sapien
aactgaggctggatatcacctctcc

SEQ ID NO: 5037645 - DNA, 25 bp, Homo sapien
ctttgttgggtcaatctcaatcaaa

SEQ ID NO: 5037646 - DNA, 25 bp, Homo sapien
gagatgtggaaacaaggtaagagcc

SEQ ID NO: 5037647 - DNA, 25 bp, Homo sapien
gagcctctgtctggatagaaggatc

SEQ ID NO: 5037648 - DNA, 25 bp, Homo sapien
caaaaacgggcacgggctggctttg

SEQ ID NO: 5037649 - DNA, 25 bp, Homo sapien
ctaaagacaaaggtggcaagcatcc

SEQ ID NO: 5037650 - DNA, 25 bp, Homo sapien
acaaaggtggcaagcatccgctctc

SEQ ID NO: 5037651 - DNA, 25 bp, Homo sapien
ggtggcaagcatccgctctcctggc

SEQ ID NO: 5037652 - DNA, 25 bp, Homo sapien
gaatccttggcagttcctttgactc

SEQ ID NO: 5037653 - DNA, 25 bp, Homo sapien
gtaggagtaatcatcaccatacatt

SEQ ID NO: 5037654 - DNA, 25 bp, Homo sapien
tcctcaaggatgtaggagtaatcat

SEQ ID NO: 5037655 - DNA, 25 bp, Homo sapien
tcaccatacattaatctggccacct

SEQ ID NO: 5037656 - DNA, 25 bp, Homo sapien
catacattaatctggccacctgagc

SEQ ID NO: 5037657 - DNA, 25 bp, Homo sapien
tcctacaggtctcgcttaattctcg

SEQ ID NO: 5037658 - DNA, 25 bp, Homo sapien
gctcccattgctcgcaagaaaagaa

SEQ ID NO: 5037659 - DNA, 25 bp, Homo sapien
ccctgcaaggcatgaaaggtcattg

SEQ ID NO: 5037660 - DNA, 25 bp, Homo sapien
gtctacctcatagcctcagcctttg

SEQ ID NO: 5037661 - DNA, 25 bp, Homo sapien
taaacagccgatcaaaaagccagtg

SEQ ID NO: 5037662 - DNA, 25 bp, Homo sapien
aacatgaatgctgggaacaagctgc

SEQ ID NO: 5037663 - DNA, 25 bp, Homo sapien
ccaatcagggtgtgtcttacaatca

SEQ ID NO: 5037664 - DNA, 25 bp, Homo sapien
cctgggttcaagacagtatgtccga

SEQ ID NO: 5037665 - DNA, 25 bp, Homo sapien
tcagagaacaactagaaaacgtccc

SEQ ID NO: 5037666 - DNA, 25 bp, Homo sapien
tatttttcaacctactgtgccccag

SEQ ID NO: 5037667 - DNA, 25 bp, Homo sapien
ccttctgacactgggtagtttagca

SEQ ID NO: 5037668 - DNA, 25 bp, Homo sapien
atgaagcattcagaacaacgcccgg

SEQ ID NO: 5037669 - DNA, 25 bp, Homo sapien
ctgggggatgagcaaaccactgtgc

SEQ ID NO: 5037670 - DNA, 25 bp, Homo sapien
tgagtgcataggctggatacggctg

SEQ ID NO: 5037671 - DNA, 25 bp, Homo sapien
gcaggtctcagggtcattctgagag

SEQ ID NO: 5037672 - DNA, 25 bp, Homo sapien
gagccattgatccattgactgcagg

SEQ ID NO: 5037673 - DNA, 25 bp, Homo sapien
aggaagaatgacgtggagaggcatt

SEQ ID NO: 5037674 - DNA, 25 bp, Homo sapien
aaaggaagaatgacgtggagaggca

SEQ ID NO: 5037675 - DNA, 25 bp, Homo sapien
agaaaggaagaatgacgtggagagg

SEQ ID NO: 5037676 - DNA, 25 bp, Homo sapien
gaaaggaagaatgacgtggagaggc

SEQ ID NO: 5037677 - DNA, 25 bp, Homo sapien
gctgtttcataatcacaatgttgag

SEQ ID NO: 5037678 - DNA, 25 bp, Homo sapien
aaggtttactagaaactgtgcaagc

SEQ ID NO: 5037679 - DNA, 25 bp, Homo sapien
gtttactagaaactgtgcaagctgt

SEQ ID NO: 5037680 - DNA, 25 bp, Homo sapien
tccaaaggtttactagaaactgtgc

SEQ ID NO: 5037681 - DNA, 25 bp, Homo sapien
cagagatttgggatggtagacttac

SEQ ID NO: 5037682 - DNA, 25 bp, Homo sapien
tttgagctggtagaaaaacctgggc

SEQ ID NO: 5037683 - DNA, 25 bp, Homo sapien
gcagaggtctggacaaccacggaaa

SEQ ID NO: 5037684 - DNA, 25 bp, Homo sapien
acagcaaggaccacaccgtgagcag

SEQ ID NO: 5037685 - DNA, 25 bp, Homo sapien
tgtttcatgtgttaaacagtccatg

SEQ ID NO: 5037686 - DNA, 25 bp, Homo sapien
catggctcgccaccaaattttctat

SEQ ID NO: 5037687 - DNA, 25 bp, Homo sapien
gtgcaggatacacaattgacacaaa

SEQ ID NO: 5037688 - DNA, 25 bp, Homo sapien
gggcacacggtgagaaagtgcagga

SEQ ID NO: 5037689 - DNA, 25 bp, Homo sapien
tcgtggtcaactccaagacctccaa

SEQ ID NO: 5037690 - DNA, 25 bp, Homo sapien
cattgggtcgtggtcaactccaaga

SEQ ID NO: 5037691 - DNA, 25 bp, Homo sapien
ttccccattgggtcgtggtcaactc

SEQ ID NO: 5037692 - DNA, 25 bp, Homo sapien
tgggtcgtggtcaactccaagacct

SEQ ID NO: 5037693 - DNA, 25 bp, Homo sapien
gtaagaaagagtcgaagaatgtgat

SEQ ID NO: 5037694 - DNA, 25 bp, Homo sapien
aagaaagagtcgaagaatgtgataa

SEQ ID NO: 5037695 - DNA, 25 bp, Homo sapien
gaaagagtcgaagaatgtgataaaa

SEQ ID NO: 5037696 - DNA, 25 bp, Homo sapien
aaagagtcgaagaatgtgataaaag

SEQ ID NO: 5037697 - DNA, 25 bp, Homo sapien
ttcatccatccgaacgcgtggtgcg

SEQ ID NO: 5037698 - DNA, 25 bp, Homo sapien
ggtgcgtcagaaggaactgctaaca

SEQ ID NO: 5037699 - DNA, 25 bp, Homo sapien
ggtccgggaatctgccacttgaagg

SEQ ID NO: 5037700 - DNA, 25 bp, Homo sapien
ctgctaacacttttacaaaccgagg

SEQ ID NO: 5037701 - DNA, 25 bp, Homo sapien
gtttcagcgtatccgaggacttctt

SEQ ID NO: 5037702 - DNA, 25 bp, Homo sapien
tatctcttggcgggctttcttatat

SEQ ID NO: 5037703 - DNA, 25 bp, Homo sapien
cagcgtatccgaggacttctttttt

SEQ ID NO: 5037704 - DNA, 25 bp, Homo sapien
gcagtttcagcgtatccgaggactt

SEQ ID NO: 5037705 - DNA, 25 bp, Homo sapien
gtgcagcgtggcagctctccactct

SEQ ID NO: 5037706 - DNA, 25 bp, Homo sapien
gcagcgtggcagctctccactcttt

SEQ ID NO: 5037707 - DNA, 25 bp, Homo sapien
agcgtggcagctctccactcttttc

SEQ ID NO: 5037708 - DNA, 25 bp, Homo sapien
tgcagcgtggcagctctccactctt

SEQ ID NO: 5037709 - DNA, 25 bp, Homo sapien
tcctcatcccctgacacggacgtgc

SEQ ID NO: 5037710 - DNA, 25 bp, Homo sapien
tcacaacgggatcactttgttctcc

SEQ ID NO: 5037711 - DNA, 25 bp, Homo sapien
gcccttggctgttttggtgacacca

SEQ ID NO: 5037712 - DNA, 25 bp, Homo sapien
ccccagcgtgcagtgatgcgctaga

SEQ ID NO: 5037713 - DNA, 25 bp, Homo sapien
atgcgctagacatctcgcccctgta

SEQ ID NO: 5037714 - DNA, 25 bp, Homo sapien
tgttttggtgacaccaataaaccta

SEQ ID NO: 5037715 - DNA, 25 bp, Homo sapien
ctgttcttgaagtgggtttatcaga

SEQ ID NO: 5037716 - DNA, 25 bp, Homo sapien
ttttgcgtggtctttatccagctgg

SEQ ID NO: 5037717 - DNA, 25 bp, Homo sapien
tatccagctggttggccactttctt

SEQ ID NO: 5037718 - DNA, 25 bp, Homo sapien
gtttatcagacaatcaattaaagcg

SEQ ID NO: 5037719 - DNA, 25 bp, Homo sapien
tcgaaaactgcctcagcttggcttc

SEQ ID NO: 5037720 - DNA, 25 bp, Homo sapien
tgcacatcctggtgagagcagatcc

SEQ ID NO: 5037721 - DNA, 25 bp, Homo sapien
gagcagatccaatctccctggtccc

SEQ ID NO: 5037722 - DNA, 25 bp, Homo sapien
tgcttctgtgcctcatgcacatcct

SEQ ID NO: 5037723 - DNA, 25 bp, Homo sapien
tcaccatgcccatgtgtgcatacac

SEQ ID NO: 5037724 - DNA, 25 bp, Homo sapien
ctcaccatgcccatgtgtgcataca

SEQ ID NO: 5037725 - DNA, 25 bp, Homo sapien
tataaatcgaccatgacctgtagtt

SEQ ID NO: 5037726 - DNA, 25 bp, Homo sapien
tagtatctgctgtttagggaagagc

SEQ ID NO: 5037727 - DNA, 25 bp, Homo sapien
gccaaggcagccacgctagctaatt

SEQ ID NO: 5037728 - DNA, 25 bp, Homo sapien
caaaactatcaccaaaggctgctcc

SEQ ID NO: 5037729 - DNA, 25 bp, Homo sapien
gaaattctcatcatacttttcccct

SEQ ID NO: 5037730 - DNA, 25 bp, Homo sapien
gaaggaagttgcagcccagtttgat

SEQ ID NO: 5037731 - DNA, 25 bp, Homo sapien
gcttgagcaacaccagtcttcaagc

SEQ ID NO: 5037732 - DNA, 25 bp, Homo sapien
caaataatgaaggaagttgcagccc

SEQ ID NO: 5037733 - DNA, 25 bp, Homo sapien
ggggcgtgggagagcaaattataac

SEQ ID NO: 5037734 - DNA, 25 bp, Homo sapien
aaacaatgcttgaatcagcatttac

SEQ ID NO: 5037735 - DNA, 25 bp, Homo sapien
aaattataaccacacatggtagttc

SEQ ID NO: 5037736 - DNA, 25 bp, Homo sapien
aatcagcatttactggggcgtggga

SEQ ID NO: 5037737 - DNA, 25 bp, Homo sapien
gtctccagagagtaccaagtgttgg

SEQ ID NO: 5037738 - DNA, 25 bp, Homo sapien
tcaacagcagacttcctttaacctc

SEQ ID NO: 5037739 - DNA, 25 bp, Homo sapien
ctcctgttgaaaccagtgctgtaaa

SEQ ID NO: 5037740 - DNA, 25 bp, Homo sapien
gtgttgggcaacaaatcactcctgt

SEQ ID NO: 5037741 - DNA, 25 bp, Homo sapien
cagcttgtgtacaagcccaaaatac

SEQ ID NO: 5037742 - DNA, 25 bp, Homo sapien
agcttgtgtacaagcccaaaatact

SEQ ID NO: 5037743 - DNA, 25 bp, Homo sapien
gatctaaggccgcagctgtctggtt

SEQ ID NO: 5037744 - DNA, 25 bp, Homo sapien
tctaaggccgcagctgtctggttag

SEQ ID NO: 5037745 - DNA, 25 bp, Homo sapien
aaggccgcagctgtctggttaggaa

SEQ ID NO: 5037746 - DNA, 25 bp, Homo sapien
aggatctaaggccgcagctgtctgg

SEQ ID NO: 5037747 - DNA, 25 bp, Homo sapien
ctattgaggtaagtgaccccctcct

SEQ ID NO: 5037748 - DNA, 25 bp, Homo sapien
tattgaggtaagtgaccccctcctc

SEQ ID NO: 5037749 - DNA, 25 bp, Homo sapien
ttggcagctgtattcccatctgtct

SEQ ID NO: 5037750 - DNA, 25 bp, Homo sapien
tcagtgctcccattaggcagagcgg

SEQ ID NO: 5037751 - DNA, 25 bp, Homo sapien
tacaggtttataagcgcacacagcg

SEQ ID NO: 5037752 - DNA, 25 bp, Homo sapien
agtatgtgcaactggcatttacagg

SEQ ID NO: 5037753 - DNA, 25 bp, Homo sapien
tagctataagctgagtcctacagga

SEQ ID NO: 5037754 - DNA, 25 bp, Homo sapien
gctactgtatacagctgagtatgta

SEQ ID NO: 5037755 - DNA, 25 bp, Homo sapien
tactgcacattcagcaaatgctagg

SEQ ID NO: 5037756 - DNA, 25 bp, Homo sapien
gctacaatggcaatcctaacaactc

SEQ ID NO: 5037757 - DNA, 25 bp, Homo sapien
gtttacgggacagctaatactgcac

SEQ ID NO: 5037758 - DNA, 25 bp, Homo sapien
attctggcatgcaccgtactggcag

SEQ ID NO: 5037759 - DNA, 25 bp, Homo sapien
cagaccagcaagcatgagattctgg

SEQ ID NO: 5037760 - DNA, 25 bp, Homo sapien
accatctggcggcttcagaccagca

SEQ ID NO: 5037761 - DNA, 25 bp, Homo sapien
caaagaccaatattcctctttgttg

SEQ ID NO: 5037762 - DNA, 25 bp, Homo sapien
gaaacacaaaaacacggacacgctc

SEQ ID NO: 5037763 - DNA, 25 bp, Homo sapien
aacacaaaaacacggacacgctcac

SEQ ID NO: 5037764 - DNA, 25 bp, Homo sapien
gcgagaatggtaatatggaaacaca

SEQ ID NO: 5037765 - DNA, 25 bp, Homo sapien
tgttttaaaagcaaagcgagaatgg

SEQ ID NO: 5037766 - DNA, 25 bp, Homo sapien
gctgcatgggcacagaaagatgctc

SEQ ID NO: 5037767 - DNA, 25 bp, Homo sapien
gaagccaggtctgagcgactcgatg

SEQ ID NO: 5037768 - DNA, 25 bp, Homo sapien
tctgagcgactcgatgacgccagct

SEQ ID NO: 5037769 - DNA, 25 bp, Homo sapien
atgaaccccccattgccatggtctg

SEQ ID NO: 5037770 - DNA, 25 bp, Homo sapien
ctgccagcgaagcagctgtggcctg

SEQ ID NO: 5037771 - DNA, 25 bp, Homo sapien
cagtcatcagttaggaagttgccag

SEQ ID NO: 5037772 - DNA, 25 bp, Homo sapien
caaacgtgagtaagtggaaccaggc

SEQ ID NO: 5037773 - DNA, 25 bp, Homo sapien
tgaatgactgaaacctgactgtggc

SEQ ID NO: 5037774 - DNA, 25 bp, Homo sapien
tcgagtctcaggtcaagcagtggta

SEQ ID NO: 5037775 - DNA, 25 bp, Homo sapien
ctaaaggacacagggtctgctgctg

SEQ ID NO: 5037776 - DNA, 25 bp, Homo sapien
cagaggtcctcctaccaacgagtga

SEQ ID NO: 5037777 - DNA, 25 bp, Homo sapien
actgtttgccagttgcaccactaaa

SEQ ID NO: 5037778 - DNA, 25 bp, Homo sapien
ccagctgacgggatgtcctgagaca

SEQ ID NO: 5037779 - DNA, 25 bp, Homo sapien
tagccattcaatgccacctggaaat

SEQ ID NO: 5037780 - DNA, 25 bp, Homo sapien
gatggtagggagctttcttcaatca

SEQ ID NO: 5037781 - DNA, 25 bp, Homo sapien
agttgaaacatctccaggaccagag

SEQ ID NO: 5037782 - DNA, 25 bp, Homo sapien
cccaggtctccaatacagagctagt

SEQ ID NO: 5037783 - DNA, 25 bp, Homo sapien
gaagacaagcttgcagtccctgaga

SEQ ID NO: 5037784 - DNA, 25 bp, Homo sapien
cacaggaaacggcataggcagggta

SEQ ID NO: 5037785 - DNA, 25 bp, Homo sapien
ggcaggagcagacacatcctcatta

SEQ ID NO: 5037786 - DNA, 25 bp, Homo sapien
tcagggatcttcttgtcttaagcag

SEQ ID NO: 5037787 - DNA, 25 bp, Homo sapien
tctcagaaagcagagcacggtgcta

SEQ ID NO: 5037788 - DNA, 25 bp, Homo sapien
tggacaaattccgtaggcaggctat

SEQ ID NO: 5037789 - DNA, 25 bp, Homo sapien
taatccaagtaggatgctgagtgcc

SEQ ID NO: 5037790 - DNA, 25 bp, Homo sapien
gggcaacccaccgaacaggagtata

SEQ ID NO: 5037791 - DNA, 25 bp, Homo sapien
caaggatacactcctcaccctaagg

SEQ ID NO: 5037792 - DNA, 25 bp, Homo sapien
tgacaacagggaaatactcatctca

SEQ ID NO: 5037793 - DNA, 25 bp, Homo sapien
ataaaaagtcccaatttgccccatg

SEQ ID NO: 5037794 - DNA, 25 bp, Homo sapien
tgggctgattagagccagaaacctt

SEQ ID NO: 5037795 - DNA, 25 bp, Homo sapien
taagagttaacgctcaatgcctagc

SEQ ID NO: 5037796 - DNA, 25 bp, Homo sapien
gacaggaaactctagatcaccttag

SEQ ID NO: 5037797 - DNA, 25 bp, Homo sapien
gaaatgactgtctattctccccagg

SEQ ID NO: 5037798 - DNA, 25 bp, Homo sapien
caaagcctggaacgttaaagctgcc

SEQ ID NO: 5037799 - DNA, 25 bp, Homo sapien
gcactgcaagatctagtagacaacg

SEQ ID NO: 5037800 - DNA, 25 bp, Homo sapien
tcagcagctttcaggttatctccca

SEQ ID NO: 5037801 - DNA, 25 bp, Homo sapien
tagacaacgggagctcaatcactgg

SEQ ID NO: 5037802 - DNA, 25 bp, Homo sapien
ttgacacatcccaggcaaatgccgg

SEQ ID NO: 5037803 - DNA, 25 bp, Homo sapien
tccaaagggcagagaacataacatg

SEQ ID NO: 5037804 - DNA, 25 bp, Homo sapien
ttttccaaagggcagagaacataac

SEQ ID NO: 5037805 - DNA, 25 bp, Homo sapien
aacattttccaaagggcagagaaca

SEQ ID NO: 5037806 - DNA, 25 bp, Homo sapien
acattttccaaagggcagagaacat

SEQ ID NO: 5037807 - DNA, 25 bp, Homo sapien
cgggaccttgcacgatgacctttga

SEQ ID NO: 5037808 - DNA, 25 bp, Homo sapien
cctaagcacccatcgccattggaga

SEQ ID NO: 5037809 - DNA, 25 bp, Homo sapien
tagaggtacagctgaccaagagtct

SEQ ID NO: 5037810 - DNA, 25 bp, Homo sapien
gacaatccgaaagtacctaagcacc

SEQ ID NO: 5037811 - DNA, 25 bp, Homo sapien
tcagatcctgaagcatccgtgttgg

SEQ ID NO: 5037812 - DNA, 25 bp, Homo sapien
gatcctgaagcatccgtgttggttc

SEQ ID NO: 5037813 - DNA, 25 bp, Homo sapien
tgaagcatccgtgttggttcatgct

SEQ ID NO: 5037814 - DNA, 25 bp, Homo sapien
actgtcagatcctgaagcatccgtg

SEQ ID NO: 5037815 - DNA, 25 bp, Homo sapien
gaatttcgtctcactggaagctcac

SEQ ID NO: 5037816 - DNA, 25 bp, Homo sapien
aagcacagtgactccaagaaagtcc

SEQ ID NO: 5037817 - DNA, 25 bp, Homo sapien
tatttcccagagatatattaccttg

SEQ ID NO: 5037818 - DNA, 25 bp, Homo sapien
ccatcacagctccttagtagaggga

SEQ ID NO: 5037819 - DNA, 25 bp, Homo sapien
gaaaggccacctcctaggatttcag

SEQ ID NO: 5037820 - DNA, 25 bp, Homo sapien
caggcagtcacgtgtggcagttcaa

SEQ ID NO: 5037821 - DNA, 25 bp, Homo sapien
ggatttcagtattaaagccccatgc

SEQ ID NO: 5037822 - DNA, 25 bp, Homo sapien
taacaatggtgtatggcccggattc

SEQ ID NO: 5037823 - DNA, 25 bp, Homo sapien
agtcagacagtaccagccatggaga

SEQ ID NO: 5037824 - DNA, 25 bp, Homo sapien
gcttagccctctaaataaaggctgg

SEQ ID NO: 5037825 - DNA, 25 bp, Homo sapien
gaagaactcgctaattcatctgagg

SEQ ID NO: 5037826 - DNA, 25 bp, Homo sapien
gaaaaattcactgagcctgggttac

SEQ ID NO: 5037827 - DNA, 25 bp, Homo sapien
ttcaggacctgtcacactgtacggc

SEQ ID NO: 5037828 - DNA, 25 bp, Homo sapien
gaacctgggaagtccaatcagcact

SEQ ID NO: 5037829 - DNA, 25 bp, Homo sapien
cgcagctgggaagatacgtgtgacc

SEQ ID NO: 5037830 - DNA, 25 bp, Homo sapien
tgtaaagtatgagggccatgctcca

SEQ ID NO: 5037831 - DNA, 25 bp, Homo sapien
ccacgacaaagaggcttagaatgca

SEQ ID NO: 5037832 - DNA, 25 bp, Homo sapien
atggtctagcatgggcatccggcta

SEQ ID NO: 5037833 - DNA, 25 bp, Homo sapien
tgtacctttctagggaggcagtcca

SEQ ID NO: 5037834 - DNA, 25 bp, Homo sapien
catccggctaagttcgccaccggga

SEQ ID NO: 5037835 - DNA, 25 bp, Homo sapien
aaggtcaacttagcacctacccgtg

SEQ ID NO: 5037836 - DNA, 25 bp, Homo sapien
taccaggtccacaggtgaactcctc

SEQ ID NO: 5037837 - DNA, 25 bp, Homo sapien
catcctgtcctagctccgtttgaaa

SEQ ID NO: 5037838 - DNA, 25 bp, Homo sapien
gtgacactcttcgacagcatgccag

SEQ ID NO: 5037839 - DNA, 25 bp, Homo sapien
tcacagtcatgcatgggtaccaagc

SEQ ID NO: 5037840 - DNA, 25 bp, Homo sapien
tgaaaagcctttgcatgccaatgcc

SEQ ID NO: 5037841 - DNA, 25 bp, Homo sapien
gacaggctaggctccctcaaatact

SEQ ID NO: 5037842 - DNA, 25 bp, Homo sapien
gctggacaccatacctcgaatgatg

SEQ ID NO: 5037843 - DNA, 25 bp, Homo sapien
acctctgcttcccaggttcaatcaa

SEQ ID NO: 5037844 - DNA, 25 bp, Homo sapien
gtgcagtggcactctcaacgcactg

SEQ ID NO: 5037845 - DNA, 25 bp, Homo sapien
gcagtggcactctcaacgcactgca

SEQ ID NO: 5037846 - DNA, 25 bp, Homo sapien
gagtgcagtggcactctcaacgcac

SEQ ID NO: 5037847 - DNA, 25 bp, Homo sapien
taacaagtatgtgaggtagaccctg

SEQ ID NO: 5037848 - DNA, 25 bp, Homo sapien
gacgcaaatgtgaggcaacctggcc

SEQ ID NO: 5037849 - DNA, 25 bp, Homo sapien
caaaacctcatgtggacagacgcaa

SEQ ID NO: 5037850 - DNA, 25 bp, Homo sapien
tctaaggctaagtcgggcacatgaa

SEQ ID NO: 5037851 - DNA, 25 bp, Homo sapien
ggacaactcaatcgcaggctcagga

SEQ ID NO: 5037852 - DNA, 25 bp, Homo sapien
tataggtacgaatgaaggacactcc

SEQ ID NO: 5037853 - DNA, 25 bp, Homo sapien
tagttatgtcttgcaaacagcaccc

SEQ ID NO: 5037854 - DNA, 25 bp, Homo sapien
aaacaaaggttgtctatgtgccaca

SEQ ID NO: 5037855 - DNA, 25 bp, Homo sapien
gacgcttttgtccatgccagaagga

SEQ ID NO: 5037856 - DNA, 25 bp, Homo sapien
ggaaaatctaaaggctcaactatgc

SEQ ID NO: 5037857 - DNA, 25 bp, Homo sapien
tgcacatcagaatgagacagctggg

SEQ ID NO: 5037858 - DNA, 25 bp, Homo sapien
tagtgtctgataccacggccattaa

SEQ ID NO: 5037859 - DNA, 25 bp, Homo sapien
tagatgaggtggtgtcacacagcac

SEQ ID NO: 5037860 - DNA, 25 bp, Homo sapien
ccctcaaggaggaaaggcgtcctgg

SEQ ID NO: 5037861 - DNA, 25 bp, Homo sapien
cagtacagtgctacgacagcgaagc

SEQ ID NO: 5037862 - DNA, 25 bp, Homo sapien
gagaccgcctgagataaccttggaa

SEQ ID NO: 5037863 - DNA, 25 bp, Homo sapien
gccagagttccgttaaattgcccaa

SEQ ID NO: 5037864 - DNA, 25 bp, Homo sapien
caaatcacagattgagaagccctgg

SEQ ID NO: 5037865 - DNA, 25 bp, Homo sapien
tctcaacctgagataaggcagctgg

SEQ ID NO: 5037866 - DNA, 25 bp, Homo sapien
aagaacctggtactggagtgtcaca

SEQ ID NO: 5037867 - DNA, 25 bp, Homo sapien
ccctttaagcaagcacagatggcaa

SEQ ID NO: 5037868 - DNA, 25 bp, Homo sapien
gaagtatcactctcctaatcagcat

SEQ ID NO: 5037869 - DNA, 25 bp, Homo sapien
gatggcaatcacgtgcttaagtggc

SEQ ID NO: 5037870 - DNA, 25 bp, Homo sapien
tcaagggctgaaatccgggcaagct

SEQ ID NO: 5037871 - DNA, 25 bp, Homo sapien
gacaatcagattaaaagggcgcgta

SEQ ID NO: 5037872 - DNA, 25 bp, Homo sapien
tctttgagaaactgtgcactgtcct

SEQ ID NO: 5037873 - DNA, 25 bp, Homo sapien
ggtaaacacccttgtcagccttgca

SEQ ID NO: 5037874 - DNA, 25 bp, Homo sapien
tctcaaagagaagcctgtggatcag

SEQ ID NO: 5037875 - DNA, 25 bp, Homo sapien
ccatcgcataattcaccggcattga

SEQ ID NO: 5037876 - DNA, 25 bp, Homo sapien
caccatcgcataattcaccggcatt

SEQ ID NO: 5037877 - DNA, 25 bp, Homo sapien
gccgccaccaccatcgcataattca

SEQ ID NO: 5037878 - DNA, 25 bp, Homo sapien
tcgcataattcaccggcattgatga

SEQ ID NO: 5037879 - DNA, 25 bp, Homo sapien
aaatgatgagaccaaaagcagactg

SEQ ID NO: 5037880 - DNA, 25 bp, Homo sapien
tctaaaatctgtgtataggagggct

SEQ ID NO: 5037881 - DNA, 25 bp, Homo sapien
tagggcaatggcagctctaaaatct

SEQ ID NO: 5037882 - DNA, 25 bp, Homo sapien
gacaaattgaagtggaaaaacacca

SEQ ID NO: 5037883 - DNA, 25 bp, Homo sapien
tttatcaaagtatcatatgtgcccc

SEQ ID NO: 5037884 - DNA, 25 bp, Homo sapien
gtgaagtctcaattaaacaatctgg

SEQ ID NO: 5037885 - DNA, 25 bp, Homo sapien
cccataacatgtggatgcatcaatc

SEQ ID NO: 5037886 - DNA, 25 bp, Homo sapien
ctctaattacacgaaagagttctgg

SEQ ID NO: 5037887 - DNA, 25 bp, Homo sapien
tgtcctttgcaccagagacttgacc

SEQ ID NO: 5037888 - DNA, 25 bp, Homo sapien
ccagttgtcctttgcaccagagact

SEQ ID NO: 5037889 - DNA, 25 bp, Homo sapien
caccagagacttgacctcagggagg

SEQ ID NO: 5037890 - DNA, 25 bp, Homo sapien
tttgcaccagagacttgacctcagg

SEQ ID NO: 5037891 - DNA, 25 bp, Homo sapien
ttgctcgagaactgacgggcttccc

SEQ ID NO: 5037892 - DNA, 25 bp, Homo sapien
agccccttgctcgagaactgacggg

SEQ ID NO: 5037893 - DNA, 25 bp, Homo sapien
ccttgctcgagaactgacgggcttc

SEQ ID NO: 5037894 - DNA, 25 bp, Homo sapien
aacagccccttgctcgagaactgac

SEQ ID NO: 5037895 - DNA, 25 bp, Homo sapien
aaagtggaagctactgtttgcacgc

SEQ ID NO: 5037896 - DNA, 25 bp, Homo sapien
gctgcataaaagtggaagctactgt

SEQ ID NO: 5037897 - DNA, 25 bp, Homo sapien
tccatgagggctgcataaaagtgga

SEQ ID NO: 5037898 - DNA, 25 bp, Homo sapien
ctgtttgcacgcagtcgttcattca

SEQ ID NO: 5037899 - DNA, 25 bp, Homo sapien
cacatgtgccagcagatagggatca

SEQ ID NO: 5037900 - DNA, 25 bp, Homo sapien
tcctgggagacaagcagcagatcct

SEQ ID NO: 5037901 - DNA, 25 bp, Homo sapien
gcaagaggctttacaggacagcaca

SEQ ID NO: 5037902 - DNA, 25 bp, Homo sapien
gatcctcaagcatacaaacagggtg

SEQ ID NO: 5037903 - DNA, 25 bp, Homo sapien
tgtcctagaaggtccggcgtccacc

SEQ ID NO: 5037904 - DNA, 25 bp, Homo sapien
agcgcatgtctgatggaccagcctt

SEQ ID NO: 5037905 - DNA, 25 bp, Homo sapien
tctttggcttaatcttgcttcctcc

SEQ ID NO: 5037906 - DNA, 25 bp, Homo sapien
ccagccttcgatgcctgtcctagaa

SEQ ID NO: 5037907 - DNA, 25 bp, Homo sapien
gaaggaaatggatcccaggcagact

SEQ ID NO: 5037908 - DNA, 25 bp, Homo sapien
aattcgtacgcctgtaagcctgtgc

SEQ ID NO: 5037909 - DNA, 25 bp, Homo sapien
ttacacatcagggacttgcgcggag

SEQ ID NO: 5037910 - DNA, 25 bp, Homo sapien
aatacatccaatgcctgaggaaggc

SEQ ID NO: 5037911 - DNA, 25 bp, Homo sapien
tcaacaaaatatggaactgcgccta

SEQ ID NO: 5037912 - DNA, 25 bp, Homo sapien
tagccacgtgctggtccattatgga

SEQ ID NO: 5037913 - DNA, 25 bp, Homo sapien
tctcagctcctgtaatagccacgtg

SEQ ID NO: 5037914 - DNA, 25 bp, Homo sapien
aagcctcgggttccaagtctaccag

SEQ ID NO: 5037915 - DNA, 25 bp, Homo sapien
tctgttagagtcacggcctacacca

SEQ ID NO: 5037916 - DNA, 25 bp, Homo sapien
accacaaactctgttagagtcacgg

SEQ ID NO: 5037917 - DNA, 25 bp, Homo sapien
ccttggtgatccatacatcattaaa

SEQ ID NO: 5037918 - DNA, 25 bp, Homo sapien
tgaccaaaacagcttgaagcacttt

SEQ ID NO: 5037919 - DNA, 25 bp, Homo sapien
ggttatttgagagttctcacactcc

SEQ ID NO: 5037920 - DNA, 25 bp, Homo sapien
gacacttactaagaaggacattcga

SEQ ID NO: 5037921 - DNA, 25 bp, Homo sapien
ttttaaactaaagagcatgtcctat

SEQ ID NO: 5037922 - DNA, 25 bp, Homo sapien
gtagcacgtatggattttaaacaga

SEQ ID NO: 5037923 - DNA, 25 bp, Homo sapien
gctttttgtggtcccatgatagtgc

SEQ ID NO: 5037924 - DNA, 25 bp, Homo sapien
tccaggacaaggagagtcatattgc

SEQ ID NO: 5037925 - DNA, 25 bp, Homo sapien
taagccgctccaggacaaggagagt

SEQ ID NO: 5037926 - DNA, 25 bp, Homo sapien
attttccccactcaattgtaagccg

SEQ ID NO: 5037927 - DNA, 25 bp, Homo sapien
ttcggagaaactttcatgtgcctgg

SEQ ID NO: 5037928 - DNA, 25 bp, Homo sapien
aaggtacccatcaggtggttcggag

SEQ ID NO: 5037929 - DNA, 25 bp, Homo sapien
tgagaagggttcttgctgcaaattc

SEQ ID NO: 5037930 - DNA, 25 bp, Homo sapien
aatacttttaagcacctgtgatgaa

SEQ ID NO: 5037931 - DNA, 25 bp, Homo sapien
ctcaacaggtttgcagtcaaatatg

SEQ ID NO: 5037932 - DNA, 25 bp, Homo sapien
ttctaaagacggtcaggcatacggg

SEQ ID NO: 5037933 - DNA, 25 bp, Homo sapien
gggcttcagacatgaataagtcata

SEQ ID NO: 5037934 - DNA, 25 bp, Homo sapien
taaacatctcctatgttctaggcac

SEQ ID NO: 5037935 - DNA, 25 bp, Homo sapien
caaaggcacagctcaaggttcaaca

SEQ ID NO: 5037936 - DNA, 25 bp, Homo sapien
ggaagagtccacgtgcagaatgcag

SEQ ID NO: 5037937 - DNA, 25 bp, Homo sapien
caactcgtgcagaaacagtggttca

SEQ ID NO: 5037938 - DNA, 25 bp, Homo sapien
tgcagttaacactgggagtcagcct

SEQ ID NO: 5037939 - DNA, 25 bp, Homo sapien
ttctgaaaggcgtccaagaaggcag

SEQ ID NO: 5037940 - DNA, 25 bp, Homo sapien
tctgaaaggcgtccaagaaggcagc

SEQ ID NO: 5037941 - DNA, 25 bp, Homo sapien
aatcttcccaaactggatagctccc

SEQ ID NO: 5037942 - DNA, 25 bp, Homo sapien
ttgtttatgaaatcttcccaaactg

SEQ ID NO: 5037943 - DNA, 25 bp, Homo sapien
gctgggactgcagctttcctgcttt

SEQ ID NO: 5037944 - DNA, 25 bp, Homo sapien
tgcagctttcctgctttgtttatga

SEQ ID NO: 5037945 - DNA, 25 bp, Homo sapien
ccagagccgtgaaaacaattcaaca

SEQ ID NO: 5037946 - DNA, 25 bp, Homo sapien
cccatttgaggaaatccctcggaat

SEQ ID NO: 5037947 - DNA, 25 bp, Homo sapien
aaatccctcggaatgcactcccaga

SEQ ID NO: 5037948 - DNA, 25 bp, Homo sapien
actcccagagccgtgaaaacaattc

SEQ ID NO: 5037949 - DNA, 25 bp, Homo sapien
gcgttcgttgaaaatacaactcaga

SEQ ID NO: 5037950 - DNA, 25 bp, Homo sapien
gcagtgcgttcgttgaaaatacaac

SEQ ID NO: 5037951 - DNA, 25 bp, Homo sapien
ccttggcagtgcgttcgttgaaaat

SEQ ID NO: 5037952 - DNA, 25 bp, Homo sapien
ttggcagtgcgttcgttgaaaatac

SEQ ID NO: 5037953 - DNA, 25 bp, Homo sapien
agtttgctgtctataagcctgaggg

SEQ ID NO: 5037954 - DNA, 25 bp, Homo sapien
tgctgtctataagcctgagggcttc

SEQ ID NO: 5037955 - DNA, 25 bp, Homo sapien
tccccaacttatcacatcatacagt

SEQ ID NO: 5037956 - DNA, 25 bp, Homo sapien
tggtttagctgcacctactccccaa

SEQ ID NO: 5037957 - DNA, 25 bp, Homo sapien
ctgagaaatgaagggaggaaggaaa

SEQ ID NO: 5037958 - DNA, 25 bp, Homo sapien
aaagtacttctggtagggggtgcag

SEQ ID NO: 5037959 - DNA, 25 bp, Homo sapien
tgagaaatgaagggaggaaggaaaa

SEQ ID NO: 5037960 - DNA, 25 bp, Homo sapien
tggagcttaggagacaccgccgagt

SEQ ID NO: 5037961 - DNA, 25 bp, Homo sapien
agtggagcttaggagacaccgccga

SEQ ID NO: 5037962 - DNA, 25 bp, Homo sapien
aaagtggagcttaggagacaccgcc

SEQ ID NO: 5037963 - DNA, 25 bp, Homo sapien
gcttaggagacaccgccgagtgcct

SEQ ID NO: 5037964 - DNA, 25 bp, Homo sapien
tctctgttcaccttgacaagcatca

SEQ ID NO: 5037965 - DNA, 25 bp, Homo sapien
aagccgtggggtatatgaccagcca

SEQ ID NO: 5037966 - DNA, 25 bp, Homo sapien
tctggctgagaaatcaagccgtggg

SEQ ID NO: 5037967 - DNA, 25 bp, Homo sapien
ttgacaagcatcactgtcatcacca

SEQ ID NO: 5037968 - DNA, 25 bp, Homo sapien
tgcagagtggttactggagcgaccc

SEQ ID NO: 5037969 - DNA, 25 bp, Homo sapien
ggtgttcctaattaaggccagcaca

SEQ ID NO: 5037970 - DNA, 25 bp, Homo sapien
tccttaatggctgcgtgctcggctg

SEQ ID NO: 5037971 - DNA, 25 bp, Homo sapien
tcctgctgccgagcgggctttgaag

SEQ ID NO: 5037972 - DNA, 25 bp, Homo sapien
tactgctaattcaagggagaacctc

SEQ ID NO: 5037973 - DNA, 25 bp, Homo sapien
gacaatgggcttccttaatgctcag

SEQ ID NO: 5037974 - DNA, 25 bp, Homo sapien
gaacctcagcaatcgtgacaatggg

SEQ ID NO: 5037975 - DNA, 25 bp, Homo sapien
tatgaccaaggccagatacgccaag

SEQ ID NO: 5037976 - DNA, 25 bp, Homo sapien
tcaccgtttatagggagcagcccac

SEQ ID NO: 5037977 - DNA, 25 bp, Homo sapien
gaagaaagacatccgcagagtgagc

SEQ ID NO: 5037978 - DNA, 25 bp, Homo sapien
catgggcccaaaacgaggaagctgt

SEQ ID NO: 5037979 - DNA, 25 bp, Homo sapien
tccaagggaactcctgcagagactg

SEQ ID NO: 5037980 - DNA, 25 bp, Homo sapien
ccagacaaaccagctatgggccctt

SEQ ID NO: 5037981 - DNA, 25 bp, Homo sapien
agacaaaccagctatgggcccttcc

SEQ ID NO: 5037982 - DNA, 25 bp, Homo sapien
agtcaacatcacttccagactactg

SEQ ID NO: 5037983 - DNA, 25 bp, Homo sapien
tccagactactgttccccagacaaa

SEQ ID NO: 5037984 - DNA, 25 bp, Homo sapien
tgctttacatggtgctgttccccag

SEQ ID NO: 5037985 - DNA, 25 bp, Homo sapien
cgacatttacgcttttccctcagag

SEQ ID NO: 5037986 - DNA, 25 bp, Homo sapien
cagccagccgaggacttagatgaag

SEQ ID NO: 5037987 - DNA, 25 bp, Homo sapien
ccacagcagggtagaataaacggga

SEQ ID NO: 5037988 - DNA, 25 bp, Homo sapien
gcataaacaatcttggaaatcagac

SEQ ID NO: 5037989 - DNA, 25 bp, Homo sapien
taaaactctgcagaacccaaggcat

SEQ ID NO: 5037990 - DNA, 25 bp, Homo sapien
tatatactgcttatcagatctgttc

SEQ ID NO: 5037991 - DNA, 25 bp, Homo sapien
tgttttagtcttccattccaccttg

SEQ ID NO: 5037992 - DNA, 25 bp, Homo sapien
tactgaacaaacctactaaactcaa

SEQ ID NO: 5037993 - DNA, 25 bp, Homo sapien
ataggatactgaacaaacctactaa

SEQ ID NO: 5037994 - DNA, 25 bp, Homo sapien
taggatactgaacaaacctactaaa

SEQ ID NO: 5037995 - DNA, 25 bp, Homo sapien
gatactgaacaaacctactaaactc

SEQ ID NO: 5037996 - DNA, 25 bp, Homo sapien
aacagtgaatgggaagaaccgagcc

SEQ ID NO: 5037997 - DNA, 25 bp, Homo sapien
tttgtgacaaaaggcacgagagctg

SEQ ID NO: 5037998 - DNA, 25 bp, Homo sapien
gcttgataaagttcaccctgggtga

SEQ ID NO: 5037999 - DNA, 25 bp, Homo sapien
gacagatccgtcagtgtgcactggg

SEQ ID NO: 5038000 - DNA, 25 bp, Homo sapien
actcggtgcacagctttccaaacct

SEQ ID NO: 5038001 - DNA, 25 bp, Homo sapien
caaacctgcccactcgttttggaag

SEQ ID NO: 5038002 - DNA, 25 bp, Homo sapien
ttggaagcgagcttttaattaaaca

SEQ ID NO: 5038003 - DNA, 25 bp, Homo sapien
tcggtgcacagctttccaaacctgc

SEQ ID NO: 5038004 - DNA, 25 bp, Homo sapien
ctgggccagagccaaagagaagctc

SEQ ID NO: 5038005 - DNA, 25 bp, Homo sapien
tgggccagagccaaagagaagctcc

SEQ ID NO: 5038006 - DNA, 25 bp, Homo sapien
cccacctccagccagctcgcgcggc

SEQ ID NO: 5038007 - DNA, 25 bp, Homo sapien
tggatgaataacacggggccctggt

SEQ ID NO: 5038008 - DNA, 25 bp, Homo sapien
gctcgcgcggctggttttatttcct

SEQ ID NO: 5038009 - DNA, 25 bp, Homo sapien
ctggatgaataacacggggccctgg

SEQ ID NO: 5038010 - DNA, 25 bp, Homo sapien
cagaaaatccacatccgaggatcag

SEQ ID NO: 5038011 - DNA, 25 bp, Homo sapien
aatccacatccgaggatcaggttat

SEQ ID NO: 5038012 - DNA, 25 bp, Homo sapien
gaggatcaggttatccccagtccca

SEQ ID NO: 5038013 - DNA, 25 bp, Homo sapien
aggatcaggttatccccagtcccac

SEQ ID NO: 5038014 - DNA, 25 bp, Homo sapien
cttccaagagaaaacctagagtgtg

SEQ ID NO: 5038015 - DNA, 25 bp, Homo sapien
ccagcttcggaacggcccaattaat

SEQ ID NO: 5038016 - DNA, 25 bp, Homo sapien
tctgggagggcaggatacagttatt

SEQ ID NO: 5038017 - DNA, 25 bp, Homo sapien
gataccccactccaagtagacctga

SEQ ID NO: 5038018 - DNA, 25 bp, Homo sapien
tcaggtgtcctcccgggcatccagc

SEQ ID NO: 5038019 - DNA, 25 bp, Homo sapien
ggtgtcctcccgggcatccagcccc

SEQ ID NO: 5038020 - DNA, 25 bp, Homo sapien
atccagcccccgcgggtcccagaca

SEQ ID NO: 5038021 - DNA, 25 bp, Homo sapien
cagcccccgcgggtcccagacactt

SEQ ID NO: 5038022 - DNA, 25 bp, Homo sapien
aacttgcagccagtgccttgagccc

SEQ ID NO: 5038023 - DNA, 25 bp, Homo sapien
agggacagacaatgggaaaacttgc

SEQ ID NO: 5038024 - DNA, 25 bp, Homo sapien
cagacaatgggaaaacttgcagcca

SEQ ID NO: 5038025 - DNA, 25 bp, Homo sapien
cttgagcccccgagggaaagaaatg

SEQ ID NO: 5038026 - DNA, 25 bp, Homo sapien
aagcgcggcggcgaggtcagagcgc

SEQ ID NO: 5038027 - DNA, 25 bp, Homo sapien
ccccgggtgagcaggtgacactccg

SEQ ID NO: 5038028 - DNA, 25 bp, Homo sapien
aggtgacactccggccgggagctcc

SEQ ID NO: 5038029 - DNA, 25 bp, Homo sapien
atggcgtgggacagcagacaccccc

SEQ ID NO: 5038030 - DNA, 25 bp, Homo sapien
cgagcgcgctgcattccttctcaat

SEQ ID NO: 5038031 - DNA, 25 bp, Homo sapien
cctccgagcgcgctgcattccttct

SEQ ID NO: 5038032 - DNA, 25 bp, Homo sapien
agcgcgctgcattccttctcaatca

SEQ ID NO: 5038033 - DNA, 25 bp, Homo sapien
gaggcctccgagcgcgctgcattcc

SEQ ID NO: 5038034 - DNA, 25 bp, Homo sapien
ccggcagggcgagggcacacacgcg

SEQ ID NO: 5038035 - DNA, 25 bp, Homo sapien
agggcgagggcacacacgcggggcc

SEQ ID NO: 5038036 - DNA, 25 bp, Homo sapien
gcgagggcacacacgcggggccgct

SEQ ID NO: 5038037 - DNA, 25 bp, Homo sapien
gctccggcagggcgagggcacacac

SEQ ID NO: 5038038 - DNA, 25 bp, Homo sapien
gaatttcaccttccgagagacccac

SEQ ID NO: 5038039 - DNA, 25 bp, Homo sapien
gctcgctcaccccagaaggaatttc

SEQ ID NO: 5038040 - DNA, 25 bp, Homo sapien
gggctcgctcaccccagaaggaatt

SEQ ID NO: 5038041 - DNA, 25 bp, Homo sapien
cagaaggaatttcaccttccgagag

SEQ ID NO: 5038042 - DNA, 25 bp, Homo sapien
tagggtattcgcctacaagcagcgc

SEQ ID NO: 5038043 - DNA, 25 bp, Homo sapien
gccaaaccgctctgtagggtattcg

SEQ ID NO: 5038044 - DNA, 25 bp, Homo sapien
gggtgcaccagaccgactgttctct

SEQ ID NO: 5038045 - DNA, 25 bp, Homo sapien
attcgcctacaagcagcgctcggct

SEQ ID NO: 5038046 - DNA, 25 bp, Homo sapien
gggccagcgccattgaaaaacgcaa

SEQ ID NO: 5038047 - DNA, 25 bp, Homo sapien
taaaaatgccgggagaagactgaca

SEQ ID NO: 5038048 - DNA, 25 bp, Homo sapien
tgatgcagagaaaatcgcccgctga

SEQ ID NO: 5038049 - DNA, 25 bp, Homo sapien
aaaaatcgcccaacagcagagcggg

SEQ ID NO: 5038050 - DNA, 25 bp, Homo sapien
ggagcgcgcgcccgagaggcgcgtg

SEQ ID NO: 5038051 - DNA, 25 bp, Homo sapien
tgggagcgcgcgcccgagaggcgcg

SEQ ID NO: 5038052 - DNA, 25 bp, Homo sapien
gagcgcgcgcccgagaggcgcgtgg

SEQ ID NO: 5038053 - DNA, 25 bp, Homo sapien
ggctgggagcgcgcgcccgagaggc

SEQ ID NO: 5038054 - DNA, 25 bp, Homo sapien
ccctacaatggctgcgagcgcgcgg

SEQ ID NO: 5038055 - DNA, 25 bp, Homo sapien
ggccggagcctctccctccggtgcg

SEQ ID NO: 5038056 - DNA, 25 bp, Homo sapien
gcagcgcggagagggcgtgtcggca

SEQ ID NO: 5038057 - DNA, 25 bp, Homo sapien
ccgccgcaaagaggagcctgctggt

SEQ ID NO: 5038058 - DNA, 25 bp, Homo sapien
ccctgctggatcctgtccccaaggg

SEQ ID NO: 5038059 - DNA, 25 bp, Homo sapien
gaatgcatccgactcatcttcacct

SEQ ID NO: 5038060 - DNA, 25 bp, Homo sapien
tcttcaccttgccaataacgggtgc

SEQ ID NO: 5038061 - DNA, 25 bp, Homo sapien
tgccaataacgggtgcttgacacat

SEQ ID NO: 5038062 - DNA, 25 bp, Homo sapien
gccattacccgactaatgagcacaa

SEQ ID NO: 5038063 - DNA, 25 bp, Homo sapien
ggtggtggcagccattacccgacta

SEQ ID NO: 5038064 - DNA, 25 bp, Homo sapien
ttacccgactaatgagcacaacacc

SEQ ID NO: 5038065 - DNA, 25 bp, Homo sapien
ggtggcagccattacccgactaatg

SEQ ID NO: 5038066 - DNA, 25 bp, Homo sapien
agtcatcacattgccatctggaaaa

SEQ ID NO: 5038067 - DNA, 25 bp, Homo sapien
aaaaggctgccaaataggcaacttt

SEQ ID NO: 5038068 - DNA, 25 bp, Homo sapien
aaggctgccaaataggcaactttct

SEQ ID NO: 5038069 - DNA, 25 bp, Homo sapien
tcagtcatcacattgccatctggaa

SEQ ID NO: 5038070 - DNA, 25 bp, Homo sapien
gggtcctgttcgttgctggcagctt

SEQ ID NO: 5038071 - DNA, 25 bp, Homo sapien
tgctgcgtttacagccgtgtggacc

SEQ ID NO: 5038072 - DNA, 25 bp, Homo sapien
cagctcccatactggatgccgtggg

SEQ ID NO: 5038073 - DNA, 25 bp, Homo sapien
ccatttacgggaagcagtgctgcgt

SEQ ID NO: 5038074 - DNA, 25 bp, Homo sapien
gagaacgtgcacctgagaagcctcg

SEQ ID NO: 5038075 - DNA, 25 bp, Homo sapien
gcacaattagagaacgtgcacctga

SEQ ID NO: 5038076 - DNA, 25 bp, Homo sapien
ccatggagaagttgactgcttgcct

SEQ ID NO: 5038077 - DNA, 25 bp, Homo sapien
ctctgcacaattagagaacgtgcac

SEQ ID NO: 5038078 - DNA, 25 bp, Homo sapien
gcgtgggtcaggaggtggggtgtta

SEQ ID NO: 5038079 - DNA, 25 bp, Homo sapien
tggcgtgggtcaggaggtggggtgt

SEQ ID NO: 5038080 - DNA, 25 bp, Homo sapien
gtggcgtgggtcaggaggtggggtg

SEQ ID NO: 5038081 - DNA, 25 bp, Homo sapien
tgcagctttcactcggcagacagac

SEQ ID NO: 5038082 - DNA, 25 bp, Homo sapien
actccgggtcttcgggctggtcctg

SEQ ID NO: 5038083 - DNA, 25 bp, Homo sapien
tggcagcaagttgggtgaccgctcc

SEQ ID NO: 5038084 - DNA, 25 bp, Homo sapien
aaggcttttctcctgctggcagcaa

SEQ ID NO: 5038085 - DNA, 25 bp, Homo sapien
tggctcccaaggggattttataaga

SEQ ID NO: 5038086 - DNA, 25 bp, Homo sapien
ggcatttgacaaagtcagcagatga

SEQ ID NO: 5038087 - DNA, 25 bp, Homo sapien
gaacactgttttcatgggtccaagg

SEQ ID NO: 5038088 - DNA, 25 bp, Homo sapien
aagagtccactatcttttggttgtt

SEQ ID NO: 5038089 - DNA, 25 bp, Homo sapien
aaatgggcataggtacacctgcctc

SEQ ID NO: 5038090 - DNA, 25 bp, Homo sapien
ctgcccggctcctccatacgttatg

SEQ ID NO: 5038091 - DNA, 25 bp, Homo sapien
gcctcctatctacgtttcctttgga

SEQ ID NO: 5038092 - DNA, 25 bp, Homo sapien
ggtacacctgcctcctatctacgtt

SEQ ID NO: 5038093 - DNA, 25 bp, Homo sapien
tgtagtattgcaggtgagcgcagga

SEQ ID NO: 5038094 - DNA, 25 bp, Homo sapien
gagcgggcatcaccttcatgctcat

SEQ ID NO: 5038095 - DNA, 25 bp, Homo sapien
ttttactctctgagcgggcatcacc

SEQ ID NO: 5038096 - DNA, 25 bp, Homo sapien
tgcacagacatttggtagcttttac

SEQ ID NO: 5038097 - DNA, 25 bp, Homo sapien
catttggtagcttttactctctgag

SEQ ID NO: 5038098 - DNA, 25 bp, Homo sapien
tagactgaactccaggtgatgaggt

SEQ ID NO: 5038099 - DNA, 25 bp, Homo sapien
tctctcagcatacattgtagactga

SEQ ID NO: 5038100 - DNA, 25 bp, Homo sapien
ccattttggatctgacacaggcacc

SEQ ID NO: 5038101 - DNA, 25 bp, Homo sapien
cattgtagactgaactccaggtgat

SEQ ID NO: 5038102 - DNA, 25 bp, Homo sapien
cagtgccttcaatgggtccttgtgg

SEQ ID NO: 5038103 - DNA, 25 bp, Homo sapien
gtgttgattctatggcagtgccttc

SEQ ID NO: 5038104 - DNA, 25 bp, Homo sapien
ccttcaatgggtccttgtggcatat

SEQ ID NO: 5038105 - DNA, 25 bp, Homo sapien
tatggcagtgccttcaatgggtcct

SEQ ID NO: 5038106 - DNA, 25 bp, Homo sapien
catggatcccgggttacctcttatt

SEQ ID NO: 5038107 - DNA, 25 bp, Homo sapien
gtacgtatacggcagttgatctcca

SEQ ID NO: 5038108 - DNA, 25 bp, Homo sapien
tgaaccagggctgtcatcctggaaa

SEQ ID NO: 5038109 - DNA, 25 bp, Homo sapien
cacactcttgggttgaaaacacttt

SEQ ID NO: 5038110 - DNA, 25 bp, Homo sapien
gccctcacttatccagtatttggtt

SEQ ID NO: 5038111 - DNA, 25 bp, Homo sapien
tttagccctcacttatccagtattt

SEQ ID NO: 5038112 - DNA, 25 bp, Homo sapien
tagccctcacttatccagtatttgg

SEQ ID NO: 5038113 - DNA, 25 bp, Homo sapien
agccctcacttatccagtatttggt

SEQ ID NO: 5038114 - DNA, 25 bp, Homo sapien
ggaaactgaacccttggcttgcact

SEQ ID NO: 5038115 - DNA, 25 bp, Homo sapien
tagctccgggtgctagacagctgca

SEQ ID NO: 5038116 - DNA, 25 bp, Homo sapien
gaaaatagatccatcgcaagcactg

SEQ ID NO: 5038117 - DNA, 25 bp, Homo sapien
taaggcagcactcttcaagtcaagg

SEQ ID NO: 5038118 - DNA, 25 bp, Homo sapien
ccttccttggctataacaggcatga

SEQ ID NO: 5038119 - DNA, 25 bp, Homo sapien
caattctctgcattagttgagccca

SEQ ID NO: 5038120 - DNA, 25 bp, Homo sapien
gaaaagcgccatctcgagttctgtg

SEQ ID NO: 5038121 - DNA, 25 bp, Homo sapien
gttgagcccatggacagtaacagcc

SEQ ID NO: 5038122 - DNA, 25 bp, Homo sapien
gtggtgccaggcactctccccattg

SEQ ID NO: 5038123 - DNA, 25 bp, Homo sapien
tccttgacattctaatccgctgacg

SEQ ID NO: 5038124 - DNA, 25 bp, Homo sapien
gctgatgaagttcccggtggtgcca

SEQ ID NO: 5038125 - DNA, 25 bp, Homo sapien
ggtcctatgcttgctgatgaagttc

SEQ ID NO: 5038126 - DNA, 25 bp, Homo sapien
ctcccttgtgcagggactgaagtaa

SEQ ID NO: 5038127 - DNA, 25 bp, Homo sapien
gaagtaagcccatggtttattctgg

SEQ ID NO: 5038128 - DNA, 25 bp, Homo sapien
agggactgaagtaagcccatggttt

SEQ ID NO: 5038129 - DNA, 25 bp, Homo sapien
gccgtcactcccttgtgcagggact

SEQ ID NO: 5038130 - DNA, 25 bp, Homo sapien
tgaggagaccctgagtttggatgct

SEQ ID NO: 5038131 - DNA, 25 bp, Homo sapien
cctgggctaagaagtgggaggcctg

SEQ ID NO: 5038132 - DNA, 25 bp, Homo sapien
gctaatgggaaacgcttgagggctt

SEQ ID NO: 5038133 - DNA, 25 bp, Homo sapien
agcgcaagagccctgggctaagaag

SEQ ID NO: 5038134 - DNA, 25 bp, Homo sapien
gagaagacatggtcacaggcaacaa

SEQ ID NO: 5038135 - DNA, 25 bp, Homo sapien
tcctctaggtgtggggccaaataca

SEQ ID NO: 5038136 - DNA, 25 bp, Homo sapien
gaagacatggtcacaggcaacaagg

SEQ ID NO: 5038137 - DNA, 25 bp, Homo sapien
cctgtggaccctccactggtttcaa

SEQ ID NO: 5038138 - DNA, 25 bp, Homo sapien
ggttttccctacaacaagtgctcca

SEQ ID NO: 5038139 - DNA, 25 bp, Homo sapien
cacggaggcttagaagagaccaagg

SEQ ID NO: 5038140 - DNA, 25 bp, Homo sapien
gaattactggaaccatgttggaggc

SEQ ID NO: 5038141 - DNA, 25 bp, Homo sapien
tatacaaagacacaataccaggagg

SEQ ID NO: 5038142 - DNA, 25 bp, Homo sapien
gctacgagctgttcagagcacaaag

SEQ ID NO: 5038143 - DNA, 25 bp, Homo sapien
gcataatgtgaatggtccaagggcc

SEQ ID NO: 5038144 - DNA, 25 bp, Homo sapien
cattaagtatgagagagccatcagc

SEQ ID NO: 5038145 - DNA, 25 bp, Homo sapien
tacggcatcatggtgcagaaggctg

SEQ ID NO: 5038146 - DNA, 25 bp, Homo sapien
ggccagcattgtgcaagccggagaa

SEQ ID NO: 5038147 - DNA, 25 bp, Homo sapien
cgaatgccatggcaggccctcgcag

SEQ ID NO: 5038148 - DNA, 25 bp, Homo sapien
gacaaagagagccattatccccttg

SEQ ID NO: 5038149 - DNA, 25 bp, Homo sapien
tcttttccggagaatttacacgcag

SEQ ID NO: 5038150 - DNA, 25 bp, Homo sapien
gatggaccaggctagggctttggga

SEQ ID NO: 5038151 - DNA, 25 bp, Homo sapien
ttggacaaaccagaggcagttttga

SEQ ID NO: 5038152 - DNA, 25 bp, Homo sapien
gaatcctggtagacttggacaaacc

SEQ ID NO: 5038153 - DNA, 25 bp, Homo sapien
gaacttgaatcctggtagacttgga

SEQ ID NO: 5038154 - DNA, 25 bp, Homo sapien
acaaagcgtctttcagagctatggg

SEQ ID NO: 5038155 - DNA, 25 bp, Homo sapien
tccaaggaacttggcacaaagcgtc

SEQ ID NO: 5038156 - DNA, 25 bp, Homo sapien
ccattgtatatctcggcaggagagc

SEQ ID NO: 5038157 - DNA, 25 bp, Homo sapien
gatttgcctagaactagcctgtgga

SEQ ID NO: 5038158 - DNA, 25 bp, Homo sapien
cttccctgaagagtggtctgtctgg

SEQ ID NO: 5038159 - DNA, 25 bp, Homo sapien
tgcttccctgaagagtggtctgtct

SEQ ID NO: 5038160 - DNA, 25 bp, Homo sapien
ccctgaagagtggtctgtctggttc

SEQ ID NO: 5038161 - DNA, 25 bp, Homo sapien
ctgaagagtggtctgtctggttctc

SEQ ID NO: 5038162 - DNA, 25 bp, Homo sapien
ttggcacgagcctcagatgttgggc

SEQ ID NO: 5038163 - DNA, 25 bp, Homo sapien
gcatggccccaggaatttgccgaag

SEQ ID NO: 5038164 - DNA, 25 bp, Homo sapien
cagggctgatccaacatatctggct

SEQ ID NO: 5038165 - DNA, 25 bp, Homo sapien
tgttcagcctgtaccctgcttggag

SEQ ID NO: 5038166 - DNA, 25 bp, Homo sapien
gtgtggagcagctcacagaacatga

SEQ ID NO: 5038167 - DNA, 25 bp, Homo sapien
gtggagcagctcacagaacatgagg

SEQ ID NO: 5038168 - DNA, 25 bp, Homo sapien
ctgtgggagtgtggagcagctcaca

SEQ ID NO: 5038169 - DNA, 25 bp, Homo sapien
gagtgtggagcagctcacagaacat

SEQ ID NO: 5038170 - DNA, 25 bp, Homo sapien
tgcagtaggagagagtggacaattt

SEQ ID NO: 5038171 - DNA, 25 bp, Homo sapien
gggtcatgcagtaggagagagtgga

SEQ ID NO: 5038172 - DNA, 25 bp, Homo sapien
cagcaaaggcttgtcatgaccacag

SEQ ID NO: 5038173 - DNA, 25 bp, Homo sapien
tcatgcagtaggagagagtggacaa

SEQ ID NO: 5038174 - DNA, 25 bp, Homo sapien
gctttcgtgggcattggtaatcaaa

SEQ ID NO: 5038175 - DNA, 25 bp, Homo sapien
tgagtgcaaatgctttcgtgggcat

SEQ ID NO: 5038176 - DNA, 25 bp, Homo sapien
caaatgctttcgtgggcattggtaa

SEQ ID NO: 5038177 - DNA, 25 bp, Homo sapien
ctgcttgagtgcaaatgctttcgtg

SEQ ID NO: 5038178 - DNA, 25 bp, Homo sapien
tccttctcgctcatccattgcatct

SEQ ID NO: 5038179 - DNA, 25 bp, Homo sapien
gggaacatgtgtatgcctgactctc

SEQ ID NO: 5038180 - DNA, 25 bp, Homo sapien
catgtgtatgcctgactctccctct

SEQ ID NO: 5038181 - DNA, 25 bp, Homo sapien
ttctcgctcatccattgcatctttg

SEQ ID NO: 5038182 - DNA, 25 bp, Homo sapien
tgtaatacccgaatgttcctgggga

SEQ ID NO: 5038183 - DNA, 25 bp, Homo sapien
ctgtaatacccgaatgttcctgggg

SEQ ID NO: 5038184 - DNA, 25 bp, Homo sapien
aagccacttaaaagaatcagtagga

SEQ ID NO: 5038185 - DNA, 25 bp, Homo sapien
ttcctgagaaaagccgtatatgaag

SEQ ID NO: 5038186 - DNA, 25 bp, Homo sapien
gaatttccatgaggtattcctgaga

SEQ ID NO: 5038187 - DNA, 25 bp, Homo sapien
taggagccagatcagttgacttgga

SEQ ID NO: 5038188 - DNA, 25 bp, Homo sapien
gtagacgacaagatggagtgtgcaa

SEQ ID NO: 5038189 - DNA, 25 bp, Homo sapien
cgtagacgacaagatggagtgtgca

SEQ ID NO: 5038190 - DNA, 25 bp, Homo sapien
tggaactccaggggttcggaagcca

SEQ ID NO: 5038191 - DNA, 25 bp, Homo sapien
cttatcagattatttatgctcactg

SEQ ID NO: 5038192 - DNA, 25 bp, Homo sapien
ccaccacttggaaggggcataacca

SEQ ID NO: 5038193 - DNA, 25 bp, Homo sapien
tgagcattagttctagagcatctct

SEQ ID NO: 5038194 - DNA, 25 bp, Homo sapien
ggcataaccagggaatactggcact

SEQ ID NO: 5038195 - DNA, 25 bp, Homo sapien
cagccaggacctatttgcaagtgag

SEQ ID NO: 5038196 - DNA, 25 bp, Homo sapien
caggtgggtgcggtcactttcccca

SEQ ID NO: 5038197 - DNA, 25 bp, Homo sapien
tactgcccataaagaagcgggaagc

SEQ ID NO: 5038198 - DNA, 25 bp, Homo sapien
gcgggaagccagttagtgcaagatc

SEQ ID NO: 5038199 - DNA, 25 bp, Homo sapien
tatccattactattcctaccactag

SEQ ID NO: 5038200 - DNA, 25 bp, Homo sapien
cacctgagtcaagcaaacgccatta

SEQ ID NO: 5038201 - DNA, 25 bp, Homo sapien
ggatcaagccctaccaaattaaagc

SEQ ID NO: 5038202 - DNA, 25 bp, Homo sapien
ccttacccagtgcttatatccatta

SEQ ID NO: 5038203 - DNA, 25 bp, Homo sapien
taatcgttatgctctgaacaaagcc

SEQ ID NO: 5038204 - DNA, 25 bp, Homo sapien
tcaatcactattcgttcatggaggg

SEQ ID NO: 5038205 - DNA, 25 bp, Homo sapien
cctggtgcagggagtatcaatcact

SEQ ID NO: 5038206 - DNA, 25 bp, Homo sapien
gctttttcctggattggaccctctg

SEQ ID NO: 5038207 - DNA, 25 bp, Homo sapien
caatcctgctaaggaaggctaggca

SEQ ID NO: 5038208 - DNA, 25 bp, Homo sapien
cacagtggctaataggagacttcac

SEQ ID NO: 5038209 - DNA, 25 bp, Homo sapien
tcagggtcacatggaagcctagggt

SEQ ID NO: 5038210 - DNA, 25 bp, Homo sapien
tgatagcatcttcggccaaacttgg

SEQ ID NO: 5038211 - DNA, 25 bp, Homo sapien
taactggtggcggaattcaagattc

SEQ ID NO: 5038212 - DNA, 25 bp, Homo sapien
gaaataactggtggcggaattcaag

SEQ ID NO: 5038213 - DNA, 25 bp, Homo sapien
gaattcaagattcagctggtagaga

SEQ ID NO: 5038214 - DNA, 25 bp, Homo sapien
tggcggaattcaagattcagctggt

SEQ ID NO: 5038215 - DNA, 25 bp, Homo sapien
tagcatctcgtgaccggcttacaat

SEQ ID NO: 5038216 - DNA, 25 bp, Homo sapien
cgtgccagccggagggctgtaagca

SEQ ID NO: 5038217 - DNA, 25 bp, Homo sapien
gaccttgctggagcacctagataag

SEQ ID NO: 5038218 - DNA, 25 bp, Homo sapien
cctggggtagcttgtccctaacaca

SEQ ID NO: 5038219 - DNA, 25 bp, Homo sapien
tgtcatggtagtcacaggaaacttc

SEQ ID NO: 5038220 - DNA, 25 bp, Homo sapien
ggatcaggctgaagcatcctcacaa

SEQ ID NO: 5038221 - DNA, 25 bp, Homo sapien
tttcattccttggacgacagccgga

SEQ ID NO: 5038222 - DNA, 25 bp, Homo sapien
tcatgggaagtagcctcatctggag

SEQ ID NO: 5038223 - DNA, 25 bp, Homo sapien
tgaggaactgagaacccaaaggaca

SEQ ID NO: 5038224 - DNA, 25 bp, Homo sapien
agaacccaaaggacagcagatggct

SEQ ID NO: 5038225 - DNA, 25 bp, Homo sapien
aatatgaggaactgagaacccaaag

SEQ ID NO: 5038226 - DNA, 25 bp, Homo sapien
cagacccctctgggaatatgaggaa

SEQ ID NO: 5038227 - DNA, 25 bp, Homo sapien
taagcataggagagatacagtatag

SEQ ID NO: 5038228 - DNA, 25 bp, Homo sapien
attatgttaatgaatgccattggga

SEQ ID NO: 5038229 - DNA, 25 bp, Homo sapien
gattctagactttaagcataggaga

SEQ ID NO: 5038230 - DNA, 25 bp, Homo sapien
tatatatattgtaagatcagtgatt

SEQ ID NO: 5038231 - DNA, 25 bp, Homo sapien
gccttgtgggcacagcgcccatgct

SEQ ID NO: 5038232 - DNA, 25 bp, Homo sapien
tgggtgaaggagagcgagttgggac

SEQ ID NO: 5038233 - DNA, 25 bp, Homo sapien
cgagttgggactttgaggcaggatc

SEQ ID NO: 5038234 - DNA, 25 bp, Homo sapien
aagttctagggatggattcgtgggt

SEQ ID NO: 5038235 - DNA, 25 bp, Homo sapien
gtgacggacttcacttccaccctcc

SEQ ID NO: 5038236 - DNA, 25 bp, Homo sapien
ttccagccaagcccggcttctccat

SEQ ID NO: 5038237 - DNA, 25 bp, Homo sapien
cggtgacggacttcacttccaccct

SEQ ID NO: 5038238 - DNA, 25 bp, Homo sapien
ggtgacggacttcacttccaccctc

SEQ ID NO: 5038239 - DNA, 25 bp, Homo sapien
tacgaagtagcagagcggatctcaa

SEQ ID NO: 5038240 - DNA, 25 bp, Homo sapien
gaatttatgccgacaactcatgcgc

SEQ ID NO: 5038241 - DNA, 25 bp, Homo sapien
cagcaggctctctcatacagaagga

SEQ ID NO: 5038242 - DNA, 25 bp, Homo sapien
tagactgtcagcattacatcaaggc

SEQ ID NO: 5038243 - DNA, 25 bp, Homo sapien
gagtatcactaatctcaagaccttc

SEQ ID NO: 5038244 - DNA, 25 bp, Homo sapien
tctgctatacgagctctggcagagc

SEQ ID NO: 5038245 - DNA, 25 bp, Homo sapien
ccagtgtcagaaacgctgagtatca

SEQ ID NO: 5038246 - DNA, 25 bp, Homo sapien
gaaaagggttgtcatgaaaactgct

SEQ ID NO: 5038247 - DNA, 25 bp, Homo sapien
gtctgtgtgtaatgccggctccttc

SEQ ID NO: 5038248 - DNA, 25 bp, Homo sapien
atctgggttcaattaaaatatatca

SEQ ID NO: 5038249 - DNA, 25 bp, Homo sapien
accatgattgtgttttaccctcccg

SEQ ID NO: 5038250 - DNA, 25 bp, Homo sapien
aaaggagctccaaaacgttgctgcc

SEQ ID NO: 5038251 - DNA, 25 bp, Homo sapien
atggctgtaccggattgctctccag

SEQ ID NO: 5038252 - DNA, 25 bp, Homo sapien
tggatggctgtaccggattgctctc

SEQ ID NO: 5038253 - DNA, 25 bp, Homo sapien
atgagttcatagggcctggatggct

SEQ ID NO: 5038254 - DNA, 25 bp, Homo sapien
cagaaatttctacaacctactgggg

SEQ ID NO: 5038255 - DNA, 25 bp, Homo sapien
tatctcgagttggttccctattgcc

SEQ ID NO: 5038256 - DNA, 25 bp, Homo sapien
agagctgagctatgaaatgcattgt

SEQ ID NO: 5038257 - DNA, 25 bp, Homo sapien
aatccattgtccatgtagggttctt

SEQ ID NO: 5038258 - DNA, 25 bp, Homo sapien
tagggttcttctgccgaaacgagga

SEQ ID NO: 5038259 - DNA, 25 bp, Homo sapien
agtaaatgggtataatgaggtgtaa

SEQ ID NO: 5038260 - DNA, 25 bp, Homo sapien
atgggtataatgaggtgtaaaactc

SEQ ID NO: 5038261 - DNA, 25 bp, Homo sapien
gcttcataagcctttctgcttctca

SEQ ID NO: 5038262 - DNA, 25 bp, Homo sapien
taaatgggtataatgaggtgtaaaa

SEQ ID NO: 5038263 - DNA, 25 bp, Homo sapien
cttgcattgaggttacaaagtggca

SEQ ID NO: 5038264 - DNA, 25 bp, Homo sapien
aagcttgcattgaggttacaaagtg

SEQ ID NO: 5038265 - DNA, 25 bp, Homo sapien
gcaaagctgggatatcacatgatgt

SEQ ID NO: 5038266 - DNA, 25 bp, Homo sapien
gctgggatatcacatgatgtcacca

SEQ ID NO: 5038267 - DNA, 25 bp, Homo sapien
ggatgagaaggacgtacagcttcct

SEQ ID NO: 5038268 - DNA, 25 bp, Homo sapien
tggatgagaaggacgtacagcttcc

SEQ ID NO: 5038269 - DNA, 25 bp, Homo sapien
acatgacatgctgctctcggcagcc

SEQ ID NO: 5038270 - DNA, 25 bp, Homo sapien
catgacatgctgctctcggcagccc

SEQ ID NO: 5038271 - DNA, 25 bp, Homo sapien
ctgtgaggttctactaaggggtcac

SEQ ID NO: 5038272 - DNA, 25 bp, Homo sapien
tcaccagtcacggaaaacatgccca

SEQ ID NO: 5038273 - DNA, 25 bp, Homo sapien
tgaggttctactaaggggtcaccag

SEQ ID NO: 5038274 - DNA, 25 bp, Homo sapien
ggggtcaccagtcacggaaaacatg

SEQ ID NO: 5038275 - DNA, 25 bp, Homo sapien
gacaactgacaacttagtgccagct

SEQ ID NO: 5038276 - DNA, 25 bp, Homo sapien
tctgattgtataatcagctcagtac

SEQ ID NO: 5038277 - DNA, 25 bp, Homo sapien
cttagtgccagctgttctgattgta

SEQ ID NO: 5038278 - DNA, 25 bp, Homo sapien
cgatagtaggataaaacctactgac

SEQ ID NO: 5038279 - DNA, 25 bp, Homo sapien
aacccatatcttcgccacaggggaa

SEQ ID NO: 5038280 - DNA, 25 bp, Homo sapien
caaacccatatcttcgccacagggg

SEQ ID NO: 5038281 - DNA, 25 bp, Homo sapien
cccatatcttcgccacaggggaatt

SEQ ID NO: 5038282 - DNA, 25 bp, Homo sapien
catatcttcgccacaggggaattcc

SEQ ID NO: 5038283 - DNA, 25 bp, Homo sapien
tcattgttttcctcgggcggtggtg

SEQ ID NO: 5038284 - DNA, 25 bp, Homo sapien
cattgttttcctcgggcggtggtgg

SEQ ID NO: 5038285 - DNA, 25 bp, Homo sapien
ggaggagagattgtcattgttttcc

SEQ ID NO: 5038286 - DNA, 25 bp, Homo sapien
gaaggaggagagattgtcattgttt

SEQ ID NO: 5038287 - DNA, 25 bp, Homo sapien
gaagagagatttttaactggtgttc

SEQ ID NO: 5038288 - DNA, 25 bp, Homo sapien
tttaactggtgttccttgagtcctc

SEQ ID NO: 5038289 - DNA, 25 bp, Homo sapien
caaatccgagaagagagatttttaa

SEQ ID NO: 5038290 - DNA, 25 bp, Homo sapien
tggtgttccttgagtcctctgcctt

SEQ ID NO: 5038291 - DNA, 25 bp, Homo sapien
gaggagcccttagtattacatgcga

SEQ ID NO: 5038292 - DNA, 25 bp, Homo sapien
gcttcagagtgagtctgaggagccc

SEQ ID NO: 5038293 - DNA, 25 bp, Homo sapien
tacatgcgaagctttcgtaagtcca

SEQ ID NO: 5038294 - DNA, 25 bp, Homo sapien
gagtatcctgtcagttagggtttta

SEQ ID NO: 5038295 - DNA, 25 bp, Homo sapien
gctagaggagtggaaacagccccgt

SEQ ID NO: 5038296 - DNA, 25 bp, Homo sapien
ccagaacagtgagttccttcttggg

SEQ ID NO: 5038297 - DNA, 25 bp, Homo sapien
tgcagtggacgtccgggagagagtt

SEQ ID NO: 5038298 - DNA, 25 bp, Homo sapien
cagggcgccttgggtgtagcaccca

SEQ ID NO: 5038299 - DNA, 25 bp, Homo sapien
tgtcaccatcacctatacaatgtac

SEQ ID NO: 5038300 - DNA, 25 bp, Homo sapien
tcacaaaccttgatgtctaccagaa

SEQ ID NO: 5038301 - DNA, 25 bp, Homo sapien
tattcactttgtaagcagctataac

SEQ ID NO: 5038302 - DNA, 25 bp, Homo sapien
gatgggttaagatgggctccattag

SEQ ID NO: 5038303 - DNA, 25 bp, Homo sapien
gaaaagttataagaggtgccatgtt

SEQ ID NO: 5038304 - DNA, 25 bp, Homo sapien
caaaggatgttcgagttcatgaaga

SEQ ID NO: 5038305 - DNA, 25 bp, Homo sapien
ttaaaccctgccaagtatctgatac

SEQ ID NO: 5038306 - DNA, 25 bp, Homo sapien
ccaagtatctgatacagaattgcaa

SEQ ID NO: 5038307 - DNA, 25 bp, Homo sapien
aggcagcggatcactccaggcttct

SEQ ID NO: 5038308 - DNA, 25 bp, Homo sapien
aatgctagcggaatgaatggaaacg

SEQ ID NO: 5038309 - DNA, 25 bp, Homo sapien
cgagcacacctcagtccagggaggg

SEQ ID NO: 5038310 - DNA, 25 bp, Homo sapien
tctgattcctctttcggactccggg

SEQ ID NO: 5038311 - DNA, 25 bp, Homo sapien
cagccgggtggttatcatgttctca

SEQ ID NO: 5038312 - DNA, 25 bp, Homo sapien
ggaacagctgcctgtacatcaacat

SEQ ID NO: 5038313 - DNA, 25 bp, Homo sapien
ttatcatcgtgggagctggcgtgct

SEQ ID NO: 5038314 - DNA, 25 bp, Homo sapien
taaaagagcctgacagaatagttgg

SEQ ID NO: 5038315 - DNA, 25 bp, Homo sapien
tccatcacggaagattcatcatgag

SEQ ID NO: 5038316 - DNA, 25 bp, Homo sapien
gattccttaccctctgtcagaaaac

SEQ ID NO: 5038317 - DNA, 25 bp, Homo sapien
aaagcaaatcagaggttcagattcc

SEQ ID NO: 5038318 - DNA, 25 bp, Homo sapien
agagtggaagagctttccatcacgg

SEQ ID NO: 5038319 - DNA, 25 bp, Homo sapien
ctatttgggatgtttcctaaaggca

SEQ ID NO: 5038320 - DNA, 25 bp, Homo sapien
tcagccctaggctacccctaattta

SEQ ID NO: 5038321 - DNA, 25 bp, Homo sapien
gcattgtatagtaaagccctttgga

SEQ ID NO: 5038322 - DNA, 25 bp, Homo sapien
tcttccattgtgtggctatattaca

SEQ ID NO: 5038323 - DNA, 25 bp, Homo sapien
gaactaggccttttatcattgtgct

SEQ ID NO: 5038324 - DNA, 25 bp, Homo sapien
ccatcctagtagtgtgaactaggcc

SEQ ID NO: 5038325 - DNA, 25 bp, Homo sapien
tattatctttgtgtgcatagccatc

SEQ ID NO: 5038326 - DNA, 25 bp, Homo sapien
tgctggattacatagtagttcacgt

SEQ ID NO: 5038327 - DNA, 25 bp, Homo sapien
aactcacttcggcatttcttgtggg

SEQ ID NO: 5038328 - DNA, 25 bp, Homo sapien
gatgacaactgattccacaaacgag

SEQ ID NO: 5038329 - DNA, 25 bp, Homo sapien
tacgcctttcgagtggagtttagtc

SEQ ID NO: 5038330 - DNA, 25 bp, Homo sapien
taccaggaagcttgcaggtcatatc

SEQ ID NO: 5038331 - DNA, 25 bp, Homo sapien
gtaacacttgattgctatgggccac

SEQ ID NO: 5038332 - DNA, 25 bp, Homo sapien
tacttgcagatagtccttagaagga

SEQ ID NO: 5038333 - DNA, 25 bp, Homo sapien
gaacctgacttgcaacctgtgaatc

SEQ ID NO: 5038334 - DNA, 25 bp, Homo sapien
gcatcttgcttaggcttaaagaacc

SEQ ID NO: 5038335 - DNA, 25 bp, Homo sapien
tttgggactatatagctcactacag

SEQ ID NO: 5038336 - DNA, 25 bp, Homo sapien
aaattaaaagatcagcaaggcatgg

SEQ ID NO: 5038337 - DNA, 25 bp, Homo sapien
taatcttgtccctgttgaaaagcac

SEQ ID NO: 5038338 - DNA, 25 bp, Homo sapien
tttccatattatacagaggtcacgg

SEQ ID NO: 5038339 - DNA, 25 bp, Homo sapien
gttcagtaaatctccaaataccatg

SEQ ID NO: 5038340 - DNA, 25 bp, Homo sapien
caagggctttataagttccactgta

SEQ ID NO: 5038341 - DNA, 25 bp, Homo sapien
aagtaagcacttgtaatacccggca

SEQ ID NO: 5038342 - DNA, 25 bp, Homo sapien
ttactacttgagattctaacagggc

SEQ ID NO: 5038343 - DNA, 25 bp, Homo sapien
tctgatataaattgcatgtaatacc

SEQ ID NO: 5038344 - DNA, 25 bp, Homo sapien
agcatttaagagaggcagtacaaaa

SEQ ID NO: 5038345 - DNA, 25 bp, Homo sapien
tggatttatacataacagttacatt

SEQ ID NO: 5038346 - DNA, 25 bp, Homo sapien
gaaaatctggagttgcacaaatagt

SEQ ID NO: 5038347 - DNA, 25 bp, Homo sapien
gaaaaaatgcagttgtatgagcaac

SEQ ID NO: 5038348 - DNA, 25 bp, Homo sapien
gacaatccttccattgaagaagtag

SEQ ID NO: 5038349 - DNA, 25 bp, Homo sapien
gtgggaagatctaaggacaatcctt

SEQ ID NO: 5038350 - DNA, 25 bp, Homo sapien
tgatggtgggaagatctaaggacaa

SEQ ID NO: 5038351 - DNA, 25 bp, Homo sapien
tgaaattaggcacatgtgcttcagc

SEQ ID NO: 5038352 - DNA, 25 bp, Homo sapien
aattaaattattcatggtgttatag

SEQ ID NO: 5038353 - DNA, 25 bp, Homo sapien
aagaattaaattattcatggtgtta

SEQ ID NO: 5038354 - DNA, 25 bp, Homo sapien
ttaaattattcatggtgttatagtt

SEQ ID NO: 5038355 - DNA, 25 bp, Homo sapien
gaattaaattattcatggtgttata

SEQ ID NO: 5038356 - DNA, 25 bp, Homo sapien
tttagcaaatgcagaagagtataaa

SEQ ID NO: 5038357 - DNA, 25 bp, Homo sapien
tataacctgctaatgagaggaaatt

SEQ ID NO: 5038358 - DNA, 25 bp, Homo sapien
tgatcataaaggtataacctgctaa

SEQ ID NO: 5038359 - DNA, 25 bp, Homo sapien
agcctggcgacagatggcacatgta

SEQ ID NO: 5038360 - DNA, 25 bp, Homo sapien
cctcctcaaaggctgtcaatttaca

SEQ ID NO: 5038361 - DNA, 25 bp, Homo sapien
tctccaaatgcttccgaataatggg

SEQ ID NO: 5038362 - DNA, 25 bp, Homo sapien
tcaccaacctgataagtggaaacag

SEQ ID NO: 5038363 - DNA, 25 bp, Homo sapien
tctattggcttggacatctttttca

SEQ ID NO: 5038364 - DNA, 25 bp, Homo sapien
tttgtgtaccgaacataatcctcca

SEQ ID NO: 5038365 - DNA, 25 bp, Homo sapien
tagctttgtgtaccgaacataatcc

SEQ ID NO: 5038366 - DNA, 25 bp, Homo sapien
gggtagctttgtgtaccgaacataa

SEQ ID NO: 5038367 - DNA, 25 bp, Homo sapien
tcctgggtagctttgtgtaccgaac

SEQ ID NO: 5038368 - DNA, 25 bp, Homo sapien
ggttgccaataacatgctggactag

SEQ ID NO: 5038369 - DNA, 25 bp, Homo sapien
cctcagggttgccaataacatgctg

SEQ ID NO: 5038370 - DNA, 25 bp, Homo sapien
accaccctcagggttgccaataaca

SEQ ID NO: 5038371 - DNA, 25 bp, Homo sapien
ctgtagcctgatcaccaccctcagg

SEQ ID NO: 5038372 - DNA, 25 bp, Homo sapien
gaagaagaacctgtccaagttgaca

SEQ ID NO: 5038373 - DNA, 25 bp, Homo sapien
aagaagaacctgtccaagttgacag

SEQ ID NO: 5038374 - DNA, 25 bp, Homo sapien
cctgtccaagttgacagctagggag

SEQ ID NO: 5038375 - DNA, 25 bp, Homo sapien
gaacctgtccaagttgacagctagg

SEQ ID NO: 5038376 - DNA, 25 bp, Homo sapien
tgagtagaccggatggagttcccct

SEQ ID NO: 5038377 - DNA, 25 bp, Homo sapien
ggtatgccctgacttgctttacaga

SEQ ID NO: 5038378 - DNA, 25 bp, Homo sapien
tgctctaaacaaggaggtatgccct

SEQ ID NO: 5038379 - DNA, 25 bp, Homo sapien
gcagggtgactaaggatggacacac

SEQ ID NO: 5038380 - DNA, 25 bp, Homo sapien
tcagcgccaggaactgctcggtgta

SEQ ID NO: 5038381 - DNA, 25 bp, Homo sapien
aagtggtggccaatcaaccgggtcg

SEQ ID NO: 5038382 - DNA, 25 bp, Homo sapien
tgtaccgggaatggaactgcttcag

SEQ ID NO: 5038383 - DNA, 25 bp, Homo sapien
cgtggagcagataaactggccaatc

SEQ ID NO: 5038384 - DNA, 25 bp, Homo sapien
gggaacaagttgcaacaccatatga

SEQ ID NO: 5038385 - DNA, 25 bp, Homo sapien
ccacaggattggtagggcattccag

SEQ ID NO: 5038386 - DNA, 25 bp, Homo sapien
tcattaaataccaacgctgtgaagg

SEQ ID NO: 5038387 - DNA, 25 bp, Homo sapien
tctcgctggcagatgatattttgga

SEQ ID NO: 5038388 - DNA, 25 bp, Homo sapien
tttacattacacttgggatggccct

SEQ ID NO: 5038389 - DNA, 25 bp, Homo sapien
actcagtttgcggtgacttggccaa

SEQ ID NO: 5038390 - DNA, 25 bp, Homo sapien
ggtgaagccagattccaaacacaca

SEQ ID NO: 5038391 - DNA, 25 bp, Homo sapien
cacataggtgataagtggtgaagcc

SEQ ID NO: 5038392 - DNA, 25 bp, Homo sapien
tacaattggaaaatagggtaagcgc

SEQ ID NO: 5038393 - DNA, 25 bp, Homo sapien
gggtaagcgctttgttgttatgtat

SEQ ID NO: 5038394 - DNA, 25 bp, Homo sapien
tgtattgaagttttggcaactgagc

SEQ ID NO: 5038395 - DNA, 25 bp, Homo sapien
gcaactgagcgatcaaaaatagaaa

SEQ ID NO: 5038396 - DNA, 25 bp, Homo sapien
gtgggttgtgaatgccagctgcctc

SEQ ID NO: 5038397 - DNA, 25 bp, Homo sapien
aagggtcctgatagtgggcttcaat

SEQ ID NO: 5038398 - DNA, 25 bp, Homo sapien
ttcatataaaagtgtgttatcttct

SEQ ID NO: 5038399 - DNA, 25 bp, Homo sapien
tgcctccagataggctgtgatttca

SEQ ID NO: 5038400 - DNA, 25 bp, Homo sapien
gatgtttagaatcaaaccgacaaga

SEQ ID NO: 5038401 - DNA, 25 bp, Homo sapien
tgccagatgtttagaatcaaaccga

SEQ ID NO: 5038402 - DNA, 25 bp, Homo sapien
agagcagctgccagatgtttagaat

SEQ ID NO: 5038403 - DNA, 25 bp, Homo sapien
gaatcaaaccgacaagaataattta

SEQ ID NO: 5038404 - DNA, 25 bp, Homo sapien
tccaaactcgggtgattctttattc

SEQ ID NO: 5038405 - DNA, 25 bp, Homo sapien
tgggaagcgcttaatatctgacaat

SEQ ID NO: 5038406 - DNA, 25 bp, Homo sapien
ttccagcaattagaaacttggcctg

SEQ ID NO: 5038407 - DNA, 25 bp, Homo sapien
gcctgggaagcgcttaatatctgac

SEQ ID NO: 5038408 - DNA, 25 bp, Homo sapien
tgtgagttagctaaggagaccggtc

SEQ ID NO: 5038409 - DNA, 25 bp, Homo sapien
tgaaagaagactcgcagaagatgca

SEQ ID NO: 5038410 - DNA, 25 bp, Homo sapien
tgggagctcctactgccgagtaaag

SEQ ID NO: 5038411 - DNA, 25 bp, Homo sapien
gcaactgacaatgccctgggtataa

SEQ ID NO: 5038412 - DNA, 25 bp, Homo sapien
ttatagcctcgagatacgcagtcca

SEQ ID NO: 5038413 - DNA, 25 bp, Homo sapien
ctcgagatacgcagtccaaatcttc

SEQ ID NO: 5038414 - DNA, 25 bp, Homo sapien
tgttttggcaatggcggaaaaataa

SEQ ID NO: 5038415 - DNA, 25 bp, Homo sapien
cttcattatagcctcgagatacgca

SEQ ID NO: 5038416 - DNA, 25 bp, Homo sapien
ttctgtctctcaggataattttctg

SEQ ID NO: 5038417 - DNA, 25 bp, Homo sapien
agttctgtctctcaggataattttc

SEQ ID NO: 5038418 - DNA, 25 bp, Homo sapien
gttctgtctctcaggataattttct

SEQ ID NO: 5038419 - DNA, 25 bp, Homo sapien
gaaaacaggcatgaaagtcaaaagg

SEQ ID NO: 5038420 - DNA, 25 bp, Homo sapien
tacaatcataaagcacagaagcctg

SEQ ID NO: 5038421 - DNA, 25 bp, Homo sapien
tctaagccatttagaccaaaggttc

SEQ ID NO: 5038422 - DNA, 25 bp, Homo sapien
catatcataccaagtgttcagctgg

SEQ ID NO: 5038423 - DNA, 25 bp, Homo sapien
gctggtcacttcctgatgagttttc

SEQ ID NO: 5038424 - DNA, 25 bp, Homo sapien
tctgcagagtcgaccaataaacgtt

SEQ ID NO: 5038425 - DNA, 25 bp, Homo sapien
tgagtggactggtacatgctttgcc

SEQ ID NO: 5038426 - DNA, 25 bp, Homo sapien
cttgggtattggaatatgagtggac

SEQ ID NO: 5038427 - DNA, 25 bp, Homo sapien
aataaacgttacagactcatccaca

SEQ ID NO: 5038428 - DNA, 25 bp, Homo sapien
tcagcttgggcatcaattcacttgg

SEQ ID NO: 5038429 - DNA, 25 bp, Homo sapien
ttcaaaagaacgatggaatccatcc

SEQ ID NO: 5038430 - DNA, 25 bp, Homo sapien
gttattacactcttgctccacgttg

SEQ ID NO: 5038431 - DNA, 25 bp, Homo sapien
gatacgagatacttcttcctgccaa

SEQ ID NO: 5038432 - DNA, 25 bp, Homo sapien
atgcagggcaaaggcaacgcgcttc

SEQ ID NO: 5038433 - DNA, 25 bp, Homo sapien
cagtcccctatgcagggcaaaggca

SEQ ID NO: 5038434 - DNA, 25 bp, Homo sapien
gggttgaatatcagtcccctatgca

SEQ ID NO: 5038435 - DNA, 25 bp, Homo sapien
aaaggcaacgcgcttcacaagctct

SEQ ID NO: 5038436 - DNA, 25 bp, Homo sapien
caattgaattcacctgggatcaggc

SEQ ID NO: 5038437 - DNA, 25 bp, Homo sapien
cagtggtcactttgcagtcctagga

SEQ ID NO: 5038438 - DNA, 25 bp, Homo sapien
taaactatatgaatgggcccatcgc

SEQ ID NO: 5038439 - DNA, 25 bp, Homo sapien
tagttggtcagcagagtattccttc

SEQ ID NO: 5038440 - DNA, 25 bp, Homo sapien
aaaatggaaatagcatgagtaagct

SEQ ID NO: 5038441 - DNA, 25 bp, Homo sapien
ttaagatgccttcagtaaaaatgga

SEQ ID NO: 5038442 - DNA, 25 bp, Homo sapien
aaccaaagtcgttttcatcattaag

SEQ ID NO: 5038443 - DNA, 25 bp, Homo sapien
aaatagcatgagtaagcttggcaac

SEQ ID NO: 5038444 - DNA, 25 bp, Homo sapien
tggtccccagaatatggcaggtgac

SEQ ID NO: 5038445 - DNA, 25 bp, Homo sapien
cccagaatatggcaggtgacacagg

SEQ ID NO: 5038446 - DNA, 25 bp, Homo sapien
cacaggcctgtgatatttcatgact

SEQ ID NO: 5038447 - DNA, 25 bp, Homo sapien
agtcagaattggtctggtggtcccc

SEQ ID NO: 5038448 - DNA, 25 bp, Homo sapien
cacttcaataatgtcgtgggtctga

SEQ ID NO: 5038449 - DNA, 25 bp, Homo sapien
tgtctttgtccaggcgggtaggcac

SEQ ID NO: 5038450 - DNA, 25 bp, Homo sapien
tagctgagcatagtccctcagcttg

SEQ ID NO: 5038451 - DNA, 25 bp, Homo sapien
cgtatcgtgggcctagctgagcata

SEQ ID NO: 5038452 - DNA, 25 bp, Homo sapien
cataggataccaactctccagaata

SEQ ID NO: 5038453 - DNA, 25 bp, Homo sapien
tactgtgacacgctgagcaggtcgg

SEQ ID NO: 5038454 - DNA, 25 bp, Homo sapien
tccagaatagtactgtgacacgctg

SEQ ID NO: 5038455 - DNA, 25 bp, Homo sapien
ttctcacataggataccaactctcc

SEQ ID NO: 5038456 - DNA, 25 bp, Homo sapien
aagaaggggcagatcgagggcagag

SEQ ID NO: 5038457 - DNA, 25 bp, Homo sapien
tgattaatacgaagaaggggcagat

SEQ ID NO: 5038458 - DNA, 25 bp, Homo sapien
ctgattaatacgaagaaggggcaga

SEQ ID NO: 5038459 - DNA, 25 bp, Homo sapien
cccttatgctttcttgcatgatgga

SEQ ID NO: 5038460 - DNA, 25 bp, Homo sapien
ctttaggaaggtagctctgagttta

SEQ ID NO: 5038461 - DNA, 25 bp, Homo sapien
tggatggatttacccttatgctttc

SEQ ID NO: 5038462 - DNA, 25 bp, Homo sapien
tgctttcttgcatgatggatgtgaa

SEQ ID NO: 5038463 - DNA, 25 bp, Homo sapien
tgtcaatcaactgccaagcgaaaga

SEQ ID NO: 5038464 - DNA, 25 bp, Homo sapien
gaaaggtccccaacgatctgcattg

SEQ ID NO: 5038465 - DNA, 25 bp, Homo sapien
gaagaaactttcgagtatcggcaag

SEQ ID NO: 5038466 - DNA, 25 bp, Homo sapien
gacatacttgcagattggattccaa

SEQ ID NO: 5038467 - DNA, 25 bp, Homo sapien
ctcttccaaagcttgtatcagttgt

SEQ ID NO: 5038468 - DNA, 25 bp, Homo sapien
tgcccgcagcagtagaatcatcata

SEQ ID NO: 5038469 - DNA, 25 bp, Homo sapien
tatcagttgtacagtttttctgccc

SEQ ID NO: 5038470 - DNA, 25 bp, Homo sapien
tgtacagtttttctgcccgcagcag

SEQ ID NO: 5038471 - DNA, 25 bp, Homo sapien
acactaaagatggaatatcatagga

SEQ ID NO: 5038472 - DNA, 25 bp, Homo sapien
tgccagtttccaaggtttcaaataa

SEQ ID NO: 5038473 - DNA, 25 bp, Homo sapien
agatggaatatcataggatacaata

SEQ ID NO: 5038474 - DNA, 25 bp, Homo sapien
ccttcagatctttattagcaacact

SEQ ID NO: 5038475 - DNA, 25 bp, Homo sapien
ggtttcactcctgaaaagacatcag

SEQ ID NO: 5038476 - DNA, 25 bp, Homo sapien
agcaagctcagtcatccgctccgaa

SEQ ID NO: 5038477 - DNA, 25 bp, Homo sapien
tccactctggttaggggtttcactc

SEQ ID NO: 5038478 - DNA, 25 bp, Homo sapien
aaccctctttcttgtaatgctccca

SEQ ID NO: 5038479 - DNA, 25 bp, Homo sapien
acattgaccctgatgtcatctcctc

SEQ ID NO: 5038480 - DNA, 25 bp, Homo sapien
gaccctgatgtcatctcctcaggca

SEQ ID NO: 5038481 - DNA, 25 bp, Homo sapien
atccagactaggcagcttatgaaga

SEQ ID NO: 5038482 - DNA, 25 bp, Homo sapien
aatccagactaggcagcttatgaag

SEQ ID NO: 5038483 - DNA, 25 bp, Homo sapien
taagagactacatggcgtcaagccc

SEQ ID NO: 5038484 - DNA, 25 bp, Homo sapien
taagagcaccctgaagccttcgtaa

SEQ ID NO: 5038485 - DNA, 25 bp, Homo sapien
gagtccctcggatcaatcaatgcca

SEQ ID NO: 5038486 - DNA, 25 bp, Homo sapien
gctttcctgaagacctctaatgagg

SEQ ID NO: 5038487 - DNA, 25 bp, Homo sapien
tctggtccttgatttgacgaaggcg

SEQ ID NO: 5038488 - DNA, 25 bp, Homo sapien
tgcagtatctaacagcagctggaag

SEQ ID NO: 5038489 - DNA, 25 bp, Homo sapien
gagtctgttagaatctggtccttga

SEQ ID NO: 5038490 - DNA, 25 bp, Homo sapien
cctgggattgtaccgagagtctgtt

SEQ ID NO: 5038491 - DNA, 25 bp, Homo sapien
tacctgcttactaaatgtgtagaaa

SEQ ID NO: 5038492 - DNA, 25 bp, Homo sapien
aaaagtgttacctgcttactaaatg

SEQ ID NO: 5038493 - DNA, 25 bp, Homo sapien
tgttacctgcttactaaatgtgtag

SEQ ID NO: 5038494 - DNA, 25 bp, Homo sapien
acaggaaaagtgttacctgcttact

SEQ ID NO: 5038495 - DNA, 25 bp, Homo sapien
ttgggatattgtccagaaccatctc

SEQ ID NO: 5038496 - DNA, 25 bp, Homo sapien
tatgaagcatcagccatcggatggc

SEQ ID NO: 5038497 - DNA, 25 bp, Homo sapien
gatggcaacattgcagtctctcagg

SEQ ID NO: 5038498 - DNA, 25 bp, Homo sapien
ctcaggcagttcagaagctttggga

SEQ ID NO: 5038499 - DNA, 25 bp, Homo sapien
ttaaagcagtttttgcagctttgta

SEQ ID NO: 5038500 - DNA, 25 bp, Homo sapien
tttgcagctttgtaaggttcccaag

SEQ ID NO: 5038501 - DNA, 25 bp, Homo sapien
ggttcccaagcatctactagattaa

SEQ ID NO: 5038502 - DNA, 25 bp, Homo sapien
tgtgatccccatgtaaatactaatt

SEQ ID NO: 5038503 - DNA, 25 bp, Homo sapien
tcagaatttgttaaattcctactca

SEQ ID NO: 5038504 - DNA, 25 bp, Homo sapien
cattcagaatttgttaaattcctac

SEQ ID NO: 5038505 - DNA, 25 bp, Homo sapien
ctgaaagaggagacattcagaattt

SEQ ID NO: 5038506 - DNA, 25 bp, Homo sapien
gaaagaggagacattcagaatttgt

SEQ ID NO: 5038507 - DNA, 25 bp, Homo sapien
ccaattatctggaaagtatttatcc

SEQ ID NO: 5038508 - DNA, 25 bp, Homo sapien
aattatctggaaagtatttatccac

SEQ ID NO: 5038509 - DNA, 25 bp, Homo sapien
caattatctggaaagtatttatcca

SEQ ID NO: 5038510 - DNA, 25 bp, Homo sapien
caaagtagagaatcacgtacagcat

SEQ ID NO: 5038511 - DNA, 25 bp, Homo sapien
catttttgcttgatgggtgtgaagg

SEQ ID NO: 5038512 - DNA, 25 bp, Homo sapien
tgctccggcaaaggatacgctgaga

SEQ ID NO: 5038513 - DNA, 25 bp, Homo sapien
cagcatggcagcttggtttgccagg

SEQ ID NO: 5038514 - DNA, 25 bp, Homo sapien
tagctctcgggatagttggatggtc

SEQ ID NO: 5038515 - DNA, 25 bp, Homo sapien
cctggttggctagaataacctgtac

SEQ ID NO: 5038516 - DNA, 25 bp, Homo sapien
gataggcactctctggaaatagctc

SEQ ID NO: 5038517 - DNA, 25 bp, Homo sapien
tcagatctcagtcgaccaatgacca

SEQ ID NO: 5038518 - DNA, 25 bp, Homo sapien
atttgaatcagcagaagatcgagca

SEQ ID NO: 5038519 - DNA, 25 bp, Homo sapien
tgaatcagcagaagatcgagcagca

SEQ ID NO: 5038520 - DNA, 25 bp, Homo sapien
tttgaatcagcagaagatcgagcag

SEQ ID NO: 5038521 - DNA, 25 bp, Homo sapien
ttgaatcagcagaagatcgagcagc

SEQ ID NO: 5038522 - DNA, 25 bp, Homo sapien
tcggaagtgtagtcctagcccagga

SEQ ID NO: 5038523 - DNA, 25 bp, Homo sapien
cgacagcagcgtttcggaagtgtag

SEQ ID NO: 5038524 - DNA, 25 bp, Homo sapien
gcgtttcggaagtgtagtcctagcc

SEQ ID NO: 5038525 - DNA, 25 bp, Homo sapien
gaagtgtagtcctagcccaggaata

SEQ ID NO: 5038526 - DNA, 25 bp, Homo sapien
ccttcaatcttttggtcaatgacca

SEQ ID NO: 5038527 - DNA, 25 bp, Homo sapien
tttggtcaatgaccagtagcataac

SEQ ID NO: 5038528 - DNA, 25 bp, Homo sapien
cataactccatataagtacagtgct

SEQ ID NO: 5038529 - DNA, 25 bp, Homo sapien
gaccagtagcataactccatataag

SEQ ID NO: 5038530 - DNA, 25 bp, Homo sapien
cagtttctaaggtttgctgaatata

SEQ ID NO: 5038531 - DNA, 25 bp, Homo sapien
cattgagaagcacagtttctaaggt

SEQ ID NO: 5038532 - DNA, 25 bp, Homo sapien
aaccccttcattgagatcatctaga

SEQ ID NO: 5038533 - DNA, 25 bp, Homo sapien
gaatataaaccccttcattgagatc

SEQ ID NO: 5038534 - DNA, 25 bp, Homo sapien
taagagcaggacattatagtaaaac

SEQ ID NO: 5038535 - DNA, 25 bp, Homo sapien
gagatttacacgttgctatgtgtcc

SEQ ID NO: 5038536 - DNA, 25 bp, Homo sapien
cacaggtaggaaaagacaactatat

SEQ ID NO: 5038537 - DNA, 25 bp, Homo sapien
caaaattcttaagatgaccagtgcc

SEQ ID NO: 5038538 - DNA, 25 bp, Homo sapien
aatttctatgttgttttcacgaaat

SEQ ID NO: 5038539 - DNA, 25 bp, Homo sapien
taaataaaatctggtcacaatttct

SEQ ID NO: 5038540 - DNA, 25 bp, Homo sapien
tatgttgttttcacgaaattcttca

SEQ ID NO: 5038541 - DNA, 25 bp, Homo sapien
atgctaaataaaatctggtcacaat

SEQ ID NO: 5038542 - DNA, 25 bp, Homo sapien
cacagaggttgttctcggctagaaa

SEQ ID NO: 5038543 - DNA, 25 bp, Homo sapien
aatccttaggattgcttggccacag

SEQ ID NO: 5038544 - DNA, 25 bp, Homo sapien
tgtcttttaacctgaacacagcagg

SEQ ID NO: 5038545 - DNA, 25 bp, Homo sapien
tccatatttctgttgatcagctctg

SEQ ID NO: 5038546 - DNA, 25 bp, Homo sapien
gacactggggatgattaactggcct

SEQ ID NO: 5038547 - DNA, 25 bp, Homo sapien
ggatgattaactggcctcagagctg

SEQ ID NO: 5038548 - DNA, 25 bp, Homo sapien
tattagatgaaaccaggtgtgcaga

SEQ ID NO: 5038549 - DNA, 25 bp, Homo sapien
gagctggtgtctgtatattattaga

SEQ ID NO: 5038550 - DNA, 25 bp, Homo sapien
tcagcacttaggtatctagcactgt

SEQ ID NO: 5038551 - DNA, 25 bp, Homo sapien
gcctggctgcttaagggaatcacct

SEQ ID NO: 5038552 - DNA, 25 bp, Homo sapien
tgtttttaagaatctccccggatga

SEQ ID NO: 5038553 - DNA, 25 bp, Homo sapien
gccaggctggatatgaagatgttta

SEQ ID NO: 5038554 - DNA, 25 bp, Homo sapien
agggccggaggtcgcgcgcggagcc

SEQ ID NO: 5038555 - DNA, 25 bp, Homo sapien
gcgcggagccggcacccagtttcca

SEQ ID NO: 5038556 - DNA, 25 bp, Homo sapien
acggcgcacgcgcagggccggaggt

SEQ ID NO: 5038557 - DNA, 25 bp, Homo sapien
gcggagccggcacccagtttccacc

SEQ ID NO: 5038558 - DNA, 25 bp, Homo sapien
tctcacttttcagcggcaggcgaag

SEQ ID NO: 5038559 - DNA, 25 bp, Homo sapien
gcgacggctgatgacgcaagagccc

SEQ ID NO: 5038560 - DNA, 25 bp, Homo sapien
tcacatgaccgaagcggctgggagc

SEQ ID NO: 5038561 - DNA, 25 bp, Homo sapien
ttctatccgcagtcccggacctgga

SEQ ID NO: 5038562 - DNA, 25 bp, Homo sapien
ctggagtcatcattctgtgaatttg

SEQ ID NO: 5038563 - DNA, 25 bp, Homo sapien
tctgtgaatttgaacatcgttgtgt

SEQ ID NO: 5038564 - DNA, 25 bp, Homo sapien
gtgatttctacccaccactccagtg

SEQ ID NO: 5038565 - DNA, 25 bp, Homo sapien
tgaacttccctaatgccagacttgc

SEQ ID NO: 5038566 - DNA, 25 bp, Homo sapien
attgagatatttgtgtattctttgc

SEQ ID NO: 5038567 - DNA, 25 bp, Homo sapien
ttctttgctgcctggatagtaaaag

SEQ ID NO: 5038568 - DNA, 25 bp, Homo sapien
gcctggatagtaaaagctgaagggt

SEQ ID NO: 5038569 - DNA, 25 bp, Homo sapien
atatttgtgtattctttgctgcctg

SEQ ID NO: 5038570 - DNA, 25 bp, Homo sapien
gcgtactgaatttaaggtgctggat

SEQ ID NO: 5038571 - DNA, 25 bp, Homo sapien
cttcaacaagtggttggcagtgaaa

SEQ ID NO: 5038572 - DNA, 25 bp, Homo sapien
tgcttccaggtgatagttggagctc

SEQ ID NO: 5038573 - DNA, 25 bp, Homo sapien
aaaacatttcgtgtaagaccatggc

SEQ ID NO: 5038574 - DNA, 25 bp, Homo sapien
aaaaattctcatagcacataaagtg

SEQ ID NO: 5038575 - DNA, 25 bp, Homo sapien
gaatagaaattagtattgtgacacc

SEQ ID NO: 5038576 - DNA, 25 bp, Homo sapien
aaattaaatggtgttgagtttccag

SEQ ID NO: 5038577 - DNA, 25 bp, Homo sapien
aaatcagttcatcccaaagctagca

SEQ ID NO: 5038578 - DNA, 25 bp, Homo sapien
gcatctgcacaatgttagtctcttt

SEQ ID NO: 5038579 - DNA, 25 bp, Homo sapien
catctgcacaatgttagtctctttc

SEQ ID NO: 5038580 - DNA, 25 bp, Homo sapien
atctgcacaatgttagtctctttct

SEQ ID NO: 5038581 - DNA, 25 bp, Homo sapien
agcatctgcacaatgttagtctctt

SEQ ID NO: 5038582 - DNA, 25 bp, Homo sapien
aatagtgagtagcttgttggctgac

SEQ ID NO: 5038583 - DNA, 25 bp, Homo sapien
tagcttctggagttgcctaacagta

SEQ ID NO: 5038584 - DNA, 25 bp, Homo sapien
ggatcagttgatctcatttgggcag

SEQ ID NO: 5038585 - DNA, 25 bp, Homo sapien
tagaacatgtaactctgtcagagaa

SEQ ID NO: 5038586 - DNA, 25 bp, Homo sapien
gggatactatcacccttcctcagag

SEQ ID NO: 5038587 - DNA, 25 bp, Homo sapien
agagatttcttatagcagggctttc

SEQ ID NO: 5038588 - DNA, 25 bp, Homo sapien
gaatataggataccagtcctgcagt

SEQ ID NO: 5038589 - DNA, 25 bp, Homo sapien
tgcagtagcattccccatatcatgg

SEQ ID NO: 5038590 - DNA, 25 bp, Homo sapien
taatcatgggacattcgcgtgggtc

SEQ ID NO: 5038591 - DNA, 25 bp, Homo sapien
gcagccgggatcagtcaagatctca

SEQ ID NO: 5038592 - DNA, 25 bp, Homo sapien
aaagcggagaggtgtacagctgctc

SEQ ID NO: 5038593 - DNA, 25 bp, Homo sapien
tgtacccctcatatctgcagccggg

SEQ ID NO: 5038594 - DNA, 25 bp, Homo sapien
gcactgctctccaaaacttgttctg

SEQ ID NO: 5038595 - DNA, 25 bp, Homo sapien
aaaacttgttctggcaaccctctgc

SEQ ID NO: 5038596 - DNA, 25 bp, Homo sapien
tcctccctgtttgacagtctggcta

SEQ ID NO: 5038597 - DNA, 25 bp, Homo sapien
ttttctctccccgtttcatggcact

SEQ ID NO: 5038598 - DNA, 25 bp, Homo sapien
tctgtcatcttctacagggatgtga

SEQ ID NO: 5038599 - DNA, 25 bp, Homo sapien
tctggaggcttagttacgcaattgc

SEQ ID NO: 5038600 - DNA, 25 bp, Homo sapien
gcattgcaaaagaatggtcacattc

SEQ ID NO: 5038601 - DNA, 25 bp, Homo sapien
cagggttgtaactagttctggaggc

SEQ ID NO: 5038602 - DNA, 25 bp, Homo sapien
cgtgataagattgtcataactccca

SEQ ID NO: 5038603 - DNA, 25 bp, Homo sapien
tcagagacatcaccattccaccagt

SEQ ID NO: 5038604 - DNA, 25 bp, Homo sapien
ggaggagatgaaactcgtgataaga

SEQ ID NO: 5038605 - DNA, 25 bp, Homo sapien
tccaagacatctttgtattaataca

SEQ ID NO: 5038606 - DNA, 25 bp, Homo sapien
gagctagctttagccagcttcctta

SEQ ID NO: 5038607 - DNA, 25 bp, Homo sapien
taaacactgccagtcctacagagcc

SEQ ID NO: 5038608 - DNA, 25 bp, Homo sapien
aaacacaactcttgtccgcctaatc

SEQ ID NO: 5038609 - DNA, 25 bp, Homo sapien
tatgccctttcaatcatctctctca

SEQ ID NO: 5038610 - DNA, 25 bp, Homo sapien
gcccatctgcatcgttttgtgccat

SEQ ID NO: 5038611 - DNA, 25 bp, Homo sapien
gatgcccatctgcatcgttttgtgc

SEQ ID NO: 5038612 - DNA, 25 bp, Homo sapien
ggtgatgcccatctgcatcgttttg

SEQ ID NO: 5038613 - DNA, 25 bp, Homo sapien
aggtgatgcccatctgcatcgtttt

SEQ ID NO: 5038614 - DNA, 25 bp, Homo sapien
cagttgttaacagagtggtgtgcca

SEQ ID NO: 5038615 - DNA, 25 bp, Homo sapien
taacagactaatagcagggatctac

SEQ ID NO: 5038616 - DNA, 25 bp, Homo sapien
tgtttctcaacaattaggcaggagg

SEQ ID NO: 5038617 - DNA, 25 bp, Homo sapien
tgtgccataaagctaatgataaatg

SEQ ID NO: 5038618 - DNA, 25 bp, Homo sapien
cagccactatatgatccaaaggtac

SEQ ID NO: 5038619 - DNA, 25 bp, Homo sapien
gcagtgactaccctatgttgttaaa

SEQ ID NO: 5038620 - DNA, 25 bp, Homo sapien
attgaaattggccaagctctgtggc

SEQ ID NO: 5038621 - DNA, 25 bp, Homo sapien
ggagcgactgctcaaagcttaaact

SEQ ID NO: 5038622 - DNA, 25 bp, Homo sapien
attctcatgaattcagatttgtctt

SEQ ID NO: 5038623 - DNA, 25 bp, Homo sapien
ctcatgaattcagatttgtcttaaa

SEQ ID NO: 5038624 - DNA, 25 bp, Homo sapien
tgttcatagcattaaacaactactg

SEQ ID NO: 5038625 - DNA, 25 bp, Homo sapien
caactactgtttccttactgtaagt

SEQ ID NO: 5038626 - DNA, 25 bp, Homo sapien
tctagtaaaagcatagtggttccat

SEQ ID NO: 5038627 - DNA, 25 bp, Homo sapien
tgatggtaggactgcaaatgatctg

SEQ ID NO: 5038628 - DNA, 25 bp, Homo sapien
tatagtcagctataggacaaagcag

SEQ ID NO: 5038629 - DNA, 25 bp, Homo sapien
tactaggtgacagtaaaacaacatg

SEQ ID NO: 5038630 - DNA, 25 bp, Homo sapien
tttcctccacttcctgtgcaggcga

SEQ ID NO: 5038631 - DNA, 25 bp, Homo sapien
acttcctgtgcaggcgacagggacc

SEQ ID NO: 5038632 - DNA, 25 bp, Homo sapien
tcctgtgcaggcgacagggacctca

SEQ ID NO: 5038633 - DNA, 25 bp, Homo sapien
tccacttcctgtgcaggcgacaggg

SEQ ID NO: 5038634 - DNA, 25 bp, Homo sapien
ctgtgccatcagtcagccagaggtc

SEQ ID NO: 5038635 - DNA, 25 bp, Homo sapien
tagtgctcaagatgtctgccaaaga

SEQ ID NO: 5038636 - DNA, 25 bp, Homo sapien
tgtgccatcagtcagccagaggtct

SEQ ID NO: 5038637 - DNA, 25 bp, Homo sapien
ctgctgtagtgctcaagatgtctgc

SEQ ID NO: 5038638 - DNA, 25 bp, Homo sapien
ggaatccgggacaaagaatctgagc

SEQ ID NO: 5038639 - DNA, 25 bp, Homo sapien
cacggagcagggtaacgcagtgtcc

SEQ ID NO: 5038640 - DNA, 25 bp, Homo sapien
tctgtttcgcaagcggagagtcctc

SEQ ID NO: 5038641 - DNA, 25 bp, Homo sapien
taggaagttggtgcctgtgcctcca

SEQ ID NO: 5038642 - DNA, 25 bp, Homo sapien
tagctcagttggtgaaatctgcccc

SEQ ID NO: 5038643 - DNA, 25 bp, Homo sapien
ctgcaggcctcccattccggtgagt

SEQ ID NO: 5038644 - DNA, 25 bp, Homo sapien
cccattccggtgagtgtagctcagt

SEQ ID NO: 5038645 - DNA, 25 bp, Homo sapien
gggccacacgatacaaaggtgatac

SEQ ID NO: 5038646 - DNA, 25 bp, Homo sapien
cagccatctgaggacaatttgagct

SEQ ID NO: 5038647 - DNA, 25 bp, Homo sapien
gccatctgaggacaatttgagcttg

SEQ ID NO: 5038648 - DNA, 25 bp, Homo sapien
catctgaggacaatttgagcttgat

SEQ ID NO: 5038649 - DNA, 25 bp, Homo sapien
ttgagcttgataacgtggggccagc

SEQ ID NO: 5038650 - DNA, 25 bp, Homo sapien
gtacctcatccattcttccgtaatg

SEQ ID NO: 5038651 - DNA, 25 bp, Homo sapien
tgcaagtacctcatccattcttccg

SEQ ID NO: 5038652 - DNA, 25 bp, Homo sapien
tccattcttccgtaatgtttttctc

SEQ ID NO: 5038653 - DNA, 25 bp, Homo sapien
aagtacctcatccattcttccgtaa

SEQ ID NO: 5038654 - DNA, 25 bp, Homo sapien
cttgttccccatactcttccgtgga

SEQ ID NO: 5038655 - DNA, 25 bp, Homo sapien
tgttatacacgtccttagagtttcc

SEQ ID NO: 5038656 - DNA, 25 bp, Homo sapien
agtgtcctcaaaatcggtcatcctg

SEQ ID NO: 5038657 - DNA, 25 bp, Homo sapien
tcttccgtggacaaagtgtgacact

SEQ ID NO: 5038658 - DNA, 25 bp, Homo sapien
taagccaatgtgaactcagtatagc

SEQ ID NO: 5038659 - DNA, 25 bp, Homo sapien
gaagtctaggtcagcataagccaat

SEQ ID NO: 5038660 - DNA, 25 bp, Homo sapien
ctattatctgattccaggttacagg

SEQ ID NO: 5038661 - DNA, 25 bp, Homo sapien
gacagttgcctatctgaagtctagg

SEQ ID NO: 5038662 - DNA, 25 bp, Homo sapien
cccaactcagggattttcaaaaatg

SEQ ID NO: 5038663 - DNA, 25 bp, Homo sapien
cagaggatgagtagttctctcatga

SEQ ID NO: 5038664 - DNA, 25 bp, Homo sapien
ggtttcagaattcgctgccaagcca

SEQ ID NO: 5038665 - DNA, 25 bp, Homo sapien
tcagaattcgctgccaagccagagg

SEQ ID NO: 5038666 - DNA, 25 bp, Homo sapien
tacagcagagtcttagctggtacca

SEQ ID NO: 5038667 - DNA, 25 bp, Homo sapien
gctggtaccagggagcattggaact

SEQ ID NO: 5038668 - DNA, 25 bp, Homo sapien
tccgtctgaattctgcgaaatgtct

SEQ ID NO: 5038669 - DNA, 25 bp, Homo sapien
tgaactttgccatcctgtgaggttg

SEQ ID NO: 5038670 - DNA, 25 bp, Homo sapien
tgttgccctcatagcccataaggtg

SEQ ID NO: 5038671 - DNA, 25 bp, Homo sapien
tagagcttgctgtcactccagggca

SEQ ID NO: 5038672 - DNA, 25 bp, Homo sapien
aagatgtgttcggtgaggcatgccc

SEQ ID NO: 5038673 - DNA, 25 bp, Homo sapien
catgcagacttgttcccacgcttca

SEQ ID NO: 5038674 - DNA, 25 bp, Homo sapien
tgctgaccccagcagttagggactg

SEQ ID NO: 5038675 - DNA, 25 bp, Homo sapien
gaaaagacatcgtcattccgagtag

SEQ ID NO: 5038676 - DNA, 25 bp, Homo sapien
cacttagaagggcaattgagaacca

SEQ ID NO: 5038677 - DNA, 25 bp, Homo sapien
tagggactggctgcatagcatactt

SEQ ID NO: 5038678 - DNA, 25 bp, Homo sapien
gaatcataaaagtacactgggtggg

SEQ ID NO: 5038679 - DNA, 25 bp, Homo sapien
tttccgaatcataaaagtacactgg

SEQ ID NO: 5038680 - DNA, 25 bp, Homo sapien
aatttccgaatcataaaagtacact

SEQ ID NO: 5038681 - DNA, 25 bp, Homo sapien
tccgaatcataaaagtacactgggt

SEQ ID NO: 5038682 - DNA, 25 bp, Homo sapien
gatccgggccagtgaggagtgagga

SEQ ID NO: 5038683 - DNA, 25 bp, Homo sapien
tagtgggaagactgagatccgggcc

SEQ ID NO: 5038684 - DNA, 25 bp, Homo sapien
gaagactgagatccgggccagtgag

SEQ ID NO: 5038685 - DNA, 25 bp, Homo sapien
gtggtagtgggaagactgagatccg

SEQ ID NO: 5038686 - DNA, 25 bp, Homo sapien
gagggaaatttgtgacctgggtcca

SEQ ID NO: 5038687 - DNA, 25 bp, Homo sapien
gaatgcctggaaacgcacctaagtc

SEQ ID NO: 5038688 - DNA, 25 bp, Homo sapien
tggagagaacttggagcggactcca

SEQ ID NO: 5038689 - DNA, 25 bp, Homo sapien
gtccaccctcactgataggactcag

SEQ ID NO: 5038690 - DNA, 25 bp, Homo sapien
ttattgttggtgctccctttgtttc

SEQ ID NO: 5038691 - DNA, 25 bp, Homo sapien
gaagagctggatcctcatggggtta

SEQ ID NO: 5038692 - DNA, 25 bp, Homo sapien
ttgtttctctgacgcctagccttgg

SEQ ID NO: 5038693 - DNA, 25 bp, Homo sapien
gaccttgtggagcaaatgggattag

SEQ ID NO: 5038694 - DNA, 25 bp, Homo sapien
acgctcagggatgcaagggttttgc

SEQ ID NO: 5038695 - DNA, 25 bp, Homo sapien
ccctatgtcatagagcggtgatgag

SEQ ID NO: 5038696 - DNA, 25 bp, Homo sapien
ttgaatcagcccacgcgcatgtaca

SEQ ID NO: 5038697 - DNA, 25 bp, Homo sapien
caggaacttcgggaccttggatcta

SEQ ID NO: 5038698 - DNA, 25 bp, Homo sapien
ggctctccttgtgggtgaccctctg

SEQ ID NO: 5038699 - DNA, 25 bp, Homo sapien
agacgtctaactccgaaatctgtgc

SEQ ID NO: 5038700 - DNA, 25 bp, Homo sapien
taactccgaaatctgtgccctgctc

SEQ ID NO: 5038701 - DNA, 25 bp, Homo sapien
cagggccagacgtctaactccgaaa

SEQ ID NO: 5038702 - DNA, 25 bp, Homo sapien
ctgggaggaagatgctcaggggcca

SEQ ID NO: 5038703 - DNA, 25 bp, Homo sapien
tgggaggaagatgctcaggggccat

SEQ ID NO: 5038704 - DNA, 25 bp, Homo sapien
tatacagcgtgagtcaccaggaggc

SEQ ID NO: 5038705 - DNA, 25 bp, Homo sapien
gaagctatttccgtgcaatccgggc

SEQ ID NO: 5038706 - DNA, 25 bp, Homo sapien
tctatttgtggaagcgaacagacgc

SEQ ID NO: 5038707 - DNA, 25 bp, Homo sapien
gaagctctttctgcgagtcaccgcg

SEQ ID NO: 5038708 - DNA, 25 bp, Homo sapien
tactggcattgtggaagtgatcctt

SEQ ID NO: 5038709 - DNA, 25 bp, Homo sapien
aggacaaaatcaggccttacatcca

SEQ ID NO: 5038710 - DNA, 25 bp, Homo sapien
cagctgccatcgcacagcaacatta

SEQ ID NO: 5038711 - DNA, 25 bp, Homo sapien
tcccattaaacactaccaggacaaa

SEQ ID NO: 5038712 - DNA, 25 bp, Homo sapien
ccgtggcgcttctatgggatggcaa

SEQ ID NO: 5038713 - DNA, 25 bp, Homo sapien
ccaaagcggaggtgcaggtcatgta

SEQ ID NO: 5038714 - DNA, 25 bp, Homo sapien
aaagtcaagggctcatatgtcccag

SEQ ID NO: 5038715 - DNA, 25 bp, Homo sapien
caagtgctgttttgtacctggaagg

SEQ ID NO: 5038716 - DNA, 25 bp, Homo sapien
tagtttgtgaaatcaggagccctcg

SEQ ID NO: 5038717 - DNA, 25 bp, Homo sapien
ggttcgtaggatgctcaggccctct

SEQ ID NO: 5038718 - DNA, 25 bp, Homo sapien
tcctaattgttgcagcctgggccca

SEQ ID NO: 5038719 - DNA, 25 bp, Homo sapien
catgtatcagtgtgggcaccagcgc

SEQ ID NO: 5038720 - DNA, 25 bp, Homo sapien
cagtctgagggacgtgccatgcact

SEQ ID NO: 5038721 - DNA, 25 bp, Homo sapien
cataggtctgacctttggatcagtg

SEQ ID NO: 5038722 - DNA, 25 bp, Homo sapien
gatcagtgaccacatgagtgtctcc

SEQ ID NO: 5038723 - DNA, 25 bp, Homo sapien
tgtcatgtagtcatcactctcagtc

SEQ ID NO: 5038724 - DNA, 25 bp, Homo sapien
tccgtgatgaaaccaccaacccgaa

SEQ ID NO: 5038725 - DNA, 25 bp, Homo sapien
acccgaaaacagcacgcaggtcggc

SEQ ID NO: 5038726 - DNA, 25 bp, Homo sapien
aaacagcacgcaggtcggccaggga

SEQ ID NO: 5038727 - DNA, 25 bp, Homo sapien
tgaaaccaccaacccgaaaacagca

SEQ ID NO: 5038728 - DNA, 25 bp, Homo sapien
ctggcttggggccacggaatgtggc

SEQ ID NO: 5038729 - DNA, 25 bp, Homo sapien
cggcctggcttggggccacggaatg

SEQ ID NO: 5038730 - DNA, 25 bp, Homo sapien
ggcctggcttggggccacggaatgt

SEQ ID NO: 5038731 - DNA, 25 bp, Homo sapien
gcctggcttggggccacggaatgtg

SEQ ID NO: 5038732 - DNA, 25 bp, Homo sapien
ctcctgcctcctccagttccaacat

SEQ ID NO: 5038733 - DNA, 25 bp, Homo sapien
atggagactgcttgcctcctggtga

SEQ ID NO: 5038734 - DNA, 25 bp, Homo sapien
ctcccctttctatgggagaggtgac

SEQ ID NO: 5038735 - DNA, 25 bp, Homo sapien
gcttgcctcctggtgatgatgggtt

SEQ ID NO: 5038736 - DNA, 25 bp, Homo sapien
gactgcttgcctcctggtgatgatg

SEQ ID NO: 5038737 - DNA, 25 bp, Homo sapien
ttttcccgctgtaattgccatctct

SEQ ID NO: 5038738 - DNA, 25 bp, Homo sapien
gccatctcttccaccgtagcacagt

SEQ ID NO: 5038739 - DNA, 25 bp, Homo sapien
ttcccgctgtaattgccatctcttc

SEQ ID NO: 5038740 - DNA, 25 bp, Homo sapien
atctcttccaccgtagcacagtggc

SEQ ID NO: 5038741 - DNA, 25 bp, Homo sapien
acttgtcaaagtcatgtggccactg

SEQ ID NO: 5038742 - DNA, 25 bp, Homo sapien
tgccataggctgtatccaaccgcag

SEQ ID NO: 5038743 - DNA, 25 bp, Homo sapien
tacttctgacccgaatgccataggc

SEQ ID NO: 5038744 - DNA, 25 bp, Homo sapien
tcaagcccctaaatacttgggctgg

SEQ ID NO: 5038745 - DNA, 25 bp, Homo sapien
tcatgcaatgtcaaccctgaaatac

SEQ ID NO: 5038746 - DNA, 25 bp, Homo sapien
gttgcaggcttggatgtaagcagcc

SEQ ID NO: 5038747 - DNA, 25 bp, Homo sapien
taatgtcatgcaatgtcaaccctga

SEQ ID NO: 5038748 - DNA, 25 bp, Homo sapien
tgtaagcagccatataatgtcatgc

SEQ ID NO: 5038749 - DNA, 25 bp, Homo sapien
tctgccatcgactgttgttccttcc

SEQ ID NO: 5038750 - DNA, 25 bp, Homo sapien
agctggggcatgcattagtctggaa

SEQ ID NO: 5038751 - DNA, 25 bp, Homo sapien
tctggaaagatctaattggttataa

SEQ ID NO: 5038752 - DNA, 25 bp, Homo sapien
aatctgccatcgactgttgttcctt

SEQ ID NO: 5038753 - DNA, 25 bp, Homo sapien
catgagaaacagagcgcaatggttg

SEQ ID NO: 5038754 - DNA, 25 bp, Homo sapien
gatatcatctctgggaacgggcttg

SEQ ID NO: 5038755 - DNA, 25 bp, Homo sapien
cagagcgcaatggttgagcaatgca

SEQ ID NO: 5038756 - DNA, 25 bp, Homo sapien
tgtggcaatccacgacctgtgtctg

SEQ ID NO: 5038757 - DNA, 25 bp, Homo sapien
tctgagagtcgcttccatttcctcg

SEQ ID NO: 5038758 - DNA, 25 bp, Homo sapien
gcacagccacaggtctgagagtcgc

SEQ ID NO: 5038759 - DNA, 25 bp, Homo sapien
gccacaggtctgagagtcgcttcca

SEQ ID NO: 5038760 - DNA, 25 bp, Homo sapien
caggtctgagagtcgcttccatttc

SEQ ID NO: 5038761 - DNA, 25 bp, Homo sapien
aatctgccctgccggttcctccact

SEQ ID NO: 5038762 - DNA, 25 bp, Homo sapien
gaatctgccctgccggttcctccac

SEQ ID NO: 5038763 - DNA, 25 bp, Homo sapien
tgaatctgccctgccggttcctcca

SEQ ID NO: 5038764 - DNA, 25 bp, Homo sapien
ctgcagtcctcctccgatccctgtt

SEQ ID NO: 5038765 - DNA, 25 bp, Homo sapien
gtcctcctccgatccctgtttgccc

SEQ ID NO: 5038766 - DNA, 25 bp, Homo sapien
tgcagtcctcctccgatccctgttt

SEQ ID NO: 5038767 - DNA, 25 bp, Homo sapien
cagtcctcctccgatccctgtttgc

SEQ ID NO: 5038768 - DNA, 25 bp, Homo sapien
atgtcaaaatgatgtccttgtggcc

SEQ ID NO: 5038769 - DNA, 25 bp, Homo sapien
caaaatgatgtccttgtggccgtag

SEQ ID NO: 5038770 - DNA, 25 bp, Homo sapien
tcaaaatgatgtccttgtggccgta

SEQ ID NO: 5038771 - DNA, 25 bp, Homo sapien
aaatgatgtccttgtggccgtaggg

SEQ ID NO: 5038772 - DNA, 25 bp, Homo sapien
tctgtgaagaatgtatggcccattc

SEQ ID NO: 5038773 - DNA, 25 bp, Homo sapien
gctccactctggacttccttgggct

SEQ ID NO: 5038774 - DNA, 25 bp, Homo sapien
ccattctgctccactctggacttcc

SEQ ID NO: 5038775 - DNA, 25 bp, Homo sapien
atctgtgaagaatgtatggcccatt

SEQ ID NO: 5038776 - DNA, 25 bp, Homo sapien
caatatccgttctgtggcccttggg

SEQ ID NO: 5038777 - DNA, 25 bp, Homo sapien
tgcctgttggtctttggaagcctca

SEQ ID NO: 5038778 - DNA, 25 bp, Homo sapien
taggtgacccgaggctccaactgtc

SEQ ID NO: 5038779 - DNA, 25 bp, Homo sapien
tctttggaagcctcattttgtaggt

SEQ ID NO: 5038780 - DNA, 25 bp, Homo sapien
ctctcttcaaggcttcctggtctgg

SEQ ID NO: 5038781 - DNA, 25 bp, Homo sapien
cttgccaaaggtcatgcaactctgc

SEQ ID NO: 5038782 - DNA, 25 bp, Homo sapien
ggtcatgcaactctgccctggtctg

SEQ ID NO: 5038783 - DNA, 25 bp, Homo sapien
caaaggtcatgcaactctgccctgg

SEQ ID NO: 5038784 - DNA, 25 bp, Homo sapien
taacaggtaatgtggacagatagaa

SEQ ID NO: 5038785 - DNA, 25 bp, Homo sapien
gggtaacaggtaatgtggacagata

SEQ ID NO: 5038786 - DNA, 25 bp, Homo sapien
gtaatgtggacagatagaaggccag

SEQ ID NO: 5038787 - DNA, 25 bp, Homo sapien
caggtaatgtggacagatagaaggc

SEQ ID NO: 5038788 - DNA, 25 bp, Homo sapien
ggatggaggatgttccctgagtgtc

SEQ ID NO: 5038789 - DNA, 25 bp, Homo sapien
tggatggaggatgttccctgagtgt

SEQ ID NO: 5038790 - DNA, 25 bp, Homo sapien
ccctggaggcattgcctaacaccat

SEQ ID NO: 5038791 - DNA, 25 bp, Homo sapien
cctgagcattgctggaaacccttgc

SEQ ID NO: 5038792 - DNA, 25 bp, Homo sapien
agcttttccctctgcgagttctggg

SEQ ID NO: 5038793 - DNA, 25 bp, Homo sapien
gaaacccttgctcagaaggtgactt

SEQ ID NO: 5038794 - DNA, 25 bp, Homo sapien
gggcctgagcattgctggaaaccct

SEQ ID NO: 5038795 - DNA, 25 bp, Homo sapien
tagccagttgggagtggtttgagtt

SEQ ID NO: 5038796 - DNA, 25 bp, Homo sapien
gaaagtcaccccaagctctgggctg

SEQ ID NO: 5038797 - DNA, 25 bp, Homo sapien
gtttttcacaatgacaggttcctga

SEQ ID NO: 5038798 - DNA, 25 bp, Homo sapien
ccaggtggttagagatagccagttg

SEQ ID NO: 5038799 - DNA, 25 bp, Homo sapien
aaagtatccagtgtggacattgagt

SEQ ID NO: 5038800 - DNA, 25 bp, Homo sapien
gcagtcctgcacgtggtactcctta

SEQ ID NO: 5038801 - DNA, 25 bp, Homo sapien
tgtcgtgtggcctaacaaagatatc

SEQ ID NO: 5038802 - DNA, 25 bp, Homo sapien
gaatccaaagttgtatgtcgtgtgg

SEQ ID NO: 5038803 - DNA, 25 bp, Homo sapien
tttgcggctaagaccttggccaaga

SEQ ID NO: 5038804 - DNA, 25 bp, Homo sapien
tgcggctaagaccttggccaagatg

SEQ ID NO: 5038805 - DNA, 25 bp, Homo sapien
ttgcggctaagaccttggccaagat

SEQ ID NO: 5038806 - DNA, 25 bp, Homo sapien
gcatgtgaccctggggatgaaccaa

SEQ ID NO: 5038807 - DNA, 25 bp, Homo sapien
tcatgagctggtccctaaagagaag

SEQ ID NO: 5038808 - DNA, 25 bp, Homo sapien
tacgaagcagtccttggtccttcat

SEQ ID NO: 5038809 - DNA, 25 bp, Homo sapien
gtgccttagagatactgtttgtgct

SEQ ID NO: 5038810 - DNA, 25 bp, Homo sapien
cgcagttgccaacactgaggggctg

SEQ ID NO: 5038811 - DNA, 25 bp, Homo sapien
tcatcgcagttgccaacactgaggg

SEQ ID NO: 5038812 - DNA, 25 bp, Homo sapien
catcgcagttgccaacactgagggg

SEQ ID NO: 5038813 - DNA, 25 bp, Homo sapien
tcgcagttgccaacactgaggggct

SEQ ID NO: 5038814 - DNA, 25 bp, Homo sapien
tcccgtggccgcgtggaaatggacc

SEQ ID NO: 5038815 - DNA, 25 bp, Homo sapien
ggcatgttcctgtccctccgtgttc

SEQ ID NO: 5038816 - DNA, 25 bp, Homo sapien
cagctcctggattgcgtaagggcta

SEQ ID NO: 5038817 - DNA, 25 bp, Homo sapien
caagttcctctttcgggcatgttcc

SEQ ID NO: 5038818 - DNA, 25 bp, Homo sapien
tccggcgggggacagcccttcctca

SEQ ID NO: 5038819 - DNA, 25 bp, Homo sapien
ccggcgggggacagcccttcctcat

SEQ ID NO: 5038820 - DNA, 25 bp, Homo sapien
atggctccggcgggggacagccctt

SEQ ID NO: 5038821 - DNA, 25 bp, Homo sapien
tggctccggcgggggacagcccttc

SEQ ID NO: 5038822 - DNA, 25 bp, Homo sapien
ttgctgtggaaagtggagcttctca

SEQ ID NO: 5038823 - DNA, 25 bp, Homo sapien
tgtaattgccttatttgggtcactc

SEQ ID NO: 5038824 - DNA, 25 bp, Homo sapien
ctcagtgagaggtcttccagagatg

SEQ ID NO: 5038825 - DNA, 25 bp, Homo sapien
tatttgggtcactcagtgagaggtc

SEQ ID NO: 5038826 - DNA, 25 bp, Homo sapien
agtgagaggtcttccagagatgagc

SEQ ID NO: 5038827 - DNA, 25 bp, Homo sapien
cgtattggttgaatatcagcctgca

SEQ ID NO: 5038828 - DNA, 25 bp, Homo sapien
tcagattctctattgccagctttgc

SEQ ID NO: 5038829 - DNA, 25 bp, Homo sapien
tccctgaaccgacatgaggtcttgg

SEQ ID NO: 5038830 - DNA, 25 bp, Homo sapien
ttggcatctgatcacaacctccgtg

SEQ ID NO: 5038831 - DNA, 25 bp, Homo sapien
tttcaggtgagtcagtttgcttcac

SEQ ID NO: 5038832 - DNA, 25 bp, Homo sapien
ggtgagtcagtttgcttcacctgag

SEQ ID NO: 5038833 - DNA, 25 bp, Homo sapien
cagtttgcttcacctgagcaagttg

SEQ ID NO: 5038834 - DNA, 25 bp, Homo sapien
acctgagcaagttgcaactgcctgg

SEQ ID NO: 5038835 - DNA, 25 bp, Homo sapien
gactgtacaagggacgggtctggat

SEQ ID NO: 5038836 - DNA, 25 bp, Homo sapien
agggacgggtctggatcgggcagcc

SEQ ID NO: 5038837 - DNA, 25 bp, Homo sapien
actgtacaagggacgggtctggatc

SEQ ID NO: 5038838 - DNA, 25 bp, Homo sapien
tacaagggacgggtctggatcgggc

SEQ ID NO: 5038839 - DNA, 25 bp, Homo sapien
ttaagagtactctgtataagctctg

SEQ ID NO: 5038840 - DNA, 25 bp, Homo sapien
taagagtactctgtataagctctgg

SEQ ID NO: 5038841 - DNA, 25 bp, Homo sapien
gggtggcctttgagattgagatgaa

SEQ ID NO: 5038842 - DNA, 25 bp, Homo sapien
atgaaggcagagctggccatagcag

SEQ ID NO: 5038843 - DNA, 25 bp, Homo sapien
tgccttccttcaaggtctatccgtt

SEQ ID NO: 5038844 - DNA, 25 bp, Homo sapien
ggtctatccgtttgatgatcaggtc

SEQ ID NO: 5038845 - DNA, 25 bp, Homo sapien
cttgcatggtcaacttcttcaaatg

SEQ ID NO: 5038846 - DNA, 25 bp, Homo sapien
ctgtctctcatcttgcatggtcaac

SEQ ID NO: 5038847 - DNA, 25 bp, Homo sapien
tgtggagcagacatagctttcagcc

SEQ ID NO: 5038848 - DNA, 25 bp, Homo sapien
tacaaggtactcagtgcaacacaaa

SEQ ID NO: 5038849 - DNA, 25 bp, Homo sapien
cgagcggagagtggaatagtttccc

SEQ ID NO: 5038850 - DNA, 25 bp, Homo sapien
cagggaccttgctgtcatgtggagc

SEQ ID NO: 5038851 - DNA, 25 bp, Homo sapien
gcatggcaagaccgagcagagcaga

SEQ ID NO: 5038852 - DNA, 25 bp, Homo sapien
ggcagtgcgcatggcaagaccgagc

SEQ ID NO: 5038853 - DNA, 25 bp, Homo sapien
ctggcagtgcgcatggcaagaccga

SEQ ID NO: 5038854 - DNA, 25 bp, Homo sapien
agtgcgcatggcaagaccgagcaga

SEQ ID NO: 5038855 - DNA, 25 bp, Homo sapien
tctgactcaggcaccgtggggcgtc

SEQ ID NO: 5038856 - DNA, 25 bp, Homo sapien
cctctgactcaggcaccgtggggcg

SEQ ID NO: 5038857 - DNA, 25 bp, Homo sapien
gactcaggcaccgtggggcgtcctc

SEQ ID NO: 5038858 - DNA, 25 bp, Homo sapien
ctgactcaggcaccgtggggcgtcc

SEQ ID NO: 5038859 - DNA, 25 bp, Homo sapien
tttccacagagcactaccatccacc

SEQ ID NO: 5038860 - DNA, 25 bp, Homo sapien
cccctttccacagagcactaccatc

SEQ ID NO: 5038861 - DNA, 25 bp, Homo sapien
tccacagagcactaccatccaccca

SEQ ID NO: 5038862 - DNA, 25 bp, Homo sapien
cctttccacagagcactaccatcca

SEQ ID NO: 5038863 - DNA, 25 bp, Homo sapien
caaggactgactttttcacggagaa

SEQ ID NO: 5038864 - DNA, 25 bp, Homo sapien
gtccagacgccgattctgcaaggac

SEQ ID NO: 5038865 - DNA, 25 bp, Homo sapien
gcaaggactgactttttcacggaga

SEQ ID NO: 5038866 - DNA, 25 bp, Homo sapien
gacgccgattctgcaaggactgact

SEQ ID NO: 5038867 - DNA, 25 bp, Homo sapien
tctcctcacaaacagagccaggatg

SEQ ID NO: 5038868 - DNA, 25 bp, Homo sapien
ggcctctcctcacaaacagagccag

SEQ ID NO: 5038869 - DNA, 25 bp, Homo sapien
ctcctcacaaacagagccaggatgt

SEQ ID NO: 5038870 - DNA, 25 bp, Homo sapien
cctggcctctcctcacaaacagagc

SEQ ID NO: 5038871 - DNA, 25 bp, Homo sapien
ttggatgggtgggtgaaattgctca

SEQ ID NO: 5038872 - DNA, 25 bp, Homo sapien
tggatgggtgggtgaaattgctcat

SEQ ID NO: 5038873 - DNA, 25 bp, Homo sapien
ggtttggatgggtgggtgaaattgc

SEQ ID NO: 5038874 - DNA, 25 bp, Homo sapien
gtttggatgggtgggtgaaattgct

SEQ ID NO: 5038875 - DNA, 25 bp, Homo sapien
tgcttgcctattgaccagtgacacc

SEQ ID NO: 5038876 - DNA, 25 bp, Homo sapien
cagttgagaagtaccttcagcaggc

SEQ ID NO: 5038877 - DNA, 25 bp, Homo sapien
gagaaattgctgtggtctgacccct

SEQ ID NO: 5038878 - DNA, 25 bp, Homo sapien
gacacttgaccttgctgagttcctg

SEQ ID NO: 5038879 - DNA, 25 bp, Homo sapien
ggccactgattgttaggctccaggg

SEQ ID NO: 5038880 - DNA, 25 bp, Homo sapien
tctgcttggcaatacattcattcct

SEQ ID NO: 5038881 - DNA, 25 bp, Homo sapien
tcatttcccagagattgttctcgta

SEQ ID NO: 5038882 - DNA, 25 bp, Homo sapien
tggcactggtagtggtcagggaggt

SEQ ID NO: 5038883 - DNA, 25 bp, Homo sapien
ggaagagatgaaactgtaggtgact

SEQ ID NO: 5038884 - DNA, 25 bp, Homo sapien
tattggcctgggtcgtgagtctgtc

SEQ ID NO: 5038885 - DNA, 25 bp, Homo sapien
ttattggcctgggtcgtgagtctgt

SEQ ID NO: 5038886 - DNA, 25 bp, Homo sapien
agagatgaaactgtaggtgacttct

SEQ ID NO: 5038887 - DNA, 25 bp, Homo sapien
ttcagggctgaaagaactctccgtc

SEQ ID NO: 5038888 - DNA, 25 bp, Homo sapien
tctgggcatcccagcgctatcaggc

SEQ ID NO: 5038889 - DNA, 25 bp, Homo sapien
cagctccgggtgaccaggattgcaa

SEQ ID NO: 5038890 - DNA, 25 bp, Homo sapien
gtctctctggctgtaaccataaggg

SEQ ID NO: 5038891 - DNA, 25 bp, Homo sapien
gacatgaggcgttgaggaatagcaa

SEQ ID NO: 5038892 - DNA, 25 bp, Homo sapien
caggaatgagctagactctcaaaag

SEQ ID NO: 5038893 - DNA, 25 bp, Homo sapien
cacttgaagtcctgcgtggccagag

SEQ ID NO: 5038894 - DNA, 25 bp, Homo sapien
tagcaagaagtgttccaagcatgaa

SEQ ID NO: 5038895 - DNA, 25 bp, Homo sapien
aaaggcctgtgtccatagtaccagg

SEQ ID NO: 5038896 - DNA, 25 bp, Homo sapien
gccaacaatggaaggttggaaaggc

SEQ ID NO: 5038897 - DNA, 25 bp, Homo sapien
ccaagcaggagagcagtaaattgcc

SEQ ID NO: 5038898 - DNA, 25 bp, Homo sapien
tatgatcctgaaaagggattggatg

SEQ ID NO: 5038899 - DNA, 25 bp, Homo sapien
tcaggtgctggccgctgtcattccc

SEQ ID NO: 5038900 - DNA, 25 bp, Homo sapien
tgcaggcaggatctcaggtgatggc

SEQ ID NO: 5038901 - DNA, 25 bp, Homo sapien
ccagtgggaaatggatctccttctc

SEQ ID NO: 5038902 - DNA, 25 bp, Homo sapien
attcccagtgggaaatggatctcct

SEQ ID NO: 5038903 - DNA, 25 bp, Homo sapien
gaaagtcagcttcttttccgtgtac

SEQ ID NO: 5038904 - DNA, 25 bp, Homo sapien
tgtgagtgagtcacctttcccagaa

SEQ ID NO: 5038905 - DNA, 25 bp, Homo sapien
tctacttgggcccagaaaacgagaa

SEQ ID NO: 5038906 - DNA, 25 bp, Homo sapien
tcaaagggcaggattgcgcaaggac

SEQ ID NO: 5038907 - DNA, 25 bp, Homo sapien
tgagaccgaaagaacagcttgggca

SEQ ID NO: 5038908 - DNA, 25 bp, Homo sapien
gagaccgaaagaacagcttgggcat

SEQ ID NO: 5038909 - DNA, 25 bp, Homo sapien
ggaataaccccagtcccatcgtgtg

SEQ ID NO: 5038910 - DNA, 25 bp, Homo sapien
cagctggatggaagctgggggaata

SEQ ID NO: 5038911 - DNA, 25 bp, Homo sapien
gatggaagctgggggaataacccca

SEQ ID NO: 5038912 - DNA, 25 bp, Homo sapien
aataaccccagtcccatcgtgtggg

SEQ ID NO: 5038913 - DNA, 25 bp, Homo sapien
gccctcagcaccccctgtgtgaccc

SEQ ID NO: 5038914 - DNA, 25 bp, Homo sapien
ctgggagccccagcatccagaatgg

SEQ ID NO: 5038915 - DNA, 25 bp, Homo sapien
cccagcatccagaatggttctttca

SEQ ID NO: 5038916 - DNA, 25 bp, Homo sapien
aatggttctttcattacatgatctt

SEQ ID NO: 5038917 - DNA, 25 bp, Homo sapien
atgatcttcatttgcacagtctggg

SEQ ID NO: 5038918 - DNA, 25 bp, Homo sapien
ctattctcttgcctgctctgggatg

SEQ ID NO: 5038919 - DNA, 25 bp, Homo sapien
cagaatgctctttactttggggagg

SEQ ID NO: 5038920 - DNA, 25 bp, Homo sapien
ggctctgctcttggtggttccagaa

SEQ ID NO: 5038921 - DNA, 25 bp, Homo sapien
gaagatcaacatctgcatccagctg

SEQ ID NO: 5038922 - DNA, 25 bp, Homo sapien
aagcagatttggaatagttggcagg

SEQ ID NO: 5038923 - DNA, 25 bp, Homo sapien
ttgcagagaacagaggcatccaggt

SEQ ID NO: 5038924 - DNA, 25 bp, Homo sapien
gatcatgaagggtcggtacactggc

SEQ ID NO: 5038925 - DNA, 25 bp, Homo sapien
gctcgagtaataaggtcgttgtgaa

SEQ ID NO: 5038926 - DNA, 25 bp, Homo sapien
gcctctagggacattctgattttcc

SEQ ID NO: 5038927 - DNA, 25 bp, Homo sapien
ggccttgcctctagggacattctga

SEQ ID NO: 5038928 - DNA, 25 bp, Homo sapien
gacattctgattttcctttgtcaag

SEQ ID NO: 5038929 - DNA, 25 bp, Homo sapien
gggagcatcctaggctttccaggga

SEQ ID NO: 5038930 - DNA, 25 bp, Homo sapien
tcatgttggaggattattattcctg

SEQ ID NO: 5038931 - DNA, 25 bp, Homo sapien
catgttggaggattattattcctgt

SEQ ID NO: 5038932 - DNA, 25 bp, Homo sapien
ggaggctcccgcagagtccggcact

SEQ ID NO: 5038933 - DNA, 25 bp, Homo sapien
gaggctcccgcagagtccggcactg

SEQ ID NO: 5038934 - DNA, 25 bp, Homo sapien
aggctcccgcagagtccggcactgc

SEQ ID NO: 5038935 - DNA, 25 bp, Homo sapien
ctggaggctcccgcagagtccggca

SEQ ID NO: 5038936 - DNA, 25 bp, Homo sapien
tgtctgttcgaatcagtggctctcc

SEQ ID NO: 5038937 - DNA, 25 bp, Homo sapien
tgaaggaacgccgatgagaatgccg

SEQ ID NO: 5038938 - DNA, 25 bp, Homo sapien
caactgcagagaggtggcatgcgac

SEQ ID NO: 5038939 - DNA, 25 bp, Homo sapien
gagaatgccgacgtaagagttctag

SEQ ID NO: 5038940 - DNA, 25 bp, Homo sapien
ccttcgggactcctctgtgtggtca

SEQ ID NO: 5038941 - DNA, 25 bp, Homo sapien
cactgcatttgtattgattaattcc

SEQ ID NO: 5038942 - DNA, 25 bp, Homo sapien
gctttgtggaggtctccttcgggac

SEQ ID NO: 5038943 - DNA, 25 bp, Homo sapien
taatttctgcgatagagggagagac

SEQ ID NO: 5038944 - DNA, 25 bp, Homo sapien
aggaagtggccggccaggcctgcag

SEQ ID NO: 5038945 - DNA, 25 bp, Homo sapien
gcgaggtgaggcagccaggaagtgg

SEQ ID NO: 5038946 - DNA, 25 bp, Homo sapien
aggcagccaggaagtggccggccag

SEQ ID NO: 5038947 - DNA, 25 bp, Homo sapien
ctggcgaggtgaggcagccaggaag

SEQ ID NO: 5038948 - DNA, 25 bp, Homo sapien
tcagaatccaggaagacagcccaga

SEQ ID NO: 5038949 - DNA, 25 bp, Homo sapien
ttggaattccttctctctcagaatc

SEQ ID NO: 5038950 - DNA, 25 bp, Homo sapien
tccaggaagacagcccagatactac

SEQ ID NO: 5038951 - DNA, 25 bp, Homo sapien
gaatccaggaagacagcccagatac

SEQ ID NO: 5038952 - DNA, 25 bp, Homo sapien
gcatccttcttagcagcatggcctc

SEQ ID NO: 5038953 - DNA, 25 bp, Homo sapien
ccttgtgctcccacagctgaatgca

SEQ ID NO: 5038954 - DNA, 25 bp, Homo sapien
ccactggaaggctcagttcctcctt

SEQ ID NO: 5038955 - DNA, 25 bp, Homo sapien
tctgtgtgccccagctgcaactcat

SEQ ID NO: 5038956 - DNA, 25 bp, Homo sapien
gatcccgtctgcacttgcttgctga

SEQ ID NO: 5038957 - DNA, 25 bp, Homo sapien
taagcgctattgtgtagagtcttgg

SEQ ID NO: 5038958 - DNA, 25 bp, Homo sapien
gttgttgccacccattctaatctga

SEQ ID NO: 5038959 - DNA, 25 bp, Homo sapien
tgctgggtgcatgagcaagatcccg

SEQ ID NO: 5038960 - DNA, 25 bp, Homo sapien
tgaagagggtgatttgaaagagaga

SEQ ID NO: 5038961 - DNA, 25 bp, Homo sapien
atttgaaagagagaacagccttgtt

SEQ ID NO: 5038962 - DNA, 25 bp, Homo sapien
tgaaagagagaacagccttgtttct

SEQ ID NO: 5038963 - DNA, 25 bp, Homo sapien
ctgaagagggtgatttgaaagagag

SEQ ID NO: 5038964 - DNA, 25 bp, Homo sapien
cacagctaggatcagaagtaggatt

SEQ ID NO: 5038965 - DNA, 25 bp, Homo sapien
actgtcaggctctgtgtcgttgaga

SEQ ID NO: 5038966 - DNA, 25 bp, Homo sapien
cctgcttgatcgtcacacagctagg

SEQ ID NO: 5038967 - DNA, 25 bp, Homo sapien
ccattggaggcaacgcatggtgccc

SEQ ID NO: 5038968 - DNA, 25 bp, Homo sapien
ggttgatgctaatggaatctgtcca

SEQ ID NO: 5038969 - DNA, 25 bp, Homo sapien
aatatgctacggtggatgatcaggg

SEQ ID NO: 5038970 - DNA, 25 bp, Homo sapien
catttatgactctagtggttgatgc

SEQ ID NO: 5038971 - DNA, 25 bp, Homo sapien
tctgtccaaagacttcagtgtggag

SEQ ID NO: 5038972 - DNA, 25 bp, Homo sapien
aaggtaccacatcatctctctttgc

SEQ ID NO: 5038973 - DNA, 25 bp, Homo sapien
catcctgtttgggttaggcatctct

SEQ ID NO: 5038974 - DNA, 25 bp, Homo sapien
tgttcttcttgttcaggtgcccctt

SEQ ID NO: 5038975 - DNA, 25 bp, Homo sapien
ccaaaggcgtctcttatgtgatccc

SEQ ID NO: 5038976 - DNA, 25 bp, Homo sapien
ttttagatccatggaaacatccgct

SEQ ID NO: 5038977 - DNA, 25 bp, Homo sapien
catccgctactaggtggagcctgtg

SEQ ID NO: 5038978 - DNA, 25 bp, Homo sapien
tttagggcattttggagggccactg

SEQ ID NO: 5038979 - DNA, 25 bp, Homo sapien
cccttcttggccaaatgatgaacca

SEQ ID NO: 5038980 - DNA, 25 bp, Homo sapien
tgggttctgcatttgcacagaggtc

SEQ ID NO: 5038981 - DNA, 25 bp, Homo sapien
ccatttcctgaagatgggttctgca

SEQ ID NO: 5038982 - DNA, 25 bp, Homo sapien
atggccactgttcttaaaccaggta

SEQ ID NO: 5038983 - DNA, 25 bp, Homo sapien
cttaaaccaggtatgtcaagtctat

SEQ ID NO: 5038984 - DNA, 25 bp, Homo sapien
ccaggtactgaagacattgaagatt

SEQ ID NO: 5038985 - DNA, 25 bp, Homo sapien
aggttgtcagctaaccatactccca

SEQ ID NO: 5038986 - DNA, 25 bp, Homo sapien
aaatcagtgtgggatacattatgca

SEQ ID NO: 5038987 - DNA, 25 bp, Homo sapien
ctttctttagcaagaggtctgaaat

SEQ ID NO: 5038988 - DNA, 25 bp, Homo sapien
ccaagtgtgagagccttatgaagct

SEQ ID NO: 5038989 - DNA, 25 bp, Homo sapien
gcatccccaagtgtgagagccttat

SEQ ID NO: 5038990 - DNA, 25 bp, Homo sapien
cccaagtgtgagagccttatgaagc

SEQ ID NO: 5038991 - DNA, 25 bp, Homo sapien
tccccaagtgtgagagccttatgaa

SEQ ID NO: 5038992 - DNA, 25 bp, Homo sapien
tgggccacgcttcggctgtgattca

SEQ ID NO: 5038993 - DNA, 25 bp, Homo sapien
gccacgcttcggctgtgattcagcc

SEQ ID NO: 5038994 - DNA, 25 bp, Homo sapien
catcctgggccacgcttcggctgtg

SEQ ID NO: 5038995 - DNA, 25 bp, Homo sapien
acgcttcggctgtgattcagccctg

SEQ ID NO: 5038996 - DNA, 25 bp, Homo sapien
tcaggttacacatgaggaagtgagg

SEQ ID NO: 5038997 - DNA, 25 bp, Homo sapien
ggttacacatgaggaagtgaggttt

SEQ ID NO: 5038998 - DNA, 25 bp, Homo sapien
catgtcaggttacacatgaggaagt

SEQ ID NO: 5038999 - DNA, 25 bp, Homo sapien
tcatgtcaggttacacatgaggaag

SEQ ID NO: 5039000 - DNA, 25 bp, Homo sapien
tgtttttcttgaaccgtccacatag

SEQ ID NO: 5039001 - DNA, 25 bp, Homo sapien
tctggtaggcatgctcccaggacgg

SEQ ID NO: 5039002 - DNA, 25 bp, Homo sapien
tcagctgagttccagccgggccagc

SEQ ID NO: 5039003 - DNA, 25 bp, Homo sapien
tccgagaagacgtgaattgtgtcct

SEQ ID NO: 5039004 - DNA, 25 bp, Homo sapien
cagttccacgtcatcctctgagtca

SEQ ID NO: 5039005 - DNA, 25 bp, Homo sapien
gcagttccacgtcatcctctgagtc

SEQ ID NO: 5039006 - DNA, 25 bp, Homo sapien
cagcagttccacgtcatcctctgag

SEQ ID NO: 5039007 - DNA, 25 bp, Homo sapien
acagcagttccacgtcatcctctga

SEQ ID NO: 5039008 - DNA, 25 bp, Homo sapien
ctccggggctactctgtggtctgtg

SEQ ID NO: 5039009 - DNA, 25 bp, Homo sapien
ggcactgtggcatctgctctgggtt

SEQ ID NO: 5039010 - DNA, 25 bp, Homo sapien
cactgtggcatctgctctgggtttc

SEQ ID NO: 5039011 - DNA, 25 bp, Homo sapien
tccctccggggctactctgtggtct

SEQ ID NO: 5039012 - DNA, 25 bp, Homo sapien
cagtgactatgggatctgtctttgt

SEQ ID NO: 5039013 - DNA, 25 bp, Homo sapien
tgtgagaacagtgactatgggatct

SEQ ID NO: 5039014 - DNA, 25 bp, Homo sapien
ttctcttggtgggagtcattgtgag

SEQ ID NO: 5039015 - DNA, 25 bp, Homo sapien
tgggagtcattgtgagaacagtgac

SEQ ID NO: 5039016 - DNA, 25 bp, Homo sapien
tcaaccagacaccgaattcagggag

SEQ ID NO: 5039017 - DNA, 25 bp, Homo sapien
tattcctttcaacagcgcagtgaga

SEQ ID NO: 5039018 - DNA, 25 bp, Homo sapien
caaggtattgctccgggtgtatccc

SEQ ID NO: 5039019 - DNA, 25 bp, Homo sapien
actgccctgggagtaaaaccatttg

SEQ ID NO: 5039020 - DNA, 25 bp, Homo sapien
ctttgctaaagtgggtagacagcca

SEQ ID NO: 5039021 - DNA, 25 bp, Homo sapien
tatgtgctggacaaatgtcccttca

SEQ ID NO: 5039022 - DNA, 25 bp, Homo sapien
tgggaatctgttaaggccagaaact

SEQ ID NO: 5039023 - DNA, 25 bp, Homo sapien
tgtcccttcacttatctcaacttgg

SEQ ID NO: 5039024 - DNA, 25 bp, Homo sapien
ctgggacctggtatgtgctggacaa

SEQ ID NO: 5039025 - DNA, 25 bp, Homo sapien
tctgaaaggattccaatcaaatttg

SEQ ID NO: 5039026 - DNA, 25 bp, Homo sapien
caccaagaaggcctcttgaattgga

SEQ ID NO: 5039027 - DNA, 25 bp, Homo sapien
ttgaattggagaatcccactgttga

SEQ ID NO: 5039028 - DNA, 25 bp, Homo sapien
ttaaaccataggtgctacagcccag

SEQ ID NO: 5039029 - DNA, 25 bp, Homo sapien
gcacagtcttcaggacagaaggcca

SEQ ID NO: 5039030 - DNA, 25 bp, Homo sapien
gagcacagtcttcaggacagaaggc

SEQ ID NO: 5039031 - DNA, 25 bp, Homo sapien
cacagtcttcaggacagaaggccat

SEQ ID NO: 5039032 - DNA, 25 bp, Homo sapien
ctgagcacagtcttcaggacagaag

SEQ ID NO: 5039033 - DNA, 25 bp, Homo sapien
tgaattcaggcaacacatagcaagg

SEQ ID NO: 5039034 - DNA, 25 bp, Homo sapien
tactgggaatgggatgcccgtcttc

SEQ ID NO: 5039035 - DNA, 25 bp, Homo sapien
tattcagctggagtagcgctaactg

SEQ ID NO: 5039036 - DNA, 25 bp, Homo sapien
ggttcttcacgtcatttctactggg

SEQ ID NO: 5039037 - DNA, 25 bp, Homo sapien
ttaagcaataactacttctctctcc

SEQ ID NO: 5039038 - DNA, 25 bp, Homo sapien
cactttttatgtggcatcaagtaca

SEQ ID NO: 5039039 - DNA, 25 bp, Homo sapien
tgctgactacatatcagaggctact

SEQ ID NO: 5039040 - DNA, 25 bp, Homo sapien
tctggatgcctcatagtggaatcat

SEQ ID NO: 5039041 - DNA, 25 bp, Homo sapien
gcaatcacggcaggtctcttcacag

SEQ ID NO: 5039042 - DNA, 25 bp, Homo sapien
tgtttctcagcgttgatcttcatgg

SEQ ID NO: 5039043 - DNA, 25 bp, Homo sapien
caacttggggaagcctggtgcaata

SEQ ID NO: 5039044 - DNA, 25 bp, Homo sapien
ttcatgggttggaaatgaataaagg

SEQ ID NO: 5039045 - DNA, 25 bp, Homo sapien
cacttccatctatggtgcagcccat

SEQ ID NO: 5039046 - DNA, 25 bp, Homo sapien
ctttcccacttccatctatggtgca

SEQ ID NO: 5039047 - DNA, 25 bp, Homo sapien
cttctttcccacttccatctatggt

SEQ ID NO: 5039048 - DNA, 25 bp, Homo sapien
tgtagcttctttcccacttccatct

SEQ ID NO: 5039049 - DNA, 25 bp, Homo sapien
tcttagcggtttgttcctgaacttc

SEQ ID NO: 5039050 - DNA, 25 bp, Homo sapien
tgaagtccacgtgtgccttctgtgg

SEQ ID NO: 5039051 - DNA, 25 bp, Homo sapien
tgacatatcccctttgtccattcgg

SEQ ID NO: 5039052 - DNA, 25 bp, Homo sapien
ggccatagagcctgaactgaagtcc

SEQ ID NO: 5039053 - DNA, 25 bp, Homo sapien
gatgggagaggtatatttcggtcct

SEQ ID NO: 5039054 - DNA, 25 bp, Homo sapien
tcagtatctgactgtttaacttgtt

SEQ ID NO: 5039055 - DNA, 25 bp, Homo sapien
gagaggtatatttcggtcctccaca

SEQ ID NO: 5039056 - DNA, 25 bp, Homo sapien
tatatttcggtcctccacatgctct

SEQ ID NO: 5039057 - DNA, 25 bp, Homo sapien
tatctggcaagatgagataatgtgt

SEQ ID NO: 5039058 - DNA, 25 bp, Homo sapien
actatctggcaagatgagataatgt

SEQ ID NO: 5039059 - DNA, 25 bp, Homo sapien
atctggcaagatgagataatgtgtt

SEQ ID NO: 5039060 - DNA, 25 bp, Homo sapien
ctatctggcaagatgagataatgtg

SEQ ID NO: 5039061 - DNA, 25 bp, Homo sapien
ctctgagagggcacacaagttgatt

SEQ ID NO: 5039062 - DNA, 25 bp, Homo sapien
tgattcctctaaactttgtatagtg

SEQ ID NO: 5039063 - DNA, 25 bp, Homo sapien
ccaaagtgagtgaccaaatgttccc

SEQ ID NO: 5039064 - DNA, 25 bp, Homo sapien
agcactgagtcattttggctgtttg

SEQ ID NO: 5039065 - DNA, 25 bp, Homo sapien
aacaacaggaagctctagggagaaa

SEQ ID NO: 5039066 - DNA, 25 bp, Homo sapien
tcaggagtctttgggtttgggaaca

SEQ ID NO: 5039067 - DNA, 25 bp, Homo sapien
caacaggaagctctagggagaaaag

SEQ ID NO: 5039068 - DNA, 25 bp, Homo sapien
tgagttctcatagggggtaccagca

SEQ ID NO: 5039069 - DNA, 25 bp, Homo sapien
tcctgtactcactgttgatgaaacc

SEQ ID NO: 5039070 - DNA, 25 bp, Homo sapien
gtactcactgttgatgaaaccttca

SEQ ID NO: 5039071 - DNA, 25 bp, Homo sapien
atgtgtggctgatgaaattttagtg

SEQ ID NO: 5039072 - DNA, 25 bp, Homo sapien
cccatgaggtgacacggtttggctt

SEQ ID NO: 5039073 - DNA, 25 bp, Homo sapien
tcagaggactatcttcttgtaattc

SEQ ID NO: 5039074 - DNA, 25 bp, Homo sapien
ctaacggagttcagaggactatctt

SEQ ID NO: 5039075 - DNA, 25 bp, Homo sapien
aggactatcttcttgtaattctctg

SEQ ID NO: 5039076 - DNA, 25 bp, Homo sapien
cggagttcagaggactatcttcttg

SEQ ID NO: 5039077 - DNA, 25 bp, Homo sapien
caaccactctttccttgcattcaag

SEQ ID NO: 5039078 - DNA, 25 bp, Homo sapien
aaccactctttccttgcattcaagc

SEQ ID NO: 5039079 - DNA, 25 bp, Homo sapien
tcaaccactctttccttgcattcaa

SEQ ID NO: 5039080 - DNA, 25 bp, Homo sapien
aaagcaggcattgtccaacaactaa

SEQ ID NO: 5039081 - DNA, 25 bp, Homo sapien
gagcttaatgttaatgaccatcaac

SEQ ID NO: 5039082 - DNA, 25 bp, Homo sapien
tgatttgagctgcaattctcctctg

SEQ ID NO: 5039083 - DNA, 25 bp, Homo sapien
tcacctcaaaaacacattggcagtg

SEQ ID NO: 5039084 - DNA, 25 bp, Homo sapien
ggctgccacatgtttggtgagtctg

SEQ ID NO: 5039085 - DNA, 25 bp, Homo sapien
tcatcaggctgccacatgtttggtg

SEQ ID NO: 5039086 - DNA, 25 bp, Homo sapien
ggtgagtctgtttctcaattgtgac

SEQ ID NO: 5039087 - DNA, 25 bp, Homo sapien
gagtctgtttctcaattgtgaccat

SEQ ID NO: 5039088 - DNA, 25 bp, Homo sapien
cagcaagtgtacagtgagagtatac

SEQ ID NO: 5039089 - DNA, 25 bp, Homo sapien
gacagagcacccagtcgtgaaaaag

SEQ ID NO: 5039090 - DNA, 25 bp, Homo sapien
gagtatactgtatgcccaggcttgg

SEQ ID NO: 5039091 - DNA, 25 bp, Homo sapien
gacatgtctggttgattagctacaa

SEQ ID NO: 5039092 - DNA, 25 bp, Homo sapien
agccctcaatgcctgggggacccct

SEQ ID NO: 5039093 - DNA, 25 bp, Homo sapien
acagccctcaatgcctgggggaccc

SEQ ID NO: 5039094 - DNA, 25 bp, Homo sapien
acacagccctcaatgcctgggggac

SEQ ID NO: 5039095 - DNA, 25 bp, Homo sapien
tcacacagccctcaatgcctggggg

SEQ ID NO: 5039096 - DNA, 25 bp, Homo sapien
gatggtggaaacactcaggacttca

SEQ ID NO: 5039097 - DNA, 25 bp, Homo sapien
gaaacttggctgtgagatatcaaca

SEQ ID NO: 5039098 - DNA, 25 bp, Homo sapien
tatacaacgaaagcccatgcgcatt

SEQ ID NO: 5039099 - DNA, 25 bp, Homo sapien
tctgagtggagcactacagcatcca

SEQ ID NO: 5039100 - DNA, 25 bp, Homo sapien
ctgtgagtaaaggttttcctgaagc

SEQ ID NO: 5039101 - DNA, 25 bp, Homo sapien
gttttcctgaagcttgcaaaagcag

SEQ ID NO: 5039102 - DNA, 25 bp, Homo sapien
taaaggttttcctgaagcttgcaaa

SEQ ID NO: 5039103 - DNA, 25 bp, Homo sapien
caaaagcagagagagtcacagtcat

SEQ ID NO: 5039104 - DNA, 25 bp, Homo sapien
acagcacctggatttgagaagaaaa

SEQ ID NO: 5039105 - DNA, 25 bp, Homo sapien
tagatgagcatagcagtgtggacat

SEQ ID NO: 5039106 - DNA, 25 bp, Homo sapien
tagaatagtggcctaggaactctag

SEQ ID NO: 5039107 - DNA, 25 bp, Homo sapien
taattaagagcgtggactctggagc

SEQ ID NO: 5039108 - DNA, 25 bp, Homo sapien
gatggtggttttagtagcccctcca

SEQ ID NO: 5039109 - DNA, 25 bp, Homo sapien
gaggcactagccaaagcttcatgag

SEQ ID NO: 5039110 - DNA, 25 bp, Homo sapien
gcttgatagaatgtggtaactaggg

SEQ ID NO: 5039111 - DNA, 25 bp, Homo sapien
ccgagactcctcagggatggtggtt

SEQ ID NO: 5039112 - DNA, 25 bp, Homo sapien
ggcctcaggtctaaatgctacaaca

SEQ ID NO: 5039113 - DNA, 25 bp, Homo sapien
ggtctaaatgctacaacagatgact

SEQ ID NO: 5039114 - DNA, 25 bp, Homo sapien
tcaggtctaaatgctacaacagatg

SEQ ID NO: 5039115 - DNA, 25 bp, Homo sapien
atgctacaacagatgacttttttcc

SEQ ID NO: 5039116 - DNA, 25 bp, Homo sapien
catctgctgacaaaacctgctgaca

SEQ ID NO: 5039117 - DNA, 25 bp, Homo sapien
tctacccagtggaacgaaaagagcc

SEQ ID NO: 5039118 - DNA, 25 bp, Homo sapien
taagtagactttgaccttggcctgc

SEQ ID NO: 5039119 - DNA, 25 bp, Homo sapien
tatagtgtgtcatcctggctcaaga

SEQ ID NO: 5039120 - DNA, 25 bp, Homo sapien
aagatgctcaagatctaagccagga

SEQ ID NO: 5039121 - DNA, 25 bp, Homo sapien
taagccaggaaagtctcaggcatgg

SEQ ID NO: 5039122 - DNA, 25 bp, Homo sapien
taagtgaggaaatcattactaaggg

SEQ ID NO: 5039123 - DNA, 25 bp, Homo sapien
taagtattcgaatttcctgacaatg

SEQ ID NO: 5039124 - DNA, 25 bp, Homo sapien
gtagcagagaagttaaggcaggaag

SEQ ID NO: 5039125 - DNA, 25 bp, Homo sapien
ggtagcagagaagttaaggcaggaa

SEQ ID NO: 5039126 - DNA, 25 bp, Homo sapien
taggagatggccgagtaaagtagtc

SEQ ID NO: 5039127 - DNA, 25 bp, Homo sapien
caacctaaagttgtgtcaaggacag

SEQ ID NO: 5039128 - DNA, 25 bp, Homo sapien
gagacaaggagcatctcaagtagga

SEQ ID NO: 5039129 - DNA, 25 bp, Homo sapien
gtttaatcgccctatcggtcctcca

SEQ ID NO: 5039130 - DNA, 25 bp, Homo sapien
tagtaacacagagcataccccagag

SEQ ID NO: 5039131 - DNA, 25 bp, Homo sapien
caactcaggtatgattctcaggaga

SEQ ID NO: 5039132 - DNA, 25 bp, Homo sapien
tggagaacaacagccaaattgacgg

SEQ ID NO: 5039133 - DNA, 25 bp, Homo sapien
cagacagacgtctggagcactggat

SEQ ID NO: 5039134 - DNA, 25 bp, Homo sapien
ggagtccaataaggcagcactgggt

SEQ ID NO: 5039135 - DNA, 25 bp, Homo sapien
caaatcctaagtcagagaagggatg

SEQ ID NO: 5039136 - DNA, 25 bp, Homo sapien
ggagaggcacaaggagtccaataag

SEQ ID NO: 5039137 - DNA, 25 bp, Homo sapien
catggcatcattattgtcaaagaaa

SEQ ID NO: 5039138 - DNA, 25 bp, Homo sapien
ccaccattgcatggccaatgatgga

SEQ ID NO: 5039139 - DNA, 25 bp, Homo sapien
gcatggccaatgatggagtggcctc

SEQ ID NO: 5039140 - DNA, 25 bp, Homo sapien
ccattgcatggccaatgatggagtg

SEQ ID NO: 5039141 - DNA, 25 bp, Homo sapien
tcatggaccaccattgcatggccaa

SEQ ID NO: 5039142 - DNA, 25 bp, Homo sapien
tgcttgaaatggataattctcggta

SEQ ID NO: 5039143 - DNA, 25 bp, Homo sapien
gcttgaaatggataattctcggtac

SEQ ID NO: 5039144 - DNA, 25 bp, Homo sapien
tctgcttgaaatggataattctcgg

SEQ ID NO: 5039145 - DNA, 25 bp, Homo sapien
cacaactggtccattttccttctgc

SEQ ID NO: 5039146 - DNA, 25 bp, Homo sapien
gccagaattgttaatgttttcactg

SEQ ID NO: 5039147 - DNA, 25 bp, Homo sapien
ggaaacaggaggtgctataagagat

SEQ ID NO: 5039148 - DNA, 25 bp, Homo sapien
gatgacaacacaaacgccagaattg

SEQ ID NO: 5039149 - DNA, 25 bp, Homo sapien
ctgtctgggttctgaggattgccag

SEQ ID NO: 5039150 - DNA, 25 bp, Homo sapien
aaagcagtatagtgttatcagtcat

SEQ ID NO: 5039151 - DNA, 25 bp, Homo sapien
gatgtatttctatttatcagagtcc

SEQ ID NO: 5039152 - DNA, 25 bp, Homo sapien
gcttgttgttagataaaagcagtat

SEQ ID NO: 5039153 - DNA, 25 bp, Homo sapien
cagagtcctggggtcgctttgcttg

SEQ ID NO: 5039154 - DNA, 25 bp, Homo sapien
ttctaccttgcattataatgactgg

SEQ ID NO: 5039155 - DNA, 25 bp, Homo sapien
gcattataatgactggaatacacgg

SEQ ID NO: 5039156 - DNA, 25 bp, Homo sapien
cactggggaaattctaccttgcatt

SEQ ID NO: 5039157 - DNA, 25 bp, Homo sapien
aatgactggaatacacggatgcttc

SEQ ID NO: 5039158 - DNA, 25 bp, Homo sapien
ctgttcttgttgcatcttgaggggc

SEQ ID NO: 5039159 - DNA, 25 bp, Homo sapien
tcttgaggggctacactgatgatgc

SEQ ID NO: 5039160 - DNA, 25 bp, Homo sapien
tgttgcatcttgaggggctacactg

SEQ ID NO: 5039161 - DNA, 25 bp, Homo sapien
aggggctacactgatgatgccatca

SEQ ID NO: 5039162 - DNA, 25 bp, Homo sapien
tggtgggccgccatcctcagatgcc

SEQ ID NO: 5039163 - DNA, 25 bp, Homo sapien
tgccaaggggttgtcccagatggct

SEQ ID NO: 5039164 - DNA, 25 bp, Homo sapien
ttctgtggttaccttcaagctgaca

SEQ ID NO: 5039165 - DNA, 25 bp, Homo sapien
gcattcccagtgaggacggcctcag

SEQ ID NO: 5039166 - DNA, 25 bp, Homo sapien
actacgcagacaagctcatgaggca

SEQ ID NO: 5039167 - DNA, 25 bp, Homo sapien
tgaatgcgagtgaaagataatcgcc

SEQ ID NO: 5039168 - DNA, 25 bp, Homo sapien
caaagacctctttatagaacgcaga

SEQ ID NO: 5039169 - DNA, 25 bp, Homo sapien
taattggtgatcttcatggatgaaa

SEQ ID NO: 5039170 - DNA, 25 bp, Homo sapien
caagggagactaactgatcaggtaa

SEQ ID NO: 5039171 - DNA, 25 bp, Homo sapien
tcaggtaaactacatgccttcaaag

SEQ ID NO: 5039172 - DNA, 25 bp, Homo sapien
cctttccatgcggaagtattcttga

SEQ ID NO: 5039173 - DNA, 25 bp, Homo sapien
caccccttgtcactaaacttgaaga

SEQ ID NO: 5039174 - DNA, 25 bp, Homo sapien
ctgcttcaggtttgggcccctctcc

SEQ ID NO: 5039175 - DNA, 25 bp, Homo sapien
tctgcttcaggtttgggcccctctc

SEQ ID NO: 5039176 - DNA, 25 bp, Homo sapien
aacttgggcactagatgttggatgg

SEQ ID NO: 5039177 - DNA, 25 bp, Homo sapien
attgtctggactgatatgacactga

SEQ ID NO: 5039178 - DNA, 25 bp, Homo sapien
aagaattccagacacccctcaatct

SEQ ID NO: 5039179 - DNA, 25 bp, Homo sapien
gatggttgatgggataatacccaag

SEQ ID NO: 5039180 - DNA, 25 bp, Homo sapien
atgaggatactcagagagcccataa

SEQ ID NO: 5039181 - DNA, 25 bp, Homo sapien
tgtgctgcggaatgcaggaatgagg

SEQ ID NO: 5039182 - DNA, 25 bp, Homo sapien
tgctgcggaatgcaggaatgaggat

SEQ ID NO: 5039183 - DNA, 25 bp, Homo sapien
gcaggaatgaggatactcagagagc

SEQ ID NO: 5039184 - DNA, 25 bp, Homo sapien
cttctggctgtgagtagatacgatt

SEQ ID NO: 5039185 - DNA, 25 bp, Homo sapien
tacgatttgagttgtgccaaaccat

SEQ ID NO: 5039186 - DNA, 25 bp, Homo sapien
tctaggatgtcttccgtatttcaaa

SEQ ID NO: 5039187 - DNA, 25 bp, Homo sapien
gagtagatacgatttgagttgtgcc

SEQ ID NO: 5039188 - DNA, 25 bp, Homo sapien
ggcattttcatgggacacagatttg

SEQ ID NO: 5039189 - DNA, 25 bp, Homo sapien
cattttcatgggacacagatttgaa

SEQ ID NO: 5039190 - DNA, 25 bp, Homo sapien
gcattttcatgggacacagatttga

SEQ ID NO: 5039191 - DNA, 25 bp, Homo sapien
attttcatgggacacagatttgaaa

SEQ ID NO: 5039192 - DNA, 25 bp, Homo sapien
gcatactgatttagtgctaacctca

SEQ ID NO: 5039193 - DNA, 25 bp, Homo sapien
ctcgttgattctcaagagattaggg

SEQ ID NO: 5039194 - DNA, 25 bp, Homo sapien
gggagccagcatactgatttagtgc

SEQ ID NO: 5039195 - DNA, 25 bp, Homo sapien
cttgtggaagtcttaatgatgaaga

SEQ ID NO: 5039196 - DNA, 25 bp, Homo sapien
cagaactgggtttgcttaactctca

SEQ ID NO: 5039197 - DNA, 25 bp, Homo sapien
agttctaatttcaggcggcatggca

SEQ ID NO: 5039198 - DNA, 25 bp, Homo sapien
tgtacccaggtcaggttcatgtgag

SEQ ID NO: 5039199 - DNA, 25 bp, Homo sapien
aaagtgctccatttggtgctcaaga

SEQ ID NO: 5039200 - DNA, 25 bp, Homo sapien
gacacttcactaacatgctcaacat

SEQ ID NO: 5039201 - DNA, 25 bp, Homo sapien
gaagagacacttcactaacatgctc

SEQ ID NO: 5039202 - DNA, 25 bp, Homo sapien
acttcactaacatgctcaacatggt

SEQ ID NO: 5039203 - DNA, 25 bp, Homo sapien
agtcacgaagagacacttcactaac

SEQ ID NO: 5039204 - DNA, 25 bp, Homo sapien
caatatcttcaagctgttgcaaagc

SEQ ID NO: 5039205 - DNA, 25 bp, Homo sapien
ttcaagctgttgcaaagctacagta

SEQ ID NO: 5039206 - DNA, 25 bp, Homo sapien
agttcaatatcttcaagctgttgca

SEQ ID NO: 5039207 - DNA, 25 bp, Homo sapien
atttcagttcaatatcttcaagctg

SEQ ID NO: 5039208 - DNA, 25 bp, Homo sapien
tttgtcaatttatggcatttacaac

SEQ ID NO: 5039209 - DNA, 25 bp, Homo sapien
gaggggcaccacatatcacaaaggc

SEQ ID NO: 5039210 - DNA, 25 bp, Homo sapien
ggcatttacaactgccttgtggttc

SEQ ID NO: 5039211 - DNA, 25 bp, Homo sapien
tggcttggatattttacagtcattt

SEQ ID NO: 5039212 - DNA, 25 bp, Homo sapien
agcatttccccatccattaatgcca

SEQ ID NO: 5039213 - DNA, 25 bp, Homo sapien
tttccccatccattaatgccaacct

SEQ ID NO: 5039214 - DNA, 25 bp, Homo sapien
aggctccagtaccactcagttccag

SEQ ID NO: 5039215 - DNA, 25 bp, Homo sapien
ccaggctccagtaccactcagttcc

SEQ ID NO: 5039216 - DNA, 25 bp, Homo sapien
ctctttcaggtctttaggactctgg

SEQ ID NO: 5039217 - DNA, 25 bp, Homo sapien
tctttaggactctggtaagtaaaga

SEQ ID NO: 5039218 - DNA, 25 bp, Homo sapien
caggtctttaggactctggtaagta

SEQ ID NO: 5039219 - DNA, 25 bp, Homo sapien
tttcaggtctttaggactctggtaa

SEQ ID NO: 5039220 - DNA, 25 bp, Homo sapien
cattatgggtgttaatctcagcgga

SEQ ID NO: 5039221 - DNA, 25 bp, Homo sapien
gagctccatgttatcagacctccgt

SEQ ID NO: 5039222 - DNA, 25 bp, Homo sapien
tcttgaaagagtcacggcctactgg

SEQ ID NO: 5039223 - DNA, 25 bp, Homo sapien
gtagaacttacccattcagatgagc

SEQ ID NO: 5039224 - DNA, 25 bp, Homo sapien
tagggaactctattcactgctcttc

SEQ ID NO: 5039225 - DNA, 25 bp, Homo sapien
gcagagaatacgatggttgccatgg

SEQ ID NO: 5039226 - DNA, 25 bp, Homo sapien
taacacagtgcttaggcagaaccat

SEQ ID NO: 5039227 - DNA, 25 bp, Homo sapien
ttccatcccacgctcaaaaatcggt

SEQ ID NO: 5039228 - DNA, 25 bp, Homo sapien
gcagacatacccgtacgaaccttaa

SEQ ID NO: 5039229 - DNA, 25 bp, Homo sapien
gaggctcttgaggaacctttgagct

SEQ ID NO: 5039230 - DNA, 25 bp, Homo sapien
tttgagcttaaaggccacattatcc

SEQ ID NO: 5039231 - DNA, 25 bp, Homo sapien
tcttctaagtgacaagtttccagct

SEQ ID NO: 5039232 - DNA, 25 bp, Homo sapien
ccatacttctttgacagtggaattc

SEQ ID NO: 5039233 - DNA, 25 bp, Homo sapien
cgttggatttggtaatcaagaagcc

SEQ ID NO: 5039234 - DNA, 25 bp, Homo sapien
tgttcccagtccgtggcctttgagt

SEQ ID NO: 5039235 - DNA, 25 bp, Homo sapien
tttggcagggagtgaactcctcctg

SEQ ID NO: 5039236 - DNA, 25 bp, Homo sapien
gttcttgccctcttcacttttccaa

SEQ ID NO: 5039237 - DNA, 25 bp, Homo sapien
tgctgctacttttgcaggctgctgg

SEQ ID NO: 5039238 - DNA, 25 bp, Homo sapien
aggctgctggaacactttcactctg

SEQ ID NO: 5039239 - DNA, 25 bp, Homo sapien
ctctgaggattctgatgaacacagt

SEQ ID NO: 5039240 - DNA, 25 bp, Homo sapien
gaacaaagtaacagaagagctcttt

SEQ ID NO: 5039241 - DNA, 25 bp, Homo sapien
tctttttgaagaattagggactctg

SEQ ID NO: 5039242 - DNA, 25 bp, Homo sapien
tcctgcgaagtttcacaactgtggc

SEQ ID NO: 5039243 - DNA, 25 bp, Homo sapien
gatttcatgcctgcgtttcctgcga

SEQ ID NO: 5039244 - DNA, 25 bp, Homo sapien
attttgacagctctaggagacggca

SEQ ID NO: 5039245 - DNA, 25 bp, Homo sapien
tgctgatagccctgaattttgacag

SEQ ID NO: 5039246 - DNA, 25 bp, Homo sapien
cttgctgatagccctgaattttgac

SEQ ID NO: 5039247 - DNA, 25 bp, Homo sapien
ttttgacagctctaggagacggcat

SEQ ID NO: 5039248 - DNA, 25 bp, Homo sapien
ccagtattggctccttcagaaggac

SEQ ID NO: 5039249 - DNA, 25 bp, Homo sapien
agccagtgactggaccagtattggc

SEQ ID NO: 5039250 - DNA, 25 bp, Homo sapien
ggacagaaggatgacctttgcatct

SEQ ID NO: 5039251 - DNA, 25 bp, Homo sapien
aaggacagaaggatgacctttgcat

SEQ ID NO: 5039252 - DNA, 25 bp, Homo sapien
accattggtgagattaaccaagaag

SEQ ID NO: 5039253 - DNA, 25 bp, Homo sapien
caaaaagctgattctttgaaaggta

SEQ ID NO: 5039254 - DNA, 25 bp, Homo sapien
aagatcagagcagaagtaaatataa

SEQ ID NO: 5039255 - DNA, 25 bp, Homo sapien
tagaaatgaaatgggagatggccag

SEQ ID NO: 5039256 - DNA, 25 bp, Homo sapien
ctagagcaaagtcgtttcctctttc

SEQ ID NO: 5039257 - DNA, 25 bp, Homo sapien
tgacaatttgtagctggcattgagc

SEQ ID NO: 5039258 - DNA, 25 bp, Homo sapien
tcttcaaccccttctgacaatttgt

SEQ ID NO: 5039259 - DNA, 25 bp, Homo sapien
gtctagagcaaagtcgtttcctctt

SEQ ID NO: 5039260 - DNA, 25 bp, Homo sapien
ggtgacagctgtccatctgtcaggt

SEQ ID NO: 5039261 - DNA, 25 bp, Homo sapien
ccagatttggaagcaatacagggag

SEQ ID NO: 5039262 - DNA, 25 bp, Homo sapien
ggttaaatgcctgtgaagtgcttca

SEQ ID NO: 5039263 - DNA, 25 bp, Homo sapien
atctgtagacaggtggttaaatgcc

SEQ ID NO: 5039264 - DNA, 25 bp, Homo sapien
gcagggagttttacctgagtctgca

SEQ ID NO: 5039265 - DNA, 25 bp, Homo sapien
aatctcaaagcataccctctgccat

SEQ ID NO: 5039266 - DNA, 25 bp, Homo sapien
aaatttcatcactgaatgtttatgt

SEQ ID NO: 5039267 - DNA, 25 bp, Homo sapien
gtaactcatccatagtcacatgtag

SEQ ID NO: 5039268 - DNA, 25 bp, Homo sapien
tctgagagctgtcagacctttgggc

SEQ ID NO: 5039269 - DNA, 25 bp, Homo sapien
caaacgtagcacttgcagaaagacc

SEQ ID NO: 5039270 - DNA, 25 bp, Homo sapien
cagaaagacctgtggttgtacctta

SEQ ID NO: 5039271 - DNA, 25 bp, Homo sapien
tgaggacagtaaagctcggcagctt

SEQ ID NO: 5039272 - DNA, 25 bp, Homo sapien
tcccagcatgggatctgagtcatct

SEQ ID NO: 5039273 - DNA, 25 bp, Homo sapien
gaaggcaagggccactaactggcct

SEQ ID NO: 5039274 - DNA, 25 bp, Homo sapien
ctgagtcatcttagggttgagggcc

SEQ ID NO: 5039275 - DNA, 25 bp, Homo sapien
cactccttaagcattggctgctgaa

SEQ ID NO: 5039276 - DNA, 25 bp, Homo sapien
ctttggcagccgtaaagcaagcccc

SEQ ID NO: 5039277 - DNA, 25 bp, Homo sapien
ttggcagccgtaaagcaagccccag

SEQ ID NO: 5039278 - DNA, 25 bp, Homo sapien
ttttttccattggatagaaccacat

SEQ ID NO: 5039279 - DNA, 25 bp, Homo sapien
gttttttccattggatagaaccaca

SEQ ID NO: 5039280 - DNA, 25 bp, Homo sapien
gctgtctcttgctttgcgatgattc

SEQ ID NO: 5039281 - DNA, 25 bp, Homo sapien
tcagagccctcttggtaaaccaaag

SEQ ID NO: 5039282 - DNA, 25 bp, Homo sapien
cactccgctctatccagggaataag

SEQ ID NO: 5039283 - DNA, 25 bp, Homo sapien
gattctggcagcctgttccgccact

SEQ ID NO: 5039284 - DNA, 25 bp, Homo sapien
gatcgatgacgcaggtccttccagt

SEQ ID NO: 5039285 - DNA, 25 bp, Homo sapien
ctgaatctggaggacggtgatcgat

SEQ ID NO: 5039286 - DNA, 25 bp, Homo sapien
ccttccagtgaaatgatggtctcaa

SEQ ID NO: 5039287 - DNA, 25 bp, Homo sapien
aaacctgctgaatctggaggacggt

SEQ ID NO: 5039288 - DNA, 25 bp, Homo sapien
ctgcagatcagccaaagggtgacct

SEQ ID NO: 5039289 - DNA, 25 bp, Homo sapien
agatcagccaaagggtgacctttca

SEQ ID NO: 5039290 - DNA, 25 bp, Homo sapien
ttttctgaaagtactagataacttc

SEQ ID NO: 5039291 - DNA, 25 bp, Homo sapien
taacttcttccgatggcttcatttg

SEQ ID NO: 5039292 - DNA, 25 bp, Homo sapien
tcaatagatcacttttctcgatttt

SEQ ID NO: 5039293 - DNA, 25 bp, Homo sapien
aatagatcacttttctcgattttgc

SEQ ID NO: 5039294 - DNA, 25 bp, Homo sapien
caatagatcacttttctcgattttg

SEQ ID NO: 5039295 - DNA, 25 bp, Homo sapien
taagttaactgtataaattactcca

SEQ ID NO: 5039296 - DNA, 25 bp, Homo sapien
cacctattctaggtgccccgctcca

SEQ ID NO: 5039297 - DNA, 25 bp, Homo sapien
ccgctccacaacctgttatctttta

SEQ ID NO: 5039298 - DNA, 25 bp, Homo sapien
tactccatccgactgattattaaaa

SEQ ID NO: 5039299 - DNA, 25 bp, Homo sapien
aacagtcaagagagcatcacagcca

SEQ ID NO: 5039300 - DNA, 25 bp, Homo sapien
catttggaaggctttcaacagtcaa

SEQ ID NO: 5039301 - DNA, 25 bp, Homo sapien
gctttcaacagtcaagagagcatca

SEQ ID NO: 5039302 - DNA, 25 bp, Homo sapien
tggaaggctttcaacagtcaagaga

SEQ ID NO: 5039303 - DNA, 25 bp, Homo sapien
actgtcctcaaatgtttggacgatt

SEQ ID NO: 5039304 - DNA, 25 bp, Homo sapien
ctgatgagggctatcagcagctatt

SEQ ID NO: 5039305 - DNA, 25 bp, Homo sapien
tttggacgattgactgatgagggct

SEQ ID NO: 5039306 - DNA, 25 bp, Homo sapien
cctcaaatgtttggacgattgactg

SEQ ID NO: 5039307 - DNA, 25 bp, Homo sapien
gaaccttctgctgttcttgctgatg

SEQ ID NO: 5039308 - DNA, 25 bp, Homo sapien
tgctgttcttgctgatgatgtcttc

SEQ ID NO: 5039309 - DNA, 25 bp, Homo sapien
ttctgctgttcttgctgatgatgtc

SEQ ID NO: 5039310 - DNA, 25 bp, Homo sapien
cttcagaaccttctgctgttcttgc

SEQ ID NO: 5039311 - DNA, 25 bp, Homo sapien
ggaaacgctcatagcatcttttgaa

SEQ ID NO: 5039312 - DNA, 25 bp, Homo sapien
gaactctaatagatggtttattgga

SEQ ID NO: 5039313 - DNA, 25 bp, Homo sapien
ttttaataagacatagtgaagagga

SEQ ID NO: 5039314 - DNA, 25 bp, Homo sapien
tggtttattggaaacgctcatagca

SEQ ID NO: 5039315 - DNA, 25 bp, Homo sapien
tttatttaactaagcactgcccttc

SEQ ID NO: 5039316 - DNA, 25 bp, Homo sapien
catgagtcacaagtattatagccaa

SEQ ID NO: 5039317 - DNA, 25 bp, Homo sapien
aaatcggaacttccttctcaagaag

SEQ ID NO: 5039318 - DNA, 25 bp, Homo sapien
taaagtttatacaactcactgggaa

SEQ ID NO: 5039319 - DNA, 25 bp, Homo sapien
caagagtcttcaacacagtggattc

SEQ ID NO: 5039320 - DNA, 25 bp, Homo sapien
tgtccagtgctattagggccaaagc

SEQ ID NO: 5039321 - DNA, 25 bp, Homo sapien
caaagagcatccgtaattcacagta

SEQ ID NO: 5039322 - DNA, 25 bp, Homo sapien
catttagcatacgttccagtcgatg

SEQ ID NO: 5039323 - DNA, 25 bp, Homo sapien
cagattcggtgctaaccaggtggca

SEQ ID NO: 5039324 - DNA, 25 bp, Homo sapien
gaagcaacggcaggaatgggtactc

SEQ ID NO: 5039325 - DNA, 25 bp, Homo sapien
tctaccaaggtttaagtgccaggca

SEQ ID NO: 5039326 - DNA, 25 bp, Homo sapien
tagtttacaacgactcccaagagag

SEQ ID NO: 5039327 - DNA, 25 bp, Homo sapien
tactgcaaacagttccccttcgcag

SEQ ID NO: 5039328 - DNA, 25 bp, Homo sapien
aggaatcccagatggggcccagaca

SEQ ID NO: 5039329 - DNA, 25 bp, Homo sapien
gagcagcggctgctactgcaaacag

SEQ ID NO: 5039330 - DNA, 25 bp, Homo sapien
ggctgcgcatttcaccaactctttt

SEQ ID NO: 5039331 - DNA, 25 bp, Homo sapien
gatctggtcgttgcgtcgcttctcc

SEQ ID NO: 5039332 - DNA, 25 bp, Homo sapien
gaaactctccgagttgcgccagctc

SEQ ID NO: 5039333 - DNA, 25 bp, Homo sapien
tgcgctgcgccgacagctgaatctg

SEQ ID NO: 5039334 - DNA, 25 bp, Homo sapien
tagactctggaactcgagcgtgtgg

SEQ ID NO: 5039335 - DNA, 25 bp, Homo sapien
gctggcgtcagtcaggaagctgtta

SEQ ID NO: 5039336 - DNA, 25 bp, Homo sapien
cggtacagatcgttgaccacgcggc

SEQ ID NO: 5039337 - DNA, 25 bp, Homo sapien
ccacggcgctggagcttagcggctt

SEQ ID NO: 5039338 - DNA, 25 bp, Homo sapien
tgcaccacctggaagttacccacat

SEQ ID NO: 5039339 - DNA, 25 bp, Homo sapien
aaaatgtaggagaccccaatgcggg

SEQ ID NO: 5039340 - DNA, 25 bp, Homo sapien
tagaacacggagcattccacctcgt

SEQ ID NO: 5039341 - DNA, 25 bp, Homo sapien
gatcgcccggcttgcacttgttgag

SEQ ID NO: 5039342 - DNA, 25 bp, Homo sapien
ggtagatgcattcgtcccggtagaa

SEQ ID NO: 5039343 - DNA, 25 bp, Homo sapien
acacacgttcacaccgccgcaaggg

SEQ ID NO: 5039344 - DNA, 25 bp, Homo sapien
gaaagcgaaaccaactccagggtca

SEQ ID NO: 5039345 - DNA, 25 bp, Homo sapien
gccgcaaggggagaaagcgaaacca

SEQ ID NO: 5039346 - DNA, 25 bp, Homo sapien
cagggtcatttgcacaggtccccgg

SEQ ID NO: 5039347 - DNA, 25 bp, Homo sapien
ttctccacctgtaaggtcacggtca

SEQ ID NO: 5039348 - DNA, 25 bp, Homo sapien
aagtctcgggtgtagcgagctttcc

SEQ ID NO: 5039349 - DNA, 25 bp, Homo sapien
tcacggtcacaggagactgggcaac

SEQ ID NO: 5039350 - DNA, 25 bp, Homo sapien
aaaaagaatcggtgggggctcagca

SEQ ID NO: 5039351 - DNA, 25 bp, Homo sapien
tttgaaggtgtaggctcggcagtcc

SEQ ID NO: 5039352 - DNA, 25 bp, Homo sapien
gtgtaggctcggcagtccctcctct

SEQ ID NO: 5039353 - DNA, 25 bp, Homo sapien
ccgagacttctagggcgagtttgaa

SEQ ID NO: 5039354 - DNA, 25 bp, Homo sapien
cgcgccccgagacttctagggcgag

SEQ ID NO: 5039355 - DNA, 25 bp, Homo sapien
tagcgccccgatacttgaaggcggg

SEQ ID NO: 5039356 - DNA, 25 bp, Homo sapien
tggcggcaacagctcccgcttgggc

SEQ ID NO: 5039357 - DNA, 25 bp, Homo sapien
cgggattgtagatccggctccgggc

SEQ ID NO: 5039358 - DNA, 25 bp, Homo sapien
cgggcgagcaacaagcaccggagct

SEQ ID NO: 5039359 - DNA, 25 bp, Homo sapien
gacagctcgaagagtgcgtcatcct

SEQ ID NO: 5039360 - DNA, 25 bp, Homo sapien
tatttcttgccctaaaggtcacaag

SEQ ID NO: 5039361 - DNA, 25 bp, Homo sapien
gcgtcatcctagaggtgttttcaga

SEQ ID NO: 5039362 - DNA, 25 bp, Homo sapien
tgttttcagagttagtagtgggaaa

SEQ ID NO: 5039363 - DNA, 25 bp, Homo sapien
ctcttcacaataggtgaggcctggg

SEQ ID NO: 5039364 - DNA, 25 bp, Homo sapien
gaggctgtggaatgacatccttttc

SEQ ID NO: 5039365 - DNA, 25 bp, Homo sapien
gagctgctggcctgtaactgctttc

SEQ ID NO: 5039366 - DNA, 25 bp, Homo sapien
gcctgggcctgtctcacctttgaga

SEQ ID NO: 5039367 - DNA, 25 bp, Homo sapien
ttagatcaacagagcagattctgaa

SEQ ID NO: 5039368 - DNA, 25 bp, Homo sapien
ctgtctgggcaagagctagtttacc

SEQ ID NO: 5039369 - DNA, 25 bp, Homo sapien
tgaagctgtctgggcaagagctagt

SEQ ID NO: 5039370 - DNA, 25 bp, Homo sapien
aagctgtctgggcaagagctagttt

SEQ ID NO: 5039371 - DNA, 25 bp, Homo sapien
tgaaaagcaggtactctgagaaggg

SEQ ID NO: 5039372 - DNA, 25 bp, Homo sapien
aaccagctctccatgtattaatcct

SEQ ID NO: 5039373 - DNA, 25 bp, Homo sapien
cctgcagctaaattgtctgtgagga

SEQ ID NO: 5039374 - DNA, 25 bp, Homo sapien
gggtgaaaagcaggtactctgagaa

SEQ ID NO: 5039375 - DNA, 25 bp, Homo sapien
aattctaagagtcttattttgcact

SEQ ID NO: 5039376 - DNA, 25 bp, Homo sapien
tctgcaaatccaaatgtggggattt

SEQ ID NO: 5039377 - DNA, 25 bp, Homo sapien
ttacagctcgacaaatccaaatatt

SEQ ID NO: 5039378 - DNA, 25 bp, Homo sapien
ctaaattctaagagtcttattttgc

SEQ ID NO: 5039379 - DNA, 25 bp, Homo sapien
gcttggtgatcgggcatcttgcatt

SEQ ID NO: 5039380 - DNA, 25 bp, Homo sapien
ttgcttggtgatcgggcatcttgca

SEQ ID NO: 5039381 - DNA, 25 bp, Homo sapien
ttttgcttggtgatcgggcatcttg

SEQ ID NO: 5039382 - DNA, 25 bp, Homo sapien
ctttctaagtttctggagcagaatg

SEQ ID NO: 5039383 - DNA, 25 bp, Homo sapien
tcattctccctttcctgaaactgtg

SEQ ID NO: 5039384 - DNA, 25 bp, Homo sapien
ggctgcttgctgtctcttcccaggg

SEQ ID NO: 5039385 - DNA, 25 bp, Homo sapien
agaggctgcttgctgtctcttccca

SEQ ID NO: 5039386 - DNA, 25 bp, Homo sapien
agagaggctgcttgctgtctcttcc

SEQ ID NO: 5039387 - DNA, 25 bp, Homo sapien
ctcttggctccctgctgccagagag

SEQ ID NO: 5039388 - DNA, 25 bp, Homo sapien
cgcatttccgtataaattccgctgt

SEQ ID NO: 5039389 - DNA, 25 bp, Homo sapien
ggtttctgtagtccattaacgtcgc

SEQ ID NO: 5039390 - DNA, 25 bp, Homo sapien
gtagtccattaacgtcgcatttccg

SEQ ID NO: 5039391 - DNA, 25 bp, Homo sapien
taacgtcgcatttccgtataaattc

SEQ ID NO: 5039392 - DNA, 25 bp, Homo sapien
gagtcatcaggttgactctcagagc

SEQ ID NO: 5039393 - DNA, 25 bp, Homo sapien
agtgttccagcgtgggggtccaaca

SEQ ID NO: 5039394 - DNA, 25 bp, Homo sapien
cgtgggggtccaacatgcatcatgt

SEQ ID NO: 5039395 - DNA, 25 bp, Homo sapien
gatgtgttgagctgatagcagaact

SEQ ID NO: 5039396 - DNA, 25 bp, Homo sapien
ctgatggcttctaaagggaaagcca

SEQ ID NO: 5039397 - DNA, 25 bp, Homo sapien
cttctaaagggaaagccagagttat

SEQ ID NO: 5039398 - DNA, 25 bp, Homo sapien
tctctgttgattgttggctgatggc

SEQ ID NO: 5039399 - DNA, 25 bp, Homo sapien
cttgactagtacagacagcccatct

SEQ ID NO: 5039400 - DNA, 25 bp, Homo sapien
cttatgattgcttaatcctcttaga

SEQ ID NO: 5039401 - DNA, 25 bp, Homo sapien
cagtttagggaactcagaactccca

SEQ ID NO: 5039402 - DNA, 25 bp, Homo sapien
tagaacccagtttagggaactcaga

SEQ ID NO: 5039403 - DNA, 25 bp, Homo sapien
gattgcttaatcctcttagaaccca

SEQ ID NO: 5039404 - DNA, 25 bp, Homo sapien
gtttgcactagctttgttctcttgc

SEQ ID NO: 5039405 - DNA, 25 bp, Homo sapien
tctcgtcttctttgtttgcactagc

SEQ ID NO: 5039406 - DNA, 25 bp, Homo sapien
cactggctaagtggaaactcacatt

SEQ ID NO: 5039407 - DNA, 25 bp, Homo sapien
ttgctgagccgctaactcactggct

SEQ ID NO: 5039408 - DNA, 25 bp, Homo sapien
gcatgactggcattgtaatttgttt

SEQ ID NO: 5039409 - DNA, 25 bp, Homo sapien
catgactggcattgtaatttgtttg

SEQ ID NO: 5039410 - DNA, 25 bp, Homo sapien
tgaagctctggtgggcagcacctgt

SEQ ID NO: 5039411 - DNA, 25 bp, Homo sapien
gccttctctggcatttcaaacttgt

SEQ ID NO: 5039412 - DNA, 25 bp, Homo sapien
tgctgccttctctggcatttcaaac

SEQ ID NO: 5039413 - DNA, 25 bp, Homo sapien
caaacttgttctggcacaggtagca

SEQ ID NO: 5039414 - DNA, 25 bp, Homo sapien
ccagcttgatggtctttttcaggag

SEQ ID NO: 5039415 - DNA, 25 bp, Homo sapien
tgaagatttcctctagatagccgga

SEQ ID NO: 5039416 - DNA, 25 bp, Homo sapien
gagatttttcacgttaccagcttga

SEQ ID NO: 5039417 - DNA, 25 bp, Homo sapien
gacactgagcactcccaaggtgagg

SEQ ID NO: 5039418 - DNA, 25 bp, Homo sapien
gccatttcagaactgtgtgtcagcc

SEQ ID NO: 5039419 - DNA, 25 bp, Homo sapien
tcagaactgtgtgtcagcccacatt

SEQ ID NO: 5039420 - DNA, 25 bp, Homo sapien
tgtgtgtcagcccacattcagctgc

SEQ ID NO: 5039421 - DNA, 25 bp, Homo sapien
gaactgtgtgtcagcccacattcag

SEQ ID NO: 5039422 - DNA, 25 bp, Homo sapien
ggtattgagacttttctgatggccg

SEQ ID NO: 5039423 - DNA, 25 bp, Homo sapien
ctgaaaagagagaggtattgagact

SEQ ID NO: 5039424 - DNA, 25 bp, Homo sapien
gacttttctgatggccgctctaaca

SEQ ID NO: 5039425 - DNA, 25 bp, Homo sapien
gagacttttctgatggccgctctaa

SEQ ID NO: 5039426 - DNA, 25 bp, Homo sapien
taatcagccaaacggattttactgg

SEQ ID NO: 5039427 - DNA, 25 bp, Homo sapien
ttaatcagccaaacggattttactg

SEQ ID NO: 5039428 - DNA, 25 bp, Homo sapien
atcagccaaacggattttactggag

SEQ ID NO: 5039429 - DNA, 25 bp, Homo sapien
tcagccaaacggattttactggagc

SEQ ID NO: 5039430 - DNA, 25 bp, Homo sapien
tgatcccatacccttcacaaagcct

SEQ ID NO: 5039431 - DNA, 25 bp, Homo sapien
gatcccatacccttcacaaagcctt

SEQ ID NO: 5039432 - DNA, 25 bp, Homo sapien
gctgttcccatcatgctgtttatat

SEQ ID NO: 5039433 - DNA, 25 bp, Homo sapien
tcccatcatgctgtttatattctag

SEQ ID NO: 5039434 - DNA, 25 bp, Homo sapien
agactattggagcttgtagagcctc

SEQ ID NO: 5039435 - DNA, 25 bp, Homo sapien
tagcctctaagactattggagcttg

SEQ ID NO: 5039436 - DNA, 25 bp, Homo sapien
gcctcgggatgttgacggcatctgc

SEQ ID NO: 5039437 - DNA, 25 bp, Homo sapien
gcttgtagagcctcgggatgttgac

SEQ ID NO: 5039438 - DNA, 25 bp, Homo sapien
tttgattctcctaaagttccgtagc

SEQ ID NO: 5039439 - DNA, 25 bp, Homo sapien
tagcagggcaagtaaagaactgctt

SEQ ID NO: 5039440 - DNA, 25 bp, Homo sapien
tccgtagcagggcaagtaaagaact

SEQ ID NO: 5039441 - DNA, 25 bp, Homo sapien
tgttccagctgctccgtcagtctca

SEQ ID NO: 5039442 - DNA, 25 bp, Homo sapien
tcccttctactaagaaggatcccag

SEQ ID NO: 5039443 - DNA, 25 bp, Homo sapien
gctcatccaccaggttactatccct

SEQ ID NO: 5039444 - DNA, 25 bp, Homo sapien
tctactaagaaggatcccagggaag

SEQ ID NO: 5039445 - DNA, 25 bp, Homo sapien
ccaggttactatcccttctactaag

SEQ ID NO: 5039446 - DNA, 25 bp, Homo sapien
aatattttcagaagggttatagcac

SEQ ID NO: 5039447 - DNA, 25 bp, Homo sapien
gatacacagataagatatggattgg

SEQ ID NO: 5039448 - DNA, 25 bp, Homo sapien
tatagcacttctatcagtcattctg

SEQ ID NO: 5039449 - DNA, 25 bp, Homo sapien
gacaccggatttgatggcctctgcc

SEQ ID NO: 5039450 - DNA, 25 bp, Homo sapien
catactgtgttaccgtatctgctcc

SEQ ID NO: 5039451 - DNA, 25 bp, Homo sapien
catttcttatacttgaatctccata

SEQ ID NO: 5039452 - DNA, 25 bp, Homo sapien
gggcctggctgtcatactgtgttac

SEQ ID NO: 5039453 - DNA, 25 bp, Homo sapien
ttatacttgaatctccataagaccc

SEQ ID NO: 5039454 - DNA, 25 bp, Homo sapien
ttagcagctacacctgagatccctg

SEQ ID NO: 5039455 - DNA, 25 bp, Homo sapien
gacaactggttggtccttagcagct

SEQ ID NO: 5039456 - DNA, 25 bp, Homo sapien
cacggttcgctgaagacaactggtt

SEQ ID NO: 5039457 - DNA, 25 bp, Homo sapien
tcatcacgagggcacggttcgctga

SEQ ID NO: 5039458 - DNA, 25 bp, Homo sapien
tcccaagcctctttctcttttactg

SEQ ID NO: 5039459 - DNA, 25 bp, Homo sapien
ctctttctcttttactgcttcttcc

SEQ ID NO: 5039460 - DNA, 25 bp, Homo sapien
ccaagcctctttctcttttactgct

SEQ ID NO: 5039461 - DNA, 25 bp, Homo sapien
ctttctcttttactgcttcttccat

SEQ ID NO: 5039462 - DNA, 25 bp, Homo sapien
tcaatggaatggtgatgaataaaag

SEQ ID NO: 5039463 - DNA, 25 bp, Homo sapien
cactctcccattttaggctcttctt

SEQ ID NO: 5039464 - DNA, 25 bp, Homo sapien
taaaagaaattcatgttctgctgcc

SEQ ID NO: 5039465 - DNA, 25 bp, Homo sapien
acacactgtccctcttgaatataat

SEQ ID NO: 5039466 - DNA, 25 bp, Homo sapien
acacttccgatctctctctatatca

SEQ ID NO: 5039467 - DNA, 25 bp, Homo sapien
tctctctatatcagtggagagggct

SEQ ID NO: 5039468 - DNA, 25 bp, Homo sapien
gcttgaggagtgagcgtaaggtccc

SEQ ID NO: 5039469 - DNA, 25 bp, Homo sapien
gttggactgtgctgcaaggtggcat

SEQ ID NO: 5039470 - DNA, 25 bp, Homo sapien
ggaggtcacagagctcccactgcat

SEQ ID NO: 5039471 - DNA, 25 bp, Homo sapien
tctttcaccagggaggtcacagagc

SEQ ID NO: 5039472 - DNA, 25 bp, Homo sapien
acagagctcccactgcattccacca

SEQ ID NO: 5039473 - DNA, 25 bp, Homo sapien
ttatatagcccactgtctttcacca

SEQ ID NO: 5039474 - DNA, 25 bp, Homo sapien
ccatcccgaaggttggagaaagttg

SEQ ID NO: 5039475 - DNA, 25 bp, Homo sapien
ccaagagggaattggaaactctaag

SEQ ID NO: 5039476 - DNA, 25 bp, Homo sapien
ctaagcgaggcatcagaaacatttt

SEQ ID NO: 5039477 - DNA, 25 bp, Homo sapien
aagccatgtagctcctaagagtttg

SEQ ID NO: 5039478 - DNA, 25 bp, Homo sapien
tcttagagaacctactatagacaga

SEQ ID NO: 5039479 - DNA, 25 bp, Homo sapien
cttcttagagaacctactatagaca

SEQ ID NO: 5039480 - DNA, 25 bp, Homo sapien
gagaacctactatagacagatacaa

SEQ ID NO: 5039481 - DNA, 25 bp, Homo sapien
tagagaacctactatagacagatac

SEQ ID NO: 5039482 - DNA, 25 bp, Homo sapien
aatatttccatggttaagtaggtca

SEQ ID NO: 5039483 - DNA, 25 bp, Homo sapien
gcatattaccagcaaagttaactcg

SEQ ID NO: 5039484 - DNA, 25 bp, Homo sapien
catccctctgattacggcaagaagg

SEQ ID NO: 5039485 - DNA, 25 bp, Homo sapien
gcaaagttaactcgaatgaagccaa

SEQ ID NO: 5039486 - DNA, 25 bp, Homo sapien
agggatgctgataaagagcaggcat

SEQ ID NO: 5039487 - DNA, 25 bp, Homo sapien
gaattaagttgtgacgcagatgtgg

SEQ ID NO: 5039488 - DNA, 25 bp, Homo sapien
ttgtgacgcagatgtggcaaactca

SEQ ID NO: 5039489 - DNA, 25 bp, Homo sapien
taagttgtgacgcagatgtggcaaa

SEQ ID NO: 5039490 - DNA, 25 bp, Homo sapien
acgcagatgtggcaaactcaaaagt

SEQ ID NO: 5039491 - DNA, 25 bp, Homo sapien
agatggaggaagagggcacaatcta

SEQ ID NO: 5039492 - DNA, 25 bp, Homo sapien
tggaggaagagggcacaatctaagg

SEQ ID NO: 5039493 - DNA, 25 bp, Homo sapien
gaggaagagggcacaatctaaggca

SEQ ID NO: 5039494 - DNA, 25 bp, Homo sapien
aggaagagggcacaatctaaggcac

SEQ ID NO: 5039495 - DNA, 25 bp, Homo sapien
gttccaacattgagtcaccttcatg

SEQ ID NO: 5039496 - DNA, 25 bp, Homo sapien
ctgtaagcgtagatttcctctacgc

SEQ ID NO: 5039497 - DNA, 25 bp, Homo sapien
taagcgtagatttcctctacgctca

SEQ ID NO: 5039498 - DNA, 25 bp, Homo sapien
cctctacgctcaagttccaacattg

SEQ ID NO: 5039499 - DNA, 25 bp, Homo sapien
aaacagcctgctacatattggatgc

SEQ ID NO: 5039500 - DNA, 25 bp, Homo sapien
aattctttgtcataaggccgtgagc

SEQ ID NO: 5039501 - DNA, 25 bp, Homo sapien
tggccgcaagcttttattcagaaac

SEQ ID NO: 5039502 - DNA, 25 bp, Homo sapien
tgttttctcgcatcagatcagtggt

SEQ ID NO: 5039503 - DNA, 25 bp, Homo sapien
ctaattagctgcaatgttgagggtt

SEQ ID NO: 5039504 - DNA, 25 bp, Homo sapien
gaggcagtgctaccatggagttaag

SEQ ID NO: 5039505 - DNA, 25 bp, Homo sapien
ttgagggttacccttagaggcagtg

SEQ ID NO: 5039506 - DNA, 25 bp, Homo sapien
gcttgcactgggctcttactagcgt

SEQ ID NO: 5039507 - DNA, 25 bp, Homo sapien
gttctccagcttattactgtagaag

SEQ ID NO: 5039508 - DNA, 25 bp, Homo sapien
tctccagcttattactgtagaagct

SEQ ID NO: 5039509 - DNA, 25 bp, Homo sapien
ctggtagggtccggagaacaatttg

SEQ ID NO: 5039510 - DNA, 25 bp, Homo sapien
ccagcttattactgtagaagctaaa

SEQ ID NO: 5039511 - DNA, 25 bp, Homo sapien
ttattcatcccaaattcgaagttgc

SEQ ID NO: 5039512 - DNA, 25 bp, Homo sapien
tcatcccaaattcgaagttgccaca

SEQ ID NO: 5039513 - DNA, 25 bp, Homo sapien
ccaaattcgaagttgccacagtaat

SEQ ID NO: 5039514 - DNA, 25 bp, Homo sapien
tcccaaattcgaagttgccacagta

SEQ ID NO: 5039515 - DNA, 25 bp, Homo sapien
ttgctcccgtcctcccaggcattaa

SEQ ID NO: 5039516 - DNA, 25 bp, Homo sapien
gactatgctcttggtatctcctaac

SEQ ID NO: 5039517 - DNA, 25 bp, Homo sapien
ttaaagactatgctcttggtatctc

SEQ ID NO: 5039518 - DNA, 25 bp, Homo sapien
ccgtcctcccaggcattaaagacta

SEQ ID NO: 5039519 - DNA, 25 bp, Homo sapien
tggctttatcatggtcctcatctga

SEQ ID NO: 5039520 - DNA, 25 bp, Homo sapien
gcagacatcccactaagtgtgagtt

SEQ ID NO: 5039521 - DNA, 25 bp, Homo sapien
tgagtttcttggtgtagacatcaga

SEQ ID NO: 5039522 - DNA, 25 bp, Homo sapien
agaaaacttacaactggctttatca

SEQ ID NO: 5039523 - DNA, 25 bp, Homo sapien
ccagatggacatgagaacagcccaa

SEQ ID NO: 5039524 - DNA, 25 bp, Homo sapien
agacaagaatcatccgagaatccag

SEQ ID NO: 5039525 - DNA, 25 bp, Homo sapien
tcagatttgcaccatagtatttcac

SEQ ID NO: 5039526 - DNA, 25 bp, Homo sapien
ctgtcagtataaagaaatgcaaatg

SEQ ID NO: 5039527 - DNA, 25 bp, Homo sapien
ttgccacacagagagtagagtattt

SEQ ID NO: 5039528 - DNA, 25 bp, Homo sapien
cacagagagtagagtatttgggctg

SEQ ID NO: 5039529 - DNA, 25 bp, Homo sapien
cacacagagagtagagtatttgggc

SEQ ID NO: 5039530 - DNA, 25 bp, Homo sapien
gccacacagagagtagagtatttgg

SEQ ID NO: 5039531 - DNA, 25 bp, Homo sapien
actttcagcaaatagacactgggag

SEQ ID NO: 5039532 - DNA, 25 bp, Homo sapien
tctcagcactgttcatgcatacttt

SEQ ID NO: 5039533 - DNA, 25 bp, Homo sapien
tcaaggcccgtgtcgctgtttttat

SEQ ID NO: 5039534 - DNA, 25 bp, Homo sapien
gctgcatttctagtaacttcatttc

SEQ ID NO: 5039535 - DNA, 25 bp, Homo sapien
cacctccctggaaaggcattcggaa

SEQ ID NO: 5039536 - DNA, 25 bp, Homo sapien
tcagggatacaattcagctcccagg

SEQ ID NO: 5039537 - DNA, 25 bp, Homo sapien
tcccagggcctgttggaacaagcgt

SEQ ID NO: 5039538 - DNA, 25 bp, Homo sapien
gaagctaggccagtttcagggatac

SEQ ID NO: 5039539 - DNA, 25 bp, Homo sapien
tcttgttacccggtggaaagcagat

SEQ ID NO: 5039540 - DNA, 25 bp, Homo sapien
tacccggtggaaagcagatcgcaat

SEQ ID NO: 5039541 - DNA, 25 bp, Homo sapien
cggtggaaagcagatcgcaatggat

SEQ ID NO: 5039542 - DNA, 25 bp, Homo sapien
aatggatacttcctgcagtcagtca

SEQ ID NO: 5039543 - DNA, 25 bp, Homo sapien
tggacagaggaatacaagtgcataa

SEQ ID NO: 5039544 - DNA, 25 bp, Homo sapien
tcctggtatgaagcaagggaactgg

SEQ ID NO: 5039545 - DNA, 25 bp, Homo sapien
ggtgaggtcctggtatgaagcaagg

SEQ ID NO: 5039546 - DNA, 25 bp, Homo sapien
gagatggacagaggaatacaagtgc

SEQ ID NO: 5039547 - DNA, 25 bp, Homo sapien
ggcatggatacaccctcaattttat

SEQ ID NO: 5039548 - DNA, 25 bp, Homo sapien
tatattggcatggatacaccctcaa

SEQ ID NO: 5039549 - DNA, 25 bp, Homo sapien
ttggtatattggcatggatacaccc

SEQ ID NO: 5039550 - DNA, 25 bp, Homo sapien
tattggcatggatacaccctcaatt

SEQ ID NO: 5039551 - DNA, 25 bp, Homo sapien
tgccttgcagtctaattcatgtgaa

SEQ ID NO: 5039552 - DNA, 25 bp, Homo sapien
tgaaggtcacacgttttgcataaag

SEQ ID NO: 5039553 - DNA, 25 bp, Homo sapien
cgatgacaatgcaaatcagagccag

SEQ ID NO: 5039554 - DNA, 25 bp, Homo sapien
cacgttttgcataaagtgccttgca

SEQ ID NO: 5039555 - DNA, 25 bp, Homo sapien
acaagaggtcaagttccacagctcc

SEQ ID NO: 5039556 - DNA, 25 bp, Homo sapien
caggataacaagaggtcaagttcca

SEQ ID NO: 5039557 - DNA, 25 bp, Homo sapien
ctttgggtggtgaacaggataacaa

SEQ ID NO: 5039558 - DNA, 25 bp, Homo sapien
tggtgaacaggataacaagaggtca

SEQ ID NO: 5039559 - DNA, 25 bp, Homo sapien
tcagctgctctgtaatgcaagtcga

SEQ ID NO: 5039560 - DNA, 25 bp, Homo sapien
aaggccatgcccagacttagcactc

SEQ ID NO: 5039561 - DNA, 25 bp, Homo sapien
aatctacaagggcttcacggtcttc

SEQ ID NO: 5039562 - DNA, 25 bp, Homo sapien
aatgcaagtcgacaggaaaatctac

SEQ ID NO: 5039563 - DNA, 25 bp, Homo sapien
cacaggtattgcagttaatgagcca

SEQ ID NO: 5039564 - DNA, 25 bp, Homo sapien
cgtgccccgggttggaaaatgtgat

SEQ ID NO: 5039565 - DNA, 25 bp, Homo sapien
gggaactgcaatcggcagctctgca

SEQ ID NO: 5039566 - DNA, 25 bp, Homo sapien
ggtttgcaatctgtgcacaggtatt

SEQ ID NO: 5039567 - DNA, 25 bp, Homo sapien
tggggacctccaagggacagacagt

SEQ ID NO: 5039568 - DNA, 25 bp, Homo sapien
cattagtgctgaagcccaattgccc

SEQ ID NO: 5039569 - DNA, 25 bp, Homo sapien
ggtgccagcagatgtctccatgatg

SEQ ID NO: 5039570 - DNA, 25 bp, Homo sapien
tccatgatgtgatttaagggcacca

SEQ ID NO: 5039571 - DNA, 25 bp, Homo sapien
cccacttataaataacacagaatgt

SEQ ID NO: 5039572 - DNA, 25 bp, Homo sapien
aacacagaatgttttactttggcag

SEQ ID NO: 5039573 - DNA, 25 bp, Homo sapien
cagaatgttttactttggcagtaat

SEQ ID NO: 5039574 - DNA, 25 bp, Homo sapien
gacaacacccacttataaataacac

SEQ ID NO: 5039575 - DNA, 25 bp, Homo sapien
ccatgagacatggttgagctccctg

SEQ ID NO: 5039576 - DNA, 25 bp, Homo sapien
taagacgtctgcttagagcacaagg

SEQ ID NO: 5039577 - DNA, 25 bp, Homo sapien
gacaatcagccagcagactgcaggt

SEQ ID NO: 5039578 - DNA, 25 bp, Homo sapien
tgtctatgcgaacaatggccttggg

SEQ ID NO: 5039579 - DNA, 25 bp, Homo sapien
catatctccattatgaaacaccttc

SEQ ID NO: 5039580 - DNA, 25 bp, Homo sapien
tcccatatctccattatgaaacacc

SEQ ID NO: 5039581 - DNA, 25 bp, Homo sapien
tatctccattatgaaacaccttcat

SEQ ID NO: 5039582 - DNA, 25 bp, Homo sapien
ccatcccatatctccattatgaaac

SEQ ID NO: 5039583 - DNA, 25 bp, Homo sapien
tgttccttatgctccagtgtaagtg

SEQ ID NO: 5039584 - DNA, 25 bp, Homo sapien
ccttatgctccagtgtaagtgactt

SEQ ID NO: 5039585 - DNA, 25 bp, Homo sapien
ttccttatgctccagtgtaagtgac

SEQ ID NO: 5039586 - DNA, 25 bp, Homo sapien
ttatgctccagtgtaagtgacttcc

SEQ ID NO: 5039587 - DNA, 25 bp, Homo sapien
tgatgatcagggcatgccaaaattg

SEQ ID NO: 5039588 - DNA, 25 bp, Homo sapien
cgcaagctccttaaggctttgatga

SEQ ID NO: 5039589 - DNA, 25 bp, Homo sapien
tgatcagggcatgccaaaattgtta

SEQ ID NO: 5039590 - DNA, 25 bp, Homo sapien
taagcaattatattcgcaagctcct

SEQ ID NO: 5039591 - DNA, 25 bp, Homo sapien
tctccctaaatcctactgtttgtac

SEQ ID NO: 5039592 - DNA, 25 bp, Homo sapien
aagctctccctaaatcctactgttt

SEQ ID NO: 5039593 - DNA, 25 bp, Homo sapien
ccctaaatcctactgtttgtaccat

SEQ ID NO: 5039594 - DNA, 25 bp, Homo sapien
gctctccctaaatcctactgtttgt

SEQ ID NO: 5039595 - DNA, 25 bp, Homo sapien
gagagtccccaaaggaattctctct

SEQ ID NO: 5039596 - DNA, 25 bp, Homo sapien
aaatatctctctgcattacactctg

SEQ ID NO: 5039597 - DNA, 25 bp, Homo sapien
ccccttttctcaaggatgtccctgg

SEQ ID NO: 5039598 - DNA, 25 bp, Homo sapien
ctttagaggccggttcgtgatttga

SEQ ID NO: 5039599 - DNA, 25 bp, Homo sapien
cacatggtcccctgacttggatcat

SEQ ID NO: 5039600 - DNA, 25 bp, Homo sapien
tattgagtgggaaatatccctgggc

SEQ ID NO: 5039601 - DNA, 25 bp, Homo sapien
ggaaacaggtgcacaagtcttgatg

SEQ ID NO: 5039602 - DNA, 25 bp, Homo sapien
tatgtacttggatcttttaggccag

SEQ ID NO: 5039603 - DNA, 25 bp, Homo sapien
catagtcttgagttggaccaataga

SEQ ID NO: 5039604 - DNA, 25 bp, Homo sapien
tctgcataggcagcttgctccacgc

SEQ ID NO: 5039605 - DNA, 25 bp, Homo sapien
gagggagtggctccgaaccacacat

SEQ ID NO: 5039606 - DNA, 25 bp, Homo sapien
gaccaatagaatgtccagtgaagtt

SEQ ID NO: 5039607 - DNA, 25 bp, Homo sapien
tggaagccccgcaaggcctgaagga

SEQ ID NO: 5039608 - DNA, 25 bp, Homo sapien
gagatccacagttaagtcacactta

SEQ ID NO: 5039609 - DNA, 25 bp, Homo sapien
acctgagcaattaaagagatccaca

SEQ ID NO: 5039610 - DNA, 25 bp, Homo sapien
agatgcatagccaactgaggaacct

SEQ ID NO: 5039611 - DNA, 25 bp, Homo sapien
caaatggtcacgatggatgttctac

SEQ ID NO: 5039612 - DNA, 25 bp, Homo sapien
ggatgttctacttgactcataactc

SEQ ID NO: 5039613 - DNA, 25 bp, Homo sapien
caaataggatgttgctgaagcatcc

SEQ ID NO: 5039614 - DNA, 25 bp, Homo sapien
ttgctgaagcatcccaaatggtcac

SEQ ID NO: 5039615 - DNA, 25 bp, Homo sapien
gatcccagtgttttaaacgcctgcc

SEQ ID NO: 5039616 - DNA, 25 bp, Homo sapien
ctagatcccagtgttttaaacgcct

SEQ ID NO: 5039617 - DNA, 25 bp, Homo sapien
tcccagtgttttaaacgcctgccta

SEQ ID NO: 5039618 - DNA, 25 bp, Homo sapien
ccagtgttttaaacgcctgcctaga

SEQ ID NO: 5039619 - DNA, 25 bp, Homo sapien
atctcttcttgaatcagaactacca

SEQ ID NO: 5039620 - DNA, 25 bp, Homo sapien
gatctcttcttgaatcagaactacc

SEQ ID NO: 5039621 - DNA, 25 bp, Homo sapien
aaagcaggtaccttccctctgtgtt

SEQ ID NO: 5039622 - DNA, 25 bp, Homo sapien
tgaaattcttcttatgtaggcttgc

SEQ ID NO: 5039623 - DNA, 25 bp, Homo sapien
cttatgtaggcttgcataaagcagg

SEQ ID NO: 5039624 - DNA, 25 bp, Homo sapien
tgtaggcttgcataaagcaggtacc

SEQ ID NO: 5039625 - DNA, 25 bp, Homo sapien
tgtcatgggtagctagaatgttctc

SEQ ID NO: 5039626 - DNA, 25 bp, Homo sapien
ccttttttgatgttctccatcttag

SEQ ID NO: 5039627 - DNA, 25 bp, Homo sapien
caggatgctggttgatcctttgccc

SEQ ID NO: 5039628 - DNA, 25 bp, Homo sapien
atccttgaagacaccatgccctaaa

SEQ ID NO: 5039629 - DNA, 25 bp, Homo sapien
aaaatcctctaaatgcaggatgctg

SEQ ID NO: 5039630 - DNA, 25 bp, Homo sapien
tgccttttcaaccactgtttggctt

SEQ ID NO: 5039631 - DNA, 25 bp, Homo sapien
ctgccttttcaaccactgtttggct

SEQ ID NO: 5039632 - DNA, 25 bp, Homo sapien
ccttttcaaccactgtttggcttgt

SEQ ID NO: 5039633 - DNA, 25 bp, Homo sapien
gccttttcaaccactgtttggcttg

SEQ ID NO: 5039634 - DNA, 25 bp, Homo sapien
gtaaatcagcctaaccagcacgcat

SEQ ID NO: 5039635 - DNA, 25 bp, Homo sapien
gacagatgcctatttgctagatcaa

SEQ ID NO: 5039636 - DNA, 25 bp, Homo sapien
tgccaatagtgacagacggagtgct

SEQ ID NO: 5039637 - DNA, 25 bp, Homo sapien
aaccatgtcacaggatgccaatagt

SEQ ID NO: 5039638 - DNA, 25 bp, Homo sapien
gaaatgatctgattatctccttaac

SEQ ID NO: 5039639 - DNA, 25 bp, Homo sapien
tctccttaacttcctaaatagctca

SEQ ID NO: 5039640 - DNA, 25 bp, Homo sapien
cttaagggtgtctgacgaaatgatc

SEQ ID NO: 5039641 - DNA, 25 bp, Homo sapien
cttcctaaatagctcaaacttcata

SEQ ID NO: 5039642 - DNA, 25 bp, Homo sapien
tgattagtgatagggatattgggct

SEQ ID NO: 5039643 - DNA, 25 bp, Homo sapien
tctgacagatctgaggtgatattta

SEQ ID NO: 5039644 - DNA, 25 bp, Homo sapien
tacaataactaatagattaatggtc

SEQ ID NO: 5039645 - DNA, 25 bp, Homo sapien
tattagagccccttaacagatgtat

SEQ ID NO: 5039646 - DNA, 25 bp, Homo sapien
gggatgtgatgtgttcaatttcatt

SEQ ID NO: 5039647 - DNA, 25 bp, Homo sapien
ttgtatatgggatgtgatgtgttca

SEQ ID NO: 5039648 - DNA, 25 bp, Homo sapien
tatgggatgtgatgtgttcaatttc

SEQ ID NO: 5039649 - DNA, 25 bp, Homo sapien
tatatgggatgtgatgtgttcaatt

SEQ ID NO: 5039650 - DNA, 25 bp, Homo sapien
tccaaaattcaggtactgatagtta

SEQ ID NO: 5039651 - DNA, 25 bp, Homo sapien
gatagttaacagcagccgatatgat

SEQ ID NO: 5039652 - DNA, 25 bp, Homo sapien
tagcctaaataaatgctatagtttg

SEQ ID NO: 5039653 - DNA, 25 bp, Homo sapien
gtactgatagttaacagcagccgat

SEQ ID NO: 5039654 - DNA, 25 bp, Homo sapien
ttgtagacggtgactgagactggat

SEQ ID NO: 5039655 - DNA, 25 bp, Homo sapien
ttcttgatctgaatttcttggcagt

SEQ ID NO: 5039656 - DNA, 25 bp, Homo sapien
cagtgatgggctcggtgttgggctt

SEQ ID NO: 5039657 - DNA, 25 bp, Homo sapien
tttttgaccggtacagctggtgacc

SEQ ID NO: 5039658 - DNA, 25 bp, Homo sapien
gactgtgggcttggggaagcagcct

SEQ ID NO: 5039659 - DNA, 25 bp, Homo sapien
tgtgggcttggggaagcagcctttt

SEQ ID NO: 5039660 - DNA, 25 bp, Homo sapien
actgtgggcttggggaagcagcctt

SEQ ID NO: 5039661 - DNA, 25 bp, Homo sapien
agactgtgggcttggggaagcagcc

SEQ ID NO: 5039662 - DNA, 25 bp, Homo sapien
tgccatttgtttggatgcggtgatc

SEQ ID NO: 5039663 - DNA, 25 bp, Homo sapien
gggcgaatgccatttgtttggatgc

SEQ ID NO: 5039664 - DNA, 25 bp, Homo sapien
ccatttgtttggatgcggtgatcgg

SEQ ID NO: 5039665 - DNA, 25 bp, Homo sapien
cgaatgccatttgtttggatgcggt

SEQ ID NO: 5039666 - DNA, 25 bp, Homo sapien
ctttggaaggtggagaatgggagac

SEQ ID NO: 5039667 - DNA, 25 bp, Homo sapien
atggtgatgctcttcgtttaggagg

SEQ ID NO: 5039668 - DNA, 25 bp, Homo sapien
tgctttcgtggtgatggagaagcac

SEQ ID NO: 5039669 - DNA, 25 bp, Homo sapien
gaaggggaatgtctccgccgcttgc

SEQ ID NO: 5039670 - DNA, 25 bp, Homo sapien
tttttggtgctttcgtggtgatgga

SEQ ID NO: 5039671 - DNA, 25 bp, Homo sapien
ccatgaggggaagtctctttttggt

SEQ ID NO: 5039672 - DNA, 25 bp, Homo sapien
ttcttcacatgggatctcttgggtc

SEQ ID NO: 5039673 - DNA, 25 bp, Homo sapien
catgggatctcttgggtcgttcatc

SEQ ID NO: 5039674 - DNA, 25 bp, Homo sapien
tcttcacatgggatctcttgggtcg

SEQ ID NO: 5039675 - DNA, 25 bp, Homo sapien
tcacatgggatctcttgggtcgttc

SEQ ID NO: 5039676 - DNA, 25 bp, Homo sapien
gctggttttgtcgtctgtattggcg

SEQ ID NO: 5039677 - DNA, 25 bp, Homo sapien
tgctggttttgtcgtctgtattggc

SEQ ID NO: 5039678 - DNA, 25 bp, Homo sapien
tggttttgtcgtctgtattggcgtc

SEQ ID NO: 5039679 - DNA, 25 bp, Homo sapien
ggttttgtcgtctgtattggcgtct

SEQ ID NO: 5039680 - DNA, 25 bp, Homo sapien
tctctgctgaaatgaatcaggattc

SEQ ID NO: 5039681 - DNA, 25 bp, Homo sapien
taagaccactgttttgaactaccac

SEQ ID NO: 5039682 - DNA, 25 bp, Homo sapien
tgtaagcttgcccagaaataagacc

SEQ ID NO: 5039683 - DNA, 25 bp, Homo sapien
ttcctgttgcctgtggagtctctgc

SEQ ID NO: 5039684 - DNA, 25 bp, Homo sapien
tatacctactccacttcctcctcat

SEQ ID NO: 5039685 - DNA, 25 bp, Homo sapien
ttatacctactccacttcctcctca

SEQ ID NO: 5039686 - DNA, 25 bp, Homo sapien
tcttatacctactccacttcctcct

SEQ ID NO: 5039687 - DNA, 25 bp, Homo sapien
ctcttatacctactccacttcctcc

SEQ ID NO: 5039688 - DNA, 25 bp, Homo sapien
catgcccatggacaggagaagcata

SEQ ID NO: 5039689 - DNA, 25 bp, Homo sapien
gccatgcccatggacaggagaagca

SEQ ID NO: 5039690 - DNA, 25 bp, Homo sapien
ccatgcccatggacaggagaagcat

SEQ ID NO: 5039691 - DNA, 25 bp, Homo sapien
accacgggaagcgacatccactgtt

SEQ ID NO: 5039692 - DNA, 25 bp, Homo sapien
tcatcaaccagcaggtcagtgtggg

SEQ ID NO: 5039693 - DNA, 25 bp, Homo sapien
gcagtcaaaagaatctttgctctca

SEQ ID NO: 5039694 - DNA, 25 bp, Homo sapien
tgaagagcccgaacaaccacgggaa

SEQ ID NO: 5039695 - DNA, 25 bp, Homo sapien
gtcaacatcacaatacgatatttat

SEQ ID NO: 5039696 - DNA, 25 bp, Homo sapien
ttgagaaatttctgacatgccagaa

SEQ ID NO: 5039697 - DNA, 25 bp, Homo sapien
tattcccaattattttacggcaaca

SEQ ID NO: 5039698 - DNA, 25 bp, Homo sapien
ttacggcaacaactgaaatacaatg

SEQ ID NO: 5039699 - DNA, 25 bp, Homo sapien
cacattcaggacatcgcatgccttt

SEQ ID NO: 5039700 - DNA, 25 bp, Homo sapien
aggacatcgcatgcctttagaactc

SEQ ID NO: 5039701 - DNA, 25 bp, Homo sapien
tacctgctgtgtccattggtcaagc

SEQ ID NO: 5039702 - DNA, 25 bp, Homo sapien
ttcaaatacctgctgtgtccattgg

SEQ ID NO: 5039703 - DNA, 25 bp, Homo sapien
gcacccagcctctctctttataatt

SEQ ID NO: 5039704 - DNA, 25 bp, Homo sapien
caggttcaagcgaacctcttgcttc

SEQ ID NO: 5039705 - DNA, 25 bp, Homo sapien
ccgcacccagcctctctctttataa

SEQ ID NO: 5039706 - DNA, 25 bp, Homo sapien
cccagcctctctctttataattttc

SEQ ID NO: 5039707 - DNA, 25 bp, Homo sapien
tactgttcacctgcatcaaactcct

SEQ ID NO: 5039708 - DNA, 25 bp, Homo sapien
ctactgttcacctgcatcaaactcc

SEQ ID NO: 5039709 - DNA, 25 bp, Homo sapien
caaactcctgaattctgtcatgcaa

SEQ ID NO: 5039710 - DNA, 25 bp, Homo sapien
catcaaactcctgaattctgtcatg

SEQ ID NO: 5039711 - DNA, 25 bp, Homo sapien
ctggaacagtaagagggaaaaacat

SEQ ID NO: 5039712 - DNA, 25 bp, Homo sapien
tggaacagtaagagggaaaaacatg

SEQ ID NO: 5039713 - DNA, 25 bp, Homo sapien
ctgcacctggctagccactcactgt

SEQ ID NO: 5039714 - DNA, 25 bp, Homo sapien
actgttttcatgttaggctaagtaa

SEQ ID NO: 5039715 - DNA, 25 bp, Homo sapien
gcacctggctagccactcactgttt

SEQ ID NO: 5039716 - DNA, 25 bp, Homo sapien
tgttttcatgttaggctaagtaagc

SEQ ID NO: 5039717 - DNA, 25 bp, Homo sapien
gaagaacagagattagtagtagcac

SEQ ID NO: 5039718 - DNA, 25 bp, Homo sapien
aattccagtatccagacaattggca

SEQ ID NO: 5039719 - DNA, 25 bp, Homo sapien
gggaggcccaataaccagatgctgg

SEQ ID NO: 5039720 - DNA, 25 bp, Homo sapien
ttgcaaagacttatgtaggatcact

SEQ ID NO: 5039721 - DNA, 25 bp, Homo sapien
gaaatcacaggtctacatttcgtcc

SEQ ID NO: 5039722 - DNA, 25 bp, Homo sapien
gataggattccccatttgggctgca

SEQ ID NO: 5039723 - DNA, 25 bp, Homo sapien
gttgataggattccccatttgggct

SEQ ID NO: 5039724 - DNA, 25 bp, Homo sapien
tggagttgataggattccccatttg

SEQ ID NO: 5039725 - DNA, 25 bp, Homo sapien
aggagccagaaacatgctttagttt

SEQ ID NO: 5039726 - DNA, 25 bp, Homo sapien
caaatccagacgcagagtggaggct

SEQ ID NO: 5039727 - DNA, 25 bp, Homo sapien
tatcgttatatgtccaacacagagc

SEQ ID NO: 5039728 - DNA, 25 bp, Homo sapien
ccagtcggtccaaagataagccagt

SEQ ID NO: 5039729 - DNA, 25 bp, Homo sapien
tctagttaaggagcacacagtctgg

SEQ ID NO: 5039730 - DNA, 25 bp, Homo sapien
caatgttcaagatttggcatgagtc

SEQ ID NO: 5039731 - DNA, 25 bp, Homo sapien
tctagccctgtgtctcgggcaagtt

SEQ ID NO: 5039732 - DNA, 25 bp, Homo sapien
taaaatctcacatgcgcccacatct

SEQ ID NO: 5039733 - DNA, 25 bp, Homo sapien
tccacaatagttcctgggcctacag

SEQ ID NO: 5039734 - DNA, 25 bp, Homo sapien
gagatgttagttttgcatcccttta

SEQ ID NO: 5039735 - DNA, 25 bp, Homo sapien
aaactcaaccaattccccaggtctg

SEQ ID NO: 5039736 - DNA, 25 bp, Homo sapien
ccttgaacattcagcaagttctcta

SEQ ID NO: 5039737 - DNA, 25 bp, Homo sapien
ctttattaagactaatccagagatg

SEQ ID NO: 5039738 - DNA, 25 bp, Homo sapien
ggatgtcactgggtaaattatcttt

SEQ ID NO: 5039739 - DNA, 25 bp, Homo sapien
cccagatgtcctgttggatgtcact

SEQ ID NO: 5039740 - DNA, 25 bp, Homo sapien
aagaaaatgagaacgcctgcccaga

SEQ ID NO: 5039741 - DNA, 25 bp, Homo sapien
cactgagccgtgacctaaatttagc

SEQ ID NO: 5039742 - DNA, 25 bp, Homo sapien
aacacgatgaagttcctgtatcaat

SEQ ID NO: 5039743 - DNA, 25 bp, Homo sapien
cgatgaagttcctgtatcaattcga

SEQ ID NO: 5039744 - DNA, 25 bp, Homo sapien
ctgagaacacgatgaagttcctgta

SEQ ID NO: 5039745 - DNA, 25 bp, Homo sapien
gaagttcctgtatcaattcgattca

SEQ ID NO: 5039746 - DNA, 25 bp, Homo sapien
tatgaaagctctcatcccaggataa

SEQ ID NO: 5039747 - DNA, 25 bp, Homo sapien
gtgtctccaaaacctcagccagcat

SEQ ID NO: 5039748 - DNA, 25 bp, Homo sapien
aacagttcctgacacacggtaagag

SEQ ID NO: 5039749 - DNA, 25 bp, Homo sapien
tgtccccagggatctaaaaatttca

SEQ ID NO: 5039750 - DNA, 25 bp, Homo sapien
taggccaagtcatgctcatcatcga

SEQ ID NO: 5039751 - DNA, 25 bp, Homo sapien
gaacctcgtcatgtctaggccaagt

SEQ ID NO: 5039752 - DNA, 25 bp, Homo sapien
tgggatgtcacagcctatagtatag

SEQ ID NO: 5039753 - DNA, 25 bp, Homo sapien
tcatcatcgacgtccagtccagtgc

SEQ ID NO: 5039754 - DNA, 25 bp, Homo sapien
tactcttactgggaaggcttctagt

SEQ ID NO: 5039755 - DNA, 25 bp, Homo sapien
ccttatcaatttgaggaagttacct

SEQ ID NO: 5039756 - DNA, 25 bp, Homo sapien
cattggtgagagcatacatctttga

SEQ ID NO: 5039757 - DNA, 25 bp, Homo sapien
attttcattgtgaatgggtgctgga

SEQ ID NO: 5039758 - DNA, 25 bp, Homo sapien
cctgcttctcaggtttcttccactt

SEQ ID NO: 5039759 - DNA, 25 bp, Homo sapien
ggactgtgaacttcatgcctgcttc

SEQ ID NO: 5039760 - DNA, 25 bp, Homo sapien
tgcctgcttctcaggtttcttccac

SEQ ID NO: 5039761 - DNA, 25 bp, Homo sapien
ttccacttcccctttatgtgggaca

SEQ ID NO: 5039762 - DNA, 25 bp, Homo sapien
ttgggcagaaatgaagggtttcaag

SEQ ID NO: 5039763 - DNA, 25 bp, Homo sapien
tgtttggaggtctaatagagtatag

SEQ ID NO: 5039764 - DNA, 25 bp, Homo sapien
agttgggcagaaatgaagggtttca

SEQ ID NO: 5039765 - DNA, 25 bp, Homo sapien
gttgggcagaaatgaagggtttcaa

SEQ ID NO: 5039766 - DNA, 25 bp, Homo sapien
tgtagtgccacattttgctgaccca

SEQ ID NO: 5039767 - DNA, 25 bp, Homo sapien
aattcttctaaagaggcactgtgcc

SEQ ID NO: 5039768 - DNA, 25 bp, Homo sapien
cctggcttgaactgaatgtggatcc

SEQ ID NO: 5039769 - DNA, 25 bp, Homo sapien
gcactgtgccttccaacatgtttta

SEQ ID NO: 5039770 - DNA, 25 bp, Homo sapien
gctttgcttcagaggttgcctcccc

SEQ ID NO: 5039771 - DNA, 25 bp, Homo sapien
agagcctgctttgcttcagaggttg

SEQ ID NO: 5039772 - DNA, 25 bp, Homo sapien
aaatgcaaataggaagagcctgctt

SEQ ID NO: 5039773 - DNA, 25 bp, Homo sapien
cctgctttgcttcagaggttgcctc

SEQ ID NO: 5039774 - DNA, 25 bp, Homo sapien
gacagagacatgtggagtggccacc

SEQ ID NO: 5039775 - DNA, 25 bp, Homo sapien
ctttgtgggaggcttagagtacttc

SEQ ID NO: 5039776 - DNA, 25 bp, Homo sapien
gaactgaatggacagaagctttgtg

SEQ ID NO: 5039777 - DNA, 25 bp, Homo sapien
gagtatcaatatatgaagtccggct

SEQ ID NO: 5039778 - DNA, 25 bp, Homo sapien
tttggacttcccctagacacctgag

SEQ ID NO: 5039779 - DNA, 25 bp, Homo sapien
gaaactcggttcaatgatgcatctg

SEQ ID NO: 5039780 - DNA, 25 bp, Homo sapien
ggtcagtcatggtagctggttcaca

SEQ ID NO: 5039781 - DNA, 25 bp, Homo sapien
aggccaagggccaaagtcttaacag

SEQ ID NO: 5039782 - DNA, 25 bp, Homo sapien
aattatcaccatagtgaacaagcaa

SEQ ID NO: 5039783 - DNA, 25 bp, Homo sapien
gaaattatcaccatagtgaacaagc

SEQ ID NO: 5039784 - DNA, 25 bp, Homo sapien
ttatcaccatagtgaacaagcaacc

SEQ ID NO: 5039785 - DNA, 25 bp, Homo sapien
aaagaaattatcaccatagtgaaca

SEQ ID NO: 5039786 - DNA, 25 bp, Homo sapien
tgtacttgaaatatggatttcacat

SEQ ID NO: 5039787 - DNA, 25 bp, Homo sapien
acttcatcagtaaagttggccttcg

SEQ ID NO: 5039788 - DNA, 25 bp, Homo sapien
gacagtcagaaatatacctacccat

SEQ ID NO: 5039789 - DNA, 25 bp, Homo sapien
actctttgacagtcagaaatatacc

SEQ ID NO: 5039790 - DNA, 25 bp, Homo sapien
gtcccatttctgagaaaccattcca

SEQ ID NO: 5039791 - DNA, 25 bp, Homo sapien
tcagtgtcacactccaggattttaa

SEQ ID NO: 5039792 - DNA, 25 bp, Homo sapien
cacactccaggattttaatgtccca

SEQ ID NO: 5039793 - DNA, 25 bp, Homo sapien
tttccacgtgtcagtgtcacactcc

SEQ ID NO: 5039794 - DNA, 25 bp, Homo sapien
tggacagcaccttgaatgctatcag

SEQ ID NO: 5039795 - DNA, 25 bp, Homo sapien
ccagtgtcttctcctgaactcacat

SEQ ID NO: 5039796 - DNA, 25 bp, Homo sapien
ggaagctagagtgttctcctgttct

SEQ ID NO: 5039797 - DNA, 25 bp, Homo sapien
tctcctgaactcacatcagaagcat

SEQ ID NO: 5039798 - DNA, 25 bp, Homo sapien
catgatgcaccagaaagaataccca

SEQ ID NO: 5039799 - DNA, 25 bp, Homo sapien
ttacatgatgcaccagaaagaatac

SEQ ID NO: 5039800 - DNA, 25 bp, Homo sapien
tacatgatgcaccagaaagaatacc

SEQ ID NO: 5039801 - DNA, 25 bp, Homo sapien
acatgatgcaccagaaagaataccc

SEQ ID NO: 5039802 - DNA, 25 bp, Homo sapien
tcagattcatcaaacccattctgga

SEQ ID NO: 5039803 - DNA, 25 bp, Homo sapien
tgatcactagtttcaccctcacagt

SEQ ID NO: 5039804 - DNA, 25 bp, Homo sapien
tcatcttgtgtcaccagaatcagat

SEQ ID NO: 5039805 - DNA, 25 bp, Homo sapien
cattctggaccactctgatcactag

SEQ ID NO: 5039806 - DNA, 25 bp, Homo sapien
ctttgccctctttgattttctccat

SEQ ID NO: 5039807 - DNA, 25 bp, Homo sapien
gtctgtagcacatagaattccacta

SEQ ID NO: 5039808 - DNA, 25 bp, Homo sapien
gatgggtgtataaggctctggcatt

SEQ ID NO: 5039809 - DNA, 25 bp, Homo sapien
aattccactaatgggtctgctgggc

SEQ ID NO: 5039810 - DNA, 25 bp, Homo sapien
ctttgccagacgaaatgtgatgggt

SEQ ID NO: 5039811 - DNA, 25 bp, Homo sapien
tggcagataagtcaaacctcagaga

SEQ ID NO: 5039812 - DNA, 25 bp, Homo sapien
gctcatcagcaggtattggtgggaa

SEQ ID NO: 5039813 - DNA, 25 bp, Homo sapien
tcttgacttaggtagtggttacaca

SEQ ID NO: 5039814 - DNA, 25 bp, Homo sapien
tcaaggacaggtaaaacaactctgc

SEQ ID NO: 5039815 - DNA, 25 bp, Homo sapien
gacagtaaccagaaacgccctgctt

SEQ ID NO: 5039816 - DNA, 25 bp, Homo sapien
gctaattgttagcagagtgggctcc

SEQ ID NO: 5039817 - DNA, 25 bp, Homo sapien
caaaccaggtgtgttacataaggga

SEQ ID NO: 5039818 - DNA, 25 bp, Homo sapien
gacctgtaaaccctagcagtggcgg

SEQ ID NO: 5039819 - DNA, 25 bp, Homo sapien
ggaccccaactgttaaataggcatg

SEQ ID NO: 5039820 - DNA, 25 bp, Homo sapien
tgttttacgcaggttccaaaggagc

SEQ ID NO: 5039821 - DNA, 25 bp, Homo sapien
gatcaggcatgtccgggctcagatt

SEQ ID NO: 5039822 - DNA, 25 bp, Homo sapien
tgcttagtgcaggagaaaccagtaa

SEQ ID NO: 5039823 - DNA, 25 bp, Homo sapien
caaaatgtggaagaccgtggactgg

SEQ ID NO: 5039824 - DNA, 25 bp, Homo sapien
tttttcagaaagagcgtcagggttg

SEQ ID NO: 5039825 - DNA, 25 bp, Homo sapien
gaaatagttctgatgtccatccggt

SEQ ID NO: 5039826 - DNA, 25 bp, Homo sapien
cagtagctgtgatgctccagatgga

SEQ ID NO: 5039827 - DNA, 25 bp, Homo sapien
tgttgtcagtgaatgctccagatgg

SEQ ID NO: 5039828 - DNA, 25 bp, Homo sapien
gaccaaagttcatgtctcggcacct

SEQ ID NO: 5039829 - DNA, 25 bp, Homo sapien
ttttcgcaatgcttaacacggcagc

SEQ ID NO: 5039830 - DNA, 25 bp, Homo sapien
caggtcagtgcaacttcaaagtcga

SEQ ID NO: 5039831 - DNA, 25 bp, Homo sapien
taattaaacaccagctaagccttct

SEQ ID NO: 5039832 - DNA, 25 bp, Homo sapien
gatcaatggcaaatcactggagata

SEQ ID NO: 5039833 - DNA, 25 bp, Homo sapien
tatctctagatcgtgtgcttgccag

SEQ ID NO: 5039834 - DNA, 25 bp, Homo sapien
gaaaactgggtaacattgaatcaca

SEQ ID NO: 5039835 - DNA, 25 bp, Homo sapien
gatgtcaaggatgtcgatgctctta

SEQ ID NO: 5039836 - DNA, 25 bp, Homo sapien
aatgtgccctcatgttgactcccgg

SEQ ID NO: 5039837 - DNA, 25 bp, Homo sapien
tcttcctctataatgacctcagatg

SEQ ID NO: 5039838 - DNA, 25 bp, Homo sapien
tctgtggcctccagtcttgaagtcc

SEQ ID NO: 5039839 - DNA, 25 bp, Homo sapien
tctctagttggtagtgacatgtgag

SEQ ID NO: 5039840 - DNA, 25 bp, Homo sapien
gacatgtgagagatagcctgagcca

SEQ ID NO: 5039841 - DNA, 25 bp, Homo sapien
gagggccagtggcaataatgcactg

SEQ ID NO: 5039842 - DNA, 25 bp, Homo sapien
ctgagggccagtggcaataatgcac

SEQ ID NO: 5039843 - DNA, 25 bp, Homo sapien
aatgaatagggtgcgggcaaacctc

SEQ ID NO: 5039844 - DNA, 25 bp, Homo sapien
gaaaattgccttcgggattgaaatg

SEQ ID NO: 5039845 - DNA, 25 bp, Homo sapien
aaacctcacctctggattgttatgg

SEQ ID NO: 5039846 - DNA, 25 bp, Homo sapien
ttgctacaagtcaagctattttgcc

SEQ ID NO: 5039847 - DNA, 25 bp, Homo sapien
acaaggctctgattatgaggctgca

SEQ ID NO: 5039848 - DNA, 25 bp, Homo sapien
tcatgttggtaagcctgatgcagtt

SEQ ID NO: 5039849 - DNA, 25 bp, Homo sapien
ctggcacagtcagcaatgactaatc

SEQ ID NO: 5039850 - DNA, 25 bp, Homo sapien
tctctgttgcttcaggatgaggaaa

SEQ ID NO: 5039851 - DNA, 25 bp, Homo sapien
gaactgataccttccatggagtgtg

SEQ ID NO: 5039852 - DNA, 25 bp, Homo sapien
gaggattcctgtggcgtctgcagca

SEQ ID NO: 5039853 - DNA, 25 bp, Homo sapien
cctggttttgtggagagacgactga

SEQ ID NO: 5039854 - DNA, 25 bp, Homo sapien
gaagctttccatgggcgtgaagcag

SEQ ID NO: 5039855 - DNA, 25 bp, Homo sapien
gctagaattagaactacaccccaag

SEQ ID NO: 5039856 - DNA, 25 bp, Homo sapien
tagaactacaccccaagaaaaatgc

SEQ ID NO: 5039857 - DNA, 25 bp, Homo sapien
ctagaattagaactacaccccaaga

SEQ ID NO: 5039858 - DNA, 25 bp, Homo sapien
tagaattagaactacaccccaagaa

SEQ ID NO: 5039859 - DNA, 25 bp, Homo sapien
caatctgttctgaaacaggtccaaa

SEQ ID NO: 5039860 - DNA, 25 bp, Homo sapien
gtaccatgttgggagataggaagaa

SEQ ID NO: 5039861 - DNA, 25 bp, Homo sapien
caagtcgggacttgtatcatcaggg

SEQ ID NO: 5039862 - DNA, 25 bp, Homo sapien
taaggcctctcagtcaacaagtcgg

SEQ ID NO: 5039863 - DNA, 25 bp, Homo sapien
ctgactctccaaccagactctcttc

SEQ ID NO: 5039864 - DNA, 25 bp, Homo sapien
tgactctccaaccagactctcttca

SEQ ID NO: 5039865 - DNA, 25 bp, Homo sapien
gactctccaaccagactctcttcat

SEQ ID NO: 5039866 - DNA, 25 bp, Homo sapien
ttctcatcatctctccggctttctc

SEQ ID NO: 5039867 - DNA, 25 bp, Homo sapien
ctttctccccaaccttgtgcctgca

SEQ ID NO: 5039868 - DNA, 25 bp, Homo sapien
tcatctctccggctttctccccaac

SEQ ID NO: 5039869 - DNA, 25 bp, Homo sapien
tccggctttctccccaaccttgtgc

SEQ ID NO: 5039870 - DNA, 25 bp, Homo sapien
catgaatatccaacttgagcagagc

SEQ ID NO: 5039871 - DNA, 25 bp, Homo sapien
catgatcagcaggttcgttggtagg

SEQ ID NO: 5039872 - DNA, 25 bp, Homo sapien
ggaagccttgcatcctctccatagg

SEQ ID NO: 5039873 - DNA, 25 bp, Homo sapien
cgttggtaggctagttctggctgct

SEQ ID NO: 5039874 - DNA, 25 bp, Homo sapien
tatttgacagtcatacaagagagca

SEQ ID NO: 5039875 - DNA, 25 bp, Homo sapien
atcggctacttaaacaacgcagtca

SEQ ID NO: 5039876 - DNA, 25 bp, Homo sapien
caagagagcaatcggctacttaaac

SEQ ID NO: 5039877 - DNA, 25 bp, Homo sapien
cagtcatacaagagagcaatcggct

SEQ ID NO: 5039878 - DNA, 25 bp, Homo sapien
taagcggagtgattgattgcctgag

SEQ ID NO: 5039879 - DNA, 25 bp, Homo sapien
tcagagaatcagcttaccaaaggtc

SEQ ID NO: 5039880 - DNA, 25 bp, Homo sapien
gtctaaaccgtttctgttgggctca

SEQ ID NO: 5039881 - DNA, 25 bp, Homo sapien
gcaatattagagagggaggaaaccc

SEQ ID NO: 5039882 - DNA, 25 bp, Homo sapien
tgattaacctgagacaaccatgctg

SEQ ID NO: 5039883 - DNA, 25 bp, Homo sapien
tactagtcagagaagagctgcgtgc

SEQ ID NO: 5039884 - DNA, 25 bp, Homo sapien
gatacagccaaaggagtgactcagt

SEQ ID NO: 5039885 - DNA, 25 bp, Homo sapien
tgaggcactgtccatgtgaacgaag

SEQ ID NO: 5039886 - DNA, 25 bp, Homo sapien
agccaagagcattaaatatccaagg

SEQ ID NO: 5039887 - DNA, 25 bp, Homo sapien
gccaagagcattaaatatccaaggt

SEQ ID NO: 5039888 - DNA, 25 bp, Homo sapien
aagccaagagcattaaatatccaag

SEQ ID NO: 5039889 - DNA, 25 bp, Homo sapien
ctagagagatagataagccaagagc

SEQ ID NO: 5039890 - DNA, 25 bp, Homo sapien
gccccagctgcagatatgaagcgga

SEQ ID NO: 5039891 - DNA, 25 bp, Homo sapien
cgggcagcggagctgtctcagtctt

SEQ ID NO: 5039892 - DNA, 25 bp, Homo sapien
cgcccgaccgccgggaggatggagt

SEQ ID NO: 5039893 - DNA, 25 bp, Homo sapien
aggatggagttcagcgggcagcgga

SEQ ID NO: 5039894 - DNA, 25 bp, Homo sapien
cagttccagcctcactcaaaaggcc

SEQ ID NO: 5039895 - DNA, 25 bp, Homo sapien
cagccttaggacactgctctctgca

SEQ ID NO: 5039896 - DNA, 25 bp, Homo sapien
ctggaaagcacattctgtaagcctt

SEQ ID NO: 5039897 - DNA, 25 bp, Homo sapien
tcaaaaggccccaggtacagttcag

SEQ ID NO: 5039898 - DNA, 25 bp, Homo sapien
cacaaagaacatcaaagggcagaat

SEQ ID NO: 5039899 - DNA, 25 bp, Homo sapien
tcagattcgggccaaagacaacaag

SEQ ID NO: 5039900 - DNA, 25 bp, Homo sapien
gctttgggtcaagccctgcttcaga

SEQ ID NO: 5039901 - DNA, 25 bp, Homo sapien
ggcaccagtagctttgggtcaagcc

SEQ ID NO: 5039902 - DNA, 25 bp, Homo sapien
tcaaaagccgccatcccgttctact

SEQ ID NO: 5039903 - DNA, 25 bp, Homo sapien
agccgccatcccgttctactccaac

SEQ ID NO: 5039904 - DNA, 25 bp, Homo sapien
tcaacctgctgccttggatcttcct

SEQ ID NO: 5039905 - DNA, 25 bp, Homo sapien
ttctttcagtgagtcaacctgctgc

SEQ ID NO: 5039906 - DNA, 25 bp, Homo sapien
cttctcagattgcagttcacttctt

SEQ ID NO: 5039907 - DNA, 25 bp, Homo sapien
ttactcattccactcatttcatgcc

SEQ ID NO: 5039908 - DNA, 25 bp, Homo sapien
tctcaggtcctccaaagatgattgg

SEQ ID NO: 5039909 - DNA, 25 bp, Homo sapien
gagttgtggatctttacacagggac

SEQ ID NO: 5039910 - DNA, 25 bp, Homo sapien
aacagtccttcattgccatttgcct

SEQ ID NO: 5039911 - DNA, 25 bp, Homo sapien
tttcatgcaaattgatctcaggtcc

SEQ ID NO: 5039912 - DNA, 25 bp, Homo sapien
gcaaagaggctatcatcacttaaga

SEQ ID NO: 5039913 - DNA, 25 bp, Homo sapien
gaggctatcatcacttaagactgtc

SEQ ID NO: 5039914 - DNA, 25 bp, Homo sapien
ggctatcatcacttaagactgtcat

SEQ ID NO: 5039915 - DNA, 25 bp, Homo sapien
aagaggctatcatcacttaagactg

SEQ ID NO: 5039916 - DNA, 25 bp, Homo sapien
tctacacgagagcatgatggatttg

SEQ ID NO: 5039917 - DNA, 25 bp, Homo sapien
cacgagagcatgatggatttggtga

SEQ ID NO: 5039918 - DNA, 25 bp, Homo sapien
tttattttctacacgagagcatgat

SEQ ID NO: 5039919 - DNA, 25 bp, Homo sapien
ttttctacacgagagcatgatggat

SEQ ID NO: 5039920 - DNA, 25 bp, Homo sapien
tcaaagggtagtgcttgagccacag

SEQ ID NO: 5039921 - DNA, 25 bp, Homo sapien
tcctgatgcactttatggaatccat

SEQ ID NO: 5039922 - DNA, 25 bp, Homo sapien
gccacaggagatgcttccgcttcat

SEQ ID NO: 5039923 - DNA, 25 bp, Homo sapien
gaatccattgtccttgtcatctcta

SEQ ID NO: 5039924 - DNA, 25 bp, Homo sapien
ccaattagttgagtaaagccaagac

SEQ ID NO: 5039925 - DNA, 25 bp, Homo sapien
taattagtgcaatcagaaagtctag

SEQ ID NO: 5039926 - DNA, 25 bp, Homo sapien
tatgtttaatcaactcaggagcaag

SEQ ID NO: 5039927 - DNA, 25 bp, Homo sapien
tgtcaaatttaatgagccagaacct

SEQ ID NO: 5039928 - DNA, 25 bp, Homo sapien
tggtccataaaagcctgggttacag

SEQ ID NO: 5039929 - DNA, 25 bp, Homo sapien
gaacgaagtcgaagtgcatagacaa

SEQ ID NO: 5039930 - DNA, 25 bp, Homo sapien
cagccaatgaagcatctgctaatga

SEQ ID NO: 5039931 - DNA, 25 bp, Homo sapien
ccacagctacttgagctcctaaata

SEQ ID NO: 5039932 - DNA, 25 bp, Homo sapien
tccaatttccttttgctgcttgtag

SEQ ID NO: 5039933 - DNA, 25 bp, Homo sapien
acacgggctccaatttccttttgct

SEQ ID NO: 5039934 - DNA, 25 bp, Homo sapien
gctccaatttccttttgctgcttgt

SEQ ID NO: 5039935 - DNA, 25 bp, Homo sapien
tcacacgggctccaatttccttttg

SEQ ID NO: 5039936 - DNA, 25 bp, Homo sapien
tccttctctttcacctgttcattct

SEQ ID NO: 5039937 - DNA, 25 bp, Homo sapien
cttgaacgtccttctctttcacctg

SEQ ID NO: 5039938 - DNA, 25 bp, Homo sapien
tctctttcacctgttcattcttcat

SEQ ID NO: 5039939 - DNA, 25 bp, Homo sapien
ttctctttcacctgttcattcttca

SEQ ID NO: 5039940 - DNA, 25 bp, Homo sapien
ccacaactgttctcgtttctcaact

SEQ ID NO: 5039941 - DNA, 25 bp, Homo sapien
gcaactctgcaatttaacaatgtgt

SEQ ID NO: 5039942 - DNA, 25 bp, Homo sapien
tgtgtatacagacagtgccagccaa

SEQ ID NO: 5039943 - DNA, 25 bp, Homo sapien
ctcaactgcccaggtaatatgtttg

SEQ ID NO: 5039944 - DNA, 25 bp, Homo sapien
cattcccaagatatcctgcaggtgt

SEQ ID NO: 5039945 - DNA, 25 bp, Homo sapien
gctgggacagctgtagctttttgaa

SEQ ID NO: 5039946 - DNA, 25 bp, Homo sapien
gtcattcccaagatatcctgcaggt

SEQ ID NO: 5039947 - DNA, 25 bp, Homo sapien
ataaataatgtgtgctccaagtgct

SEQ ID NO: 5039948 - DNA, 25 bp, Homo sapien
acttatttgacagtaatattccagg

SEQ ID NO: 5039949 - DNA, 25 bp, Homo sapien
ctgaaaacgttatcaggcttttact

SEQ ID NO: 5039950 - DNA, 25 bp, Homo sapien
tctctcagtggctttctcgttcctc

SEQ ID NO: 5039951 - DNA, 25 bp, Homo sapien
tctcagtggctttctcgttcctcat

SEQ ID NO: 5039952 - DNA, 25 bp, Homo sapien
cagcacggatatctccatcaggaat

SEQ ID NO: 5039953 - DNA, 25 bp, Homo sapien
taaatgttggttctaactggacggc

SEQ ID NO: 5039954 - DNA, 25 bp, Homo sapien
tggacggctcaagccagcacggata

SEQ ID NO: 5039955 - DNA, 25 bp, Homo sapien
tggttctaactggacggctcaagcc

SEQ ID NO: 5039956 - DNA, 25 bp, Homo sapien
attcctcataaattccataggattc

SEQ ID NO: 5039957 - DNA, 25 bp, Homo sapien
ttcctcataaattccataggattct

SEQ ID NO: 5039958 - DNA, 25 bp, Homo sapien
tcctcataaattccataggattctc

SEQ ID NO: 5039959 - DNA, 25 bp, Homo sapien
gattcctcataaattccataggatt

SEQ ID NO: 5039960 - DNA, 25 bp, Homo sapien
tagggcacgtttgaggctgactgca

SEQ ID NO: 5039961 - DNA, 25 bp, Homo sapien
cagtttcttatagggcacgtttgag

SEQ ID NO: 5039962 - DNA, 25 bp, Homo sapien
ctgcagtgaggacaattcagagaga

SEQ ID NO: 5039963 - DNA, 25 bp, Homo sapien
tggacagagggaatggatagtatct

SEQ ID NO: 5039964 - DNA, 25 bp, Homo sapien
tggacatcatagggacatggtgcat

SEQ ID NO: 5039965 - DNA, 25 bp, Homo sapien
acatcatagggacatggtgcatcct

SEQ ID NO: 5039966 - DNA, 25 bp, Homo sapien
ggtgcatcctgtccctatgatgcac

SEQ ID NO: 5039967 - DNA, 25 bp, Homo sapien
tggtgcatcctgtccctatgatgca

SEQ ID NO: 5039968 - DNA, 25 bp, Homo sapien
cctgcacgcagacttgtcacagtgg

SEQ ID NO: 5039969 - DNA, 25 bp, Homo sapien
cagacttgtcacagtggcactgtgg

SEQ ID NO: 5039970 - DNA, 25 bp, Homo sapien
ccttcttaatatgcagggcaatggc

SEQ ID NO: 5039971 - DNA, 25 bp, Homo sapien
ggcctgcgggccttcttaatatgca

SEQ ID NO: 5039972 - DNA, 25 bp, Homo sapien
tgaggcccccgtggtgtctgccagc

SEQ ID NO: 5039973 - DNA, 25 bp, Homo sapien
ccccgtggtgtctgccagccagttg

SEQ ID NO: 5039974 - DNA, 25 bp, Homo sapien
tggtgtctgccagccagttgcttcc

SEQ ID NO: 5039975 - DNA, 25 bp, Homo sapien
cgtggtgtctgccagccagttgctt

SEQ ID NO: 5039976 - DNA, 25 bp, Homo sapien
aattccagaagaagggagtagcatg

SEQ ID NO: 5039977 - DNA, 25 bp, Homo sapien
tagagatacacgagaaatccaaatt

SEQ ID NO: 5039978 - DNA, 25 bp, Homo sapien
ccaaattaggatagaattccagaag

SEQ ID NO: 5039979 - DNA, 25 bp, Homo sapien
ccagaagaagggagtagcatgtgca

SEQ ID NO: 5039980 - DNA, 25 bp, Homo sapien
tttggtaccccaggctatgggagcc

SEQ ID NO: 5039981 - DNA, 25 bp, Homo sapien
ttcaaactgaggtgcctgcccttct

SEQ ID NO: 5039982 - DNA, 25 bp, Homo sapien
tcaaactgaggtgcctgcccttcta

SEQ ID NO: 5039983 - DNA, 25 bp, Homo sapien
attttggtaccccaggctatgggag

SEQ ID NO: 5039984 - DNA, 25 bp, Homo sapien
caagtggctcttcttcaagtggtga

SEQ ID NO: 5039985 - DNA, 25 bp, Homo sapien
ggtgtgttcttctattgtacgtcca

SEQ ID NO: 5039986 - DNA, 25 bp, Homo sapien
tgggtgtgttcttctattgtacgtc

SEQ ID NO: 5039987 - DNA, 25 bp, Homo sapien
gtgttcttctattgtacgtccataa

SEQ ID NO: 5039988 - DNA, 25 bp, Homo sapien
cttctattgtacgtccataatctcc

SEQ ID NO: 5039989 - DNA, 25 bp, Homo sapien
ttctgggctcctcacagttacaaaa

SEQ ID NO: 5039990 - DNA, 25 bp, Homo sapien
aaaatacagcatacccttctggttc

SEQ ID NO: 5039991 - DNA, 25 bp, Homo sapien
ggctcctcacagttacaaaaataca

SEQ ID NO: 5039992 - DNA, 25 bp, Homo sapien
tcaaggagtttccaatgcagatctc

SEQ ID NO: 5039993 - DNA, 25 bp, Homo sapien
caagcactgagcagaagcattgcca

SEQ ID NO: 5039994 - DNA, 25 bp, Homo sapien
tcctgtgtccaagcactgagcagaa

SEQ ID NO: 5039995 - DNA, 25 bp, Homo sapien
aaaggcaaggcccattcctgtgtcc

SEQ ID NO: 5039996 - DNA, 25 bp, Homo sapien
ttaaaaggcaaggcccattcctgtg

SEQ ID NO: 5039997 - DNA, 25 bp, Homo sapien
aatgtgtaccagatgttgaaaggct

SEQ ID NO: 5039998 - DNA, 25 bp, Homo sapien
tgtgtaccagatgttgaaaggcttt

SEQ ID NO: 5039999 - DNA, 25 bp, Homo sapien
taccagatgttgaaaggctttgtag

SEQ ID NO: 5040000 - DNA, 25 bp, Homo sapien
gatgagataatctgtggcccaaatg

SEQ ID NO: 5040001 - DNA, 25 bp, Homo sapien
tcagatgtgagaaatgataccgccc

SEQ ID NO: 5040002 - DNA, 25 bp, Homo sapien
taagatgcttgaagtccccagtgaa

SEQ ID NO: 5040003 - DNA, 25 bp, Homo sapien
taaaagaagattgccacaagtcgcc

SEQ ID NO: 5040004 - DNA, 25 bp, Homo sapien
tggactttcatgctgggccctaaga

SEQ ID NO: 5040005 - DNA, 25 bp, Homo sapien
tcagtgacacaaatgctctgggctc

SEQ ID NO: 5040006 - DNA, 25 bp, Homo sapien
tcggtttagggtaacacaagcagca

SEQ ID NO: 5040007 - DNA, 25 bp, Homo sapien
tccactgtacagtcggtttagggta

SEQ ID NO: 5040008 - DNA, 25 bp, Homo sapien
gcagcattgtatgcaggcatggcct

SEQ ID NO: 5040009 - DNA, 25 bp, Homo sapien
caaatacagtggtagatgacactac

SEQ ID NO: 5040010 - DNA, 25 bp, Homo sapien
gcaaatacagtggtagatgacacta

SEQ ID NO: 5040011 - DNA, 25 bp, Homo sapien
taactaggataggtgctgaggcaaa

SEQ ID NO: 5040012 - DNA, 25 bp, Homo sapien
tcagtaactaggataggtgctgagg

SEQ ID NO: 5040013 - DNA, 25 bp, Homo sapien
tagtgcattaagagctatccaagtc

SEQ ID NO: 5040014 - DNA, 25 bp, Homo sapien
aaatatcccaaaatagtgcattaag

SEQ ID NO: 5040015 - DNA, 25 bp, Homo sapien
gagctatccaagtctttaggtgaac

SEQ ID NO: 5040016 - DNA, 25 bp, Homo sapien
taggtgaactaaaccttcagccaaa

SEQ ID NO: 5040017 - DNA, 25 bp, Homo sapien
gctgtacggatttttcacctgcttc

SEQ ID NO: 5040018 - DNA, 25 bp, Homo sapien
caaagacagaagctgctgtacggat

SEQ ID NO: 5040019 - DNA, 25 bp, Homo sapien
cttcaaagacagaagctgctgtacg

SEQ ID NO: 5040020 - DNA, 25 bp, Homo sapien
cagaagctgctgtacggatttttca

SEQ ID NO: 5040021 - DNA, 25 bp, Homo sapien
caacactttttgagcattcgctgca

SEQ ID NO: 5040022 - DNA, 25 bp, Homo sapien
tgcatgcggggcattctggtgtata

SEQ ID NO: 5040023 - DNA, 25 bp, Homo sapien
cattgtcaaccgcaacactggttgt

SEQ ID NO: 5040024 - DNA, 25 bp, Homo sapien
tttttgagcattcgctgcatgcggg

SEQ ID NO: 5040025 - DNA, 25 bp, Homo sapien
atgcaaatgcaatgggcctttactg

SEQ ID NO: 5040026 - DNA, 25 bp, Homo sapien
gcaaatgcaatgggcctttactgac

SEQ ID NO: 5040027 - DNA, 25 bp, Homo sapien
tgcaaatgcaatgggcctttactga

SEQ ID NO: 5040028 - DNA, 25 bp, Homo sapien
gctcctggtccatgccattcatcaa

SEQ ID NO: 5040029 - DNA, 25 bp, Homo sapien
ctggtccatgccattcatcaattgg

SEQ ID NO: 5040030 - DNA, 25 bp, Homo sapien
aagaatgccaagctgtttccgctga

SEQ ID NO: 5040031 - DNA, 25 bp, Homo sapien
actagtgctcctggtccatgccatt

SEQ ID NO: 5040032 - DNA, 25 bp, Homo sapien
tacttctctatgaaggtctctcttc

SEQ ID NO: 5040033 - DNA, 25 bp, Homo sapien
cattttcctacttctctatgaaggt

SEQ ID NO: 5040034 - DNA, 25 bp, Homo sapien
tgtatttaatgctaacaggtgctgg

SEQ ID NO: 5040035 - DNA, 25 bp, Homo sapien
tatgtatttaatgctaacaggtgct

SEQ ID NO: 5040036 - DNA, 25 bp, Homo sapien
aggcagttgtgaggggttgccagtc

SEQ ID NO: 5040037 - DNA, 25 bp, Homo sapien
gaaggacccacaagagttgtcagag

SEQ ID NO: 5040038 - DNA, 25 bp, Homo sapien
gcagaaggacccacaagagttgtca

SEQ ID NO: 5040039 - DNA, 25 bp, Homo sapien
aaggacccacaagagttgtcagagg

SEQ ID NO: 5040040 - DNA, 25 bp, Homo sapien
tctgcactggcaatactggaacatt

SEQ ID NO: 5040041 - DNA, 25 bp, Homo sapien
atttccttagaagaagcacatgcaa

SEQ ID NO: 5040042 - DNA, 25 bp, Homo sapien
tgcactggcaatactggaacatttc

SEQ ID NO: 5040043 - DNA, 25 bp, Homo sapien
cactggcaatactggaacatttcct

SEQ ID NO: 5040044 - DNA, 25 bp, Homo sapien
aaccttcccggcactggttcctcag

SEQ ID NO: 5040045 - DNA, 25 bp, Homo sapien
ctaagtggattgcagaagtctctgg

SEQ ID NO: 5040046 - DNA, 25 bp, Homo sapien
tgggtgaccgtaggatcagaccatc

SEQ ID NO: 5040047 - DNA, 25 bp, Homo sapien
caagacatcaccagtccattgctgt

SEQ ID NO: 5040048 - DNA, 25 bp, Homo sapien
acatctggtaaaccataggatcttt

SEQ ID NO: 5040049 - DNA, 25 bp, Homo sapien
tctggtaaaccataggatctttctg

SEQ ID NO: 5040050 - DNA, 25 bp, Homo sapien
catctggtaaaccataggatctttc

SEQ ID NO: 5040051 - DNA, 25 bp, Homo sapien
tggtaaaccataggatctttctgtt

SEQ ID NO: 5040052 - DNA, 25 bp, Homo sapien
agccatggttattcaagtgaagctg

SEQ ID NO: 5040053 - DNA, 25 bp, Homo sapien
tcaagtgaagctggaatctaaaggg

SEQ ID NO: 5040054 - DNA, 25 bp, Homo sapien
catggttattcaagtgaagctggaa

SEQ ID NO: 5040055 - DNA, 25 bp, Homo sapien
ggttattcaagtgaagctggaatct

SEQ ID NO: 5040056 - DNA, 25 bp, Homo sapien
ctagaagctccttgtgcggtcactt

SEQ ID NO: 5040057 - DNA, 25 bp, Homo sapien
tgcgacttataaataagcatgtttc

SEQ ID NO: 5040058 - DNA, 25 bp, Homo sapien
cagccttctcaattagttgcgactt

SEQ ID NO: 5040059 - DNA, 25 bp, Homo sapien
tccttgtgcggtcactttgtctgtg

SEQ ID NO: 5040060 - DNA, 25 bp, Homo sapien
agtttgttcttgataagctttcagc

SEQ ID NO: 5040061 - DNA, 25 bp, Homo sapien
tcagctcttgaccacaaataggctc

SEQ ID NO: 5040062 - DNA, 25 bp, Homo sapien
cttgataagctttcagctcttgacc

SEQ ID NO: 5040063 - DNA, 25 bp, Homo sapien
ttcttttagtttgttcttgataagc

SEQ ID NO: 5040064 - DNA, 25 bp, Homo sapien
ctccaaaaacctcattgatatcttc

SEQ ID NO: 5040065 - DNA, 25 bp, Homo sapien
aaaacctcattgatatcttctccac

SEQ ID NO: 5040066 - DNA, 25 bp, Homo sapien
caaaaacctcattgatatcttctcc

SEQ ID NO: 5040067 - DNA, 25 bp, Homo sapien
tccaaaaacctcattgatatcttct

SEQ ID NO: 5040068 - DNA, 25 bp, Homo sapien
actgggtgtagaggtaaagtcatca

SEQ ID NO: 5040069 - DNA, 25 bp, Homo sapien
tgagagtcagatgtcatttgcagct

SEQ ID NO: 5040070 - DNA, 25 bp, Homo sapien
tctttggcattcatgactccatgtc

SEQ ID NO: 5040071 - DNA, 25 bp, Homo sapien
cagcttctgaggcatgaattggaac

SEQ ID NO: 5040072 - DNA, 25 bp, Homo sapien
gagagaccccagcaaattttagtac

SEQ ID NO: 5040073 - DNA, 25 bp, Homo sapien
tatgcagccccaatgaagaagccac

SEQ ID NO: 5040074 - DNA, 25 bp, Homo sapien
catttctgctcatgagagagacccc

SEQ ID NO: 5040075 - DNA, 25 bp, Homo sapien
tccagaactggaggtagtaaaggct

SEQ ID NO: 5040076 - DNA, 25 bp, Homo sapien
agagttgggtgccagcttcaaggaa

SEQ ID NO: 5040077 - DNA, 25 bp, Homo sapien
cattaaccccaagagatgagagttg

SEQ ID NO: 5040078 - DNA, 25 bp, Homo sapien
tccgaaggcatgagagatagaagac

SEQ ID NO: 5040079 - DNA, 25 bp, Homo sapien
gctgggtggagaaactaccacatca

SEQ ID NO: 5040080 - DNA, 25 bp, Homo sapien
tgctaagggtcatacacttttcatc

SEQ ID NO: 5040081 - DNA, 25 bp, Homo sapien
ccagttccctgacggccagctttat

SEQ ID NO: 5040082 - DNA, 25 bp, Homo sapien
tgtacaaagtgagttccagttccct

SEQ ID NO: 5040083 - DNA, 25 bp, Homo sapien
gctccactagctagcagaagtttga

SEQ ID NO: 5040084 - DNA, 25 bp, Homo sapien
ctctcagatcgtgtcttctcagcaa

SEQ ID NO: 5040085 - DNA, 25 bp, Homo sapien
tctcagatcgtgtcttctcagcaag

SEQ ID NO: 5040086 - DNA, 25 bp, Homo sapien
taatctgcaatccaaacttgattcc

SEQ ID NO: 5040087 - DNA, 25 bp, Homo sapien
atacaataatctgcaatccaaactt

SEQ ID NO: 5040088 - DNA, 25 bp, Homo sapien
tgttccctgggtaaggcccatgcta

SEQ ID NO: 5040089 - DNA, 25 bp, Homo sapien
aacttgattccaaggtcaatcttct

SEQ ID NO: 5040090 - DNA, 25 bp, Homo sapien
gggggtccctccaaaattgctctga

SEQ ID NO: 5040091 - DNA, 25 bp, Homo sapien
ggggtccctccaaaattgctctgac

SEQ ID NO: 5040092 - DNA, 25 bp, Homo sapien
gacaagctgcacagtgtagccatct

SEQ ID NO: 5040093 - DNA, 25 bp, Homo sapien
cactctaggcaactgtacggaacgg

SEQ ID NO: 5040094 - DNA, 25 bp, Homo sapien
aggaatgtggccatagctccagctg

SEQ ID NO: 5040095 - DNA, 25 bp, Homo sapien
tacggaacggacagactacaatccc

SEQ ID NO: 5040096 - DNA, 25 bp, Homo sapien
gggcaccaatatctacctcggctgc

SEQ ID NO: 5040097 - DNA, 25 bp, Homo sapien
tatctacctcggctgcctcagtggc

SEQ ID NO: 5040098 - DNA, 25 bp, Homo sapien
tcacttcccgtaactgctgaatggg

SEQ ID NO: 5040099 - DNA, 25 bp, Homo sapien
gctggtgtagggcttgtttcaaaca

SEQ ID NO: 5040100 - DNA, 25 bp, Homo sapien
gagttctcacccaaagaggccaggg

SEQ ID NO: 5040101 - DNA, 25 bp, Homo sapien
tgttcccatgagttctcacccaaag

SEQ ID NO: 5040102 - DNA, 25 bp, Homo sapien
catgagttctcacccaaagaggcca

SEQ ID NO: 5040103 - DNA, 25 bp, Homo sapien
cttctctactgtaggaggaaaagca

SEQ ID NO: 5040104 - DNA, 25 bp, Homo sapien
atgtatcatgcacttgagctgcatg

SEQ ID NO: 5040105 - DNA, 25 bp, Homo sapien
aagacaaatgtcacctttcaatgct

SEQ ID NO: 5040106 - DNA, 25 bp, Homo sapien
gacaaatgtcacctttcaatgcttc

SEQ ID NO: 5040107 - DNA, 25 bp, Homo sapien
gtatcatgcacttgagctgcatgac

SEQ ID NO: 5040108 - DNA, 25 bp, Homo sapien
gagcctatgcccatcggcctgtgtt

SEQ ID NO: 5040109 - DNA, 25 bp, Homo sapien
tgctgcactccaagcagagcctatg

SEQ ID NO: 5040110 - DNA, 25 bp, Homo sapien
ccacttaaaggtcttgggcacttca

SEQ ID NO: 5040111 - DNA, 25 bp, Homo sapien
tagctaaataccaatcactgagtga

SEQ ID NO: 5040112 - DNA, 25 bp, Homo sapien
gggctcagaacaccatgcaaaaagt

SEQ ID NO: 5040113 - DNA, 25 bp, Homo sapien
attattgtaacagcagagagttaaa

SEQ ID NO: 5040114 - DNA, 25 bp, Homo sapien
ttaaatgaagaagcgacagatggcc

SEQ ID NO: 5040115 - DNA, 25 bp, Homo sapien
tagtctaaaatcacctgctatgaaa

SEQ ID NO: 5040116 - DNA, 25 bp, Homo sapien
aatcagtgaccgcacaagaatgtgg

SEQ ID NO: 5040117 - DNA, 25 bp, Homo sapien
attggaagagataagccagagacca

SEQ ID NO: 5040118 - DNA, 25 bp, Homo sapien
tccctgcgaagccaagaatgcaccg

SEQ ID NO: 5040119 - DNA, 25 bp, Homo sapien
atgtgggcatgctgaatccctgcga

SEQ ID NO: 5040120 - DNA, 25 bp, Homo sapien
cttaggtgttattgcagcaacttta

SEQ ID NO: 5040121 - DNA, 25 bp, Homo sapien
agcacctttcctatctgaccgacga

SEQ ID NO: 5040122 - DNA, 25 bp, Homo sapien
ttctgaaagcacctttcctatctga

SEQ ID NO: 5040123 - DNA, 25 bp, Homo sapien
tctgaccgacgattgatctctttca

SEQ ID NO: 5040124 - DNA, 25 bp, Homo sapien
tgctctgggcgcacccgttttctgc

SEQ ID NO: 5040125 - DNA, 25 bp, Homo sapien
ttctcattgctaggtagcacaggca

SEQ ID NO: 5040126 - DNA, 25 bp, Homo sapien
gttgcccatactctgtgccctcagg

SEQ ID NO: 5040127 - DNA, 25 bp, Homo sapien
tcagggctcttacagttgtcccagg

SEQ ID NO: 5040128 - DNA, 25 bp, Homo sapien
caggactgctcgcagaggaggagct

SEQ ID NO: 5040129 - DNA, 25 bp, Homo sapien
ggactgctcgcagaggaggagctgc

SEQ ID NO: 5040130 - DNA, 25 bp, Homo sapien
actgctcgcagaggaggagctgcaa

SEQ ID NO: 5040131 - DNA, 25 bp, Homo sapien
ccaggactgctcgcagaggaggagc

SEQ ID NO: 5040132 - DNA, 25 bp, Homo sapien
gttaggctataaacactccctccgc

SEQ ID NO: 5040133 - DNA, 25 bp, Homo sapien
ggcttgttgcctcgccaaagttagg

SEQ ID NO: 5040134 - DNA, 25 bp, Homo sapien
gtctccaaatagaacgagctggctt

SEQ ID NO: 5040135 - DNA, 25 bp, Homo sapien
tggtaaggcagcaacagtctccaaa

SEQ ID NO: 5040136 - DNA, 25 bp, Homo sapien
tatacatattgttcctcctgcccgg

SEQ ID NO: 5040137 - DNA, 25 bp, Homo sapien
tagtcattgcaccagtcacacagga

SEQ ID NO: 5040138 - DNA, 25 bp, Homo sapien
catattcttgacctcgtgtgccgga

SEQ ID NO: 5040139 - DNA, 25 bp, Homo sapien
tgaaaagtcactaggtggccaaccc

SEQ ID NO: 5040140 - DNA, 25 bp, Homo sapien
aatgctgaacattatcattatccag

SEQ ID NO: 5040141 - DNA, 25 bp, Homo sapien
ggcacaatcatgacaagcattcaat

SEQ ID NO: 5040142 - DNA, 25 bp, Homo sapien
attatccagcacttatgctgcaagg

SEQ ID NO: 5040143 - DNA, 25 bp, Homo sapien
agtgtctggcacaatcatgacaagc

SEQ ID NO: 5040144 - DNA, 25 bp, Homo sapien
actgcctagttcagaaattaccaat

SEQ ID NO: 5040145 - DNA, 25 bp, Homo sapien
ttatggagtagggacaacagcattg

SEQ ID NO: 5040146 - DNA, 25 bp, Homo sapien
ttctctaaccacgacactgcctagt

SEQ ID NO: 5040147 - DNA, 25 bp, Homo sapien
acaacagcattggaacttgatgtcc

SEQ ID NO: 5040148 - DNA, 25 bp, Homo sapien
cttcagttctgtgtcttctgcacca

SEQ ID NO: 5040149 - DNA, 25 bp, Homo sapien
tcttcagttctgtgtcttctgcacc

SEQ ID NO: 5040150 - DNA, 25 bp, Homo sapien
atcttcagttctgtgtcttctgcac

SEQ ID NO: 5040151 - DNA, 25 bp, Homo sapien
cactgccaggtgtagccatcatcta

SEQ ID NO: 5040152 - DNA, 25 bp, Homo sapien
ccaggtgtagccatcatctacaggg

SEQ ID NO: 5040153 - DNA, 25 bp, Homo sapien
cactttttattacactgccaggtgt

SEQ ID NO: 5040154 - DNA, 25 bp, Homo sapien
tcatctacaggggagcagccctcta

SEQ ID NO: 5040155 - DNA, 25 bp, Homo sapien
gagctgcagcgagggtaagaactcc

SEQ ID NO: 5040156 - DNA, 25 bp, Homo sapien
ggtttccgaaagcatcgacgttcta

SEQ ID NO: 5040157 - DNA, 25 bp, Homo sapien
caacatggcccacaggcaagggttt

SEQ ID NO: 5040158 - DNA, 25 bp, Homo sapien
gaaagcatcgacgttctaaatacat

SEQ ID NO: 5040159 - DNA, 25 bp, Homo sapien
cacagaaaggagtccgctttatttt

SEQ ID NO: 5040160 - DNA, 25 bp, Homo sapien
acagaaaggagtccgctttattttg

SEQ ID NO: 5040161 - DNA, 25 bp, Homo sapien
ttattttgcagactgggaatccaga

SEQ ID NO: 5040162 - DNA, 25 bp, Homo sapien
attttgcagactgggaatccagatg

SEQ ID NO: 5040163 - DNA, 25 bp, Homo sapien
tcacccttgctccaacgatgttggg

SEQ ID NO: 5040164 - DNA, 25 bp, Homo sapien
gcatttgcttttcggtcaatgaggg

SEQ ID NO: 5040165 - DNA, 25 bp, Homo sapien
ttcgttgcatttgcttttcggtcaa

SEQ ID NO: 5040166 - DNA, 25 bp, Homo sapien
tgagggcaattcatctggaatgacc

SEQ ID NO: 5040167 - DNA, 25 bp, Homo sapien
atctctggccaaaacttgaatgttt

SEQ ID NO: 5040168 - DNA, 25 bp, Homo sapien
tatgtccaaccacgcaagggcccat

SEQ ID NO: 5040169 - DNA, 25 bp, Homo sapien
tgtatgtccaaccacgcaagggccc

SEQ ID NO: 5040170 - DNA, 25 bp, Homo sapien
ctgtatgtccaaccacgcaagggcc

SEQ ID NO: 5040171 - DNA, 25 bp, Homo sapien
gtatgtccaaccacgcaagggccca

SEQ ID NO: 5040172 - DNA, 25 bp, Homo sapien
ttcaattagagtaatgccaaaagtg

SEQ ID NO: 5040173 - DNA, 25 bp, Homo sapien
ccagattcctgggaaatcagcctac

SEQ ID NO: 5040174 - DNA, 25 bp, Homo sapien
tagcttcaattagagtaatgccaaa

SEQ ID NO: 5040175 - DNA, 25 bp, Homo sapien
catttagcttcaattagagtaatgc

SEQ ID NO: 5040176 - DNA, 25 bp, Homo sapien
cagaagtccttagggcatctaagtg

SEQ ID NO: 5040177 - DNA, 25 bp, Homo sapien
gcatctaagtgatcagacaccgtca

SEQ ID NO: 5040178 - DNA, 25 bp, Homo sapien
ctgcgggaaggaacctccactgcca

SEQ ID NO: 5040179 - DNA, 25 bp, Homo sapien
cgggaaggaacctccactgccagaa

SEQ ID NO: 5040180 - DNA, 25 bp, Homo sapien
tcaccatctcttatgcggttgaata

SEQ ID NO: 5040181 - DNA, 25 bp, Homo sapien
gcagtggtgataggttaattttcac

SEQ ID NO: 5040182 - DNA, 25 bp, Homo sapien
atctcttatgcggttgaatagtcac

SEQ ID NO: 5040183 - DNA, 25 bp, Homo sapien
cggttctccatagggtgatgttcat

SEQ ID NO: 5040184 - DNA, 25 bp, Homo sapien
cctctttcttcggaccttctgcagc

SEQ ID NO: 5040185 - DNA, 25 bp, Homo sapien
cttaacacttgaacgctgagctgca

SEQ ID NO: 5040186 - DNA, 25 bp, Homo sapien
tttcgcaaacctgaacgcgggtgct

SEQ ID NO: 5040187 - DNA, 25 bp, Homo sapien
gcatagcgattggttgctccccgcg

SEQ ID NO: 5040188 - DNA, 25 bp, Homo sapien
gctgcaaactcaacgggtaataacc

SEQ ID NO: 5040189 - DNA, 25 bp, Homo sapien
ctttgcccatagcagcgggcgggca

SEQ ID NO: 5040190 - DNA, 25 bp, Homo sapien
tctcagaggcttggcgggaaaaaga

SEQ ID NO: 5040191 - DNA, 25 bp, Homo sapien
ggatcgcgctgagtataaaagccgg

SEQ ID NO: 5040192 - DNA, 25 bp, Homo sapien
tggaacttacaacacccgagcaagg

SEQ ID NO: 5040193 - DNA, 25 bp, Homo sapien
ggtctctggcgcagttgcatctccg

SEQ ID NO: 5040194 - DNA, 25 bp, Homo sapien
agggaggtgcccctattattatttg

SEQ ID NO: 5040195 - DNA, 25 bp, Homo sapien
tgggcggttccagaacagctgctac

SEQ ID NO: 5040196 - DNA, 25 bp, Homo sapien
catctccgtattgagtgcgaaggga

SEQ ID NO: 5040197 - DNA, 25 bp, Homo sapien
cagagtttcatctgcgacccggacg

SEQ ID NO: 5040198 - DNA, 25 bp, Homo sapien
actgtatgtggagcggcttctcggc

SEQ ID NO: 5040199 - DNA, 25 bp, Homo sapien
gccgccaagctcgtctcagagaagc

SEQ ID NO: 5040200 - DNA, 25 bp, Homo sapien
ccggacgacgagaccttcatcaaaa

SEQ ID NO: 5040201 - DNA, 25 bp, Homo sapien
cagagacctttctaacgtattcatg

SEQ ID NO: 5040202 - DNA, 25 bp, Homo sapien
tgtatttgtacagcattaatctggt

SEQ ID NO: 5040203 - DNA, 25 bp, Homo sapien
cctttctaacgtattcatgccttgt

SEQ ID NO: 5040204 - DNA, 25 bp, Homo sapien
taacgtattcatgccttgtatttgt

SEQ ID NO: 5040205 - DNA, 25 bp, Homo sapien
gaagaggacttgttgcggaaacgac

SEQ ID NO: 5040206 - DNA, 25 bp, Homo sapien
tacatcctgtccgtccaagcagagg

SEQ ID NO: 5040207 - DNA, 25 bp, Homo sapien
tgaacagctacggaactcttgtgcg

SEQ ID NO: 5040208 - DNA, 25 bp, Homo sapien
aacacacaacgtcttggagcgccag

SEQ ID NO: 5040209 - DNA, 25 bp, Homo sapien
tgtcaggacatggacagagacgtct

SEQ ID NO: 5040210 - DNA, 25 bp, Homo sapien
tgcagaagggactgggcatcaactg

SEQ ID NO: 5040211 - DNA, 25 bp, Homo sapien
gagagggcaaacagcatcaaggtca

SEQ ID NO: 5040212 - DNA, 25 bp, Homo sapien
tagaagctggtcctctcatagccca

SEQ ID NO: 5040213 - DNA, 25 bp, Homo sapien
cctccgggcagagcgcgtgtggcgg

SEQ ID NO: 5040214 - DNA, 25 bp, Homo sapien
gctcctccgggcagagcgcgtgtgg

SEQ ID NO: 5040215 - DNA, 25 bp, Homo sapien
cgctcctccgggcagagcgcgtgtg

SEQ ID NO: 5040216 - DNA, 25 bp, Homo sapien
agccccgcgctcctccgggcagagc

SEQ ID NO: 5040217 - DNA, 25 bp, Homo sapien
actgcaatggtattaaaagccaaat

SEQ ID NO: 5040218 - DNA, 25 bp, Homo sapien
gaaaaaggcacatctaagcaacaaa

SEQ ID NO: 5040219 - DNA, 25 bp, Homo sapien
tgtatgcagaattcccaaaagtcaa

SEQ ID NO: 5040220 - DNA, 25 bp, Homo sapien
gccaaatacaagacttagaagatat

SEQ ID NO: 5040221 - DNA, 25 bp, Homo sapien
cttcaaggatcatccgcattctttc

SEQ ID NO: 5040222 - DNA, 25 bp, Homo sapien
ttcaaggatcatccgcattctttca

SEQ ID NO: 5040223 - DNA, 25 bp, Homo sapien
tcaaggatcatccgcattctttcat

SEQ ID NO: 5040224 - DNA, 25 bp, Homo sapien
tgttgtaacatcctattgcaatgac

SEQ ID NO: 5040225 - DNA, 25 bp, Homo sapien
aatgtggccgggcatgaaggctcct

SEQ ID NO: 5040226 - DNA, 25 bp, Homo sapien
tcccaattttatctgcactattagg

SEQ ID NO: 5040227 - DNA, 25 bp, Homo sapien
ttaagaatatttaatgtggccgggc

SEQ ID NO: 5040228 - DNA, 25 bp, Homo sapien
tcggaaggctaaggctggaaaatca

SEQ ID NO: 5040229 - DNA, 25 bp, Homo sapien
ggaaggctaaggctggaaaatcatt

SEQ ID NO: 5040230 - DNA, 25 bp, Homo sapien
tactcggaaggctaaggctggaaaa

SEQ ID NO: 5040231 - DNA, 25 bp, Homo sapien
aaggctaaggctggaaaatcatttg

SEQ ID NO: 5040232 - DNA, 25 bp, Homo sapien
gttagactgagtcctagacacttag

SEQ ID NO: 5040233 - DNA, 25 bp, Homo sapien
tgagtcctagacacttagcctctgg

SEQ ID NO: 5040234 - DNA, 25 bp, Homo sapien
ctgtctccagaatatgttagactga

SEQ ID NO: 5040235 - DNA, 25 bp, Homo sapien
ccagaatatgttagactgagtccta

SEQ ID NO: 5040236 - DNA, 25 bp, Homo sapien
cagcatgttctcattcagaagtggg

SEQ ID NO: 5040237 - DNA, 25 bp, Homo sapien
cacagcatgttctcattcagaagtg

SEQ ID NO: 5040238 - DNA, 25 bp, Homo sapien
aacacagcatgttctcattcagaag

SEQ ID NO: 5040239 - DNA, 25 bp, Homo sapien
aaacacagcatgttctcattcagaa

SEQ ID NO: 5040240 - DNA, 25 bp, Homo sapien
gggctcgccttccatccagctgaag

SEQ ID NO: 5040241 - DNA, 25 bp, Homo sapien
tgggaacaccacatgcaagagaaga

SEQ ID NO: 5040242 - DNA, 25 bp, Homo sapien
gctgactgtagagatagacgcttgg

SEQ ID NO: 5040243 - DNA, 25 bp, Homo sapien
gccataattatcacctagtccccag

SEQ ID NO: 5040244 - DNA, 25 bp, Homo sapien
ttaaggagccaacatggatcatggg

SEQ ID NO: 5040245 - DNA, 25 bp, Homo sapien
gagagggacctgtcactcctgctgt

SEQ ID NO: 5040246 - DNA, 25 bp, Homo sapien
gctaaacacagttgatggccagtgc

SEQ ID NO: 5040247 - DNA, 25 bp, Homo sapien
gcatcagtcagggtctaatggctca

SEQ ID NO: 5040248 - DNA, 25 bp, Homo sapien
ctttctcaggatgagtgctgaggag

SEQ ID NO: 5040249 - DNA, 25 bp, Homo sapien
tgtcttcagaggagacgtctgccca

SEQ ID NO: 5040250 - DNA, 25 bp, Homo sapien
agtccagactacgtgcctcatgcca

SEQ ID NO: 5040251 - DNA, 25 bp, Homo sapien
tatgctaggtgtgaacagtcacccc

SEQ ID NO: 5040252 - DNA, 25 bp, Homo sapien
tcttgtctggatttgttcccctaag

SEQ ID NO: 5040253 - DNA, 25 bp, Homo sapien
accgaactggtcctgcccatgcagg

SEQ ID NO: 5040254 - DNA, 25 bp, Homo sapien
gccactctcctagctgtgcttccgc

SEQ ID NO: 5040255 - DNA, 25 bp, Homo sapien
cactctcctagctgtgcttccgcag

SEQ ID NO: 5040256 - DNA, 25 bp, Homo sapien
ccttccaaagctgctaagtcctgtg

SEQ ID NO: 5040257 - DNA, 25 bp, Homo sapien
tgcttggacgatgccttccaaagct

SEQ ID NO: 5040258 - DNA, 25 bp, Homo sapien
agagtggctgcttggacgatgcctt

SEQ ID NO: 5040259 - DNA, 25 bp, Homo sapien
tgccttccaaagctgctaagtcctg

SEQ ID NO: 5040260 - DNA, 25 bp, Homo sapien
tgaagagtgttttctcaagtcccta

SEQ ID NO: 5040261 - DNA, 25 bp, Homo sapien
gatcctcatggctttcaaggagtca

SEQ ID NO: 5040262 - DNA, 25 bp, Homo sapien
ggagtcatgcccaagatacaggaat

SEQ ID NO: 5040263 - DNA, 25 bp, Homo sapien
ttattgttgcatgaatggcctaaat

SEQ ID NO: 5040264 - DNA, 25 bp, Homo sapien
gactggagcctgtgccgtgtgtttc

SEQ ID NO: 5040265 - DNA, 25 bp, Homo sapien
ccttcctttacatgtgagcattctc

SEQ ID NO: 5040266 - DNA, 25 bp, Homo sapien
gatcaactccctgatgactggagcc

SEQ ID NO: 5040267 - DNA, 25 bp, Homo sapien
cattcctactgcatgttccctcagg

SEQ ID NO: 5040268 - DNA, 25 bp, Homo sapien
tcagtgcctctaagacagggtcaga

SEQ ID NO: 5040269 - DNA, 25 bp, Homo sapien
tattgaggattaggcagaacttgca

SEQ ID NO: 5040270 - DNA, 25 bp, Homo sapien
cacttattgaggattaggcagaact

SEQ ID NO: 5040271 - DNA, 25 bp, Homo sapien
aggcttccacttattgaggattagg

SEQ ID NO: 5040272 - DNA, 25 bp, Homo sapien
ggattaggcagaacttgcagcttgg

SEQ ID NO: 5040273 - DNA, 25 bp, Homo sapien
tggttcattggagaaacctgtcaca

SEQ ID NO: 5040274 - DNA, 25 bp, Homo sapien
gctgtggagactctagccatggttt

SEQ ID NO: 5040275 - DNA, 25 bp, Homo sapien
cctgctgctccggactggttcattg

SEQ ID NO: 5040276 - DNA, 25 bp, Homo sapien
tctagaccggttgccacgccatgct

SEQ ID NO: 5040277 - DNA, 25 bp, Homo sapien
atggccttgccctccgtaggcaggc

SEQ ID NO: 5040278 - DNA, 25 bp, Homo sapien
catggccttgccctccgtaggcagg

SEQ ID NO: 5040279 - DNA, 25 bp, Homo sapien
tagcatggccttgccctccgtaggc

SEQ ID NO: 5040280 - DNA, 25 bp, Homo sapien
cctcctccgatctagcatggccttg

SEQ ID NO: 5040281 - DNA, 25 bp, Homo sapien
ggtagatcatgtagcactgctggga

SEQ ID NO: 5040282 - DNA, 25 bp, Homo sapien
tgctgggatgccagctgcgtaagtc

SEQ ID NO: 5040283 - DNA, 25 bp, Homo sapien
taagtctccggcagtgggcacaggc

SEQ ID NO: 5040284 - DNA, 25 bp, Homo sapien
gttttgcctgtttaccctggcgcag

SEQ ID NO: 5040285 - DNA, 25 bp, Homo sapien
caggaaccgccagaaccaaagtctt

SEQ ID NO: 5040286 - DNA, 25 bp, Homo sapien
gtgtgggaccagcaacaggctgctc

SEQ ID NO: 5040287 - DNA, 25 bp, Homo sapien
tgagcactccggagaggagcctttg

SEQ ID NO: 5040288 - DNA, 25 bp, Homo sapien
gaagagaaccggctcccagtgagct

SEQ ID NO: 5040289 - DNA, 25 bp, Homo sapien
gtcactggaatcaggatggtcctgg

SEQ ID NO: 5040290 - DNA, 25 bp, Homo sapien
caggggtcactggaatcaggatggt

SEQ ID NO: 5040291 - DNA, 25 bp, Homo sapien
ttcagaaggacaaggtggtaggtgc

SEQ ID NO: 5040292 - DNA, 25 bp, Homo sapien
tcactggaatcaggatggtcctggc

SEQ ID NO: 5040293 - DNA, 25 bp, Homo sapien
ctgctggtggcttgtcctgctcttg

SEQ ID NO: 5040294 - DNA, 25 bp, Homo sapien
ggatcataggcactgggacatcctg

SEQ ID NO: 5040295 - DNA, 25 bp, Homo sapien
ctcttggatcataggcactgggaca

SEQ ID NO: 5040296 - DNA, 25 bp, Homo sapien
tgtcctgctcttggatcataggcac

SEQ ID NO: 5040297 - DNA, 25 bp, Homo sapien
tgtcggcacagctgatgaggtcttt

SEQ ID NO: 5040298 - DNA, 25 bp, Homo sapien
tcctaggtttgtgtgatgtcggcac

SEQ ID NO: 5040299 - DNA, 25 bp, Homo sapien
cagagtccaccagaatcgggtaaag

SEQ ID NO: 5040300 - DNA, 25 bp, Homo sapien
caaatagacattagcgaggagaggg

SEQ ID NO: 5040301 - DNA, 25 bp, Homo sapien
tccacatctccgtgatatagcgtgt

SEQ ID NO: 5040302 - DNA, 25 bp, Homo sapien
gatatagcgtgtactcctttcctca

SEQ ID NO: 5040303 - DNA, 25 bp, Homo sapien
ttcttctcctctaaggcgctccaca

SEQ ID NO: 5040304 - DNA, 25 bp, Homo sapien
tctaaggcgctccacatctccgtga

SEQ ID NO: 5040305 - DNA, 25 bp, Homo sapien
catgggctgttcgtgctgtcatcgc

SEQ ID NO: 5040306 - DNA, 25 bp, Homo sapien
cagcagagcagagccgatgtgcctg

SEQ ID NO: 5040307 - DNA, 25 bp, Homo sapien
cctccagttctgaagggatggggac

SEQ ID NO: 5040308 - DNA, 25 bp, Homo sapien
aactcctgtcctccgtggcgcttgg

SEQ ID NO: 5040309 - DNA, 25 bp, Homo sapien
ttatgcctgatggaactgacacggg

SEQ ID NO: 5040310 - DNA, 25 bp, Homo sapien
tgacacgggcctgctatgtttacag

SEQ ID NO: 5040311 - DNA, 25 bp, Homo sapien
gcctgatggaactgacacgggcctg

SEQ ID NO: 5040312 - DNA, 25 bp, Homo sapien
cgggcctgctatgtttacagtgcct

SEQ ID NO: 5040313 - DNA, 25 bp, Homo sapien
gatgacaggaaattctgctgcagct

SEQ ID NO: 5040314 - DNA, 25 bp, Homo sapien
ctggccagcactccggaggatgaca

SEQ ID NO: 5040315 - DNA, 25 bp, Homo sapien
tgacaggaaattctgctgcagctct

SEQ ID NO: 5040316 - DNA, 25 bp, Homo sapien
cagcactccggaggatgacaggaaa

SEQ ID NO: 5040317 - DNA, 25 bp, Homo sapien
ctggacagggagcgggcggacaggg

SEQ ID NO: 5040318 - DNA, 25 bp, Homo sapien
gactttgagtcggatggaggaactc

SEQ ID NO: 5040319 - DNA, 25 bp, Homo sapien
cttgagattagatgcagtagcactg

SEQ ID NO: 5040320 - DNA, 25 bp, Homo sapien
ggctgcggaaggtgtctgaactatc

SEQ ID NO: 5040321 - DNA, 25 bp, Homo sapien
ctgaactatcgtagcagtagggtcc

SEQ ID NO: 5040322 - DNA, 25 bp, Homo sapien
gcttatagacgctgcccgttttttc

SEQ ID NO: 5040323 - DNA, 25 bp, Homo sapien
gtggcccctgccatttaggtccatg

SEQ ID NO: 5040324 - DNA, 25 bp, Homo sapien
gagttggttgctctgtcctcttagc

SEQ ID NO: 5040325 - DNA, 25 bp, Homo sapien
gccatttaggtccatgtctctcgtg

SEQ ID NO: 5040326 - DNA, 25 bp, Homo sapien
tctgggcagtgcgaatttggtctca

SEQ ID NO: 5040327 - DNA, 25 bp, Homo sapien
gatcacatgtgtaggaagctgacaa

SEQ ID NO: 5040328 - DNA, 25 bp, Homo sapien
gaggatggtgctataattagcccca

SEQ ID NO: 5040329 - DNA, 25 bp, Homo sapien
gaatgtgaaatcctgacctgaaatg

SEQ ID NO: 5040330 - DNA, 25 bp, Homo sapien
ccagatgcagctgggttgagactca

SEQ ID NO: 5040331 - DNA, 25 bp, Homo sapien
ggcctgtgtcagttgagtgcgtcca

SEQ ID NO: 5040332 - DNA, 25 bp, Homo sapien
cacttgcagcctatgtcgggctcct

SEQ ID NO: 5040333 - DNA, 25 bp, Homo sapien
tctggccatagttttcctgggcctg

SEQ ID NO: 5040334 - DNA, 25 bp, Homo sapien
gcacagcaggtcggagtggccgccg

SEQ ID NO: 5040335 - DNA, 25 bp, Homo sapien
gaggagatggcagctctaataaaaa

SEQ ID NO: 5040336 - DNA, 25 bp, Homo sapien
cgtggccactgtgaagtacgggact

SEQ ID NO: 5040337 - DNA, 25 bp, Homo sapien
tacgggactggaggtctccggagga

SEQ ID NO: 5040338 - DNA, 25 bp, Homo sapien
aggccccagccggtgaatcactgaa

SEQ ID NO: 5040339 - DNA, 25 bp, Homo sapien
ttctgtgatcctgcagtttgaacat

SEQ ID NO: 5040340 - DNA, 25 bp, Homo sapien
aagttctgtgatcctgcagtttgaa

SEQ ID NO: 5040341 - DNA, 25 bp, Homo sapien
taaagttctgtgatcctgcagtttg

SEQ ID NO: 5040342 - DNA, 25 bp, Homo sapien
tgataaagttctgtgatcctgcagt

SEQ ID NO: 5040343 - DNA, 25 bp, Homo sapien
cctggcattcagctcagcccactgt

SEQ ID NO: 5040344 - DNA, 25 bp, Homo sapien
ttcagctcagcccactgtgcagaaa

SEQ ID NO: 5040345 - DNA, 25 bp, Homo sapien
gcattcagctcagcccactgtgcag

SEQ ID NO: 5040346 - DNA, 25 bp, Homo sapien
ctggcattcagctcagcccactgtg

SEQ ID NO: 5040347 - DNA, 25 bp, Homo sapien
gtggtgaaatatagaggaaatggtg

SEQ ID NO: 5040348 - DNA, 25 bp, Homo sapien
tctctgccatgactcgggggcggcc

SEQ ID NO: 5040349 - DNA, 25 bp, Homo sapien
attcagttgggccagtggtgaaata

SEQ ID NO: 5040350 - DNA, 25 bp, Homo sapien
cctgcgccaccggaattcagttggg

SEQ ID NO: 5040351 - DNA, 25 bp, Homo sapien
aaattctcggcattcctccttgatg

SEQ ID NO: 5040352 - DNA, 25 bp, Homo sapien
attctcggcattcctccttgatgtc

SEQ ID NO: 5040353 - DNA, 25 bp, Homo sapien
aattctcggcattcctccttgatgt

SEQ ID NO: 5040354 - DNA, 25 bp, Homo sapien
ttctcggcattcctccttgatgtca

SEQ ID NO: 5040355 - DNA, 25 bp, Homo sapien
tgccaacacagtggtaggaagggaa

SEQ ID NO: 5040356 - DNA, 25 bp, Homo sapien
tccttgaagagggagatcttgctca

SEQ ID NO: 5040357 - DNA, 25 bp, Homo sapien
tgtccagctcactgtgggacccagg

SEQ ID NO: 5040358 - DNA, 25 bp, Homo sapien
aaggcggcaggcttaggcgaggtcc

SEQ ID NO: 5040359 - DNA, 25 bp, Homo sapien
gagattagccttcctccaactggag

SEQ ID NO: 5040360 - DNA, 25 bp, Homo sapien
tcatccgggaagttgctcaccctgc

SEQ ID NO: 5040361 - DNA, 25 bp, Homo sapien
ggtgtccctctaagacccagatgtt

SEQ ID NO: 5040362 - DNA, 25 bp, Homo sapien
tgtggatggcctgagttggtcccca

SEQ ID NO: 5040363 - DNA, 25 bp, Homo sapien
aatcggacacgaggaaaggtctgca

SEQ ID NO: 5040364 - DNA, 25 bp, Homo sapien
tcctccgttcattcccccgaacatc

SEQ ID NO: 5040365 - DNA, 25 bp, Homo sapien
ctaatcggacacgaggaaaggtctg

SEQ ID NO: 5040366 - DNA, 25 bp, Homo sapien
ggacacgaggaaaggtctgcattga

SEQ ID NO: 5040367 - DNA, 25 bp, Homo sapien
cagcctcgccagatagttgtcatca

SEQ ID NO: 5040368 - DNA, 25 bp, Homo sapien
aacagctctgggttcaagtccgggc

SEQ ID NO: 5040369 - DNA, 25 bp, Homo sapien
tgtgccgacaatgacctcagcagaa

SEQ ID NO: 5040370 - DNA, 25 bp, Homo sapien
tgtggtggcttctctaaccgggaac

SEQ ID NO: 5040371 - DNA, 25 bp, Homo sapien
ttccatcctagcactgcttgctgca

SEQ ID NO: 5040372 - DNA, 25 bp, Homo sapien
gttctttccatcctagcactgcttg

SEQ ID NO: 5040373 - DNA, 25 bp, Homo sapien
cttttggatgcctcttagggggatg

SEQ ID NO: 5040374 - DNA, 25 bp, Homo sapien
ggatgagttctttccatcctagcac

SEQ ID NO: 5040375 - DNA, 25 bp, Homo sapien
aattgggacctaagctcgattccga

SEQ ID NO: 5040376 - DNA, 25 bp, Homo sapien
cacttcatgatatgcggctgcacag

SEQ ID NO: 5040377 - DNA, 25 bp, Homo sapien
gaaagtcatctgtaagccgtgctga

SEQ ID NO: 5040378 - DNA, 25 bp, Homo sapien
tccaacctcaggaaagatcgctgtg

SEQ ID NO: 5040379 - DNA, 25 bp, Homo sapien
ttactcagggtttgacttcagccag

SEQ ID NO: 5040380 - DNA, 25 bp, Homo sapien
tcagccagggaacataacctttctg

SEQ ID NO: 5040381 - DNA, 25 bp, Homo sapien
tagagcagtgggtggatttacagac

SEQ ID NO: 5040382 - DNA, 25 bp, Homo sapien
catgggctgtgaccctgggagttta

SEQ ID NO: 5040383 - DNA, 25 bp, Homo sapien
tacagttaactgagctcacgtggcg

SEQ ID NO: 5040384 - DNA, 25 bp, Homo sapien
gaacaagccgttgaaagtcccctca

SEQ ID NO: 5040385 - DNA, 25 bp, Homo sapien
gaaaaggcgatgatcacagtccagg

SEQ ID NO: 5040386 - DNA, 25 bp, Homo sapien
gacccaaggccatagtaagttccag

SEQ ID NO: 5040387 - DNA, 25 bp, Homo sapien
tattcgtccagtaacgtttgtcagg

SEQ ID NO: 5040388 - DNA, 25 bp, Homo sapien
cacagggactgcgaaggcttattgc

SEQ ID NO: 5040389 - DNA, 25 bp, Homo sapien
gaatttgcactgtgagggaactcac

SEQ ID NO: 5040390 - DNA, 25 bp, Homo sapien
aaggagtgccatgacgacgatgacc

SEQ ID NO: 5040391 - DNA, 25 bp, Homo sapien
gacaagcagatgggttcagggaagg

SEQ ID NO: 5040392 - DNA, 25 bp, Homo sapien
tccaggacaagcagatgggttcagg

SEQ ID NO: 5040393 - DNA, 25 bp, Homo sapien
ggacaagcagatgggttcagggaag

SEQ ID NO: 5040394 - DNA, 25 bp, Homo sapien
caggacaagcagatgggttcaggga

SEQ ID NO: 5040395 - DNA, 25 bp, Homo sapien
ggagtcctgttttgacagttgtcat

SEQ ID NO: 5040396 - DNA, 25 bp, Homo sapien
tgggagtcctgttttgacagttgtc

SEQ ID NO: 5040397 - DNA, 25 bp, Homo sapien
gggagtcctgttttgacagttgtca

SEQ ID NO: 5040398 - DNA, 25 bp, Homo sapien
cccgctgatgacaaagggacaggtc

SEQ ID NO: 5040399 - DNA, 25 bp, Homo sapien
acccgctgatgacaaagggacaggt

SEQ ID NO: 5040400 - DNA, 25 bp, Homo sapien
cacccgctgatgacaaagggacagg

SEQ ID NO: 5040401 - DNA, 25 bp, Homo sapien
ccacccgctgatgacaaagggacag

SEQ ID NO: 5040402 - DNA, 25 bp, Homo sapien
ctggaagatgaagaatgaactgggc

SEQ ID NO: 5040403 - DNA, 25 bp, Homo sapien
tgaagaatgaactgggcagtgaagt

SEQ ID NO: 5040404 - DNA, 25 bp, Homo sapien
tggaagatgaagaatgaactgggca

SEQ ID NO: 5040405 - DNA, 25 bp, Homo sapien
agatgaagaatgaactgggcagtga

SEQ ID NO: 5040406 - DNA, 25 bp, Homo sapien
tttgtgctcagccaacaatcctgtg

SEQ ID NO: 5040407 - DNA, 25 bp, Homo sapien
tttatggaaggtctgcctggctgac

SEQ ID NO: 5040408 - DNA, 25 bp, Homo sapien
ccatacacagattgcatagggtttt

SEQ ID NO: 5040409 - DNA, 25 bp, Homo sapien
gatctgtcagaactgattgggagaa

SEQ ID NO: 5040410 - DNA, 25 bp, Homo sapien
tcaagtgtgggttctgcccctgaag

SEQ ID NO: 5040411 - DNA, 25 bp, Homo sapien
agcccaggctctaatttattcccct

SEQ ID NO: 5040412 - DNA, 25 bp, Homo sapien
tgttttctcacaatggaggctccag

SEQ ID NO: 5040413 - DNA, 25 bp, Homo sapien
tctccaggtatcaccctcagaaata

SEQ ID NO: 5040414 - DNA, 25 bp, Homo sapien
aactgttcatctcccctggttgcag

SEQ ID NO: 5040415 - DNA, 25 bp, Homo sapien
taaaccgcagttgtaagttcggtgc

SEQ ID NO: 5040416 - DNA, 25 bp, Homo sapien
tgaaggcttcttatcactataggat

SEQ ID NO: 5040417 - DNA, 25 bp, Homo sapien
tataggattaagtctgtaaaccgca

SEQ ID NO: 5040418 - DNA, 25 bp, Homo sapien
ggtgacagcatgcttccccatgcat

SEQ ID NO: 5040419 - DNA, 25 bp, Homo sapien
tcacccacgtccgtggtgatgggtg

SEQ ID NO: 5040420 - DNA, 25 bp, Homo sapien
gttctcacccacgtccgtggtgatg

SEQ ID NO: 5040421 - DNA, 25 bp, Homo sapien
cccacgtccgtggtgatgggtgtta

SEQ ID NO: 5040422 - DNA, 25 bp, Homo sapien
agtttgcagccgtattaagggctcg

SEQ ID NO: 5040423 - DNA, 25 bp, Homo sapien
tctacagacgagtgttgagcacctg

SEQ ID NO: 5040424 - DNA, 25 bp, Homo sapien
cctccctgggacacagttgttgcag

SEQ ID NO: 5040425 - DNA, 25 bp, Homo sapien
taagggctcggccttacagtgcgtg

SEQ ID NO: 5040426 - DNA, 25 bp, Homo sapien
ctgtgattaaggtgacataggtttt

SEQ ID NO: 5040427 - DNA, 25 bp, Homo sapien
tcagggtgattctcgccctcttgtt

SEQ ID NO: 5040428 - DNA, 25 bp, Homo sapien
tctacgtaataaatcctaacatctg

SEQ ID NO: 5040429 - DNA, 25 bp, Homo sapien
catggatggttaatactccaggctc

SEQ ID NO: 5040430 - DNA, 25 bp, Homo sapien
cagaacttttcagcgttctttattc

SEQ ID NO: 5040431 - DNA, 25 bp, Homo sapien
gctgactaagcttcatgtcattcat

SEQ ID NO: 5040432 - DNA, 25 bp, Homo sapien
gagtttgtgctgactaagcttcatg

SEQ ID NO: 5040433 - DNA, 25 bp, Homo sapien
gtttgtgctgactaagcttcatgtc

SEQ ID NO: 5040434 - DNA, 25 bp, Homo sapien
gctccaatgtgttcgggaagctggc

SEQ ID NO: 5040435 - DNA, 25 bp, Homo sapien
taaggtaagcgactttatcttcctg

SEQ ID NO: 5040436 - DNA, 25 bp, Homo sapien
aaatagcttttggagttgacgacct

SEQ ID NO: 5040437 - DNA, 25 bp, Homo sapien
tgacctctcggtgtgtcttcctgtg

SEQ ID NO: 5040438 - DNA, 25 bp, Homo sapien
tagtgaatgcgccacttgtagcaga

SEQ ID NO: 5040439 - DNA, 25 bp, Homo sapien
gcgccacttgtagcagaaggtgcag

SEQ ID NO: 5040440 - DNA, 25 bp, Homo sapien
catctcctagtgaatgcgccacttg

SEQ ID NO: 5040441 - DNA, 25 bp, Homo sapien
tgaatgcgccacttgtagcagaagg

SEQ ID NO: 5040442 - DNA, 25 bp, Homo sapien
tttgaaagctatgcaagggtggaaa

SEQ ID NO: 5040443 - DNA, 25 bp, Homo sapien
agaagtcagaactgagagcatagca

SEQ ID NO: 5040444 - DNA, 25 bp, Homo sapien
ttgaaagctatgcaagggtggaaag

SEQ ID NO: 5040445 - DNA, 25 bp, Homo sapien
gaagtcagaactgagagcatagcag

SEQ ID NO: 5040446 - DNA, 25 bp, Homo sapien
taaattttcaaaagcgcatttgcgt

SEQ ID NO: 5040447 - DNA, 25 bp, Homo sapien
cttcatcttttgtattgtgccttaa

SEQ ID NO: 5040448 - DNA, 25 bp, Homo sapien
tctgttgtgctacatatgtcatctt

SEQ ID NO: 5040449 - DNA, 25 bp, Homo sapien
gcgcatttgcgtttcaaatctgctg

SEQ ID NO: 5040450 - DNA, 25 bp, Homo sapien
tggagggctggaacaagctattctc

SEQ ID NO: 5040451 - DNA, 25 bp, Homo sapien
tgaaagccagaagcttggcaggtct

SEQ ID NO: 5040452 - DNA, 25 bp, Homo sapien
gggtgacggagagacatttccctag

SEQ ID NO: 5040453 - DNA, 25 bp, Homo sapien
tggaacaagctattctcatattggg

SEQ ID NO: 5040454 - DNA, 25 bp, Homo sapien
cctttagaccttcactttgctcttt

SEQ ID NO: 5040455 - DNA, 25 bp, Homo sapien
gctccctgcctgatactgccacact

SEQ ID NO: 5040456 - DNA, 25 bp, Homo sapien
tgctggctccctgcctgatactgcc

SEQ ID NO: 5040457 - DNA, 25 bp, Homo sapien
tcttccctttagaccttcactttgc

SEQ ID NO: 5040458 - DNA, 25 bp, Homo sapien
catgcttggagaacgttttcttgag

SEQ ID NO: 5040459 - DNA, 25 bp, Homo sapien
tggcattttgacagcacataggaca

SEQ ID NO: 5040460 - DNA, 25 bp, Homo sapien
gagttaactgaattcaggacactga

SEQ ID NO: 5040461 - DNA, 25 bp, Homo sapien
ttcttgagttaactgaattcaggac

SEQ ID NO: 5040462 - DNA, 25 bp, Homo sapien
ctccccagcaccttgtgtggtgact

SEQ ID NO: 5040463 - DNA, 25 bp, Homo sapien
gcaggaggtagccattccctcctgt

SEQ ID NO: 5040464 - DNA, 25 bp, Homo sapien
caggaggtagccattccctcctgtc

SEQ ID NO: 5040465 - DNA, 25 bp, Homo sapien
ctgagtcttcagccgccgccccctg

SEQ ID NO: 5040466 - DNA, 25 bp, Homo sapien
tgagtcttcagccgccgccccctgc

SEQ ID NO: 5040467 - DNA, 25 bp, Homo sapien
agtcttcagccgccgccccctgctg

SEQ ID NO: 5040468 - DNA, 25 bp, Homo sapien
gagtcttcagccgccgccccctgct

SEQ ID NO: 5040469 - DNA, 25 bp, Homo sapien
tagaaccccttggttagccccatca

SEQ ID NO: 5040470 - DNA, 25 bp, Homo sapien
acactgctcctagaaccccttggtt

SEQ ID NO: 5040471 - DNA, 25 bp, Homo sapien
ttggttagccccatcagggatgtcc

SEQ ID NO: 5040472 - DNA, 25 bp, Homo sapien
cactgctcctagaaccccttggtta

SEQ ID NO: 5040473 - DNA, 25 bp, Homo sapien
gacgcttcgggttttccacagtgaa

SEQ ID NO: 5040474 - DNA, 25 bp, Homo sapien
tggctgcttgcccacaaccatgact

SEQ ID NO: 5040475 - DNA, 25 bp, Homo sapien
cagcctgctgtgcataaaggtgacg

SEQ ID NO: 5040476 - DNA, 25 bp, Homo sapien
tgaccatgcagggtggaaacaacct

SEQ ID NO: 5040477 - DNA, 25 bp, Homo sapien
gacacacttcctgtgaccctttcag

SEQ ID NO: 5040478 - DNA, 25 bp, Homo sapien
tgaccctttcagactcgccattggc

SEQ ID NO: 5040479 - DNA, 25 bp, Homo sapien
tgagccactcacagagtgggaaagg

SEQ ID NO: 5040480 - DNA, 25 bp, Homo sapien
cttgttgaccttgagccactcacag

SEQ ID NO: 5040481 - DNA, 25 bp, Homo sapien
actgtgttagacaatcctgcctccc

SEQ ID NO: 5040482 - DNA, 25 bp, Homo sapien
cactgtgttagacaatcctgcctcc

SEQ ID NO: 5040483 - DNA, 25 bp, Homo sapien
ctgtgttagacaatcctgcctccct

SEQ ID NO: 5040484 - DNA, 25 bp, Homo sapien
gaacatccctctgcatccggatgca

SEQ ID NO: 5040485 - DNA, 25 bp, Homo sapien
gatgcatccagtactctcggtttgt

SEQ ID NO: 5040486 - DNA, 25 bp, Homo sapien
tcagaacatccctctgcatccggat

SEQ ID NO: 5040487 - DNA, 25 bp, Homo sapien
catccagtactctcggtttgtctgg

SEQ ID NO: 5040488 - DNA, 25 bp, Homo sapien
gatattttggcacgcaatcttgcga

SEQ ID NO: 5040489 - DNA, 25 bp, Homo sapien
gaatgtgaacaatgggaacctgagc

SEQ ID NO: 5040490 - DNA, 25 bp, Homo sapien
taaaccacgctgtgtctaagatgca

SEQ ID NO: 5040491 - DNA, 25 bp, Homo sapien
gagatgactagcagggtaaaccacg

SEQ ID NO: 5040492 - DNA, 25 bp, Homo sapien
taatcgcacctcggtgaaacctcat

SEQ ID NO: 5040493 - DNA, 25 bp, Homo sapien
caataatcgcacctcggtgaaacct

SEQ ID NO: 5040494 - DNA, 25 bp, Homo sapien
aataatcgcacctcggtgaaacctc

SEQ ID NO: 5040495 - DNA, 25 bp, Homo sapien
atcgcacctcggtgaaacctcattg

SEQ ID NO: 5040496 - DNA, 25 bp, Homo sapien
caagaaagctttgagagtgcttagt

SEQ ID NO: 5040497 - DNA, 25 bp, Homo sapien
ccgtgtctggccgtgggcggtgctg

SEQ ID NO: 5040498 - DNA, 25 bp, Homo sapien
gaagttctagatggactgaacctga

SEQ ID NO: 5040499 - DNA, 25 bp, Homo sapien
aatgaaccgaacagagaacacagac

SEQ ID NO: 5040500 - DNA, 25 bp, Homo sapien
gtcgggggtgatgccacatgtggcc

SEQ ID NO: 5040501 - DNA, 25 bp, Homo sapien
cgggggtgatgccacatgtggccca

SEQ ID NO: 5040502 - DNA, 25 bp, Homo sapien
gtgtcgggggtgatgccacatgtgg

SEQ ID NO: 5040503 - DNA, 25 bp, Homo sapien
cttgtgtcgggggtgatgccacatg

SEQ ID NO: 5040504 - DNA, 25 bp, Homo sapien
acagcttctttaccactatgtgtaa

SEQ ID NO: 5040505 - DNA, 25 bp, Homo sapien
taccactatgtgtaatgccattctg

SEQ ID NO: 5040506 - DNA, 25 bp, Homo sapien
cattgctgcatgtaatgacatcttc

SEQ ID NO: 5040507 - DNA, 25 bp, Homo sapien
tcgtcaccacatgtaacagcttctt

SEQ ID NO: 5040508 - DNA, 25 bp, Homo sapien
agagaacgtcagagccactgcgtct

SEQ ID NO: 5040509 - DNA, 25 bp, Homo sapien
ccagagaacgtcagagccactgcgt

SEQ ID NO: 5040510 - DNA, 25 bp, Homo sapien
ctgccagagaacgtcagagccactg

SEQ ID NO: 5040511 - DNA, 25 bp, Homo sapien
agccactgcgtctggaccagctgaa

SEQ ID NO: 5040512 - DNA, 25 bp, Homo sapien
ctggcagggccaaatctggtgtccg

SEQ ID NO: 5040513 - DNA, 25 bp, Homo sapien
ggccttccaagttcttgctgcctct

SEQ ID NO: 5040514 - DNA, 25 bp, Homo sapien
ggccttgcacacataagatgcactg

SEQ ID NO: 5040515 - DNA, 25 bp, Homo sapien
tctggtgtccggttcactcttggcc

SEQ ID NO: 5040516 - DNA, 25 bp, Homo sapien
ggtacggaagcaggatgccttccgt

SEQ ID NO: 5040517 - DNA, 25 bp, Homo sapien
tgtatttgctcagcggttcggggta

SEQ ID NO: 5040518 - DNA, 25 bp, Homo sapien
gccttccgtcattgcaccctgggtg

SEQ ID NO: 5040519 - DNA, 25 bp, Homo sapien
ttgcaccctgggtgttcggggcctc

SEQ ID NO: 5040520 - DNA, 25 bp, Homo sapien
gttcagccacctcggtttcaggcca

SEQ ID NO: 5040521 - DNA, 25 bp, Homo sapien
tgcattgcacactcctttgaagcct

SEQ ID NO: 5040522 - DNA, 25 bp, Homo sapien
tcctgcaggcgtaggctgcccagtg

SEQ ID NO: 5040523 - DNA, 25 bp, Homo sapien
caagctggcccgagcgcgcaaggca

SEQ ID NO: 5040524 - DNA, 25 bp, Homo sapien
ctgctgtgcctacagctctggatcc

SEQ ID NO: 5040525 - DNA, 25 bp, Homo sapien
gctgtgcctacagctctggatcctg

SEQ ID NO: 5040526 - DNA, 25 bp, Homo sapien
tagaaacggtcgcagcccacactgc

SEQ ID NO: 5040527 - DNA, 25 bp, Homo sapien
atgggtgtagaaacggtcgcagccc

SEQ ID NO: 5040528 - DNA, 25 bp, Homo sapien
ctgtgcccaagtcagacttatgtga

SEQ ID NO: 5040529 - DNA, 25 bp, Homo sapien
tgcccaagtcagacttatgtgactc

SEQ ID NO: 5040530 - DNA, 25 bp, Homo sapien
cccaagtcagacttatgtgactctt

SEQ ID NO: 5040531 - DNA, 25 bp, Homo sapien
gcccaagtcagacttatgtgactct

SEQ ID NO: 5040532 - DNA, 25 bp, Homo sapien
ctccttgtgtagttggagctgcttc

SEQ ID NO: 5040533 - DNA, 25 bp, Homo sapien
gcattcctccttgtgtagttggagc

SEQ ID NO: 5040534 - DNA, 25 bp, Homo sapien
cttgaagtaaggcattcctccttgt

SEQ ID NO: 5040535 - DNA, 25 bp, Homo sapien
gccttgaagtaaggcattcctcctt

SEQ ID NO: 5040536 - DNA, 25 bp, Homo sapien
tctccacagggatgtcacaatgcag

SEQ ID NO: 5040537 - DNA, 25 bp, Homo sapien
gggatgtcacaatgcagggcaatgt

SEQ ID NO: 5040538 - DNA, 25 bp, Homo sapien
cctcgtcatcgacaggaaggcactg

SEQ ID NO: 5040539 - DNA, 25 bp, Homo sapien
ctcttgtacctcgtcatcgacagga

SEQ ID NO: 5040540 - DNA, 25 bp, Homo sapien
gttaccgcacctgggttttgccaga

SEQ ID NO: 5040541 - DNA, 25 bp, Homo sapien
tgtcaggcattgcaggagtgagtgg

SEQ ID NO: 5040542 - DNA, 25 bp, Homo sapien
gccgtgtcggcaacaggcttggaaa

SEQ ID NO: 5040543 - DNA, 25 bp, Homo sapien
tattgtgttgttgcactttgtttgc

SEQ ID NO: 5040544 - DNA, 25 bp, Homo sapien
cactttgtttgcattcctgaggccg

SEQ ID NO: 5040545 - DNA, 25 bp, Homo sapien
cctgaggccgtgtcggcaacaggct

SEQ ID NO: 5040546 - DNA, 25 bp, Homo sapien
tggcctggtggacaaagcaccctgc

SEQ ID NO: 5040547 - DNA, 25 bp, Homo sapien
tcttcagtaggaaacatggtaattc

SEQ ID NO: 5040548 - DNA, 25 bp, Homo sapien
tctccagatgtctgcaaccaagtca

SEQ ID NO: 5040549 - DNA, 25 bp, Homo sapien
ggcaggtcttcggaaggagatttaa

SEQ ID NO: 5040550 - DNA, 25 bp, Homo sapien
cagactggcatccagccattccttc

SEQ ID NO: 5040551 - DNA, 25 bp, Homo sapien
ctcctgtgtcagaaattgattattc

SEQ ID NO: 5040552 - DNA, 25 bp, Homo sapien
agactggcatccagccattccttct

SEQ ID NO: 5040553 - DNA, 25 bp, Homo sapien
tgtgaataatgtgaagtgcaggacc

SEQ ID NO: 5040554 - DNA, 25 bp, Homo sapien
ggtcatttgaactcggtgactggaa

SEQ ID NO: 5040555 - DNA, 25 bp, Homo sapien
caaatagttttgcagccccaaggga

SEQ ID NO: 5040556 - DNA, 25 bp, Homo sapien
tgtgaagcttccttaatggcaagtg

SEQ ID NO: 5040557 - DNA, 25 bp, Homo sapien
ccctgggattgatccctgtgtcctc

SEQ ID NO: 5040558 - DNA, 25 bp, Homo sapien
cccctgggattgatccctgtgtcct

SEQ ID NO: 5040559 - DNA, 25 bp, Homo sapien
cctgggattgatccctgtgtcctcc

SEQ ID NO: 5040560 - DNA, 25 bp, Homo sapien
ccccctgggattgatccctgtgtcc

SEQ ID NO: 5040561 - DNA, 25 bp, Homo sapien
gttacaaaagcagtgatccagggca

SEQ ID NO: 5040562 - DNA, 25 bp, Homo sapien
tgttacaaaagcagtgatccagggc

SEQ ID NO: 5040563 - DNA, 25 bp, Homo sapien
gtgttacaaaagcagtgatccaggg

SEQ ID NO: 5040564 - DNA, 25 bp, Homo sapien
tctgtgctctgcaaggctttctcat

SEQ ID NO: 5040565 - DNA, 25 bp, Homo sapien
ttctgtgctctgcaaggctttctca

SEQ ID NO: 5040566 - DNA, 25 bp, Homo sapien
tgctctcctgggtactatccctggc

SEQ ID NO: 5040567 - DNA, 25 bp, Homo sapien
tgtgctctgcaaggctttctcatta

SEQ ID NO: 5040568 - DNA, 25 bp, Homo sapien
aagcaggtcatttcgagatgtttgc

SEQ ID NO: 5040569 - DNA, 25 bp, Homo sapien
agaagcaggtcatttcgagatgttt

SEQ ID NO: 5040570 - DNA, 25 bp, Homo sapien
agcaggtcatttcgagatgtttgcg

SEQ ID NO: 5040571 - DNA, 25 bp, Homo sapien
caggtcatttcgagatgtttgcgtc

SEQ ID NO: 5040572 - DNA, 25 bp, Homo sapien
aattgactaccccactgattattca

SEQ ID NO: 5040573 - DNA, 25 bp, Homo sapien
cttctaattgactaccccactgatt

SEQ ID NO: 5040574 - DNA, 25 bp, Homo sapien
tctaattgactaccccactgattat

SEQ ID NO: 5040575 - DNA, 25 bp, Homo sapien
taattgactaccccactgattattc

SEQ ID NO: 5040576 - DNA, 25 bp, Homo sapien
cattcacttcctctgtgggtttttc

SEQ ID NO: 5040577 - DNA, 25 bp, Homo sapien
tttgaaagactcttagttcctcatg

SEQ ID NO: 5040578 - DNA, 25 bp, Homo sapien
tcttagttcctcatgtatgacagca

SEQ ID NO: 5040579 - DNA, 25 bp, Homo sapien
tgtatgacagcaagagtggacctca

SEQ ID NO: 5040580 - DNA, 25 bp, Homo sapien
tcggatctcggcattaaatctcccc

SEQ ID NO: 5040581 - DNA, 25 bp, Homo sapien
cgtcatccttgtagaacgaggttcg

SEQ ID NO: 5040582 - DNA, 25 bp, Homo sapien
tcgtttaaattccaggtcgtcatcc

SEQ ID NO: 5040583 - DNA, 25 bp, Homo sapien
tgccatttgcagaacacttcctgag

SEQ ID NO: 5040584 - DNA, 25 bp, Homo sapien
ccctttggtccctatgttctcaggc

SEQ ID NO: 5040585 - DNA, 25 bp, Homo sapien
ctttggtccctatgttctcaggcca

SEQ ID NO: 5040586 - DNA, 25 bp, Homo sapien
tccctttggtccctatgttctcagg

SEQ ID NO: 5040587 - DNA, 25 bp, Homo sapien
ttccctttggtccctatgttctcag

SEQ ID NO: 5040588 - DNA, 25 bp, Homo sapien
aataggcatagtatctgtcaagacc

SEQ ID NO: 5040589 - DNA, 25 bp, Homo sapien
taggcatagtatctgtcaagaccag

SEQ ID NO: 5040590 - DNA, 25 bp, Homo sapien
gcatagtatctgtcaagaccagtct

SEQ ID NO: 5040591 - DNA, 25 bp, Homo sapien
tcaataggcatagtatctgtcaaga

SEQ ID NO: 5040592 - DNA, 25 bp, Homo sapien
tcctgaacccagaccacacagtgcc

SEQ ID NO: 5040593 - DNA, 25 bp, Homo sapien
cacactcaattaatctttgacaatc

SEQ ID NO: 5040594 - DNA, 25 bp, Homo sapien
gcccacactcaattaatctttgaca

SEQ ID NO: 5040595 - DNA, 25 bp, Homo sapien
cagtgcccacactcaattaatcttt

SEQ ID NO: 5040596 - DNA, 25 bp, Homo sapien
gagtcaacctgacctatgattcaca

SEQ ID NO: 5040597 - DNA, 25 bp, Homo sapien
tccaggcttgctggtggagcttcag

SEQ ID NO: 5040598 - DNA, 25 bp, Homo sapien
taaacagttagcgtgcctgtccacg

SEQ ID NO: 5040599 - DNA, 25 bp, Homo sapien
gttcaagtgaactagaatgggcaga

SEQ ID NO: 5040600 - DNA, 25 bp, Homo sapien
taggctgccatgcagtggcgcaaac

SEQ ID NO: 5040601 - DNA, 25 bp, Homo sapien
ccgtttataccagtgttgacagggt

SEQ ID NO: 5040602 - DNA, 25 bp, Homo sapien
tttataccagtgttgacagggtctc

SEQ ID NO: 5040603 - DNA, 25 bp, Homo sapien
tataccagtgttgacagggtctcac

SEQ ID NO: 5040604 - DNA, 25 bp, Homo sapien
ccatgtggttgtttgtgatgaacta

SEQ ID NO: 5040605 - DNA, 25 bp, Homo sapien
tagtatgtcctgtatctcaagagga

SEQ ID NO: 5040606 - DNA, 25 bp, Homo sapien
tgatgaactacaggttgctgacttt

SEQ ID NO: 5040607 - DNA, 25 bp, Homo sapien
tcaaaggatatgactgttgctcagc

SEQ ID NO: 5040608 - DNA, 25 bp, Homo sapien
tggtacctatgtgccaaagttccag

SEQ ID NO: 5040609 - DNA, 25 bp, Homo sapien
aatgattagaacatcgcttggcgca

SEQ ID NO: 5040610 - DNA, 25 bp, Homo sapien
tggtatttaagcagaaccttcaccc

SEQ ID NO: 5040611 - DNA, 25 bp, Homo sapien
tctaatcttggctctgtggcgtgac

SEQ ID NO: 5040612 - DNA, 25 bp, Homo sapien
gggcttcagcaatgtccttggctgc

SEQ ID NO: 5040613 - DNA, 25 bp, Homo sapien
ttaattcacggtcccagctcgtggc

SEQ ID NO: 5040614 - DNA, 25 bp, Homo sapien
cgtggcgcagacttgccagtgaaag

SEQ ID NO: 5040615 - DNA, 25 bp, Homo sapien
ggtcccagctcgtggcgcagacttg

SEQ ID NO: 5040616 - DNA, 25 bp, Homo sapien
ggaaccagcttgaggtacgcattct

SEQ ID NO: 5040617 - DNA, 25 bp, Homo sapien
gcaagttgaaaacaaggaaccagct

SEQ ID NO: 5040618 - DNA, 25 bp, Homo sapien
cctgtctgaggatgatcacggattt

SEQ ID NO: 5040619 - DNA, 25 bp, Homo sapien
tgtttgttagcgttgcggtcagccg

SEQ ID NO: 5040620 - DNA, 25 bp, Homo sapien
tgcagagtgttctctttaaaagacg

SEQ ID NO: 5040621 - DNA, 25 bp, Homo sapien
gcagagtgttctctttaaaagacgc

SEQ ID NO: 5040622 - DNA, 25 bp, Homo sapien
cagagtgttctctttaaaagacgct

SEQ ID NO: 5040623 - DNA, 25 bp, Homo sapien
agagtgttctctttaaaagacgctt

SEQ ID NO: 5040624 - DNA, 25 bp, Homo sapien
ccctggacctctgggagaagactca

SEQ ID NO: 5040625 - DNA, 25 bp, Homo sapien
atgggaagatcacagccgcataggg

SEQ ID NO: 5040626 - DNA, 25 bp, Homo sapien
ctttatgcaaatgtgggcatctctg

SEQ ID NO: 5040627 - DNA, 25 bp, Homo sapien
agggaggccctgcttgccggtatca

SEQ ID NO: 5040628 - DNA, 25 bp, Homo sapien
tcgaagccaatcatgggcgccactg

SEQ ID NO: 5040629 - DNA, 25 bp, Homo sapien
gacctgtgtccaatgagagatctca

SEQ ID NO: 5040630 - DNA, 25 bp, Homo sapien
gaatcagggaggacacctcatctgg

SEQ ID NO: 5040631 - DNA, 25 bp, Homo sapien
tcagttaaagtagaatagaccacgc

SEQ ID NO: 5040632 - DNA, 25 bp, Homo sapien
tgtggagggctgtctcgccatggtt

SEQ ID NO: 5040633 - DNA, 25 bp, Homo sapien
catttggtattgacagtcttcttga

SEQ ID NO: 5040634 - DNA, 25 bp, Homo sapien
agtgatccacaatgcctagccaata

SEQ ID NO: 5040635 - DNA, 25 bp, Homo sapien
gctgtctcgccatggttgttattta

SEQ ID NO: 5040636 - DNA, 25 bp, Homo sapien
cagtgctgggctgggttatttcggt

SEQ ID NO: 5040637 - DNA, 25 bp, Homo sapien
gaagccttgtatctccctggcagtc

SEQ ID NO: 5040638 - DNA, 25 bp, Homo sapien
catgtggccctcgagccagtgctgg

SEQ ID NO: 5040639 - DNA, 25 bp, Homo sapien
ggttatttcggttcacactctcgcc

SEQ ID NO: 5040640 - DNA, 25 bp, Homo sapien
agaccatcctgggaagtaggcggct

SEQ ID NO: 5040641 - DNA, 25 bp, Homo sapien
tcctgggaagtaggcggctcccaca

SEQ ID NO: 5040642 - DNA, 25 bp, Homo sapien
gggaggatgccacacagctttgagt

SEQ ID NO: 5040643 - DNA, 25 bp, Homo sapien
ctcccacaacccggttgggagcgtg

SEQ ID NO: 5040644 - DNA, 25 bp, Homo sapien
tgcctccaacacgtggtgcagtttc

SEQ ID NO: 5040645 - DNA, 25 bp, Homo sapien
gacatctgcccgatatctttctctt

SEQ ID NO: 5040646 - DNA, 25 bp, Homo sapien
gactcagatgataccagctctatga

SEQ ID NO: 5040647 - DNA, 25 bp, Homo sapien
ttgcatatactgtgacatctgcccg

SEQ ID NO: 5040648 - DNA, 25 bp, Homo sapien
gatatcacagtgcttagattagtgc

SEQ ID NO: 5040649 - DNA, 25 bp, Homo sapien
ttgaggacatactgcagagtatctg

SEQ ID NO: 5040650 - DNA, 25 bp, Homo sapien
atcatcttctgatatcacagtgctt

SEQ ID NO: 5040651 - DNA, 25 bp, Homo sapien
tgaggacatactgcagagtatctgt

SEQ ID NO: 5040652 - DNA, 25 bp, Homo sapien
tcagcctgatggcaagggatcctct

SEQ ID NO: 5040653 - DNA, 25 bp, Homo sapien
ggagtgccgtctttatccagagctg

SEQ ID NO: 5040654 - DNA, 25 bp, Homo sapien
caagggatcctctggagattgattg

SEQ ID NO: 5040655 - DNA, 25 bp, Homo sapien
gattgattgttgagtgggatcctag

SEQ ID NO: 5040656 - DNA, 25 bp, Homo sapien
ttcagtaatcacactgtggtcgtag

SEQ ID NO: 5040657 - DNA, 25 bp, Homo sapien
caagttcagtaatcacactgtggtc

SEQ ID NO: 5040658 - DNA, 25 bp, Homo sapien
tgaccaagttcagtaatcacactgt

SEQ ID NO: 5040659 - DNA, 25 bp, Homo sapien
cagtaatcacactgtggtcgtaggg

SEQ ID NO: 5040660 - DNA, 25 bp, Homo sapien
aataaagttttatcctgagcagggt

SEQ ID NO: 5040661 - DNA, 25 bp, Homo sapien
gaaaaagtagtttgccagtgtctgt

SEQ ID NO: 5040662 - DNA, 25 bp, Homo sapien
agagtgcgactagatttgaaccagg

SEQ ID NO: 5040663 - DNA, 25 bp, Homo sapien
taggcaatgtgcagacacgccatgt

SEQ ID NO: 5040664 - DNA, 25 bp, Homo sapien
aaaactctccaacacctttccatca

SEQ ID NO: 5040665 - DNA, 25 bp, Homo sapien
tctccaacacctttccatcacactc

SEQ ID NO: 5040666 - DNA, 25 bp, Homo sapien
tccaacacctttccatcacactcac

SEQ ID NO: 5040667 - DNA, 25 bp, Homo sapien
ctaaaactctccaacacctttccat

SEQ ID NO: 5040668 - DNA, 25 bp, Homo sapien
catggcttacaaagtcctctgtgct

SEQ ID NO: 5040669 - DNA, 25 bp, Homo sapien
ctctgtgctctgtccactggtgacc

SEQ ID NO: 5040670 - DNA, 25 bp, Homo sapien
gtcctctgtgctctgtccactggtg

SEQ ID NO: 5040671 - DNA, 25 bp, Homo sapien
tctgtgctctgtccactggtgacca

SEQ ID NO: 5040672 - DNA, 25 bp, Homo sapien
ggtggtcctccctgaagtatgcagc

SEQ ID NO: 5040673 - DNA, 25 bp, Homo sapien
caggttcctaagtgtgctgctgtgg

SEQ ID NO: 5040674 - DNA, 25 bp, Homo sapien
gcctgatagatggaacagcccacag

SEQ ID NO: 5040675 - DNA, 25 bp, Homo sapien
tcaaagctgggacacgctgacccag

SEQ ID NO: 5040676 - DNA, 25 bp, Homo sapien
gggcaaatttttctttgattcagag

SEQ ID NO: 5040677 - DNA, 25 bp, Homo sapien
ggcaaatttttctttgattcagaga

SEQ ID NO: 5040678 - DNA, 25 bp, Homo sapien
gagggcaaatttttctttgattcag

SEQ ID NO: 5040679 - DNA, 25 bp, Homo sapien
ctggagggcaaatttttctttgatt

SEQ ID NO: 5040680 - DNA, 25 bp, Homo sapien
gtggaagggacccacgacattcagg

SEQ ID NO: 5040681 - DNA, 25 bp, Homo sapien
ccaatattagcggttctaccatggg

SEQ ID NO: 5040682 - DNA, 25 bp, Homo sapien
gattatagcagacccattcactgga

SEQ ID NO: 5040683 - DNA, 25 bp, Homo sapien
tgttgggacacctaagagccactct

SEQ ID NO: 5040684 - DNA, 25 bp, Homo sapien
tggacacaatgcagcagctctccag

SEQ ID NO: 5040685 - DNA, 25 bp, Homo sapien
ctggacacaatgcagcagctctcca

SEQ ID NO: 5040686 - DNA, 25 bp, Homo sapien
tccttggtgtctaccttgctacatt

SEQ ID NO: 5040687 - DNA, 25 bp, Homo sapien
cttggtgtctaccttgctacattca

SEQ ID NO: 5040688 - DNA, 25 bp, Homo sapien
cagtcctttctgtaagcatttccca

SEQ ID NO: 5040689 - DNA, 25 bp, Homo sapien
ctctgttctattaggcagtcctttc

SEQ ID NO: 5040690 - DNA, 25 bp, Homo sapien
gccgcgggccggcttctgtaaatcg

SEQ ID NO: 5040691 - DNA, 25 bp, Homo sapien
gccggcttctgtaaatcgcgtgttg

SEQ ID NO: 5040692 - DNA, 25 bp, Homo sapien
ggaaaaatgagaacaggccgcgggc

SEQ ID NO: 5040693 - DNA, 25 bp, Homo sapien
atcgcgtgttgttggaattcctgtc

SEQ ID NO: 5040694 - DNA, 25 bp, Homo sapien
tgcagatggccacgaagtgtctccg

SEQ ID NO: 5040695 - DNA, 25 bp, Homo sapien
ctgctacttttaggcttgttgctga

SEQ ID NO: 5040696 - DNA, 25 bp, Homo sapien
caaacgagccgtctgctgaggagaa

SEQ ID NO: 5040697 - DNA, 25 bp, Homo sapien
ctgggtggccgctgacagagcttcc

SEQ ID NO: 5040698 - DNA, 25 bp, Homo sapien
gcttgaatggatggccttgagacac

SEQ ID NO: 5040699 - DNA, 25 bp, Homo sapien
gaatatttggatgactgctgcttga

SEQ ID NO: 5040700 - DNA, 25 bp, Homo sapien
gagacacctgaagaccctgatgtgc

SEQ ID NO: 5040701 - DNA, 25 bp, Homo sapien
agaccctgatgtgccttctgaatca

SEQ ID NO: 5040702 - DNA, 25 bp, Homo sapien
aggagttgagtaggtgcaggtcagg

SEQ ID NO: 5040703 - DNA, 25 bp, Homo sapien
gtctcctctggacgatgctcctctg

SEQ ID NO: 5040704 - DNA, 25 bp, Homo sapien
caggtctcctctggacgatgctcct

SEQ ID NO: 5040705 - DNA, 25 bp, Homo sapien
tcaggtctcctctggacgatgctcc

SEQ ID NO: 5040706 - DNA, 25 bp, Homo sapien
ctgattcttccagctccccgatcct

SEQ ID NO: 5040707 - DNA, 25 bp, Homo sapien
cttccagctccccgatcctctccat

SEQ ID NO: 5040708 - DNA, 25 bp, Homo sapien
tattattaagaactggttttcctga

SEQ ID NO: 5040709 - DNA, 25 bp, Homo sapien
ggttttcctgattcttccagctccc

SEQ ID NO: 5040710 - DNA, 25 bp, Homo sapien
ctttattaagtgtctgtgaacgaag

SEQ ID NO: 5040711 - DNA, 25 bp, Homo sapien
acgaagcgaaataatgttgtagagc

SEQ ID NO: 5040712 - DNA, 25 bp, Homo sapien
taatgttgtagagcactcggtattt

SEQ ID NO: 5040713 - DNA, 25 bp, Homo sapien
gcactcggtatttagtaagttccca

SEQ ID NO: 5040714 - DNA, 25 bp, Homo sapien
ttttagactctgtgtatctccgacc

SEQ ID NO: 5040715 - DNA, 25 bp, Homo sapien
gtatctccgacccttgcgaacatcg

SEQ ID NO: 5040716 - DNA, 25 bp, Homo sapien
tgctgttaatggcagattggctacg

SEQ ID NO: 5040717 - DNA, 25 bp, Homo sapien
gcgaacatcgcaccctgtgccatta

SEQ ID NO: 5040718 - DNA, 25 bp, Homo sapien
gcattccaggcgaatgtttctgaca

SEQ ID NO: 5040719 - DNA, 25 bp, Homo sapien
tgtgtttatggtggattcagcattc

SEQ ID NO: 5040720 - DNA, 25 bp, Homo sapien
tctgctctcctgatggtgtgtttat

SEQ ID NO: 5040721 - DNA, 25 bp, Homo sapien
gggtgtccaagttcacatgtccccg

SEQ ID NO: 5040722 - DNA, 25 bp, Homo sapien
gactttacaaaggtgatggtggctc

SEQ ID NO: 5040723 - DNA, 25 bp, Homo sapien
cattacttgtgggatgtggccaacc

SEQ ID NO: 5040724 - DNA, 25 bp, Homo sapien
accagtgggatgcaaccagccgttg

SEQ ID NO: 5040725 - DNA, 25 bp, Homo sapien
tacaggcgcagggatattaacctca

SEQ ID NO: 5040726 - DNA, 25 bp, Homo sapien
tgagctccactggtagagttatgag

SEQ ID NO: 5040727 - DNA, 25 bp, Homo sapien
tcgcaaaccaggaataataagacct

SEQ ID NO: 5040728 - DNA, 25 bp, Homo sapien
tgactagctctttgactgccagaga

SEQ ID NO: 5040729 - DNA, 25 bp, Homo sapien
tgaccctcagtattcccatcgcaaa

SEQ ID NO: 5040730 - DNA, 25 bp, Homo sapien
ggctgaatgaaagctactgtttttc

SEQ ID NO: 5040731 - DNA, 25 bp, Homo sapien
taacaacattaggaaagatggagtg

SEQ ID NO: 5040732 - DNA, 25 bp, Homo sapien
tagccatggagaattgtgcgttgag

SEQ ID NO: 5040733 - DNA, 25 bp, Homo sapien
gacttttgggtttagctattagcca

SEQ ID NO: 5040734 - DNA, 25 bp, Homo sapien
gaggctgaggttgctaccaacaagc

SEQ ID NO: 5040735 - DNA, 25 bp, Homo sapien
gagcactgaatcattcccctgtcca

SEQ ID NO: 5040736 - DNA, 25 bp, Homo sapien
cacatatttccttgaaggagcactg

SEQ ID NO: 5040737 - DNA, 25 bp, Homo sapien
cacagaataggtggccaaacagtta

SEQ ID NO: 5040738 - DNA, 25 bp, Homo sapien
gctgctcagaatgctgcataggccc

SEQ ID NO: 5040739 - DNA, 25 bp, Homo sapien
ctgcatggagccctgacgctgctca

SEQ ID NO: 5040740 - DNA, 25 bp, Homo sapien
tcagaatgctgcataggccctccta

SEQ ID NO: 5040741 - DNA, 25 bp, Homo sapien
ggagccctgacgctgctcagaatgc

SEQ ID NO: 5040742 - DNA, 25 bp, Homo sapien
gtgttccattctgatctccagctct

SEQ ID NO: 5040743 - DNA, 25 bp, Homo sapien
ccattctgatctccagctctaggtc

SEQ ID NO: 5040744 - DNA, 25 bp, Homo sapien
gcagtgttccattctgatctccagc

SEQ ID NO: 5040745 - DNA, 25 bp, Homo sapien
gttccattctgatctccagctctag

SEQ ID NO: 5040746 - DNA, 25 bp, Homo sapien
cttttcccccagctcagcaagctct

SEQ ID NO: 5040747 - DNA, 25 bp, Homo sapien
cctcctcactttctggggaagaatg

SEQ ID NO: 5040748 - DNA, 25 bp, Homo sapien
ccccagctcagcaagctctgtgccc

SEQ ID NO: 5040749 - DNA, 25 bp, Homo sapien
cagctcagcaagctctgtgccctcc

SEQ ID NO: 5040750 - DNA, 25 bp, Homo sapien
atattttcatctttactggatactg

SEQ ID NO: 5040751 - DNA, 25 bp, Homo sapien
tcatctttactggatactgagccac

SEQ ID NO: 5040752 - DNA, 25 bp, Homo sapien
catttgtaacataggaagactttcc

SEQ ID NO: 5040753 - DNA, 25 bp, Homo sapien
tctccgaggactttctgtcttccct

SEQ ID NO: 5040754 - DNA, 25 bp, Homo sapien
gaagactttcccaatctccgaggac

SEQ ID NO: 5040755 - DNA, 25 bp, Homo sapien
agatgccttttcaccagactctgga

SEQ ID NO: 5040756 - DNA, 25 bp, Homo sapien
tccagatatcttggtcgaatctttg

SEQ ID NO: 5040757 - DNA, 25 bp, Homo sapien
cttccttgtcacctagaatctgtgc

SEQ ID NO: 5040758 - DNA, 25 bp, Homo sapien
tcacctagaatctgtgcatagtcat

SEQ ID NO: 5040759 - DNA, 25 bp, Homo sapien
ccttgtcacctagaatctgtgcata

SEQ ID NO: 5040760 - DNA, 25 bp, Homo sapien
tcttggctcctctctggatttgctg

SEQ ID NO: 5040761 - DNA, 25 bp, Homo sapien
tctggatttgctggttcttaaggaa

SEQ ID NO: 5040762 - DNA, 25 bp, Homo sapien
tggatttgctggttcttaaggaaaa

SEQ ID NO: 5040763 - DNA, 25 bp, Homo sapien
cctcttggctcctctctggatttgc

SEQ ID NO: 5040764 - DNA, 25 bp, Homo sapien
ggcatgcaaaggcttcggcagatga

SEQ ID NO: 5040765 - DNA, 25 bp, Homo sapien
agccctcaaggggagaagctctaga

SEQ ID NO: 5040766 - DNA, 25 bp, Homo sapien
agtccctcaaggtggccggaagttg

SEQ ID NO: 5040767 - DNA, 25 bp, Homo sapien
tctcccctgctgctcatttgcataa

SEQ ID NO: 5040768 - DNA, 25 bp, Homo sapien
ttaactatcatgtggagagaggtgt

SEQ ID NO: 5040769 - DNA, 25 bp, Homo sapien
tgtatgtggcacattccattttcaa

SEQ ID NO: 5040770 - DNA, 25 bp, Homo sapien
gtttggacaccatattaataatagc

SEQ ID NO: 5040771 - DNA, 25 bp, Homo sapien
taatagctcttagtgtgtatgtggc

SEQ ID NO: 5040772 - DNA, 25 bp, Homo sapien
tcaagtgatataacctgttcctgat

SEQ ID NO: 5040773 - DNA, 25 bp, Homo sapien
gatttcatcgcattggtaaatcttc

SEQ ID NO: 5040774 - DNA, 25 bp, Homo sapien
gtgatataacctgttcctgatttca

SEQ ID NO: 5040775 - DNA, 25 bp, Homo sapien
tgttcctgatttcatcgcattggta

SEQ ID NO: 5040776 - DNA, 25 bp, Homo sapien
ggagcacaagaactccaaagtgacc

SEQ ID NO: 5040777 - DNA, 25 bp, Homo sapien
tttggagcacaagaactccaaagtg

SEQ ID NO: 5040778 - DNA, 25 bp, Homo sapien
gagcacaagaactccaaagtgacca

SEQ ID NO: 5040779 - DNA, 25 bp, Homo sapien
tggagcacaagaactccaaagtgac

SEQ ID NO: 5040780 - DNA, 25 bp, Homo sapien
ttggtaaaggcttggcttccatgac

SEQ ID NO: 5040781 - DNA, 25 bp, Homo sapien
catagaggagaacagtttcatttac

SEQ ID NO: 5040782 - DNA, 25 bp, Homo sapien
tctcaatagggggagtagtttcagc

SEQ ID NO: 5040783 - DNA, 25 bp, Homo sapien
ggcattctcaatagggggagtagtt

SEQ ID NO: 5040784 - DNA, 25 bp, Homo sapien
ggaaagtccagattcatcctgaaag

SEQ ID NO: 5040785 - DNA, 25 bp, Homo sapien
catgtgaaggtgtcatccaagggtt

SEQ ID NO: 5040786 - DNA, 25 bp, Homo sapien
gaatggctttctcgttaggctgcaa

SEQ ID NO: 5040787 - DNA, 25 bp, Homo sapien
agtgacattcagcagaggccttgtg

SEQ ID NO: 5040788 - DNA, 25 bp, Homo sapien
tatatatccacgaaatggaaagtta

SEQ ID NO: 5040789 - DNA, 25 bp, Homo sapien
atatatccacgaaatggaaagttaa

SEQ ID NO: 5040790 - DNA, 25 bp, Homo sapien
atcagcataaatatattggcttcca

SEQ ID NO: 5040791 - DNA, 25 bp, Homo sapien
aatcagcataaatatattggcttcc

SEQ ID NO: 5040792 - DNA, 25 bp, Homo sapien
tcagcataaatatattggcttccat

SEQ ID NO: 5040793 - DNA, 25 bp, Homo sapien
ttggtgtccactgtcagatcccggc

SEQ ID NO: 5040794 - DNA, 25 bp, Homo sapien
tcctgacagcatgcaatgagattgt

SEQ ID NO: 5040795 - DNA, 25 bp, Homo sapien
gctgaagatggaagctagtccctaa

SEQ ID NO: 5040796 - DNA, 25 bp, Homo sapien
agatcccggccaggttctgacttca

SEQ ID NO: 5040797 - DNA, 25 bp, Homo sapien
tagcagcaatggacaggtaccacgc

SEQ ID NO: 5040798 - DNA, 25 bp, Homo sapien
tccactgttagcagcaatggacagg

SEQ ID NO: 5040799 - DNA, 25 bp, Homo sapien
aaacctctgaattttccactgttag

SEQ ID NO: 5040800 - DNA, 25 bp, Homo sapien
ctgaattttccactgttagcagcaa

SEQ ID NO: 5040801 - DNA, 25 bp, Homo sapien
tttgccagatcgtagaagggaaaga

SEQ ID NO: 5040802 - DNA, 25 bp, Homo sapien
ctgcagaggcagtttttacggcagg

SEQ ID NO: 5040803 - DNA, 25 bp, Homo sapien
cagaggcagtttttacggcaggccc

SEQ ID NO: 5040804 - DNA, 25 bp, Homo sapien
aggccctttgccagatcgtagaagg

SEQ ID NO: 5040805 - DNA, 25 bp, Homo sapien
tcacaggtatcattcaaggataaag

SEQ ID NO: 5040806 - DNA, 25 bp, Homo sapien
caggtcacaggtatcattcaaggat

SEQ ID NO: 5040807 - DNA, 25 bp, Homo sapien
aagcacgatttacccttttcctgca

SEQ ID NO: 5040808 - DNA, 25 bp, Homo sapien
aactttctggcatcaaagcacgatt

SEQ ID NO: 5040809 - DNA, 25 bp, Homo sapien
tctgcttcccggcagacaggctgga

SEQ ID NO: 5040810 - DNA, 25 bp, Homo sapien
gctttctgacagtggacatgatgca

SEQ ID NO: 5040811 - DNA, 25 bp, Homo sapien
gagaagcatagttcagggcacaggt

SEQ ID NO: 5040812 - DNA, 25 bp, Homo sapien
agtgctgaaaggagccacccgaagt

SEQ ID NO: 5040813 - DNA, 25 bp, Homo sapien
agagagccttagatccctggacatg

SEQ ID NO: 5040814 - DNA, 25 bp, Homo sapien
acttctgtcctaagcctttctactt

SEQ ID NO: 5040815 - DNA, 25 bp, Homo sapien
tctcccctgctccactttacttctg

SEQ ID NO: 5040816 - DNA, 25 bp, Homo sapien
gcctttctactttattccgcttcat

SEQ ID NO: 5040817 - DNA, 25 bp, Homo sapien
tctgtggaagtaacgctgatggtgc

SEQ ID NO: 5040818 - DNA, 25 bp, Homo sapien
gagtgaggctgctccaaagttggct

SEQ ID NO: 5040819 - DNA, 25 bp, Homo sapien
tgttccagctcccaaggagtgaggc

SEQ ID NO: 5040820 - DNA, 25 bp, Homo sapien
tgatggtgcctctttgactgtggca

SEQ ID NO: 5040821 - DNA, 25 bp, Homo sapien
gcagtgtttgatgatcaagaggcat

SEQ ID NO: 5040822 - DNA, 25 bp, Homo sapien
ccaaaccagaccaactccttgaata

SEQ ID NO: 5040823 - DNA, 25 bp, Homo sapien
gaatattattttggagcagtgtttg

SEQ ID NO: 5040824 - DNA, 25 bp, Homo sapien
gaccaactccttgaatattattttg

SEQ ID NO: 5040825 - DNA, 25 bp, Homo sapien
ggggttcccctctgaagttctgcag

SEQ ID NO: 5040826 - DNA, 25 bp, Homo sapien
gagtttgcatctatttccagcattt

SEQ ID NO: 5040827 - DNA, 25 bp, Homo sapien
tggcctctcaatggctgaaacttcc

SEQ ID NO: 5040828 - DNA, 25 bp, Homo sapien
tgcagtcagtctgctaacaccgttt

SEQ ID NO: 5040829 - DNA, 25 bp, Homo sapien
tccccctcatcagaatatgagctag

SEQ ID NO: 5040830 - DNA, 25 bp, Homo sapien
gggtcactgaccttctttgtacatg

SEQ ID NO: 5040831 - DNA, 25 bp, Homo sapien
tgtacatgcccttgtcttagttgag

SEQ ID NO: 5040832 - DNA, 25 bp, Homo sapien
tgagctagtttccaaatgaacaaca

SEQ ID NO: 5040833 - DNA, 25 bp, Homo sapien
catcagaacaagatattccaatgtc

SEQ ID NO: 5040834 - DNA, 25 bp, Homo sapien
aggccaccctgtggttaccactgaa

SEQ ID NO: 5040835 - DNA, 25 bp, Homo sapien
tggttaccactgaaaccatttgaaa

SEQ ID NO: 5040836 - DNA, 25 bp, Homo sapien
ttgaaaataatcagtgacctgggaa

SEQ ID NO: 5040837 - DNA, 25 bp, Homo sapien
gtccgaagttactttctttgtcatg

SEQ ID NO: 5040838 - DNA, 25 bp, Homo sapien
agtccgaagttactttctttgtcat

SEQ ID NO: 5040839 - DNA, 25 bp, Homo sapien
cccatggccttgttaagaatccgaa

SEQ ID NO: 5040840 - DNA, 25 bp, Homo sapien
gctgtatggatgacctttgctcaca

SEQ ID NO: 5040841 - DNA, 25 bp, Homo sapien
tagggcgctagggatacaatgtcac

SEQ ID NO: 5040842 - DNA, 25 bp, Homo sapien
gacaatggtccagcttttaaggcca

SEQ ID NO: 5040843 - DNA, 25 bp, Homo sapien
agtgttgcttcataggcccttaccc

SEQ ID NO: 5040844 - DNA, 25 bp, Homo sapien
cttgagtcccaatctttaatgcctt

SEQ ID NO: 5040845 - DNA, 25 bp, Homo sapien
tcaaaccaaagacttcactcttggc

SEQ ID NO: 5040846 - DNA, 25 bp, Homo sapien
aaccacagagtcctatagtgttgct

SEQ ID NO: 5040847 - DNA, 25 bp, Homo sapien
gtaagtggcaaagctttttccttgc

SEQ ID NO: 5040848 - DNA, 25 bp, Homo sapien
tgtaagtggcaaagctttttccttg

SEQ ID NO: 5040849 - DNA, 25 bp, Homo sapien
ttttccttgcactgaagagctgtgt

SEQ ID NO: 5040850 - DNA, 25 bp, Homo sapien
taaaacacaattcaccgagctgcag

SEQ ID NO: 5040851 - DNA, 25 bp, Homo sapien
tatcaccccgttccttagcaaatgg

SEQ ID NO: 5040852 - DNA, 25 bp, Homo sapien
catggaggcactattcagggaggca

SEQ ID NO: 5040853 - DNA, 25 bp, Homo sapien
aatatggatgagaccctcttcccgg

SEQ ID NO: 5040854 - DNA, 25 bp, Homo sapien
gaggcactgaccagtccttctgatg

SEQ ID NO: 5040855 - DNA, 25 bp, Homo sapien
agacacattatcttgagcaaattgc

SEQ ID NO: 5040856 - DNA, 25 bp, Homo sapien
gacacattatcttgagcaaattgct

SEQ ID NO: 5040857 - DNA, 25 bp, Homo sapien
cgaggcactgaccagtccttctgat

SEQ ID NO: 5040858 - DNA, 25 bp, Homo sapien
ggctgctgacctgagcttcgcatag

SEQ ID NO: 5040859 - DNA, 25 bp, Homo sapien
gatgcttatgctgtttggtaaatgg

SEQ ID NO: 5040860 - DNA, 25 bp, Homo sapien
tgacctgagcttcgcataggcccat

SEQ ID NO: 5040861 - DNA, 25 bp, Homo sapien
tgagcttcgcataggcccatgtcac

SEQ ID NO: 5040862 - DNA, 25 bp, Homo sapien
tgccccttgttcagaggacgtaaag

SEQ ID NO: 5040863 - DNA, 25 bp, Homo sapien
tcttcatccgaacgtgccccttgtt

SEQ ID NO: 5040864 - DNA, 25 bp, Homo sapien
ggacgtaaagacatcagcaggaaaa

SEQ ID NO: 5040865 - DNA, 25 bp, Homo sapien
tcagaggacgtaaagacatcagcag

SEQ ID NO: 5040866 - DNA, 25 bp, Homo sapien
tttgacactctggtaaggaaaatac

SEQ ID NO: 5040867 - DNA, 25 bp, Homo sapien
tttatctttgacactctggtaagga

SEQ ID NO: 5040868 - DNA, 25 bp, Homo sapien
tatctttgacactctggtaaggaaa

SEQ ID NO: 5040869 - DNA, 25 bp, Homo sapien
tgacactctggtaaggaaaatactc

SEQ ID NO: 5040870 - DNA, 25 bp, Homo sapien
tatgcaaatagcatgcatgttggtg

SEQ ID NO: 5040871 - DNA, 25 bp, Homo sapien
tccaggtttgactgtttgggtgata

SEQ ID NO: 5040872 - DNA, 25 bp, Homo sapien
tttgggtgatagatggagacagaaa

SEQ ID NO: 5040873 - DNA, 25 bp, Homo sapien
catgttggtgtagagaggaaaagta

SEQ ID NO: 5040874 - DNA, 25 bp, Homo sapien
cttctgttctagcttattgtcactc

SEQ ID NO: 5040875 - DNA, 25 bp, Homo sapien
aacttctgttctagcttattgtcac

SEQ ID NO: 5040876 - DNA, 25 bp, Homo sapien
aaaacttctgttctagcttattgtc

SEQ ID NO: 5040877 - DNA, 25 bp, Homo sapien
tctgttctagcttattgtcactctc

SEQ ID NO: 5040878 - DNA, 25 bp, Homo sapien
tcagcttccatagattttgaaattg

SEQ ID NO: 5040879 - DNA, 25 bp, Homo sapien
acccttgagtctgcaggcattcttg

SEQ ID NO: 5040880 - DNA, 25 bp, Homo sapien
tgggattcagcttccatagattttg

SEQ ID NO: 5040881 - DNA, 25 bp, Homo sapien
ccatggataacccttgagtctgcag

SEQ ID NO: 5040882 - DNA, 25 bp, Homo sapien
ttttcaggcagatccacactatgcc

SEQ ID NO: 5040883 - DNA, 25 bp, Homo sapien
caggcagatccacactatgccatct

SEQ ID NO: 5040884 - DNA, 25 bp, Homo sapien
gtttttcaggcagatccacactatg

SEQ ID NO: 5040885 - DNA, 25 bp, Homo sapien
ttcaggcagatccacactatgccat

SEQ ID NO: 5040886 - DNA, 25 bp, Homo sapien
gatccacagttcgaaggccacagtg

SEQ ID NO: 5040887 - DNA, 25 bp, Homo sapien
cagactgcatataccagtgggcagg

SEQ ID NO: 5040888 - DNA, 25 bp, Homo sapien
catgtaaaagtaagtcggaagatct

SEQ ID NO: 5040889 - DNA, 25 bp, Homo sapien
ggttctaagactgtccagactgcat

SEQ ID NO: 5040890 - DNA, 25 bp, Homo sapien
aagctaaaacagtcagctggatgaa

SEQ ID NO: 5040891 - DNA, 25 bp, Homo sapien
ctttgaaagctaaaacagtcagctg

SEQ ID NO: 5040892 - DNA, 25 bp, Homo sapien
tttgaaagctaaaacagtcagctgg

SEQ ID NO: 5040893 - DNA, 25 bp, Homo sapien
gaaagctaaaacagtcagctggatg

SEQ ID NO: 5040894 - DNA, 25 bp, Homo sapien
aatgattatacataggaggagcccc

SEQ ID NO: 5040895 - DNA, 25 bp, Homo sapien
caagcacagtttagcagggcactag

SEQ ID NO: 5040896 - DNA, 25 bp, Homo sapien
gaggagccccgagtgttaatcttgc

SEQ ID NO: 5040897 - DNA, 25 bp, Homo sapien
tcactggagtatcgggcaaaaaccc

SEQ ID NO: 5040898 - DNA, 25 bp, Homo sapien
ccatgctggatccaccatgttgtcc

SEQ ID NO: 5040899 - DNA, 25 bp, Homo sapien
catcaaactagcctcagttgtaagt

SEQ ID NO: 5040900 - DNA, 25 bp, Homo sapien
catgttgtcctcctatcctggctcc

SEQ ID NO: 5040901 - DNA, 25 bp, Homo sapien
aactagcctcagttgtaagttccat

SEQ ID NO: 5040902 - DNA, 25 bp, Homo sapien
attcaaggatggagcctcttgccat

SEQ ID NO: 5040903 - DNA, 25 bp, Homo sapien
aaggatggagcctcttgccattttg

SEQ ID NO: 5040904 - DNA, 25 bp, Homo sapien
caaggatggagcctcttgccatttt

SEQ ID NO: 5040905 - DNA, 25 bp, Homo sapien
ttcaaggatggagcctcttgccatt

SEQ ID NO: 5040906 - DNA, 25 bp, Homo sapien
cagagtgggcctgagtgccctgcaa

SEQ ID NO: 5040907 - DNA, 25 bp, Homo sapien
actgttggattaagggcggcttaga

SEQ ID NO: 5040908 - DNA, 25 bp, Homo sapien
ggtgcatatgcttttagcaagtcag

SEQ ID NO: 5040909 - DNA, 25 bp, Homo sapien
tttagcaagtcaggattgagtctgc

SEQ ID NO: 5040910 - DNA, 25 bp, Homo sapien
gaacccctctgtttcttagctagaa

SEQ ID NO: 5040911 - DNA, 25 bp, Homo sapien
ggccttgcagaacgagtcagtcaca

SEQ ID NO: 5040912 - DNA, 25 bp, Homo sapien
ggatataaagatcctcctggaccag

SEQ ID NO: 5040913 - DNA, 25 bp, Homo sapien
tctggaccaaactgctgactggctg

SEQ ID NO: 5040914 - DNA, 25 bp, Homo sapien
gcagcagcaactgagactgagtccc

SEQ ID NO: 5040915 - DNA, 25 bp, Homo sapien
acagcaggcgaaagtgtgtgtgcca

SEQ ID NO: 5040916 - DNA, 25 bp, Homo sapien
cagtgctcccttcgccgaatactgg

SEQ ID NO: 5040917 - DNA, 25 bp, Homo sapien
gactgagtcccgaaatagactgcac

SEQ ID NO: 5040918 - DNA, 25 bp, Homo sapien
tttctatccatcctttaggaatgtt

SEQ ID NO: 5040919 - DNA, 25 bp, Homo sapien
ctatccatcctttaggaatgttttc

SEQ ID NO: 5040920 - DNA, 25 bp, Homo sapien
ttctatccatcctttaggaatgttt

SEQ ID NO: 5040921 - DNA, 25 bp, Homo sapien
tctatccatcctttaggaatgtttt

SEQ ID NO: 5040922 - DNA, 25 bp, Homo sapien
agacaataacaattggcctagtgga

SEQ ID NO: 5040923 - DNA, 25 bp, Homo sapien
cgtgtggggatttgagctcattttc

SEQ ID NO: 5040924 - DNA, 25 bp, Homo sapien
tttcaaagacaataacaattggcct

SEQ ID NO: 5040925 - DNA, 25 bp, Homo sapien
taacaattggcctagtggaagcgtt

SEQ ID NO: 5040926 - DNA, 25 bp, Homo sapien
tcacttggggctcccatttcatgaa

SEQ ID NO: 5040927 - DNA, 25 bp, Homo sapien
cgttcacttggggctcccatttcat

SEQ ID NO: 5040928 - DNA, 25 bp, Homo sapien
tctgaacgttcacttggggctccca

SEQ ID NO: 5040929 - DNA, 25 bp, Homo sapien
ctctgaacgttcacttggggctccc

SEQ ID NO: 5040930 - DNA, 25 bp, Homo sapien
caatttgtgttggataatggtatga

SEQ ID NO: 5040931 - DNA, 25 bp, Homo sapien
ccaagggatggaggttcaatttgtg

SEQ ID NO: 5040932 - DNA, 25 bp, Homo sapien
aagagtttacacacatcatgttctc

SEQ ID NO: 5040933 - DNA, 25 bp, Homo sapien
tgatattagcaatgaaacagtctcc

SEQ ID NO: 5040934 - DNA, 25 bp, Homo sapien
tgcacttatgtctaagacacaggaa

SEQ ID NO: 5040935 - DNA, 25 bp, Homo sapien
tatttgcacttatgtctaagacaca

SEQ ID NO: 5040936 - DNA, 25 bp, Homo sapien
tttgcacttatgtctaagacacagg

SEQ ID NO: 5040937 - DNA, 25 bp, Homo sapien
ttgcacttatgtctaagacacagga

SEQ ID NO: 5040938 - DNA, 25 bp, Homo sapien
gactacaggatcttaccactgcttg

SEQ ID NO: 5040939 - DNA, 25 bp, Homo sapien
taagattgagcggacttcctgaaac

SEQ ID NO: 5040940 - DNA, 25 bp, Homo sapien
gagtctagactaggacgactacagg

SEQ ID NO: 5040941 - DNA, 25 bp, Homo sapien
tccaatttgtctgttccgtgatcaa

SEQ ID NO: 5040942 - DNA, 25 bp, Homo sapien
gccttgactgagattaagctctaat

SEQ ID NO: 5040943 - DNA, 25 bp, Homo sapien
cattttggttgtaggtacctagctc

SEQ ID NO: 5040944 - DNA, 25 bp, Homo sapien
taatccttgtgtcttccgcgactag

SEQ ID NO: 5040945 - DNA, 25 bp, Homo sapien
gctctaatttacattttggttgtag

SEQ ID NO: 5040946 - DNA, 25 bp, Homo sapien
atctggaacactccctccattatca

SEQ ID NO: 5040947 - DNA, 25 bp, Homo sapien
ctcaatctggaacactccctccatt

SEQ ID NO: 5040948 - DNA, 25 bp, Homo sapien
caatctggaacactccctccattat

SEQ ID NO: 5040949 - DNA, 25 bp, Homo sapien
ctttctcaatctggaacactccctc

SEQ ID NO: 5040950 - DNA, 25 bp, Homo sapien
catgaagacattagtcatgtcctcc

SEQ ID NO: 5040951 - DNA, 25 bp, Homo sapien
aaacttgggatacttacagaggcac

SEQ ID NO: 5040952 - DNA, 25 bp, Homo sapien
gatgatctgtctcagtacatacagc

SEQ ID NO: 5040953 - DNA, 25 bp, Homo sapien
tcacacagctgaggggaatccacaa

SEQ ID NO: 5040954 - DNA, 25 bp, Homo sapien
atcaactatttttaaggcgatacct

SEQ ID NO: 5040955 - DNA, 25 bp, Homo sapien
tatttttaaggcgataccttctcga

SEQ ID NO: 5040956 - DNA, 25 bp, Homo sapien
ttttaaggcgataccttctcgactg

SEQ ID NO: 5040957 - DNA, 25 bp, Homo sapien
aaggcgataccttctcgactgtctt

SEQ ID NO: 5040958 - DNA, 25 bp, Homo sapien
ttttctggaaggactctctggcttg

SEQ ID NO: 5040959 - DNA, 25 bp, Homo sapien
ttgtctcttgatgctgacagccaca

SEQ ID NO: 5040960 - DNA, 25 bp, Homo sapien
tctcttgatgctgacagccacattt

SEQ ID NO: 5040961 - DNA, 25 bp, Homo sapien
tctggaaggactctctggcttgcat

SEQ ID NO: 5040962 - DNA, 25 bp, Homo sapien
taatccccaatgtgacggtactgat

SEQ ID NO: 5040963 - DNA, 25 bp, Homo sapien
tgggatctgctgctagcacagtgaa

SEQ ID NO: 5040964 - DNA, 25 bp, Homo sapien
taatcatggcaagtctagttgcatc

SEQ ID NO: 5040965 - DNA, 25 bp, Homo sapien
tgggttgggatacgaccaaatcata

SEQ ID NO: 5040966 - DNA, 25 bp, Homo sapien
ttcccaggttccacaagagaattgg

SEQ ID NO: 5040967 - DNA, 25 bp, Homo sapien
ccaactcagatcaccctggcaaagg

SEQ ID NO: 5040968 - DNA, 25 bp, Homo sapien
cctgctctttttcagccttaaggaa

SEQ ID NO: 5040969 - DNA, 25 bp, Homo sapien
ggctactagtgacccctggattccc

SEQ ID NO: 5040970 - DNA, 25 bp, Homo sapien
cagcaggaaatgtgttgataggaaa

SEQ ID NO: 5040971 - DNA, 25 bp, Homo sapien
gatggtttcagcaggaaatgtgttg

SEQ ID NO: 5040972 - DNA, 25 bp, Homo sapien
aatgaccatagatggtttcagcagg

SEQ ID NO: 5040973 - DNA, 25 bp, Homo sapien
ccatagatggtttcagcaggaaatg

SEQ ID NO: 5040974 - DNA, 25 bp, Homo sapien
tcagctaatagttgcacagcgggcc

SEQ ID NO: 5040975 - DNA, 25 bp, Homo sapien
tatacggcagtggaaaagaattgac

SEQ ID NO: 5040976 - DNA, 25 bp, Homo sapien
gactttagagctcaagtgcgccagg

SEQ ID NO: 5040977 - DNA, 25 bp, Homo sapien
cctgtaatgcattccctgtgtgaag

SEQ ID NO: 5040978 - DNA, 25 bp, Homo sapien
taaaaaacaatcagctacaggaagt

SEQ ID NO: 5040979 - DNA, 25 bp, Homo sapien
gccagaacccggaagtcttgtgtta

SEQ ID NO: 5040980 - DNA, 25 bp, Homo sapien
ctgctttcagaacccggaagtcttt

SEQ ID NO: 5040981 - DNA, 25 bp, Homo sapien
tacaggaagtcaattcactttctga

SEQ ID NO: 5040982 - DNA, 25 bp, Homo sapien
ccatcttgttccaacactgtccata

SEQ ID NO: 5040983 - DNA, 25 bp, Homo sapien
atttctgaatccaagaccatcttgt

SEQ ID NO: 5040984 - DNA, 25 bp, Homo sapien
ttctgaatccaagaccatcttgttc

SEQ ID NO: 5040985 - DNA, 25 bp, Homo sapien
cactgtccataccccttcatatgtg

SEQ ID NO: 5040986 - DNA, 25 bp, Homo sapien
tggggggtgagaggagaagggtcca

SEQ ID NO: 5040987 - DNA, 25 bp, Homo sapien
ggggtgagaggagaagggtccatgc

SEQ ID NO: 5040988 - DNA, 25 bp, Homo sapien
gggggtgagaggagaagggtccatg

SEQ ID NO: 5040989 - DNA, 25 bp, Homo sapien
gaatctaagtcagttgtgacacatc

SEQ ID NO: 5040990 - DNA, 25 bp, Homo sapien
tgcttcttgatatctagacctggac

SEQ ID NO: 5040991 - DNA, 25 bp, Homo sapien
gccctattcatagaaggcttttgaa

SEQ ID NO: 5040992 - DNA, 25 bp, Homo sapien
cattttgcttggtaaactgctagtc

SEQ ID NO: 5040993 - DNA, 25 bp, Homo sapien
cctccaggccttaccatcttcttgg

SEQ ID NO: 5040994 - DNA, 25 bp, Homo sapien
gccacctccaggccttaccatcttc

SEQ ID NO: 5040995 - DNA, 25 bp, Homo sapien
cacctccaggccttaccatcttctt

SEQ ID NO: 5040996 - DNA, 25 bp, Homo sapien
ctccaggccttaccatcttcttggt

SEQ ID NO: 5040997 - DNA, 25 bp, Homo sapien
caatgtagtagcatcgtggaaaaat

SEQ ID NO: 5040998 - DNA, 25 bp, Homo sapien
tcttcttcgtggttgcagtggatct

SEQ ID NO: 5040999 - DNA, 25 bp, Homo sapien
aaatggccctgtgtagaaaggataa

SEQ ID NO: 5041000 - DNA, 25 bp, Homo sapien
ctgtgatggccaatgtagtagcatc

SEQ ID NO: 5041001 - DNA, 25 bp, Homo sapien
tcgagagatcgtgccaattaaatta

SEQ ID NO: 5041002 - DNA, 25 bp, Homo sapien
cttcgagagatcgtgccaattaaat

SEQ ID NO: 5041003 - DNA, 25 bp, Homo sapien
caattaaattaacacgtttatagct

SEQ ID NO: 5041004 - DNA, 25 bp, Homo sapien
aattaacacgtttatagctcttcat

SEQ ID NO: 5041005 - DNA, 25 bp, Homo sapien
cttgcagctcacattttaagtcctt

SEQ ID NO: 5041006 - DNA, 25 bp, Homo sapien
ggttcaacttaatgaaggacaaaga

SEQ ID NO: 5041007 - DNA, 25 bp, Homo sapien
gaaatatgaaatccatagatcatag

SEQ ID NO: 5041008 - DNA, 25 bp, Homo sapien
gcagctcacattttaagtccttccc

SEQ ID NO: 5041009 - DNA, 25 bp, Homo sapien
tatttagctcggtctttattttcca

SEQ ID NO: 5041010 - DNA, 25 bp, Homo sapien
ttagctcggtctttattttccaatc

SEQ ID NO: 5041011 - DNA, 25 bp, Homo sapien
tagctcggtctttattttccaatct

SEQ ID NO: 5041012 - DNA, 25 bp, Homo sapien
tagagccaaatccatcaaacagagg

SEQ ID NO: 5041013 - DNA, 25 bp, Homo sapien
aaagcaatccaagtagactctggcc

SEQ ID NO: 5041014 - DNA, 25 bp, Homo sapien
cagagagagtagtctagagagttca

SEQ ID NO: 5041015 - DNA, 25 bp, Homo sapien
cagttgatgcaagggcaaattcaaa

SEQ ID NO: 5041016 - DNA, 25 bp, Homo sapien
cacttggttgctttataaaagtgtc

SEQ ID NO: 5041017 - DNA, 25 bp, Homo sapien
ctacccacagagagtggtttttaag

SEQ ID NO: 5041018 - DNA, 25 bp, Homo sapien
aacacttggttgctttataaaagtg

SEQ ID NO: 5041019 - DNA, 25 bp, Homo sapien
ggagggaacacttggttgctttata

SEQ ID NO: 5041020 - DNA, 25 bp, Homo sapien
aatggactcttgataccaggaatag

SEQ ID NO: 5041021 - DNA, 25 bp, Homo sapien
gattctttcatgtgccagggcctta

SEQ ID NO: 5041022 - DNA, 25 bp, Homo sapien
tctagcgtttactgagattctttca

SEQ ID NO: 5041023 - DNA, 25 bp, Homo sapien
atatttggtattagtcagctgttgt

SEQ ID NO: 5041024 - DNA, 25 bp, Homo sapien
gctgctgggaacatgtcagttgctc

SEQ ID NO: 5041025 - DNA, 25 bp, Homo sapien
gggaacatgtcagttgctccaacaa

SEQ ID NO: 5041026 - DNA, 25 bp, Homo sapien
ttatgctagtggtaacggcacacat

SEQ ID NO: 5041027 - DNA, 25 bp, Homo sapien
cagttgctccaacaattatgctagt

SEQ ID NO: 5041028 - DNA, 25 bp, Homo sapien
gacttgttggatacttgcaggtgca

SEQ ID NO: 5041029 - DNA, 25 bp, Homo sapien
cccaaggtgactgagaaagaccaca

SEQ ID NO: 5041030 - DNA, 25 bp, Homo sapien
gagtttacatgcgtttatgacagca

SEQ ID NO: 5041031 - DNA, 25 bp, Homo sapien
ttcatgcaacagtagtccaagggct

SEQ ID NO: 5041032 - DNA, 25 bp, Homo sapien
gtactgcagttagccaggagagcca

SEQ ID NO: 5041033 - DNA, 25 bp, Homo sapien
caaaaaactgttaggaggtactgca

SEQ ID NO: 5041034 - DNA, 25 bp, Homo sapien
ggtcaaggaggatcttactatttca

SEQ ID NO: 5041035 - DNA, 25 bp, Homo sapien
aaagttacaggttgtgctaggctag

SEQ ID NO: 5041036 - DNA, 25 bp, Homo sapien
aaggctttgcccctcccattcacaa

SEQ ID NO: 5041037 - DNA, 25 bp, Homo sapien
atctcctgaggtactcaggaatttc

SEQ ID NO: 5041038 - DNA, 25 bp, Homo sapien
tctaaatctcctgaggtactcagga

SEQ ID NO: 5041039 - DNA, 25 bp, Homo sapien
tcctcaaaggctttgcccctcccat

SEQ ID NO: 5041040 - DNA, 25 bp, Homo sapien
cagaagtctaagttggtaacctggg

SEQ ID NO: 5041041 - DNA, 25 bp, Homo sapien
gagtagccccacagaagtctaagtt

SEQ ID NO: 5041042 - DNA, 25 bp, Homo sapien
actccacaccagagtagccccacag

SEQ ID NO: 5041043 - DNA, 25 bp, Homo sapien
tcatgggtagaaagtggactccaca

SEQ ID NO: 5041044 - DNA, 25 bp, Homo sapien
agttgatttcctgggggcttggagg

SEQ ID NO: 5041045 - DNA, 25 bp, Homo sapien
tcagttgatttcctgggggcttgga

SEQ ID NO: 5041046 - DNA, 25 bp, Homo sapien
cagttgatttcctgggggcttggag

SEQ ID NO: 5041047 - DNA, 25 bp, Homo sapien
gttgatttcctgggggcttggaggc

SEQ ID NO: 5041048 - DNA, 25 bp, Homo sapien
cacctactcgcatataagaagcatc

SEQ ID NO: 5041049 - DNA, 25 bp, Homo sapien
tttctttatcacctactcgcatata

SEQ ID NO: 5041050 - DNA, 25 bp, Homo sapien
ttatcacctactcgcatataagaag

SEQ ID NO: 5041051 - DNA, 25 bp, Homo sapien
cctactcgcatataagaagcatctt

SEQ ID NO: 5041052 - DNA, 25 bp, Homo sapien
tacctatctcgtaccatgcacagaa

SEQ ID NO: 5041053 - DNA, 25 bp, Homo sapien
tcaggccactgggtagttcctgcag

SEQ ID NO: 5041054 - DNA, 25 bp, Homo sapien
tagaacagccatcacttagagtacc

SEQ ID NO: 5041055 - DNA, 25 bp, Homo sapien
ggtgtaagtgagtcatccacagcaa

SEQ ID NO: 5041056 - DNA, 25 bp, Homo sapien
ctgtggtacaatcagccttccagag

SEQ ID NO: 5041057 - DNA, 25 bp, Homo sapien
tgtggtacaatcagccttccagaga

SEQ ID NO: 5041058 - DNA, 25 bp, Homo sapien
ttccagagaacaaggcaaatagtca

SEQ ID NO: 5041059 - DNA, 25 bp, Homo sapien
gagaacaaggcaaatagtcagggaa

SEQ ID NO: 5041060 - DNA, 25 bp, Homo sapien
tatggtaggtgcatgacgttaaaag

SEQ ID NO: 5041061 - DNA, 25 bp, Homo sapien
gtctatggtaggtgcatgacgttaa

SEQ ID NO: 5041062 - DNA, 25 bp, Homo sapien
tggtaggtgcatgacgttaaaagca

SEQ ID NO: 5041063 - DNA, 25 bp, Homo sapien
taggtgcatgacgttaaaagcacac

SEQ ID NO: 5041064 - DNA, 25 bp, Homo sapien
tctgtcatgaaagctcccaaagtac

SEQ ID NO: 5041065 - DNA, 25 bp, Homo sapien
ttttgcccgatacactcagtgatgt

SEQ ID NO: 5041066 - DNA, 25 bp, Homo sapien
caaagtaccgcaaggaaggaaagtg

SEQ ID NO: 5041067 - DNA, 25 bp, Homo sapien
aaagtgggagtggtaagccctgcca

SEQ ID NO: 5041068 - DNA, 25 bp, Homo sapien
gtgtttgtatcctgtctggcagcac

SEQ ID NO: 5041069 - DNA, 25 bp, Homo sapien
cagtgtttgtatcctgtctggcagc

SEQ ID NO: 5041070 - DNA, 25 bp, Homo sapien
gtctggcagcacaatactccccaga

SEQ ID NO: 5041071 - DNA, 25 bp, Homo sapien
aattgtctggaccatcaacacattc

SEQ ID NO: 5041072 - DNA, 25 bp, Homo sapien
gccctccagctgatggtcgtcattc

SEQ ID NO: 5041073 - DNA, 25 bp, Homo sapien
cctccagctgatggtcgtcattcac

SEQ ID NO: 5041074 - DNA, 25 bp, Homo sapien
tccagctgatggtcgtcattcacca

SEQ ID NO: 5041075 - DNA, 25 bp, Homo sapien
aagccctccagctgatggtcgtcat

SEQ ID NO: 5041076 - DNA, 25 bp, Homo sapien
gccaagctggcaccaaatatttctg

SEQ ID NO: 5041077 - DNA, 25 bp, Homo sapien
tgggtgccagtagatctgaaagtgt

SEQ ID NO: 5041078 - DNA, 25 bp, Homo sapien
ttgtccagctgtccgaaagataggg

SEQ ID NO: 5041079 - DNA, 25 bp, Homo sapien
ggtaaaacagtcttgattggcagct

SEQ ID NO: 5041080 - DNA, 25 bp, Homo sapien
ctttttaagaagagatatgcctgca

SEQ ID NO: 5041081 - DNA, 25 bp, Homo sapien
ttttaagaagagatatgcctgcata

SEQ ID NO: 5041082 - DNA, 25 bp, Homo sapien
tttttaagaagagatatgcctgcat

SEQ ID NO: 5041083 - DNA, 25 bp, Homo sapien
agtgagtgtcctcatgcacagctct

SEQ ID NO: 5041084 - DNA, 25 bp, Homo sapien
ctaacaaaggtagtgaatccaagtt

SEQ ID NO: 5041085 - DNA, 25 bp, Homo sapien
aaggtagtgaatccaagttgctgct

SEQ ID NO: 5041086 - DNA, 25 bp, Homo sapien
gtgtcctcatgcacagctctgactt

SEQ ID NO: 5041087 - DNA, 25 bp, Homo sapien
ttttggactcagtaaagtctggacc

SEQ ID NO: 5041088 - DNA, 25 bp, Homo sapien
cttttggactcagtaaagtctggac

SEQ ID NO: 5041089 - DNA, 25 bp, Homo sapien
tttggactcagtaaagtctggacca

SEQ ID NO: 5041090 - DNA, 25 bp, Homo sapien
ttggactcagtaaagtctggaccat

SEQ ID NO: 5041091 - DNA, 25 bp, Homo sapien
cattcttttctggtggaccaaaact

SEQ ID NO: 5041092 - DNA, 25 bp, Homo sapien
caataagttggccctattcagttga

SEQ ID NO: 5041093 - DNA, 25 bp, Homo sapien
tcttttctggtggaccaaaactctg

SEQ ID NO: 5041094 - DNA, 25 bp, Homo sapien
taagttggccctattcagttgaaaa

SEQ ID NO: 5041095 - DNA, 25 bp, Homo sapien
ttttcagcaactttggcccacagca

SEQ ID NO: 5041096 - DNA, 25 bp, Homo sapien
gagatcactggtggactcagctagg

SEQ ID NO: 5041097 - DNA, 25 bp, Homo sapien
cagctaggggctcgtcagactcact

SEQ ID NO: 5041098 - DNA, 25 bp, Homo sapien
gctgactagcaaggccctcattgtc

SEQ ID NO: 5041099 - DNA, 25 bp, Homo sapien
gaagaagggtgtagttcagccttca

SEQ ID NO: 5041100 - DNA, 25 bp, Homo sapien
acagaagtctggatgagggaaccat

SEQ ID NO: 5041101 - DNA, 25 bp, Homo sapien
agatgaagaagggtgtagttcagcc

SEQ ID NO: 5041102 - DNA, 25 bp, Homo sapien
tgtgctacagaggctacaacagaag

SEQ ID NO: 5041103 - DNA, 25 bp, Homo sapien
cttcattattaccactgttaccctt

SEQ ID NO: 5041104 - DNA, 25 bp, Homo sapien
tgacacaggtcttgaacttgcttcc

SEQ ID NO: 5041105 - DNA, 25 bp, Homo sapien
aatactgagtcattgctgacacagg

SEQ ID NO: 5041106 - DNA, 25 bp, Homo sapien
gctattagtatggtaatactgagtc

SEQ ID NO: 5041107 - DNA, 25 bp, Homo sapien
gaggccaaggtaatccagtggcact

SEQ ID NO: 5041108 - DNA, 25 bp, Homo sapien
aggtaatgggctgcccatccaccag

SEQ ID NO: 5041109 - DNA, 25 bp, Homo sapien
aggcaggcaaagggcgcacagccct

SEQ ID NO: 5041110 - DNA, 25 bp, Homo sapien
atctgcttggcaggtaatgggctgc

SEQ ID NO: 5041111 - DNA, 25 bp, Homo sapien
ccaacttaaaagctgtttctctaca

SEQ ID NO: 5041112 - DNA, 25 bp, Homo sapien
tgcttcatcttgtggaagcttccac

SEQ ID NO: 5041113 - DNA, 25 bp, Homo sapien
tcctgttctgcaaaaacgtactgaa

SEQ ID NO: 5041114 - DNA, 25 bp, Homo sapien
tgctgaggtacatgtcctgttctgc

SEQ ID NO: 5041115 - DNA, 25 bp, Homo sapien
tgcttgctgtccaggactgagaatc

SEQ ID NO: 5041116 - DNA, 25 bp, Homo sapien
gctcccttcttgagccctcaaaaaa

SEQ ID NO: 5041117 - DNA, 25 bp, Homo sapien
ctgcttgctgtccaggactgagaat

SEQ ID NO: 5041118 - DNA, 25 bp, Homo sapien
gctccaggtgtctttgtgatgacat

SEQ ID NO: 5041119 - DNA, 25 bp, Homo sapien
ctccaggtgtctttgtgatgacatt

SEQ ID NO: 5041120 - DNA, 25 bp, Homo sapien
cattaaagataccaagggaaattct

SEQ ID NO: 5041121 - DNA, 25 bp, Homo sapien
gaaactgctagaagtaggaaaggga

SEQ ID NO: 5041122 - DNA, 25 bp, Homo sapien
gaagagaaactgctcggcattcagg

SEQ ID NO: 5041123 - DNA, 25 bp, Homo sapien
aattctgatatccttgccctggtaa

SEQ ID NO: 5041124 - DNA, 25 bp, Homo sapien
gagaaaaaccttgctcaggtttgca

SEQ ID NO: 5041125 - DNA, 25 bp, Homo sapien
atttaatcagtaggaaacaagagaa

SEQ ID NO: 5041126 - DNA, 25 bp, Homo sapien
tcgcccagccgttcttactaattta

SEQ ID NO: 5041127 - DNA, 25 bp, Homo sapien
tgcaagatttgatacccactaagtt

SEQ ID NO: 5041128 - DNA, 25 bp, Homo sapien
gaacgtagagcttaacatggagaca

SEQ ID NO: 5041129 - DNA, 25 bp, Homo sapien
tgttctcacgaagaggaagccacag

SEQ ID NO: 5041130 - DNA, 25 bp, Homo sapien
gaatcagtgttgaccaactagggca

SEQ ID NO: 5041131 - DNA, 25 bp, Homo sapien
tcctgatagaggcagaaaccccttg

SEQ ID NO: 5041132 - DNA, 25 bp, Homo sapien
aggattcttggctccattatctgag

SEQ ID NO: 5041133 - DNA, 25 bp, Homo sapien
taagcattacagcagtcactgaaaa

SEQ ID NO: 5041134 - DNA, 25 bp, Homo sapien
ccaggaagtaaagagtatatgtccc

SEQ ID NO: 5041135 - DNA, 25 bp, Homo sapien
tccaaattgctagggagcgatcaca

SEQ ID NO: 5041136 - DNA, 25 bp, Homo sapien
gctgacactctcgaataccttggaa

SEQ ID NO: 5041137 - DNA, 25 bp, Homo sapien
caaaggtaagagtgagtgatctccc

SEQ ID NO: 5041138 - DNA, 25 bp, Homo sapien
aaatttatgcttctttaatgatgcc

SEQ ID NO: 5041139 - DNA, 25 bp, Homo sapien
taggagtgaccgctgacatgtgtgt

SEQ ID NO: 5041140 - DNA, 25 bp, Homo sapien
tttgctggaggaatgtgtaatatgt

SEQ ID NO: 5041141 - DNA, 25 bp, Homo sapien
tgctggaggaatgtgtaatatgtgc

SEQ ID NO: 5041142 - DNA, 25 bp, Homo sapien
tggaggaatgtgtaatatgtgctga

SEQ ID NO: 5041143 - DNA, 25 bp, Homo sapien
agagtgggaagacagtcactcaggg

SEQ ID NO: 5041144 - DNA, 25 bp, Homo sapien
cagaaaagagccaggtatgtcacat

SEQ ID NO: 5041145 - DNA, 25 bp, Homo sapien
catctttgtatgagggaatgcagaa

SEQ ID NO: 5041146 - DNA, 25 bp, Homo sapien
cattgatttgattaacctgggtgaa

SEQ ID NO: 5041147 - DNA, 25 bp, Homo sapien
cctgggtgaagtatgcatctttgta

SEQ ID NO: 5041148 - DNA, 25 bp, Homo sapien
gaaggtctggcggagtgttagtgtc

SEQ ID NO: 5041149 - DNA, 25 bp, Homo sapien
ttctgcttgtggtttggtgcttggc

SEQ ID NO: 5041150 - DNA, 25 bp, Homo sapien
tgttagtgtctggtgcctgaagcag

SEQ ID NO: 5041151 - DNA, 25 bp, Homo sapien
gaagcagaggattacagttattatg

SEQ ID NO: 5041152 - DNA, 25 bp, Homo sapien
cattgattctctgtttcgatgttct

SEQ ID NO: 5041153 - DNA, 25 bp, Homo sapien
tcattgattctctgtttcgatgttc

SEQ ID NO: 5041154 - DNA, 25 bp, Homo sapien
ctctgtttcgatgttctctaatcct

SEQ ID NO: 5041155 - DNA, 25 bp, Homo sapien
tgattctctgtttcgatgttctcta

SEQ ID NO: 5041156 - DNA, 25 bp, Homo sapien
agggcagttgggtcggcctccccag

SEQ ID NO: 5041157 - DNA, 25 bp, Homo sapien
atgcactgaggcaacccttgaagaa

SEQ ID NO: 5041158 - DNA, 25 bp, Homo sapien
ggcagttgggtcggcctccccagca

SEQ ID NO: 5041159 - DNA, 25 bp, Homo sapien
ttcccagggcagttgggtcggcctc

SEQ ID NO: 5041160 - DNA, 25 bp, Homo sapien
tgtactccactgggctagtccatat

SEQ ID NO: 5041161 - DNA, 25 bp, Homo sapien
ctgtactccactgggctagtccata

SEQ ID NO: 5041162 - DNA, 25 bp, Homo sapien
gtactccactgggctagtccatata

SEQ ID NO: 5041163 - DNA, 25 bp, Homo sapien
tactccactgggctagtccatatat

SEQ ID NO: 5041164 - DNA, 25 bp, Homo sapien
ctgtgtcctttaggctctctctaac

SEQ ID NO: 5041165 - DNA, 25 bp, Homo sapien
gtcactgtgtcctttaggctctctc

SEQ ID NO: 5041166 - DNA, 25 bp, Homo sapien
cactgtgtcctttaggctctctcta

SEQ ID NO: 5041167 - DNA, 25 bp, Homo sapien
gtgtcctttaggctctctctaacat

SEQ ID NO: 5041168 - DNA, 25 bp, Homo sapien
cctcaattgcttggggtgtttcagc

SEQ ID NO: 5041169 - DNA, 25 bp, Homo sapien
gcttggggtgtttcagctcagaact

SEQ ID NO: 5041170 - DNA, 25 bp, Homo sapien
aaggattggtgtacctattcctcaa

SEQ ID NO: 5041171 - DNA, 25 bp, Homo sapien
gctcagaactttcacttgcaacttt

SEQ ID NO: 5041172 - DNA, 25 bp, Homo sapien
tcttgcaggtggatacagtttctcc

SEQ ID NO: 5041173 - DNA, 25 bp, Homo sapien
caaaaatggctgaagtcatatgtcc

SEQ ID NO: 5041174 - DNA, 25 bp, Homo sapien
tagagtctatggttccctcccttga

SEQ ID NO: 5041175 - DNA, 25 bp, Homo sapien
tctgacacgttaaggtgtggcacag

SEQ ID NO: 5041176 - DNA, 25 bp, Homo sapien
taaattttgcttttgagtgatatga

SEQ ID NO: 5041177 - DNA, 25 bp, Homo sapien
agagcttagggcatccttgtcattg

SEQ ID NO: 5041178 - DNA, 25 bp, Homo sapien
tgatatgatatcaacctggtagatg

SEQ ID NO: 5041179 - DNA, 25 bp, Homo sapien
ggtagatgtttatctcgcagtttca

SEQ ID NO: 5041180 - DNA, 25 bp, Homo sapien
tcctgagcctgaatgcatgtgcatg

SEQ ID NO: 5041181 - DNA, 25 bp, Homo sapien
ccgtgaaatggttgatgtccttcaa

SEQ ID NO: 5041182 - DNA, 25 bp, Homo sapien
ccaccactcattttaatatccgtga

SEQ ID NO: 5041183 - DNA, 25 bp, Homo sapien
taaacaggcactgtgtcaatgccac

SEQ ID NO: 5041184 - DNA, 25 bp, Homo sapien
ctgctgtgctcatcgccttccttgt

SEQ ID NO: 5041185 - DNA, 25 bp, Homo sapien
gctgtgctcatcgccttccttgttg

SEQ ID NO: 5041186 - DNA, 25 bp, Homo sapien
tgtgctcatcgccttccttgttgat

SEQ ID NO: 5041187 - DNA, 25 bp, Homo sapien
gtgctcatcgccttccttgttgatt

SEQ ID NO: 5041188 - DNA, 25 bp, Homo sapien
atggagagccttatcatgcacctcc

SEQ ID NO: 5041189 - DNA, 25 bp, Homo sapien
catggagagccttatcatgcacctc

SEQ ID NO: 5041190 - DNA, 25 bp, Homo sapien
ggagagccttatcatgcacctccat

SEQ ID NO: 5041191 - DNA, 25 bp, Homo sapien
tggagagccttatcatgcacctcca

SEQ ID NO: 5041192 - DNA, 25 bp, Homo sapien
ggctgggtggtccacgcacatttct

SEQ ID NO: 5041193 - DNA, 25 bp, Homo sapien
cacgcacatttctgctccctgagtt

SEQ ID NO: 5041194 - DNA, 25 bp, Homo sapien
tctacccgctggctgggtggtccac

SEQ ID NO: 5041195 - DNA, 25 bp, Homo sapien
cgctggctgggtggtccacgcacat

SEQ ID NO: 5041196 - DNA, 25 bp, Homo sapien
tcagatgtcctaatgcattccacat

SEQ ID NO: 5041197 - DNA, 25 bp, Homo sapien
tcggctcctttgaacacagactttc

SEQ ID NO: 5041198 - DNA, 25 bp, Homo sapien
tacttagccaaaaagattcggctcc

SEQ ID NO: 5041199 - DNA, 25 bp, Homo sapien
atttggccattaaatcctaattgga

SEQ ID NO: 5041200 - DNA, 25 bp, Homo sapien
ttatgcccaatttgaatcagaagga

SEQ ID NO: 5041201 - DNA, 25 bp, Homo sapien
gctgttatgcccaatttgaatcaga

SEQ ID NO: 5041202 - DNA, 25 bp, Homo sapien
gctctgctgttatgcccaatttgaa

SEQ ID NO: 5041203 - DNA, 25 bp, Homo sapien
catctgctctgctgttatgcccaat

SEQ ID NO: 5041204 - DNA, 25 bp, Homo sapien
tctataaagggcctattgaggttaa

SEQ ID NO: 5041205 - DNA, 25 bp, Homo sapien
gtgaatggaatggcacagtgaatgg

SEQ ID NO: 5041206 - DNA, 25 bp, Homo sapien
aaagggcctattgaggttaaagcag

SEQ ID NO: 5041207 - DNA, 25 bp, Homo sapien
aaattcttctataaagggcctattg

SEQ ID NO: 5041208 - DNA, 25 bp, Homo sapien
ccagaactgcttccatagagctcca

SEQ ID NO: 5041209 - DNA, 25 bp, Homo sapien
tcttcttttccagtactcgccacac

SEQ ID NO: 5041210 - DNA, 25 bp, Homo sapien
tgtctcagtgagcaatgctcagttc

SEQ ID NO: 5041211 - DNA, 25 bp, Homo sapien
atagagctccacctagtgccccagg

SEQ ID NO: 5041212 - DNA, 25 bp, Homo sapien
tctgtaccatagcttttattgtaag

SEQ ID NO: 5041213 - DNA, 25 bp, Homo sapien
tgccccattttctgtaccatagctt

SEQ ID NO: 5041214 - DNA, 25 bp, Homo sapien
taccatagcttttattgtaaggcaa

SEQ ID NO: 5041215 - DNA, 25 bp, Homo sapien
gccccattttctgtaccatagcttt

SEQ ID NO: 5041216 - DNA, 25 bp, Homo sapien
gataggagactatagcttgagctat

SEQ ID NO: 5041217 - DNA, 25 bp, Homo sapien
atagcttgagctattgccagagtca

SEQ ID NO: 5041218 - DNA, 25 bp, Homo sapien
aacaataaagcttgataggagacta

SEQ ID NO: 5041219 - DNA, 25 bp, Homo sapien
gcttgagctattgccagagtcaaca

SEQ ID NO: 5041220 - DNA, 25 bp, Homo sapien
tgagagtgtgaatttagttttgtcc

SEQ ID NO: 5041221 - DNA, 25 bp, Homo sapien
tgtcctcttctagcattaaacgttt

SEQ ID NO: 5041222 - DNA, 25 bp, Homo sapien
tcagttctagggtcttaattgcaac

SEQ ID NO: 5041223 - DNA, 25 bp, Homo sapien
gatggccaggttagactcagttcta

SEQ ID NO: 5041224 - DNA, 25 bp, Homo sapien
cactgaagtctaggccttaggccaa

SEQ ID NO: 5041225 - DNA, 25 bp, Homo sapien
aaaagactgaaaggcaacccatggt

SEQ ID NO: 5041226 - DNA, 25 bp, Homo sapien
caatacttcgattctattttgatga

SEQ ID NO: 5041227 - DNA, 25 bp, Homo sapien
gatgatgtttcggaactgaaaggtt

SEQ ID NO: 5041228 - DNA, 25 bp, Homo sapien
gcagcccaaactcggaagagtttga

SEQ ID NO: 5041229 - DNA, 25 bp, Homo sapien
cggtcagtgcacacgagaggcacta

SEQ ID NO: 5041230 - DNA, 25 bp, Homo sapien
caaactcggaagagtttgaccagcc

SEQ ID NO: 5041231 - DNA, 25 bp, Homo sapien
ctgcggtcagtgcacacgagaggca

SEQ ID NO: 5041232 - DNA, 25 bp, Homo sapien
taacatatgcaatcgttggctgaaa

SEQ ID NO: 5041233 - DNA, 25 bp, Homo sapien
ggaaacattcctgttggagccaaaa

SEQ ID NO: 5041234 - DNA, 25 bp, Homo sapien
ttttggaaacttggcatatggatgg

SEQ ID NO: 5041235 - DNA, 25 bp, Homo sapien
ggctgaaaaagctcacccgtggtgt

SEQ ID NO: 5041236 - DNA, 25 bp, Homo sapien
tttctagtttattgctgaacttcct

SEQ ID NO: 5041237 - DNA, 25 bp, Homo sapien
aacttcctgaaggtaagcataaggg

SEQ ID NO: 5041238 - DNA, 25 bp, Homo sapien
gggcaaagaacttggaataccagca

SEQ ID NO: 5041239 - DNA, 25 bp, Homo sapien
cagtggaatctggataacccataat

SEQ ID NO: 5041240 - DNA, 25 bp, Homo sapien
ctcttgagaaaatgacacccacgta

SEQ ID NO: 5041241 - DNA, 25 bp, Homo sapien
gacacccacgtaaaattccagtgct

SEQ ID NO: 5041242 - DNA, 25 bp, Homo sapien
ttgcagctggaaatctcttgagaaa

SEQ ID NO: 5041243 - DNA, 25 bp, Homo sapien
aaatgacacccacgtaaaattccag

SEQ ID NO: 5041244 - DNA, 25 bp, Homo sapien
tcctgttggtatttgggaacttcca

SEQ ID NO: 5041245 - DNA, 25 bp, Homo sapien
tcaggtccaaaccagaagcaggaag

SEQ ID NO: 5041246 - DNA, 25 bp, Homo sapien
ccagaagcaggaagctcagtgcttg

SEQ ID NO: 5041247 - DNA, 25 bp, Homo sapien
cttcaggtccaaaccagaagcagga

SEQ ID NO: 5041248 - DNA, 25 bp, Homo sapien
aggtccaaaccagaagcaggaagct

SEQ ID NO: 5041249 - DNA, 25 bp, Homo sapien
ccaggactggaatgaactcacaggt

SEQ ID NO: 5041250 - DNA, 25 bp, Homo sapien
ggtgaacacaaagaacacaggtcag

SEQ ID NO: 5041251 - DNA, 25 bp, Homo sapien
ggcctgggagtgagttacccataaa

SEQ ID NO: 5041252 - DNA, 25 bp, Homo sapien
cattattcacgagagaaaactggag

SEQ ID NO: 5041253 - DNA, 25 bp, Homo sapien
tgccaccagcgtaggaagaactgcc

SEQ ID NO: 5041254 - DNA, 25 bp, Homo sapien
gcgtaggaagaactgccacccacag

SEQ ID NO: 5041255 - DNA, 25 bp, Homo sapien
cttggcagaagctcagagtgccacc

SEQ ID NO: 5041256 - DNA, 25 bp, Homo sapien
tcagagtgccaccagcgtaggaaga

SEQ ID NO: 5041257 - DNA, 25 bp, Homo sapien
ctattgcaccgatatttctcaaaaa

SEQ ID NO: 5041258 - DNA, 25 bp, Homo sapien
ttctctattgcaccgatatttctca

SEQ ID NO: 5041259 - DNA, 25 bp, Homo sapien
ctctattgcaccgatatttctcaaa

SEQ ID NO: 5041260 - DNA, 25 bp, Homo sapien
tttctctattgcaccgatatttctc

SEQ ID NO: 5041261 - DNA, 25 bp, Homo sapien
gggatcgctttgctttggggatgaa

SEQ ID NO: 5041262 - DNA, 25 bp, Homo sapien
gtcaccagggatcgctttgctttgg

SEQ ID NO: 5041263 - DNA, 25 bp, Homo sapien
ggatcgctttgctttggggatgaac

SEQ ID NO: 5041264 - DNA, 25 bp, Homo sapien
caagtcaccagggatcgctttgctt

SEQ ID NO: 5041265 - DNA, 25 bp, Homo sapien
gaaggaaggatgagaccaactaagt

SEQ ID NO: 5041266 - DNA, 25 bp, Homo sapien
tctgttcccaaagataggtctcatc

SEQ ID NO: 5041267 - DNA, 25 bp, Homo sapien
tgtaaccttccaggatatgtcaaga

SEQ ID NO: 5041268 - DNA, 25 bp, Homo sapien
tctgacctacaccaaaccatgtgat

SEQ ID NO: 5041269 - DNA, 25 bp, Homo sapien
atcttgcaggggaatttgcctttga

SEQ ID NO: 5041270 - DNA, 25 bp, Homo sapien
cttgcaggggaatttgcctttgact

SEQ ID NO: 5041271 - DNA, 25 bp, Homo sapien
tcttgcaggggaatttgcctttgac

SEQ ID NO: 5041272 - DNA, 25 bp, Homo sapien
gagaaaacttgcataaggcttacaa

SEQ ID NO: 5041273 - DNA, 25 bp, Homo sapien
cccaaaagaggtattacagaatgat

SEQ ID NO: 5041274 - DNA, 25 bp, Homo sapien
aattagacaaagttccattctggag

SEQ ID NO: 5041275 - DNA, 25 bp, Homo sapien
gaggatctcatcgtctagtttttca

SEQ ID NO: 5041276 - DNA, 25 bp, Homo sapien
ttccacatgactaccaaaaggcaac

SEQ ID NO: 5041277 - DNA, 25 bp, Homo sapien
tcaagaggagataccaggaaaggtt

SEQ ID NO: 5041278 - DNA, 25 bp, Homo sapien
ggccactgttcatcaatgtccttag

SEQ ID NO: 5041279 - DNA, 25 bp, Homo sapien
ctagtttctaacttaacatctccaa

SEQ ID NO: 5041280 - DNA, 25 bp, Homo sapien
gagcattcttatattcagatatgag

SEQ ID NO: 5041281 - DNA, 25 bp, Homo sapien
tgagatttagaaagattcctcttgc

SEQ ID NO: 5041282 - DNA, 25 bp, Homo sapien
gatatgagatttagaaagattcctc

SEQ ID NO: 5041283 - DNA, 25 bp, Homo sapien
gagtatatgagaaactgttcattag

SEQ ID NO: 5041284 - DNA, 25 bp, Homo sapien
caaacggcactaaactatgaggcag

SEQ ID NO: 5041285 - DNA, 25 bp, Homo sapien
tctggatccatggacgaagataggc

SEQ ID NO: 5041286 - DNA, 25 bp, Homo sapien
gaagataggcatgtacacaaacggc

SEQ ID NO: 5041287 - DNA, 25 bp, Homo sapien
gacagactccatcagcacggtgatt

SEQ ID NO: 5041288 - DNA, 25 bp, Homo sapien
gaatgacttgcatgatccacctttc

SEQ ID NO: 5041289 - DNA, 25 bp, Homo sapien
cttgcatgatccacctttccatgaa

SEQ ID NO: 5041290 - DNA, 25 bp, Homo sapien
ttgaatgacttgcatgatccacctt

SEQ ID NO: 5041291 - DNA, 25 bp, Homo sapien
tgcagaaatccataagatccttcat

SEQ ID NO: 5041292 - DNA, 25 bp, Homo sapien
gtggaggaaaatgctgacccaaata

SEQ ID NO: 5041293 - DNA, 25 bp, Homo sapien
ccagggtgggtcctggatttctggc

SEQ ID NO: 5041294 - DNA, 25 bp, Homo sapien
acacagtaggtgagaaaaagggagc

SEQ ID NO: 5041295 - DNA, 25 bp, Homo sapien
atcagttttaagtggtgggtggagg

SEQ ID NO: 5041296 - DNA, 25 bp, Homo sapien
ttcaagagcaggagccggcaagagg

SEQ ID NO: 5041297 - DNA, 25 bp, Homo sapien
tcaagagcaggagccggcaagaggg

SEQ ID NO: 5041298 - DNA, 25 bp, Homo sapien
cacttgggtgtgtttcaagagcagg

SEQ ID NO: 5041299 - DNA, 25 bp, Homo sapien
attgaacattgcacttgggtgtgtt

SEQ ID NO: 5041300 - DNA, 25 bp, Homo sapien
tttggattacgctcactccagaaga

SEQ ID NO: 5041301 - DNA, 25 bp, Homo sapien
ctgtgatgggttttggattacgctc

SEQ ID NO: 5041302 - DNA, 25 bp, Homo sapien
gaagaactcctcatcagtcgtcgag

SEQ ID NO: 5041303 - DNA, 25 bp, Homo sapien
ggcctttgttgtccacagccgcttg

SEQ ID NO: 5041304 - DNA, 25 bp, Homo sapien
cacccaccagtgaaatcagattcag

SEQ ID NO: 5041305 - DNA, 25 bp, Homo sapien
acacccaccagtgaaatcagattca

SEQ ID NO: 5041306 - DNA, 25 bp, Homo sapien
gtgggcacgtaccagacccctattc

SEQ ID NO: 5041307 - DNA, 25 bp, Homo sapien
aagcttcagccccattagggtcctc

SEQ ID NO: 5041308 - DNA, 25 bp, Homo sapien
caagaacagctccactgtgcctctg

SEQ ID NO: 5041309 - DNA, 25 bp, Homo sapien
gaacagctccactgtgcctctgaga

SEQ ID NO: 5041310 - DNA, 25 bp, Homo sapien
gaacgaaggacaaacacatgcctcc

SEQ ID NO: 5041311 - DNA, 25 bp, Homo sapien
ttggaacgaaggacaaacacatgcc

SEQ ID NO: 5041312 - DNA, 25 bp, Homo sapien
cttggaacgaaggacaaacacatgc

SEQ ID NO: 5041313 - DNA, 25 bp, Homo sapien
tggaacgaaggacaaacacatgcct

SEQ ID NO: 5041314 - DNA, 25 bp, Homo sapien
ggagagctctagcaacaacagcaga

SEQ ID NO: 5041315 - DNA, 25 bp, Homo sapien
tgcagtttttatgcccctccacagg

SEQ ID NO: 5041316 - DNA, 25 bp, Homo sapien
gacaggacagcaccaatacactggg

SEQ ID NO: 5041317 - DNA, 25 bp, Homo sapien
ggagaccaacatgctgacaggacag

SEQ ID NO: 5041318 - DNA, 25 bp, Homo sapien
ttcctgtattaagtagctggacagt

SEQ ID NO: 5041319 - DNA, 25 bp, Homo sapien
ctttgtcaaggtaagcctttcaact

SEQ ID NO: 5041320 - DNA, 25 bp, Homo sapien
cctgtattaagtagctggacagttg

SEQ ID NO: 5041321 - DNA, 25 bp, Homo sapien
tttgtcaaggtaagcctttcaactg

SEQ ID NO: 5041322 - DNA, 25 bp, Homo sapien
taagctgtaattagggatattgaga

SEQ ID NO: 5041323 - DNA, 25 bp, Homo sapien
caagctgcccaagatttctgggaag

SEQ ID NO: 5041324 - DNA, 25 bp, Homo sapien
tgtttaaacaggagtcctgccaggg

SEQ ID NO: 5041325 - DNA, 25 bp, Homo sapien
tgtgtagcctgcaatgtaagctgta

SEQ ID NO: 5041326 - DNA, 25 bp, Homo sapien
caggcagccatagtcacagctttgc

SEQ ID NO: 5041327 - DNA, 25 bp, Homo sapien
ttgatcctccgagaaacagctgcct

SEQ ID NO: 5041328 - DNA, 25 bp, Homo sapien
catagtcacagctttgcatccacaa

SEQ ID NO: 5041329 - DNA, 25 bp, Homo sapien
actgccgatacctgagcttgatcct

SEQ ID NO: 5041330 - DNA, 25 bp, Homo sapien
cacacgcctacaggcaactggtctt

SEQ ID NO: 5041331 - DNA, 25 bp, Homo sapien
gctggttactgagcaagctacctaa

SEQ ID NO: 5041332 - DNA, 25 bp, Homo sapien
tattattgccaactgtatctccatg

SEQ ID NO: 5041333 - DNA, 25 bp, Homo sapien
cgttttctacaatatgaggctacag

SEQ ID NO: 5041334 - DNA, 25 bp, Homo sapien
tgtcagaagtatcgtaaggccatca

SEQ ID NO: 5041335 - DNA, 25 bp, Homo sapien
tccccaatgagttgattatatcctg

SEQ ID NO: 5041336 - DNA, 25 bp, Homo sapien
aataacgtggctatacaaggaatgc

SEQ ID NO: 5041337 - DNA, 25 bp, Homo sapien
tcggtcatgcccagaaataacgtgg

SEQ ID NO: 5041338 - DNA, 25 bp, Homo sapien
tgggtcagacatcatgataggcatg

SEQ ID NO: 5041339 - DNA, 25 bp, Homo sapien
tggtctcagggcttttgatgggtca

SEQ ID NO: 5041340 - DNA, 25 bp, Homo sapien
tccaagggctattgactagttcagg

SEQ ID NO: 5041341 - DNA, 25 bp, Homo sapien
aaaatcagatagtgtctgggcgtgg

SEQ ID NO: 5041342 - DNA, 25 bp, Homo sapien
caatgccacaagcagtaacatcaac

SEQ ID NO: 5041343 - DNA, 25 bp, Homo sapien
gcaaggttaaatgacacagcatcgc

SEQ ID NO: 5041344 - DNA, 25 bp, Homo sapien
acacagcatcgccatcactactaaa

SEQ ID NO: 5041345 - DNA, 25 bp, Homo sapien
gcagtaacatcaacaccatcaacaa

SEQ ID NO: 5041346 - DNA, 25 bp, Homo sapien
caaacgcatgaggagagatcaaaca

SEQ ID NO: 5041347 - DNA, 25 bp, Homo sapien
cacagttctgcaatctaggaggtat

SEQ ID NO: 5041348 - DNA, 25 bp, Homo sapien
taagaataagaactcacggccagga

SEQ ID NO: 5041349 - DNA, 25 bp, Homo sapien
gaggtataagaaacacggccgtggc

SEQ ID NO: 5041350 - DNA, 25 bp, Homo sapien
catggtccatgtgagttgacttccc

SEQ ID NO: 5041351 - DNA, 25 bp, Homo sapien
ttactgaagatcctgggttaagggc

SEQ ID NO: 5041352 - DNA, 25 bp, Homo sapien
tatgttccaaacaccaacggaagcc

SEQ ID NO: 5041353 - DNA, 25 bp, Homo sapien
gtggctgaacacaacaagatcttag

SEQ ID NO: 5041354 - DNA, 25 bp, Homo sapien
cacaaaacatgagcctgcgggagag

SEQ ID NO: 5041355 - DNA, 25 bp, Homo sapien
ctctgcctggcatgaacacaaaaca

SEQ ID NO: 5041356 - DNA, 25 bp, Homo sapien
gtagaccgctgtgggcaacaggcca

SEQ ID NO: 5041357 - DNA, 25 bp, Homo sapien
gtttagtttttcacgcaatgcctcc

SEQ ID NO: 5041358 - DNA, 25 bp, Homo sapien
gattagtcctgactcaaaaagttgg

SEQ ID NO: 5041359 - DNA, 25 bp, Homo sapien
aatattattacaaatttgtgggtga

SEQ ID NO: 5041360 - DNA, 25 bp, Homo sapien
tggagaaacctttgaaaagtgagta

SEQ ID NO: 5041361 - DNA, 25 bp, Homo sapien
gaaaagtgagtaaatattattacaa

SEQ ID NO: 5041362 - DNA, 25 bp, Homo sapien
ttggtaattctaggtgatctggttt

SEQ ID NO: 5041363 - DNA, 25 bp, Homo sapien
ggtttagtcagcatgactatgtgtc

SEQ ID NO: 5041364 - DNA, 25 bp, Homo sapien
gtgatctggtttagtcagcatgact

SEQ ID NO: 5041365 - DNA, 25 bp, Homo sapien
tctaggtgatctggtttagtcagca

SEQ ID NO: 5041366 - DNA, 25 bp, Homo sapien
tggcattgaatgctatgctccagaa

SEQ ID NO: 5041367 - DNA, 25 bp, Homo sapien
taaagggcccaaaactactcatgta

SEQ ID NO: 5041368 - DNA, 25 bp, Homo sapien
gaagaagtctgttcacagaaggctc

SEQ ID NO: 5041369 - DNA, 25 bp, Homo sapien
tactcatgtatgcaattgtagcagg

SEQ ID NO: 5041370 - DNA, 25 bp, Homo sapien
tgcgggttctcactaaagaatttca

SEQ ID NO: 5041371 - DNA, 25 bp, Homo sapien
taaactctagatgtaagatgcgggt

SEQ ID NO: 5041372 - DNA, 25 bp, Homo sapien
gaaattggcgacaggttacaaatga

SEQ ID NO: 5041373 - DNA, 25 bp, Homo sapien
gaaatagaaattggcgacaggttac

SEQ ID NO: 5041374 - DNA, 25 bp, Homo sapien
tggaatcaggggtactcccacttag

SEQ ID NO: 5041375 - DNA, 25 bp, Homo sapien
atcaggggtactcccacttagttgg

SEQ ID NO: 5041376 - DNA, 25 bp, Homo sapien
caaggtggaatcaggggtactccca

SEQ ID NO: 5041377 - DNA, 25 bp, Homo sapien
aggtggaatcaggggtactcccact

SEQ ID NO: 5041378 - DNA, 25 bp, Homo sapien
ttggctccttgatctctaagacatg

SEQ ID NO: 5041379 - DNA, 25 bp, Homo sapien
cttggctccttgatctctaagacat

SEQ ID NO: 5041380 - DNA, 25 bp, Homo sapien
cacagccacaccctatcacctagga

SEQ ID NO: 5041381 - DNA, 25 bp, Homo sapien
gccacaccctatcacctaggaaccc

SEQ ID NO: 5041382 - DNA, 25 bp, Homo sapien
atattcttacagatagagaacactt

SEQ ID NO: 5041383 - DNA, 25 bp, Homo sapien
ttcctatacttgcttcagaatggta

SEQ ID NO: 5041384 - DNA, 25 bp, Homo sapien
cagaatggtagtatgtttaagaact

SEQ ID NO: 5041385 - DNA, 25 bp, Homo sapien
cttgcttcagaatggtagtatgttt

SEQ ID NO: 5041386 - DNA, 25 bp, Homo sapien
aaattgtcacggaactttgagcacg

SEQ ID NO: 5041387 - DNA, 25 bp, Homo sapien
tgagcacctcattagcaccatagag

SEQ ID NO: 5041388 - DNA, 25 bp, Homo sapien
tctgactacacccttagagcatagg

SEQ ID NO: 5041389 - DNA, 25 bp, Homo sapien
ggaagcttcctatctgcccagtggt

SEQ ID NO: 5041390 - DNA, 25 bp, Homo sapien
aatcctaaggttcttctctcagtgc

SEQ ID NO: 5041391 - DNA, 25 bp, Homo sapien
aaacatttgtgttgaagactcttca

SEQ ID NO: 5041392 - DNA, 25 bp, Homo sapien
gtcacatgacattagccgatgataa

SEQ ID NO: 5041393 - DNA, 25 bp, Homo sapien
ccctgatttatgaggaccagctagt

SEQ ID NO: 5041394 - DNA, 25 bp, Homo sapien
ttccttggttgtagtgcctgagcac

SEQ ID NO: 5041395 - DNA, 25 bp, Homo sapien
tcagtgcatcactgtccacaagtcc

SEQ ID NO: 5041396 - DNA, 25 bp, Homo sapien
cacccagctgcctgttcatcagttt

SEQ ID NO: 5041397 - DNA, 25 bp, Homo sapien
agcatcctgccctatcctcagtgca

SEQ ID NO: 5041398 - DNA, 25 bp, Homo sapien
tatatctttcatacctatactaaaa

SEQ ID NO: 5041399 - DNA, 25 bp, Homo sapien
tggttcgtgttgaatttcataatgc

SEQ ID NO: 5041400 - DNA, 25 bp, Homo sapien
aaaatataattggttcgtgttgaat

SEQ ID NO: 5041401 - DNA, 25 bp, Homo sapien
tcgtgttgaatttcataatgcatat

SEQ ID NO: 5041402 - DNA, 25 bp, Homo sapien
aaatagccacttgccgaagcgataa

SEQ ID NO: 5041403 - DNA, 25 bp, Homo sapien
gagtcccaacttgaccacaagcaga

SEQ ID NO: 5041404 - DNA, 25 bp, Homo sapien
ggttcactatataacccctgatgca

SEQ ID NO: 5041405 - DNA, 25 bp, Homo sapien
cttgcattaggattgcaaagcttgt

SEQ ID NO: 5041406 - DNA, 25 bp, Homo sapien
ccctgatggaatcgctgcacacaag

SEQ ID NO: 5041407 - DNA, 25 bp, Homo sapien
gaatcgctgcacacaagagctgctg

SEQ ID NO: 5041408 - DNA, 25 bp, Homo sapien
gatggaatcgctgcacacaagagct

SEQ ID NO: 5041409 - DNA, 25 bp, Homo sapien
tcgctgcacacaagagctgctgcca

SEQ ID NO: 5041410 - DNA, 25 bp, Homo sapien
taatgatgttggcccctcaaacagc

SEQ ID NO: 5041411 - DNA, 25 bp, Homo sapien
agttaatgatgttggcccctcaaac

SEQ ID NO: 5041412 - DNA, 25 bp, Homo sapien
tgatgttggcccctcaaacagccca

SEQ ID NO: 5041413 - DNA, 25 bp, Homo sapien
gttaatgatgttggcccctcaaaca

SEQ ID NO: 5041414 - DNA, 25 bp, Homo sapien
aactgtcacctaaggtggcttctgg

SEQ ID NO: 5041415 - DNA, 25 bp, Homo sapien
gaacttgacccataaactgtcacct

SEQ ID NO: 5041416 - DNA, 25 bp, Homo sapien
cccagtgccccaagaataggaactt

SEQ ID NO: 5041417 - DNA, 25 bp, Homo sapien
gctgatcatattatccacaacactg

SEQ ID NO: 5041418 - DNA, 25 bp, Homo sapien
gaaacttcagccctgcaacattaac

SEQ ID NO: 5041419 - DNA, 25 bp, Homo sapien
aaacttcagccctgcaacattaacc

SEQ ID NO: 5041420 - DNA, 25 bp, Homo sapien
ttggaaacttcagccctgcaacatt

SEQ ID NO: 5041421 - DNA, 25 bp, Homo sapien
ctggttcataccaatctaggtttct

SEQ ID NO: 5041422 - DNA, 25 bp, Homo sapien
caaagacattcctcacatcaataaa

SEQ ID NO: 5041423 - DNA, 25 bp, Homo sapien
tcaatattgtcaacaatgtccatac

SEQ ID NO: 5041424 - DNA, 25 bp, Homo sapien
tttggaaaatcatagaaactgtagc

SEQ ID NO: 5041425 - DNA, 25 bp, Homo sapien
tggaaccaggaaagtccctgaatag

SEQ ID NO: 5041426 - DNA, 25 bp, Homo sapien
cagagccttgcagccattccgagga

SEQ ID NO: 5041427 - DNA, 25 bp, Homo sapien
ccgaggattccgtgtgcactggata

SEQ ID NO: 5041428 - DNA, 25 bp, Homo sapien
gccacaagcgctgactattgcccaa

SEQ ID NO: 5041429 - DNA, 25 bp, Homo sapien
gcccaaaattaagctgagtttgcca

SEQ ID NO: 5041430 - DNA, 25 bp, Homo sapien
cactgggtctactgaaagatggcag

SEQ ID NO: 5041431 - DNA, 25 bp, Homo sapien
tctgtgcctaccgtgatagtcggac

SEQ ID NO: 5041432 - DNA, 25 bp, Homo sapien
gacatccgaggtcattcagctagtg

SEQ ID NO: 5041433 - DNA, 25 bp, Homo sapien
caatgatgtagctcggtgaagtgcc

SEQ ID NO: 5041434 - DNA, 25 bp, Homo sapien
tgggactgccaagccggaagagcct

SEQ ID NO: 5041435 - DNA, 25 bp, Homo sapien
gaaagcctctggtgtcgctggcacc

SEQ ID NO: 5041436 - DNA, 25 bp, Homo sapien
gaacagatgtgtgacctgaaatgaa

SEQ ID NO: 5041437 - DNA, 25 bp, Homo sapien
ctcagtgggtgtctctcagaggaaa

SEQ ID NO: 5041438 - DNA, 25 bp, Homo sapien
ctggcttgaggtggtcaagaccctg

SEQ ID NO: 5041439 - DNA, 25 bp, Homo sapien
gaggtggtcaagaccctgagacgcc

SEQ ID NO: 5041440 - DNA, 25 bp, Homo sapien
gcttgaggtggtcaagaccctgaga

SEQ ID NO: 5041441 - DNA, 25 bp, Homo sapien
ttgaggtggtcaagaccctgagacg

SEQ ID NO: 5041442 - DNA, 25 bp, Homo sapien
ggaggtgatgttgttcaaagacagc

SEQ ID NO: 5041443 - DNA, 25 bp, Homo sapien
gactgacaccaatgaagcgaagaac

SEQ ID NO: 5041444 - DNA, 25 bp, Homo sapien
aagagtcatagctgtcctctctggc

SEQ ID NO: 5041445 - DNA, 25 bp, Homo sapien
tgttgttcaaagacagcatgctctg

SEQ ID NO: 5041446 - DNA, 25 bp, Homo sapien
gagtatacatgatgcaaaggtgcat

SEQ ID NO: 5041447 - DNA, 25 bp, Homo sapien
aggtgcatggaaagggactggaggg

SEQ ID NO: 5041448 - DNA, 25 bp, Homo sapien
agccactattgctgagtatacatga

SEQ ID NO: 5041449 - DNA, 25 bp, Homo sapien
tgctgagtatacatgatgcaaaggt

SEQ ID NO: 5041450 - DNA, 25 bp, Homo sapien
gctgaaaccttggcttgggcccttc

SEQ ID NO: 5041451 - DNA, 25 bp, Homo sapien
ttccggtgctcaaaagggtgccctg

SEQ ID NO: 5041452 - DNA, 25 bp, Homo sapien
ggatgatcccgcaaatcaaggttga

SEQ ID NO: 5041453 - DNA, 25 bp, Homo sapien
tcaaggttgatcgtgtcattccggt

SEQ ID NO: 5041454 - DNA, 25 bp, Homo sapien
tttgggaagtctatccagccacccc

SEQ ID NO: 5041455 - DNA, 25 bp, Homo sapien
tagctgatcttcgtaatttccgacc

SEQ ID NO: 5041456 - DNA, 25 bp, Homo sapien
agactctgcagttgcctgattatgg

SEQ ID NO: 5041457 - DNA, 25 bp, Homo sapien
ctgattatgggccagtagcactgta

SEQ ID NO: 5041458 - DNA, 25 bp, Homo sapien
ccctgtaatctccggtattgattga

SEQ ID NO: 5041459 - DNA, 25 bp, Homo sapien
aatctccggtattgattgaggtgtc

SEQ ID NO: 5041460 - DNA, 25 bp, Homo sapien
ctgtaatctccggtattgattgagg

SEQ ID NO: 5041461 - DNA, 25 bp, Homo sapien
tccggtattgattgaggtgtcatct

SEQ ID NO: 5041462 - DNA, 25 bp, Homo sapien
gctgcggctaatcattcctagaaca

SEQ ID NO: 5041463 - DNA, 25 bp, Homo sapien
tgactgctgcggctaatcattccta

SEQ ID NO: 5041464 - DNA, 25 bp, Homo sapien
gactgctgcggctaatcattcctag

SEQ ID NO: 5041465 - DNA, 25 bp, Homo sapien
ctctctgactgctgcggctaatcat

SEQ ID NO: 5041466 - DNA, 25 bp, Homo sapien
gtgtcccacagtaaggtgcactggg

SEQ ID NO: 5041467 - DNA, 25 bp, Homo sapien
tcagtgtcccacagtaaggtgcact

SEQ ID NO: 5041468 - DNA, 25 bp, Homo sapien
cactcagtgtcccacagtaaggtgc

SEQ ID NO: 5041469 - DNA, 25 bp, Homo sapien
actcagtgtcccacagtaaggtgca

SEQ ID NO: 5041470 - DNA, 25 bp, Homo sapien
cttgctcttattgcatcgttttctg

SEQ ID NO: 5041471 - DNA, 25 bp, Homo sapien
aaagctcttgctcttattgcatcgt

SEQ ID NO: 5041472 - DNA, 25 bp, Homo sapien
gctcttgctcttattgcatcgtttt

SEQ ID NO: 5041473 - DNA, 25 bp, Homo sapien
gctcttattgcatcgttttctgcct

SEQ ID NO: 5041474 - DNA, 25 bp, Homo sapien
tctaaccatgaggagatactggaga

SEQ ID NO: 5041475 - DNA, 25 bp, Homo sapien
ttccagctgaaaatgtatgacctga

SEQ ID NO: 5041476 - DNA, 25 bp, Homo sapien
gcataaaactggaacaattggtgaa

SEQ ID NO: 5041477 - DNA, 25 bp, Homo sapien
gaaagtacacatcgaagtctttagg

SEQ ID NO: 5041478 - DNA, 25 bp, Homo sapien
atgatggctgtttgttgtgctggac

SEQ ID NO: 5041479 - DNA, 25 bp, Homo sapien
ttcatttgccacttgagccacggtg

SEQ ID NO: 5041480 - DNA, 25 bp, Homo sapien
gggtctctcctgctatttgcaccat

SEQ ID NO: 5041481 - DNA, 25 bp, Homo sapien
tggaaggcagcagggtacctctcct

SEQ ID NO: 5041482 - DNA, 25 bp, Homo sapien
tgcaccccgaaaagtataggcaaga

SEQ ID NO: 5041483 - DNA, 25 bp, Homo sapien
tattagctttcctgttgagatctga

SEQ ID NO: 5041484 - DNA, 25 bp, Homo sapien
gaatctactgttcttcactacctgc

SEQ ID NO: 5041485 - DNA, 25 bp, Homo sapien
gaaaactggcagagggactatctac

SEQ ID NO: 5041486 - DNA, 25 bp, Homo sapien
ggtgttggatttctggagctacaag

SEQ ID NO: 5041487 - DNA, 25 bp, Homo sapien
tcagagcttggcaggtatagaatgt

SEQ ID NO: 5041488 - DNA, 25 bp, Homo sapien
cttggcaggtatagaatgtgggcca

SEQ ID NO: 5041489 - DNA, 25 bp, Homo sapien
ggagctacaagagatttgctccagg

SEQ ID NO: 5041490 - DNA, 25 bp, Homo sapien
gtctggtgacctctgctagtgttaa

SEQ ID NO: 5041491 - DNA, 25 bp, Homo sapien
tggtgacctctgctagtgttaaggg

SEQ ID NO: 5041492 - DNA, 25 bp, Homo sapien
gggctacacttctgtctggtgacct

SEQ ID NO: 5041493 - DNA, 25 bp, Homo sapien
gttaaggggcccactctttgctcca

SEQ ID NO: 5041494 - DNA, 25 bp, Homo sapien
gctcgggtttcatgtccccagtgaa

SEQ ID NO: 5041495 - DNA, 25 bp, Homo sapien
actcttgtgcaaggctcgggtttca

SEQ ID NO: 5041496 - DNA, 25 bp, Homo sapien
caacacccgactcttgtgcaaggct

SEQ ID NO: 5041497 - DNA, 25 bp, Homo sapien
gatggaccaaatcaacacccgactc

SEQ ID NO: 5041498 - DNA, 25 bp, Homo sapien
agatttactccagtttgtttgcaga

SEQ ID NO: 5041499 - DNA, 25 bp, Homo sapien
tgtttgcagatctcctgtctggagt

SEQ ID NO: 5041500 - DNA, 25 bp, Homo sapien
cacaatccttaagatttactccagt

SEQ ID NO: 5041501 - DNA, 25 bp, Homo sapien
gatcagaattgctccttcgcttaca

SEQ ID NO: 5041502 - DNA, 25 bp, Homo sapien
acagcatgagtattgcaaagcgtag

SEQ ID NO: 5041503 - DNA, 25 bp, Homo sapien
gaggaccctgtggttccatacaaca

SEQ ID NO: 5041504 - DNA, 25 bp, Homo sapien
gagaggcggaaaagacatagacgaa

SEQ ID NO: 5041505 - DNA, 25 bp, Homo sapien
ccatacaacagcatgagtattgcaa

SEQ ID NO: 5041506 - DNA, 25 bp, Homo sapien
agaagggagcgacaccctgagggcg

SEQ ID NO: 5041507 - DNA, 25 bp, Homo sapien
gggagcgacaccctgagggcgatgg

SEQ ID NO: 5041508 - DNA, 25 bp, Homo sapien
agagaagggagcgacaccctgaggg

SEQ ID NO: 5041509 - DNA, 25 bp, Homo sapien
aagggagcgacaccctgagggcgat

SEQ ID NO: 5041510 - DNA, 25 bp, Homo sapien
ccagcccaaagctcgaccccagaaa

SEQ ID NO: 5041511 - DNA, 25 bp, Homo sapien
aggacaaactgcgaatcccagccgc

SEQ ID NO: 5041512 - DNA, 25 bp, Homo sapien
cctcaggacaaactgcgaatcccag

SEQ ID NO: 5041513 - DNA, 25 bp, Homo sapien
agcccaaagctcgaccccagaaagc

SEQ ID NO: 5041514 - DNA, 25 bp, Homo sapien
tttgaaagtgattttgctttccctg

SEQ ID NO: 5041515 - DNA, 25 bp, Homo sapien
tttgctttccctgtctgagataacc

SEQ ID NO: 5041516 - DNA, 25 bp, Homo sapien
gctttccctgtctgagataacccat

SEQ ID NO: 5041517 - DNA, 25 bp, Homo sapien
tcaaacttttgaaagtgattttgct

SEQ ID NO: 5041518 - DNA, 25 bp, Homo sapien
cttccttctaagaagggtgttacat

SEQ ID NO: 5041519 - DNA, 25 bp, Homo sapien
ctaagaagggtgttacattgtcaaa

SEQ ID NO: 5041520 - DNA, 25 bp, Homo sapien
caaaggtggtgaggatgcaaattgt

SEQ ID NO: 5041521 - DNA, 25 bp, Homo sapien
aagggtgttacattgtcaaaggtgg

SEQ ID NO: 5041522 - DNA, 25 bp, Homo sapien
actcagttccgcaagaagacaatcg

SEQ ID NO: 5041523 - DNA, 25 bp, Homo sapien
gttccgcaagaagacaatcggcctc

SEQ ID NO: 5041524 - DNA, 25 bp, Homo sapien
caagaagacaatcggcctcctttag

SEQ ID NO: 5041525 - DNA, 25 bp, Homo sapien
cctcactcagttccgcaagaagaca

SEQ ID NO: 5041526 - DNA, 25 bp, Homo sapien
accacaggacaaagggccattttga

SEQ ID NO: 5041527 - DNA, 25 bp, Homo sapien
gcctcactattttaacaccaaagat

SEQ ID NO: 5041528 - DNA, 25 bp, Homo sapien
gccattttgatttggggcctcacta

SEQ ID NO: 5041529 - DNA, 25 bp, Homo sapien
aagattttcatttggcagtcactgt

SEQ ID NO: 5041530 - DNA, 25 bp, Homo sapien
tcatacaacgcacactctctttcct

SEQ ID NO: 5041531 - DNA, 25 bp, Homo sapien
ttgacagaatttgccggctgccggc

SEQ ID NO: 5041532 - DNA, 25 bp, Homo sapien
atcatcacagcctgcggtgccagac

SEQ ID NO: 5041533 - DNA, 25 bp, Homo sapien
tctgagtccaaacccctcgtgggct

SEQ ID NO: 5041534 - DNA, 25 bp, Homo sapien
cctaagaccctgtgaatagatgctg

SEQ ID NO: 5041535 - DNA, 25 bp, Homo sapien
tgctcaagagacaggcctaggctgg

SEQ ID NO: 5041536 - DNA, 25 bp, Homo sapien
aataatgagagccagtacaggagcc

SEQ ID NO: 5041537 - DNA, 25 bp, Homo sapien
tcagatacagatacatgggcaccct

SEQ ID NO: 5041538 - DNA, 25 bp, Homo sapien
gatatgggatcacctaacagagaga

SEQ ID NO: 5041539 - DNA, 25 bp, Homo sapien
gaagcattaccaattgttctgcctg

SEQ ID NO: 5041540 - DNA, 25 bp, Homo sapien
caaatgggtctattatgcgtgaagc

SEQ ID NO: 5041541 - DNA, 25 bp, Homo sapien
tgcgagaagcagattgtaacctcat

SEQ ID NO: 5041542 - DNA, 25 bp, Homo sapien
ttcccacaacaactgctagagatgc

SEQ ID NO: 5041543 - DNA, 25 bp, Homo sapien
gagaatctggattctagcttggtga

SEQ ID NO: 5041544 - DNA, 25 bp, Homo sapien
ctgagaatctggattctagcttggt

SEQ ID NO: 5041545 - DNA, 25 bp, Homo sapien
tgagaatctggattctagcttggtg

SEQ ID NO: 5041546 - DNA, 25 bp, Homo sapien
caggccaggccattttccaatataa

SEQ ID NO: 5041547 - DNA, 25 bp, Homo sapien
caggcttgatttgacccacagtagt

SEQ ID NO: 5041548 - DNA, 25 bp, Homo sapien
taatgcccttatagagccaaagcag

SEQ ID NO: 5041549 - DNA, 25 bp, Homo sapien
actttatttatggaaccaggcaggc

SEQ ID NO: 5041550 - DNA, 25 bp, Homo sapien
agatgaagtggccaacgtctaagcc

SEQ ID NO: 5041551 - DNA, 25 bp, Homo sapien
tggccaacgtctaagccacagagat

SEQ ID NO: 5041552 - DNA, 25 bp, Homo sapien
gaagtggccaacgtctaagccacag

SEQ ID NO: 5041553 - DNA, 25 bp, Homo sapien
atgccaagatgaagtggccaacgtc

SEQ ID NO: 5041554 - DNA, 25 bp, Homo sapien
tatagaaggaaattgcaactcagta

SEQ ID NO: 5041555 - DNA, 25 bp, Homo sapien
gaatatagaaggaaattgcaactca

SEQ ID NO: 5041556 - DNA, 25 bp, Homo sapien
aggaaattgcaactcagtaataagc

SEQ ID NO: 5041557 - DNA, 25 bp, Homo sapien
atagaaggaaattgcaactcagtaa

SEQ ID NO: 5041558 - DNA, 25 bp, Homo sapien
tacagcagtgttagtgggtgagcac

SEQ ID NO: 5041559 - DNA, 25 bp, Homo sapien
ctcctttcagaggtacgcagggaaa

SEQ ID NO: 5041560 - DNA, 25 bp, Homo sapien
ttccccagggaatagccagaaggca

SEQ ID NO: 5041561 - DNA, 25 bp, Homo sapien
gaaagtaggaagtcacccaacagta

SEQ ID NO: 5041562 - DNA, 25 bp, Homo sapien
gctgttatggatcttcataaacacc

SEQ ID NO: 5041563 - DNA, 25 bp, Homo sapien
cattcttgaagttgaaatgcagtct

SEQ ID NO: 5041564 - DNA, 25 bp, Homo sapien
gaagttgaaatgcagtcttcggcat

SEQ ID NO: 5041565 - DNA, 25 bp, Homo sapien
aaatgcagtcttcggcattctccca

SEQ ID NO: 5041566 - DNA, 25 bp, Homo sapien
gtgtgcatcacaccaggttgaccct

SEQ ID NO: 5041567 - DNA, 25 bp, Homo sapien
tgagattgacatatcctagataaac

SEQ ID NO: 5041568 - DNA, 25 bp, Homo sapien
tgagagtaacagtgaagcctttcct

SEQ ID NO: 5041569 - DNA, 25 bp, Homo sapien
gggtcctgttgctacttcttggaag

SEQ ID NO: 5041570 - DNA, 25 bp, Homo sapien
gaactgtgaacagctaagaagtgct

SEQ ID NO: 5041571 - DNA, 25 bp, Homo sapien
tcaaaaacaggtgagatccgacccc

SEQ ID NO: 5041572 - DNA, 25 bp, Homo sapien
taaaagtctccttattcactcccag

SEQ ID NO: 5041573 - DNA, 25 bp, Homo sapien
gctcacagatgagtagattcaggca

SEQ ID NO: 5041574 - DNA, 25 bp, Homo sapien
tgttgtaagacctaagcccaggact

SEQ ID NO: 5041575 - DNA, 25 bp, Homo sapien
gactgcgggttctggccaaattgta

SEQ ID NO: 5041576 - DNA, 25 bp, Homo sapien
tgtctctctctagcctcgctactaa

SEQ ID NO: 5041577 - DNA, 25 bp, Homo sapien
tactaagctcgggaggaactcccat

SEQ ID NO: 5041578 - DNA, 25 bp, Homo sapien
tctcttgataggctggcccgcgtgt

SEQ ID NO: 5041579 - DNA, 25 bp, Homo sapien
catttccgcttcctacaggtgagtg

SEQ ID NO: 5041580 - DNA, 25 bp, Homo sapien
tcattaccaagagcaacagacgttc

SEQ ID NO: 5041581 - DNA, 25 bp, Homo sapien
cagctgtttggcaagggcacgcagt

SEQ ID NO: 5041582 - DNA, 25 bp, Homo sapien
gagtggtgcggcctgtcacatgaaa

SEQ ID NO: 5041583 - DNA, 25 bp, Homo sapien
tctatatcactaccacagccaagga

SEQ ID NO: 5041584 - DNA, 25 bp, Homo sapien
ggcagaggccacatgtagtagctca

SEQ ID NO: 5041585 - DNA, 25 bp, Homo sapien
tacactggctggataaatatgaggc

SEQ ID NO: 5041586 - DNA, 25 bp, Homo sapien
gacactcacagcatagactgggcga

SEQ ID NO: 5041587 - DNA, 25 bp, Homo sapien
tacatagtgaaacgcttacgtcttt

SEQ ID NO: 5041588 - DNA, 25 bp, Homo sapien
agcatctctggactgactgcccatc

SEQ ID NO: 5041589 - DNA, 25 bp, Homo sapien
tctcttgcacccataaggacactca

SEQ ID NO: 5041590 - DNA, 25 bp, Homo sapien
tgcagcaacgagagagtcccataga

SEQ ID NO: 5041591 - DNA, 25 bp, Homo sapien
ctccagcaggccataggtgatggcc

SEQ ID NO: 5041592 - DNA, 25 bp, Homo sapien
tggccaaaccctcactctggagtgg

SEQ ID NO: 5041593 - DNA, 25 bp, Homo sapien
caggggtatctgaagtttggctcca

SEQ ID NO: 5041594 - DNA, 25 bp, Homo sapien
gaagcaggatcctcttctccatgga

SEQ ID NO: 5041595 - DNA, 25 bp, Homo sapien
tggaacaggccagcaaatcgtgttg

SEQ ID NO: 5041596 - DNA, 25 bp, Homo sapien
caaatcgtgttggaagtcactcagc

SEQ ID NO: 5041597 - DNA, 25 bp, Homo sapien
caggccagcaaatcgtgttggaagt

SEQ ID NO: 5041598 - DNA, 25 bp, Homo sapien
gtcctttgggttaaaccatgcatgg

SEQ ID NO: 5041599 - DNA, 25 bp, Homo sapien
tttctttaggatggcaccaccaggg

SEQ ID NO: 5041600 - DNA, 25 bp, Homo sapien
tttgggttaaaccatgcatggtttg

SEQ ID NO: 5041601 - DNA, 25 bp, Homo sapien
cctttgggttaaaccatgcatggtt

SEQ ID NO: 5041602 - DNA, 25 bp, Homo sapien
aaacctcctcttgtagatgcttgaa

SEQ ID NO: 5041603 - DNA, 25 bp, Homo sapien
aggtcctgtagagcccctctgtctc

SEQ ID NO: 5041604 - DNA, 25 bp, Homo sapien
tctctgagcatggccaggatactgt

SEQ ID NO: 5041605 - DNA, 25 bp, Homo sapien
ggaaaacctcctcttgtagatgctt

SEQ ID NO: 5041606 - DNA, 25 bp, Homo sapien
gcatcaacgccgaccagaaagtggg

SEQ ID NO: 5041607 - DNA, 25 bp, Homo sapien
ctcaggcatcaacgccgaccagaaa

SEQ ID NO: 5041608 - DNA, 25 bp, Homo sapien
caggcatcaacgccgaccagaaagt

SEQ ID NO: 5041609 - DNA, 25 bp, Homo sapien
ggcatcaacgccgaccagaaagtgg

SEQ ID NO: 5041610 - DNA, 25 bp, Homo sapien
tgccagaagggttcctctattcttc

SEQ ID NO: 5041611 - DNA, 25 bp, Homo sapien
tttgccagaagggttcctctattct

SEQ ID NO: 5041612 - DNA, 25 bp, Homo sapien
ttgccagaagggttcctctattctt

SEQ ID NO: 5041613 - DNA, 25 bp, Homo sapien
attccacatgaccaaacgccaggcc

SEQ ID NO: 5041614 - DNA, 25 bp, Homo sapien
tgttctcagctttctggacccttcc

SEQ ID NO: 5041615 - DNA, 25 bp, Homo sapien
ttcccattccacatgaccaaacgcc

SEQ ID NO: 5041616 - DNA, 25 bp, Homo sapien
ccattccacatgaccaaacgccagg

SEQ ID NO: 5041617 - DNA, 25 bp, Homo sapien
gaggcaggggcaatctgccctactt

SEQ ID NO: 5041618 - DNA, 25 bp, Homo sapien
gcgaggcaggggcaatctgccctac

SEQ ID NO: 5041619 - DNA, 25 bp, Homo sapien
ggcaggggcaatctgccctacttac

SEQ ID NO: 5041620 - DNA, 25 bp, Homo sapien
caaaggcgaggcaggggcaatctgc

SEQ ID NO: 5041621 - DNA, 25 bp, Homo sapien
cccacctccagcaaactcacactca

SEQ ID NO: 5041622 - DNA, 25 bp, Homo sapien
tgtgtgcaggatgggatccccaccc

SEQ ID NO: 5041623 - DNA, 25 bp, Homo sapien
cccatgtgtgcaggatgggatcccc

SEQ ID NO: 5041624 - DNA, 25 bp, Homo sapien
catgtgtgcaggatgggatccccac

SEQ ID NO: 5041625 - DNA, 25 bp, Homo sapien
tactgggaggatgtgaacttgttcg

SEQ ID NO: 5041626 - DNA, 25 bp, Homo sapien
ctgggaggatgtgaacttgttcgta

SEQ ID NO: 5041627 - DNA, 25 bp, Homo sapien
gggaggatgtgaacttgttcgtatt

SEQ ID NO: 5041628 - DNA, 25 bp, Homo sapien
ctactgggaggatgtgaacttgttc

SEQ ID NO: 5041629 - DNA, 25 bp, Homo sapien
gcccgctcaaaaattgctgtgtcag

SEQ ID NO: 5041630 - DNA, 25 bp, Homo sapien
ttggcaaatgcccgctcaaaaattg

SEQ ID NO: 5041631 - DNA, 25 bp, Homo sapien
cgctcaaaaattgctgtgtcagaaa

SEQ ID NO: 5041632 - DNA, 25 bp, Homo sapien
aaatgcccgctcaaaaattgctgtg

SEQ ID NO: 5041633 - DNA, 25 bp, Homo sapien
cagtagcctaccatttcggaaattt

SEQ ID NO: 5041634 - DNA, 25 bp, Homo sapien
aaatgatggtagcaacccctcactc

SEQ ID NO: 5041635 - DNA, 25 bp, Homo sapien
tcactcctcgcagcacagtagccta

SEQ ID NO: 5041636 - DNA, 25 bp, Homo sapien
ctcgcagcacagtagcctaccattt

SEQ ID NO: 5041637 - DNA, 25 bp, Homo sapien
ggtaactttacattgaactcagtac

SEQ ID NO: 5041638 - DNA, 25 bp, Homo sapien
tgggtaactttacattgaactcagt

SEQ ID NO: 5041639 - DNA, 25 bp, Homo sapien
taactttacattgaactcagtactg

SEQ ID NO: 5041640 - DNA, 25 bp, Homo sapien
gggtaactttacattgaactcagta

SEQ ID NO: 5041641 - DNA, 25 bp, Homo sapien
ttcatcatcatctgagatgagaatg

SEQ ID NO: 5041642 - DNA, 25 bp, Homo sapien
tcttgaaaggttctctgttcatcat

SEQ ID NO: 5041643 - DNA, 25 bp, Homo sapien
ctctgttcatcatcatctgagatga

SEQ ID NO: 5041644 - DNA, 25 bp, Homo sapien
tgttcatcatcatctgagatgagaa

SEQ ID NO: 5041645 - DNA, 25 bp, Homo sapien
ttaccactctcaatttggcatcttc

SEQ ID NO: 5041646 - DNA, 25 bp, Homo sapien
ctcaatttggcatcttcttggatga

SEQ ID NO: 5041647 - DNA, 25 bp, Homo sapien
cactctcaatttggcatcttcttgg

SEQ ID NO: 5041648 - DNA, 25 bp, Homo sapien
ggcatcttcttggatgatttcacat

SEQ ID NO: 5041649 - DNA, 25 bp, Homo sapien
ttctgaagagtcagcgccttcttct

SEQ ID NO: 5041650 - DNA, 25 bp, Homo sapien
tttctgaagagtcagcgccttcttc

SEQ ID NO: 5041651 - DNA, 25 bp, Homo sapien
tcttcctaaatctagaacccacagg

SEQ ID NO: 5041652 - DNA, 25 bp, Homo sapien
caaccaggcagggattaaactatct

SEQ ID NO: 5041653 - DNA, 25 bp, Homo sapien
ataattcttcaatctcccgcctagg

SEQ ID NO: 5041654 - DNA, 25 bp, Homo sapien
gaaagctgttaaatgtgcataggca

SEQ ID NO: 5041655 - DNA, 25 bp, Homo sapien
gccataggtaatccaaagagcaatt

SEQ ID NO: 5041656 - DNA, 25 bp, Homo sapien
tgccataggtaatccaaagagcaat

SEQ ID NO: 5041657 - DNA, 25 bp, Homo sapien
cttgccataggtaatccaaagagca

SEQ ID NO: 5041658 - DNA, 25 bp, Homo sapien
ccctaaaatattcacactactgcta

SEQ ID NO: 5041659 - DNA, 25 bp, Homo sapien
tcctccggcactccttcagaaatga

SEQ ID NO: 5041660 - DNA, 25 bp, Homo sapien
agcacagtattgttgatcagttcaa

SEQ ID NO: 5041661 - DNA, 25 bp, Homo sapien
tgatcagttcaacagcctctgtcac

SEQ ID NO: 5041662 - DNA, 25 bp, Homo sapien
gaaatgatggctctggatccaacag

SEQ ID NO: 5041663 - DNA, 25 bp, Homo sapien
ccatgtcagccttatgcttctggat

SEQ ID NO: 5041664 - DNA, 25 bp, Homo sapien
tgtcactgaagtggaacggtcctgt

SEQ ID NO: 5041665 - DNA, 25 bp, Homo sapien
gacacactcacttctataccaacat

SEQ ID NO: 5041666 - DNA, 25 bp, Homo sapien
taacaatttgaaactcgagggagca

SEQ ID NO: 5041667 - DNA, 25 bp, Homo sapien
ctccttggcctctggctgacaatac

SEQ ID NO: 5041668 - DNA, 25 bp, Homo sapien
taacaaactgacgtaatttggtggc

SEQ ID NO: 5041669 - DNA, 25 bp, Homo sapien
tcccaaaatgatgaacgagaatcct

SEQ ID NO: 5041670 - DNA, 25 bp, Homo sapien
cattgagggagaattcaactggaac

SEQ ID NO: 5041671 - DNA, 25 bp, Homo sapien
taatgcgttccaacatggagggcat

SEQ ID NO: 5041672 - DNA, 25 bp, Homo sapien
tgtcgctgatgatagtaatcttttc

SEQ ID NO: 5041673 - DNA, 25 bp, Homo sapien
tttttgtcgctgatgatagtaatct

SEQ ID NO: 5041674 - DNA, 25 bp, Homo sapien
atccagaacatttttgtcgctgatg

SEQ ID NO: 5041675 - DNA, 25 bp, Homo sapien
agaacatttttgtcgctgatgatag

SEQ ID NO: 5041676 - DNA, 25 bp, Homo sapien
gcacaattgagtagggccccttcca

SEQ ID NO: 5041677 - DNA, 25 bp, Homo sapien
tagaaattgtcagacaaactccagg

SEQ ID NO: 5041678 - DNA, 25 bp, Homo sapien
tcctgcggtcaagtagaaattgtca

SEQ ID NO: 5041679 - DNA, 25 bp, Homo sapien
tgtagagaaatagcaggattggccg

SEQ ID NO: 5041680 - DNA, 25 bp, Homo sapien
tgggtccctgactcaatttccaatg

SEQ ID NO: 5041681 - DNA, 25 bp, Homo sapien
ggtccctgactcaatttccaatgca

SEQ ID NO: 5041682 - DNA, 25 bp, Homo sapien
ccctgactcaatttccaatgcagta

SEQ ID NO: 5041683 - DNA, 25 bp, Homo sapien
ctgactcaatttccaatgcagtatc

SEQ ID NO: 5041684 - DNA, 25 bp, Homo sapien
ataagcacaggagggccctgttcat

SEQ ID NO: 5041685 - DNA, 25 bp, Homo sapien
aaaaataagcacaggagggccctgt

SEQ ID NO: 5041686 - DNA, 25 bp, Homo sapien
ctggaaaaataagcacaggagggcc

SEQ ID NO: 5041687 - DNA, 25 bp, Homo sapien
aaataagcacaggagggccctgttc

SEQ ID NO: 5041688 - DNA, 25 bp, Homo sapien
gaacaacttctttggctcgtattcc

SEQ ID NO: 5041689 - DNA, 25 bp, Homo sapien
tctgtggaacaaaatcaagtggcat

SEQ ID NO: 5041690 - DNA, 25 bp, Homo sapien
cgtattcctctggtatatgtgctga

SEQ ID NO: 5041691 - DNA, 25 bp, Homo sapien
ggatcacagaaccttagctctcaag

SEQ ID NO: 5041692 - DNA, 25 bp, Homo sapien
attattggcctactcaagttttggg

SEQ ID NO: 5041693 - DNA, 25 bp, Homo sapien
gaataggtttcgacatattcccacc

SEQ ID NO: 5041694 - DNA, 25 bp, Homo sapien
tggcctcatagaataggtttcgaca

SEQ ID NO: 5041695 - DNA, 25 bp, Homo sapien
taggaatgtatcaattgcctctagg

SEQ ID NO: 5041696 - DNA, 25 bp, Homo sapien
atcctactgaaacccggcgctgcag

SEQ ID NO: 5041697 - DNA, 25 bp, Homo sapien
gcgtcagccgcattagcagtggcca

SEQ ID NO: 5041698 - DNA, 25 bp, Homo sapien
acaagctcaaacagccaccctggag

SEQ ID NO: 5041699 - DNA, 25 bp, Homo sapien
tcatcgatgcaggacccatcctact

SEQ ID NO: 5041700 - DNA, 25 bp, Homo sapien
tttcttcctgctctgttaactcgga

SEQ ID NO: 5041701 - DNA, 25 bp, Homo sapien
catcggctcctcccggttgtaggct

SEQ ID NO: 5041702 - DNA, 25 bp, Homo sapien
cccggttgtaggctatttcttcctg

SEQ ID NO: 5041703 - DNA, 25 bp, Homo sapien
ctcctcccggttgtaggctatttct

SEQ ID NO: 5041704 - DNA, 25 bp, Homo sapien
aattggcccacagaccggtttgcta

SEQ ID NO: 5041705 - DNA, 25 bp, Homo sapien
aacagacggtgagtaaattggccca

SEQ ID NO: 5041706 - DNA, 25 bp, Homo sapien
gccacaagcgcaggtaagtatcaga

SEQ ID NO: 5041707 - DNA, 25 bp, Homo sapien
gaatgtcaggttcagggaccagcca

SEQ ID NO: 5041708 - DNA, 25 bp, Homo sapien
tttggttgcacatgaaaaaggcggc

SEQ ID NO: 5041709 - DNA, 25 bp, Homo sapien
gcagttttgccatgcaggagaagca

SEQ ID NO: 5041710 - DNA, 25 bp, Homo sapien
tctcagtagagaccccaatgcaatg

SEQ ID NO: 5041711 - DNA, 25 bp, Homo sapien
taattagctgccttagatggcccgt

SEQ ID NO: 5041712 - DNA, 25 bp, Homo sapien
agcatggatttaatttgcttggagg

SEQ ID NO: 5041713 - DNA, 25 bp, Homo sapien
ttgcagcatggatttaatttgcttg

SEQ ID NO: 5041714 - DNA, 25 bp, Homo sapien
cagcatggatttaatttgcttggag

SEQ ID NO: 5041715 - DNA, 25 bp, Homo sapien
gcagcatggatttaatttgcttgga

SEQ ID NO: 5041716 - DNA, 25 bp, Homo sapien
caaaattatggcttctcattgtagc

SEQ ID NO: 5041717 - DNA, 25 bp, Homo sapien
gaatagccagtagctatttagcagc

SEQ ID NO: 5041718 - DNA, 25 bp, Homo sapien
cattgtagctttaaccctgttcagg

SEQ ID NO: 5041719 - DNA, 25 bp, Homo sapien
caggatggagaattggtctcagcaa

SEQ ID NO: 5041720 - DNA, 25 bp, Homo sapien
aatgctaagtgatgtcacaaggatt

SEQ ID NO: 5041721 - DNA, 25 bp, Homo sapien
taagtgatgtcacaaggatttaacc

SEQ ID NO: 5041722 - DNA, 25 bp, Homo sapien
taaatgctaagtgatgtcacaagga

SEQ ID NO: 5041723 - DNA, 25 bp, Homo sapien
tgctaagtgatgtcacaaggattta

SEQ ID NO: 5041724 - DNA, 25 bp, Homo sapien
ttatgtagataaagtatacgcaatt

SEQ ID NO: 5041725 - DNA, 25 bp, Homo sapien
tgtctcgtagttctcaaaattcttc

SEQ ID NO: 5041726 - DNA, 25 bp, Homo sapien
taaagtatacgcaattacacgaaat

SEQ ID NO: 5041727 - DNA, 25 bp, Homo sapien
tacacgaaatcctacagatgtctcg

SEQ ID NO: 5041728 - DNA, 25 bp, Homo sapien
ccttctgtgggatgtgatcttggct

SEQ ID NO: 5041729 - DNA, 25 bp, Homo sapien
tctctacccatgacgcaagttctcg

SEQ ID NO: 5041730 - DNA, 25 bp, Homo sapien
tcaaagagtgctaagtgttttcctc

SEQ ID NO: 5041731 - DNA, 25 bp, Homo sapien
gacaaagccaatccagagcacactg

SEQ ID NO: 5041732 - DNA, 25 bp, Homo sapien
taagaactttgatacaacctttcat

SEQ ID NO: 5041733 - DNA, 25 bp, Homo sapien
accttccacactattaggaggttgg

SEQ ID NO: 5041734 - DNA, 25 bp, Homo sapien
cacactattaggaggttggtcctta

SEQ ID NO: 5041735 - DNA, 25 bp, Homo sapien
gttggtccttaagaactttgataca

SEQ ID NO: 5041736 - DNA, 25 bp, Homo sapien
tattgccaaatacgtagtagaagcc

SEQ ID NO: 5041737 - DNA, 25 bp, Homo sapien
gctagtaatcagtaatcgagatccg

SEQ ID NO: 5041738 - DNA, 25 bp, Homo sapien
tgacaggtgtacatgaaggcaacaa

SEQ ID NO: 5041739 - DNA, 25 bp, Homo sapien
tcgagatccgaaatgctaagagcct

SEQ ID NO: 5041740 - DNA, 25 bp, Homo sapien
gagtattatgacacccaccattacc

SEQ ID NO: 5041741 - DNA, 25 bp, Homo sapien
gaagttttagcaaatgctcccactg

SEQ ID NO: 5041742 - DNA, 25 bp, Homo sapien
caaatgctcccactggatgtacgtg

SEQ ID NO: 5041743 - DNA, 25 bp, Homo sapien
cattaccctcaagcagaatgacact

SEQ ID NO: 5041744 - DNA, 25 bp, Homo sapien
gactctgcatacactagccattgtg

SEQ ID NO: 5041745 - DNA, 25 bp, Homo sapien
agccattgtgcttaaacaatctgtg

SEQ ID NO: 5041746 - DNA, 25 bp, Homo sapien
cactagccattgtgcttaaacaatc

SEQ ID NO: 5041747 - DNA, 25 bp, Homo sapien
agcatgactctgcatacactagcca

SEQ ID NO: 5041748 - DNA, 25 bp, Homo sapien
tgcctcagcataaaacaaagacatt

SEQ ID NO: 5041749 - DNA, 25 bp, Homo sapien
caaagacattcgatttgccaattca

SEQ ID NO: 5041750 - DNA, 25 bp, Homo sapien
tcactcaaggttttcagcattggag

SEQ ID NO: 5041751 - DNA, 25 bp, Homo sapien
ttttgttgtggcatcactcaaggtt

SEQ ID NO: 5041752 - DNA, 25 bp, Homo sapien
tacattgttaatcctcatacgactc

SEQ ID NO: 5041753 - DNA, 25 bp, Homo sapien
cggtacattgttaatcctcatacga

SEQ ID NO: 5041754 - DNA, 25 bp, Homo sapien
cattgttaatcctcatacgactcaa

SEQ ID NO: 5041755 - DNA, 25 bp, Homo sapien
tgttaatcctcatacgactcaatgt

SEQ ID NO: 5041756 - DNA, 25 bp, Homo sapien
actgtttagcaagagcctgctctcg

SEQ ID NO: 5041757 - DNA, 25 bp, Homo sapien
tgcaaactgtttagcaagagcctgc

SEQ ID NO: 5041758 - DNA, 25 bp, Homo sapien
caaactgtttagcaagagcctgctc

SEQ ID NO: 5041759 - DNA, 25 bp, Homo sapien
ctgcaaactgtttagcaagagcctg

SEQ ID NO: 5041760 - DNA, 25 bp, Homo sapien
tggggtacttgttaaggctcccaga

SEQ ID NO: 5041761 - DNA, 25 bp, Homo sapien
atggggtacttgttaaggctcccag

SEQ ID NO: 5041762 - DNA, 25 bp, Homo sapien
tatggggtacttgttaaggctccca

SEQ ID NO: 5041763 - DNA, 25 bp, Homo sapien
ggtacttgttaaggctcccagaaga

SEQ ID NO: 5041764 - DNA, 25 bp, Homo sapien
aatccttgccctgtcccattgtaag

SEQ ID NO: 5041765 - DNA, 25 bp, Homo sapien
tagtgctcaggccaagaaaccttct

SEQ ID NO: 5041766 - DNA, 25 bp, Homo sapien
aactggcaagggatcagggtccttc

SEQ ID NO: 5041767 - DNA, 25 bp, Homo sapien
cttctgaagtataacccatggtgta

SEQ ID NO: 5041768 - DNA, 25 bp, Homo sapien
ctctgagaaaattcgtaaaatttct

SEQ ID NO: 5041769 - DNA, 25 bp, Homo sapien
actagtggaacaactgcaccccatg

SEQ ID NO: 5041770 - DNA, 25 bp, Homo sapien
ccataaagctatagaagaagtcctg

SEQ ID NO: 5041771 - DNA, 25 bp, Homo sapien
gaaggtagaatgctctccagctcca

SEQ ID NO: 5041772 - DNA, 25 bp, Homo sapien
tcaaagccttcggtacattgctaag

SEQ ID NO: 5041773 - DNA, 25 bp, Homo sapien
aagattccacgtacacatttttgag

SEQ ID NO: 5041774 - DNA, 25 bp, Homo sapien
cagggtgtgtgccaccaatttggct

SEQ ID NO: 5041775 - DNA, 25 bp, Homo sapien
gggtgtgtgccaccaatttggctat

SEQ ID NO: 5041776 - DNA, 25 bp, Homo sapien
ttacagggtgtgtgccaccaatttg

SEQ ID NO: 5041777 - DNA, 25 bp, Homo sapien
gtgtgccaccaatttggctatttat

SEQ ID NO: 5041778 - DNA, 25 bp, Homo sapien
ttggtcatagcattacgagatcctg

SEQ ID NO: 5041779 - DNA, 25 bp, Homo sapien
atagcattacgagatcctggtttcc

SEQ ID NO: 5041780 - DNA, 25 bp, Homo sapien
ctactgagtgactacggtatcctat

SEQ ID NO: 5041781 - DNA, 25 bp, Homo sapien
gtgactacggtatcctatgcaaaac

SEQ ID NO: 5041782 - DNA, 25 bp, Homo sapien
tagaaaatacataaatgcgctttac

SEQ ID NO: 5041783 - DNA, 25 bp, Homo sapien
taactagaaaatacataaatgcgct

SEQ ID NO: 5041784 - DNA, 25 bp, Homo sapien
actagaaaatacataaatgcgcttt

SEQ ID NO: 5041785 - DNA, 25 bp, Homo sapien
ttaactagaaaatacataaatgcgc

SEQ ID NO: 5041786 - DNA, 25 bp, Homo sapien
gccagctcctctgtatgactgcaag

SEQ ID NO: 5041787 - DNA, 25 bp, Homo sapien
ctctgtatgactgcaagtcctccaa

SEQ ID NO: 5041788 - DNA, 25 bp, Homo sapien
aatactacattcacctgattataaa

SEQ ID NO: 5041789 - DNA, 25 bp, Homo sapien
ctctcgtatttcgtggccagctcct

SEQ ID NO: 5041790 - DNA, 25 bp, Homo sapien
aaatctgagttcctacacacttggg

SEQ ID NO: 5041791 - DNA, 25 bp, Homo sapien
caccacctgtggtgttagccacaaa

SEQ ID NO: 5041792 - DNA, 25 bp, Homo sapien
cagaaggtcaagaatcctgtgcaga

SEQ ID NO: 5041793 - DNA, 25 bp, Homo sapien
gaatcaaggacacaaacatatgggc

SEQ ID NO: 5041794 - DNA, 25 bp, Homo sapien
agggcacacatcactattcccagct

SEQ ID NO: 5041795 - DNA, 25 bp, Homo sapien
tcatacagatagagtcttgccatgt

SEQ ID NO: 5041796 - DNA, 25 bp, Homo sapien
cactgcacctagctcgattgagtgc

SEQ ID NO: 5041797 - DNA, 25 bp, Homo sapien
gactaaacgtctaactgaatacaga

SEQ ID NO: 5041798 - DNA, 25 bp, Homo sapien
caaacatcaccatcagaaagtcttc

SEQ ID NO: 5041799 - DNA, 25 bp, Homo sapien
aaacatcaccatcagaaagtcttcc

SEQ ID NO: 5041800 - DNA, 25 bp, Homo sapien
gataggccaaggtcaccatagtagc

SEQ ID NO: 5041801 - DNA, 25 bp, Homo sapien
cggtttaagagaacacccatctgat

SEQ ID NO: 5041802 - DNA, 25 bp, Homo sapien
tactagattgagagcttccagcatg

SEQ ID NO: 5041803 - DNA, 25 bp, Homo sapien
cctactggctggtatacaggaggca

SEQ ID NO: 5041804 - DNA, 25 bp, Homo sapien
aatttggcccctgctcaaggtctgt

SEQ ID NO: 5041805 - DNA, 25 bp, Homo sapien
atttggcccctgctcaaggtctgtg

SEQ ID NO: 5041806 - DNA, 25 bp, Homo sapien
tttggcccctgctcaaggtctgtgc

SEQ ID NO: 5041807 - DNA, 25 bp, Homo sapien
ttggcccctgctcaaggtctgtgca

SEQ ID NO: 5041808 - DNA, 25 bp, Homo sapien
aagaatgagaaaagagaaaatatcc

SEQ ID NO: 5041809 - DNA, 25 bp, Homo sapien
gacaagaatgagaaaagagaaaata

SEQ ID NO: 5041810 - DNA, 25 bp, Homo sapien
ctgtcaagacaagaatgagaaaaga

SEQ ID NO: 5041811 - DNA, 25 bp, Homo sapien
tgtcaagacaagaatgagaaaagag

SEQ ID NO: 5041812 - DNA, 25 bp, Homo sapien
tgtccctggttagcaccttaatgag

SEQ ID NO: 5041813 - DNA, 25 bp, Homo sapien
gctgcattgtggtctatgtccctgg

SEQ ID NO: 5041814 - DNA, 25 bp, Homo sapien
gttagcaccttaatgagattaccca

SEQ ID NO: 5041815 - DNA, 25 bp, Homo sapien
tctatgtccctggttagcaccttaa

SEQ ID NO: 5041816 - DNA, 25 bp, Homo sapien
ctaaatggtacaacaaagcctagat

SEQ ID NO: 5041817 - DNA, 25 bp, Homo sapien
ccattgagccctattcctcagaaaa

SEQ ID NO: 5041818 - DNA, 25 bp, Homo sapien
ggtgtactcaatattctaagcccac

SEQ ID NO: 5041819 - DNA, 25 bp, Homo sapien
tgcctgtgctctctaaatggtacaa

SEQ ID NO: 5041820 - DNA, 25 bp, Homo sapien
tactgtgggtgaaatgttacccaac

SEQ ID NO: 5041821 - DNA, 25 bp, Homo sapien
cactggcaaggtctgaaagtactgc

SEQ ID NO: 5041822 - DNA, 25 bp, Homo sapien
gccattactcccagccgaaaatggt

SEQ ID NO: 5041823 - DNA, 25 bp, Homo sapien
tgaacacagctgataagcactggca

SEQ ID NO: 5041824 - DNA, 25 bp, Homo sapien
ggaagagtttaaccaccaatgcaaa

SEQ ID NO: 5041825 - DNA, 25 bp, Homo sapien
gtagtactaaaatctccccatgaag

SEQ ID NO: 5041826 - DNA, 25 bp, Homo sapien
aagccctagcaaatgttaagatcca

SEQ ID NO: 5041827 - DNA, 25 bp, Homo sapien
tagtacaacaggattcaggtattcc

SEQ ID NO: 5041828 - DNA, 25 bp, Homo sapien
cattagacaaatatagtattctgaa

SEQ ID NO: 5041829 - DNA, 25 bp, Homo sapien
aatacgttatcattagacaaatata

SEQ ID NO: 5041830 - DNA, 25 bp, Homo sapien
tatcattagacaaatatagtattct

SEQ ID NO: 5041831 - DNA, 25 bp, Homo sapien
cgttatcattagacaaatatagtat

SEQ ID NO: 5041832 - DNA, 25 bp, Homo sapien
tattctagttcctcaattagcggcg

SEQ ID NO: 5041833 - DNA, 25 bp, Homo sapien
tgctatcggcaaactgtacacaata

SEQ ID NO: 5041834 - DNA, 25 bp, Homo sapien
tccagctacatacgataaagatgaa

SEQ ID NO: 5041835 - DNA, 25 bp, Homo sapien
tgtaaaacgcaagagcaatgggcac

SEQ ID NO: 5041836 - DNA, 25 bp, Homo sapien
tacttaagctcatgtacaagagtcc

SEQ ID NO: 5041837 - DNA, 25 bp, Homo sapien
ttaacagttatgctttacacctcca

SEQ ID NO: 5041838 - DNA, 25 bp, Homo sapien
aattgctctcccaagtgcttccatc

SEQ ID NO: 5041839 - DNA, 25 bp, Homo sapien
tagagtctgaaatgtctcactgatg

SEQ ID NO: 5041840 - DNA, 25 bp, Homo sapien
ctacgaagggataattcaaatacaa

SEQ ID NO: 5041841 - DNA, 25 bp, Homo sapien
tacgaagggataattcaaatacaag

SEQ ID NO: 5041842 - DNA, 25 bp, Homo sapien
tccccagagtgagagtctctggtgc

SEQ ID NO: 5041843 - DNA, 25 bp, Homo sapien
cccagagtgagagtctctggtgcct

SEQ ID NO: 5041844 - DNA, 25 bp, Homo sapien
ggtgcctcttccagtcaccaaacag

SEQ ID NO: 5041845 - DNA, 25 bp, Homo sapien
tctggtgcctcttccagtcaccaaa

SEQ ID NO: 5041846 - DNA, 25 bp, Homo sapien
ggataaactgtccatcattctttct

SEQ ID NO: 5041847 - DNA, 25 bp, Homo sapien
aatgaacgtttattgtggcacatac

SEQ ID NO: 5041848 - DNA, 25 bp, Homo sapien
tatggatggttggatgcagaagcta

SEQ ID NO: 5041849 - DNA, 25 bp, Homo sapien
cagagggctttgcatgacgttagtg

SEQ ID NO: 5041850 - DNA, 25 bp, Homo sapien
tgtttgagccttgtacactaacgga

SEQ ID NO: 5041851 - DNA, 25 bp, Homo sapien
gacaaggccaggtatctttgtaaat

SEQ ID NO: 5041852 - DNA, 25 bp, Homo sapien
actatgccatacatattcagggagg

SEQ ID NO: 5041853 - DNA, 25 bp, Homo sapien
aacaagggtgacaccagttggaggc

SEQ ID NO: 5041854 - DNA, 25 bp, Homo sapien
tattaggaccaaatgcagtatgtgc

SEQ ID NO: 5041855 - DNA, 25 bp, Homo sapien
tgctgggcaaacactgggattcggg

SEQ ID NO: 5041856 - DNA, 25 bp, Homo sapien
ctgacattcaatttgtagtcagtgt

SEQ ID NO: 5041857 - DNA, 25 bp, Homo sapien
acattcaatttgtagtcagtgtcag

SEQ ID NO: 5041858 - DNA, 25 bp, Homo sapien
ctgctgggcaaacactgggattcgg

SEQ ID NO: 5041859 - DNA, 25 bp, Homo sapien
agccagtgctggtgattctgtcctt

SEQ ID NO: 5041860 - DNA, 25 bp, Homo sapien
gtgctggtgattctgtccttgtcct

SEQ ID NO: 5041861 - DNA, 25 bp, Homo sapien
agtgctggtgattctgtccttgtcc

SEQ ID NO: 5041862 - DNA, 25 bp, Homo sapien
cttcagccagtgctggtgattctgt

SEQ ID NO: 5041863 - DNA, 25 bp, Homo sapien
ttggcgttccctctttcctagttca

SEQ ID NO: 5041864 - DNA, 25 bp, Homo sapien
cttggattggcgttccctctttcct

SEQ ID NO: 5041865 - DNA, 25 bp, Homo sapien
cgttccctctttcctagttcacttg

SEQ ID NO: 5041866 - DNA, 25 bp, Homo sapien
ctctttcctagttcacttgttccag

SEQ ID NO: 5041867 - DNA, 25 bp, Homo sapien
ttggttcagaatacctactgttttc

SEQ ID NO: 5041868 - DNA, 25 bp, Homo sapien
ttcagaatacctactgttttcacca

SEQ ID NO: 5041869 - DNA, 25 bp, Homo sapien
aggttggttcagaatacctactgtt

SEQ ID NO: 5041870 - DNA, 25 bp, Homo sapien
gcaaggttggttcagaatacctact

SEQ ID NO: 5041871 - DNA, 25 bp, Homo sapien
cttttccataataatcagaactaga

SEQ ID NO: 5041872 - DNA, 25 bp, Homo sapien
tgtaattacagtaaaagcttttcca

SEQ ID NO: 5041873 - DNA, 25 bp, Homo sapien
gcttttccataataatcagaactag

SEQ ID NO: 5041874 - DNA, 25 bp, Homo sapien
ttgccaacaaagacgaaagtgaagc

SEQ ID NO: 5041875 - DNA, 25 bp, Homo sapien
tgtctcagaggaagtcatgccagca

SEQ ID NO: 5041876 - DNA, 25 bp, Homo sapien
tagaaatgatgctcactccacactg

SEQ ID NO: 5041877 - DNA, 25 bp, Homo sapien
caacagggagactaaatatgcagcc

SEQ ID NO: 5041878 - DNA, 25 bp, Homo sapien
tagtagtctcaaactgcaagcaacc

SEQ ID NO: 5041879 - DNA, 25 bp, Homo sapien
taaatgaccataccaagggctggtg

SEQ ID NO: 5041880 - DNA, 25 bp, Homo sapien
tctaggagttaagtctgggcaacac

SEQ ID NO: 5041881 - DNA, 25 bp, Homo sapien
gaattcctatacacttgtgcaaagc

SEQ ID NO: 5041882 - DNA, 25 bp, Homo sapien
aaagggcaggcgtgcttattgctca

SEQ ID NO: 5041883 - DNA, 25 bp, Homo sapien
gaggtaccagctgccctttgctcta

SEQ ID NO: 5041884 - DNA, 25 bp, Homo sapien
gatctgggttcccttaactcagggc

SEQ ID NO: 5041885 - DNA, 25 bp, Homo sapien
catcatcctgtagactgaggctcag

SEQ ID NO: 5041886 - DNA, 25 bp, Homo sapien
tgggccacgagaaatagagtgatcc

SEQ ID NO: 5041887 - DNA, 25 bp, Homo sapien
gagtgatcctcactttggtccgaga

SEQ ID NO: 5041888 - DNA, 25 bp, Homo sapien
tacgtcacattatgacatccgggac

SEQ ID NO: 5041889 - DNA, 25 bp, Homo sapien
aaatattctagatcaatggtcccca

SEQ ID NO: 5041890 - DNA, 25 bp, Homo sapien
gcgataaagacaccaacttcaaaac

SEQ ID NO: 5041891 - DNA, 25 bp, Homo sapien
ctaagttggaagatctggccgcgca

SEQ ID NO: 5041892 - DNA, 25 bp, Homo sapien
gggagcgataaagacaccaacttca

SEQ ID NO: 5041893 - DNA, 25 bp, Homo sapien
ttaaaaggacaacgcagtatctaag

SEQ ID NO: 5041894 - DNA, 25 bp, Homo sapien
gccgacacgggaagggacgagccaa

SEQ ID NO: 5041895 - DNA, 25 bp, Homo sapien
aaaggaagacccgaatgaatgagcg

SEQ ID NO: 5041896 - DNA, 25 bp, Homo sapien
gagccaacgagccaggagtcactgg

SEQ ID NO: 5041897 - DNA, 25 bp, Homo sapien
agcgcgcgtggaggtgccaatggaa

SEQ ID NO: 5041898 - DNA, 25 bp, Homo sapien
cagaggcggctcctcagcggcgcta

SEQ ID NO: 5041899 - DNA, 25 bp, Homo sapien
gctcgagcctccaggcgctctcagt

SEQ ID NO: 5041900 - DNA, 25 bp, Homo sapien
tcctggagccgcagaggcggctcct

SEQ ID NO: 5041901 - DNA, 25 bp, Homo sapien
ctccgctcgagcctccaggcgctct

SEQ ID NO: 5041902 - DNA, 25 bp, Homo sapien
gggcaagtgacccggatgtacaggg

SEQ ID NO: 5041903 - DNA, 25 bp, Homo sapien
agtgacccggatgtacagggtaacg

SEQ ID NO: 5041904 - DNA, 25 bp, Homo sapien
caagtgacccggatgtacagggtaa

SEQ ID NO: 5041905 - DNA, 25 bp, Homo sapien
tgacccggatgtacagggtaacgac

SEQ ID NO: 5041906 - DNA, 25 bp, Homo sapien
ttagcctatcttctccgcccctcat

SEQ ID NO: 5041907 - DNA, 25 bp, Homo sapien
aggtaaatccttagcctatcttctc

SEQ ID NO: 5041908 - DNA, 25 bp, Homo sapien
ctgtccggccgtgcgcatgcgccgc

SEQ ID NO: 5041909 - DNA, 25 bp, Homo sapien
cccgcaaggtaaatccttagcctat

SEQ ID NO: 5041910 - DNA, 25 bp, Homo sapien
tcaacttcacagcttctatggacac

SEQ ID NO: 5041911 - DNA, 25 bp, Homo sapien
aatgaggcaaccgaaactccgtatg

SEQ ID NO: 5041912 - DNA, 25 bp, Homo sapien
aaactccgtatgtgacagatgcagg

SEQ ID NO: 5041913 - DNA, 25 bp, Homo sapien
ctatatggtactattatcaggccca

SEQ ID NO: 5041914 - DNA, 25 bp, Homo sapien
tactcctaggttgatagaatttccc

SEQ ID NO: 5041915 - DNA, 25 bp, Homo sapien
tgcctcaatccacagaagctttggt

SEQ ID NO: 5041916 - DNA, 25 bp, Homo sapien
tggaaatagaatcacacaggcagaa

SEQ ID NO: 5041917 - DNA, 25 bp, Homo sapien
gcaaacagaaggctcatggctggta

SEQ ID NO: 5041918 - DNA, 25 bp, Homo sapien
tccatcagtccctttaggagcagca

SEQ ID NO: 5041919 - DNA, 25 bp, Homo sapien
catcagtccctttaggagcagcatc

SEQ ID NO: 5041920 - DNA, 25 bp, Homo sapien
atccatcagtccctttaggagcagc

SEQ ID NO: 5041921 - DNA, 25 bp, Homo sapien
atatccatcagtccctttaggagca

SEQ ID NO: 5041922 - DNA, 25 bp, Homo sapien
gaaccgctgacaaccattttggacc

SEQ ID NO: 5041923 - DNA, 25 bp, Homo sapien
tccgaagtgctgtggtgtatgctgc

SEQ ID NO: 5041924 - DNA, 25 bp, Homo sapien
ttttacctcctgctagaaccgctga

SEQ ID NO: 5041925 - DNA, 25 bp, Homo sapien
gaatcctgactaatgaaatccgaag

SEQ ID NO: 5041926 - DNA, 25 bp, Homo sapien
ggaaggcctcacagagcaatggcga

SEQ ID NO: 5041927 - DNA, 25 bp, Homo sapien
gaagggcgatgatacttaaagctct

SEQ ID NO: 5041928 - DNA, 25 bp, Homo sapien
gcaatggcgattaaacctattccct

SEQ ID NO: 5041929 - DNA, 25 bp, Homo sapien
tacatcccacgttgcacagaagggc

SEQ ID NO: 5041930 - DNA, 25 bp, Homo sapien
ccctctatgtagatgtaagtagtgc

SEQ ID NO: 5041931 - DNA, 25 bp, Homo sapien
tagtgcctactcttggtgatttccc

SEQ ID NO: 5041932 - DNA, 25 bp, Homo sapien
caaattcttggaacctaaggattgg

SEQ ID NO: 5041933 - DNA, 25 bp, Homo sapien
ccagcacaccaatgtagactacagt

SEQ ID NO: 5041934 - DNA, 25 bp, Homo sapien
tttgcgttcgcagtagaggtttcca

SEQ ID NO: 5041935 - DNA, 25 bp, Homo sapien
cactgtgggagtgctgttaggtata

SEQ ID NO: 5041936 - DNA, 25 bp, Homo sapien
ggttgaagggtctcatacctcataa

SEQ ID NO: 5041937 - DNA, 25 bp, Homo sapien
cattgtgaactcgtcttcagaggtc

SEQ ID NO: 5041938 - DNA, 25 bp, Homo sapien
aatgaaggggtgtatatgtattctg

SEQ ID NO: 5041939 - DNA, 25 bp, Homo sapien
ccttgtaggttcatggaatgaatga

SEQ ID NO: 5041940 - DNA, 25 bp, Homo sapien
aaaaaccttgtaggttcatggaatg

SEQ ID NO: 5041941 - DNA, 25 bp, Homo sapien
ctgatttcaacagaggtaggaggtt

SEQ ID NO: 5041942 - DNA, 25 bp, Homo sapien
taaccttgaatgagttaatcaaatt

SEQ ID NO: 5041943 - DNA, 25 bp, Homo sapien
aaccttgaatgagttaatcaaattc

SEQ ID NO: 5041944 - DNA, 25 bp, Homo sapien
gtaaccttgaatgagttaatcaaat

SEQ ID NO: 5041945 - DNA, 25 bp, Homo sapien
gattcattctatccctgttaataaa

SEQ ID NO: 5041946 - DNA, 25 bp, Homo sapien
aattcagaattcatgaccgtttttc

SEQ ID NO: 5041947 - DNA, 25 bp, Homo sapien
tattaggaccagttagcaacaatgt

SEQ ID NO: 5041948 - DNA, 25 bp, Homo sapien
cttcccctcagtggattcatcttgt

SEQ ID NO: 5041949 - DNA, 25 bp, Homo sapien
gatgcggggacgctggggacgcggg

SEQ ID NO: 5041950 - DNA, 25 bp, Homo sapien
gccacagggatgcggggacgctggg

SEQ ID NO: 5041951 - DNA, 25 bp, Homo sapien
cagggatgcggggacgctggggacg

SEQ ID NO: 5041952 - DNA, 25 bp, Homo sapien
cagccacagggatgcggggacgctg

SEQ ID NO: 5041953 - DNA, 25 bp, Homo sapien
tgggacgcaagtccctttaatacac

SEQ ID NO: 5041954 - DNA, 25 bp, Homo sapien
tagtacacaaatcctccgctggctc

SEQ ID NO: 5041955 - DNA, 25 bp, Homo sapien
gacggaacaaaggtttcatagtctc

SEQ ID NO: 5041956 - DNA, 25 bp, Homo sapien
gtcgtacgaaactgctacgtgatac

SEQ ID NO: 5041957 - DNA, 25 bp, Homo sapien
tgattccgctatcttgcttcggcac

SEQ ID NO: 5041958 - DNA, 25 bp, Homo sapien
caggaagtctcctagtcgtacgaaa

SEQ ID NO: 5041959 - DNA, 25 bp, Homo sapien
gaaccctctaattcagccacgtgga

SEQ ID NO: 5041960 - DNA, 25 bp, Homo sapien
tctaattcagccacgtggacctgtg

SEQ ID NO: 5041961 - DNA, 25 bp, Homo sapien
cacgtggacctgtgaatgttctttg

SEQ ID NO: 5041962 - DNA, 25 bp, Homo sapien
tacactcaggaaccctctaattcag

SEQ ID NO: 5041963 - DNA, 25 bp, Homo sapien
tcaagaagcgaaatcaccgtccagc

SEQ ID NO: 5041964 - DNA, 25 bp, Homo sapien
tctgtgtttaccagcaggacgactg

SEQ ID NO: 5041965 - DNA, 25 bp, Homo sapien
tacgcactcaagaatggaagccaca

SEQ ID NO: 5041966 - DNA, 25 bp, Homo sapien
ggcggtctctacttcccaaagcgga

SEQ ID NO: 5041967 - DNA, 25 bp, Homo sapien
gaggactaggcctggatatgcaaac

SEQ ID NO: 5041968 - DNA, 25 bp, Homo sapien
ccgaggaccgtggtccagaggacta

SEQ ID NO: 5041969 - DNA, 25 bp, Homo sapien
tgtcaacatggtagatggcaatctg

SEQ ID NO: 5041970 - DNA, 25 bp, Homo sapien
ccaggtaggctaaagatgtcaacat

SEQ ID NO: 5041971 - DNA, 25 bp, Homo sapien
aagaagaggagactcttagtggaga

SEQ ID NO: 5041972 - DNA, 25 bp, Homo sapien
aaaagaagaggagactcttagtgga

SEQ ID NO: 5041973 - DNA, 25 bp, Homo sapien
ggagactcttagtggagaggaaaaa

SEQ ID NO: 5041974 - DNA, 25 bp, Homo sapien
gaggagactcttagtggagaggaaa

SEQ ID NO: 5041975 - DNA, 25 bp, Homo sapien
tctgaagaagcctatggaatcaaat

SEQ ID NO: 5041976 - DNA, 25 bp, Homo sapien
cttgccaatctatgtgagtatctgt

SEQ ID NO: 5041977 - DNA, 25 bp, Homo sapien
gcctctagagatggcacttgccaat

SEQ ID NO: 5041978 - DNA, 25 bp, Homo sapien
taattactccagaggattctgaaga

SEQ ID NO: 5041979 - DNA, 25 bp, Homo sapien
aaaagtgtattttgcctattgtatt

SEQ ID NO: 5041980 - DNA, 25 bp, Homo sapien
cataccctcgtttcactgagccgaa

SEQ ID NO: 5041981 - DNA, 25 bp, Homo sapien
gctatactcaaagggccaaatgctt

SEQ ID NO: 5041982 - DNA, 25 bp, Homo sapien
gagccgaattcagctatactcaaag

SEQ ID NO: 5041983 - DNA, 25 bp, Homo sapien
ttttagtgtagagacaaggcttcac

SEQ ID NO: 5041984 - DNA, 25 bp, Homo sapien
caaattcctgacctcgttatccatc

SEQ ID NO: 5041985 - DNA, 25 bp, Homo sapien
ttagtgtagagacaaggcttcacca

SEQ ID NO: 5041986 - DNA, 25 bp, Homo sapien
attcctgacctcgttatccatctgc

SEQ ID NO: 5041987 - DNA, 25 bp, Homo sapien
tacattgtgtgagatactgacctcc

SEQ ID NO: 5041988 - DNA, 25 bp, Homo sapien
tatctggtcaaaagaactcgccctc

SEQ ID NO: 5041989 - DNA, 25 bp, Homo sapien
tgttaggaaccagcggaaaatcagc

SEQ ID NO: 5041990 - DNA, 25 bp, Homo sapien
gcccagctcggatcagaacaggaaa

SEQ ID NO: 5041991 - DNA, 25 bp, Homo sapien
gaagcctccggaactatggccttag

SEQ ID NO: 5041992 - DNA, 25 bp, Homo sapien
caaaagagatctgccttaggaacct

SEQ ID NO: 5041993 - DNA, 25 bp, Homo sapien
tatggtctacaatccagaggcatcg

SEQ ID NO: 5041994 - DNA, 25 bp, Homo sapien
ggttggatgatctcctggcccactg

SEQ ID NO: 5041995 - DNA, 25 bp, Homo sapien
ggtggacgattttgctgaagacagc

SEQ ID NO: 5041996 - DNA, 25 bp, Homo sapien
taacgagatggcagtaatgctgagc

SEQ ID NO: 5041997 - DNA, 25 bp, Homo sapien
gaccgccaaagccacatgaatcgtg

SEQ ID NO: 5041998 - DNA, 25 bp, Homo sapien
catgggtctctggatcctgatataa

SEQ ID NO: 5041999 - DNA, 25 bp, Homo sapien
ccacatagggaggaaccacgggaca

SEQ ID NO: 5042000 - DNA, 25 bp, Homo sapien
gaggaaccacgggacaaccatttca

SEQ ID NO: 5042001 - DNA, 25 bp, Homo sapien
cacatagggaggaaccacgggacaa

SEQ ID NO: 5042002 - DNA, 25 bp, Homo sapien
tgggggacccacatagctaaggatc

SEQ ID NO: 5042003 - DNA, 25 bp, Homo sapien
gttgggggacccacatagctaagga

SEQ ID NO: 5042004 - DNA, 25 bp, Homo sapien
ttgggggacccacatagctaaggat

SEQ ID NO: 5042005 - DNA, 25 bp, Homo sapien
agaggcacacagaagactttgggag

SEQ ID NO: 5042006 - DNA, 25 bp, Homo sapien
agagaggcacacagaagactttggg

SEQ ID NO: 5042007 - DNA, 25 bp, Homo sapien
ctaagagaggcacacagaagacttt

SEQ ID NO: 5042008 - DNA, 25 bp, Homo sapien
taagagaggcacacagaagactttg

SEQ ID NO: 5042009 - DNA, 25 bp, Homo sapien
gggctcacgtcaccgccacaggttt

SEQ ID NO: 5042010 - DNA, 25 bp, Homo sapien
tcacgtcaccgccacaggtttgcga

SEQ ID NO: 5042011 - DNA, 25 bp, Homo sapien
gcccgggcgagtgccaggcgagaaa

SEQ ID NO: 5042012 - DNA, 25 bp, Homo sapien
tcaccgccacaggtttgcgagctgc

SEQ ID NO: 5042013 - DNA, 25 bp, Homo sapien
ccgccggcgctcgcacaaaaggagg

SEQ ID NO: 5042014 - DNA, 25 bp, Homo sapien
ccggcgctcgcacaaaaggaggacg

SEQ ID NO: 5042015 - DNA, 25 bp, Homo sapien
cggcgctcgcacaaaaggaggacgc

SEQ ID NO: 5042016 - DNA, 25 bp, Homo sapien
gccggcgctcgcacaaaaggaggac

SEQ ID NO: 5042017 - DNA, 25 bp, Homo sapien
gggaactaatgtccaccttgctgtg

SEQ ID NO: 5042018 - DNA, 25 bp, Homo sapien
gaaacactgggtcctgaactatgac

SEQ ID NO: 5042019 - DNA, 25 bp, Homo sapien
aggaagggaactaatgtccaccttg

SEQ ID NO: 5042020 - DNA, 25 bp, Homo sapien
gagcgccagtgccttcattcctaaa

SEQ ID NO: 5042021 - DNA, 25 bp, Homo sapien
ggcatcctgtgtcagtgatgctgaa

SEQ ID NO: 5042022 - DNA, 25 bp, Homo sapien
gcatcctgtgtcagtgatgctgaat

SEQ ID NO: 5042023 - DNA, 25 bp, Homo sapien
taagtggatctctggataagcggcc

SEQ ID NO: 5042024 - DNA, 25 bp, Homo sapien
tcaggagaatcagctcgtaaaagcc

SEQ ID NO: 5042025 - DNA, 25 bp, Homo sapien
tttgcggcaagaacagtgatagaac

SEQ ID NO: 5042026 - DNA, 25 bp, Homo sapien
tagaacagacattatcatcaggaga

SEQ ID NO: 5042027 - DNA, 25 bp, Homo sapien
tgggtgtgctagcaggataccaagc

SEQ ID NO: 5042028 - DNA, 25 bp, Homo sapien
gataccaagcaagaaggaacttacc

SEQ ID NO: 5042029 - DNA, 25 bp, Homo sapien
aaactgaaccgacctttgtgaccag

SEQ ID NO: 5042030 - DNA, 25 bp, Homo sapien
taacacgcatagagaaaagcgcatg

SEQ ID NO: 5042031 - DNA, 25 bp, Homo sapien
tgcaccaagtcaccctgtgtgccag

SEQ ID NO: 5042032 - DNA, 25 bp, Homo sapien
attgtacgtgcaccaagtcaccctg

SEQ ID NO: 5042033 - DNA, 25 bp, Homo sapien
tgtccatgacatgttatgagaaatg

SEQ ID NO: 5042034 - DNA, 25 bp, Homo sapien
tgttatgagaaatgctcgctgtggg

SEQ ID NO: 5042035 - DNA, 25 bp, Homo sapien
tacaaaattgcagatagtggcttac

SEQ ID NO: 5042036 - DNA, 25 bp, Homo sapien
gaattcggcatttaactagtggcac

SEQ ID NO: 5042037 - DNA, 25 bp, Homo sapien
gatcaccaaaggtatttctactgag

SEQ ID NO: 5042038 - DNA, 25 bp, Homo sapien
tagtggcactacaggattcctatac

SEQ ID NO: 5042039 - DNA, 25 bp, Homo sapien
tgtggcttcagtaccgaggctgcta

SEQ ID NO: 5042040 - DNA, 25 bp, Homo sapien
tgccagaatgacacatgagcctcgg

SEQ ID NO: 5042041 - DNA, 25 bp, Homo sapien
tcatagcagcgttcaaaaacttggt

SEQ ID NO: 5042042 - DNA, 25 bp, Homo sapien
cactgtaacgatggaagagggcttt

SEQ ID NO: 5042043 - DNA, 25 bp, Homo sapien
gattctacatacagtagggaaactg

SEQ ID NO: 5042044 - DNA, 25 bp, Homo sapien
tctacatacagtagggaaactgtgt

SEQ ID NO: 5042045 - DNA, 25 bp, Homo sapien
tagggaaactgtgtgaagggttgac

SEQ ID NO: 5042046 - DNA, 25 bp, Homo sapien
cacctggattctacatacagtaggg

SEQ ID NO: 5042047 - DNA, 25 bp, Homo sapien
aatggatgcaatggatgcttcaaca

SEQ ID NO: 5042048 - DNA, 25 bp, Homo sapien
gatgcaatggatgcttcaacacatc

SEQ ID NO: 5042049 - DNA, 25 bp, Homo sapien
atggatgcttcaacacatctgagag

SEQ ID NO: 5042050 - DNA, 25 bp, Homo sapien
acacatctgagagatgtgcattcat

SEQ ID NO: 5042051 - DNA, 25 bp, Homo sapien
tgtcaatccatactcttgagaaagc

SEQ ID NO: 5042052 - DNA, 25 bp, Homo sapien
atatgtcaatccatactcttgagaa

SEQ ID NO: 5042053 - DNA, 25 bp, Homo sapien
tcaatccatactcttgagaaagcca

SEQ ID NO: 5042054 - DNA, 25 bp, Homo sapien
atgtcaatccatactcttgagaaag

SEQ ID NO: 5042055 - DNA, 25 bp, Homo sapien
gggcgggcactcataagacagtata

SEQ ID NO: 5042056 - DNA, 25 bp, Homo sapien
gagtcaattctatgcctttcaacgg

SEQ ID NO: 5042057 - DNA, 25 bp, Homo sapien
gaggctaccctcatactggtgaagg

SEQ ID NO: 5042058 - DNA, 25 bp, Homo sapien
tttggcaaaccagtaaggcgcgccg

SEQ ID NO: 5042059 - DNA, 25 bp, Homo sapien
caggctgtccttcgatgtggccaat

SEQ ID NO: 5042060 - DNA, 25 bp, Homo sapien
cttcctttcaggctgtccttcgatg

SEQ ID NO: 5042061 - DNA, 25 bp, Homo sapien
tcctttcaggctgtccttcgatgtg

SEQ ID NO: 5042062 - DNA, 25 bp, Homo sapien
tttcaggctgtccttcgatgtggcc

SEQ ID NO: 5042063 - DNA, 25 bp, Homo sapien
tctactagttgttggtagcaacccc

SEQ ID NO: 5042064 - DNA, 25 bp, Homo sapien
aagaatctgaggtcactgtctaggc

SEQ ID NO: 5042065 - DNA, 25 bp, Homo sapien
gatgaagtggactctctgacaggct

SEQ ID NO: 5042066 - DNA, 25 bp, Homo sapien
gaagggacatgctttatccaaggcc

SEQ ID NO: 5042067 - DNA, 25 bp, Homo sapien
tattcactgtaccttggcctggcag

SEQ ID NO: 5042068 - DNA, 25 bp, Homo sapien
gagacttactccctggcaacgtgaa

SEQ ID NO: 5042069 - DNA, 25 bp, Homo sapien
ttaggtactgctggctcaactgcga

SEQ ID NO: 5042070 - DNA, 25 bp, Homo sapien
aatagatgtgtggactgccctcgca

SEQ ID NO: 5042071 - DNA, 25 bp, Homo sapien
tgcctggcagtcataaatggtcttc

SEQ ID NO: 5042072 - DNA, 25 bp, Homo sapien
taaatggtcttcactcgcctcactt

SEQ ID NO: 5042073 - DNA, 25 bp, Homo sapien
ccctcgatgaatgtgagctcgtcat

SEQ ID NO: 5042074 - DNA, 25 bp, Homo sapien
ttcccctgtgacgataatcacttct

SEQ ID NO: 5042075 - DNA, 25 bp, Homo sapien
tatcgagagctttatctccaattcc

SEQ ID NO: 5042076 - DNA, 25 bp, Homo sapien
gaagatgcagcgagaaagtctgact

SEQ ID NO: 5042077 - DNA, 25 bp, Homo sapien
tatgctattctattatatcgagagc

SEQ ID NO: 5042078 - DNA, 25 bp, Homo sapien
tggatatagagtaggaaacatttca

SEQ ID NO: 5042079 - DNA, 25 bp, Homo sapien
ttttggatggcgtctctggactgca

SEQ ID NO: 5042080 - DNA, 25 bp, Homo sapien
gatccaatgggtgtgacttcagtgt

SEQ ID NO: 5042081 - DNA, 25 bp, Homo sapien
ttgggtgagacatctccagtctggg

SEQ ID NO: 5042082 - DNA, 25 bp, Homo sapien
ggcttaggcggcaaatctccaattt

SEQ ID NO: 5042083 - DNA, 25 bp, Homo sapien
gtggaagcaatcaaaaacaaggagg

SEQ ID NO: 5042084 - DNA, 25 bp, Homo sapien
ggaagcaatcaaaaacaaggaggtc

SEQ ID NO: 5042085 - DNA, 25 bp, Homo sapien
aagcaatcaaaaacaaggaggtcat

SEQ ID NO: 5042086 - DNA, 25 bp, Homo sapien
ctgtggaagcaatcaaaaacaagga

SEQ ID NO: 5042087 - DNA, 25 bp, Homo sapien
gcatatgtgctgccgaagtgagcac

SEQ ID NO: 5042088 - DNA, 25 bp, Homo sapien
gttccaattttagcatatgtgctgc

SEQ ID NO: 5042089 - DNA, 25 bp, Homo sapien
gggccatgctaatcttctctgtatg

SEQ ID NO: 5042090 - DNA, 25 bp, Homo sapien
aaaataacgtgtcattcatgagcag

SEQ ID NO: 5042091 - DNA, 25 bp, Homo sapien
tctgagatcaaaacagcccgttggg

SEQ ID NO: 5042092 - DNA, 25 bp, Homo sapien
ttctacggaaagtgaatcagcagtc

SEQ ID NO: 5042093 - DNA, 25 bp, Homo sapien
taggacggaatctgggcacactgta

SEQ ID NO: 5042094 - DNA, 25 bp, Homo sapien
gatatgtgagcgatctaggacggaa

SEQ ID NO: 5042095 - DNA, 25 bp, Homo sapien
taggaagaactcttgggccaagggc

SEQ ID NO: 5042096 - DNA, 25 bp, Homo sapien
aggaagaactcttgggccaagggca

SEQ ID NO: 5042097 - DNA, 25 bp, Homo sapien
ctcttgggccaagggcagtctttgc

SEQ ID NO: 5042098 - DNA, 25 bp, Homo sapien
agaactcttgggccaagggcagtct

SEQ ID NO: 5042099 - DNA, 25 bp, Homo sapien
ggttctcccaaagtggcgagagcca

SEQ ID NO: 5042100 - DNA, 25 bp, Homo sapien
gttctcccaaagtggcgagagccac

SEQ ID NO: 5042101 - DNA, 25 bp, Homo sapien
tggttctcccaaagtggcgagagcc

SEQ ID NO: 5042102 - DNA, 25 bp, Homo sapien
tgtgcccagtccagtcacaagatgt

SEQ ID NO: 5042103 - DNA, 25 bp, Homo sapien
tgaactgggtagacagcgttgctgc

SEQ ID NO: 5042104 - DNA, 25 bp, Homo sapien
gaccaccgggaagtgaggttagctc

SEQ ID NO: 5042105 - DNA, 25 bp, Homo sapien
gatgtgcatgcaaaccaagagtgaa

SEQ ID NO: 5042106 - DNA, 25 bp, Homo sapien
gtcttacttgaagaggatggacccc

SEQ ID NO: 5042107 - DNA, 25 bp, Homo sapien
cttgtttgtagtcttacttgaagag

SEQ ID NO: 5042108 - DNA, 25 bp, Homo sapien
ctgggatagtccctcaaacttgttt

SEQ ID NO: 5042109 - DNA, 25 bp, Homo sapien
ctcgactgctgggatagtccctcaa

SEQ ID NO: 5042110 - DNA, 25 bp, Homo sapien
tgctatgtccaggagagggtcacaa

SEQ ID NO: 5042111 - DNA, 25 bp, Homo sapien
catacccggccaagtattaacattt

SEQ ID NO: 5042112 - DNA, 25 bp, Homo sapien
gggaagacatagcacctggacaggt

SEQ ID NO: 5042113 - DNA, 25 bp, Homo sapien
gaagaactttctagcgggtgagcag

SEQ ID NO: 5042114 - DNA, 25 bp, Homo sapien
taaatttgagaccaacagggctgca

SEQ ID NO: 5042115 - DNA, 25 bp, Homo sapien
gaattctagctgtactgctgaccag

SEQ ID NO: 5042116 - DNA, 25 bp, Homo sapien
tgctagcgaaagacaggactgaccg

SEQ ID NO: 5042117 - DNA, 25 bp, Homo sapien
tataaagtacgggacacagtgctag

SEQ ID NO: 5042118 - DNA, 25 bp, Homo sapien
ccaggagaaccatgctaagttgatc

SEQ ID NO: 5042119 - DNA, 25 bp, Homo sapien
gttgatcgccttctccacacttcag

SEQ ID NO: 5042120 - DNA, 25 bp, Homo sapien
cagcttcatgggcacagaaaccact

SEQ ID NO: 5042121 - DNA, 25 bp, Homo sapien
agcttcatgggcacagaaaccactg

SEQ ID NO: 5042122 - DNA, 25 bp, Homo sapien
ctgtgaggagaaatggccagtgggc

SEQ ID NO: 5042123 - DNA, 25 bp, Homo sapien
gaggagaaatggccagtgggcctgc

SEQ ID NO: 5042124 - DNA, 25 bp, Homo sapien
gtgaggagaaatggccagtgggcct

SEQ ID NO: 5042125 - DNA, 25 bp, Homo sapien
ggagaaatggccagtgggcctgcat

SEQ ID NO: 5042126 - DNA, 25 bp, Homo sapien
cttggcctcccgagacaagattatc

SEQ ID NO: 5042127 - DNA, 25 bp, Homo sapien
gcgcctttgtttgggggcccatgag

SEQ ID NO: 5042128 - DNA, 25 bp, Homo sapien
ttgtttgggggcccatgaggtagtg

SEQ ID NO: 5042129 - DNA, 25 bp, Homo sapien
tgtttgggggcccatgaggtagtgg

SEQ ID NO: 5042130 - DNA, 25 bp, Homo sapien
actgcgcctttgtttgggggcccat

SEQ ID NO: 5042131 - DNA, 25 bp, Homo sapien
agtgttgaaggtgggccagttggac

SEQ ID NO: 5042132 - DNA, 25 bp, Homo sapien
ttagagggagtgttgaaggtgggcc

SEQ ID NO: 5042133 - DNA, 25 bp, Homo sapien
gccactagaggtctgggtgcttaga

SEQ ID NO: 5042134 - DNA, 25 bp, Homo sapien
ctgggagggtcggatagggttctct

SEQ ID NO: 5042135 - DNA, 25 bp, Homo sapien
acaaaggtaagaagagtgtgtgctt

SEQ ID NO: 5042136 - DNA, 25 bp, Homo sapien
tgcttttaggaacaaaatgccagtc

SEQ ID NO: 5042137 - DNA, 25 bp, Homo sapien
agtcaacacagaatgctactgagtt

SEQ ID NO: 5042138 - DNA, 25 bp, Homo sapien
cacagaatgctactgagtttagatc

SEQ ID NO: 5042139 - DNA, 25 bp, Homo sapien
caggcccacgggcagttttcaggcc

SEQ ID NO: 5042140 - DNA, 25 bp, Homo sapien
aggcccacgggcagttttcaggcca

SEQ ID NO: 5042141 - DNA, 25 bp, Homo sapien
gcaggcccacgggcagttttcaggc

SEQ ID NO: 5042142 - DNA, 25 bp, Homo sapien
cagttttcaggccaaagctcttgtc

SEQ ID NO: 5042143 - DNA, 25 bp, Homo sapien
tgctgctgaattgagttccttgtat

SEQ ID NO: 5042144 - DNA, 25 bp, Homo sapien
tatattccggatatacaagtccctt

SEQ ID NO: 5042145 - DNA, 25 bp, Homo sapien
tttgctgctgaattgagttccttgt

SEQ ID NO: 5042146 - DNA, 25 bp, Homo sapien
tatacaagtcccttgtaagatgaat

SEQ ID NO: 5042147 - DNA, 25 bp, Homo sapien
tgctcttggtagtatgatcatttta

SEQ ID NO: 5042148 - DNA, 25 bp, Homo sapien
tccagcactatctgagcaggagtgg

SEQ ID NO: 5042149 - DNA, 25 bp, Homo sapien
ggtgtgtctcatttattgattagcg

SEQ ID NO: 5042150 - DNA, 25 bp, Homo sapien
gcatccatttaggtcatcatatggc

SEQ ID NO: 5042151 - DNA, 25 bp, Homo sapien
gagtttgtcacatacggcctttatt

SEQ ID NO: 5042152 - DNA, 25 bp, Homo sapien
ccacaggttttggttacatcttcat

SEQ ID NO: 5042153 - DNA, 25 bp, Homo sapien
tagaacggaggagctgttatctcca

SEQ ID NO: 5042154 - DNA, 25 bp, Homo sapien
taacagatgcattacttcacgtatg

SEQ ID NO: 5042155 - DNA, 25 bp, Homo sapien
ctggtgcccgggcatgatatgtgcc

SEQ ID NO: 5042156 - DNA, 25 bp, Homo sapien
tgggacactagtgtaagtcagcagg

SEQ ID NO: 5042157 - DNA, 25 bp, Homo sapien
gagtgcattgaagacttccctaatc

SEQ ID NO: 5042158 - DNA, 25 bp, Homo sapien
tggaagagtgcattgaagacttccc

SEQ ID NO: 5042159 - DNA, 25 bp, Homo sapien
taactggaagagtgcattgaagact

SEQ ID NO: 5042160 - DNA, 25 bp, Homo sapien
cctaactggaagagtgcattgaaga

SEQ ID NO: 5042161 - DNA, 25 bp, Homo sapien
tgctctctaagcaaggtagacacct

SEQ ID NO: 5042162 - DNA, 25 bp, Homo sapien
tactgaatgctcactacgtgccagt

SEQ ID NO: 5042163 - DNA, 25 bp, Homo sapien
cctgagagtgggaggtacttcttcc

SEQ ID NO: 5042164 - DNA, 25 bp, Homo sapien
catgcaggaggattgaacaaacttg

SEQ ID NO: 5042165 - DNA, 25 bp, Homo sapien
tgcctgattctagaggcctggcttc

SEQ ID NO: 5042166 - DNA, 25 bp, Homo sapien
gcctggcttcaggaatagatgggaa

SEQ ID NO: 5042167 - DNA, 25 bp, Homo sapien
agttaagatgcctaccaagtgcccg

SEQ ID NO: 5042168 - DNA, 25 bp, Homo sapien
caagtgcccggtctcattatccaga

SEQ ID NO: 5042169 - DNA, 25 bp, Homo sapien
ttaggcagcgaagtgtttcggtatg

SEQ ID NO: 5042170 - DNA, 25 bp, Homo sapien
ccagtgttaataaacgtacagtaga

SEQ ID NO: 5042171 - DNA, 25 bp, Homo sapien
gggaagctactgatcacaaacgaga

SEQ ID NO: 5042172 - DNA, 25 bp, Homo sapien
cgagaaactaccacacacaaattaa

SEQ ID NO: 5042173 - DNA, 25 bp, Homo sapien
ctttgcttgacggtaatttaggtca

SEQ ID NO: 5042174 - DNA, 25 bp, Homo sapien
ctcagctagattcagaataattctt

SEQ ID NO: 5042175 - DNA, 25 bp, Homo sapien
atttcgatgaggcagctggagtttc

SEQ ID NO: 5042176 - DNA, 25 bp, Homo sapien
ttaggtcaagcttccttgaatttcg

SEQ ID NO: 5042177 - DNA, 25 bp, Homo sapien
gctgagctagctatgggatatcgca

SEQ ID NO: 5042178 - DNA, 25 bp, Homo sapien
ttaatggtagcctgaggcgccagcc

SEQ ID NO: 5042179 - DNA, 25 bp, Homo sapien
tcaattatccctactggctgaggca

SEQ ID NO: 5042180 - DNA, 25 bp, Homo sapien
gcgagaagccatgaaacctgtggga

SEQ ID NO: 5042181 - DNA, 25 bp, Homo sapien
tcccttggagtgctgaatcctggca

SEQ ID NO: 5042182 - DNA, 25 bp, Homo sapien
ctttcccggcgttcctaggaggcag

SEQ ID NO: 5042183 - DNA, 25 bp, Homo sapien
gagagccgctgtttgtcccttggag

SEQ ID NO: 5042184 - DNA, 25 bp, Homo sapien
tctgtgcttgtggaaacgaagatct

SEQ ID NO: 5042185 - DNA, 25 bp, Homo sapien
tctgggtgagcgctctttcttgata

SEQ ID NO: 5042186 - DNA, 25 bp, Homo sapien
aggtctgggtgagcgctctttcttg

SEQ ID NO: 5042187 - DNA, 25 bp, Homo sapien
gaggtctgggtgagcgctctttctt

SEQ ID NO: 5042188 - DNA, 25 bp, Homo sapien
tgggtgagcgctctttcttgatagg

SEQ ID NO: 5042189 - DNA, 25 bp, Homo sapien
cgtaagtgcttaaatctgtctaatc

SEQ ID NO: 5042190 - DNA, 25 bp, Homo sapien
gaacatcattccttaatgacaggca

SEQ ID NO: 5042191 - DNA, 25 bp, Homo sapien
cacagcactcagttatggactttca

SEQ ID NO: 5042192 - DNA, 25 bp, Homo sapien
tcaataaagatgatctgagataacg

SEQ ID NO: 5042193 - DNA, 25 bp, Homo sapien
aaagggtaaggaatgctgcctccag

SEQ ID NO: 5042194 - DNA, 25 bp, Homo sapien
ccttcatgatgtgggtgtgcctcac

SEQ ID NO: 5042195 - DNA, 25 bp, Homo sapien
tatgtgtcaacaggctacagtgtcc

SEQ ID NO: 5042196 - DNA, 25 bp, Homo sapien
tagatttcgagtcaagggaactacc

SEQ ID NO: 5042197 - DNA, 25 bp, Homo sapien
tgttgagaattcgaggacataattt

SEQ ID NO: 5042198 - DNA, 25 bp, Homo sapien
cagactagaaaagttggggtagttg

SEQ ID NO: 5042199 - DNA, 25 bp, Homo sapien
gagaattcgaggacataatttacac

SEQ ID NO: 5042200 - DNA, 25 bp, Homo sapien
ggtagttgttgagaattcgaggaca

SEQ ID NO: 5042201 - DNA, 25 bp, Homo sapien
tcctgtcgaagattccactcatatt

SEQ ID NO: 5042202 - DNA, 25 bp, Homo sapien
cgtggacgtgtggattgaactttcc

SEQ ID NO: 5042203 - DNA, 25 bp, Homo sapien
cagatcatcatcgctctcatctatc

SEQ ID NO: 5042204 - DNA, 25 bp, Homo sapien
cactcatattctacgtggacgtgtg

SEQ ID NO: 5042205 - DNA, 25 bp, Homo sapien
cttgcaaattcctggctgaaaggca

SEQ ID NO: 5042206 - DNA, 25 bp, Homo sapien
catctgtaggtgtactataggcaac

SEQ ID NO: 5042207 - DNA, 25 bp, Homo sapien
taaggtcccagtccaatctgtggcc

SEQ ID NO: 5042208 - DNA, 25 bp, Homo sapien
taggcaacactctgcttagacaagc

SEQ ID NO: 5042209 - DNA, 25 bp, Homo sapien
cttcacactgggtagcttttagtct

SEQ ID NO: 5042210 - DNA, 25 bp, Homo sapien
ctctttgctatgtctagggcagttt

SEQ ID NO: 5042211 - DNA, 25 bp, Homo sapien
tcacactgggtagcttttagtctct

SEQ ID NO: 5042212 - DNA, 25 bp, Homo sapien
tttgctatgtctagggcagtttctc

SEQ ID NO: 5042213 - DNA, 25 bp, Homo sapien
tactgtacatactacagtagtgtag

SEQ ID NO: 5042214 - DNA, 25 bp, Homo sapien
tatatccacagtgggcttgctcctg

SEQ ID NO: 5042215 - DNA, 25 bp, Homo sapien
cagggccgtctgcttatccaggttc

SEQ ID NO: 5042216 - DNA, 25 bp, Homo sapien
caaacactcaggtttactgtacata

SEQ ID NO: 5042217 - DNA, 25 bp, Homo sapien
ttgtacaaggaagtcaaccaaatgg

SEQ ID NO: 5042218 - DNA, 25 bp, Homo sapien
aatggagagatgtctgatctgcagt

SEQ ID NO: 5042219 - DNA, 25 bp, Homo sapien
gagatgtctgatctgcagttcggac

SEQ ID NO: 5042220 - DNA, 25 bp, Homo sapien
tctgcagttcggacggcaaggtgaa

SEQ ID NO: 5042221 - DNA, 25 bp, Homo sapien
taccccttctgcatagacttgaatt

SEQ ID NO: 5042222 - DNA, 25 bp, Homo sapien
gatctacatactttgcagtgatata

SEQ ID NO: 5042223 - DNA, 25 bp, Homo sapien
gcagtggttccattagctctacccc

SEQ ID NO: 5042224 - DNA, 25 bp, Homo sapien
gaagttgaacaggtcttccttgaaa

SEQ ID NO: 5042225 - DNA, 25 bp, Homo sapien
cacctgtggaagctgctactgtttc

SEQ ID NO: 5042226 - DNA, 25 bp, Homo sapien
gagagggctctaacacaaaggacat

SEQ ID NO: 5042227 - DNA, 25 bp, Homo sapien
caaaaatatgcattccacctgtgga

SEQ ID NO: 5042228 - DNA, 25 bp, Homo sapien
cagttgagctggttgatgatggcac

SEQ ID NO: 5042229 - DNA, 25 bp, Homo sapien
gaagtatctggcctcttactaggca

SEQ ID NO: 5042230 - DNA, 25 bp, Homo sapien
cagagggtgctcaggtatcacatga

SEQ ID NO: 5042231 - DNA, 25 bp, Homo sapien
gatgccacgcaattatttggaagca

SEQ ID NO: 5042232 - DNA, 25 bp, Homo sapien
tggaaatatcatgcagatgccacgc

SEQ ID NO: 5042233 - DNA, 25 bp, Homo sapien
tccataatatcattaaaactattgt

SEQ ID NO: 5042234 - DNA, 25 bp, Homo sapien
aggggctgggtaaatttgcttccat

SEQ ID NO: 5042235 - DNA, 25 bp, Homo sapien
cctaatttgtctagttccaaagact

SEQ ID NO: 5042236 - DNA, 25 bp, Homo sapien
ttcctaatttgtctagttccaaaga

SEQ ID NO: 5042237 - DNA, 25 bp, Homo sapien
actgaatgcgagaaatatgaacccc

SEQ ID NO: 5042238 - DNA, 25 bp, Homo sapien
ttccaaagactgaatgcgagaaata

SEQ ID NO: 5042239 - DNA, 25 bp, Homo sapien
caggtcaaaatacccaagttggttg

SEQ ID NO: 5042240 - DNA, 25 bp, Homo sapien
caagttggttgaaagccaggtgggt

SEQ ID NO: 5042241 - DNA, 25 bp, Homo sapien
ccaagttggttgaaagccaggtggg

SEQ ID NO: 5042242 - DNA, 25 bp, Homo sapien
cagctcagcggtaggaaaaatcacg

SEQ ID NO: 5042243 - DNA, 25 bp, Homo sapien
gacagtgatacaaaatgtggacccc

SEQ ID NO: 5042244 - DNA, 25 bp, Homo sapien
gccaccgtgccatagcaagaggttt

SEQ ID NO: 5042245 - DNA, 25 bp, Homo sapien
gactcagtgtgagatggtccaggct

SEQ ID NO: 5042246 - DNA, 25 bp, Homo sapien
gcaaatgtcattccctgggagccgc

SEQ ID NO: 5042247 - DNA, 25 bp, Homo sapien
ctgatgagccacaatcgcagcaaat

SEQ ID NO: 5042248 - DNA, 25 bp, Homo sapien
tgggagccgctggacatcctcaata

SEQ ID NO: 5042249 - DNA, 25 bp, Homo sapien
tggcttttgtcaggtcttccaggct

SEQ ID NO: 5042250 - DNA, 25 bp, Homo sapien
tgctatttgtcaatactgatatcca

SEQ ID NO: 5042251 - DNA, 25 bp, Homo sapien
ttctgcctgaaagtgatatgttcta

SEQ ID NO: 5042252 - DNA, 25 bp, Homo sapien
gcctgaaagtgatatgttctattat

SEQ ID NO: 5042253 - DNA, 25 bp, Homo sapien
tctgcctgaaagtgatatgttctat

SEQ ID NO: 5042254 - DNA, 25 bp, Homo sapien
ctgcctgaaagtgatatgttctatt

SEQ ID NO: 5042255 - DNA, 25 bp, Homo sapien
ccaatgccaactgtgaggagccctg

SEQ ID NO: 5042256 - DNA, 25 bp, Homo sapien
ggcatcttcctagagcagcacatgc

SEQ ID NO: 5042257 - DNA, 25 bp, Homo sapien
agccctgcttggaaaagctgctgac

SEQ ID NO: 5042258 - DNA, 25 bp, Homo sapien
gcagcacatgcaggaataactgttc

SEQ ID NO: 5042259 - DNA, 25 bp, Homo sapien
tcaacttggctggttgcctgttaga

SEQ ID NO: 5042260 - DNA, 25 bp, Homo sapien
cattaggttttacttggcaggtgag

SEQ ID NO: 5042261 - DNA, 25 bp, Homo sapien
agattttttgtcttcggcattaggt

SEQ ID NO: 5042262 - DNA, 25 bp, Homo sapien
ttggcaggtgagaaggttcaacttg

SEQ ID NO: 5042263 - DNA, 25 bp, Homo sapien
gagaagttacatgcagctccactct

SEQ ID NO: 5042264 - DNA, 25 bp, Homo sapien
aaatggagaagttacatgcagctcc

SEQ ID NO: 5042265 - DNA, 25 bp, Homo sapien
agaagttacatgcagctccactctc

SEQ ID NO: 5042266 - DNA, 25 bp, Homo sapien
gaaaatggagaagttacatgcagct

SEQ ID NO: 5042267 - DNA, 25 bp, Homo sapien
ggctgatactaggatccctccttcc

SEQ ID NO: 5042268 - DNA, 25 bp, Homo sapien
ctggacaatggctgatactaggatc

SEQ ID NO: 5042269 - DNA, 25 bp, Homo sapien
caatggctgatactaggatccctcc

SEQ ID NO: 5042270 - DNA, 25 bp, Homo sapien
cacgtattcacactggtcaaaacac

SEQ ID NO: 5042271 - DNA, 25 bp, Homo sapien
gaatgaaatgtttgagtgcccaggc

SEQ ID NO: 5042272 - DNA, 25 bp, Homo sapien
tccctgtttcgattgagagctgtgg

SEQ ID NO: 5042273 - DNA, 25 bp, Homo sapien
tgtgctcgaacacgagaagcctgga

SEQ ID NO: 5042274 - DNA, 25 bp, Homo sapien
tctgaaaatcctagtaccaggtgca

SEQ ID NO: 5042275 - DNA, 25 bp, Homo sapien
taacatgaactgcatttgacacagg

SEQ ID NO: 5042276 - DNA, 25 bp, Homo sapien
tgaggagccaagtacgcataagttt

SEQ ID NO: 5042277 - DNA, 25 bp, Homo sapien
tgattgacccacaacttcagtggtg

SEQ ID NO: 5042278 - DNA, 25 bp, Homo sapien
aagcagctgacttacccagggctga

SEQ ID NO: 5042279 - DNA, 25 bp, Homo sapien
actcagctcctgtcactctgagttg

SEQ ID NO: 5042280 - DNA, 25 bp, Homo sapien
aggaggggcactggtccctcctgct

SEQ ID NO: 5042281 - DNA, 25 bp, Homo sapien
ctgtcactctgagttgttcctttgg

SEQ ID NO: 5042282 - DNA, 25 bp, Homo sapien
ctcctgtcactctgagttgttcctt

SEQ ID NO: 5042283 - DNA, 25 bp, Homo sapien
ggcggtacctggcctgaccacctcc

SEQ ID NO: 5042284 - DNA, 25 bp, Homo sapien
tcctcagaggaggcggtacctggcc

SEQ ID NO: 5042285 - DNA, 25 bp, Homo sapien
ctcctcagaggaggcggtacctggc

SEQ ID NO: 5042286 - DNA, 25 bp, Homo sapien
gcggtacctggcctgaccacctccc

SEQ ID NO: 5042287 - DNA, 25 bp, Homo sapien
tctttctggctcttaacactcctta

SEQ ID NO: 5042288 - DNA, 25 bp, Homo sapien
tggctcttaacactccttatttgct

SEQ ID NO: 5042289 - DNA, 25 bp, Homo sapien
ttttgtacaccctgctgtattttct

SEQ ID NO: 5042290 - DNA, 25 bp, Homo sapien
ttaacactccttatttgcttcctgt

SEQ ID NO: 5042291 - DNA, 25 bp, Homo sapien
aaggacacacacatttttctcatta

SEQ ID NO: 5042292 - DNA, 25 bp, Homo sapien
gacacacacatttttctcattaaaa

SEQ ID NO: 5042293 - DNA, 25 bp, Homo sapien
ctaaggacacacacatttttctcat

SEQ ID NO: 5042294 - DNA, 25 bp, Homo sapien
ggacacacacatttttctcattaaa

SEQ ID NO: 5042295 - DNA, 25 bp, Homo sapien
taatgactacattccaggcatctta

SEQ ID NO: 5042296 - DNA, 25 bp, Homo sapien
gcatcttatgtcatatactatctca

SEQ ID NO: 5042297 - DNA, 25 bp, Homo sapien
tgtactacctgtgagggaagtcttc

SEQ ID NO: 5042298 - DNA, 25 bp, Homo sapien
cattcctaagctctcccggtaagaa

SEQ ID NO: 5042299 - DNA, 25 bp, Homo sapien
taagacgtggcgctgaggttactgc

SEQ ID NO: 5042300 - DNA, 25 bp, Homo sapien
tttacgtcatgctatccaacaaggg

SEQ ID NO: 5042301 - DNA, 25 bp, Homo sapien
ttattgcagcaaggaatcggttacc

SEQ ID NO: 5042302 - DNA, 25 bp, Homo sapien
gctagatagtcatccacgcaggcat

SEQ ID NO: 5042303 - DNA, 25 bp, Homo sapien
gaaaagcccgctaaaactggctaga

SEQ ID NO: 5042304 - DNA, 25 bp, Homo sapien
tgatgagggccttcaaaccaaagaa

SEQ ID NO: 5042305 - DNA, 25 bp, Homo sapien
ccaaaatgaggcatgagcggattac

SEQ ID NO: 5042306 - DNA, 25 bp, Homo sapien
caatggtgtttgcaaagtcaggaaa

SEQ ID NO: 5042307 - DNA, 25 bp, Homo sapien
ggcattcagactcacatcagacaga

SEQ ID NO: 5042308 - DNA, 25 bp, Homo sapien
caggagggtttgcttgtcaacagat

SEQ ID NO: 5042309 - DNA, 25 bp, Homo sapien
gatgccacagtccattatcttagcc

SEQ ID NO: 5042310 - DNA, 25 bp, Homo sapien
tattaacagaatggccacacatggc

SEQ ID NO: 5042311 - DNA, 25 bp, Homo sapien
tagacaggatttctgatatcagatg

SEQ ID NO: 5042312 - DNA, 25 bp, Homo sapien
aaacagatccaagtctgtagacagg

SEQ ID NO: 5042313 - DNA, 25 bp, Homo sapien
tctgatatcagatgggtagctggac

SEQ ID NO: 5042314 - DNA, 25 bp, Homo sapien
gaattcctccgaagaatcactgaaa

SEQ ID NO: 5042315 - DNA, 25 bp, Homo sapien
gcctgtcatctctataattcaaaga

SEQ ID NO: 5042316 - DNA, 25 bp, Homo sapien
cacttctttgactaccaccaaggtt

SEQ ID NO: 5042317 - DNA, 25 bp, Homo sapien
tacatctactgttacgtttcctaca

SEQ ID NO: 5042318 - DNA, 25 bp, Homo sapien
tgtgcacttctttgactaccaccaa

SEQ ID NO: 5042319 - DNA, 25 bp, Homo sapien
tatatttgcgccaatttttactgct

SEQ ID NO: 5042320 - DNA, 25 bp, Homo sapien
ttttactgctgagtacataatcgtg

SEQ ID NO: 5042321 - DNA, 25 bp, Homo sapien
cgtgtttgctttctggcccatgagg

SEQ ID NO: 5042322 - DNA, 25 bp, Homo sapien
atgatctgacccaaatgcataaata

SEQ ID NO: 5042323 - DNA, 25 bp, Homo sapien
cattcttgactgaacacttcctcct

SEQ ID NO: 5042324 - DNA, 25 bp, Homo sapien
tcctcctctgccatactttccggat

SEQ ID NO: 5042325 - DNA, 25 bp, Homo sapien
cagaatcccattcttgactgaacac

SEQ ID NO: 5042326 - DNA, 25 bp, Homo sapien
gtggcatgtgagatggtcagaatcc

SEQ ID NO: 5042327 - DNA, 25 bp, Homo sapien
gctgtatcctccttgccggctctga

SEQ ID NO: 5042328 - DNA, 25 bp, Homo sapien
tgctgtatcctccttgccggctctg

SEQ ID NO: 5042329 - DNA, 25 bp, Homo sapien
catgctgtatcctccttgccggctc

SEQ ID NO: 5042330 - DNA, 25 bp, Homo sapien
tgtatcctccttgccggctctgaga

SEQ ID NO: 5042331 - DNA, 25 bp, Homo sapien
aactagagacaattctcccatcttt

SEQ ID NO: 5042332 - DNA, 25 bp, Homo sapien
tgattctattctgccattgagcctt

SEQ ID NO: 5042333 - DNA, 25 bp, Homo sapien
aaaactagagacaattctcccatct

SEQ ID NO: 5042334 - DNA, 25 bp, Homo sapien
tagagacaattctcccatctttgat

SEQ ID NO: 5042335 - DNA, 25 bp, Homo sapien
tccagtttacactagcggcagaggc

SEQ ID NO: 5042336 - DNA, 25 bp, Homo sapien
cagactactgtaagactgaatccag

SEQ ID NO: 5042337 - DNA, 25 bp, Homo sapien
gaaaataaagtccatgcaacccaaa

SEQ ID NO: 5042338 - DNA, 25 bp, Homo sapien
gaactgaattcaaacaagcacaatg

SEQ ID NO: 5042339 - DNA, 25 bp, Homo sapien
tcaaaggaaaatcatagattccgtg

SEQ ID NO: 5042340 - DNA, 25 bp, Homo sapien
gggccaagtaatgtatgttcagtga

SEQ ID NO: 5042341 - DNA, 25 bp, Homo sapien
agattccgtgttcaaaagcatgtcc

SEQ ID NO: 5042342 - DNA, 25 bp, Homo sapien
ttctgacactcaggatccttttggg

SEQ ID NO: 5042343 - DNA, 25 bp, Homo sapien
ctactttggccttccgaggtgctgg

SEQ ID NO: 5042344 - DNA, 25 bp, Homo sapien
gtaatgtggttcactaagtcctccc

SEQ ID NO: 5042345 - DNA, 25 bp, Homo sapien
gactgagggactgtactaaatagca

SEQ ID NO: 5042346 - DNA, 25 bp, Homo sapien
cacactttctaaatggaggtaggac

SEQ ID NO: 5042347 - DNA, 25 bp, Homo sapien
aggctgcagtgagcgagatttgtac

SEQ ID NO: 5042348 - DNA, 25 bp, Homo sapien
actgcactccagtctgggcgacaga

SEQ ID NO: 5042349 - DNA, 25 bp, Homo sapien
gcagtgagcgagatttgtaccactg

SEQ ID NO: 5042350 - DNA, 25 bp, Homo sapien
ctgcagtgagcgagatttgtaccac

SEQ ID NO: 5042351 - DNA, 25 bp, Homo sapien
tcaaatttcctaattgtggggcaaa

SEQ ID NO: 5042352 - DNA, 25 bp, Homo sapien
gcttctgtaggattctgcatcaaaa

SEQ ID NO: 5042353 - DNA, 25 bp, Homo sapien
gggcaaagcttctgtaggattctgc

SEQ ID NO: 5042354 - DNA, 25 bp, Homo sapien
aaagcttctgtaggattctgcatca

SEQ ID NO: 5042355 - DNA, 25 bp, Homo sapien
ctgttagccctgttgtaaacatgta

SEQ ID NO: 5042356 - DNA, 25 bp, Homo sapien
cactgttagccctgttgtaaacatg

SEQ ID NO: 5042357 - DNA, 25 bp, Homo sapien
ctacactgttagccctgttgtaaac

SEQ ID NO: 5042358 - DNA, 25 bp, Homo sapien
acactgttagccctgttgtaaacat

SEQ ID NO: 5042359 - DNA, 25 bp, Homo sapien
ccagttgaagagaggattttattaa

SEQ ID NO: 5042360 - DNA, 25 bp, Homo sapien
gaagagaggattttattaagtctcg

SEQ ID NO: 5042361 - DNA, 25 bp, Homo sapien
taagtctcggagtgcagttagctgt

SEQ ID NO: 5042362 - DNA, 25 bp, Homo sapien
aggattttattaagtctcggagtgc

SEQ ID NO: 5042363 - DNA, 25 bp, Homo sapien
tgtactgtttcaacttatcagctgt

SEQ ID NO: 5042364 - DNA, 25 bp, Homo sapien
caatgtactgtttcaacttatcagc

SEQ ID NO: 5042365 - DNA, 25 bp, Homo sapien
ctgtttcaacttatcagctgttttc

SEQ ID NO: 5042366 - DNA, 25 bp, Homo sapien
tactgtttcaacttatcagctgttt

SEQ ID NO: 5042367 - DNA, 25 bp, Homo sapien
taaggcatatcttaagagacatatt

SEQ ID NO: 5042368 - DNA, 25 bp, Homo sapien
gcgcccagcttaaggcatatcttaa

SEQ ID NO: 5042369 - DNA, 25 bp, Homo sapien
cagcttaaggcatatcttaagagac

SEQ ID NO: 5042370 - DNA, 25 bp, Homo sapien
actgcgcccagcttaaggcatatct

SEQ ID NO: 5042371 - DNA, 25 bp, Homo sapien
caaggaagggatatatgcccaggag

SEQ ID NO: 5042372 - DNA, 25 bp, Homo sapien
gtgttaacctgaaaccagcatcctc

SEQ ID NO: 5042373 - DNA, 25 bp, Homo sapien
aggcctaagtgccagacctggagag

SEQ ID NO: 5042374 - DNA, 25 bp, Homo sapien
ttcattgagcatgtgggcccaggcc

SEQ ID NO: 5042375 - DNA, 25 bp, Homo sapien
tactggacaacactctagaaaaaga

SEQ ID NO: 5042376 - DNA, 25 bp, Homo sapien
cacgtgtggccaatgggtaccatgt

SEQ ID NO: 5042377 - DNA, 25 bp, Homo sapien
tctgttcctgaagactcataagcca

SEQ ID NO: 5042378 - DNA, 25 bp, Homo sapien
gaaaattcctgccaattacaaggct

SEQ ID NO: 5042379 - DNA, 25 bp, Homo sapien
ggatatcacgtattaatcagttaaa

SEQ ID NO: 5042380 - DNA, 25 bp, Homo sapien
ttcttaaggatatcacgtattaatc

SEQ ID NO: 5042381 - DNA, 25 bp, Homo sapien
tttctctgggatgaacaatttggag

SEQ ID NO: 5042382 - DNA, 25 bp, Homo sapien
tctctgggatgaacaatttggaggc

SEQ ID NO: 5042383 - DNA, 25 bp, Homo sapien
gcaggaaaggaggacgagttgtaga

SEQ ID NO: 5042384 - DNA, 25 bp, Homo sapien
aaggaggacgagttgtagaagaata

SEQ ID NO: 5042385 - DNA, 25 bp, Homo sapien
gacgagttgtagaagaataaaataa

SEQ ID NO: 5042386 - DNA, 25 bp, Homo sapien
gaggacgagttgtagaagaataaaa

SEQ ID NO: 5042387 - DNA, 25 bp, Homo sapien
aaaaagcaaagggtgacatgctgtc

SEQ ID NO: 5042388 - DNA, 25 bp, Homo sapien
gacatgctgtcatctgcactgtccc

SEQ ID NO: 5042389 - DNA, 25 bp, Homo sapien
cagtcattagcaatgtatcagtgac

SEQ ID NO: 5042390 - DNA, 25 bp, Homo sapien
aagcaaagggtgacatgctgtcatc

SEQ ID NO: 5042391 - DNA, 25 bp, Homo sapien
acagggtagacagagagccaccacg

SEQ ID NO: 5042392 - DNA, 25 bp, Homo sapien
ggtagacagagagccaccacgacct

SEQ ID NO: 5042393 - DNA, 25 bp, Homo sapien
gacagggtagacagagagccaccac

SEQ ID NO: 5042394 - DNA, 25 bp, Homo sapien
agggtagacagagagccaccacgac

SEQ ID NO: 5042395 - DNA, 25 bp, Homo sapien
gaatctctttttagtctcgttacag

SEQ ID NO: 5042396 - DNA, 25 bp, Homo sapien
ccatgcaactaggttcagaactttc

SEQ ID NO: 5042397 - DNA, 25 bp, Homo sapien
ggagattgggccaataaccaacagc

SEQ ID NO: 5042398 - DNA, 25 bp, Homo sapien
agtaacagtaatggcagctaacatg

SEQ ID NO: 5042399 - DNA, 25 bp, Homo sapien
cataggttgcaatcttcccacatcc

SEQ ID NO: 5042400 - DNA, 25 bp, Homo sapien
ttgtacttaacaccgactaatgatg

SEQ ID NO: 5042401 - DNA, 25 bp, Homo sapien
ctaggctggagtaagtcattatggc

SEQ ID NO: 5042402 - DNA, 25 bp, Homo sapien
gcaccttttcacgtgtttttctggc

SEQ ID NO: 5042403 - DNA, 25 bp, Homo sapien
gaactcctgtaatctaataatccac

SEQ ID NO: 5042404 - DNA, 25 bp, Homo sapien
gatgctccatggtacccgtcactgt

SEQ ID NO: 5042405 - DNA, 25 bp, Homo sapien
caattaactcctgagcggaaaagcc

SEQ ID NO: 5042406 - DNA, 25 bp, Homo sapien
tgacttacttcctatacctggacaa

SEQ ID NO: 5042407 - DNA, 25 bp, Homo sapien
ccctaaggtggttgctacagaatcg

SEQ ID NO: 5042408 - DNA, 25 bp, Homo sapien
gacataatattaatgctgacctcct

SEQ ID NO: 5042409 - DNA, 25 bp, Homo sapien
aacacatacaaggtcgcaggcactg

SEQ ID NO: 5042410 - DNA, 25 bp, Homo sapien
gaatcgtaacccagcttgacgagtg

SEQ ID NO: 5042411 - DNA, 25 bp, Homo sapien
cactttatttagtcacgagatgaag

SEQ ID NO: 5042412 - DNA, 25 bp, Homo sapien
tacagggggcagtaattgggctaat

SEQ ID NO: 5042413 - DNA, 25 bp, Homo sapien
tttagtcacgagatgaagaaaagat

SEQ ID NO: 5042414 - DNA, 25 bp, Homo sapien
ttgggctaataacaatgcttgcaat

SEQ ID NO: 5042415 - DNA, 25 bp, Homo sapien
tggtaatactttataagattctgca

SEQ ID NO: 5042416 - DNA, 25 bp, Homo sapien
catggtaatactttataagattctg

SEQ ID NO: 5042417 - DNA, 25 bp, Homo sapien
gcatggtaatactttataagattct

SEQ ID NO: 5042418 - DNA, 25 bp, Homo sapien
atggtaatactttataagattctgc

SEQ ID NO: 5042419 - DNA, 25 bp, Homo sapien
gagattagaatccttaagaaacagt

SEQ ID NO: 5042420 - DNA, 25 bp, Homo sapien
aaatatgagacaacagtgcaatggc

SEQ ID NO: 5042421 - DNA, 25 bp, Homo sapien
ttggcttaaacagccccatagggcc

SEQ ID NO: 5042422 - DNA, 25 bp, Homo sapien
ccatagggccaaggctcaaaatatg

SEQ ID NO: 5042423 - DNA, 25 bp, Homo sapien
gctcctgttatctctgtgcggatca

SEQ ID NO: 5042424 - DNA, 25 bp, Homo sapien
gagctgaaagaggcgcctttccttc

SEQ ID NO: 5042425 - DNA, 25 bp, Homo sapien
ctcagctcctgttatctctgtgcgg

SEQ ID NO: 5042426 - DNA, 25 bp, Homo sapien
ttctccatttcttccgcaatctcag

SEQ ID NO: 5042427 - DNA, 25 bp, Homo sapien
ccatgttgttttgcgtgctctcttt

SEQ ID NO: 5042428 - DNA, 25 bp, Homo sapien
atgttgttttgcgtgctctcttttc

SEQ ID NO: 5042429 - DNA, 25 bp, Homo sapien
cccatgttgttttgcgtgctctctt

SEQ ID NO: 5042430 - DNA, 25 bp, Homo sapien
gttgttttgcgtgctctcttttctc

SEQ ID NO: 5042431 - DNA, 25 bp, Homo sapien
gaacaatgccttcaacatttagaga

SEQ ID NO: 5042432 - DNA, 25 bp, Homo sapien
aaaacaatggaacaatgccttcaac

SEQ ID NO: 5042433 - DNA, 25 bp, Homo sapien
caatgccttcaacatttagagataa

SEQ ID NO: 5042434 - DNA, 25 bp, Homo sapien
caatggaacaatgccttcaacattt

SEQ ID NO: 5042435 - DNA, 25 bp, Homo sapien
taagcaccagatacttctaggtctt

SEQ ID NO: 5042436 - DNA, 25 bp, Homo sapien
actaagcaccagatacttctaggtc

SEQ ID NO: 5042437 - DNA, 25 bp, Homo sapien
ctaagcaccagatacttctaggtct

SEQ ID NO: 5042438 - DNA, 25 bp, Homo sapien
tgtctcataatctttccaggctttg

SEQ ID NO: 5042439 - DNA, 25 bp, Homo sapien
tcataatctttccaggctttgtcaa

SEQ ID NO: 5042440 - DNA, 25 bp, Homo sapien
cataatctttccaggctttgtcaaa

SEQ ID NO: 5042441 - DNA, 25 bp, Homo sapien
tctcataatctttccaggctttgtc

SEQ ID NO: 5042442 - DNA, 25 bp, Homo sapien
gaaagaagggtaagcgccctggtca

SEQ ID NO: 5042443 - DNA, 25 bp, Homo sapien
ggccaacatcaaaccatgtgttata

SEQ ID NO: 5042444 - DNA, 25 bp, Homo sapien
tcaagcaatttacccgccgccatgg

SEQ ID NO: 5042445 - DNA, 25 bp, Homo sapien
tacacaagaagcctgagagaggaaa

SEQ ID NO: 5042446 - DNA, 25 bp, Homo sapien
ccatggaggaccttcccaatcttct

SEQ ID NO: 5042447 - DNA, 25 bp, Homo sapien
ccaagagcatttttaacgctgaaaa

SEQ ID NO: 5042448 - DNA, 25 bp, Homo sapien
caagactcgggcttagcttctctct

SEQ ID NO: 5042449 - DNA, 25 bp, Homo sapien
tcaataccattatgtgaagaggcac

SEQ ID NO: 5042450 - DNA, 25 bp, Homo sapien
gaagatcacattgtggctcaaaccc

SEQ ID NO: 5042451 - DNA, 25 bp, Homo sapien
tcacattgtggctcaaaccctggag

SEQ ID NO: 5042452 - DNA, 25 bp, Homo sapien
aaggtgaagatcacattgtggctca

SEQ ID NO: 5042453 - DNA, 25 bp, Homo sapien
agatcacattgtggctcaaaccctg

SEQ ID NO: 5042454 - DNA, 25 bp, Homo sapien
tgtgagaaggaccaacgctgacttg

SEQ ID NO: 5042455 - DNA, 25 bp, Homo sapien
tgggtcccctcactcaagaaatgat

SEQ ID NO: 5042456 - DNA, 25 bp, Homo sapien
taaaaagtgctagcttactccctga

SEQ ID NO: 5042457 - DNA, 25 bp, Homo sapien
tattataacctactgcaagcagctg

SEQ ID NO: 5042458 - DNA, 25 bp, Homo sapien
gagcacagctctacaaatggtactt

SEQ ID NO: 5042459 - DNA, 25 bp, Homo sapien
tcagcagggcctcgttttttcttgc

SEQ ID NO: 5042460 - DNA, 25 bp, Homo sapien
gcagagcacagctctacaaatggta

SEQ ID NO: 5042461 - DNA, 25 bp, Homo sapien
acagctctacaaatggtacttccag

SEQ ID NO: 5042462 - DNA, 25 bp, Homo sapien
tgatacagagcaaagaatcccagag

SEQ ID NO: 5042463 - DNA, 25 bp, Homo sapien
tcccggcctgcgtgaactgggaaaa

SEQ ID NO: 5042464 - DNA, 25 bp, Homo sapien
taaaactggtgcctcctgaagtggc

SEQ ID NO: 5042465 - DNA, 25 bp, Homo sapien
aactgatgcctcgtcattaggctgc

SEQ ID NO: 5042466 - DNA, 25 bp, Homo sapien
ctggcatttcaggtacttttaaggc

SEQ ID NO: 5042467 - DNA, 25 bp, Homo sapien
tttttattgcaccacattctctcca

SEQ ID NO: 5042468 - DNA, 25 bp, Homo sapien
gcctcgtctgcaaggcagtctccat

SEQ ID NO: 5042469 - DNA, 25 bp, Homo sapien
cagcagtagtggtgaaaaaatgata

SEQ ID NO: 5042470 - DNA, 25 bp, Homo sapien
caaatgggtgagaactatagggaga

SEQ ID NO: 5042471 - DNA, 25 bp, Homo sapien
aacagttctgtggtaaagccggaga

SEQ ID NO: 5042472 - DNA, 25 bp, Homo sapien
gccggagagttagaaaagtccattc

SEQ ID NO: 5042473 - DNA, 25 bp, Homo sapien
tatagggagatgctcaaactgcctc

SEQ ID NO: 5042474 - DNA, 25 bp, Homo sapien
atatggctaggccttggtttgagaa

SEQ ID NO: 5042475 - DNA, 25 bp, Homo sapien
tatcctaaggatttctttgttgtac

SEQ ID NO: 5042476 - DNA, 25 bp, Homo sapien
tgagaaagatatccctatcctaagg

SEQ ID NO: 5042477 - DNA, 25 bp, Homo sapien
gatcaactttcagacctttaatttc

SEQ ID NO: 5042478 - DNA, 25 bp, Homo sapien
tcatttaactgacaggaggtcaaag

SEQ ID NO: 5042479 - DNA, 25 bp, Homo sapien
catttaactgacaggaggtcaaagc

SEQ ID NO: 5042480 - DNA, 25 bp, Homo sapien
cacgtactagggtgacatagtaatg

SEQ ID NO: 5042481 - DNA, 25 bp, Homo sapien
catagtaatgtctcatagtagacat

SEQ ID NO: 5042482 - DNA, 25 bp, Homo sapien
gtttcactgcagacacaaaactgtg

SEQ ID NO: 5042483 - DNA, 25 bp, Homo sapien
tacctatacctgcagatatctatgc

SEQ ID NO: 5042484 - DNA, 25 bp, Homo sapien
aatctcttgactagacttgaggtgg

SEQ ID NO: 5042485 - DNA, 25 bp, Homo sapien
cataatataaggcatgtacaccctg

SEQ ID NO: 5042486 - DNA, 25 bp, Homo sapien
atcttcctgccccagtagttggatt

SEQ ID NO: 5042487 - DNA, 25 bp, Homo sapien
cagtagttggattgccattccgcag

SEQ ID NO: 5042488 - DNA, 25 bp, Homo sapien
gatgtcaccgcattggctctcacaa

SEQ ID NO: 5042489 - DNA, 25 bp, Homo sapien
ttccgcagatgtcaccgcattggct

SEQ ID NO: 5042490 - DNA, 25 bp, Homo sapien
aggggatgaggctgcaatgaggatg

SEQ ID NO: 5042491 - DNA, 25 bp, Homo sapien
gggatgaggctgcaatgaggatgaa

SEQ ID NO: 5042492 - DNA, 25 bp, Homo sapien
ctagaaggggatgaggctgcaatga

SEQ ID NO: 5042493 - DNA, 25 bp, Homo sapien
gaggctgcaatgaggatgaaggctg

SEQ ID NO: 5042494 - DNA, 25 bp, Homo sapien
gggctctcggataagtcatattctt

SEQ ID NO: 5042495 - DNA, 25 bp, Homo sapien
gactcaacttgggaaagtgtgtctg

SEQ ID NO: 5042496 - DNA, 25 bp, Homo sapien
tgctctagttccagtactacatgaa

SEQ ID NO: 5042497 - DNA, 25 bp, Homo sapien
gaattcattacatggggctctcgga

SEQ ID NO: 5042498 - DNA, 25 bp, Homo sapien
taaatatgaatagaagtagtccaca

SEQ ID NO: 5042499 - DNA, 25 bp, Homo sapien
gaaagtaccttgcacgctaaacaca

SEQ ID NO: 5042500 - DNA, 25 bp, Homo sapien
tatagctaccgtctattaagttggc

SEQ ID NO: 5042501 - DNA, 25 bp, Homo sapien
caatatgctataactcaccaatgag

SEQ ID NO: 5042502 - DNA, 25 bp, Homo sapien
taaaatgggatatgactgatagctg

SEQ ID NO: 5042503 - DNA, 25 bp, Homo sapien
gatagctgtctttacactgagttac

SEQ ID NO: 5042504 - DNA, 25 bp, Homo sapien
tggtgcatctatctctaaaatggga

SEQ ID NO: 5042505 - DNA, 25 bp, Homo sapien
tagccacagggcttgagctcaatcc

SEQ ID NO: 5042506 - DNA, 25 bp, Homo sapien
acttatcaagaacttgtgcatagtt

SEQ ID NO: 5042507 - DNA, 25 bp, Homo sapien
gtagaaaacttgacaaacgcggtgc

SEQ ID NO: 5042508 - DNA, 25 bp, Homo sapien
ttgacaaacgcggtgccaaggtcgg

SEQ ID NO: 5042509 - DNA, 25 bp, Homo sapien
aaacttgacaaacgcggtgccaagg

SEQ ID NO: 5042510 - DNA, 25 bp, Homo sapien
tcactctcctatagcagaagcagaa

SEQ ID NO: 5042511 - DNA, 25 bp, Homo sapien
gacaaagcttcttgccctttctggg

SEQ ID NO: 5042512 - DNA, 25 bp, Homo sapien
cctttctgggtgcacagttggcgag

SEQ ID NO: 5042513 - DNA, 25 bp, Homo sapien
ggtctatgaccccaaaatgttcaga

SEQ ID NO: 5042514 - DNA, 25 bp, Homo sapien
gaagaaatgttagctgtatctgaag

SEQ ID NO: 5042515 - DNA, 25 bp, Homo sapien
gaatagccaactcagtatacccacg

SEQ ID NO: 5042516 - DNA, 25 bp, Homo sapien
tatacctgtacctgtgttgtgtgag

SEQ ID NO: 5042517 - DNA, 25 bp, Homo sapien
gcccatgcttccaagggaaagccag

SEQ ID NO: 5042518 - DNA, 25 bp, Homo sapien
gacccagggtctctcacaaagatca

SEQ ID NO: 5042519 - DNA, 25 bp, Homo sapien
aacaattcgagggtaagggtctgag

SEQ ID NO: 5042520 - DNA, 25 bp, Homo sapien
ggtgatcctaatcaacaaaggtaag

SEQ ID NO: 5042521 - DNA, 25 bp, Homo sapien
ccaagagagatggttagtaattgca

SEQ ID NO: 5042522 - DNA, 25 bp, Homo sapien
gaatcattatctactccaagagaga

SEQ ID NO: 5042523 - DNA, 25 bp, Homo sapien
catacccatggcagctgtgatcaag

SEQ ID NO: 5042524 - DNA, 25 bp, Homo sapien
ttacatccatacaggaacaatctct

SEQ ID NO: 5042525 - DNA, 25 bp, Homo sapien
tttaaagaacaggaagaagcatatc

SEQ ID NO: 5042526 - DNA, 25 bp, Homo sapien
ccccagtagaggagcctttgtatga

SEQ ID NO: 5042527 - DNA, 25 bp, Homo sapien
tctgatgtgtttaactgaagccact

SEQ ID NO: 5042528 - DNA, 25 bp, Homo sapien
tagttacacaggttatctggcacac

SEQ ID NO: 5042529 - DNA, 25 bp, Homo sapien
tcacaggtctgttgaggtctgaatt

SEQ ID NO: 5042530 - DNA, 25 bp, Homo sapien
taactttttccacaaccatcgccaa

SEQ ID NO: 5042531 - DNA, 25 bp, Homo sapien
tatatattgcttttacagacttctt

SEQ ID NO: 5042532 - DNA, 25 bp, Homo sapien
cttgaccagaattatatattgcttt

SEQ ID NO: 5042533 - DNA, 25 bp, Homo sapien
cttcactttctgaagggctgttcta

SEQ ID NO: 5042534 - DNA, 25 bp, Homo sapien
tttctgaagggctgttctatcttgg

SEQ ID NO: 5042535 - DNA, 25 bp, Homo sapien
tgtcaccagcactgaaaacaatagg

SEQ ID NO: 5042536 - DNA, 25 bp, Homo sapien
tatcctgttcatggcaatgtcacca

SEQ ID NO: 5042537 - DNA, 25 bp, Homo sapien
tctctcaaagaaggtggtgctatcc

SEQ ID NO: 5042538 - DNA, 25 bp, Homo sapien
gctcctgcgtttatgatctgtccca

SEQ ID NO: 5042539 - DNA, 25 bp, Homo sapien
gaactccaattacagcagtttgagg

SEQ ID NO: 5042540 - DNA, 25 bp, Homo sapien
tgcagaatacttgccaacagaggaa

SEQ ID NO: 5042541 - DNA, 25 bp, Homo sapien
cagccgcagcttatatgaaaggaag

SEQ ID NO: 5042542 - DNA, 25 bp, Homo sapien
tgtggagtgctaagaatcatcctgt

SEQ ID NO: 5042543 - DNA, 25 bp, Homo sapien
cagactccgagagagactagatgag

SEQ ID NO: 5042544 - DNA, 25 bp, Homo sapien
gagatgagtgaagtatgggcctcct

SEQ ID NO: 5042545 - DNA, 25 bp, Homo sapien
cagaattcagcaatgtgtacagaga

SEQ ID NO: 5042546 - DNA, 25 bp, Homo sapien
tgggcctcctatcatatcaacaacc

SEQ ID NO: 5042547 - DNA, 25 bp, Homo sapien
catcttgatgcaatttcagtcccat

SEQ ID NO: 5042548 - DNA, 25 bp, Homo sapien
aagcaccatggcttgttcatcttga

SEQ ID NO: 5042549 - DNA, 25 bp, Homo sapien
ccatggcttgttcatcttgatgcaa

SEQ ID NO: 5042550 - DNA, 25 bp, Homo sapien
ggcttgttcatcttgatgcaatttc

SEQ ID NO: 5042551 - DNA, 25 bp, Homo sapien
ccaaatgtccacgctgataatacag

SEQ ID NO: 5042552 - DNA, 25 bp, Homo sapien
tgtccacgctgataatacagtaaag

SEQ ID NO: 5042553 - DNA, 25 bp, Homo sapien
aatgtccacgctgataatacagtaa

SEQ ID NO: 5042554 - DNA, 25 bp, Homo sapien
caaatgtccacgctgataatacagt

SEQ ID NO: 5042555 - DNA, 25 bp, Homo sapien
agctccataatggaagacgttaggg

SEQ ID NO: 5042556 - DNA, 25 bp, Homo sapien
ctacagaggcccacaatgccttttt

SEQ ID NO: 5042557 - DNA, 25 bp, Homo sapien
cagaggcccacaatgcctttttagg

SEQ ID NO: 5042558 - DNA, 25 bp, Homo sapien
tggaagacgttagggcacgtttaga

SEQ ID NO: 5042559 - DNA, 25 bp, Homo sapien
gatttccttgaatgacgcgctaatg

SEQ ID NO: 5042560 - DNA, 25 bp, Homo sapien
gaatgacgcgctaatgaaaaatgca

SEQ ID NO: 5042561 - DNA, 25 bp, Homo sapien
cctaaagacaggatttccttgaatg

SEQ ID NO: 5042562 - DNA, 25 bp, Homo sapien
aagttttgactcattgcaccagggt

SEQ ID NO: 5042563 - DNA, 25 bp, Homo sapien
tctggaccaaagggccacacttttc

SEQ ID NO: 5042564 - DNA, 25 bp, Homo sapien
tctcctagctatagctaactgaacc

SEQ ID NO: 5042565 - DNA, 25 bp, Homo sapien
aaagggccacacttttctcctagct

SEQ ID NO: 5042566 - DNA, 25 bp, Homo sapien
gctaactgaaccagggaaggtagca

SEQ ID NO: 5042567 - DNA, 25 bp, Homo sapien
aaaggcttcccagcaacccaagatg

SEQ ID NO: 5042568 - DNA, 25 bp, Homo sapien
caaaggcttcccagcaacccaagat

SEQ ID NO: 5042569 - DNA, 25 bp, Homo sapien
ccaaaggcttcccagcaacccaaga

SEQ ID NO: 5042570 - DNA, 25 bp, Homo sapien
aaggcttcccagcaacccaagatgt

SEQ ID NO: 5042571 - DNA, 25 bp, Homo sapien
tctgtgtgatctcaaggaatcagct

SEQ ID NO: 5042572 - DNA, 25 bp, Homo sapien
taaccagtgtagagacaagtaactt

SEQ ID NO: 5042573 - DNA, 25 bp, Homo sapien
cagtccttagaaaagagttacagat

SEQ ID NO: 5042574 - DNA, 25 bp, Homo sapien
ttctgtccaacaggtagaagctgct

SEQ ID NO: 5042575 - DNA, 25 bp, Homo sapien
ttatggtctgaacccttgcaccaga

SEQ ID NO: 5042576 - DNA, 25 bp, Homo sapien
cagaaatggggaggttactatgttc

SEQ ID NO: 5042577 - DNA, 25 bp, Homo sapien
gctgaagaatcaaacagctgtggtt

SEQ ID NO: 5042578 - DNA, 25 bp, Homo sapien
cagaccactcgatctaccttaaatc

SEQ ID NO: 5042579 - DNA, 25 bp, Homo sapien
ggatgacccaggtcaatacccctct

SEQ ID NO: 5042580 - DNA, 25 bp, Homo sapien
tcaattaccagtcccctgaggcgtc

SEQ ID NO: 5042581 - DNA, 25 bp, Homo sapien
tcagatggatgacccaggtcaatac

SEQ ID NO: 5042582 - DNA, 25 bp, Homo sapien
tctctcaattaccagtcccctgagg

SEQ ID NO: 5042583 - DNA, 25 bp, Homo sapien
cgatgcatgctctagctgaggacca

SEQ ID NO: 5042584 - DNA, 25 bp, Homo sapien
tgcatgctctagctgaggaccacag

SEQ ID NO: 5042585 - DNA, 25 bp, Homo sapien
gatgcatgctctagctgaggaccac

SEQ ID NO: 5042586 - DNA, 25 bp, Homo sapien
ttacgatgcatgctctagctgagga

SEQ ID NO: 5042587 - DNA, 25 bp, Homo sapien
tgccaaacagcgtcagcgagaaagg

SEQ ID NO: 5042588 - DNA, 25 bp, Homo sapien
tccagtctggccattcacctaaaag

SEQ ID NO: 5042589 - DNA, 25 bp, Homo sapien
agccacttggtaacgaggacaacgg

SEQ ID NO: 5042590 - DNA, 25 bp, Homo sapien
acctaaaagatggtttcctgtagca

SEQ ID NO: 5042591 - DNA, 25 bp, Homo sapien
gatcaagattcacagcatccgacat

SEQ ID NO: 5042592 - DNA, 25 bp, Homo sapien
ctggggaaaatgatcaagattcaca

SEQ ID NO: 5042593 - DNA, 25 bp, Homo sapien
taaatcttaagtataggagctgcgc

SEQ ID NO: 5042594 - DNA, 25 bp, Homo sapien
tgactgatgctggaaggccttaacc

SEQ ID NO: 5042595 - DNA, 25 bp, Homo sapien
gctaggttcaagtcagttctggcac

SEQ ID NO: 5042596 - DNA, 25 bp, Homo sapien
gaatttactgggaactggtcacact

SEQ ID NO: 5042597 - DNA, 25 bp, Homo sapien
gaaacagagacctagggaggcccga

SEQ ID NO: 5042598 - DNA, 25 bp, Homo sapien
agaaacagagacctagggaggcccg

SEQ ID NO: 5042599 - DNA, 25 bp, Homo sapien
tgatgtttcttgctaaacagaggtt

SEQ ID NO: 5042600 - DNA, 25 bp, Homo sapien
gagtcttgcttagggtactagcttc

SEQ ID NO: 5042601 - DNA, 25 bp, Homo sapien
tgtttcttgctaaacagaggtttac

SEQ ID NO: 5042602 - DNA, 25 bp, Homo sapien
agtcttgcttagggtactagcttct

SEQ ID NO: 5042603 - DNA, 25 bp, Homo sapien
tcagctccacgaaaaccttgttcaa

SEQ ID NO: 5042604 - DNA, 25 bp, Homo sapien
aaggcacacagagctcgggccactg

SEQ ID NO: 5042605 - DNA, 25 bp, Homo sapien
tctctgttcatgagagtcacctcag

SEQ ID NO: 5042606 - DNA, 25 bp, Homo sapien
acctcagctccacgaaaaccttgtt

SEQ ID NO: 5042607 - DNA, 25 bp, Homo sapien
taaattatctccacctgctacttcc

SEQ ID NO: 5042608 - DNA, 25 bp, Homo sapien
tatctccacctgctacttccctttt

SEQ ID NO: 5042609 - DNA, 25 bp, Homo sapien
ctgtggagggattggtaagcagggg

SEQ ID NO: 5042610 - DNA, 25 bp, Homo sapien
tggagggattggtaagcaggggtcc

SEQ ID NO: 5042611 - DNA, 25 bp, Homo sapien
ttcattacatgatacttccttctgg

SEQ ID NO: 5042612 - DNA, 25 bp, Homo sapien
tccttctggccctcacatatttaac

SEQ ID NO: 5042613 - DNA, 25 bp, Homo sapien
aggagcagctagagatttatcattc

SEQ ID NO: 5042614 - DNA, 25 bp, Homo sapien
cagctagagatttatcattcattac

SEQ ID NO: 5042615 - DNA, 25 bp, Homo sapien
cttcaacctcagatcctgcatcaag

SEQ ID NO: 5042616 - DNA, 25 bp, Homo sapien
ttcaacctcagatcctgcatcaagg

SEQ ID NO: 5042617 - DNA, 25 bp, Homo sapien
aacctcagatcctgcatcaaggaag

SEQ ID NO: 5042618 - DNA, 25 bp, Homo sapien
cctcagatcctgcatcaaggaagaa

SEQ ID NO: 5042619 - DNA, 25 bp, Homo sapien
caaggccgactacagaattagttta

SEQ ID NO: 5042620 - DNA, 25 bp, Homo sapien
tcaggcccttgtaaacatctaaggc

SEQ ID NO: 5042621 - DNA, 25 bp, Homo sapien
gagacaaagaatcccacactcctga

SEQ ID NO: 5042622 - DNA, 25 bp, Homo sapien
taagctactttccaagcaggtaaaa

SEQ ID NO: 5042623 - DNA, 25 bp, Homo sapien
gaaaatgaaggccttgcatgcccag

SEQ ID NO: 5042624 - DNA, 25 bp, Homo sapien
gaagtgcaggacgactatctcccat

SEQ ID NO: 5042625 - DNA, 25 bp, Homo sapien
ggacgactatctcccatcacaataa

SEQ ID NO: 5042626 - DNA, 25 bp, Homo sapien
tgaaggccttgcatgcccagtggcc

SEQ ID NO: 5042627 - DNA, 25 bp, Homo sapien
gggaatttaggttctgagtccactg

SEQ ID NO: 5042628 - DNA, 25 bp, Homo sapien
gagaggcccattgccttaaaggaag

SEQ ID NO: 5042629 - DNA, 25 bp, Homo sapien
gccacattttagactaactcactgc

SEQ ID NO: 5042630 - DNA, 25 bp, Homo sapien
tctggagaggcccattgccttaaag

SEQ ID NO: 5042631 - DNA, 25 bp, Homo sapien
tccttctggagaggcccattgcctt

SEQ ID NO: 5042632 - DNA, 25 bp, Homo sapien
gacaagctaaatggggaggtgaaaa

SEQ ID NO: 5042633 - DNA, 25 bp, Homo sapien
tggaaagtgggtaaagaagacaagc

SEQ ID NO: 5042634 - DNA, 25 bp, Homo sapien
ggaaggaataagctggatgcccgtg

SEQ ID NO: 5042635 - DNA, 25 bp, Homo sapien
tgtgtccgtgcctctgcaggtctgc

SEQ ID NO: 5042636 - DNA, 25 bp, Homo sapien
aacaggaagaacagatagagagggc

SEQ ID NO: 5042637 - DNA, 25 bp, Homo sapien
ggaagaacagatagagagggcaggc

SEQ ID NO: 5042638 - DNA, 25 bp, Homo sapien
caggaagaacagatagagagggcag

SEQ ID NO: 5042639 - DNA, 25 bp, Homo sapien
agctgttcttcatggcaaacaggaa

SEQ ID NO: 5042640 - DNA, 25 bp, Homo sapien
tcttctggtgcaatcacttctaagg

SEQ ID NO: 5042641 - DNA, 25 bp, Homo sapien
atcttctggtgcaatcacttctaag

SEQ ID NO: 5042642 - DNA, 25 bp, Homo sapien
tatcttctggtgcaatcacttctaa

SEQ ID NO: 5042643 - DNA, 25 bp, Homo sapien
tggaaagatcgtgtcttctccttct

SEQ ID NO: 5042644 - DNA, 25 bp, Homo sapien
cagaagacaatcagatggaaagttc

SEQ ID NO: 5042645 - DNA, 25 bp, Homo sapien
agaactccagaagacaatcagatgg

SEQ ID NO: 5042646 - DNA, 25 bp, Homo sapien
tcttcttcctgtggaaagatcgtgt

SEQ ID NO: 5042647 - DNA, 25 bp, Homo sapien
ctgcctctagtttttctcttacttt

SEQ ID NO: 5042648 - DNA, 25 bp, Homo sapien
atgaggcaagataagcagtgaggca

SEQ ID NO: 5042649 - DNA, 25 bp, Homo sapien
tgaatggacacatcataagatgagg

SEQ ID NO: 5042650 - DNA, 25 bp, Homo sapien
gaggcacggtatgcaactgctgctg

SEQ ID NO: 5042651 - DNA, 25 bp, Homo sapien
acagaggcgtgaccaggacggcctt

SEQ ID NO: 5042652 - DNA, 25 bp, Homo sapien
caacagcagtgatagtaactagaca

SEQ ID NO: 5042653 - DNA, 25 bp, Homo sapien
cagtactacttcatgcccaccaaag

SEQ ID NO: 5042654 - DNA, 25 bp, Homo sapien
gacagaaggctcagaggatcatccc

SEQ ID NO: 5042655 - DNA, 25 bp, Homo sapien
caagcaaatactcggaaagataggg

SEQ ID NO: 5042656 - DNA, 25 bp, Homo sapien
tacaagtgacaagtgcaatgcacca

SEQ ID NO: 5042657 - DNA, 25 bp, Homo sapien
cattctatgagaacgcagtccaggg

SEQ ID NO: 5042658 - DNA, 25 bp, Homo sapien
cactgtacaagtttgggactcaaga

SEQ ID NO: 5042659 - DNA, 25 bp, Homo sapien
ccagtatctactaaggcggcagtgt

SEQ ID NO: 5042660 - DNA, 25 bp, Homo sapien
cccttcgggtcccttctctgcagag

SEQ ID NO: 5042661 - DNA, 25 bp, Homo sapien
cagaggaccaactcatcatctattc

SEQ ID NO: 5042662 - DNA, 25 bp, Homo sapien
catcttcccactggcattggccact

SEQ ID NO: 5042663 - DNA, 25 bp, Homo sapien
tcccttcgcctgtgcccttcgggtc

SEQ ID NO: 5042664 - DNA, 25 bp, Homo sapien
tgtctgttcccatccacaagttcac

SEQ ID NO: 5042665 - DNA, 25 bp, Homo sapien
ctgtgaccactattatgccatcttc

SEQ ID NO: 5042666 - DNA, 25 bp, Homo sapien
ccacaagttcacctgtgaccactat

SEQ ID NO: 5042667 - DNA, 25 bp, Homo sapien
tgttcccatccacaagttcacctgt

SEQ ID NO: 5042668 - DNA, 25 bp, Homo sapien
ctcttctgagggctatgccaaccat

SEQ ID NO: 5042669 - DNA, 25 bp, Homo sapien
caaaacggccatgatattcctccct

SEQ ID NO: 5042670 - DNA, 25 bp, Homo sapien
tgtaggaacagggtctacgactcac

SEQ ID NO: 5042671 - DNA, 25 bp, Homo sapien
aaactggtacctaagcaagtgaggg

SEQ ID NO: 5042672 - DNA, 25 bp, Homo sapien
gtaacaccatacagccaaaacggcc

SEQ ID NO: 5042673 - DNA, 25 bp, Homo sapien
gattccagatggagtagttcaaagt

SEQ ID NO: 5042674 - DNA, 25 bp, Homo sapien
tccatcagaacctgtagaggtacta

SEQ ID NO: 5042675 - DNA, 25 bp, Homo sapien
gctaatgagtttctatgattccaga

SEQ ID NO: 5042676 - DNA, 25 bp, Homo sapien
tgtgaatcagaatgagcccacgtcc

SEQ ID NO: 5042677 - DNA, 25 bp, Homo sapien
taatgagctgagacctgatacagca

SEQ ID NO: 5042678 - DNA, 25 bp, Homo sapien
gaaaccagttacctccattgtgagc

SEQ ID NO: 5042679 - DNA, 25 bp, Homo sapien
tacgcgtttgtttcactagtgctaa

SEQ ID NO: 5042680 - DNA, 25 bp, Homo sapien
tacagcagcaagaaggaccctataa

SEQ ID NO: 5042681 - DNA, 25 bp, Homo sapien
gatagagagtttttatgacaagaca

SEQ ID NO: 5042682 - DNA, 25 bp, Homo sapien
gcatccactgatagagagtttttat

SEQ ID NO: 5042683 - DNA, 25 bp, Homo sapien
ttgatggaatccatggaccagatgt

SEQ ID NO: 5042684 - DNA, 25 bp, Homo sapien
cactgtaacatagtgatgcagtcac

SEQ ID NO: 5042685 - DNA, 25 bp, Homo sapien
gaggagagctgaacaaattggagaa

SEQ ID NO: 5042686 - DNA, 25 bp, Homo sapien
aatgtgtgagctttcaacctttcct

SEQ ID NO: 5042687 - DNA, 25 bp, Homo sapien
catttagggaccaaaattccactga

SEQ ID NO: 5042688 - DNA, 25 bp, Homo sapien
cccaaacatgcctatacatttaggg

SEQ ID NO: 5042689 - DNA, 25 bp, Homo sapien
tcacactggatttaacacttagggt

SEQ ID NO: 5042690 - DNA, 25 bp, Homo sapien
aagtcagacctcttagactagcagg

SEQ ID NO: 5042691 - DNA, 25 bp, Homo sapien
cacttagggtatgagagccctccaa

SEQ ID NO: 5042692 - DNA, 25 bp, Homo sapien
gatatctgctggaatggttccactg

SEQ ID NO: 5042693 - DNA, 25 bp, Homo sapien
cacttcaggtattctcaagctaaag

SEQ ID NO: 5042694 - DNA, 25 bp, Homo sapien
cctgtgcaaatatgttactggctca

SEQ ID NO: 5042695 - DNA, 25 bp, Homo sapien
tactggctcataataaatgtccaac

SEQ ID NO: 5042696 - DNA, 25 bp, Homo sapien
aactcgctcagagttccacaagtga

SEQ ID NO: 5042697 - DNA, 25 bp, Homo sapien
ttaaggtttatattgccaaaggcaa

SEQ ID NO: 5042698 - DNA, 25 bp, Homo sapien
aaggtttatattgccaaaggcaatt

SEQ ID NO: 5042699 - DNA, 25 bp, Homo sapien
taaggtttatattgccaaaggcaat

SEQ ID NO: 5042700 - DNA, 25 bp, Homo sapien
ggtaagctttacgatggatcattgt

SEQ ID NO: 5042701 - DNA, 25 bp, Homo sapien
tacgatggatcattgtttcctttcc

SEQ ID NO: 5042702 - DNA, 25 bp, Homo sapien
agctttacgatggatcattgtttcc

SEQ ID NO: 5042703 - DNA, 25 bp, Homo sapien
ttacgggtaagctttacgatggatc

SEQ ID NO: 5042704 - DNA, 25 bp, Homo sapien
aagaccttagctgtccattggccag

SEQ ID NO: 5042705 - DNA, 25 bp, Homo sapien
gctaatcttaagtgttgtgggctcc

SEQ ID NO: 5042706 - DNA, 25 bp, Homo sapien
aatgccccgagctgaaaattttagg

SEQ ID NO: 5042707 - DNA, 25 bp, Homo sapien
cagtagcagatgatatggtgtacca

SEQ ID NO: 5042708 - DNA, 25 bp, Homo sapien
tacagaaagaactagcagcagcaac

SEQ ID NO: 5042709 - DNA, 25 bp, Homo sapien
ggcgaaaccgtgtcatgctctattt

SEQ ID NO: 5042710 - DNA, 25 bp, Homo sapien
aagcggttcaatctttcatatggaa

SEQ ID NO: 5042711 - DNA, 25 bp, Homo sapien
cagtgattcaagcacaaagcggttc

SEQ ID NO: 5042712 - DNA, 25 bp, Homo sapien
gagggcctattatgtgacaagcagc

SEQ ID NO: 5042713 - DNA, 25 bp, Homo sapien
caagcagcatgcagaatggaacacc

SEQ ID NO: 5042714 - DNA, 25 bp, Homo sapien
agtagtatttctggagggcctatta

SEQ ID NO: 5042715 - DNA, 25 bp, Homo sapien
gcagcatgcagaatggaacaccatg

SEQ ID NO: 5042716 - DNA, 25 bp, Homo sapien
gcctcatgggtgttgggccacagtg

SEQ ID NO: 5042717 - DNA, 25 bp, Homo sapien
ggaaccccgtgaagcctcatgggtg

SEQ ID NO: 5042718 - DNA, 25 bp, Homo sapien
cctcatgggtgttgggccacagtgt

SEQ ID NO: 5042719 - DNA, 25 bp, Homo sapien
agcctcatgggtgttgggccacagt

SEQ ID NO: 5042720 - DNA, 25 bp, Homo sapien
taggtgttcatctggtacaggagga

SEQ ID NO: 5042721 - DNA, 25 bp, Homo sapien
catagattcagctagagttcagaga

SEQ ID NO: 5042722 - DNA, 25 bp, Homo sapien
cagaggactctaggtgcagctgtta

SEQ ID NO: 5042723 - DNA, 25 bp, Homo sapien
gacgtgaaaatgcaagaggcttcca

SEQ ID NO: 5042724 - DNA, 25 bp, Homo sapien
gccagcaacaacagaagatacgtgt

SEQ ID NO: 5042725 - DNA, 25 bp, Homo sapien
gaaaagaacattatcctgactactc

SEQ ID NO: 5042726 - DNA, 25 bp, Homo sapien
cgtgtcaggtaaataaagacaggac

SEQ ID NO: 5042727 - DNA, 25 bp, Homo sapien
tagctagtcatgcatctgtgtggaa

SEQ ID NO: 5042728 - DNA, 25 bp, Homo sapien
gctaacagtggctccggttccatca

SEQ ID NO: 5042729 - DNA, 25 bp, Homo sapien
gtgctggaaaatgtacacactgggc

SEQ ID NO: 5042730 - DNA, 25 bp, Homo sapien
tacacactgggctaacagtggctcc

SEQ ID NO: 5042731 - DNA, 25 bp, Homo sapien
ttaacagcaggcaatggggtgtgct

SEQ ID NO: 5042732 - DNA, 25 bp, Homo sapien
tggatcacaatccttctgaggactg

SEQ ID NO: 5042733 - DNA, 25 bp, Homo sapien
ggctctttctgcacactggttggtc

SEQ ID NO: 5042734 - DNA, 25 bp, Homo sapien
ctgggcagacaatcaaaatcacaag

SEQ ID NO: 5042735 - DNA, 25 bp, Homo sapien
aaagcacctgggcactaatgagcag

SEQ ID NO: 5042736 - DNA, 25 bp, Homo sapien
cttgtgactcttatgatggctcctg

SEQ ID NO: 5042737 - DNA, 25 bp, Homo sapien
ccaatcattgcgatgaatgacaaaa

SEQ ID NO: 5042738 - DNA, 25 bp, Homo sapien
tgtgactcttatgatggctcctgca

SEQ ID NO: 5042739 - DNA, 25 bp, Homo sapien
ttcttgaggctgaccaatcattgcg

SEQ ID NO: 5042740 - DNA, 25 bp, Homo sapien
aaatatgtgtcaacagcctggcacc

SEQ ID NO: 5042741 - DNA, 25 bp, Homo sapien
gaaggccaccctgttctcaaaaatg

SEQ ID NO: 5042742 - DNA, 25 bp, Homo sapien
cacccacagtgtctaagcgcttgag

SEQ ID NO: 5042743 - DNA, 25 bp, Homo sapien
ccacgtggctgtgagggtgcttaca

SEQ ID NO: 5042744 - DNA, 25 bp, Homo sapien
gcccagagaggtagacttaaccgta

SEQ ID NO: 5042745 - DNA, 25 bp, Homo sapien
aaatcctacttccatggccatccgg

SEQ ID NO: 5042746 - DNA, 25 bp, Homo sapien
ggccatccggttggtatttaataca

SEQ ID NO: 5042747 - DNA, 25 bp, Homo sapien
caactgctctatgcaattggtaggc

SEQ ID NO: 5042748 - DNA, 25 bp, Homo sapien
gtgctgggtgctataccaggcactg

SEQ ID NO: 5042749 - DNA, 25 bp, Homo sapien
cgtgctgggtgctataccaggcact

SEQ ID NO: 5042750 - DNA, 25 bp, Homo sapien
gcgtgctgggtgctataccaggcac

SEQ ID NO: 5042751 - DNA, 25 bp, Homo sapien
tgcgtgctgggtgctataccaggca

SEQ ID NO: 5042752 - DNA, 25 bp, Homo sapien
ctaaattaggtgctgtcttatcaag

SEQ ID NO: 5042753 - DNA, 25 bp, Homo sapien
tgagtggctaaattaggtgctgtct

SEQ ID NO: 5042754 - DNA, 25 bp, Homo sapien
cccagcttttgagtggctaaattag

SEQ ID NO: 5042755 - DNA, 25 bp, Homo sapien
tatcaaggggacacatattccagtt

SEQ ID NO: 5042756 - DNA, 25 bp, Homo sapien
ggtaggtacttatccccatgaggaa

SEQ ID NO: 5042757 - DNA, 25 bp, Homo sapien
ggtgttgccctagtcctctccttag

SEQ ID NO: 5042758 - DNA, 25 bp, Homo sapien
cacaccaatggagaggactcgacga

SEQ ID NO: 5042759 - DNA, 25 bp, Homo sapien
taatcagtaaagcacctaacctagc

SEQ ID NO: 5042760 - DNA, 25 bp, Homo sapien
gactggcctgcatgaggacttgaca

SEQ ID NO: 5042761 - DNA, 25 bp, Homo sapien
tactggctgtacgacctagctggac

SEQ ID NO: 5042762 - DNA, 25 bp, Homo sapien
tgacctgggcagaatacttactggc

SEQ ID NO: 5042763 - DNA, 25 bp, Homo sapien
taatgggctccttaagtttagcacc

SEQ ID NO: 5042764 - DNA, 25 bp, Homo sapien
ggtttgcatgtagtaggaatgttac

SEQ ID NO: 5042765 - DNA, 25 bp, Homo sapien
aaataactgaacacaccaggtgaat

SEQ ID NO: 5042766 - DNA, 25 bp, Homo sapien
tactgttatgagatagagcttgata

SEQ ID NO: 5042767 - DNA, 25 bp, Homo sapien
gcttgatactgaatctacattctgt

SEQ ID NO: 5042768 - DNA, 25 bp, Homo sapien
catattacagaggtccgtccttggg

SEQ ID NO: 5042769 - DNA, 25 bp, Homo sapien
gatgggacccagcactaacagaagt

SEQ ID NO: 5042770 - DNA, 25 bp, Homo sapien
ctctggaagtatgccggaatgacac

SEQ ID NO: 5042771 - DNA, 25 bp, Homo sapien
catttcaagatgagtcggcccacag

SEQ ID NO: 5042772 - DNA, 25 bp, Homo sapien
tggctgcactacttcgcctctgggc

SEQ ID NO: 5042773 - DNA, 25 bp, Homo sapien
tggtgaccttggctgcactacttcg

SEQ ID NO: 5042774 - DNA, 25 bp, Homo sapien
atctcctagtcccttgctggtgacc

SEQ ID NO: 5042775 - DNA, 25 bp, Homo sapien
gccctcggtggcctgacgccaccta

SEQ ID NO: 5042776 - DNA, 25 bp, Homo sapien
gtgtccacagctcgctcagtcctct

SEQ ID NO: 5042777 - DNA, 25 bp, Homo sapien
ctcgagggttacaggagggtcacga

SEQ ID NO: 5042778 - DNA, 25 bp, Homo sapien
tgtggaagcgccgaacagtgcatgc

SEQ ID NO: 5042779 - DNA, 25 bp, Homo sapien
tgcatgccagggacaggacttccat

SEQ ID NO: 5042780 - DNA, 25 bp, Homo sapien
tgtgcagccgcgtggtgaagctgga

SEQ ID NO: 5042781 - DNA, 25 bp, Homo sapien
gatgaactccgagacagagatctgg

SEQ ID NO: 5042782 - DNA, 25 bp, Homo sapien
acgtggtgggcgagttgtagtcctc

SEQ ID NO: 5042783 - DNA, 25 bp, Homo sapien
ctccagcagcgtgacggtgttcctg

SEQ ID NO: 5042784 - DNA, 25 bp, Homo sapien
tgccgggagggacgagacacaagcg

SEQ ID NO: 5042785 - DNA, 25 bp, Homo sapien
gaggctcatgaaccccggcgcgcag

SEQ ID NO: 5042786 - DNA, 25 bp, Homo sapien
ttcaaactccaagccgcgcgcgagg

SEQ ID NO: 5042787 - DNA, 25 bp, Homo sapien
gggggtgagtcacggcgcaggctcc

SEQ ID NO: 5042788 - DNA, 25 bp, Homo sapien
ctattccaggtagtcgtctagcacc

SEQ ID NO: 5042789 - DNA, 25 bp, Homo sapien
gttaccccatggagcactgacaaca

SEQ ID NO: 5042790 - DNA, 25 bp, Homo sapien
aaatatggcccatgctagttgagct

SEQ ID NO: 5042791 - DNA, 25 bp, Homo sapien
tcttttgaagtatgagctacccagg

SEQ ID NO: 5042792 - DNA, 25 bp, Homo sapien
tctcaaatactctgaaaatcattcc

SEQ ID NO: 5042793 - DNA, 25 bp, Homo sapien
tcctctttaaatttgaaaccatgcc

SEQ ID NO: 5042794 - DNA, 25 bp, Homo sapien
catttctgggccataatcctcttta

SEQ ID NO: 5042795 - DNA, 25 bp, Homo sapien
gtgaaaaccatctgcacctctcatt

SEQ ID NO: 5042796 - DNA, 25 bp, Homo sapien
tcttctgaacagcaatggcgctaac

SEQ ID NO: 5042797 - DNA, 25 bp, Homo sapien
gatgcactttgtcgccttgaaaaaa

SEQ ID NO: 5042798 - DNA, 25 bp, Homo sapien
tcagttacatttccagttgcagacc

SEQ ID NO: 5042799 - DNA, 25 bp, Homo sapien
taacgacccacttgccatcagggaa

SEQ ID NO: 5042800 - DNA, 25 bp, Homo sapien
tctcagacatcctaagtagacaatt

SEQ ID NO: 5042801 - DNA, 25 bp, Homo sapien
tgttctgagaattcaacgagctaag

SEQ ID NO: 5042802 - DNA, 25 bp, Homo sapien
aagtgcttagcagggtctcagacat

SEQ ID NO: 5042803 - DNA, 25 bp, Homo sapien
gggcaatgacaacccctatctcagt

SEQ ID NO: 5042804 - DNA, 25 bp, Homo sapien
ggctccggtttcctaactgctccat

SEQ ID NO: 5042805 - DNA, 25 bp, Homo sapien
gcacatttatggctccggtttccta

SEQ ID NO: 5042806 - DNA, 25 bp, Homo sapien
ctcgtccacttgcacatttatggct

SEQ ID NO: 5042807 - DNA, 25 bp, Homo sapien
cacttgcacatttatggctccggtt

SEQ ID NO: 5042808 - DNA, 25 bp, Homo sapien
tacacaatcgccacgcgtcgcttta

SEQ ID NO: 5042809 - DNA, 25 bp, Homo sapien
tgtagatacacaatcgccacgcgtc

SEQ ID NO: 5042810 - DNA, 25 bp, Homo sapien
gcgtcgctttactggtgaaaactcc

SEQ ID NO: 5042811 - DNA, 25 bp, Homo sapien
gtctcctcttaccaaactcacattg

SEQ ID NO: 5042812 - DNA, 25 bp, Homo sapien
tgcagccagtcgtgctaatgacctg

SEQ ID NO: 5042813 - DNA, 25 bp, Homo sapien
gctaatgacctgtctgcagtaactt

SEQ ID NO: 5042814 - DNA, 25 bp, Homo sapien
tgcagtaactttgtaaacctccact

SEQ ID NO: 5042815 - DNA, 25 bp, Homo sapien
tgacctgtctgcagtaactttgtaa

SEQ ID NO: 5042816 - DNA, 25 bp, Homo sapien
catagtgaatctctcgacgaaaaac

SEQ ID NO: 5042817 - DNA, 25 bp, Homo sapien
cgacgaaaaactggagagcctggag

SEQ ID NO: 5042818 - DNA, 25 bp, Homo sapien
cgattccatagtgaatctctcgacg

SEQ ID NO: 5042819 - DNA, 25 bp, Homo sapien
tgaatctctcgacgaaaaactggag

SEQ ID NO: 5042820 - DNA, 25 bp, Homo sapien
gtctcagccgtcacatcagaaaacg

SEQ ID NO: 5042821 - DNA, 25 bp, Homo sapien
agaactaagatcctgacccgggtgg

SEQ ID NO: 5042822 - DNA, 25 bp, Homo sapien
tggtctaaaaaactccaagccaggc

SEQ ID NO: 5042823 - DNA, 25 bp, Homo sapien
tcttcagtgcctaggtaactcctgt

SEQ ID NO: 5042824 - DNA, 25 bp, Homo sapien
aatcctgcaagggagacactgggcc

SEQ ID NO: 5042825 - DNA, 25 bp, Homo sapien
actaaggcgatttcatttctgggac

SEQ ID NO: 5042826 - DNA, 25 bp, Homo sapien
cacggcacttggagacccatctgat

SEQ ID NO: 5042827 - DNA, 25 bp, Homo sapien
gctgccttgactctgaactaattcg

SEQ ID NO: 5042828 - DNA, 25 bp, Homo sapien
taaatactgttcctatactaaggcg

SEQ ID NO: 5042829 - DNA, 25 bp, Homo sapien
gaggcttcagtcaaacagatggtcc

SEQ ID NO: 5042830 - DNA, 25 bp, Homo sapien
tgagccgaacatggcacatcaggcc

SEQ ID NO: 5042831 - DNA, 25 bp, Homo sapien
gacacggcgctatgggttttctgcc

SEQ ID NO: 5042832 - DNA, 25 bp, Homo sapien
gaccttgtggctctgatggagtgaa

SEQ ID NO: 5042833 - DNA, 25 bp, Homo sapien
tgattccagagaaaccacccagaac

SEQ ID NO: 5042834 - DNA, 25 bp, Homo sapien
tgaccctcggtctgagcagttgaaa

SEQ ID NO: 5042835 - DNA, 25 bp, Homo sapien
tctaaaggcgttcagtgggtaagca

SEQ ID NO: 5042836 - DNA, 25 bp, Homo sapien
aacactgacccgaggcaggaactgt

SEQ ID NO: 5042837 - DNA, 25 bp, Homo sapien
gatcgccttgcttaaaatcttgcca

SEQ ID NO: 5042838 - DNA, 25 bp, Homo sapien
acagatcgccttgcttaaaatcttg

SEQ ID NO: 5042839 - DNA, 25 bp, Homo sapien
tgccaattacaagggccaagcatgg

SEQ ID NO: 5042840 - DNA, 25 bp, Homo sapien
gcttaaaatcttgccaattacaagg

SEQ ID NO: 5042841 - DNA, 25 bp, Homo sapien
attccatcccagaacggctctctgt

SEQ ID NO: 5042842 - DNA, 25 bp, Homo sapien
tctgtgacggctcggcccatattga

SEQ ID NO: 5042843 - DNA, 25 bp, Homo sapien
ggagccgcaaagaacagtgggtcaa

SEQ ID NO: 5042844 - DNA, 25 bp, Homo sapien
gatcacaaacgcaatgacatgcaaa

SEQ ID NO: 5042845 - DNA, 25 bp, Homo sapien
gagaaccgagcagcaggatccaaat

SEQ ID NO: 5042846 - DNA, 25 bp, Homo sapien
ctagaaaagaccttccggagcccat

SEQ ID NO: 5042847 - DNA, 25 bp, Homo sapien
ggatcactcatgcagtctcctagaa

SEQ ID NO: 5042848 - DNA, 25 bp, Homo sapien
ggagcccatgccagatacagcagtg

SEQ ID NO: 5042849 - DNA, 25 bp, Homo sapien
gcagcaggtcccaaaatggtacaag

SEQ ID NO: 5042850 - DNA, 25 bp, Homo sapien
aaaacacaagccacttcacggtccg

SEQ ID NO: 5042851 - DNA, 25 bp, Homo sapien
tcgctctcagaaaacgcagcaggtc

SEQ ID NO: 5042852 - DNA, 25 bp, Homo sapien
cgcagaaaaccggacaccggcaagt

SEQ ID NO: 5042853 - DNA, 25 bp, Homo sapien
aaagcgaactgcgaccgggaagcgc

SEQ ID NO: 5042854 - DNA, 25 bp, Homo sapien
cggctctcgggtgggaaagcgaact

SEQ ID NO: 5042855 - DNA, 25 bp, Homo sapien
cctggcgggccgctgggcattattc

SEQ ID NO: 5042856 - DNA, 25 bp, Homo sapien
gcattattccatcgcgggttcggcc

SEQ ID NO: 5042857 - DNA, 25 bp, Homo sapien
caggcgaggcgcgggagccgagcgc

SEQ ID NO: 5042858 - DNA, 25 bp, Homo sapien
gggagccgagcgcggcgcaggaagg

SEQ ID NO: 5042859 - DNA, 25 bp, Homo sapien
gcggcgcaggaaggggcgggcgacc

SEQ ID NO: 5042860 - DNA, 25 bp, Homo sapien
caggccaggcgaggcgcgggagccg

SEQ ID NO: 5042861 - DNA, 25 bp, Homo sapien
ttaaccatgacaaagagtgagggat

SEQ ID NO: 5042862 - DNA, 25 bp, Homo sapien
catgacaaagagtgagggataggaa

SEQ ID NO: 5042863 - DNA, 25 bp, Homo sapien
accatgacaaagagtgagggatagg

SEQ ID NO: 5042864 - DNA, 25 bp, Homo sapien
gagggtggtatttttaaccatgaca

SEQ ID NO: 5042865 - DNA, 25 bp, Homo sapien
tgattgggggcaacattccagatgt

SEQ ID NO: 5042866 - DNA, 25 bp, Homo sapien
catcttatagaagccgacaaagtca

SEQ ID NO: 5042867 - DNA, 25 bp, Homo sapien
tatagaagccgacaaagtcagcctt

SEQ ID NO: 5042868 - DNA, 25 bp, Homo sapien
gaagccgacaaagtcagcctttctt

SEQ ID NO: 5042869 - DNA, 25 bp, Homo sapien
caaaatggcaactgctgcaaccttg

SEQ ID NO: 5042870 - DNA, 25 bp, Homo sapien
aaatggcaactgctgcaaccttggc

SEQ ID NO: 5042871 - DNA, 25 bp, Homo sapien
gggaccatgggaaagatacaatttc

SEQ ID NO: 5042872 - DNA, 25 bp, Homo sapien
tcaaaatggcaactgctgcaacctt

SEQ ID NO: 5042873 - DNA, 25 bp, Homo sapien
ctgctgccaagggcttggctcctag

SEQ ID NO: 5042874 - DNA, 25 bp, Homo sapien
tctgctgccaagggcttggctccta

SEQ ID NO: 5042875 - DNA, 25 bp, Homo sapien
ctctgctgccaagggcttggctcct

SEQ ID NO: 5042876 - DNA, 25 bp, Homo sapien
tgctgccaagggcttggctcctaga

SEQ ID NO: 5042877 - DNA, 25 bp, Homo sapien
gattttggcatttaaggctctcaag

SEQ ID NO: 5042878 - DNA, 25 bp, Homo sapien
actgccacggagagagtgcagattt

SEQ ID NO: 5042879 - DNA, 25 bp, Homo sapien
agctccctttccacgcagtctgtgg

SEQ ID NO: 5042880 - DNA, 25 bp, Homo sapien
taaggctctcaagaattcagctccc

SEQ ID NO: 5042881 - DNA, 25 bp, Homo sapien
tccatttttgtagctttaatgagac

SEQ ID NO: 5042882 - DNA, 25 bp, Homo sapien
ttttgtagctttaatgagactctca

SEQ ID NO: 5042883 - DNA, 25 bp, Homo sapien
acactttcctgagtagacccttaga

SEQ ID NO: 5042884 - DNA, 25 bp, Homo sapien
cttagacggatagctccactcagaa

SEQ ID NO: 5042885 - DNA, 25 bp, Homo sapien
cagctgagtgggtctggcagacagc

SEQ ID NO: 5042886 - DNA, 25 bp, Homo sapien
gggagagcagctgagtgggtctggc

SEQ ID NO: 5042887 - DNA, 25 bp, Homo sapien
gtgggtctggcagacagcaaaagct

SEQ ID NO: 5042888 - DNA, 25 bp, Homo sapien
tccccacattccacatgggggttgg

SEQ ID NO: 5042889 - DNA, 25 bp, Homo sapien
agggcagacccagggaactcatcag

SEQ ID NO: 5042890 - DNA, 25 bp, Homo sapien
cagacattcgaaggcgggaactgca

SEQ ID NO: 5042891 - DNA, 25 bp, Homo sapien
cgcttcccagggcagacccagggaa

SEQ ID NO: 5042892 - DNA, 25 bp, Homo sapien
ttcccagggcagacccagggaactc

SEQ ID NO: 5042893 - DNA, 25 bp, Homo sapien
ctctttggcaccttgcttgaatgtt

SEQ ID NO: 5042894 - DNA, 25 bp, Homo sapien
tttggcaccttgcttgaatgttttt

SEQ ID NO: 5042895 - DNA, 25 bp, Homo sapien
tgcccatcagcatactctttggcac

SEQ ID NO: 5042896 - DNA, 25 bp, Homo sapien
ctgtgcccatcagcatactctttgg

SEQ ID NO: 5042897 - DNA, 25 bp, Homo sapien
tctgcagtcgttcctgatcgaggct

SEQ ID NO: 5042898 - DNA, 25 bp, Homo sapien
tctggtgactctccggggcagctgt

SEQ ID NO: 5042899 - DNA, 25 bp, Homo sapien
caccacggtgtctgcgtcatgcaga

SEQ ID NO: 5042900 - DNA, 25 bp, Homo sapien
tgtgctctctgcagtcgttcctgat

SEQ ID NO: 5042901 - DNA, 25 bp, Homo sapien
tgccttctgtcacgatcggaagctt

SEQ ID NO: 5042902 - DNA, 25 bp, Homo sapien
gatcttttatgaatggcgtgggtca

SEQ ID NO: 5042903 - DNA, 25 bp, Homo sapien
tcatccttttggtgatgagtgggct

SEQ ID NO: 5042904 - DNA, 25 bp, Homo sapien
gttcatccataccatagcattgtgt

SEQ ID NO: 5042905 - DNA, 25 bp, Homo sapien
tgtgtttagccggattgaggcccaa

SEQ ID NO: 5042906 - DNA, 25 bp, Homo sapien
ccaggagactcccaagggatatagt

SEQ ID NO: 5042907 - DNA, 25 bp, Homo sapien
gggatatagttacatgaagcacgag

SEQ ID NO: 5042908 - DNA, 25 bp, Homo sapien
gaggcccaagctatgtgaacgtgac

SEQ ID NO: 5042909 - DNA, 25 bp, Homo sapien
ggaagtggggtgcctggttggagct

SEQ ID NO: 5042910 - DNA, 25 bp, Homo sapien
ccaatagagcatctctgaatttgta

SEQ ID NO: 5042911 - DNA, 25 bp, Homo sapien
aggaagtggggtgcctggttggagc

SEQ ID NO: 5042912 - DNA, 25 bp, Homo sapien
cggacaacactggccaatagagcat

SEQ ID NO: 5042913 - DNA, 25 bp, Homo sapien
gattgactagataagaagcttggcc

SEQ ID NO: 5042914 - DNA, 25 bp, Homo sapien
ccctctggttttgggattggatctc

SEQ ID NO: 5042915 - DNA, 25 bp, Homo sapien
ccagtgaagtgcaggagagatgaca

SEQ ID NO: 5042916 - DNA, 25 bp, Homo sapien
gaatgtttttcacacgcttacagaa

SEQ ID NO: 5042917 - DNA, 25 bp, Homo sapien
taattcatctacaagcctagaggca

SEQ ID NO: 5042918 - DNA, 25 bp, Homo sapien
gatacatccaagcagttgggcaggg

SEQ ID NO: 5042919 - DNA, 25 bp, Homo sapien
gacaatggaggcatcggcagcagct

SEQ ID NO: 5042920 - DNA, 25 bp, Homo sapien
ccatcttgtgccaggttatgccatc

SEQ ID NO: 5042921 - DNA, 25 bp, Homo sapien
gccaaggtaggggatgtggaggaag

SEQ ID NO: 5042922 - DNA, 25 bp, Homo sapien
ggatgtggaggaagagcatttggca

SEQ ID NO: 5042923 - DNA, 25 bp, Homo sapien
ctggccaaggtaggggatgtggagg

SEQ ID NO: 5042924 - DNA, 25 bp, Homo sapien
gatgtggaggaagagcatttggcat

SEQ ID NO: 5042925 - DNA, 25 bp, Homo sapien
agcataggaggacttttggcttttg

SEQ ID NO: 5042926 - DNA, 25 bp, Homo sapien
gaagtgggactggatccaacttagc

SEQ ID NO: 5042927 - DNA, 25 bp, Homo sapien
gactggatccaacttagcataggag

SEQ ID NO: 5042928 - DNA, 25 bp, Homo sapien
aacttagcataggaggacttttggc

SEQ ID NO: 5042929 - DNA, 25 bp, Homo sapien
tctgctagcagtttattggttttat

SEQ ID NO: 5042930 - DNA, 25 bp, Homo sapien
tggttagtctgctagcagtttattg

SEQ ID NO: 5042931 - DNA, 25 bp, Homo sapien
ttagtctgctagcagtttattggtt

SEQ ID NO: 5042932 - DNA, 25 bp, Homo sapien
tttcttggttagtctgctagcagtt

SEQ ID NO: 5042933 - DNA, 25 bp, Homo sapien
tttcattctactaatcttgcgtttg

SEQ ID NO: 5042934 - DNA, 25 bp, Homo sapien
cattctactaatcttgcgtttggtt

SEQ ID NO: 5042935 - DNA, 25 bp, Homo sapien
tctttcattctactaatcttgcgtt

SEQ ID NO: 5042936 - DNA, 25 bp, Homo sapien
tcattctactaatcttgcgtttggt

SEQ ID NO: 5042937 - DNA, 25 bp, Homo sapien
cagaggcctttgttgagtagcttgg

SEQ ID NO: 5042938 - DNA, 25 bp, Homo sapien
acttgcagaggcctttgttgagtag

SEQ ID NO: 5042939 - DNA, 25 bp, Homo sapien
ggcctttgttgagtagcttgggatt

SEQ ID NO: 5042940 - DNA, 25 bp, Homo sapien
ttgttgagtagcttgggatttttcc

SEQ ID NO: 5042941 - DNA, 25 bp, Homo sapien
ttaaacagtctgaattccatttggg

SEQ ID NO: 5042942 - DNA, 25 bp, Homo sapien
tagcccctccaaaattgccatcttg

SEQ ID NO: 5042943 - DNA, 25 bp, Homo sapien
gcatgactcttgagtttgtgaacaa

SEQ ID NO: 5042944 - DNA, 25 bp, Homo sapien
ggatcacatcatagagcatgactct

SEQ ID NO: 5042945 - DNA, 25 bp, Homo sapien
aggcatccctgctgagagagtatag

SEQ ID NO: 5042946 - DNA, 25 bp, Homo sapien
gacatccgtagcctcctgaatctaa

SEQ ID NO: 5042947 - DNA, 25 bp, Homo sapien
tgagtgcttcagagttcatctgaga

SEQ ID NO: 5042948 - DNA, 25 bp, Homo sapien
tgagagtgtctatcggcaggcatcc

SEQ ID NO: 5042949 - DNA, 25 bp, Homo sapien
ggactcatgaacttctatcgtcaga

SEQ ID NO: 5042950 - DNA, 25 bp, Homo sapien
gaacttctatcgtcagataaatggg

SEQ ID NO: 5042951 - DNA, 25 bp, Homo sapien
tatcgtcagataaatgggtttggcc

SEQ ID NO: 5042952 - DNA, 25 bp, Homo sapien
ttcagtgttggactcatgaacttct

SEQ ID NO: 5042953 - DNA, 25 bp, Homo sapien
ctcagagcaagatcggatgggagtt

SEQ ID NO: 5042954 - DNA, 25 bp, Homo sapien
tcggcgcatggcattcagtggttca

SEQ ID NO: 5042955 - DNA, 25 bp, Homo sapien
actcagagcaagatcggatgggagt

SEQ ID NO: 5042956 - DNA, 25 bp, Homo sapien
gcccactcggcgcatggcattcagt

SEQ ID NO: 5042957 - DNA, 25 bp, Homo sapien
tctcataaacggttactgagatctg

SEQ ID NO: 5042958 - DNA, 25 bp, Homo sapien
cataaacggttactgagatctgatg

SEQ ID NO: 5042959 - DNA, 25 bp, Homo sapien
taaacggttactgagatctgatgct

SEQ ID NO: 5042960 - DNA, 25 bp, Homo sapien
ttaaatctcataaacggttactgag

SEQ ID NO: 5042961 - DNA, 25 bp, Homo sapien
gagagagcagatgcaacgaacctgt

SEQ ID NO: 5042962 - DNA, 25 bp, Homo sapien
tgtgaactgccgagggtctaagcaa

SEQ ID NO: 5042963 - DNA, 25 bp, Homo sapien
tgtatcttgccaaaggagagagcag

SEQ ID NO: 5042964 - DNA, 25 bp, Homo sapien
tctgtgcggccatgactgtgttgaa

SEQ ID NO: 5042965 - DNA, 25 bp, Homo sapien
tatacctttgcatttctaccgtctt

SEQ ID NO: 5042966 - DNA, 25 bp, Homo sapien
acctttgcatttctaccgtcttcca

SEQ ID NO: 5042967 - DNA, 25 bp, Homo sapien
tacctttgcatttctaccgtcttcc

SEQ ID NO: 5042968 - DNA, 25 bp, Homo sapien
cctttgcatttctaccgtcttccat

SEQ ID NO: 5042969 - DNA, 25 bp, Homo sapien
tgccctgccgctcctgtgcaatgtt

SEQ ID NO: 5042970 - DNA, 25 bp, Homo sapien
tgctgccgggtaaatcttcataaag

SEQ ID NO: 5042971 - DNA, 25 bp, Homo sapien
gctcctgtgcaatgtttccttatag

SEQ ID NO: 5042972 - DNA, 25 bp, Homo sapien
tcataaagcacgcttcctgccctgc

SEQ ID NO: 5042973 - DNA, 25 bp, Homo sapien
gggctgacttcaccaactttgaagg

SEQ ID NO: 5042974 - DNA, 25 bp, Homo sapien
tgaaggctgacaatgccacctgtac

SEQ ID NO: 5042975 - DNA, 25 bp, Homo sapien
caactttgaaggctgacaatgccac

SEQ ID NO: 5042976 - DNA, 25 bp, Homo sapien
caggtaggggctgacttcaccaact

SEQ ID NO: 5042977 - DNA, 25 bp, Homo sapien
gtgtcaacagtagcaacacctctat

SEQ ID NO: 5042978 - DNA, 25 bp, Homo sapien
tactatagacacacgcatctgagtt

SEQ ID NO: 5042979 - DNA, 25 bp, Homo sapien
gcaatggcccagcacggtcagtgtc

SEQ ID NO: 5042980 - DNA, 25 bp, Homo sapien
catctgagttgtttgttctctcacc

SEQ ID NO: 5042981 - DNA, 25 bp, Homo sapien
acctgccaccacgctcagctaattt

SEQ ID NO: 5042982 - DNA, 25 bp, Homo sapien
cctgccaccacgctcagctaatttt

SEQ ID NO: 5042983 - DNA, 25 bp, Homo sapien
cctcctggattcaaataattttcct

SEQ ID NO: 5042984 - DNA, 25 bp, Homo sapien
cctggattcaaataattttcctgcc

SEQ ID NO: 5042985 - DNA, 25 bp, Homo sapien
ggtgaatacctacaatcagttgacc

SEQ ID NO: 5042986 - DNA, 25 bp, Homo sapien
aggagattactttccataatgtgag

SEQ ID NO: 5042987 - DNA, 25 bp, Homo sapien
cctggctgggaaggtattttacaga

SEQ ID NO: 5042988 - DNA, 25 bp, Homo sapien
gaaggccttcacagcaaaaactcag

SEQ ID NO: 5042989 - DNA, 25 bp, Homo sapien
cacttgggttctcatcccccatggg

SEQ ID NO: 5042990 - DNA, 25 bp, Homo sapien
gggccaccttcctcattcaggcttg

SEQ ID NO: 5042991 - DNA, 25 bp, Homo sapien
gctgacatctcacttggctgctttt

SEQ ID NO: 5042992 - DNA, 25 bp, Homo sapien
gccaccttcctcattcaggcttgcc

SEQ ID NO: 5042993 - DNA, 25 bp, Homo sapien
tttactgatgtcaggattttttccc

SEQ ID NO: 5042994 - DNA, 25 bp, Homo sapien
tgtttcctctgcaccaaacactgat

SEQ ID NO: 5042995 - DNA, 25 bp, Homo sapien
tgcaccaaacactgatccaactctt

SEQ ID NO: 5042996 - DNA, 25 bp, Homo sapien
ttcttcttaggccaacttttactga

SEQ ID NO: 5042997 - DNA, 25 bp, Homo sapien
aatactgtagtagagactgtctgaa

SEQ ID NO: 5042998 - DNA, 25 bp, Homo sapien
catgggaaatactgtagtagagact

SEQ ID NO: 5042999 - DNA, 25 bp, Homo sapien
actatcacatgggaaatactgtagt

SEQ ID NO: 5043000 - DNA, 25 bp, Homo sapien
gtagagactgtctgaaactgctatt

SEQ ID NO: 5043001 - DNA, 25 bp, Homo sapien
tgtccccatgcttctgacttaaagc

SEQ ID NO: 5043002 - DNA, 25 bp, Homo sapien
tctgtgtccccatgcttctgactta

SEQ ID NO: 5043003 - DNA, 25 bp, Homo sapien
ctctgtgtccccatgcttctgactt

SEQ ID NO: 5043004 - DNA, 25 bp, Homo sapien
tgtgtccccatgcttctgacttaaa

SEQ ID NO: 5043005 - DNA, 25 bp, Homo sapien
ctgagctccatgtatatgggctacc

SEQ ID NO: 5043006 - DNA, 25 bp, Homo sapien
tggttgaagcaataccacagctcag

SEQ ID NO: 5043007 - DNA, 25 bp, Homo sapien
tttggcattggttgaagcaatacca

SEQ ID NO: 5043008 - DNA, 25 bp, Homo sapien
catgtatatgggctacccaagaaga

SEQ ID NO: 5043009 - DNA, 25 bp, Homo sapien
ctatgcatggaccagaagcaccttt

SEQ ID NO: 5043010 - DNA, 25 bp, Homo sapien
catggaccagaagcacctttttatt

SEQ ID NO: 5043011 - DNA, 25 bp, Homo sapien
tatgcatggaccagaagcacctttt

SEQ ID NO: 5043012 - DNA, 25 bp, Homo sapien
tgcatggaccagaagcaccttttta

SEQ ID NO: 5043013 - DNA, 25 bp, Homo sapien
tggcaacccctacaggctgaggaca

SEQ ID NO: 5043014 - DNA, 25 bp, Homo sapien
ggcactgactgggatgtctgtgttc

SEQ ID NO: 5043015 - DNA, 25 bp, Homo sapien
ggtggccccactttgtgcaactggt

SEQ ID NO: 5043016 - DNA, 25 bp, Homo sapien
ccagtggggacctgatggcaacccc

SEQ ID NO: 5043017 - DNA, 25 bp, Homo sapien
cacgtcttgggcctggatacacatt

SEQ ID NO: 5043018 - DNA, 25 bp, Homo sapien
tacaaaagcggcatgtccttccacg

SEQ ID NO: 5043019 - DNA, 25 bp, Homo sapien
tgaggacttgcacgtctttcccagt

SEQ ID NO: 5043020 - DNA, 25 bp, Homo sapien
tgacttcactaactgtaactggacc

SEQ ID NO: 5043021 - DNA, 25 bp, Homo sapien
aacatacgaagcacgcaggcacacg

SEQ ID NO: 5043022 - DNA, 25 bp, Homo sapien
cacacgcacgagagcccaggcgggt

SEQ ID NO: 5043023 - DNA, 25 bp, Homo sapien
aaacatacgaagcacgcaggcacac

SEQ ID NO: 5043024 - DNA, 25 bp, Homo sapien
aggcacacgcacgagagcccaggcg

SEQ ID NO: 5043025 - DNA, 25 bp, Homo sapien
gtgctgtgtgctcataaactcttcc

SEQ ID NO: 5043026 - DNA, 25 bp, Homo sapien
tgttgatccatacggctgactgtgc

SEQ ID NO: 5043027 - DNA, 25 bp, Homo sapien
ccttttgcattgatggacttggcac

SEQ ID NO: 5043028 - DNA, 25 bp, Homo sapien
gtggacataatgcaagcagaggcct

SEQ ID NO: 5043029 - DNA, 25 bp, Homo sapien
gaactggtacagctgacttgtaaac

SEQ ID NO: 5043030 - DNA, 25 bp, Homo sapien
tgaactggtacagctgacttgtaaa

SEQ ID NO: 5043031 - DNA, 25 bp, Homo sapien
cctgggtggctgaaggtttaccctg

SEQ ID NO: 5043032 - DNA, 25 bp, Homo sapien
ttgggatggtttccaggtcacttgc

SEQ ID NO: 5043033 - DNA, 25 bp, Homo sapien
gacacagctggtgaatctgggatct

SEQ ID NO: 5043034 - DNA, 25 bp, Homo sapien
ttcctccctaaggtggcgtctggct

SEQ ID NO: 5043035 - DNA, 25 bp, Homo sapien
gccactttgcttcctgacatggctt

SEQ ID NO: 5043036 - DNA, 25 bp, Homo sapien
tgcttcctgacatggctttgtgagg

SEQ ID NO: 5043037 - DNA, 25 bp, Homo sapien
tgtggctctgccactttgcttcctg

SEQ ID NO: 5043038 - DNA, 25 bp, Homo sapien
ctttgtgaggtttgctggggttctc

SEQ ID NO: 5043039 - DNA, 25 bp, Homo sapien
aggcataggcttctgggtcctttcc

SEQ ID NO: 5043040 - DNA, 25 bp, Homo sapien
gaaggcataggcttctgggtccttt

SEQ ID NO: 5043041 - DNA, 25 bp, Homo sapien
caggaaggcataggcttctgggtcc

SEQ ID NO: 5043042 - DNA, 25 bp, Homo sapien
tcaccaggaaggcataggcttctgg

SEQ ID NO: 5043043 - DNA, 25 bp, Homo sapien
taaatgtagcaagtaaattcctggc

SEQ ID NO: 5043044 - DNA, 25 bp, Homo sapien
ttcctggctaaagaacaagccttcc

SEQ ID NO: 5043045 - DNA, 25 bp, Homo sapien
tctacttataggaacccacttgctg

SEQ ID NO: 5043046 - DNA, 25 bp, Homo sapien
gaagggctcaatagccagtgctctt

SEQ ID NO: 5043047 - DNA, 25 bp, Homo sapien
gcccttggctgttctggggtccata

SEQ ID NO: 5043048 - DNA, 25 bp, Homo sapien
ggctgttctggggtccatattgctc

SEQ ID NO: 5043049 - DNA, 25 bp, Homo sapien
cccttggctgttctggggtccatat

SEQ ID NO: 5043050 - DNA, 25 bp, Homo sapien
cttggctgttctggggtccatattg

SEQ ID NO: 5043051 - DNA, 25 bp, Homo sapien
accttccctgtcatagcacctggca

SEQ ID NO: 5043052 - DNA, 25 bp, Homo sapien
gtaagccagtcttttacagttgacc

SEQ ID NO: 5043053 - DNA, 25 bp, Homo sapien
cgttggattaatgttgggttcactt

SEQ ID NO: 5043054 - DNA, 25 bp, Homo sapien
cacagtcatgctcagaaacgttgga

SEQ ID NO: 5043055 - DNA, 25 bp, Homo sapien
ctttgagcaaaccattaaaccacca

SEQ ID NO: 5043056 - DNA, 25 bp, Homo sapien
cattaaaccaccagaggattctctt

SEQ ID NO: 5043057 - DNA, 25 bp, Homo sapien
tgagcaaaccattaaaccaccagag

SEQ ID NO: 5043058 - DNA, 25 bp, Homo sapien
gcaaaccattaaaccaccagaggat

SEQ ID NO: 5043059 - DNA, 25 bp, Homo sapien
cacgttgaaaaactctgctgaaggc

SEQ ID NO: 5043060 - DNA, 25 bp, Homo sapien
tgtttgctggccttgagagcacagc

SEQ ID NO: 5043061 - DNA, 25 bp, Homo sapien
caaggccagtggagacatcgactgg

SEQ ID NO: 5043062 - DNA, 25 bp, Homo sapien
cacgttggaagtagaaaatggatca

SEQ ID NO: 5043063 - DNA, 25 bp, Homo sapien
gagtccttgcctgatttataggtgt

SEQ ID NO: 5043064 - DNA, 25 bp, Homo sapien
ctgagtccttgcctgatttataggt

SEQ ID NO: 5043065 - DNA, 25 bp, Homo sapien
tccttgcctgatttataggtgtttg

SEQ ID NO: 5043066 - DNA, 25 bp, Homo sapien
cttgcctgatttataggtgtttggc

SEQ ID NO: 5043067 - DNA, 25 bp, Homo sapien
tgactagagattgggaatgcctgct

SEQ ID NO: 5043068 - DNA, 25 bp, Homo sapien
tctccccacgggaaagtgagcagct

SEQ ID NO: 5043069 - DNA, 25 bp, Homo sapien
gagcagctcagatgattggcgtgaa

SEQ ID NO: 5043070 - DNA, 25 bp, Homo sapien
cagtgtatttgtggagcccttcaag

SEQ ID NO: 5043071 - DNA, 25 bp, Homo sapien
gcttggatctggtcttgaatatcca

SEQ ID NO: 5043072 - DNA, 25 bp, Homo sapien
gatctggtcttgaatatccacagat

SEQ ID NO: 5043073 - DNA, 25 bp, Homo sapien
tggatctggtcttgaatatccacag

SEQ ID NO: 5043074 - DNA, 25 bp, Homo sapien
cttggatctggtcttgaatatccac

SEQ ID NO: 5043075 - DNA, 25 bp, Homo sapien
tcaggcttctgttccccagtctgac

SEQ ID NO: 5043076 - DNA, 25 bp, Homo sapien
tggacaaggctgttgccgtgctgaa

SEQ ID NO: 5043077 - DNA, 25 bp, Homo sapien
aggaaagcgtgtcccctggacaagg

SEQ ID NO: 5043078 - DNA, 25 bp, Homo sapien
tgttgccgtgctgaaggcctctgca

SEQ ID NO: 5043079 - DNA, 25 bp, Homo sapien
aaagcgtgtcccctggacaaggctg

SEQ ID NO: 5043080 - DNA, 25 bp, Homo sapien
gttcttgactgttggagactggagt

SEQ ID NO: 5043081 - DNA, 25 bp, Homo sapien
gaggatctatttgttcttgactgtt

SEQ ID NO: 5043082 - DNA, 25 bp, Homo sapien
ttcttgactgttggagactggagtg

SEQ ID NO: 5043083 - DNA, 25 bp, Homo sapien
actttgaggatctatttgttcttga

SEQ ID NO: 5043084 - DNA, 25 bp, Homo sapien
tcctggtgggctctaaagcaatcag

SEQ ID NO: 5043085 - DNA, 25 bp, Homo sapien
tgatgggctccacggacagaaagaa

SEQ ID NO: 5043086 - DNA, 25 bp, Homo sapien
aaaggactgcgcgtactgggaacag

SEQ ID NO: 5043087 - DNA, 25 bp, Homo sapien
gaaggcccctgtagaaataatgaga

SEQ ID NO: 5043088 - DNA, 25 bp, Homo sapien
ggccccaacagcaggcccctcttta

SEQ ID NO: 5043089 - DNA, 25 bp, Homo sapien
gcttcaggtctgtcggccccaacag

SEQ ID NO: 5043090 - DNA, 25 bp, Homo sapien
tcggccccaacagcaggcccctctt

SEQ ID NO: 5043091 - DNA, 25 bp, Homo sapien
ctgcttcaggtctgtcggccccaac

SEQ ID NO: 5043092 - DNA, 25 bp, Homo sapien
gccaggttcacagttttgccccaaa

SEQ ID NO: 5043093 - DNA, 25 bp, Homo sapien
agatttgtcggtgccttcagcctgg

SEQ ID NO: 5043094 - DNA, 25 bp, Homo sapien
gatctcccctcggtaatcaaaggca

SEQ ID NO: 5043095 - DNA, 25 bp, Homo sapien
tgtgccgctgggtgacaacaaagtc

SEQ ID NO: 5043096 - DNA, 25 bp, Homo sapien
tatgctttctgtcagggcgagtgag

SEQ ID NO: 5043097 - DNA, 25 bp, Homo sapien
caatccggagttcaaaattgttgaa

SEQ ID NO: 5043098 - DNA, 25 bp, Homo sapien
ttctgtcagggcgagtgagaagtca

SEQ ID NO: 5043099 - DNA, 25 bp, Homo sapien
tgaatgcttgttgatctcctgtatg

SEQ ID NO: 5043100 - DNA, 25 bp, Homo sapien
acaggcctgacacggccatgtaggt

SEQ ID NO: 5043101 - DNA, 25 bp, Homo sapien
tttcaatgtcttgaaatcggtcttc

SEQ ID NO: 5043102 - DNA, 25 bp, Homo sapien
cttgaaatcggtcttcaccaagcaa

SEQ ID NO: 5043103 - DNA, 25 bp, Homo sapien
ttttcaggtgacaggcctgacacgg

SEQ ID NO: 5043104 - DNA, 25 bp, Homo sapien
cacgctggtttaaaggcaggaacca

SEQ ID NO: 5043105 - DNA, 25 bp, Homo sapien
acgctggtttaaaggcaggaaccag

SEQ ID NO: 5043106 - DNA, 25 bp, Homo sapien
gccacgctggtttaaaggcaggaac

SEQ ID NO: 5043107 - DNA, 25 bp, Homo sapien
cctgccacgctggtttaaaggcagg

SEQ ID NO: 5043108 - DNA, 25 bp, Homo sapien
ggttattgcaaacacagtcttggag

SEQ ID NO: 5043109 - DNA, 25 bp, Homo sapien
tcagatgtgagagggctcttcagcc

SEQ ID NO: 5043110 - DNA, 25 bp, Homo sapien
gcatagagtggtccctgatcagccc

SEQ ID NO: 5043111 - DNA, 25 bp, Homo sapien
tgatcagcccatttgtggaagtcag

SEQ ID NO: 5043112 - DNA, 25 bp, Homo sapien
cagtgacttcttgtgtaagggcaac

SEQ ID NO: 5043113 - DNA, 25 bp, Homo sapien
tgacttcttgtgtaagggcaactca

SEQ ID NO: 5043114 - DNA, 25 bp, Homo sapien
taagggcaactcatagtcaccctgc

SEQ ID NO: 5043115 - DNA, 25 bp, Homo sapien
cttgtgtaagggcaactcatagtca

SEQ ID NO: 5043116 - DNA, 25 bp, Homo sapien
atctcattgagcaagcgcaggcatt

SEQ ID NO: 5043117 - DNA, 25 bp, Homo sapien
ctcattgagcaagcgcaggcattcc

SEQ ID NO: 5043118 - DNA, 25 bp, Homo sapien
ccactccctggttattcatttcagt

SEQ ID NO: 5043119 - DNA, 25 bp, Homo sapien
ttgagcaagcgcaggcattccactc

SEQ ID NO: 5043120 - DNA, 25 bp, Homo sapien
gaggcaaacatcaccccaacagcat

SEQ ID NO: 5043121 - DNA, 25 bp, Homo sapien
catcataggattgagaatacagctc

SEQ ID NO: 5043122 - DNA, 25 bp, Homo sapien
gagagtaaaagtccgcaaatcctgg

SEQ ID NO: 5043123 - DNA, 25 bp, Homo sapien
taaaagtccgcaaatcctgggatgg

SEQ ID NO: 5043124 - DNA, 25 bp, Homo sapien
gcctgtactcgccaaaggaagtcca

SEQ ID NO: 5043125 - DNA, 25 bp, Homo sapien
gttctcattgtgttccctcagctcc

SEQ ID NO: 5043126 - DNA, 25 bp, Homo sapien
tggctgggtaagatattccggagca

SEQ ID NO: 5043127 - DNA, 25 bp, Homo sapien
ttctctaggaaatggcgggccacat

SEQ ID NO: 5043128 - DNA, 25 bp, Homo sapien
aagaggagaatgaggtaaacttctg

SEQ ID NO: 5043129 - DNA, 25 bp, Homo sapien
ctgcagtacatgtgagagaaagagg

SEQ ID NO: 5043130 - DNA, 25 bp, Homo sapien
atgaggtaaacttctgaggtgtagg

SEQ ID NO: 5043131 - DNA, 25 bp, Homo sapien
tgcagtacatgtgagagaaagagga

SEQ ID NO: 5043132 - DNA, 25 bp, Homo sapien
gtctttattaggaattgattcttta

SEQ ID NO: 5043133 - DNA, 25 bp, Homo sapien
gaaccacaacttgccacaggcagct

SEQ ID NO: 5043134 - DNA, 25 bp, Homo sapien
tttaagaaccacaacttgccacagg

SEQ ID NO: 5043135 - DNA, 25 bp, Homo sapien
ttctttaagaaccacaacttgccac

SEQ ID NO: 5043136 - DNA, 25 bp, Homo sapien
gaggaacatggccatcagtagcagt

SEQ ID NO: 5043137 - DNA, 25 bp, Homo sapien
tgctgtccatggtagaacacagcca

SEQ ID NO: 5043138 - DNA, 25 bp, Homo sapien
ccatcagtagcagtgatacctcctt

SEQ ID NO: 5043139 - DNA, 25 bp, Homo sapien
aacatggccatcagtagcagtgata

SEQ ID NO: 5043140 - DNA, 25 bp, Homo sapien
tcataacgcagaaagaggcctgcgt

SEQ ID NO: 5043141 - DNA, 25 bp, Homo sapien
tgccagcttcaggacggagttcagc

SEQ ID NO: 5043142 - DNA, 25 bp, Homo sapien
actgtggttgaggttgtcataacgc

SEQ ID NO: 5043143 - DNA, 25 bp, Homo sapien
cctgcgtagacggtctcagtgagca

SEQ ID NO: 5043144 - DNA, 25 bp, Homo sapien
ctctgggtaggagcagatatctgta

SEQ ID NO: 5043145 - DNA, 25 bp, Homo sapien
ggtaggagcagatatctgtaaacac

SEQ ID NO: 5043146 - DNA, 25 bp, Homo sapien
ggaattgaaagtcaggttcttcaag

SEQ ID NO: 5043147 - DNA, 25 bp, Homo sapien
tcgacttgtcaaaatcacaccacag

SEQ ID NO: 5043148 - DNA, 25 bp, Homo sapien
atcaaaatggatgcaaagatgatga

SEQ ID NO: 5043149 - DNA, 25 bp, Homo sapien
gaccagagccgagtgcagcataatc

SEQ ID NO: 5043150 - DNA, 25 bp, Homo sapien
aacatttataatcctctgctgtggt

SEQ ID NO: 5043151 - DNA, 25 bp, Homo sapien
cgttccgggccaaataggtctcatt

SEQ ID NO: 5043152 - DNA, 25 bp, Homo sapien
aagtttgacttgaacacttcatccc

SEQ ID NO: 5043153 - DNA, 25 bp, Homo sapien
tagaagaacgataaatgcacagacc

SEQ ID NO: 5043154 - DNA, 25 bp, Homo sapien
gacttgaacacttcatccctcattt

SEQ ID NO: 5043155 - DNA, 25 bp, Homo sapien
gcaaactttgtattgccgtgataaa

SEQ ID NO: 5043156 - DNA, 25 bp, Homo sapien
caaaactacctccttgattgctcaa

SEQ ID NO: 5043157 - DNA, 25 bp, Homo sapien
ctcccggccgggtttgattgttctg

SEQ ID NO: 5043158 - DNA, 25 bp, Homo sapien
tctgggaggctatttctggctttgt

SEQ ID NO: 5043159 - DNA, 25 bp, Homo sapien
gattgctcaagctaatcagcctttt

SEQ ID NO: 5043160 - DNA, 25 bp, Homo sapien
tgaaatatctaatccttggctggct

SEQ ID NO: 5043161 - DNA, 25 bp, Homo sapien
catggcctttgggaatgataaaaca

SEQ ID NO: 5043162 - DNA, 25 bp, Homo sapien
ccatgcctgatggactcccaaggaa

SEQ ID NO: 5043163 - DNA, 25 bp, Homo sapien
tagagtgaacactctgagccatgcc

SEQ ID NO: 5043164 - DNA, 25 bp, Homo sapien
tggtcactgcttgtgctccagtgat

SEQ ID NO: 5043165 - DNA, 25 bp, Homo sapien
agattaatgacggttggaaccctgg

SEQ ID NO: 5043166 - DNA, 25 bp, Homo sapien
gggagattgttggaagcacctcttc

SEQ ID NO: 5043167 - DNA, 25 bp, Homo sapien
gagctacaaggctgtacttgcttag

SEQ ID NO: 5043168 - DNA, 25 bp, Homo sapien
taagcctcattcagagccatttccc

SEQ ID NO: 5043169 - DNA, 25 bp, Homo sapien
ctaagcctcattcagagccatttcc

SEQ ID NO: 5043170 - DNA, 25 bp, Homo sapien
gccactccgcaagtcgatggtatgt

SEQ ID NO: 5043171 - DNA, 25 bp, Homo sapien
caggcccagactggacatgcaaagc

SEQ ID NO: 5043172 - DNA, 25 bp, Homo sapien
tcttgttaatttcctcaggcccaga

SEQ ID NO: 5043173 - DNA, 25 bp, Homo sapien
gaatttcttgttagggcagccagag

SEQ ID NO: 5043174 - DNA, 25 bp, Homo sapien
tgtttccgatttctgaacaagatct

SEQ ID NO: 5043175 - DNA, 25 bp, Homo sapien
agacctgtttccgatttctgaacaa

SEQ ID NO: 5043176 - DNA, 25 bp, Homo sapien
gatttctgaacaagatctacatcca

SEQ ID NO: 5043177 - DNA, 25 bp, Homo sapien
tccgatttctgaacaagatctacat

SEQ ID NO: 5043178 - DNA, 25 bp, Homo sapien
tgcattcatggccaagcagaaggag

SEQ ID NO: 5043179 - DNA, 25 bp, Homo sapien
gagagatagtttgatcatttgcaat

SEQ ID NO: 5043180 - DNA, 25 bp, Homo sapien
tgcaattatggtgttcattggagaa

SEQ ID NO: 5043181 - DNA, 25 bp, Homo sapien
tctggattggagatgcacacgagca

SEQ ID NO: 5043182 - DNA, 25 bp, Homo sapien
aatgtggccccactgtttctccggt

SEQ ID NO: 5043183 - DNA, 25 bp, Homo sapien
tagtcaccgttgagacagtccagcg

SEQ ID NO: 5043184 - DNA, 25 bp, Homo sapien
tctccggtctgaggagctcactgac

SEQ ID NO: 5043185 - DNA, 25 bp, Homo sapien
gactccttgacgatatcttcaggca

SEQ ID NO: 5043186 - DNA, 25 bp, Homo sapien
caagaccagacatcaaactgccact

SEQ ID NO: 5043187 - DNA, 25 bp, Homo sapien
tccagattcgagtttgtttgcaata

SEQ ID NO: 5043188 - DNA, 25 bp, Homo sapien
ttccttagtcccaaaacaccgcaca

SEQ ID NO: 5043189 - DNA, 25 bp, Homo sapien
accgagccggagtggattccaatcc

SEQ ID NO: 5043190 - DNA, 25 bp, Homo sapien
gtgttttgtccttgaccgcacatac

SEQ ID NO: 5043191 - DNA, 25 bp, Homo sapien
tcgtgttttgtccttgaccgcacat

SEQ ID NO: 5043192 - DNA, 25 bp, Homo sapien
cgtgttttgtccttgaccgcacata

SEQ ID NO: 5043193 - DNA, 25 bp, Homo sapien
cagcaaataaagagggtcaacacga

SEQ ID NO: 5043194 - DNA, 25 bp, Homo sapien
aaattggaacaagcaactttgcagc

SEQ ID NO: 5043195 - DNA, 25 bp, Homo sapien
actatagaagtctgagccaattgca

SEQ ID NO: 5043196 - DNA, 25 bp, Homo sapien
gatcaggaagaataaggtcctctcc

SEQ ID NO: 5043197 - DNA, 25 bp, Homo sapien
ccctgtgctggaatggtaatccagc

SEQ ID NO: 5043198 - DNA, 25 bp, Homo sapien
tggtaatccagctgtcttcgaagag

SEQ ID NO: 5043199 - DNA, 25 bp, Homo sapien
cagaattactctggatccactttga

SEQ ID NO: 5043200 - DNA, 25 bp, Homo sapien
tcttcgaagaggcttggatgcatgc

SEQ ID NO: 5043201 - DNA, 25 bp, Homo sapien
agctttcatttagaggctgtacgcc

SEQ ID NO: 5043202 - DNA, 25 bp, Homo sapien
actgccttctttcaaccaaacgtgg

SEQ ID NO: 5043203 - DNA, 25 bp, Homo sapien
gaggctgtacgcctattgcccactg

SEQ ID NO: 5043204 - DNA, 25 bp, Homo sapien
cagacagcactccacttgaagactg

SEQ ID NO: 5043205 - DNA, 25 bp, Homo sapien
tgagacccatttcaacacagcagtg

SEQ ID NO: 5043206 - DNA, 25 bp, Homo sapien
ccccaggattttaatacgaaggcag

SEQ ID NO: 5043207 - DNA, 25 bp, Homo sapien
caggattttaatacgaaggcagtga

SEQ ID NO: 5043208 - DNA, 25 bp, Homo sapien
ttttaatacgaaggcagtgatgctc

SEQ ID NO: 5043209 - DNA, 25 bp, Homo sapien
gttggtaaatcctttaacatctgca

SEQ ID NO: 5043210 - DNA, 25 bp, Homo sapien
caaggtcgtggagaggttggtaaat

SEQ ID NO: 5043211 - DNA, 25 bp, Homo sapien
agctcctgagcagacaaggtcgtgg

SEQ ID NO: 5043212 - DNA, 25 bp, Homo sapien
aggttggtaaatcctttaacatctg

SEQ ID NO: 5043213 - DNA, 25 bp, Homo sapien
gctctgagaatagcccgggagcaac

SEQ ID NO: 5043214 - DNA, 25 bp, Homo sapien
agcaacagggccggcggctggtttc

SEQ ID NO: 5043215 - DNA, 25 bp, Homo sapien
tgcatcaattctcctccccctagta

SEQ ID NO: 5043216 - DNA, 25 bp, Homo sapien
cacgctgctctgagaatagcccggg

SEQ ID NO: 5043217 - DNA, 25 bp, Homo sapien
gatgtagatccgatggaactggtgc

SEQ ID NO: 5043218 - DNA, 25 bp, Homo sapien
ggtcatgtcgttgatcatttccagg

SEQ ID NO: 5043219 - DNA, 25 bp, Homo sapien
ctgacgttctcatagcgatggatgt

SEQ ID NO: 5043220 - DNA, 25 bp, Homo sapien
tccaggacaacaaaccgggggagca

SEQ ID NO: 5043221 - DNA, 25 bp, Homo sapien
ctgggatgccttctctaactggtct

SEQ ID NO: 5043222 - DNA, 25 bp, Homo sapien
tgctgaagtgacactacctccatga

SEQ ID NO: 5043223 - DNA, 25 bp, Homo sapien
catgaagttcccccaagtcctcgta

SEQ ID NO: 5043224 - DNA, 25 bp, Homo sapien
tctaactggtctgctgaagtgacac

SEQ ID NO: 5043225 - DNA, 25 bp, Homo sapien
caggagtttcgctacttctatcaag

SEQ ID NO: 5043226 - DNA, 25 bp, Homo sapien
gctgacctctcccaagcagaaagga

SEQ ID NO: 5043227 - DNA, 25 bp, Homo sapien
tgggtggtccaatcagttttaggcc

SEQ ID NO: 5043228 - DNA, 25 bp, Homo sapien
gccatggtgcacagatattagatta

SEQ ID NO: 5043229 - DNA, 25 bp, Homo sapien
agaggagactgcatgagtgggctct

SEQ ID NO: 5043230 - DNA, 25 bp, Homo sapien
aagaggacaagagcttgcatgggcg

SEQ ID NO: 5043231 - DNA, 25 bp, Homo sapien
gcagcctgaatgtctgggcttccta

SEQ ID NO: 5043232 - DNA, 25 bp, Homo sapien
acaagagcttgcatgggcgggctcc

SEQ ID NO: 5043233 - DNA, 25 bp, Homo sapien
gagactgcatgagtgggctccctgt

SEQ ID NO: 5043234 - DNA, 25 bp, Homo sapien
aggagactgcatgagtgggctccct

SEQ ID NO: 5043235 - DNA, 25 bp, Homo sapien
ggagaggagactgcatgagtgggct

SEQ ID NO: 5043236 - DNA, 25 bp, Homo sapien
gagaggagactgcatgagtgggctc

SEQ ID NO: 5043237 - DNA, 25 bp, Homo sapien
tgaattggcacagatcccatggaaa

SEQ ID NO: 5043238 - DNA, 25 bp, Homo sapien
caaagcattaagaacagttgaataa

SEQ ID NO: 5043239 - DNA, 25 bp, Homo sapien
tctctgaattggcacagatcccatg

SEQ ID NO: 5043240 - DNA, 25 bp, Homo sapien
cagctcttgttgtgacaaagcatta

SEQ ID NO: 5043241 - DNA, 25 bp, Homo sapien
ctttggttctctgtctccaggcgca

SEQ ID NO: 5043242 - DNA, 25 bp, Homo sapien
ttggttctctgtctccaggcgcagc

SEQ ID NO: 5043243 - DNA, 25 bp, Homo sapien
ggttctctgtctccaggcgcagcct

SEQ ID NO: 5043244 - DNA, 25 bp, Homo sapien
tctctgtctccaggcgcagcctggc

SEQ ID NO: 5043245 - DNA, 25 bp, Homo sapien
caggtaactgatgaagattccagct

SEQ ID NO: 5043246 - DNA, 25 bp, Homo sapien
ccggtctgacaggtaactgatgaag

SEQ ID NO: 5043247 - DNA, 25 bp, Homo sapien
taactgatgaagattccagctgtgt

SEQ ID NO: 5043248 - DNA, 25 bp, Homo sapien
ctgacaggtaactgatgaagattcc

SEQ ID NO: 5043249 - DNA, 25 bp, Homo sapien
ctatcttttaggctgtccccctctc

SEQ ID NO: 5043250 - DNA, 25 bp, Homo sapien
atcttttaggctgtccccctctcac

SEQ ID NO: 5043251 - DNA, 25 bp, Homo sapien
tatcttttaggctgtccccctctca

SEQ ID NO: 5043252 - DNA, 25 bp, Homo sapien
actgctctatagctcctgtcagttc

SEQ ID NO: 5043253 - DNA, 25 bp, Homo sapien
tgttatcatactgctctatagctcc

SEQ ID NO: 5043254 - DNA, 25 bp, Homo sapien
catactgctctatagctcctgtcag

SEQ ID NO: 5043255 - DNA, 25 bp, Homo sapien
gcaaactgttatcatactgctctat

SEQ ID NO: 5043256 - DNA, 25 bp, Homo sapien
ggtagtgtcagcagttcctaaggaa

SEQ ID NO: 5043257 - DNA, 25 bp, Homo sapien
cagcagttcctaaggaagtttttgg

SEQ ID NO: 5043258 - DNA, 25 bp, Homo sapien
tctcctcctccatagcagatggcag

SEQ ID NO: 5043259 - DNA, 25 bp, Homo sapien
cagatggcagtgtcaaggaggtagt

SEQ ID NO: 5043260 - DNA, 25 bp, Homo sapien
atgtgatggttactatggcaatttt

SEQ ID NO: 5043261 - DNA, 25 bp, Homo sapien
tgtgatggttactatggcaattttt

SEQ ID NO: 5043262 - DNA, 25 bp, Homo sapien
cagatagctgtggatgaaatctcgt

SEQ ID NO: 5043263 - DNA, 25 bp, Homo sapien
tttggaatcagatagctgtggatga

SEQ ID NO: 5043264 - DNA, 25 bp, Homo sapien
caaagggaaatgctgtaacaactct

SEQ ID NO: 5043265 - DNA, 25 bp, Homo sapien
cgtattcatcatatgaccaaaggga

SEQ ID NO: 5043266 - DNA, 25 bp, Homo sapien
tcaaacaaacacaattctccattta

SEQ ID NO: 5043267 - DNA, 25 bp, Homo sapien
aacacaattctccatttaaacacac

SEQ ID NO: 5043268 - DNA, 25 bp, Homo sapien
caaacaaacacaattctccatttaa

SEQ ID NO: 5043269 - DNA, 25 bp, Homo sapien
acaaacacaattctccatttaaaca

SEQ ID NO: 5043270 - DNA, 25 bp, Homo sapien
tgacacttgaatattgccaggcaag

SEQ ID NO: 5043271 - DNA, 25 bp, Homo sapien
cccacttattcttaagcaggtactt

SEQ ID NO: 5043272 - DNA, 25 bp, Homo sapien
ccacttattcttaagcaggtacttg

SEQ ID NO: 5043273 - DNA, 25 bp, Homo sapien
gtggtgacacttgaatattgccagg

SEQ ID NO: 5043274 - DNA, 25 bp, Homo sapien
gaagtggtgagaatgctagcatatg

SEQ ID NO: 5043275 - DNA, 25 bp, Homo sapien
gagtgttggggtggttcagcggagc

SEQ ID NO: 5043276 - DNA, 25 bp, Homo sapien
gttggggtggttcagcggagcatgg

SEQ ID NO: 5043277 - DNA, 25 bp, Homo sapien
cactggggagtgttggggtggttca

SEQ ID NO: 5043278 - DNA, 25 bp, Homo sapien
tgtccattggcacagcttctctctg

SEQ ID NO: 5043279 - DNA, 25 bp, Homo sapien
cagggcccaaagagctgcgtatcat

SEQ ID NO: 5043280 - DNA, 25 bp, Homo sapien
ctgagatggcttgggcagggcccaa

SEQ ID NO: 5043281 - DNA, 25 bp, Homo sapien
ctctctggctgagatggcttgggca

SEQ ID NO: 5043282 - DNA, 25 bp, Homo sapien
atgtttagaaggataatcactaaag

SEQ ID NO: 5043283 - DNA, 25 bp, Homo sapien
tgtttagaaggataatcactaaagg

SEQ ID NO: 5043284 - DNA, 25 bp, Homo sapien
gaatgggtcaccttctaaatctgga

SEQ ID NO: 5043285 - DNA, 25 bp, Homo sapien
gagatgttaaggaatgggtcacctt

SEQ ID NO: 5043286 - DNA, 25 bp, Homo sapien
cctgctgcgactctcctgaggagag

SEQ ID NO: 5043287 - DNA, 25 bp, Homo sapien
tctcctgctccggagactgcagacc

SEQ ID NO: 5043288 - DNA, 25 bp, Homo sapien
gaaaatgacccctcggtagctatag

SEQ ID NO: 5043289 - DNA, 25 bp, Homo sapien
ggtagaggcgttccaaatcccgaga

SEQ ID NO: 5043290 - DNA, 25 bp, Homo sapien
cctttggcccaagaaatagcgctgg

SEQ ID NO: 5043291 - DNA, 25 bp, Homo sapien
tatgaccacttggaggatgacctgc

SEQ ID NO: 5043292 - DNA, 25 bp, Homo sapien
tgcctccccggtgcccgtgaatgaa

SEQ ID NO: 5043293 - DNA, 25 bp, Homo sapien
cggtgcccgtgaatgaagcgctgct

SEQ ID NO: 5043294 - DNA, 25 bp, Homo sapien
gcccgtgaatgaagcgctgctccgt

SEQ ID NO: 5043295 - DNA, 25 bp, Homo sapien
gtgaatgaagcgctgctccgtgatg

SEQ ID NO: 5043296 - DNA, 25 bp, Homo sapien
tggatggtgtagagttcctcgctgc

SEQ ID NO: 5043297 - DNA, 25 bp, Homo sapien
gtaaggcagcgcacatcggagagct

SEQ ID NO: 5043298 - DNA, 25 bp, Homo sapien
gcctgtaaggcagcgcacatcggag

SEQ ID NO: 5043299 - DNA, 25 bp, Homo sapien
tagagttcctcgctgcctgtaaggc

SEQ ID NO: 5043300 - DNA, 25 bp, Homo sapien
gattctaggctcagcgttttggcgc

SEQ ID NO: 5043301 - DNA, 25 bp, Homo sapien
ttcggagaactccattgcgccggga

SEQ ID NO: 5043302 - DNA, 25 bp, Homo sapien
ggctggaatcatcgcccttcggaga

SEQ ID NO: 5043303 - DNA, 25 bp, Homo sapien
tcctagttcgggagcaaggactgac

SEQ ID NO: 5043304 - DNA, 25 bp, Homo sapien
tcagctgtgctttcgaagggtcgca

SEQ ID NO: 5043305 - DNA, 25 bp, Homo sapien
acgaggtcaacgctttcagctgtgc

SEQ ID NO: 5043306 - DNA, 25 bp, Homo sapien
tgtggggactctcgctccagggtcc

SEQ ID NO: 5043307 - DNA, 25 bp, Homo sapien
gtcccagcctgagctataagacgag

SEQ ID NO: 5043308 - DNA, 25 bp, Homo sapien
ccaggtcttgtaggcagaggcacgc

SEQ ID NO: 5043309 - DNA, 25 bp, Homo sapien
tatctgaggctgagaaccgaagctt

SEQ ID NO: 5043310 - DNA, 25 bp, Homo sapien
cgtggaagtcgacagagacgcctct

SEQ ID NO: 5043311 - DNA, 25 bp, Homo sapien
tccaaagccaagagctccgagaacg

SEQ ID NO: 5043312 - DNA, 25 bp, Homo sapien
ccagcgcgacggaatacagggtttc

SEQ ID NO: 5043313 - DNA, 25 bp, Homo sapien
tacccgtgcgtcttttggcaaagcc

SEQ ID NO: 5043314 - DNA, 25 bp, Homo sapien
gagccaggactcgtaggccgctttg

SEQ ID NO: 5043315 - DNA, 25 bp, Homo sapien
ccgctttgcgcacggactcggagag

SEQ ID NO: 5043316 - DNA, 25 bp, Homo sapien
tacaggagcctctttactacctcga

SEQ ID NO: 5043317 - DNA, 25 bp, Homo sapien
caagaggccgcaatcatagaggcag

SEQ ID NO: 5043318 - DNA, 25 bp, Homo sapien
agtttctccgcttacaatagggtcg

SEQ ID NO: 5043319 - DNA, 25 bp, Homo sapien
tgcctgcctcgcacactaagtttct

SEQ ID NO: 5043320 - DNA, 25 bp, Homo sapien
cgcagtcccgcagccggatgcaggt

SEQ ID NO: 5043321 - DNA, 25 bp, Homo sapien
gtctgcagggcaaacgcggccgccg

SEQ ID NO: 5043322 - DNA, 25 bp, Homo sapien
taatgacagatgagccgcgtcccgg

SEQ ID NO: 5043323 - DNA, 25 bp, Homo sapien
ggagcttagtgccggtgctaatgac

SEQ ID NO: 5043324 - DNA, 25 bp, Homo sapien
cctgttttcgtattttgaccaccat

SEQ ID NO: 5043325 - DNA, 25 bp, Homo sapien
tcctgttttcgtattttgaccacca

SEQ ID NO: 5043326 - DNA, 25 bp, Homo sapien
ttttgtcccattactattgtgagac

SEQ ID NO: 5043327 - DNA, 25 bp, Homo sapien
ttgccatagtcagcctcaaatctgt

SEQ ID NO: 5043328 - DNA, 25 bp, Homo sapien
ttcttcagtacaagctaagctagct

SEQ ID NO: 5043329 - DNA, 25 bp, Homo sapien
cataaatttgcctgtatggactcca

SEQ ID NO: 5043330 - DNA, 25 bp, Homo sapien
tctgggtcattgctgtagggtttct

SEQ ID NO: 5043331 - DNA, 25 bp, Homo sapien
gcttttctgggtcattgctgtaggg

SEQ ID NO: 5043332 - DNA, 25 bp, Homo sapien
ttttctgggtcattgctgtagggtt

SEQ ID NO: 5043333 - DNA, 25 bp, Homo sapien
tcaaagcttttctgggtcattgctg

SEQ ID NO: 5043334 - DNA, 25 bp, Homo sapien
gaggaagaggcagaccatggtaatc

SEQ ID NO: 5043335 - DNA, 25 bp, Homo sapien
tgcagtcctaaactggccgacaggg

SEQ ID NO: 5043336 - DNA, 25 bp, Homo sapien
aagacagtcccttggcttgtcgatg

SEQ ID NO: 5043337 - DNA, 25 bp, Homo sapien
caaaagacgagctaatatgccagat

SEQ ID NO: 5043338 - DNA, 25 bp, Homo sapien
tctctgaggcccgaacaatgtctgt

SEQ ID NO: 5043339 - DNA, 25 bp, Homo sapien
gatcttctaaaacatagggttcagg

SEQ ID NO: 5043340 - DNA, 25 bp, Homo sapien
tgaatataggttcccaagagatagg

SEQ ID NO: 5043341 - DNA, 25 bp, Homo sapien
gaaaggccacctcttgtgtcagagt

SEQ ID NO: 5043342 - DNA, 25 bp, Homo sapien
caagctcggtcatggaaacactggg

SEQ ID NO: 5043343 - DNA, 25 bp, Homo sapien
ttgcagctggcaagctcggtcatgg

SEQ ID NO: 5043344 - DNA, 25 bp, Homo sapien
aacactgggttttatgtagcaacat

SEQ ID NO: 5043345 - DNA, 25 bp, Homo sapien
tgtagcaacatttcaggctccagtc

SEQ ID NO: 5043346 - DNA, 25 bp, Homo sapien
tcttcctggaaccaacagatgctat

SEQ ID NO: 5043347 - DNA, 25 bp, Homo sapien
cagatgctatggcagcttccctatc

SEQ ID NO: 5043348 - DNA, 25 bp, Homo sapien
ctgccatgcataaagtaactagatg

SEQ ID NO: 5043349 - DNA, 25 bp, Homo sapien
tgcctttggcagaggtagcaactct

SEQ ID NO: 5043350 - DNA, 25 bp, Homo sapien
gctaaataatgtggatgactcagtt

SEQ ID NO: 5043351 - DNA, 25 bp, Homo sapien
gttaattctctggagactaccagga

SEQ ID NO: 5043352 - DNA, 25 bp, Homo sapien
ggataacccatatgacattttcttc

SEQ ID NO: 5043353 - DNA, 25 bp, Homo sapien
accaggataacccatatgacatttt

SEQ ID NO: 5043354 - DNA, 25 bp, Homo sapien
aagaaaggctttcctgtctatttat

SEQ ID NO: 5043355 - DNA, 25 bp, Homo sapien
tggaaagaaaggctttcctgtctat

SEQ ID NO: 5043356 - DNA, 25 bp, Homo sapien
gaaaggctttcctgtctatttataa

SEQ ID NO: 5043357 - DNA, 25 bp, Homo sapien
aggctttcctgtctatttataatcc

SEQ ID NO: 5043358 - DNA, 25 bp, Homo sapien
attgtcttagcatagtcttcttgtg

SEQ ID NO: 5043359 - DNA, 25 bp, Homo sapien
tagtattgtcttagcatagtcttct

SEQ ID NO: 5043360 - DNA, 25 bp, Homo sapien
gtattgtcttagcatagtcttcttg

SEQ ID NO: 5043361 - DNA, 25 bp, Homo sapien
ttctagtattgtcttagcatagtct

SEQ ID NO: 5043362 - DNA, 25 bp, Homo sapien
agcctggaaatataacgctctccta

SEQ ID NO: 5043363 - DNA, 25 bp, Homo sapien
ccaagcctggaaatataacgctctc

SEQ ID NO: 5043364 - DNA, 25 bp, Homo sapien
cctggaaatataacgctctcctaca

SEQ ID NO: 5043365 - DNA, 25 bp, Homo sapien
gaaatataacgctctcctacatcca

SEQ ID NO: 5043366 - DNA, 25 bp, Homo sapien
tgtgagctaccagatatagatccaa

SEQ ID NO: 5043367 - DNA, 25 bp, Homo sapien
tgggctttgggggatcatactgaac

SEQ ID NO: 5043368 - DNA, 25 bp, Homo sapien
cagatatagatccaaggtactgctg

SEQ ID NO: 5043369 - DNA, 25 bp, Homo sapien
gggggatcatactgaactggcaagc

SEQ ID NO: 5043370 - DNA, 25 bp, Homo sapien
acactgtgagccttcaacatagaca

SEQ ID NO: 5043371 - DNA, 25 bp, Homo sapien
tctgccccatgtggcagttgtaaaa

SEQ ID NO: 5043372 - DNA, 25 bp, Homo sapien
tgcaagtcaccttcttgtttctcag

SEQ ID NO: 5043373 - DNA, 25 bp, Homo sapien
actgcaatgcaagtcaccttcttgt

SEQ ID NO: 5043374 - DNA, 25 bp, Homo sapien
cttcagatagccagagcgagtgagc

SEQ ID NO: 5043375 - DNA, 25 bp, Homo sapien
tccttgtcttcagatagccagagcg

SEQ ID NO: 5043376 - DNA, 25 bp, Homo sapien
tgtcttcagatagccagagcgagtg

SEQ ID NO: 5043377 - DNA, 25 bp, Homo sapien
cttgtcttcagatagccagagcgag

SEQ ID NO: 5043378 - DNA, 25 bp, Homo sapien
aatgcagaactcatcagttgcctgc

SEQ ID NO: 5043379 - DNA, 25 bp, Homo sapien
gacacagcgtgagaaaatgcagaac

SEQ ID NO: 5043380 - DNA, 25 bp, Homo sapien
caaggacacagcgtgagaaaatgca

SEQ ID NO: 5043381 - DNA, 25 bp, Homo sapien
tgggcaaggacacagcgtgagaaaa

SEQ ID NO: 5043382 - DNA, 25 bp, Homo sapien
ggagaaaaggagtccaagcatcttt

SEQ ID NO: 5043383 - DNA, 25 bp, Homo sapien
caataactatgctctcagctttggt

SEQ ID NO: 5043384 - DNA, 25 bp, Homo sapien
cagctttggtatacattgggctttc

SEQ ID NO: 5043385 - DNA, 25 bp, Homo sapien
tgaagttgcttcgagtgccaataac

SEQ ID NO: 5043386 - DNA, 25 bp, Homo sapien
tctgttatcagcccatccatgacac

SEQ ID NO: 5043387 - DNA, 25 bp, Homo sapien
gaatttctgttcctgacctgggcat

SEQ ID NO: 5043388 - DNA, 25 bp, Homo sapien
tgttatcagcccatccatgacacct

SEQ ID NO: 5043389 - DNA, 25 bp, Homo sapien
ttatcagcccatccatgacacctgg

SEQ ID NO: 5043390 - DNA, 25 bp, Homo sapien
atttttatctactggttgtcttgtt

SEQ ID NO: 5043391 - DNA, 25 bp, Homo sapien
caaaaagcaagcttctgctataagt

SEQ ID NO: 5043392 - DNA, 25 bp, Homo sapien
tttgccaaaaagcaagcttctgcta

SEQ ID NO: 5043393 - DNA, 25 bp, Homo sapien
tagtttttgagtgtgcttttgtcaa

SEQ ID NO: 5043394 - DNA, 25 bp, Homo sapien
gagataatccacattcaagtagttt

SEQ ID NO: 5043395 - DNA, 25 bp, Homo sapien
aggtgtaaacctcaccccatagact

SEQ ID NO: 5043396 - DNA, 25 bp, Homo sapien
cacaggtgtaaacctcaccccatag

SEQ ID NO: 5043397 - DNA, 25 bp, Homo sapien
caggtgtaaacctcaccccatagac

SEQ ID NO: 5043398 - DNA, 25 bp, Homo sapien
aacacaggtgtaaacctcaccccat

SEQ ID NO: 5043399 - DNA, 25 bp, Homo sapien
cttattctcccatatttctttgctc

SEQ ID NO: 5043400 - DNA, 25 bp, Homo sapien
tattctcccatatttctttgctcat

SEQ ID NO: 5043401 - DNA, 25 bp, Homo sapien
attcttattctcccatatttctttg

SEQ ID NO: 5043402 - DNA, 25 bp, Homo sapien
cccattcttattctcccatatttct

SEQ ID NO: 5043403 - DNA, 25 bp, Homo sapien
atcctgtgctcttaagttttctggt

SEQ ID NO: 5043404 - DNA, 25 bp, Homo sapien
tcctgtgctcttaagttttctggtt

SEQ ID NO: 5043405 - DNA, 25 bp, Homo sapien
cctgtgctcttaagttttctggttg

SEQ ID NO: 5043406 - DNA, 25 bp, Homo sapien
tcagcctccagtggcaccatggtgg

SEQ ID NO: 5043407 - DNA, 25 bp, Homo sapien
tcatagtccattgaccagagctggc

SEQ ID NO: 5043408 - DNA, 25 bp, Homo sapien
tgtatgaggtatctgatggttcacc

SEQ ID NO: 5043409 - DNA, 25 bp, Homo sapien
aaattacatgcatcatagtccattg

SEQ ID NO: 5043410 - DNA, 25 bp, Homo sapien
tgatccaatgcgaagcagagttgtg

SEQ ID NO: 5043411 - DNA, 25 bp, Homo sapien
gagatctgtggttctaagcctctag

SEQ ID NO: 5043412 - DNA, 25 bp, Homo sapien
gttgtgagccagtatagtcccttgc

SEQ ID NO: 5043413 - DNA, 25 bp, Homo sapien
caccatagtcattgcctgagatctg

SEQ ID NO: 5043414 - DNA, 25 bp, Homo sapien
taggttgctcgtgattcagagctcc

SEQ ID NO: 5043415 - DNA, 25 bp, Homo sapien
cccattggggctaggttgctcgtga

SEQ ID NO: 5043416 - DNA, 25 bp, Homo sapien
gattactcttaaatgggactggcat

SEQ ID NO: 5043417 - DNA, 25 bp, Homo sapien
ttcagactgattactcttaaatggg

SEQ ID NO: 5043418 - DNA, 25 bp, Homo sapien
cctcttcaccttcatgggagaaatg

SEQ ID NO: 5043419 - DNA, 25 bp, Homo sapien
catgggagaaatgtatttctttgcc

SEQ ID NO: 5043420 - DNA, 25 bp, Homo sapien
tttgccccagcaacagtagccctgg

SEQ ID NO: 5043421 - DNA, 25 bp, Homo sapien
gtatttctttgccccagcaacagta

SEQ ID NO: 5043422 - DNA, 25 bp, Homo sapien
actggtgatttcaggtagttggatc

SEQ ID NO: 5043423 - DNA, 25 bp, Homo sapien
tatgtaaatagtacaggatttcaaa

SEQ ID NO: 5043424 - DNA, 25 bp, Homo sapien
caattatgtaaatagtacaggattt

SEQ ID NO: 5043425 - DNA, 25 bp, Homo sapien
tggtgatttcaggtagttggatcta

SEQ ID NO: 5043426 - DNA, 25 bp, Homo sapien
gctgcttatctgattatctgaggtc

SEQ ID NO: 5043427 - DNA, 25 bp, Homo sapien
gtgttgctgcttatctgattatctg

SEQ ID NO: 5043428 - DNA, 25 bp, Homo sapien
tatctgattatctgaggtcaaggga

SEQ ID NO: 5043429 - DNA, 25 bp, Homo sapien
tgcttatctgattatctgaggtcaa

SEQ ID NO: 5043430 - DNA, 25 bp, Homo sapien
gccccatgatttagtttattgttcc

SEQ ID NO: 5043431 - DNA, 25 bp, Homo sapien
tgatggccacctggtattaagtgcc

SEQ ID NO: 5043432 - DNA, 25 bp, Homo sapien
cctggtattaagtgccttgtatgcc

SEQ ID NO: 5043433 - DNA, 25 bp, Homo sapien
tttgatcaacatcctttttctccgg

SEQ ID NO: 5043434 - DNA, 25 bp, Homo sapien
ccttgtgatctaacatcctttatca

SEQ ID NO: 5043435 - DNA, 25 bp, Homo sapien
gttcccttgtgatctaacatccttt

SEQ ID NO: 5043436 - DNA, 25 bp, Homo sapien
caggtagttcccttgtgatctaaca

SEQ ID NO: 5043437 - DNA, 25 bp, Homo sapien
ggtagttcccttgtgatctaacatc

SEQ ID NO: 5043438 - DNA, 25 bp, Homo sapien
tcctcttctggaggcaaacaaaaac

SEQ ID NO: 5043439 - DNA, 25 bp, Homo sapien
acaaaaactgagcaacctgagggta

SEQ ID NO: 5043440 - DNA, 25 bp, Homo sapien
ttcattcttcccaatctcccctcct

SEQ ID NO: 5043441 - DNA, 25 bp, Homo sapien
cttctggaggcaaacaaaaactgag

SEQ ID NO: 5043442 - DNA, 25 bp, Homo sapien
gatagggctgagtctcaagggtgga

SEQ ID NO: 5043443 - DNA, 25 bp, Homo sapien
atagggctgagtctcaagggtggac

SEQ ID NO: 5043444 - DNA, 25 bp, Homo sapien
cttgtctgtgaccaaagttgagttc

SEQ ID NO: 5043445 - DNA, 25 bp, Homo sapien
atccttcccatcaaagcagactctt

SEQ ID NO: 5043446 - DNA, 25 bp, Homo sapien
ccttcccatcaaagcagactctttt

SEQ ID NO: 5043447 - DNA, 25 bp, Homo sapien
gtctgtgaccaaagttgagttcttc

SEQ ID NO: 5043448 - DNA, 25 bp, Homo sapien
atagtgaatgttatacccacaaaaa

SEQ ID NO: 5043449 - DNA, 25 bp, Homo sapien
tatagtgaatgttatacccacaaaa

SEQ ID NO: 5043450 - DNA, 25 bp, Homo sapien
tcaacatcgtgtttgaaaatcagaa

SEQ ID NO: 5043451 - DNA, 25 bp, Homo sapien
ccttctcaacatcgtgtttgaaaat

SEQ ID NO: 5043452 - DNA, 25 bp, Homo sapien
tctcaacatcgtgtttgaaaatcag

SEQ ID NO: 5043453 - DNA, 25 bp, Homo sapien
caacatcgtgtttgaaaatcagaaa

SEQ ID NO: 5043454 - DNA, 25 bp, Homo sapien
tgcctactcagggctatacttgagc

SEQ ID NO: 5043455 - DNA, 25 bp, Homo sapien
ttcctggagaccatgttgagctctt

SEQ ID NO: 5043456 - DNA, 25 bp, Homo sapien
gctgagggtttcaccactgccagag

SEQ ID NO: 5043457 - DNA, 25 bp, Homo sapien
tgttgagctcttatggtggccaggc

SEQ ID NO: 5043458 - DNA, 25 bp, Homo sapien
taagcatgcaagtgacgacagtcac

SEQ ID NO: 5043459 - DNA, 25 bp, Homo sapien
tacacagaatcgactagaagctcat

SEQ ID NO: 5043460 - DNA, 25 bp, Homo sapien
ggcactacactttgagagtccttac

SEQ ID NO: 5043461 - DNA, 25 bp, Homo sapien
tctggaccatagcttggcactacac

SEQ ID NO: 5043462 - DNA, 25 bp, Homo sapien
ttcaatgttgaatctatttacccag

SEQ ID NO: 5043463 - DNA, 25 bp, Homo sapien
tggggaaaatgttgcagtaaaagct

SEQ ID NO: 5043464 - DNA, 25 bp, Homo sapien
tatttacccagatgtcagtgttttc

SEQ ID NO: 5043465 - DNA, 25 bp, Homo sapien
gtaaaagcttgccacctgttaatta

SEQ ID NO: 5043466 - DNA, 25 bp, Homo sapien
ggttacctcactacagatgatctct

SEQ ID NO: 5043467 - DNA, 25 bp, Homo sapien
tacctcactacagatgatctctagg

SEQ ID NO: 5043468 - DNA, 25 bp, Homo sapien
cactacagatgatctctagggtggt

SEQ ID NO: 5043469 - DNA, 25 bp, Homo sapien
ctggttacctcactacagatgatct

SEQ ID NO: 5043470 - DNA, 25 bp, Homo sapien
attcccactcatgtaagcatctcct

SEQ ID NO: 5043471 - DNA, 25 bp, Homo sapien
gtaagcatctccttggctaccttca

SEQ ID NO: 5043472 - DNA, 25 bp, Homo sapien
tctccttggctaccttcatcataca

SEQ ID NO: 5043473 - DNA, 25 bp, Homo sapien
cactcatgtaagcatctccttggct

SEQ ID NO: 5043474 - DNA, 25 bp, Homo sapien
tggagaacatcccagctgtcagtga

SEQ ID NO: 5043475 - DNA, 25 bp, Homo sapien
ttggagaacatcccagctgtcagtg

SEQ ID NO: 5043476 - DNA, 25 bp, Homo sapien
cttggagaacatcccagctgtcagt

SEQ ID NO: 5043477 - DNA, 25 bp, Homo sapien
ggagcagggtgtattcataccagca

SEQ ID NO: 5043478 - DNA, 25 bp, Homo sapien
ccatgcttagttccacggtggcagc

SEQ ID NO: 5043479 - DNA, 25 bp, Homo sapien
tgtgtgtcccctgtgcatgttcatg

SEQ ID NO: 5043480 - DNA, 25 bp, Homo sapien
gctccaacggtaatggctgtgtcgt

SEQ ID NO: 5043481 - DNA, 25 bp, Homo sapien
tgtcccgtacataagtgctgccact

SEQ ID NO: 5043482 - DNA, 25 bp, Homo sapien
ccactgtgtcccgtacataagtgct

SEQ ID NO: 5043483 - DNA, 25 bp, Homo sapien
cagtcgtgccgctggattcttttct

SEQ ID NO: 5043484 - DNA, 25 bp, Homo sapien
tcagtcgtgccgctggattcttttc

SEQ ID NO: 5043485 - DNA, 25 bp, Homo sapien
tcacactcattacatagtgctataa

SEQ ID NO: 5043486 - DNA, 25 bp, Homo sapien
catagtgctataatcactgtgcctg

SEQ ID NO: 5043487 - DNA, 25 bp, Homo sapien
ctgtgcctgtttttaaggctgctgt

SEQ ID NO: 5043488 - DNA, 25 bp, Homo sapien
cctctctacccctgcattgcctcta

SEQ ID NO: 5043489 - DNA, 25 bp, Homo sapien
ttctcaccaaggcttatactcaggt

SEQ ID NO: 5043490 - DNA, 25 bp, Homo sapien
cacaaaggggtctgttaaccatgcc

SEQ ID NO: 5043491 - DNA, 25 bp, Homo sapien
aaccatgcctgtactcatgtgattt

SEQ ID NO: 5043492 - DNA, 25 bp, Homo sapien
gatttgtctccacttgaaggagccc

SEQ ID NO: 5043493 - DNA, 25 bp, Homo sapien
tatgccacctttcttcctattcatg

SEQ ID NO: 5043494 - DNA, 25 bp, Homo sapien
ggagcatatacgattgttttctgaa

SEQ ID NO: 5043495 - DNA, 25 bp, Homo sapien
ttcctagcacttgccacaaatcctg

SEQ ID NO: 5043496 - DNA, 25 bp, Homo sapien
catgccaggtgtatgagctttagga

SEQ ID NO: 5043497 - DNA, 25 bp, Homo sapien
gtctacgtggctgcagttttctctg

SEQ ID NO: 5043498 - DNA, 25 bp, Homo sapien
caaaggccaattgactacaaatgta

SEQ ID NO: 5043499 - DNA, 25 bp, Homo sapien
tgtgggttcttccatcaatacactc

SEQ ID NO: 5043500 - DNA, 25 bp, Homo sapien
caaaactgtgttatttctcacatgg

SEQ ID NO: 5043501 - DNA, 25 bp, Homo sapien
gcaaattggaagtactggaaccgat

SEQ ID NO: 5043502 - DNA, 25 bp, Homo sapien
gagtcagtcaggaagccattgtcaa

SEQ ID NO: 5043503 - DNA, 25 bp, Homo sapien
cctgatattgtctcgggaattgcaa

SEQ ID NO: 5043504 - DNA, 25 bp, Homo sapien
ataatccctgttggctccagaaggc

SEQ ID NO: 5043505 - DNA, 25 bp, Homo sapien
gaaattaagcctgttcaaagcaccc

SEQ ID NO: 5043506 - DNA, 25 bp, Homo sapien
tgttttcctaaacattgccccacgc

SEQ ID NO: 5043507 - DNA, 25 bp, Homo sapien
tctgccagatggagcagaactggct

SEQ ID NO: 5043508 - DNA, 25 bp, Homo sapien
aggtggtcaggctcaacagaaatgg

SEQ ID NO: 5043509 - DNA, 25 bp, Homo sapien
acattaattccaccatcatcagaac

SEQ ID NO: 5043510 - DNA, 25 bp, Homo sapien
cattaattccaccatcatcagaaca

SEQ ID NO: 5043511 - DNA, 25 bp, Homo sapien
attaattccaccatcatcagaacat

SEQ ID NO: 5043512 - DNA, 25 bp, Homo sapien
cacattaattccaccatcatcagaa

SEQ ID NO: 5043513 - DNA, 25 bp, Homo sapien
ccaaatctcaaaggttccaagccct

SEQ ID NO: 5043514 - DNA, 25 bp, Homo sapien
ggaatattactgtctatgagcctca

SEQ ID NO: 5043515 - DNA, 25 bp, Homo sapien
ttccaagccctagtttcttgagctg

SEQ ID NO: 5043516 - DNA, 25 bp, Homo sapien
tgcaggttggcaggaatattactgt

SEQ ID NO: 5043517 - DNA, 25 bp, Homo sapien
tattaccggtttgttctgaatactg

SEQ ID NO: 5043518 - DNA, 25 bp, Homo sapien
ctgagcactaggtattaccggtttg

SEQ ID NO: 5043519 - DNA, 25 bp, Homo sapien
cactaggtattaccggtttgttctg

SEQ ID NO: 5043520 - DNA, 25 bp, Homo sapien
tgagcactaggtattaccggtttgt

SEQ ID NO: 5043521 - DNA, 25 bp, Homo sapien
ccacttatagcagaatcattatggg

SEQ ID NO: 5043522 - DNA, 25 bp, Homo sapien
tggcagtgaccacttatagcagaat

SEQ ID NO: 5043523 - DNA, 25 bp, Homo sapien
cagtgaccacttatagcagaatcat

SEQ ID NO: 5043524 - DNA, 25 bp, Homo sapien
tcctgtggcagtgaccacttatagc

SEQ ID NO: 5043525 - DNA, 25 bp, Homo sapien
caagaagagtagactgataataagg

SEQ ID NO: 5043526 - DNA, 25 bp, Homo sapien
agaagagtagactgataataaggag

SEQ ID NO: 5043527 - DNA, 25 bp, Homo sapien
aagagtagactgataataaggagaa

SEQ ID NO: 5043528 - DNA, 25 bp, Homo sapien
gataataaggagaaataactctcat

SEQ ID NO: 5043529 - DNA, 25 bp, Homo sapien
agtgggatttgtttctatcatgagt

SEQ ID NO: 5043530 - DNA, 25 bp, Homo sapien
ttgtttctatcatgagtatcagctg

SEQ ID NO: 5043531 - DNA, 25 bp, Homo sapien
gatttgtttctatcatgagtatcag

SEQ ID NO: 5043532 - DNA, 25 bp, Homo sapien
tttctatcatgagtatcagctgagg

SEQ ID NO: 5043533 - DNA, 25 bp, Homo sapien
tgagtactcccaaataacggcaact

SEQ ID NO: 5043534 - DNA, 25 bp, Homo sapien
gaagtctctgatgagtactcccaaa

SEQ ID NO: 5043535 - DNA, 25 bp, Homo sapien
tctgatgagtactcccaaataacgg

SEQ ID NO: 5043536 - DNA, 25 bp, Homo sapien
gtctctgatgagtactcccaaataa

SEQ ID NO: 5043537 - DNA, 25 bp, Homo sapien
tcaaggtggtaacgcctgttgctgg

SEQ ID NO: 5043538 - DNA, 25 bp, Homo sapien
tgcttcattcaggctcgcccacccc

SEQ ID NO: 5043539 - DNA, 25 bp, Homo sapien
tggtaacgcctgttgctggtggaac

SEQ ID NO: 5043540 - DNA, 25 bp, Homo sapien
aggtggtaacgcctgttgctggtgg

SEQ ID NO: 5043541 - DNA, 25 bp, Homo sapien
cctgctcttccacgcagctgggact

SEQ ID NO: 5043542 - DNA, 25 bp, Homo sapien
tttccaaactggacttaggagagga

SEQ ID NO: 5043543 - DNA, 25 bp, Homo sapien
ttccaaactggacttaggagaggag

SEQ ID NO: 5043544 - DNA, 25 bp, Homo sapien
tgctcttccacgcagctgggactgg

SEQ ID NO: 5043545 - DNA, 25 bp, Homo sapien
ctatccatgggacactagtcctctg

SEQ ID NO: 5043546 - DNA, 25 bp, Homo sapien
catgggacactagtcctctggatgt

SEQ ID NO: 5043547 - DNA, 25 bp, Homo sapien
gggacactagtcctctggatgttaa

SEQ ID NO: 5043548 - DNA, 25 bp, Homo sapien
gacactagtcctctggatgttaaac

SEQ ID NO: 5043549 - DNA, 25 bp, Homo sapien
gaaatatggtttaggtagagaagaa

SEQ ID NO: 5043550 - DNA, 25 bp, Homo sapien
ccaggtctaccaagaacaaggaaat

SEQ ID NO: 5043551 - DNA, 25 bp, Homo sapien
tatggtttaggtagagaagaaggaa

SEQ ID NO: 5043552 - DNA, 25 bp, Homo sapien
aatatggtttaggtagagaagaagg

SEQ ID NO: 5043553 - DNA, 25 bp, Homo sapien
catcataaactaaatggtcctggtg

SEQ ID NO: 5043554 - DNA, 25 bp, Homo sapien
taattgctggtgcaatactccagag

SEQ ID NO: 5043555 - DNA, 25 bp, Homo sapien
tccagaggaaacacgtggtgcctta

SEQ ID NO: 5043556 - DNA, 25 bp, Homo sapien
gagtacgagtcgtggcatcataaac

SEQ ID NO: 5043557 - DNA, 25 bp, Homo sapien
tgtccctgccaggataatgcctggg

SEQ ID NO: 5043558 - DNA, 25 bp, Homo sapien
agcagcgggaccatcagagggtcaa

SEQ ID NO: 5043559 - DNA, 25 bp, Homo sapien
tttccttcatcagcaagagaacttt

SEQ ID NO: 5043560 - DNA, 25 bp, Homo sapien
tgcctgggagatgccctcatccttg

SEQ ID NO: 5043561 - DNA, 25 bp, Homo sapien
tggcaatggagtggagcccatttct

SEQ ID NO: 5043562 - DNA, 25 bp, Homo sapien
cagttgcttcttgaccatacatggg

SEQ ID NO: 5043563 - DNA, 25 bp, Homo sapien
tacatgggtggcataggcctcaagc

SEQ ID NO: 5043564 - DNA, 25 bp, Homo sapien
cgtatccgtacggacagtttcctga

SEQ ID NO: 5043565 - DNA, 25 bp, Homo sapien
tcagaagggagcaccgggcttgtta

SEQ ID NO: 5043566 - DNA, 25 bp, Homo sapien
gcttgttattagactcagaaggtgc

SEQ ID NO: 5043567 - DNA, 25 bp, Homo sapien
tagactcagaaggtgcaggtctttc

SEQ ID NO: 5043568 - DNA, 25 bp, Homo sapien
ggagcaccgggcttgttattagact

SEQ ID NO: 5043569 - DNA, 25 bp, Homo sapien
ctggattgccagactttaagagaga

SEQ ID NO: 5043570 - DNA, 25 bp, Homo sapien
taccagggcttgtagacggtaccac

SEQ ID NO: 5043571 - DNA, 25 bp, Homo sapien
gctgtgcgggacataagtttccaga

SEQ ID NO: 5043572 - DNA, 25 bp, Homo sapien
ttccagaaggtatccagtttgagcc

SEQ ID NO: 5043573 - DNA, 25 bp, Homo sapien
ctttctagggcaataccacgggaca

SEQ ID NO: 5043574 - DNA, 25 bp, Homo sapien
tagggcaataccacgggacatttgt

SEQ ID NO: 5043575 - DNA, 25 bp, Homo sapien
caataccacgggacatttgttccac

SEQ ID NO: 5043576 - DNA, 25 bp, Homo sapien
tctagggcaataccacgggacattt

SEQ ID NO: 5043577 - DNA, 25 bp, Homo sapien
caggcatttcaatattgccgcattc

SEQ ID NO: 5043578 - DNA, 25 bp, Homo sapien
gccgcattcagatttcctgcagtga

SEQ ID NO: 5043579 - DNA, 25 bp, Homo sapien
cctgcagtgagaggcgatttcataa

SEQ ID NO: 5043580 - DNA, 25 bp, Homo sapien
gtgagaggcgatttcataatgaacg

SEQ ID NO: 5043581 - DNA, 25 bp, Homo sapien
ctttctgtaataggaagttcactgg

SEQ ID NO: 5043582 - DNA, 25 bp, Homo sapien
ggcacttgagccctttttgatcttg

SEQ ID NO: 5043583 - DNA, 25 bp, Homo sapien
ctggtgtgtacagccacagttagcc

SEQ ID NO: 5043584 - DNA, 25 bp, Homo sapien
ttgagccctttttgatcttgcccta

SEQ ID NO: 5043585 - DNA, 25 bp, Homo sapien
cttttagcgctttgtgttctgaata

SEQ ID NO: 5043586 - DNA, 25 bp, Homo sapien
gcgctttgtgttctgaatactcctg

SEQ ID NO: 5043587 - DNA, 25 bp, Homo sapien
gtaaaatctgcccaacgagagcagg

SEQ ID NO: 5043588 - DNA, 25 bp, Homo sapien
tttgtgttctgaatactcctgagga

SEQ ID NO: 5043589 - DNA, 25 bp, Homo sapien
gattcctcaatccttgtaaaccacc

SEQ ID NO: 5043590 - DNA, 25 bp, Homo sapien
attgtccaacacaagcttcccaggg

SEQ ID NO: 5043591 - DNA, 25 bp, Homo sapien
aggagctctgttaaagtctggttca

SEQ ID NO: 5043592 - DNA, 25 bp, Homo sapien
tgctctgagtgtgtgattgtccaac

SEQ ID NO: 5043593 - DNA, 25 bp, Homo sapien
tgacctgaggcttgatctccaaaga

SEQ ID NO: 5043594 - DNA, 25 bp, Homo sapien
aaagagtgggtcacctccatcaggc

SEQ ID NO: 5043595 - DNA, 25 bp, Homo sapien
caggcagacccagatccagataaca

SEQ ID NO: 5043596 - DNA, 25 bp, Homo sapien
tttattggatcaaggttttcctgac

SEQ ID NO: 5043597 - DNA, 25 bp, Homo sapien
gaaggataaggctactgcaccacca

SEQ ID NO: 5043598 - DNA, 25 bp, Homo sapien
atccacagatccagtgtctaagcag

SEQ ID NO: 5043599 - DNA, 25 bp, Homo sapien
tctttgttggctaaacagtggaagg

SEQ ID NO: 5043600 - DNA, 25 bp, Homo sapien
gacatccaattagagcacactcttc

SEQ ID NO: 5043601 - DNA, 25 bp, Homo sapien
gaaatacctccttcagatttgacgc

SEQ ID NO: 5043602 - DNA, 25 bp, Homo sapien
ttagggacttagcatctcgtggtgc

SEQ ID NO: 5043603 - DNA, 25 bp, Homo sapien
cacaaaacagcattgccttagggac

SEQ ID NO: 5043604 - DNA, 25 bp, Homo sapien
ctcgtggtgcttttgctgaaatacc

SEQ ID NO: 5043605 - DNA, 25 bp, Homo sapien
atggtcttctagctactaatttcag

SEQ ID NO: 5043606 - DNA, 25 bp, Homo sapien
agaaacacactcaatcagtgtttct

SEQ ID NO: 5043607 - DNA, 25 bp, Homo sapien
ggtcttctagctactaatttcagaa

SEQ ID NO: 5043608 - DNA, 25 bp, Homo sapien
agagaaacacactcaatcagtgttt

SEQ ID NO: 5043609 - DNA, 25 bp, Homo sapien
aaacctgtctgtatatgtcatactg

SEQ ID NO: 5043610 - DNA, 25 bp, Homo sapien
cgatagatcatttctattacttgag

SEQ ID NO: 5043611 - DNA, 25 bp, Homo sapien
tatgtcatactgagtactctctcga

SEQ ID NO: 5043612 - DNA, 25 bp, Homo sapien
gagtactctctcgatagatcatttc

SEQ ID NO: 5043613 - DNA, 25 bp, Homo sapien
cttcaccatagggacctttttcata

SEQ ID NO: 5043614 - DNA, 25 bp, Homo sapien
gacctttttcataagcatccactga

SEQ ID NO: 5043615 - DNA, 25 bp, Homo sapien
catagggacctttttcataagcatc

SEQ ID NO: 5043616 - DNA, 25 bp, Homo sapien
tagggacctttttcataagcatcca

SEQ ID NO: 5043617 - DNA, 25 bp, Homo sapien
tgttcagcaagaattggtccagctc

SEQ ID NO: 5043618 - DNA, 25 bp, Homo sapien
catagatgataggaacattcatttc

SEQ ID NO: 5043619 - DNA, 25 bp, Homo sapien
catttgttcagcaagaattggtcca

SEQ ID NO: 5043620 - DNA, 25 bp, Homo sapien
ctgttccccggaacatagatgatag

SEQ ID NO: 5043621 - DNA, 25 bp, Homo sapien
tgaagccctcatcatgacaccacat

SEQ ID NO: 5043622 - DNA, 25 bp, Homo sapien
tgaccggtcccctatcagccacact

SEQ ID NO: 5043623 - DNA, 25 bp, Homo sapien
ggtcccctatcagccacactgccca

SEQ ID NO: 5043624 - DNA, 25 bp, Homo sapien
ccaactgccttctgaccggtcccct

SEQ ID NO: 5043625 - DNA, 25 bp, Homo sapien
cttctgaccggtcccctatcagcca

SEQ ID NO: 5043626 - DNA, 25 bp, Homo sapien
ggtgcaggtactcttccacagtact

SEQ ID NO: 5043627 - DNA, 25 bp, Homo sapien
aggtactcttccacagtacttcata

SEQ ID NO: 5043628 - DNA, 25 bp, Homo sapien
ttggtgcaggtactcttccacagta

SEQ ID NO: 5043629 - DNA, 25 bp, Homo sapien
ggtactcttccacagtacttcatac

SEQ ID NO: 5043630 - DNA, 25 bp, Homo sapien
gaggaagaaatcagtcaggtacttg

SEQ ID NO: 5043631 - DNA, 25 bp, Homo sapien
agaaatcagtcaggtacttgtccag

SEQ ID NO: 5043632 - DNA, 25 bp, Homo sapien
aaggtgcccctaaccacatttcact

SEQ ID NO: 5043633 - DNA, 25 bp, Homo sapien
tgtccagggtctcgcagacatattc

SEQ ID NO: 5043634 - DNA, 25 bp, Homo sapien
ggatactggctctcggatgcttcca

SEQ ID NO: 5043635 - DNA, 25 bp, Homo sapien
tccacagtaggatactggctctcgg

SEQ ID NO: 5043636 - DNA, 25 bp, Homo sapien
cagtaggatactggctctcggatgc

SEQ ID NO: 5043637 - DNA, 25 bp, Homo sapien
gatactggctctcggatgcttccat

SEQ ID NO: 5043638 - DNA, 25 bp, Homo sapien
tggaattagtctggagcttgggccc

SEQ ID NO: 5043639 - DNA, 25 bp, Homo sapien
gatatgtgcaaactagggaagctcc

SEQ ID NO: 5043640 - DNA, 25 bp, Homo sapien
gcttgttaggcagaggcacctcgac

SEQ ID NO: 5043641 - DNA, 25 bp, Homo sapien
tgcatgtctaataagcgtccctggg

SEQ ID NO: 5043642 - DNA, 25 bp, Homo sapien
tgttttataatcaatagctcgggaa

SEQ ID NO: 5043643 - DNA, 25 bp, Homo sapien
gctgttttataatcaatagctcggg

SEQ ID NO: 5043644 - DNA, 25 bp, Homo sapien
aagctgttttataatcaatagctcg

SEQ ID NO: 5043645 - DNA, 25 bp, Homo sapien
gttttataatcaatagctcgggaac

SEQ ID NO: 5043646 - DNA, 25 bp, Homo sapien
gtagcagtttcacctgtgtccctct

SEQ ID NO: 5043647 - DNA, 25 bp, Homo sapien
tagcagtttcacctgtgtccctctc

SEQ ID NO: 5043648 - DNA, 25 bp, Homo sapien
tctgtagattgggacaccggggcgg

SEQ ID NO: 5043649 - DNA, 25 bp, Homo sapien
tatagtcttcttgccaagactcttc

SEQ ID NO: 5043650 - DNA, 25 bp, Homo sapien
gggcggtatagtcttcttgccaaga

SEQ ID NO: 5043651 - DNA, 25 bp, Homo sapien
caccggggcggtatagtcttcttgc

SEQ ID NO: 5043652 - DNA, 25 bp, Homo sapien
cagtgacatgtagggtccagggaca

SEQ ID NO: 5043653 - DNA, 25 bp, Homo sapien
agtgacatgtagggtccagggacat

SEQ ID NO: 5043654 - DNA, 25 bp, Homo sapien
tataaaccagttagttgcctcagga

SEQ ID NO: 5043655 - DNA, 25 bp, Homo sapien
tctttgtgtaactctgctgagtaat

SEQ ID NO: 5043656 - DNA, 25 bp, Homo sapien
caaaagctgggattattctgtattt

SEQ ID NO: 5043657 - DNA, 25 bp, Homo sapien
aagcttttcgaatgaaatctctcag

SEQ ID NO: 5043658 - DNA, 25 bp, Homo sapien
cagaattggagctttaattctattt

SEQ ID NO: 5043659 - DNA, 25 bp, Homo sapien
gaattggagctttaattctatttat

SEQ ID NO: 5043660 - DNA, 25 bp, Homo sapien
agaattggagctttaattctattta

SEQ ID NO: 5043661 - DNA, 25 bp, Homo sapien
acagaattggagctttaattctatt

SEQ ID NO: 5043662 - DNA, 25 bp, Homo sapien
ttcttcacgggagtcctcagtatcc

SEQ ID NO: 5043663 - DNA, 25 bp, Homo sapien
cgggagtcctcagtatccagttcga

SEQ ID NO: 5043664 - DNA, 25 bp, Homo sapien
gtcctcagtatccagttcgagttcc

SEQ ID NO: 5043665 - DNA, 25 bp, Homo sapien
tgttcttcacgggagtcctcagtat

SEQ ID NO: 5043666 - DNA, 25 bp, Homo sapien
gccctaagctttgtatctagtctcc

SEQ ID NO: 5043667 - DNA, 25 bp, Homo sapien
cattctatcacggttcccctcagag

SEQ ID NO: 5043668 - DNA, 25 bp, Homo sapien
tcggattcaaaaccccacgtatatg

SEQ ID NO: 5043669 - DNA, 25 bp, Homo sapien
taaatgagtagctttgggcactgga

SEQ ID NO: 5043670 - DNA, 25 bp, Homo sapien
gaacttatcagcacggcatcaagag

SEQ ID NO: 5043671 - DNA, 25 bp, Homo sapien
gaattatgctttctcaagcctccct

SEQ ID NO: 5043672 - DNA, 25 bp, Homo sapien
gaaactcaacgcattaagtctaaag

SEQ ID NO: 5043673 - DNA, 25 bp, Homo sapien
tatttggtggccagagtacagccaa

SEQ ID NO: 5043674 - DNA, 25 bp, Homo sapien
cactctgtggtgctagatgctatca

SEQ ID NO: 5043675 - DNA, 25 bp, Homo sapien
gcccaagggcattatatagtctagg

SEQ ID NO: 5043676 - DNA, 25 bp, Homo sapien
cagattatagtttagtagctcacca

SEQ ID NO: 5043677 - DNA, 25 bp, Homo sapien
ccctctatagagttggaacagatta

SEQ ID NO: 5043678 - DNA, 25 bp, Homo sapien
taaaccaaggtgacaatcagtcgga

SEQ ID NO: 5043679 - DNA, 25 bp, Homo sapien
ccggcaatatgtatgtaccaaagtc

SEQ ID NO: 5043680 - DNA, 25 bp, Homo sapien
tagaggcagtggacttaaataggca

SEQ ID NO: 5043681 - DNA, 25 bp, Homo sapien
acctctcagattggcaaagctgttt

SEQ ID NO: 5043682 - DNA, 25 bp, Homo sapien
tctgtcccagtctatgagatgaagt

SEQ ID NO: 5043683 - DNA, 25 bp, Homo sapien
tgggcatgcccaataccaatctgtc

SEQ ID NO: 5043684 - DNA, 25 bp, Homo sapien
aatttgctttgaggttcctgttgcc

SEQ ID NO: 5043685 - DNA, 25 bp, Homo sapien
tactgatcggcgcatgaagacctca

SEQ ID NO: 5043686 - DNA, 25 bp, Homo sapien
ttgtccccatgctttagataagctg

SEQ ID NO: 5043687 - DNA, 25 bp, Homo sapien
ctgcaaaactgttcggtggcttttt

SEQ ID NO: 5043688 - DNA, 25 bp, Homo sapien
tacacagccgcttagatgtagaatt

SEQ ID NO: 5043689 - DNA, 25 bp, Homo sapien
catgctttagataagctgggatagg

SEQ ID NO: 5043690 - DNA, 25 bp, Homo sapien
gaactgtgacttgtatacatctgtt

SEQ ID NO: 5043691 - DNA, 25 bp, Homo sapien
taacactgacagacccataacatta

SEQ ID NO: 5043692 - DNA, 25 bp, Homo sapien
caggtgcactctacacataacactg

SEQ ID NO: 5043693 - DNA, 25 bp, Homo sapien
gatttcagctaccaagatcacaggt

SEQ ID NO: 5043694 - DNA, 25 bp, Homo sapien
tgggcacctttagtagaaacagaca

SEQ ID NO: 5043695 - DNA, 25 bp, Homo sapien
ccgctggaggactaaagggccctgt

SEQ ID NO: 5043696 - DNA, 25 bp, Homo sapien
cacacggtgttgtagccagttcagg

SEQ ID NO: 5043697 - DNA, 25 bp, Homo sapien
gaaaaatgcttcaccagtccgtaaa

SEQ ID NO: 5043698 - DNA, 25 bp, Homo sapien
tgtgttgtctgtgaccgcttataga

SEQ ID NO: 5043699 - DNA, 25 bp, Homo sapien
tactactacactttaccagcaatta

SEQ ID NO: 5043700 - DNA, 25 bp, Homo sapien
tggtgtttacctgaatacctatgcg

SEQ ID NO: 5043701 - DNA, 25 bp, Homo sapien
cactgtgcaattcatatgtcagcaa

SEQ ID NO: 5043702 - DNA, 25 bp, Homo sapien
gcactaaaggagcatggaggtacca

SEQ ID NO: 5043703 - DNA, 25 bp, Homo sapien
agtgacttccgcagaaacctcttgg

SEQ ID NO: 5043704 - DNA, 25 bp, Homo sapien
tgaccacagctgatgaggcatgggc

SEQ ID NO: 5043705 - DNA, 25 bp, Homo sapien
tacattggcttgtgaggtgaccaca

SEQ ID NO: 5043706 - DNA, 25 bp, Homo sapien
cttgaggctttggttaaaggaggca

SEQ ID NO: 5043707 - DNA, 25 bp, Homo sapien
gcaacttctcacacaggctttggcc

SEQ ID NO: 5043708 - DNA, 25 bp, Homo sapien
cccagggcacccgagtctgcttggg

SEQ ID NO: 5043709 - DNA, 25 bp, Homo sapien
tcagctgccgtctggtcacaggcac

SEQ ID NO: 5043710 - DNA, 25 bp, Homo sapien
tggtctccacgtcagccccagacat

SEQ ID NO: 5043711 - DNA, 25 bp, Homo sapien
tcctaacttggtctccacgtcagcc

SEQ ID NO: 5043712 - DNA, 25 bp, Homo sapien
ctaacttggtctccacgtcagcccc

SEQ ID NO: 5043713 - DNA, 25 bp, Homo sapien
ttggtctccacgtcagccccagaca

SEQ ID NO: 5043714 - DNA, 25 bp, Homo sapien
ctgaagctgtgaatcagttcaatct

SEQ ID NO: 5043715 - DNA, 25 bp, Homo sapien
ttactgaagctgtgaatcagttcaa

SEQ ID NO: 5043716 - DNA, 25 bp, Homo sapien
tactgaagctgtgaatcagttcaat

SEQ ID NO: 5043717 - DNA, 25 bp, Homo sapien
tttactgaagctgtgaatcagttca

SEQ ID NO: 5043718 - DNA, 25 bp, Homo sapien
cgtacaaggcaagataatatggcag

SEQ ID NO: 5043719 - DNA, 25 bp, Homo sapien
aagggatggaaggtccagccagtgg

SEQ ID NO: 5043720 - DNA, 25 bp, Homo sapien
ctgatcgtacaaggcaagataatat

SEQ ID NO: 5043721 - DNA, 25 bp, Homo sapien
gatcgtacaaggcaagataatatgg

SEQ ID NO: 5043722 - DNA, 25 bp, Homo sapien
gtgaccaaggaagcctctcaagcag

SEQ ID NO: 5043723 - DNA, 25 bp, Homo sapien
cacacaccaccggtgaccaaggaag

SEQ ID NO: 5043724 - DNA, 25 bp, Homo sapien
tcacttgctctaggcagcagtgatg

SEQ ID NO: 5043725 - DNA, 25 bp, Homo sapien
acttgggcgtatgatccacacacac

SEQ ID NO: 5043726 - DNA, 25 bp, Homo sapien
cagagctgtcaccgctggctctcca

SEQ ID NO: 5043727 - DNA, 25 bp, Homo sapien
cgggcaccgggatgtcagacaaaag

SEQ ID NO: 5043728 - DNA, 25 bp, Homo sapien
taggtcatcccttggctcgcctctt

SEQ ID NO: 5043729 - DNA, 25 bp, Homo sapien
ataagactcaaattcctccgggcac

SEQ ID NO: 5043730 - DNA, 25 bp, Homo sapien
tgtctaggtcatcccttggctcgcc

SEQ ID NO: 5043731 - DNA, 25 bp, Homo sapien
ggtgcaggaaggtgaatctgtcaca

SEQ ID NO: 5043732 - DNA, 25 bp, Homo sapien
tgcaggaaggtgaatctgtcacagg

SEQ ID NO: 5043733 - DNA, 25 bp, Homo sapien
ccaggtgcaggaaggtgaatctgtc

SEQ ID NO: 5043734 - DNA, 25 bp, Homo sapien
ttcccaggtgcaggaaggtgaatct

SEQ ID NO: 5043735 - DNA, 25 bp, Homo sapien
gcagcggagaggacagacactgctt

SEQ ID NO: 5043736 - DNA, 25 bp, Homo sapien
cagcggagaggacagacactgcttc

SEQ ID NO: 5043737 - DNA, 25 bp, Homo sapien
agcagcggagaggacagacactgct

SEQ ID NO: 5043738 - DNA, 25 bp, Homo sapien
cagcagggacaagggttacaatttt

SEQ ID NO: 5043739 - DNA, 25 bp, Homo sapien
acccttgttgcaactatctctgcag

SEQ ID NO: 5043740 - DNA, 25 bp, Homo sapien
ttagctgtaacccttgttgcaacta

SEQ ID NO: 5043741 - DNA, 25 bp, Homo sapien
gccccagagatttaatgccagcagg

SEQ ID NO: 5043742 - DNA, 25 bp, Homo sapien
gccatcacatctcttaccgcctgcc

SEQ ID NO: 5043743 - DNA, 25 bp, Homo sapien
actccttcctgatcgtggcctgctt

SEQ ID NO: 5043744 - DNA, 25 bp, Homo sapien
ggggacgtagccctagcagctccca

SEQ ID NO: 5043745 - DNA, 25 bp, Homo sapien
ctggaggggacgtagccctagcagc

SEQ ID NO: 5043746 - DNA, 25 bp, Homo sapien
cactccttcctgatcgtggcctgct

SEQ ID NO: 5043747 - DNA, 25 bp, Homo sapien
atcagtctgtcagcctcagtctctg

SEQ ID NO: 5043748 - DNA, 25 bp, Homo sapien
agagtgatcagtctgtcagcctcag

SEQ ID NO: 5043749 - DNA, 25 bp, Homo sapien
gaaagggctgtcaggctggtgtctg

SEQ ID NO: 5043750 - DNA, 25 bp, Homo sapien
gtgtctgtgggctccacaggaacca

SEQ ID NO: 5043751 - DNA, 25 bp, Homo sapien
ctcctgaaagggctgtcaggctggt

SEQ ID NO: 5043752 - DNA, 25 bp, Homo sapien
cttctcctgaaagggctgtcaggct

SEQ ID NO: 5043753 - DNA, 25 bp, Homo sapien
tgggcagaagtgttgtcaagtcttc

SEQ ID NO: 5043754 - DNA, 25 bp, Homo sapien
gcagaagtgttgtcaagtcttcctt

SEQ ID NO: 5043755 - DNA, 25 bp, Homo sapien
gggcagaagtgttgtcaagtcttcc

SEQ ID NO: 5043756 - DNA, 25 bp, Homo sapien
tctgggcagaagtgttgtcaagtct

SEQ ID NO: 5043757 - DNA, 25 bp, Homo sapien
tgtccagaaggttcagggaagagtt

SEQ ID NO: 5043758 - DNA, 25 bp, Homo sapien
gaggctggatcgagccaagcactct

SEQ ID NO: 5043759 - DNA, 25 bp, Homo sapien
gagccaagcactctatggcagcctt

SEQ ID NO: 5043760 - DNA, 25 bp, Homo sapien
tatggcagccttatcacaggtacac

SEQ ID NO: 5043761 - DNA, 25 bp, Homo sapien
ttggagacagtccatctcagcggcc

SEQ ID NO: 5043762 - DNA, 25 bp, Homo sapien
tgacctctgtgctaagtttggcggg

SEQ ID NO: 5043763 - DNA, 25 bp, Homo sapien
atagcacctgcggtgctggaagcag

SEQ ID NO: 5043764 - DNA, 25 bp, Homo sapien
tgctgacacaattgacctctgtgct

SEQ ID NO: 5043765 - DNA, 25 bp, Homo sapien
agtcttcaaagtctcgggggcagag

SEQ ID NO: 5043766 - DNA, 25 bp, Homo sapien
cctgcaggtgcaaccatagtcttca

SEQ ID NO: 5043767 - DNA, 25 bp, Homo sapien
gccacacacttcataccattgacaa

SEQ ID NO: 5043768 - DNA, 25 bp, Homo sapien
aaactggatcagcacagggaaattg

SEQ ID NO: 5043769 - DNA, 25 bp, Homo sapien
ctgcagccaggtgaagtgggggccc

SEQ ID NO: 5043770 - DNA, 25 bp, Homo sapien
agccaggtgaagtgggggcccaggc

SEQ ID NO: 5043771 - DNA, 25 bp, Homo sapien
caggtgaagtgggggcccaggcaat

SEQ ID NO: 5043772 - DNA, 25 bp, Homo sapien
tgcagccaggtgaagtgggggccca

SEQ ID NO: 5043773 - DNA, 25 bp, Homo sapien
cacatttttaaacatcccactgaag

SEQ ID NO: 5043774 - DNA, 25 bp, Homo sapien
caaaaatttcagccacactttccac

SEQ ID NO: 5043775 - DNA, 25 bp, Homo sapien
tttaaacatcccactgaagaaagtg

SEQ ID NO: 5043776 - DNA, 25 bp, Homo sapien
aaaatttcagccacactttccacat

SEQ ID NO: 5043777 - DNA, 25 bp, Homo sapien
tgccgtgagggctactcttgctgaa

SEQ ID NO: 5043778 - DNA, 25 bp, Homo sapien
gaactgctgtgtagattgccgtgag

SEQ ID NO: 5043779 - DNA, 25 bp, Homo sapien
tatggagaatgaagcttctaagccg

SEQ ID NO: 5043780 - DNA, 25 bp, Homo sapien
tcttctaaatgccaagtgtggcctg

SEQ ID NO: 5043781 - DNA, 25 bp, Homo sapien
gaagatgtggagtgtccagaggatg

SEQ ID NO: 5043782 - DNA, 25 bp, Homo sapien
ctcctgtggaagatgtggagtgtcc

SEQ ID NO: 5043783 - DNA, 25 bp, Homo sapien
tgatattgtttgggagtcctggagg

SEQ ID NO: 5043784 - DNA, 25 bp, Homo sapien
atattgtttgggagtcctggaggca

SEQ ID NO: 5043785 - DNA, 25 bp, Homo sapien
gtcactgaggctcgccaagtccttc

SEQ ID NO: 5043786 - DNA, 25 bp, Homo sapien
aacgcataactgagagagtcactga

SEQ ID NO: 5043787 - DNA, 25 bp, Homo sapien
gagtcactgaggctcgccaagtcct

SEQ ID NO: 5043788 - DNA, 25 bp, Homo sapien
cccttggagtttccacaacgcataa

SEQ ID NO: 5043789 - DNA, 25 bp, Homo sapien
gactctatgcaacttttaccaaaac

SEQ ID NO: 5043790 - DNA, 25 bp, Homo sapien
tgcaccttagctgtttttctatcag

SEQ ID NO: 5043791 - DNA, 25 bp, Homo sapien
cacagtattaagtcctgcttttgcc

SEQ ID NO: 5043792 - DNA, 25 bp, Homo sapien
aaatatgccgcacattttcacagta

SEQ ID NO: 5043793 - DNA, 25 bp, Homo sapien
tgtatcacagatgataacgtcttca

SEQ ID NO: 5043794 - DNA, 25 bp, Homo sapien
ccacgtgacatggctgtaatgtatc

SEQ ID NO: 5043795 - DNA, 25 bp, Homo sapien
tatcacagatgataacgtcttcagc

SEQ ID NO: 5043796 - DNA, 25 bp, Homo sapien
ggccacgtgacatggctgtaatgta

SEQ ID NO: 5043797 - DNA, 25 bp, Homo sapien
ctttggactgctaagacgtgtgcca

SEQ ID NO: 5043798 - DNA, 25 bp, Homo sapien
aagacgtgtgccaattccattattt

SEQ ID NO: 5043799 - DNA, 25 bp, Homo sapien
gactgctaagacgtgtgccaattcc

SEQ ID NO: 5043800 - DNA, 25 bp, Homo sapien
gctaagacgtgtgccaattccatta

SEQ ID NO: 5043801 - DNA, 25 bp, Homo sapien
gtattctaccgaaaagatcaaccag

SEQ ID NO: 5043802 - DNA, 25 bp, Homo sapien
tggaatgataatgtctattggtgct

SEQ ID NO: 5043803 - DNA, 25 bp, Homo sapien
gaatgggatttcatggtattatgta

SEQ ID NO: 5043804 - DNA, 25 bp, Homo sapien
aacatctttagatagtggaatgata

SEQ ID NO: 5043805 - DNA, 25 bp, Homo sapien
tttttcctcaggtcccttctcagag

SEQ ID NO: 5043806 - DNA, 25 bp, Homo sapien
ttcctcaggtcccttctcagaggat

SEQ ID NO: 5043807 - DNA, 25 bp, Homo sapien
ctttttcctcaggtcccttctcaga

SEQ ID NO: 5043808 - DNA, 25 bp, Homo sapien
ttttcctcaggtcccttctcagagg

SEQ ID NO: 5043809 - DNA, 25 bp, Homo sapien
caaaggatggggcttaggcagcaac

SEQ ID NO: 5043810 - DNA, 25 bp, Homo sapien
ctggtgaggagaaacgcaatcatag

SEQ ID NO: 5043811 - DNA, 25 bp, Homo sapien
atggggcttaggcagcaactggaac

SEQ ID NO: 5043812 - DNA, 25 bp, Homo sapien
aggagaaacgcaatcatagcaggag

SEQ ID NO: 5043813 - DNA, 25 bp, Homo sapien
gccagcagaataggatggaagcatt

SEQ ID NO: 5043814 - DNA, 25 bp, Homo sapien
agccagcagaataggatggaagcat

SEQ ID NO: 5043815 - DNA, 25 bp, Homo sapien
aagccagcagaataggatggaagca

SEQ ID NO: 5043816 - DNA, 25 bp, Homo sapien
catgtcctttcttggtcccacaagg

SEQ ID NO: 5043817 - DNA, 25 bp, Homo sapien
gtcctttcttggtcccacaaggcat

SEQ ID NO: 5043818 - DNA, 25 bp, Homo sapien
ccccatgtcctttcttggtcccaca

SEQ ID NO: 5043819 - DNA, 25 bp, Homo sapien
tgtcctttcttggtcccacaaggca

SEQ ID NO: 5043820 - DNA, 25 bp, Homo sapien
gctagggtttgaacaggtgcagact

SEQ ID NO: 5043821 - DNA, 25 bp, Homo sapien
tcctcacatcaagaaggaagccttt

SEQ ID NO: 5043822 - DNA, 25 bp, Homo sapien
gagtgcagctggatgaatgatgcta

SEQ ID NO: 5043823 - DNA, 25 bp, Homo sapien
ggaaagacccttagccatgtgatgc

SEQ ID NO: 5043824 - DNA, 25 bp, Homo sapien
tgacgttacgcatgtaactgcacaa

SEQ ID NO: 5043825 - DNA, 25 bp, Homo sapien
gaggctttcttattgccctagctat

SEQ ID NO: 5043826 - DNA, 25 bp, Homo sapien
acctcatctgctaaccactggtggc

SEQ ID NO: 5043827 - DNA, 25 bp, Homo sapien
ttcatcagaacagatacagtcactg

SEQ ID NO: 5043828 - DNA, 25 bp, Homo sapien
ccagttggactccaggcagtcgtca

SEQ ID NO: 5043829 - DNA, 25 bp, Homo sapien
gctaggccagatccttgcataagcc

SEQ ID NO: 5043830 - DNA, 25 bp, Homo sapien
tgcataagcctcagaggtattccgc

SEQ ID NO: 5043831 - DNA, 25 bp, Homo sapien
ggtattccgcatttgagcttcttaa

SEQ ID NO: 5043832 - DNA, 25 bp, Homo sapien
ccttaggtcgtgcagtatcagcttg

SEQ ID NO: 5043833 - DNA, 25 bp, Homo sapien
taactaagtttagccatgcaggcca

SEQ ID NO: 5043834 - DNA, 25 bp, Homo sapien
atgctgactgtgcaaccccactgga

SEQ ID NO: 5043835 - DNA, 25 bp, Homo sapien
gaatcattgaacctgagggtgctca

SEQ ID NO: 5043836 - DNA, 25 bp, Homo sapien
taactgatgatctagctggagcctg

SEQ ID NO: 5043837 - DNA, 25 bp, Homo sapien
ggtggatggcgtatcccctgaagta

SEQ ID NO: 5043838 - DNA, 25 bp, Homo sapien
ccctgaagtaattgttatgccctag

SEQ ID NO: 5043839 - DNA, 25 bp, Homo sapien
caatgttttgcacagattcacagga

SEQ ID NO: 5043840 - DNA, 25 bp, Homo sapien
ttctcaaggcacttttgctttaagg

SEQ ID NO: 5043841 - DNA, 25 bp, Homo sapien
tattctcaaggcacttttgctttaa

SEQ ID NO: 5043842 - DNA, 25 bp, Homo sapien
agacttgcagatattctcaaggcac

SEQ ID NO: 5043843 - DNA, 25 bp, Homo sapien
acagacttgcagatattctcaaggc

SEQ ID NO: 5043844 - DNA, 25 bp, Homo sapien
tgtgcgagtgggacacccttttcac

SEQ ID NO: 5043845 - DNA, 25 bp, Homo sapien
ccaggaatagtattcaagacagtat

SEQ ID NO: 5043846 - DNA, 25 bp, Homo sapien
tcaccctctgacagatatatgttgc

SEQ ID NO: 5043847 - DNA, 25 bp, Homo sapien
cagatatatgttgcattcttcagaa

SEQ ID NO: 5043848 - DNA, 25 bp, Homo sapien
tttgtaagtcaccagggactgtggc

SEQ ID NO: 5043849 - DNA, 25 bp, Homo sapien
gggcctgaggtagcaaaatttgtaa

SEQ ID NO: 5043850 - DNA, 25 bp, Homo sapien
cctgaatagaagaggagccgtggac

SEQ ID NO: 5043851 - DNA, 25 bp, Homo sapien
gcagcagcctgaatagaagaggagc

SEQ ID NO: 5043852 - DNA, 25 bp, Homo sapien
gcttattgcctgactgccttgtggc

SEQ ID NO: 5043853 - DNA, 25 bp, Homo sapien
tgcttattgcctgactgccttgtgg

SEQ ID NO: 5043854 - DNA, 25 bp, Homo sapien
tcaggcatgggttgagcctctgaat

SEQ ID NO: 5043855 - DNA, 25 bp, Homo sapien
aggcatgggttgagcctctgaatag

SEQ ID NO: 5043856 - DNA, 25 bp, Homo sapien
ccatcaggcatgggttgagcctctg

SEQ ID NO: 5043857 - DNA, 25 bp, Homo sapien
tccatcaggcatgggttgagcctct

SEQ ID NO: 5043858 - DNA, 25 bp, Homo sapien
tagtaagcatcttctcttcgttaag

SEQ ID NO: 5043859 - DNA, 25 bp, Homo sapien
tgcatcaggtgaatatagtcttgtc

SEQ ID NO: 5043860 - DNA, 25 bp, Homo sapien
atcagtaagagtttagtaagcatct

SEQ ID NO: 5043861 - DNA, 25 bp, Homo sapien
tcttctcttcgttaagccctgcatc

SEQ ID NO: 5043862 - DNA, 25 bp, Homo sapien
gacagacaggtaaacatagcattcc

SEQ ID NO: 5043863 - DNA, 25 bp, Homo sapien
agacaggtaaacatagcattcctca

SEQ ID NO: 5043864 - DNA, 25 bp, Homo sapien
cagacaggtaaacatagcattcctc

SEQ ID NO: 5043865 - DNA, 25 bp, Homo sapien
gacaggtaaacatagcattcctcac

SEQ ID NO: 5043866 - DNA, 25 bp, Homo sapien
ctactgtaacagttttaagagtcag

SEQ ID NO: 5043867 - DNA, 25 bp, Homo sapien
aagctactgtaacagttttaagagt

SEQ ID NO: 5043868 - DNA, 25 bp, Homo sapien
gctactgtaacagttttaagagtca

SEQ ID NO: 5043869 - DNA, 25 bp, Homo sapien
agctactgtaacagttttaagagtc

SEQ ID NO: 5043870 - DNA, 25 bp, Homo sapien
ccagcagtgaatggccactctgcag

SEQ ID NO: 5043871 - DNA, 25 bp, Homo sapien
caccagcagtgaatggccactctgc

SEQ ID NO: 5043872 - DNA, 25 bp, Homo sapien
accagcagtgaatggccactctgca

SEQ ID NO: 5043873 - DNA, 25 bp, Homo sapien
cttccagaagtcagaatggaattac

SEQ ID NO: 5043874 - DNA, 25 bp, Homo sapien
ggccttccagaagtcagaatggaat

SEQ ID NO: 5043875 - DNA, 25 bp, Homo sapien
caggaatggccttccagaagtcaga

SEQ ID NO: 5043876 - DNA, 25 bp, Homo sapien
tgcaaagggcaggaatggccttcca

SEQ ID NO: 5043877 - DNA, 25 bp, Homo sapien
ttggactcggagtctgtgtgccatg

SEQ ID NO: 5043878 - DNA, 25 bp, Homo sapien
tgccttggttggactcggagtctgt

SEQ ID NO: 5043879 - DNA, 25 bp, Homo sapien
gggctgttgccttggttggactcgg

SEQ ID NO: 5043880 - DNA, 25 bp, Homo sapien
tgttgccttggttggactcggagtc

SEQ ID NO: 5043881 - DNA, 25 bp, Homo sapien
caggtgtggccattatctcagcagc

SEQ ID NO: 5043882 - DNA, 25 bp, Homo sapien
ctgagcccagggcacggacgatatg

SEQ ID NO: 5043883 - DNA, 25 bp, Homo sapien
ggacgatatggaagcccacgtctgt

SEQ ID NO: 5043884 - DNA, 25 bp, Homo sapien
gcagcaggcgccaaaaggcttgtag

SEQ ID NO: 5043885 - DNA, 25 bp, Homo sapien
gagagtgtgggaggcactgaaccat

SEQ ID NO: 5043886 - DNA, 25 bp, Homo sapien
agagtgtgggaggcactgaaccatg

SEQ ID NO: 5043887 - DNA, 25 bp, Homo sapien
ctcaggaggcctgcctgtgttcagg

SEQ ID NO: 5043888 - DNA, 25 bp, Homo sapien
gggagagtgtgggaggcactgaacc

SEQ ID NO: 5043889 - DNA, 25 bp, Homo sapien
cagtgtccggggcttgtacttggta

SEQ ID NO: 5043890 - DNA, 25 bp, Homo sapien
cagggtgtgctctgggtccagtgtc

SEQ ID NO: 5043891 - DNA, 25 bp, Homo sapien
tgtgggctttgaagtcctggcagtt

SEQ ID NO: 5043892 - DNA, 25 bp, Homo sapien
tgttttctggcttttggttgtgggc

SEQ ID NO: 5043893 - DNA, 25 bp, Homo sapien
cttcagggaggcagtcaatggtaac

SEQ ID NO: 5043894 - DNA, 25 bp, Homo sapien
gactctggtacatgtctttggaaga

SEQ ID NO: 5043895 - DNA, 25 bp, Homo sapien
taattaaaagtatcaggcatttgct

SEQ ID NO: 5043896 - DNA, 25 bp, Homo sapien
aactgaaaggtcactggactgcaaa

SEQ ID NO: 5043897 - DNA, 25 bp, Homo sapien
atttgctatgtttcctgaacagatt

SEQ ID NO: 5043898 - DNA, 25 bp, Homo sapien
ccttatggatacaactaaatttcat

SEQ ID NO: 5043899 - DNA, 25 bp, Homo sapien
tgccttatggatacaactaaatttc

SEQ ID NO: 5043900 - DNA, 25 bp, Homo sapien
gccttatggatacaactaaatttca

SEQ ID NO: 5043901 - DNA, 25 bp, Homo sapien
atgccttatggatacaactaaattt

SEQ ID NO: 5043902 - DNA, 25 bp, Homo sapien
acacatagaaatgtcaactgtgttg

SEQ ID NO: 5043903 - DNA, 25 bp, Homo sapien
cacatagaaatgtcaactgtgttgc

SEQ ID NO: 5043904 - DNA, 25 bp, Homo sapien
acacacatagaaatgtcaactgtgt

SEQ ID NO: 5043905 - DNA, 25 bp, Homo sapien
ttttcttctatctcccagaagtcag

SEQ ID NO: 5043906 - DNA, 25 bp, Homo sapien
caagccgctggtaaatgtgtaattg

SEQ ID NO: 5043907 - DNA, 25 bp, Homo sapien
cagaacaccagacaagccgctggta

SEQ ID NO: 5043908 - DNA, 25 bp, Homo sapien
tgtaattgataatgggatatttttc

SEQ ID NO: 5043909 - DNA, 25 bp, Homo sapien
ctgtcatcacacagatgaagatgca

SEQ ID NO: 5043910 - DNA, 25 bp, Homo sapien
tgtcatcacacagatgaagatgcaa

SEQ ID NO: 5043911 - DNA, 25 bp, Homo sapien
gaattgccgatgatatctaccagta

SEQ ID NO: 5043912 - DNA, 25 bp, Homo sapien
gaggatggaggttgacttaaaaatc

SEQ ID NO: 5043913 - DNA, 25 bp, Homo sapien
gatatctaccagtagagctgtaaaa

SEQ ID NO: 5043914 - DNA, 25 bp, Homo sapien
ggtagctggtagaattgccgatgat

SEQ ID NO: 5043915 - DNA, 25 bp, Homo sapien
aatttggcggggtctactgtcttca

SEQ ID NO: 5043916 - DNA, 25 bp, Homo sapien
gggtctactgtcttcaggttagaaa

SEQ ID NO: 5043917 - DNA, 25 bp, Homo sapien
tcattggtccgattgtttaaacagt

SEQ ID NO: 5043918 - DNA, 25 bp, Homo sapien
ttaaacagtagcaataccttgtggg

SEQ ID NO: 5043919 - DNA, 25 bp, Homo sapien
caccaccaccatcaagaagagccag

SEQ ID NO: 5043920 - DNA, 25 bp, Homo sapien
accaccatcaagaagagccagccag

SEQ ID NO: 5043921 - DNA, 25 bp, Homo sapien
ccatcaagaagagccagccagcact

SEQ ID NO: 5043922 - DNA, 25 bp, Homo sapien
accaccaccatcaagaagagccagc

SEQ ID NO: 5043923 - DNA, 25 bp, Homo sapien
gctacagaaaacttgtggaaggcga

SEQ ID NO: 5043924 - DNA, 25 bp, Homo sapien
tacagaaaacttgtggaaggcgaag

SEQ ID NO: 5043925 - DNA, 25 bp, Homo sapien
cagaaaacttgtggaaggcgaagga

SEQ ID NO: 5043926 - DNA, 25 bp, Homo sapien
aaacttgtggaaggcgaaggaactg

SEQ ID NO: 5043927 - DNA, 25 bp, Homo sapien
tctactgagcatcccattcacaagc

SEQ ID NO: 5043928 - DNA, 25 bp, Homo sapien
taagcgcggacagatcgattgacct

SEQ ID NO: 5043929 - DNA, 25 bp, Homo sapien
cagatcgattgaccttgcgggcagc

SEQ ID NO: 5043930 - DNA, 25 bp, Homo sapien
caagctctgtcaggttaagcgcgga

SEQ ID NO: 5043931 - DNA, 25 bp, Homo sapien
ccgtcgtagcaagaaatgccacccc

SEQ ID NO: 5043932 - DNA, 25 bp, Homo sapien
ctctcttcttctctaaggccagaca

SEQ ID NO: 5043933 - DNA, 25 bp, Homo sapien
gtagcaagaaatgccacccccttct

SEQ ID NO: 5043934 - DNA, 25 bp, Homo sapien
tcgtagcaagaaatgccaccccctt

SEQ ID NO: 5043935 - DNA, 25 bp, Homo sapien
gcgcagtctactctgcaccagctgc

SEQ ID NO: 5043936 - DNA, 25 bp, Homo sapien
ctgcgcagtctactctgcaccagct

SEQ ID NO: 5043937 - DNA, 25 bp, Homo sapien
tgcgcagtctactctgcaccagctg

SEQ ID NO: 5043938 - DNA, 25 bp, Homo sapien
ctttcttggcttctcctttgatgcc

SEQ ID NO: 5043939 - DNA, 25 bp, Homo sapien
aaggtcattcccttctctttcttgg

SEQ ID NO: 5043940 - DNA, 25 bp, Homo sapien
tcttggcttctcctttgatgccaga

SEQ ID NO: 5043941 - DNA, 25 bp, Homo sapien
ttggcttctcctttgatgccagaca

SEQ ID NO: 5043942 - DNA, 25 bp, Homo sapien
cacagcttcattgaaggaccacgtg

SEQ ID NO: 5043943 - DNA, 25 bp, Homo sapien
agcttcattgaaggaccacgtgaca

SEQ ID NO: 5043944 - DNA, 25 bp, Homo sapien
gcacagcttcattgaaggaccacgt

SEQ ID NO: 5043945 - DNA, 25 bp, Homo sapien
cagcttcattgaaggaccacgtgac

SEQ ID NO: 5043946 - DNA, 25 bp, Homo sapien
ctttcaaaataccatcttggagtgc

SEQ ID NO: 5043947 - DNA, 25 bp, Homo sapien
aataccatcttggagtgccagtaaa

SEQ ID NO: 5043948 - DNA, 25 bp, Homo sapien
caaaataccatcttggagtgccagt

SEQ ID NO: 5043949 - DNA, 25 bp, Homo sapien
ccatcttggagtgccagtaaaaagc

SEQ ID NO: 5043950 - DNA, 25 bp, Homo sapien
cgccaatcaacaagggtcccaaatc

SEQ ID NO: 5043951 - DNA, 25 bp, Homo sapien
gcttgatgagcaaacctgcctttct

SEQ ID NO: 5043952 - DNA, 25 bp, Homo sapien
tctcactgaactctgcagccaaaag

SEQ ID NO: 5043953 - DNA, 25 bp, Homo sapien
caaaaggtgctggatcagatatagc

SEQ ID NO: 5043954 - DNA, 25 bp, Homo sapien
ccatacgcctttgtgatgctagaca

SEQ ID NO: 5043955 - DNA, 25 bp, Homo sapien
tccttggtcaactggatgcccatgc

SEQ ID NO: 5043956 - DNA, 25 bp, Homo sapien
cagttgcagagtgggtacacttacc

SEQ ID NO: 5043957 - DNA, 25 bp, Homo sapien
cccatgctcattgttggaagctgaa

SEQ ID NO: 5043958 - DNA, 25 bp, Homo sapien
tgcagttcatagataattctcagca

SEQ ID NO: 5043959 - DNA, 25 bp, Homo sapien
ctgcagttcatagataattctcagc

SEQ ID NO: 5043960 - DNA, 25 bp, Homo sapien
gcagttcatagataattctcagcat

SEQ ID NO: 5043961 - DNA, 25 bp, Homo sapien
ctctaatatgagccagtgccatgct

SEQ ID NO: 5043962 - DNA, 25 bp, Homo sapien
tctaatatgagccagtgccatgctt

SEQ ID NO: 5043963 - DNA, 25 bp, Homo sapien
ctaatatgagccagtgccatgcttt

SEQ ID NO: 5043964 - DNA, 25 bp, Homo sapien
taatatgagccagtgccatgctttg

SEQ ID NO: 5043965 - DNA, 25 bp, Homo sapien
tactcgtagcacagagacaaaccca

SEQ ID NO: 5043966 - DNA, 25 bp, Homo sapien
gaatgtgaagaaagcctactcgtag

SEQ ID NO: 5043967 - DNA, 25 bp, Homo sapien
tataaagagcactaaaggccacttg

SEQ ID NO: 5043968 - DNA, 25 bp, Homo sapien
aatagttgtgttcccctgtaagcca

SEQ ID NO: 5043969 - DNA, 25 bp, Homo sapien
tctgcagaatttcagagctcagaaa

SEQ ID NO: 5043970 - DNA, 25 bp, Homo sapien
ttctgcagaatttcagagctcagaa

SEQ ID NO: 5043971 - DNA, 25 bp, Homo sapien
tgagtgaacgtagaagcccgaagca

SEQ ID NO: 5043972 - DNA, 25 bp, Homo sapien
tgtgaagccactcaaaggacctgct

SEQ ID NO: 5043973 - DNA, 25 bp, Homo sapien
cccagggaaggtttaagcaagcatt

SEQ ID NO: 5043974 - DNA, 25 bp, Homo sapien
gaatgagctttccaggtacacgggc

SEQ ID NO: 5043975 - DNA, 25 bp, Homo sapien
gggcaagtttcagaacgactagtat

SEQ ID NO: 5043976 - DNA, 25 bp, Homo sapien
tctgtggtcatgtcatcttgggtca

SEQ ID NO: 5043977 - DNA, 25 bp, Homo sapien
gggtcatgttaaccagttccattgg

SEQ ID NO: 5043978 - DNA, 25 bp, Homo sapien
gctgaaacgattgcaatttcttggg

SEQ ID NO: 5043979 - DNA, 25 bp, Homo sapien
taatgttagctcagtaggcagcccc

SEQ ID NO: 5043980 - DNA, 25 bp, Homo sapien
tgctggagcgttttacacaagaggg

SEQ ID NO: 5043981 - DNA, 25 bp, Homo sapien
tcttaggttgtaatccccactggca

SEQ ID NO: 5043982 - DNA, 25 bp, Homo sapien
taaactgggtgctttccacgcgaca

SEQ ID NO: 5043983 - DNA, 25 bp, Homo sapien
tgggcttattggaaggggtccatac

SEQ ID NO: 5043984 - DNA, 25 bp, Homo sapien
aatgggcttattggaaggggtccat

SEQ ID NO: 5043985 - DNA, 25 bp, Homo sapien
atgggcttattggaaggggtccata

SEQ ID NO: 5043986 - DNA, 25 bp, Homo sapien
ggcatggagccgctgggcgtgaagg

SEQ ID NO: 5043987 - DNA, 25 bp, Homo sapien
cccctgtggacgacagaggcatgga

SEQ ID NO: 5043988 - DNA, 25 bp, Homo sapien
gctgggcgtgaaggggtccgtgtct

SEQ ID NO: 5043989 - DNA, 25 bp, Homo sapien
ccgctgggcgtgaaggggtccgtgt

SEQ ID NO: 5043990 - DNA, 25 bp, Homo sapien
gaggagttgcctgaacctttccaga

SEQ ID NO: 5043991 - DNA, 25 bp, Homo sapien
tcgtggttgaccgacatcagggaca

SEQ ID NO: 5043992 - DNA, 25 bp, Homo sapien
ggtcatgtgcaaaaaacccataggg

SEQ ID NO: 5043993 - DNA, 25 bp, Homo sapien
catgtgcatatccacgaggaagtcc

SEQ ID NO: 5043994 - DNA, 25 bp, Homo sapien
gatgtggatggtctggctacatatg

SEQ ID NO: 5043995 - DNA, 25 bp, Homo sapien
tggtctggctacatatggttcattc

SEQ ID NO: 5043996 - DNA, 25 bp, Homo sapien
tccccatcatgctttggtcttcgat

SEQ ID NO: 5043997 - DNA, 25 bp, Homo sapien
tcatgctttggtcttcgatttctga

SEQ ID NO: 5043998 - DNA, 25 bp, Homo sapien
agctctctgtgttacaatgttgtca

SEQ ID NO: 5043999 - DNA, 25 bp, Homo sapien
tgtcagggggctgatatctgagtgt

SEQ ID NO: 5044000 - DNA, 25 bp, Homo sapien
tctctgtgttacaatgttgtcaggg

SEQ ID NO: 5044001 - DNA, 25 bp, Homo sapien
acaatgttgtcagggggctgatatc

SEQ ID NO: 5044002 - DNA, 25 bp, Homo sapien
tccaggggtgaaaatcatatctatt

SEQ ID NO: 5044003 - DNA, 25 bp, Homo sapien
aggtccaggggtgaaaatcatatct

SEQ ID NO: 5044004 - DNA, 25 bp, Homo sapien
cttcttgtgttttggcgtggaggga

SEQ ID NO: 5044005 - DNA, 25 bp, Homo sapien
ggaaggtgaatgctgaccctttctg

SEQ ID NO: 5044006 - DNA, 25 bp, Homo sapien
ctgtgcccaaccaatgactgcataa

SEQ ID NO: 5044007 - DNA, 25 bp, Homo sapien
tgtgcccaaccaatgactgcataac

SEQ ID NO: 5044008 - DNA, 25 bp, Homo sapien
gtgcccaaccaatgactgcataaca

SEQ ID NO: 5044009 - DNA, 25 bp, Homo sapien
actgtgcccaaccaatgactgcata

SEQ ID NO: 5044010 - DNA, 25 bp, Homo sapien
cgtaaggcctcaaagtctccttgaa

SEQ ID NO: 5044011 - DNA, 25 bp, Homo sapien
gagatgcccggcagaatactgctca

SEQ ID NO: 5044012 - DNA, 25 bp, Homo sapien
ctttatcctggaaagcatgtcgaga

SEQ ID NO: 5044013 - DNA, 25 bp, Homo sapien
cgtctgaaggtactttatcctggaa

SEQ ID NO: 5044014 - DNA, 25 bp, Homo sapien
ctgacggctcggatggcggccttca

SEQ ID NO: 5044015 - DNA, 25 bp, Homo sapien
gatcatgtcttcgatggggaagtca

SEQ ID NO: 5044016 - DNA, 25 bp, Homo sapien
cgatggggaagtcattcccatagcc

SEQ ID NO: 5044017 - DNA, 25 bp, Homo sapien
tgtcttccgccatggggtcacctgt

SEQ ID NO: 5044018 - DNA, 25 bp, Homo sapien
ggccgtgcggaaacgctctttattg

SEQ ID NO: 5044019 - DNA, 25 bp, Homo sapien
tcagaactctgccagaaagcgtagg

SEQ ID NO: 5044020 - DNA, 25 bp, Homo sapien
cgtaggctttcatgcggaaggccgt

SEQ ID NO: 5044021 - DNA, 25 bp, Homo sapien
ttcctttagtattgctaccacgagg

SEQ ID NO: 5044022 - DNA, 25 bp, Homo sapien
ctcaaacggtctggattgttttggc

SEQ ID NO: 5044023 - DNA, 25 bp, Homo sapien
ccagatgcgtggaacaaagtcagaa

SEQ ID NO: 5044024 - DNA, 25 bp, Homo sapien
cagtttagatggtgttaggaatcca

SEQ ID NO: 5044025 - DNA, 25 bp, Homo sapien
cttaaaacgccattggtcacagatg

SEQ ID NO: 5044026 - DNA, 25 bp, Homo sapien
tcatgcaactggagccttgggcaat

SEQ ID NO: 5044027 - DNA, 25 bp, Homo sapien
gggcaatggccccttctcgtgggaa

SEQ ID NO: 5044028 - DNA, 25 bp, Homo sapien
gagctgtccttaccacacactctta

SEQ ID NO: 5044029 - DNA, 25 bp, Homo sapien
tgggaacccttggataggcccctga

SEQ ID NO: 5044030 - DNA, 25 bp, Homo sapien
aagcgtgaattatagtgtctgacca

SEQ ID NO: 5044031 - DNA, 25 bp, Homo sapien
caaagcgtgaattatagtgtctgac

SEQ ID NO: 5044032 - DNA, 25 bp, Homo sapien
aggcaaagcgtgaattatagtgtct

SEQ ID NO: 5044033 - DNA, 25 bp, Homo sapien
cgtgaattatagtgtctgaccaaat

SEQ ID NO: 5044034 - DNA, 25 bp, Homo sapien
cagagtattagccttgtggagctca

SEQ ID NO: 5044035 - DNA, 25 bp, Homo sapien
ttacacttcaggcagagtattagcc

SEQ ID NO: 5044036 - DNA, 25 bp, Homo sapien
ttcaggcagagtattagccttgtgg

SEQ ID NO: 5044037 - DNA, 25 bp, Homo sapien
cacttcaggcagagtattagccttg

SEQ ID NO: 5044038 - DNA, 25 bp, Homo sapien
caaacacccagcaataatgggatag

SEQ ID NO: 5044039 - DNA, 25 bp, Homo sapien
aatgggatagattttccctctgtgc

SEQ ID NO: 5044040 - DNA, 25 bp, Homo sapien
cttcttctctgaggtgggtgagcca

SEQ ID NO: 5044041 - DNA, 25 bp, Homo sapien
aggtgggtgagccaccaaacaccca

SEQ ID NO: 5044042 - DNA, 25 bp, Homo sapien
ctcctctgcccaaattctgtcagca

SEQ ID NO: 5044043 - DNA, 25 bp, Homo sapien
gctgtatccttcctcgaaagattgc

SEQ ID NO: 5044044 - DNA, 25 bp, Homo sapien
tatccttcctcgaaagattgctgca

SEQ ID NO: 5044045 - DNA, 25 bp, Homo sapien
gtgaaacagctgtatccttcctcga

SEQ ID NO: 5044046 - DNA, 25 bp, Homo sapien
cctcgaaagattgctgcaaagcttc

SEQ ID NO: 5044047 - DNA, 25 bp, Homo sapien
catgctactcccgttggctctgagg

SEQ ID NO: 5044048 - DNA, 25 bp, Homo sapien
tgagctctaggacaggatggtcagt

SEQ ID NO: 5044049 - DNA, 25 bp, Homo sapien
tgaaggaggcgggtttacccatcca

SEQ ID NO: 5044050 - DNA, 25 bp, Homo sapien
gatgatggagcagagttgagctcta

SEQ ID NO: 5044051 - DNA, 25 bp, Homo sapien
tgaacacttgctatgggctagggac

SEQ ID NO: 5044052 - DNA, 25 bp, Homo sapien
ccagggcagtaattcggaggcttcc

SEQ ID NO: 5044053 - DNA, 25 bp, Homo sapien
ggctagggactaagacaaccactct

SEQ ID NO: 5044054 - DNA, 25 bp, Homo sapien
gatccccaataccaaatagagtgca

SEQ ID NO: 5044055 - DNA, 25 bp, Homo sapien
ggttttatgccggaaaatgagttgc

SEQ ID NO: 5044056 - DNA, 25 bp, Homo sapien
tgactggaaggttttatgccggaaa

SEQ ID NO: 5044057 - DNA, 25 bp, Homo sapien
tcactgactggaaggttttatgccg

SEQ ID NO: 5044058 - DNA, 25 bp, Homo sapien
ttttatgccggaaaatgagttgcaa

SEQ ID NO: 5044059 - DNA, 25 bp, Homo sapien
aaacagcgtctctgggtggctagag

SEQ ID NO: 5044060 - DNA, 25 bp, Homo sapien
ctctgagaacacgaaacagcgtctc

SEQ ID NO: 5044061 - DNA, 25 bp, Homo sapien
gaacacgaaacagcgtctctgggtg

SEQ ID NO: 5044062 - DNA, 25 bp, Homo sapien
cacgaaacagcgtctctgggtggct

SEQ ID NO: 5044063 - DNA, 25 bp, Homo sapien
ccgtgaggccacagacacgaataca

SEQ ID NO: 5044064 - DNA, 25 bp, Homo sapien
tgaggccacagacacgaatacagac

SEQ ID NO: 5044065 - DNA, 25 bp, Homo sapien
gtgaggccacagacacgaatacaga

SEQ ID NO: 5044066 - DNA, 25 bp, Homo sapien
cgtgaggccacagacacgaatacag

SEQ ID NO: 5044067 - DNA, 25 bp, Homo sapien
tggtcacgccctgagcattcaggtg

SEQ ID NO: 5044068 - DNA, 25 bp, Homo sapien
ggtcacgccctgagcattcaggtga

SEQ ID NO: 5044069 - DNA, 25 bp, Homo sapien
cacgccctgagcattcaggtgagtc

SEQ ID NO: 5044070 - DNA, 25 bp, Homo sapien
gctggtcacgccctgagcattcagg

SEQ ID NO: 5044071 - DNA, 25 bp, Homo sapien
gaaaggaaaagagacgactgattca

SEQ ID NO: 5044072 - DNA, 25 bp, Homo sapien
tcgccaccaggtcaatcctgttggg

SEQ ID NO: 5044073 - DNA, 25 bp, Homo sapien
tggtagcataatacctccaggcagc

SEQ ID NO: 5044074 - DNA, 25 bp, Homo sapien
gggttggtagcataatacctccagg

SEQ ID NO: 5044075 - DNA, 25 bp, Homo sapien
tgacggtgttgctcctgcaccttga

SEQ ID NO: 5044076 - DNA, 25 bp, Homo sapien
gacggtgttgctcctgcaccttgag

SEQ ID NO: 5044077 - DNA, 25 bp, Homo sapien
acggtgttgctcctgcaccttgagg

SEQ ID NO: 5044078 - DNA, 25 bp, Homo sapien
tggcggcaatcagacggccttccca

SEQ ID NO: 5044079 - DNA, 25 bp, Homo sapien
ttaaggaaaaggtggcggcaatcag

SEQ ID NO: 5044080 - DNA, 25 bp, Homo sapien
gccaattaaggaaaaggtggcggca

SEQ ID NO: 5044081 - DNA, 25 bp, Homo sapien
aaaaggtggcggcaatcagacggcc

SEQ ID NO: 5044082 - DNA, 25 bp, Homo sapien
ctctgggacgtctttctcaaccagg

SEQ ID NO: 5044083 - DNA, 25 bp, Homo sapien
agggcatctgcataggtctcaaact

SEQ ID NO: 5044084 - DNA, 25 bp, Homo sapien
tcaggaaaccgatgtaccaggccgt

SEQ ID NO: 5044085 - DNA, 25 bp, Homo sapien
caaccaggtagacaagaaatgaaga

SEQ ID NO: 5044086 - DNA, 25 bp, Homo sapien
ggaatggactgagttccatccctcc

SEQ ID NO: 5044087 - DNA, 25 bp, Homo sapien
cctctttgtcgttatcatcaagggt

SEQ ID NO: 5044088 - DNA, 25 bp, Homo sapien
gggtggcagaatgactgccttctgg

SEQ ID NO: 5044089 - DNA, 25 bp, Homo sapien
cttcctctttgtcgttatcatcaag

SEQ ID NO: 5044090 - DNA, 25 bp, Homo sapien
ggtggcagaatgactgccttctggg

SEQ ID NO: 5044091 - DNA, 25 bp, Homo sapien
gtggccagaacattgccttggtttc

SEQ ID NO: 5044092 - DNA, 25 bp, Homo sapien
aggtgccacctctccggtccatccg

SEQ ID NO: 5044093 - DNA, 25 bp, Homo sapien
ccggtccatccgcagcatgcgcagg

SEQ ID NO: 5044094 - DNA, 25 bp, Homo sapien
gaggtggccagaacattgccttggt

SEQ ID NO: 5044095 - DNA, 25 bp, Homo sapien
actcggctccaaagatgaaaatagc

SEQ ID NO: 5044096 - DNA, 25 bp, Homo sapien
gatcctcaaagcaaactcggctcca

SEQ ID NO: 5044097 - DNA, 25 bp, Homo sapien
ggcaaacttcagtcggccccgccag

SEQ ID NO: 5044098 - DNA, 25 bp, Homo sapien
ccgccagcctttgtatcggcagcaa

SEQ ID NO: 5044099 - DNA, 25 bp, Homo sapien
ctgcatggaagagcatatggagagg

SEQ ID NO: 5044100 - DNA, 25 bp, Homo sapien
tgcatggaagagcatatggagaggc

SEQ ID NO: 5044101 - DNA, 25 bp, Homo sapien
gcatggaagagcatatggagaggca

SEQ ID NO: 5044102 - DNA, 25 bp, Homo sapien
caagaattctaatcctgctctgttt

SEQ ID NO: 5044103 - DNA, 25 bp, Homo sapien
cttgcccaagaattctaatcctgct

SEQ ID NO: 5044104 - DNA, 25 bp, Homo sapien
cttagctgacttgcccaagaattct

SEQ ID NO: 5044105 - DNA, 25 bp, Homo sapien
gcccaagaattctaatcctgctctg

SEQ ID NO: 5044106 - DNA, 25 bp, Homo sapien
gtgcccatggcgggccataccaagt

SEQ ID NO: 5044107 - DNA, 25 bp, Homo sapien
gcctggacttgactggagactacaa

SEQ ID NO: 5044108 - DNA, 25 bp, Homo sapien
tggcgggccataccaagtaatggag

SEQ ID NO: 5044109 - DNA, 25 bp, Homo sapien
cgggccataccaagtaatggaggct

SEQ ID NO: 5044110 - DNA, 25 bp, Homo sapien
gccagtctcccgagacagtctcata

SEQ ID NO: 5044111 - DNA, 25 bp, Homo sapien
gccagaatcaagcaccccaggacaa

SEQ ID NO: 5044112 - DNA, 25 bp, Homo sapien
ccagtctcccgagacagtctcatac

SEQ ID NO: 5044113 - DNA, 25 bp, Homo sapien
tggaacctctttcaattggggatct

SEQ ID NO: 5044114 - DNA, 25 bp, Homo sapien
agtcaatggaacctctttcaattgg

SEQ ID NO: 5044115 - DNA, 25 bp, Homo sapien
aatggaacctctttcaattggggat

SEQ ID NO: 5044116 - DNA, 25 bp, Homo sapien
aacctctttcaattggggatctttg

SEQ ID NO: 5044117 - DNA, 25 bp, Homo sapien
aagggatgtgggccttttatgatct

SEQ ID NO: 5044118 - DNA, 25 bp, Homo sapien
aacaagggatgtgggccttttatga

SEQ ID NO: 5044119 - DNA, 25 bp, Homo sapien
taacaagggatgtgggccttttatg

SEQ ID NO: 5044120 - DNA, 25 bp, Homo sapien
caagggatgtgggccttttatgatc

SEQ ID NO: 5044121 - DNA, 25 bp, Homo sapien
tggtcgtaggaatgacagaacttcc

SEQ ID NO: 5044122 - DNA, 25 bp, Homo sapien
cccatgtgccttctgtcttgatggt

SEQ ID NO: 5044123 - DNA, 25 bp, Homo sapien
cccacatccaggctggtcgtaggaa

SEQ ID NO: 5044124 - DNA, 25 bp, Homo sapien
gagcccatgtgccttctgtcttgat

SEQ ID NO: 5044125 - DNA, 25 bp, Homo sapien
caatttcagcgattagcaatggcct

SEQ ID NO: 5044126 - DNA, 25 bp, Homo sapien
tcagtgaatagctcaaacctggcac

SEQ ID NO: 5044127 - DNA, 25 bp, Homo sapien
tgggagcacgacatgaaagatattg

SEQ ID NO: 5044128 - DNA, 25 bp, Homo sapien
cagcaggataatccaagggaggtct

SEQ ID NO: 5044129 - DNA, 25 bp, Homo sapien
tccaggcccactggatacctaacct

SEQ ID NO: 5044130 - DNA, 25 bp, Homo sapien
tgtagctgcacgtggctctaaagcg

SEQ ID NO: 5044131 - DNA, 25 bp, Homo sapien
aggaagcctgctttgtagctgcacg

SEQ ID NO: 5044132 - DNA, 25 bp, Homo sapien
cgtggctctaaagcggcagatgcag

SEQ ID NO: 5044133 - DNA, 25 bp, Homo sapien
ctgccaaaccccaccaacatcaggg

SEQ ID NO: 5044134 - DNA, 25 bp, Homo sapien
ctgattacaacccgtccacttctgc

SEQ ID NO: 5044135 - DNA, 25 bp, Homo sapien
tgccaaaccccaccaacatcagggc

SEQ ID NO: 5044136 - DNA, 25 bp, Homo sapien
aagagcacgggaggcaaataaacac

SEQ ID NO: 5044137 - DNA, 25 bp, Homo sapien
aatagaagagcacgggaggcaaata

SEQ ID NO: 5044138 - DNA, 25 bp, Homo sapien
agaagagcacgggaggcaaataaac

SEQ ID NO: 5044139 - DNA, 25 bp, Homo sapien
ttaatagaagagcacgggaggcaaa

SEQ ID NO: 5044140 - DNA, 25 bp, Homo sapien
cagatatcctcatgtccccttaggg

SEQ ID NO: 5044141 - DNA, 25 bp, Homo sapien
tcagcaacttgacgcagctgagcca

SEQ ID NO: 5044142 - DNA, 25 bp, Homo sapien
cctgtgttgtgaggctgcgtttcag

SEQ ID NO: 5044143 - DNA, 25 bp, Homo sapien
tgagccaggcaatggcagatatcct

SEQ ID NO: 5044144 - DNA, 25 bp, Homo sapien
tctcttcattgtaggaatctgcatg

SEQ ID NO: 5044145 - DNA, 25 bp, Homo sapien
ttctcttcattgtaggaatctgcat

SEQ ID NO: 5044146 - DNA, 25 bp, Homo sapien
ctcttcattgtaggaatctgcatga

SEQ ID NO: 5044147 - DNA, 25 bp, Homo sapien
cttcattgtaggaatctgcatgatc

SEQ ID NO: 5044148 - DNA, 25 bp, Homo sapien
tcagctgtgtttctagagacaatag

SEQ ID NO: 5044149 - DNA, 25 bp, Homo sapien
cagcattagcatggcagagacagct

SEQ ID NO: 5044150 - DNA, 25 bp, Homo sapien
gctgtgtttctagagacaatagcca

SEQ ID NO: 5044151 - DNA, 25 bp, Homo sapien
cattagcatggcagagacagcttct

SEQ ID NO: 5044152 - DNA, 25 bp, Homo sapien
aataatgtgctaggtctggggactc

SEQ ID NO: 5044153 - DNA, 25 bp, Homo sapien
aaaacttgtgggagcctgtcagagc

SEQ ID NO: 5044154 - DNA, 25 bp, Homo sapien
taatcccacgtgagaggaggcacag

SEQ ID NO: 5044155 - DNA, 25 bp, Homo sapien
gcaaatcactgtaatcccacgtgag

SEQ ID NO: 5044156 - DNA, 25 bp, Homo sapien
tctgttgtactagcatcagctacat

SEQ ID NO: 5044157 - DNA, 25 bp, Homo sapien
cattggaatctgttgtactagcatc

SEQ ID NO: 5044158 - DNA, 25 bp, Homo sapien
ctagcatcagctacataatggttat

SEQ ID NO: 5044159 - DNA, 25 bp, Homo sapien
tgtactagcatcagctacataatgg

SEQ ID NO: 5044160 - DNA, 25 bp, Homo sapien
agcccccccgcccactagagcaaag

SEQ ID NO: 5044161 - DNA, 25 bp, Homo sapien
cccgcccactagagcaaagagaaat

SEQ ID NO: 5044162 - DNA, 25 bp, Homo sapien
agcaaagagaaatcacacccacacc

SEQ ID NO: 5044163 - DNA, 25 bp, Homo sapien
cacccagctgacattcattttccat

SEQ ID NO: 5044164 - DNA, 25 bp, Homo sapien
cattgagaaaagtagggcattgggt

SEQ ID NO: 5044165 - DNA, 25 bp, Homo sapien
tcctctatgaagactgagttgcctt

SEQ ID NO: 5044166 - DNA, 25 bp, Homo sapien
tcattgtcatgcttcctggtgcagc

SEQ ID NO: 5044167 - DNA, 25 bp, Homo sapien
tctctaccccagtcaaggctgcgtg

SEQ ID NO: 5044168 - DNA, 25 bp, Homo sapien
aatgagcttgcaggattccactcag

SEQ ID NO: 5044169 - DNA, 25 bp, Homo sapien
tcactgtgccaatgtggcctgagtc

SEQ ID NO: 5044170 - DNA, 25 bp, Homo sapien
ttgcaggattccactcagctgtccc

SEQ ID NO: 5044171 - DNA, 25 bp, Homo sapien
gggctctgcactgctaaatgagctt

SEQ ID NO: 5044172 - DNA, 25 bp, Homo sapien
tttgaagcttggaatagaaaggcaa

SEQ ID NO: 5044173 - DNA, 25 bp, Homo sapien
tttgaattttctgcccacactgtgc

SEQ ID NO: 5044174 - DNA, 25 bp, Homo sapien
tcttccctcggctggctgcaggaaa

SEQ ID NO: 5044175 - DNA, 25 bp, Homo sapien
cagagacagtctgtgacagaggact

SEQ ID NO: 5044176 - DNA, 25 bp, Homo sapien
gaccagaacaaagcaatcatcaggg

SEQ ID NO: 5044177 - DNA, 25 bp, Homo sapien
ggagaaagaagtgacgcaattcctt

SEQ ID NO: 5044178 - DNA, 25 bp, Homo sapien
acacagttttgaacacgggagaaag

SEQ ID NO: 5044179 - DNA, 25 bp, Homo sapien
caggaagaccagaacaaagcaatca

SEQ ID NO: 5044180 - DNA, 25 bp, Homo sapien
gctttaaggagccatggtcaataga

SEQ ID NO: 5044181 - DNA, 25 bp, Homo sapien
caatagattcatgctcagagagagt

SEQ ID NO: 5044182 - DNA, 25 bp, Homo sapien
tccctctggtgacccccgtgaagtg

SEQ ID NO: 5044183 - DNA, 25 bp, Homo sapien
gtgaagtgctttgccccgaactcct

SEQ ID NO: 5044184 - DNA, 25 bp, Homo sapien
tcatcgagctgccacgacgaagcag

SEQ ID NO: 5044185 - DNA, 25 bp, Homo sapien
cagccgcactgccagatgatgtgat

SEQ ID NO: 5044186 - DNA, 25 bp, Homo sapien
gccccgggaataaaagagtcatcga

SEQ ID NO: 5044187 - DNA, 25 bp, Homo sapien
cgcactgccagatgatgtgatggat

SEQ ID NO: 5044188 - DNA, 25 bp, Homo sapien
ctgacgcccacatggtgataggctg

SEQ ID NO: 5044189 - DNA, 25 bp, Homo sapien
agagctgacgcccacatggtgatag

SEQ ID NO: 5044190 - DNA, 25 bp, Homo sapien
gagctgacgcccacatggtgatagg

SEQ ID NO: 5044191 - DNA, 25 bp, Homo sapien
gtgataggctggctttctcgagcct

SEQ ID NO: 5044192 - DNA, 25 bp, Homo sapien
tgctccaagctatgtcacccaagtg

SEQ ID NO: 5044193 - DNA, 25 bp, Homo sapien
ggcaagtggccaccctcaatggcta

SEQ ID NO: 5044194 - DNA, 25 bp, Homo sapien
taattctgggatctcaactggagag

SEQ ID NO: 5044195 - DNA, 25 bp, Homo sapien
tcagaactgcgggaaaatacattcc

SEQ ID NO: 5044196 - DNA, 25 bp, Homo sapien
ccaccatgtgctgcaacccaggtaa

SEQ ID NO: 5044197 - DNA, 25 bp, Homo sapien
accatgtgctgcaacccaggtaacg

SEQ ID NO: 5044198 - DNA, 25 bp, Homo sapien
gtgctgcaacccaggtaacgaggtg

SEQ ID NO: 5044199 - DNA, 25 bp, Homo sapien
catgtgctgcaacccaggtaacgag

SEQ ID NO: 5044200 - DNA, 25 bp, Homo sapien
tctgtggcattgtattaccaagagg

SEQ ID NO: 5044201 - DNA, 25 bp, Homo sapien
tctgcgagaaaaccttctgtggcat

SEQ ID NO: 5044202 - DNA, 25 bp, Homo sapien
ttaccaagaggctggcactcggtcc

SEQ ID NO: 5044203 - DNA, 25 bp, Homo sapien
catgccaagcctctgcgagaaaacc

SEQ ID NO: 5044204 - DNA, 25 bp, Homo sapien
tccaaatgcaaggggttctttttca

SEQ ID NO: 5044205 - DNA, 25 bp, Homo sapien
ccgtgtcctccaaatgcaaggggtt

SEQ ID NO: 5044206 - DNA, 25 bp, Homo sapien
cgtgtcctccaaatgcaaggggttc

SEQ ID NO: 5044207 - DNA, 25 bp, Homo sapien
tgtcctccaaatgcaaggggttctt

SEQ ID NO: 5044208 - DNA, 25 bp, Homo sapien
gaagtaagtgagagttccctagtcc

SEQ ID NO: 5044209 - DNA, 25 bp, Homo sapien
tgagagttccctagtccctgatttt

SEQ ID NO: 5044210 - DNA, 25 bp, Homo sapien
gctgggaagtaagtgagagttccct

SEQ ID NO: 5044211 - DNA, 25 bp, Homo sapien
attaggagctgggaagtaagtgaga

SEQ ID NO: 5044212 - DNA, 25 bp, Homo sapien
ggcttatataagatgatggtgatac

SEQ ID NO: 5044213 - DNA, 25 bp, Homo sapien
ctgcagccagaaacatgtgtggaca

SEQ ID NO: 5044214 - DNA, 25 bp, Homo sapien
tgtgtggacactttataaggcttat

SEQ ID NO: 5044215 - DNA, 25 bp, Homo sapien
tatataagatgatggtgatacacac

SEQ ID NO: 5044216 - DNA, 25 bp, Homo sapien
aggggtgccctcatatggccacccg

SEQ ID NO: 5044217 - DNA, 25 bp, Homo sapien
gtgccctcatatggccacccgtggg

SEQ ID NO: 5044218 - DNA, 25 bp, Homo sapien
tatggccacccgtggggcctctggt

SEQ ID NO: 5044219 - DNA, 25 bp, Homo sapien
gggtgccctcatatggccacccgtg

SEQ ID NO: 5044220 - DNA, 25 bp, Homo sapien
ttccttgatgggctactttgtttat

SEQ ID NO: 5044221 - DNA, 25 bp, Homo sapien
tttccttgatgggctactttgttta

SEQ ID NO: 5044222 - DNA, 25 bp, Homo sapien
ctcttcattgcatcgctgtgccatc

SEQ ID NO: 5044223 - DNA, 25 bp, Homo sapien
tctcttcattgcatcgctgtgccat

SEQ ID NO: 5044224 - DNA, 25 bp, Homo sapien
gtgctcaatgcgtgcctgctaaatg

SEQ ID NO: 5044225 - DNA, 25 bp, Homo sapien
atgagcaattgaaacttcttgcaga

SEQ ID NO: 5044226 - DNA, 25 bp, Homo sapien
tcaatgcgtgcctgctaaatggatg

SEQ ID NO: 5044227 - DNA, 25 bp, Homo sapien
gcaattgaaacttcttgcagaaagc

SEQ ID NO: 5044228 - DNA, 25 bp, Homo sapien
ggcctccagcgtcagacatgggcat

SEQ ID NO: 5044229 - DNA, 25 bp, Homo sapien
agtcatactagcactcagggcctcc

SEQ ID NO: 5044230 - DNA, 25 bp, Homo sapien
cagcgtcagacatgggcattgaaaa

SEQ ID NO: 5044231 - DNA, 25 bp, Homo sapien
gggctcctcttaaggcaagtcatac

SEQ ID NO: 5044232 - DNA, 25 bp, Homo sapien
cctcagtggagagtcatgttgccag

SEQ ID NO: 5044233 - DNA, 25 bp, Homo sapien
caggttggttccacccaaggataag

SEQ ID NO: 5044234 - DNA, 25 bp, Homo sapien
gagctctgccgaacgactacaagga

SEQ ID NO: 5044235 - DNA, 25 bp, Homo sapien
gacagatacaggtgcccagtgagct

SEQ ID NO: 5044236 - DNA, 25 bp, Homo sapien
taccagttggccctacgtgtttggc

SEQ ID NO: 5044237 - DNA, 25 bp, Homo sapien
tcatgtaacaggtcccctcaaatag

SEQ ID NO: 5044238 - DNA, 25 bp, Homo sapien
atgcccacatcccacaaggtgaggt

SEQ ID NO: 5044239 - DNA, 25 bp, Homo sapien
tgtacataacatgcacagctaccct

SEQ ID NO: 5044240 - DNA, 25 bp, Homo sapien
tgtatgaaggccaacaaatcctggg

SEQ ID NO: 5044241 - DNA, 25 bp, Homo sapien
ccccgagactaagaagcctgccttg

SEQ ID NO: 5044242 - DNA, 25 bp, Homo sapien
agtgaaaccacttgtctgcacccgg

SEQ ID NO: 5044243 - DNA, 25 bp, Homo sapien
tatggtcacctgcatagataggaag

SEQ ID NO: 5044244 - DNA, 25 bp, Homo sapien
tctgggtcttgcacagactctagaa

SEQ ID NO: 5044245 - DNA, 25 bp, Homo sapien
gaattgttactgctctcctaccctt

SEQ ID NO: 5044246 - DNA, 25 bp, Homo sapien
tttgttcaacttctcggtccccagc

SEQ ID NO: 5044247 - DNA, 25 bp, Homo sapien
ggtgttcatggctctatcctaatca

SEQ ID NO: 5044248 - DNA, 25 bp, Homo sapien
catgcaagtaaatgacaggtgtcca

SEQ ID NO: 5044249 - DNA, 25 bp, Homo sapien
ttactagctatgcagaccctgggaa

SEQ ID NO: 5044250 - DNA, 25 bp, Homo sapien
gattcagggcttgccttcaggagga

SEQ ID NO: 5044251 - DNA, 25 bp, Homo sapien
gaagcgcaagtactctcagggcctt

SEQ ID NO: 5044252 - DNA, 25 bp, Homo sapien
ggttgacgggtgagtactccactcc

SEQ ID NO: 5044253 - DNA, 25 bp, Homo sapien
tctgggtcaaagcaagatcagtgct

SEQ ID NO: 5044254 - DNA, 25 bp, Homo sapien
tataacttagcatgtcgaccaactc

SEQ ID NO: 5044255 - DNA, 25 bp, Homo sapien
tgataaagcacccactcagtgtcag

SEQ ID NO: 5044256 - DNA, 25 bp, Homo sapien
aggaagccttccctgactgcctcag

SEQ ID NO: 5044257 - DNA, 25 bp, Homo sapien
caggaagccttccctgactgcctca

SEQ ID NO: 5044258 - DNA, 25 bp, Homo sapien
ggaagccttccctgactgcctcagg

SEQ ID NO: 5044259 - DNA, 25 bp, Homo sapien
gcaggtcacgggcatcattgaagat

SEQ ID NO: 5044260 - DNA, 25 bp, Homo sapien
ggtcacgggcatcattgaagataga

SEQ ID NO: 5044261 - DNA, 25 bp, Homo sapien
tttgcaggtcacgggcatcattgaa

SEQ ID NO: 5044262 - DNA, 25 bp, Homo sapien
cacgggcatcattgaagatagagcc

SEQ ID NO: 5044263 - DNA, 25 bp, Homo sapien
gctgacacccggaagtgtgtgggct

SEQ ID NO: 5044264 - DNA, 25 bp, Homo sapien
gcccttttcccttgagccagaaaca

SEQ ID NO: 5044265 - DNA, 25 bp, Homo sapien
tgatgtctcctcggctgacacccgg

SEQ ID NO: 5044266 - DNA, 25 bp, Homo sapien
tctcctcggctgacacccggaagtg

SEQ ID NO: 5044267 - DNA, 25 bp, Homo sapien
tctgagaaacgacaataaagttgcc

SEQ ID NO: 5044268 - DNA, 25 bp, Homo sapien
caagacaggtcactattgccagtaa

SEQ ID NO: 5044269 - DNA, 25 bp, Homo sapien
aagttgcccaccaaacaggcattgg

SEQ ID NO: 5044270 - DNA, 25 bp, Homo sapien
tgccagtaaggaccaaagggaacca

SEQ ID NO: 5044271 - DNA, 25 bp, Homo sapien
ctggtgaggtggagctccccagctc

SEQ ID NO: 5044272 - DNA, 25 bp, Homo sapien
tggtgaggtggagctccccagctct

SEQ ID NO: 5044273 - DNA, 25 bp, Homo sapien
ggtgaggtggagctccccagctctg

SEQ ID NO: 5044274 - DNA, 25 bp, Homo sapien
gagaaaatggcccaggttggtgtct

SEQ ID NO: 5044275 - DNA, 25 bp, Homo sapien
ggcccaggttggtgtctcttcataa

SEQ ID NO: 5044276 - DNA, 25 bp, Homo sapien
cccaggttggtgtctcttcataaag

SEQ ID NO: 5044277 - DNA, 25 bp, Homo sapien
aatggcccaggttggtgtctcttca

SEQ ID NO: 5044278 - DNA, 25 bp, Homo sapien
tgctgcaacgttccagtaaaacgcc

SEQ ID NO: 5044279 - DNA, 25 bp, Homo sapien
ggatggtaagagtgagtctttcagt

SEQ ID NO: 5044280 - DNA, 25 bp, Homo sapien
cagtaaaacgcccatccagattcca

SEQ ID NO: 5044281 - DNA, 25 bp, Homo sapien
tccaggcttgattcttgctgcaacg

SEQ ID NO: 5044282 - DNA, 25 bp, Homo sapien
ctgggaacagccagatgtttctcca

SEQ ID NO: 5044283 - DNA, 25 bp, Homo sapien
tgtgttcatctctgaccgcagacac

SEQ ID NO: 5044284 - DNA, 25 bp, Homo sapien
ttcttttcaatccaacaagaatgtg

SEQ ID NO: 5044285 - DNA, 25 bp, Homo sapien
tctctgaccgcagacacagcattct

SEQ ID NO: 5044286 - DNA, 25 bp, Homo sapien
tttgtcttcccacactagaacgcag

SEQ ID NO: 5044287 - DNA, 25 bp, Homo sapien
gctgtccttcatggcgctgaccagg

SEQ ID NO: 5044288 - DNA, 25 bp, Homo sapien
gcgtcccctcatttcctggcatgtg

SEQ ID NO: 5044289 - DNA, 25 bp, Homo sapien
gaccaggtcctgcagtatcaggcgt

SEQ ID NO: 5044290 - DNA, 25 bp, Homo sapien
aagcaagcgcctgccagaagcgtgt

SEQ ID NO: 5044291 - DNA, 25 bp, Homo sapien
tgccagaagcgtgtctgtgcagtcc

SEQ ID NO: 5044292 - DNA, 25 bp, Homo sapien
ccccacggaagccagtggcattcag

SEQ ID NO: 5044293 - DNA, 25 bp, Homo sapien
tccgagagcagcttccaatgccagt

SEQ ID NO: 5044294 - DNA, 25 bp, Homo sapien
ctgggaaatgatcacactttaggac

SEQ ID NO: 5044295 - DNA, 25 bp, Homo sapien
catataaagggtccctggatgcagc

SEQ ID NO: 5044296 - DNA, 25 bp, Homo sapien
ccacttccatataaagggtccctgg

SEQ ID NO: 5044297 - DNA, 25 bp, Homo sapien
ttaggactttaggaacctgctgcat

SEQ ID NO: 5044298 - DNA, 25 bp, Homo sapien
cgaggtacaaaattctatgcctggg

SEQ ID NO: 5044299 - DNA, 25 bp, Homo sapien
gatcaatcaaatgcgaggtacaaaa

SEQ ID NO: 5044300 - DNA, 25 bp, Homo sapien
ggcagacaagcagagatcaatcaaa

SEQ ID NO: 5044301 - DNA, 25 bp, Homo sapien
caagcagagatcaatcaaatgcgag

SEQ ID NO: 5044302 - DNA, 25 bp, Homo sapien
gactggactgtctcctaagctgcag

SEQ ID NO: 5044303 - DNA, 25 bp, Homo sapien
ctcatggccctgcattaacaatggg

SEQ ID NO: 5044304 - DNA, 25 bp, Homo sapien
tagattgtaggcctatggtaagccc

SEQ ID NO: 5044305 - DNA, 25 bp, Homo sapien
gagctcaatgggaattcaacacagg

SEQ ID NO: 5044306 - DNA, 25 bp, Homo sapien
gaaccttagctgtgtgatcgcggac

SEQ ID NO: 5044307 - DNA, 25 bp, Homo sapien
aaatgcgagctccaggaaccttagc

SEQ ID NO: 5044308 - DNA, 25 bp, Homo sapien
ggctcagaaacagagtgaacccact

SEQ ID NO: 5044309 - DNA, 25 bp, Homo sapien
tgaacccactgcattcaaatgcgag

SEQ ID NO: 5044310 - DNA, 25 bp, Homo sapien
atctgcttccaggtgatgcaataat

SEQ ID NO: 5044311 - DNA, 25 bp, Homo sapien
aatctgcttccaggtgatgcaataa

SEQ ID NO: 5044312 - DNA, 25 bp, Homo sapien
tctgcttccaggtgatgcaataatt

SEQ ID NO: 5044313 - DNA, 25 bp, Homo sapien
cagtacgtactgaacgcgatgtgca

SEQ ID NO: 5044314 - DNA, 25 bp, Homo sapien
ttcggccacctaaaaagagcaaatg

SEQ ID NO: 5044315 - DNA, 25 bp, Homo sapien
tgtgtgcactcaacgaacttcttgt

SEQ ID NO: 5044316 - DNA, 25 bp, Homo sapien
gagggagcccacatgcttccatagg

SEQ ID NO: 5044317 - DNA, 25 bp, Homo sapien
agtgtaactaactccaaggctcctg

SEQ ID NO: 5044318 - DNA, 25 bp, Homo sapien
cttccgaccacatcagtcatgggtg

SEQ ID NO: 5044319 - DNA, 25 bp, Homo sapien
aagaaacctgttgctaagtctgagg

SEQ ID NO: 5044320 - DNA, 25 bp, Homo sapien
tctccgggcttggtaacctccttga

SEQ ID NO: 5044321 - DNA, 25 bp, Homo sapien
gggttgccaaggtcataggcaattc

SEQ ID NO: 5044322 - DNA, 25 bp, Homo sapien
tcataggcaattccctgccaaaacc

SEQ ID NO: 5044323 - DNA, 25 bp, Homo sapien
gccaaaaccctggtacagtacagct

SEQ ID NO: 5044324 - DNA, 25 bp, Homo sapien
aaccctggtacagtacagcttccta

SEQ ID NO: 5044325 - DNA, 25 bp, Homo sapien
gaacatgcattttggccagtcccag

SEQ ID NO: 5044326 - DNA, 25 bp, Homo sapien
tacatcggactagcaaggagattct

SEQ ID NO: 5044327 - DNA, 25 bp, Homo sapien
gatgtttcagccaaaagagtccccg

SEQ ID NO: 5044328 - DNA, 25 bp, Homo sapien
caactaaactcagtggcgatcccaa

SEQ ID NO: 5044329 - DNA, 25 bp, Homo sapien
ttcagcgggaaagcatccatgggtc

SEQ ID NO: 5044330 - DNA, 25 bp, Homo sapien
gctggtctccccttcagcgggaaag

SEQ ID NO: 5044331 - DNA, 25 bp, Homo sapien
gaaagcatccatgggtcttaaagcc

SEQ ID NO: 5044332 - DNA, 25 bp, Homo sapien
catgggtcttaaagccccagagact

SEQ ID NO: 5044333 - DNA, 25 bp, Homo sapien
tctccagggcgtcgtagatcaaagt

SEQ ID NO: 5044334 - DNA, 25 bp, Homo sapien
tgtttctcttgactgggcggctcag

SEQ ID NO: 5044335 - DNA, 25 bp, Homo sapien
gatcaaagtttggatgcgccggtac

SEQ ID NO: 5044336 - DNA, 25 bp, Homo sapien
cagcagggtcccgtctttgtcggct

SEQ ID NO: 5044337 - DNA, 25 bp, Homo sapien
ccccgccgccctgcgcgccttgagc

SEQ ID NO: 5044338 - DNA, 25 bp, Homo sapien
gccgccctgcgcgccttgagcccca

SEQ ID NO: 5044339 - DNA, 25 bp, Homo sapien
ccgccctgcgcgccttgagccccat

SEQ ID NO: 5044340 - DNA, 25 bp, Homo sapien
cgcccccgccgccctgcgcgccttg

SEQ ID NO: 5044341 - DNA, 25 bp, Homo sapien
cgcttcgccttctccgctgctgctc

SEQ ID NO: 5044342 - DNA, 25 bp, Homo sapien
ctcggggtgcgtgaacgaggcggcg

SEQ ID NO: 5044343 - DNA, 25 bp, Homo sapien
agaaggggcgctcggggtgcgtgaa

SEQ ID NO: 5044344 - DNA, 25 bp, Homo sapien
ggcgctcggggtgcgtgaacgaggc

SEQ ID NO: 5044345 - DNA, 25 bp, Homo sapien
ggcgggagcctggaaccggcgctcc

SEQ ID NO: 5044346 - DNA, 25 bp, Homo sapien
aaagcaggcaaaggcgggccccctg

SEQ ID NO: 5044347 - DNA, 25 bp, Homo sapien
gcccaagacagcatcgcagtttatt

SEQ ID NO: 5044348 - DNA, 25 bp, Homo sapien
agcccgggaactccaatgccatgat

SEQ ID NO: 5044349 - DNA, 25 bp, Homo sapien
ggcagtgcgccaggcggctgcagag

SEQ ID NO: 5044350 - DNA, 25 bp, Homo sapien
gggacccaggatcgcctgggctacc

SEQ ID NO: 5044351 - DNA, 25 bp, Homo sapien
ccgttgcaaccaggcagtgcgccag

SEQ ID NO: 5044352 - DNA, 25 bp, Homo sapien
gccgcccccgttgcaaccaggcagt

SEQ ID NO: 5044353 - DNA, 25 bp, Homo sapien
tctgtggtagcgaagctcgtgactc

SEQ ID NO: 5044354 - DNA, 25 bp, Homo sapien
ggtagcgaagctcgtgactccctct

SEQ ID NO: 5044355 - DNA, 25 bp, Homo sapien
tgtggtagcgaagctcgtgactccc

SEQ ID NO: 5044356 - DNA, 25 bp, Homo sapien
ctgctctgtggtagcgaagctcgtg

SEQ ID NO: 5044357 - DNA, 25 bp, Homo sapien
catgcccaccgccatcggggaagcc

SEQ ID NO: 5044358 - DNA, 25 bp, Homo sapien
ccaccgccatcggggaagcctccat

SEQ ID NO: 5044359 - DNA, 25 bp, Homo sapien
atgcccaccgccatcggggaagcct

SEQ ID NO: 5044360 - DNA, 25 bp, Homo sapien
gcccaccgccatcggggaagcctcc

SEQ ID NO: 5044361 - DNA, 25 bp, Homo sapien
cctgctaggctgagcatcctcttct

SEQ ID NO: 5044362 - DNA, 25 bp, Homo sapien
ctgattgttaaaacacccagtttgc

SEQ ID NO: 5044363 - DNA, 25 bp, Homo sapien
cacaatgtcgcaggctcttgccatc

SEQ ID NO: 5044364 - DNA, 25 bp, Homo sapien
cttctggctccggtaattggctccc

SEQ ID NO: 5044365 - DNA, 25 bp, Homo sapien
tcctctaggataggcctggttaaaa

SEQ ID NO: 5044366 - DNA, 25 bp, Homo sapien
tgtggccgcaggagatttgcaacca

SEQ ID NO: 5044367 - DNA, 25 bp, Homo sapien
gtgttatgacatgagactgtggccg

SEQ ID NO: 5044368 - DNA, 25 bp, Homo sapien
gaagccataatcaggatgggtctgg

SEQ ID NO: 5044369 - DNA, 25 bp, Homo sapien
tcgtatttatagcagccccggtgga

SEQ ID NO: 5044370 - DNA, 25 bp, Homo sapien
tgtgttctcacccattaggcaaagg

SEQ ID NO: 5044371 - DNA, 25 bp, Homo sapien
gacctagtagagaaatccggagcct

SEQ ID NO: 5044372 - DNA, 25 bp, Homo sapien
taaacgacagaaccggatttgagcc

SEQ ID NO: 5044373 - DNA, 25 bp, Homo sapien
gctatttttagcattgttgctgcca

SEQ ID NO: 5044374 - DNA, 25 bp, Homo sapien
aacgtgaacgggattctctcccatg

SEQ ID NO: 5044375 - DNA, 25 bp, Homo sapien
gttccctctgccagctatttttagc

SEQ ID NO: 5044376 - DNA, 25 bp, Homo sapien
gacatgaaggccaacgtgaacggga

SEQ ID NO: 5044377 - DNA, 25 bp, Homo sapien
ctgacagcagagacaaaggcaccga

SEQ ID NO: 5044378 - DNA, 25 bp, Homo sapien
tgacagcagagacaaaggcaccgag

SEQ ID NO: 5044379 - DNA, 25 bp, Homo sapien
agcagagacaaaggcaccgaggcac

SEQ ID NO: 5044380 - DNA, 25 bp, Homo sapien
acagcagagacaaaggcaccgaggc

SEQ ID NO: 5044381 - DNA, 25 bp, Homo sapien
cttgagaatgacaaatggcgatttc

SEQ ID NO: 5044382 - DNA, 25 bp, Homo sapien
caaatggcgatttcaatgatgaaaa

SEQ ID NO: 5044383 - DNA, 25 bp, Homo sapien
gagaatgacaaatggcgatttcaat

SEQ ID NO: 5044384 - DNA, 25 bp, Homo sapien
atgacaaatggcgatttcaatgatg

SEQ ID NO: 5044385 - DNA, 25 bp, Homo sapien
cagcattgttctcacataaagtaca

SEQ ID NO: 5044386 - DNA, 25 bp, Homo sapien
ggtagacaaatcatccacctcagca

SEQ ID NO: 5044387 - DNA, 25 bp, Homo sapien
gtacagattgcagttccaaaagcca

SEQ ID NO: 5044388 - DNA, 25 bp, Homo sapien
tttaatgcagtatttgaagccctgg

SEQ ID NO: 5044389 - DNA, 25 bp, Homo sapien
tgctccttgcttccaggttcaccat

SEQ ID NO: 5044390 - DNA, 25 bp, Homo sapien
cttccgtccaccccatcttctgctc

SEQ ID NO: 5044391 - DNA, 25 bp, Homo sapien
cttctgctccttgcttccaggttca

SEQ ID NO: 5044392 - DNA, 25 bp, Homo sapien
tctgctccttgcttccaggttcacc

SEQ ID NO: 5044393 - DNA, 25 bp, Homo sapien
cacacaggtgtattagcccagggct

SEQ ID NO: 5044394 - DNA, 25 bp, Homo sapien
caatcttatgggaggagatcctgct

SEQ ID NO: 5044395 - DNA, 25 bp, Homo sapien
gagtaagaagcccagtgatcacagt

SEQ ID NO: 5044396 - DNA, 25 bp, Homo sapien
tcaccccaggatcaacatagcatgg

SEQ ID NO: 5044397 - DNA, 25 bp, Homo sapien
tagccacttgccttgctgatgtctg

SEQ ID NO: 5044398 - DNA, 25 bp, Homo sapien
tgtacagaccagatgtcgtttcctt

SEQ ID NO: 5044399 - DNA, 25 bp, Homo sapien
ccttcattagacacaggaggacact

SEQ ID NO: 5044400 - DNA, 25 bp, Homo sapien
ttgtccttgagtctctgtacagacc

SEQ ID NO: 5044401 - DNA, 25 bp, Homo sapien
caaagtaggccactggtgaggcaaa

SEQ ID NO: 5044402 - DNA, 25 bp, Homo sapien
taaggctttatcatgtagagagttg

SEQ ID NO: 5044403 - DNA, 25 bp, Homo sapien
gggacatgcaaagtaggccactggt

SEQ ID NO: 5044404 - DNA, 25 bp, Homo sapien
ccactggtgaggcaaaagagccatg

SEQ ID NO: 5044405 - DNA, 25 bp, Homo sapien
aacttgttaacagtccttccttgct

SEQ ID NO: 5044406 - DNA, 25 bp, Homo sapien
tggtagacctgtggatttctaattc

SEQ ID NO: 5044407 - DNA, 25 bp, Homo sapien
ctgggcttgagctggtagacctgtg

SEQ ID NO: 5044408 - DNA, 25 bp, Homo sapien
gcttgagctggtagacctgtggatt

SEQ ID NO: 5044409 - DNA, 25 bp, Homo sapien
tgacagctgagctcctctttagctg

SEQ ID NO: 5044410 - DNA, 25 bp, Homo sapien
tgagctcctctttagctgatggcat

SEQ ID NO: 5044411 - DNA, 25 bp, Homo sapien
caaataccatcatgaggaaccaacc

SEQ ID NO: 5044412 - DNA, 25 bp, Homo sapien
gaggtcacatgcaggactctgtgta

SEQ ID NO: 5044413 - DNA, 25 bp, Homo sapien
gaagagaaataaccatcagtcacgg

SEQ ID NO: 5044414 - DNA, 25 bp, Homo sapien
tcagtcacggatgaaagaggtcaca

SEQ ID NO: 5044415 - DNA, 25 bp, Homo sapien
tactaaatccctgatgaacagagag

SEQ ID NO: 5044416 - DNA, 25 bp, Homo sapien
tgaacaccacctgacatagtctgtg

SEQ ID NO: 5044417 - DNA, 25 bp, Homo sapien
tgaaaaagcacccatcacccttgat

SEQ ID NO: 5044418 - DNA, 25 bp, Homo sapien
gccacggaccagaagggtagcagat

SEQ ID NO: 5044419 - DNA, 25 bp, Homo sapien
gattatacatgaagccactaaggct

SEQ ID NO: 5044420 - DNA, 25 bp, Homo sapien
gccattataccatgccaccagagaa

SEQ ID NO: 5044421 - DNA, 25 bp, Homo sapien
tatcttgagacaaacctgtgaggca

SEQ ID NO: 5044422 - DNA, 25 bp, Homo sapien
gaggctctaaatgtatggctgacac

SEQ ID NO: 5044423 - DNA, 25 bp, Homo sapien
taatcagtgttttatgcaatagttc

SEQ ID NO: 5044424 - DNA, 25 bp, Homo sapien
gcaatagttctatgatcttactaaa

SEQ ID NO: 5044425 - DNA, 25 bp, Homo sapien
actttgcataagtagacagtattta

SEQ ID NO: 5044426 - DNA, 25 bp, Homo sapien
cataagtagacagtatttataatca

SEQ ID NO: 5044427 - DNA, 25 bp, Homo sapien
tctacaccaaccaaaactggacctg

SEQ ID NO: 5044428 - DNA, 25 bp, Homo sapien
cactggagcagcgatattgacaaat

SEQ ID NO: 5044429 - DNA, 25 bp, Homo sapien
tatcccaggaataatatgcatatgg

SEQ ID NO: 5044430 - DNA, 25 bp, Homo sapien
agccaatggcaacgcagccagatgt

SEQ ID NO: 5044431 - DNA, 25 bp, Homo sapien
tcaaatcagcggaggcacttcaggg

SEQ ID NO: 5044432 - DNA, 25 bp, Homo sapien
tagggtctacttctagtttctccat

SEQ ID NO: 5044433 - DNA, 25 bp, Homo sapien
catcagggaatgagtgcttgctagg

SEQ ID NO: 5044434 - DNA, 25 bp, Homo sapien
cttcctcacttggtataattttggg

SEQ ID NO: 5044435 - DNA, 25 bp, Homo sapien
gagccttgtagaatcaagactctga

SEQ ID NO: 5044436 - DNA, 25 bp, Homo sapien
agagccttgtagaatcaagactctg

SEQ ID NO: 5044437 - DNA, 25 bp, Homo sapien
agccttgtagaatcaagactctgac

SEQ ID NO: 5044438 - DNA, 25 bp, Homo sapien
cataaactccgtatgccacaggaag

SEQ ID NO: 5044439 - DNA, 25 bp, Homo sapien
taaactccgtatgccacaggaagga

SEQ ID NO: 5044440 - DNA, 25 bp, Homo sapien
aactccgtatgccacaggaaggaga

SEQ ID NO: 5044441 - DNA, 25 bp, Homo sapien
atggaaaaggggcttgtgtagcctc

SEQ ID NO: 5044442 - DNA, 25 bp, Homo sapien
ctctaggacggacgcccatcactgg

SEQ ID NO: 5044443 - DNA, 25 bp, Homo sapien
tgctttccccgccttaatgtcagag

SEQ ID NO: 5044444 - DNA, 25 bp, Homo sapien
cccgccttaatgtcagaggcctcta

SEQ ID NO: 5044445 - DNA, 25 bp, Homo sapien
tgtcagaggcctctaggacggacgc

SEQ ID NO: 5044446 - DNA, 25 bp, Homo sapien
agaaacatcacctctagaatccagt

SEQ ID NO: 5044447 - DNA, 25 bp, Homo sapien
gaaacatcacctctagaatccagta

SEQ ID NO: 5044448 - DNA, 25 bp, Homo sapien
cagaaacatcacctctagaatccag

SEQ ID NO: 5044449 - DNA, 25 bp, Homo sapien
gctcctgtccgaggtagttttcata

SEQ ID NO: 5044450 - DNA, 25 bp, Homo sapien
gatttgaatgctcgctgaccacctg

SEQ ID NO: 5044451 - DNA, 25 bp, Homo sapien
tctctgctcctgtccgaggtagttt

SEQ ID NO: 5044452 - DNA, 25 bp, Homo sapien
tttcatagatttgaatgctcgctga

SEQ ID NO: 5044453 - DNA, 25 bp, Homo sapien
ttaatatcaaacatcgtcttattca

SEQ ID NO: 5044454 - DNA, 25 bp, Homo sapien
tcattaatatcaaacatcgtcttat

SEQ ID NO: 5044455 - DNA, 25 bp, Homo sapien
cattaatatcaaacatcgtcttatt

SEQ ID NO: 5044456 - DNA, 25 bp, Homo sapien
attaatatcaaacatcgtcttattc

SEQ ID NO: 5044457 - DNA, 25 bp, Homo sapien
gcataatatgcaggttcattcatgt

SEQ ID NO: 5044458 - DNA, 25 bp, Homo sapien
gatggacaaatgttgattcttacag

SEQ ID NO: 5044459 - DNA, 25 bp, Homo sapien
tcagtaattataatgcaggtcagac

SEQ ID NO: 5044460 - DNA, 25 bp, Homo sapien
cagtaagttcataagtccagactaa

SEQ ID NO: 5044461 - DNA, 25 bp, Homo sapien
gcttttctcatcaattggttggcac

SEQ ID NO: 5044462 - DNA, 25 bp, Homo sapien
aaacagtgacagtagagcttttctc

SEQ ID NO: 5044463 - DNA, 25 bp, Homo sapien
tagagcttttctcatcaattggttg

SEQ ID NO: 5044464 - DNA, 25 bp, Homo sapien
tgtttaagactcataaacagtgaca

SEQ ID NO: 5044465 - DNA, 25 bp, Homo sapien
aatatcccaactcattcatatggcc

SEQ ID NO: 5044466 - DNA, 25 bp, Homo sapien
cattcatatggcctgtaatgatgaa

SEQ ID NO: 5044467 - DNA, 25 bp, Homo sapien
actcattcatatggcctgtaatgat

SEQ ID NO: 5044468 - DNA, 25 bp, Homo sapien
cccaactcattcatatggcctgtaa

SEQ ID NO: 5044469 - DNA, 25 bp, Homo sapien
gttctttgttctcacagaccgttgt

SEQ ID NO: 5044470 - DNA, 25 bp, Homo sapien
acagaccgttgttctcctacctcag

SEQ ID NO: 5044471 - DNA, 25 bp, Homo sapien
ttctcacagaccgttgttctcctac

SEQ ID NO: 5044472 - DNA, 25 bp, Homo sapien
tctttgttctcacagaccgttgttc

SEQ ID NO: 5044473 - DNA, 25 bp, Homo sapien
tagcagaactactatcgggtttcac

SEQ ID NO: 5044474 - DNA, 25 bp, Homo sapien
gatcttttagcagaactactatcgg

SEQ ID NO: 5044475 - DNA, 25 bp, Homo sapien
gacccgttgtctgagatcttttagc

SEQ ID NO: 5044476 - DNA, 25 bp, Homo sapien
catgcagatgaccaaatgacccgtt

SEQ ID NO: 5044477 - DNA, 25 bp, Homo sapien
caacatcgattaaagaggtatccat

SEQ ID NO: 5044478 - DNA, 25 bp, Homo sapien
ctttcctttgatcattactcgcacg

SEQ ID NO: 5044479 - DNA, 25 bp, Homo sapien
cgcacgtaagttggttgcacatcaa

SEQ ID NO: 5044480 - DNA, 25 bp, Homo sapien
tgcacatcaacatcgattaaagagg

SEQ ID NO: 5044481 - DNA, 25 bp, Homo sapien
catttgaggactgaacaggaagcag

SEQ ID NO: 5044482 - DNA, 25 bp, Homo sapien
taaaatgcacatgcatgggaatgag

SEQ ID NO: 5044483 - DNA, 25 bp, Homo sapien
ccttaaaatgcacatgcatgggaat

SEQ ID NO: 5044484 - DNA, 25 bp, Homo sapien
tttccatttgaggactgaacaggaa

SEQ ID NO: 5044485 - DNA, 25 bp, Homo sapien
ctatagacagcaaggtccaggatga

SEQ ID NO: 5044486 - DNA, 25 bp, Homo sapien
cgttatctttcaaagagaagtcaat

SEQ ID NO: 5044487 - DNA, 25 bp, Homo sapien
caggatgatctgcttttcgttatct

SEQ ID NO: 5044488 - DNA, 25 bp, Homo sapien
acagcaaggtccaggatgatctgct

SEQ ID NO: 5044489 - DNA, 25 bp, Homo sapien
catttgggtataagattctggccag

SEQ ID NO: 5044490 - DNA, 25 bp, Homo sapien
tgaagtggatcagcgccatttgggt

SEQ ID NO: 5044491 - DNA, 25 bp, Homo sapien
ccaaaaggggtgacaatgagttgaa

SEQ ID NO: 5044492 - DNA, 25 bp, Homo sapien
tgggtataagattctggccagtggt

SEQ ID NO: 5044493 - DNA, 25 bp, Homo sapien
atcttcagtgatcaaagtcctgggt

SEQ ID NO: 5044494 - DNA, 25 bp, Homo sapien
tcattcacatttagggctttcccat

SEQ ID NO: 5044495 - DNA, 25 bp, Homo sapien
tggggtaggtaagacaggtatgata

SEQ ID NO: 5044496 - DNA, 25 bp, Homo sapien
agtggggtaggtaagacaggtatga

SEQ ID NO: 5044497 - DNA, 25 bp, Homo sapien
cagtggggtaggtaagacaggtatg

SEQ ID NO: 5044498 - DNA, 25 bp, Homo sapien
acagtggggtaggtaagacaggtat

SEQ ID NO: 5044499 - DNA, 25 bp, Homo sapien
caatcttgattcaggagtaaacaaa

SEQ ID NO: 5044500 - DNA, 25 bp, Homo sapien
tcttcactgttgtctaatttctttg

SEQ ID NO: 5044501 - DNA, 25 bp, Homo sapien
gtttttccatgtgtctaagagtttc

SEQ ID NO: 5044502 - DNA, 25 bp, Homo sapien
tttccaatcttgattcaggagtaaa

SEQ ID NO: 5044503 - DNA, 25 bp, Homo sapien
gtggtctttgctctctaaagaggaa

SEQ ID NO: 5044504 - DNA, 25 bp, Homo sapien
tttggctcgtttaagacagtgatct

SEQ ID NO: 5044505 - DNA, 25 bp, Homo sapien
ctctgatttgtggttcaattactga

SEQ ID NO: 5044506 - DNA, 25 bp, Homo sapien
tcaaagcctgcgttacttctcttgt

SEQ ID NO: 5044507 - DNA, 25 bp, Homo sapien
aatagtcctgcaatgccttaatcct

SEQ ID NO: 5044508 - DNA, 25 bp, Homo sapien
catatgctctggtcataaggactca

SEQ ID NO: 5044509 - DNA, 25 bp, Homo sapien
tatggttgctatagatgggctgcag

SEQ ID NO: 5044510 - DNA, 25 bp, Homo sapien
gaaatatggccatacagtcacaggt

SEQ ID NO: 5044511 - DNA, 25 bp, Homo sapien
tcttggcagccaaagcgaaatagaa

SEQ ID NO: 5044512 - DNA, 25 bp, Homo sapien
cgaactccctatagtggtcaaagga

SEQ ID NO: 5044513 - DNA, 25 bp, Homo sapien
gaagagttgctaccacgaactccct

SEQ ID NO: 5044514 - DNA, 25 bp, Homo sapien
acagtcaggtcaagttttgccagct

SEQ ID NO: 5044515 - DNA, 25 bp, Homo sapien
atgggttccccatgagaaagagctc

SEQ ID NO: 5044516 - DNA, 25 bp, Homo sapien
aagtttcttgagtttgctaacattt

SEQ ID NO: 5044517 - DNA, 25 bp, Homo sapien
tcttgctgatgcaacgagagttcct

SEQ ID NO: 5044518 - DNA, 25 bp, Homo sapien
gggaaaaaatgacacagtcgttgtg

SEQ ID NO: 5044519 - DNA, 25 bp, Homo sapien
tgatgcaacgagagttcctccaggg

SEQ ID NO: 5044520 - DNA, 25 bp, Homo sapien
gttcagcattccgtctaataagatc

SEQ ID NO: 5044521 - DNA, 25 bp, Homo sapien
ggagtttttgtgatgccatgatgtg

SEQ ID NO: 5044522 - DNA, 25 bp, Homo sapien
cctcctggagtttttgtgatgccat

SEQ ID NO: 5044523 - DNA, 25 bp, Homo sapien
ctggagtttttgtgatgccatgatg

SEQ ID NO: 5044524 - DNA, 25 bp, Homo sapien
tcctggagtttttgtgatgccatga

SEQ ID NO: 5044525 - DNA, 25 bp, Homo sapien
gtcagagccaagcacaagatcatga

SEQ ID NO: 5044526 - DNA, 25 bp, Homo sapien
tatctatggtccacagtcagagcca

SEQ ID NO: 5044527 - DNA, 25 bp, Homo sapien
gatgtgtagtgctgggttcacctgc

SEQ ID NO: 5044528 - DNA, 25 bp, Homo sapien
ggaacgctttagatcttgcactgca

SEQ ID NO: 5044529 - DNA, 25 bp, Homo sapien
ggctcaactaacaggcagagatggt

SEQ ID NO: 5044530 - DNA, 25 bp, Homo sapien
gctttggctcaactaacaggcagag

SEQ ID NO: 5044531 - DNA, 25 bp, Homo sapien
tctaagctttggctcaactaacagg

SEQ ID NO: 5044532 - DNA, 25 bp, Homo sapien
tccttgctgctctaagctttggctc

SEQ ID NO: 5044533 - DNA, 25 bp, Homo sapien
ggaaggaggctaacagtacaccacc

SEQ ID NO: 5044534 - DNA, 25 bp, Homo sapien
cagatcctggtaagggacagcccaa

SEQ ID NO: 5044535 - DNA, 25 bp, Homo sapien
ggtacagccagaggatagagcaatg

SEQ ID NO: 5044536 - DNA, 25 bp, Homo sapien
tagcaaggatgcaacatgggtcaag

SEQ ID NO: 5044537 - DNA, 25 bp, Homo sapien
tagggagcctcccttagcatgaata

SEQ ID NO: 5044538 - DNA, 25 bp, Homo sapien
acaacagagaagtttgcctggacag

SEQ ID NO: 5044539 - DNA, 25 bp, Homo sapien
actgcgaccaaccaagaaactctct

SEQ ID NO: 5044540 - DNA, 25 bp, Homo sapien
catcgtgtccacattggtctcagac

SEQ ID NO: 5044541 - DNA, 25 bp, Homo sapien
attgttgttacacagtgctgcttca

SEQ ID NO: 5044542 - DNA, 25 bp, Homo sapien
ggaaattgttgttacacagtgctgc

SEQ ID NO: 5044543 - DNA, 25 bp, Homo sapien
gaaattgttgttacacagtgctgct

SEQ ID NO: 5044544 - DNA, 25 bp, Homo sapien
tgaggaaattgttgttacacagtgc

SEQ ID NO: 5044545 - DNA, 25 bp, Homo sapien
tgtgtaaagatatcttcatggtgca

SEQ ID NO: 5044546 - DNA, 25 bp, Homo sapien
ctgtaatggcaaacatcagaacaaa

SEQ ID NO: 5044547 - DNA, 25 bp, Homo sapien
cagagcccccgagaagaaatgtgta

SEQ ID NO: 5044548 - DNA, 25 bp, Homo sapien
tggcaaacatcagaacaaaaaccag

SEQ ID NO: 5044549 - DNA, 25 bp, Homo sapien
acattctttaagtccaaggagcatt

SEQ ID NO: 5044550 - DNA, 25 bp, Homo sapien
taatatagcactgcaattacgtgag

SEQ ID NO: 5044551 - DNA, 25 bp, Homo sapien
cataaaataatagacgttggcaagg

SEQ ID NO: 5044552 - DNA, 25 bp, Homo sapien
caggaaagcattttcggttttatat

SEQ ID NO: 5044553 - DNA, 25 bp, Homo sapien
cctagatatcggcttcctgaggagc

SEQ ID NO: 5044554 - DNA, 25 bp, Homo sapien
gaaagggcaccttaggccatcgtgg

SEQ ID NO: 5044555 - DNA, 25 bp, Homo sapien
tgttagataaaccaggaaagggcac

SEQ ID NO: 5044556 - DNA, 25 bp, Homo sapien
tcagcgaagagattgttcagccaag

SEQ ID NO: 5044557 - DNA, 25 bp, Homo sapien
aggccttccttatctctttgctctc

SEQ ID NO: 5044558 - DNA, 25 bp, Homo sapien
gctctccactccttctttctgtctc

SEQ ID NO: 5044559 - DNA, 25 bp, Homo sapien
ccttctttctgtctcacaccagttc

SEQ ID NO: 5044560 - DNA, 25 bp, Homo sapien
ctgtcaggccttccttatctctttg

SEQ ID NO: 5044561 - DNA, 25 bp, Homo sapien
tcgaatgacgcttttcacccttcac

SEQ ID NO: 5044562 - DNA, 25 bp, Homo sapien
cagcgcgtccccgtcggaattcagg

SEQ ID NO: 5044563 - DNA, 25 bp, Homo sapien
agccggacccggacctcgaatgacg

SEQ ID NO: 5044564 - DNA, 25 bp, Homo sapien
ctctccagttcgctgaccccgcaag

SEQ ID NO: 5044565 - DNA, 25 bp, Homo sapien
ggcttgccttccagaccgcctttga

SEQ ID NO: 5044566 - DNA, 25 bp, Homo sapien
gatgagaaataacctaagaggatca

SEQ ID NO: 5044567 - DNA, 25 bp, Homo sapien
cctgaatcaatggtttagagtgaac

SEQ ID NO: 5044568 - DNA, 25 bp, Homo sapien
gagtgaacaaagtatgaggacgctt

SEQ ID NO: 5044569 - DNA, 25 bp, Homo sapien
cgttgtcgttgtcatattccagctt

SEQ ID NO: 5044570 - DNA, 25 bp, Homo sapien
gtttccggctaacaagctttccaga

SEQ ID NO: 5044571 - DNA, 25 bp, Homo sapien
tataaagattcgttgtcgttgtcat

SEQ ID NO: 5044572 - DNA, 25 bp, Homo sapien
tccaacactcgtttccggctaacaa

SEQ ID NO: 5044573 - DNA, 25 bp, Homo sapien
taagttgatctactgcatccaacat

SEQ ID NO: 5044574 - DNA, 25 bp, Homo sapien
catccaacataaggggtaacttctt

SEQ ID NO: 5044575 - DNA, 25 bp, Homo sapien
actgcatccaacataaggggtaact

SEQ ID NO: 5044576 - DNA, 25 bp, Homo sapien
ttaagttgatctactgcatccaaca

SEQ ID NO: 5044577 - DNA, 25 bp, Homo sapien
taatcaatgacttgtctatgtagac

SEQ ID NO: 5044578 - DNA, 25 bp, Homo sapien
ctaatcaatgacttgtctatgtaga

SEQ ID NO: 5044579 - DNA, 25 bp, Homo sapien
tggtgaggtcatgtaagtcttctct

SEQ ID NO: 5044580 - DNA, 25 bp, Homo sapien
tttgctcatatggtgaggtcatgta

SEQ ID NO: 5044581 - DNA, 25 bp, Homo sapien
atggtgaggtcatgtaagtcttctc

SEQ ID NO: 5044582 - DNA, 25 bp, Homo sapien
tatggtgaggtcatgtaagtcttct

SEQ ID NO: 5044583 - DNA, 25 bp, Homo sapien
tatgcctcttgattctaccttcttg

SEQ ID NO: 5044584 - DNA, 25 bp, Homo sapien
tcttgattctaccttcttggcactc

SEQ ID NO: 5044585 - DNA, 25 bp, Homo sapien
tgattctaccttcttggcactccat

SEQ ID NO: 5044586 - DNA, 25 bp, Homo sapien
ggttgatatgcctcttgattctacc

SEQ ID NO: 5044587 - DNA, 25 bp, Homo sapien
cagacaagtggtagcaggtgctaaa

SEQ ID NO: 5044588 - DNA, 25 bp, Homo sapien
attttctggtacttcgtagcagaca

SEQ ID NO: 5044589 - DNA, 25 bp, Homo sapien
gcttcaagtccgaggtttttgtcat

SEQ ID NO: 5044590 - DNA, 25 bp, Homo sapien
atttgcttcaagtccgaggtttttg

SEQ ID NO: 5044591 - DNA, 25 bp, Homo sapien
taatcctcacccatcgtgtggttgg

SEQ ID NO: 5044592 - DNA, 25 bp, Homo sapien
taacaggttccgtcatcagaaggcg

SEQ ID NO: 5044593 - DNA, 25 bp, Homo sapien
gggttgcctcatctcatcgcttcag

SEQ ID NO: 5044594 - DNA, 25 bp, Homo sapien
cttgatgatgccaggtgactctgcc

SEQ ID NO: 5044595 - DNA, 25 bp, Homo sapien
ggtcttctctatgacaataaagcca

SEQ ID NO: 5044596 - DNA, 25 bp, Homo sapien
cttatttggtcttctctatgacaat

SEQ ID NO: 5044597 - DNA, 25 bp, Homo sapien
gacaataaagccatacgatcactcc

SEQ ID NO: 5044598 - DNA, 25 bp, Homo sapien
aaagccatacgatcactccacactg

SEQ ID NO: 5044599 - DNA, 25 bp, Homo sapien
cattgtgtttgcagtagtgggattc

SEQ ID NO: 5044600 - DNA, 25 bp, Homo sapien
caaagtatgccaagttggcaggtgt

SEQ ID NO: 5044601 - DNA, 25 bp, Homo sapien
gatcttcatcaaagcctggtaggca

SEQ ID NO: 5044602 - DNA, 25 bp, Homo sapien
cctggtaggcaaatgtggcattgat

SEQ ID NO: 5044603 - DNA, 25 bp, Homo sapien
tgaccaaaccaagggtagtcctcag

SEQ ID NO: 5044604 - DNA, 25 bp, Homo sapien
catatagtagatgcgccaaaacaaa

SEQ ID NO: 5044605 - DNA, 25 bp, Homo sapien
gacaaagaagataaatcacctggca

SEQ ID NO: 5044606 - DNA, 25 bp, Homo sapien
gatggtggcgatgattacagacaaa

SEQ ID NO: 5044607 - DNA, 25 bp, Homo sapien
tgaaaggtaattacgagccccaaga

SEQ ID NO: 5044608 - DNA, 25 bp, Homo sapien
ggaacatctacagcccttgagtcaa

SEQ ID NO: 5044609 - DNA, 25 bp, Homo sapien
tttgtgaacacgcaccaagtgtggg

SEQ ID NO: 5044610 - DNA, 25 bp, Homo sapien
aatatcaagtcactccactgaggtg

SEQ ID NO: 5044611 - DNA, 25 bp, Homo sapien
tcagcaagagataggtgcatgtggc

SEQ ID NO: 5044612 - DNA, 25 bp, Homo sapien
aaattcaagctcgagaaccactgcc

SEQ ID NO: 5044613 - DNA, 25 bp, Homo sapien
ttcaactgccggtgtttgcaaaggg

SEQ ID NO: 5044614 - DNA, 25 bp, Homo sapien
tccaggcggtctcttttccatcaca

SEQ ID NO: 5044615 - DNA, 25 bp, Homo sapien
tggaggacattcatcgaaggcattc

SEQ ID NO: 5044616 - DNA, 25 bp, Homo sapien
tagactgcaagttggacaatttcca

SEQ ID NO: 5044617 - DNA, 25 bp, Homo sapien
ttccaataaaacacttgattccaag

SEQ ID NO: 5044618 - DNA, 25 bp, Homo sapien
gacattcatcgaaggcattcctaaa

SEQ ID NO: 5044619 - DNA, 25 bp, Homo sapien
cagtggttttgaaatagctggcaag

SEQ ID NO: 5044620 - DNA, 25 bp, Homo sapien
agtggttttgaaatagctggcaagg

SEQ ID NO: 5044621 - DNA, 25 bp, Homo sapien
tatcatcaatgagcatgtgaagaca

SEQ ID NO: 5044622 - DNA, 25 bp, Homo sapien
gctacagttatcatcaatgagcatg

SEQ ID NO: 5044623 - DNA, 25 bp, Homo sapien
aagacactggctaatatttctccca

SEQ ID NO: 5044624 - DNA, 25 bp, Homo sapien
tgaagacactggctaatatttctcc

SEQ ID NO: 5044625 - DNA, 25 bp, Homo sapien
taaaacagcgagatatcactgcata

SEQ ID NO: 5044626 - DNA, 25 bp, Homo sapien
cactgcatacctagtagaatggcta

SEQ ID NO: 5044627 - DNA, 25 bp, Homo sapien
caatatgaccttgcatttggcaatg

SEQ ID NO: 5044628 - DNA, 25 bp, Homo sapien
gacaaggcgcagtctgtgagaaaat

SEQ ID NO: 5044629 - DNA, 25 bp, Homo sapien
cctgaaagaagacctcttgcaacaa

SEQ ID NO: 5044630 - DNA, 25 bp, Homo sapien
gcctgaaagaagacctcttgcaaca

SEQ ID NO: 5044631 - DNA, 25 bp, Homo sapien
aggttggtaccagctcctaactgca

SEQ ID NO: 5044632 - DNA, 25 bp, Homo sapien
tttagtcatctccaagtcattctca

SEQ ID NO: 5044633 - DNA, 25 bp, Homo sapien
ccttcctcgcacaggttggtaccag

SEQ ID NO: 5044634 - DNA, 25 bp, Homo sapien
tgcattttagtcatctccaagtcat

SEQ ID NO: 5044635 - DNA, 25 bp, Homo sapien
cagaagctgtcaactgggactgaag

SEQ ID NO: 5044636 - DNA, 25 bp, Homo sapien
ttctcttggaaacgttcagaagctg

SEQ ID NO: 5044637 - DNA, 25 bp, Homo sapien
tgaatgatccgaactattctcttgg

SEQ ID NO: 5044638 - DNA, 25 bp, Homo sapien
gagacaagctatgggagtttcctcc

SEQ ID NO: 5044639 - DNA, 25 bp, Homo sapien
gtcagagaagaacagtctaaatcat

SEQ ID NO: 5044640 - DNA, 25 bp, Homo sapien
agtcagagaagaacagtctaaatca

SEQ ID NO: 5044641 - DNA, 25 bp, Homo sapien
caatcctcaattgtgctactgcaaa

SEQ ID NO: 5044642 - DNA, 25 bp, Homo sapien
caggttcatctagttcaaaagctca

SEQ ID NO: 5044643 - DNA, 25 bp, Homo sapien
gattgcatcatcaccctgcttaaga

SEQ ID NO: 5044644 - DNA, 25 bp, Homo sapien
ccagcccttggtgacttgcagaatt

SEQ ID NO: 5044645 - DNA, 25 bp, Homo sapien
aggaccacagggttaccactgccca

SEQ ID NO: 5044646 - DNA, 25 bp, Homo sapien
catccctggaactgacattggttga

SEQ ID NO: 5044647 - DNA, 25 bp, Homo sapien
gaggaccacagggttaccactgccc

SEQ ID NO: 5044648 - DNA, 25 bp, Homo sapien
gaactgacattggttgaggaccaca

SEQ ID NO: 5044649 - DNA, 25 bp, Homo sapien
tttccattgcaatggtctgtgtcca

SEQ ID NO: 5044650 - DNA, 25 bp, Homo sapien
ttccattgcaatggtctgtgtccaa

SEQ ID NO: 5044651 - DNA, 25 bp, Homo sapien
tccattgcaatggtctgtgtccaac

SEQ ID NO: 5044652 - DNA, 25 bp, Homo sapien
tacttccatgcagccaagatttgga

SEQ ID NO: 5044653 - DNA, 25 bp, Homo sapien
ggagaagagttgatgtcaccaaaga

SEQ ID NO: 5044654 - DNA, 25 bp, Homo sapien
ttcaaccagttgtcttcacttggag

SEQ ID NO: 5044655 - DNA, 25 bp, Homo sapien
ccagttgtcttcacttggagaagag

SEQ ID NO: 5044656 - DNA, 25 bp, Homo sapien
gagaagaaaaggaatggcagattct

SEQ ID NO: 5044657 - DNA, 25 bp, Homo sapien
aagaaaaggaatggcagattctctt

SEQ ID NO: 5044658 - DNA, 25 bp, Homo sapien
gaagaaaaggaatggcagattctct

SEQ ID NO: 5044659 - DNA, 25 bp, Homo sapien
gagagaagaaaaggaatggcagatt

SEQ ID NO: 5044660 - DNA, 25 bp, Homo sapien
ggatgggttcagagttatgttgcca

SEQ ID NO: 5044661 - DNA, 25 bp, Homo sapien
catctttgtcgcacaggaagctgtc

SEQ ID NO: 5044662 - DNA, 25 bp, Homo sapien
ccttatacataacgctggtctggga

SEQ ID NO: 5044663 - DNA, 25 bp, Homo sapien
agtctgggacttcggcgacaggtat

SEQ ID NO: 5044664 - DNA, 25 bp, Homo sapien
caaaagaatggtaaccatccaggga

SEQ ID NO: 5044665 - DNA, 25 bp, Homo sapien
gaatggtaaccatccagggaatcac

SEQ ID NO: 5044666 - DNA, 25 bp, Homo sapien
ctatggagccgcattcaaaagaatg

SEQ ID NO: 5044667 - DNA, 25 bp, Homo sapien
atggtaaccatccagggaatcacag

SEQ ID NO: 5044668 - DNA, 25 bp, Homo sapien
cctgatttggtatccagggaaggcc

SEQ ID NO: 5044669 - DNA, 25 bp, Homo sapien
tgatttggtatccagggaaggccca

SEQ ID NO: 5044670 - DNA, 25 bp, Homo sapien
tccctgatttggtatccagggaagg

SEQ ID NO: 5044671 - DNA, 25 bp, Homo sapien
cttccctgatttggtatccagggaa

SEQ ID NO: 5044672 - DNA, 25 bp, Homo sapien
ctatttccagacatgcactgaccca

SEQ ID NO: 5044673 - DNA, 25 bp, Homo sapien
gagggattctgattatgttacacaa

SEQ ID NO: 5044674 - DNA, 25 bp, Homo sapien
cattgcctaagggtggtaagctaaa

SEQ ID NO: 5044675 - DNA, 25 bp, Homo sapien
gaaacatcaaaagggactatttcca

SEQ ID NO: 5044676 - DNA, 25 bp, Homo sapien
tgggagacagctctccagcatattc

SEQ ID NO: 5044677 - DNA, 25 bp, Homo sapien
cttgggaaaatgcacgtgggagaca

SEQ ID NO: 5044678 - DNA, 25 bp, Homo sapien
atattctctttccaacctggaagaa

SEQ ID NO: 5044679 - DNA, 25 bp, Homo sapien
acgtgggagacagctctccagcata

SEQ ID NO: 5044680 - DNA, 25 bp, Homo sapien
agcacaagctactgacagatggtta

SEQ ID NO: 5044681 - DNA, 25 bp, Homo sapien
caaggaaattgctaaaaggagtcta

SEQ ID NO: 5044682 - DNA, 25 bp, Homo sapien
tcaaaagataattgcgtatcacagt

SEQ ID NO: 5044683 - DNA, 25 bp, Homo sapien
taatggtctgagtatcagcaaaatc

SEQ ID NO: 5044684 - DNA, 25 bp, Homo sapien
gtgttgacatcagttgagatattcg

SEQ ID NO: 5044685 - DNA, 25 bp, Homo sapien
gttgacatcagttgagatattcggt

SEQ ID NO: 5044686 - DNA, 25 bp, Homo sapien
tgacatcagttgagatattcggtac

SEQ ID NO: 5044687 - DNA, 25 bp, Homo sapien
acatcagttgagatattcggtacat

SEQ ID NO: 5044688 - DNA, 25 bp, Homo sapien
aggtggactatatattaaaaataga

SEQ ID NO: 5044689 - DNA, 25 bp, Homo sapien
aaggtggactatatattaaaaatag

SEQ ID NO: 5044690 - DNA, 25 bp, Homo sapien
taacagtcatttagccccaaaacaa

SEQ ID NO: 5044691 - DNA, 25 bp, Homo sapien
taaaatgactggttctaacagtcat

SEQ ID NO: 5044692 - DNA, 25 bp, Homo sapien
ataaaatgactggttctaacagtca

SEQ ID NO: 5044693 - DNA, 25 bp, Homo sapien
tgaaagtgaggtatttgattaagaa

SEQ ID NO: 5044694 - DNA, 25 bp, Homo sapien
cagtgcttggagattggtgtctgtc

SEQ ID NO: 5044695 - DNA, 25 bp, Homo sapien
gacacaagtcaacttcattatcaag

SEQ ID NO: 5044696 - DNA, 25 bp, Homo sapien
atcaagtttcaaacagtgcttggag

SEQ ID NO: 5044697 - DNA, 25 bp, Homo sapien
tattttaatcatctgacacaagtca

SEQ ID NO: 5044698 - DNA, 25 bp, Homo sapien
tcctcggctgaaaaatgtctgaatg

SEQ ID NO: 5044699 - DNA, 25 bp, Homo sapien
ggagaactttctggccttccttgga

SEQ ID NO: 5044700 - DNA, 25 bp, Homo sapien
tactgaaatacgaagcttcctgtgg

SEQ ID NO: 5044701 - DNA, 25 bp, Homo sapien
aatattgtacgggtatgcccagccc

SEQ ID NO: 5044702 - DNA, 25 bp, Homo sapien
cttcttctcacagatgcccacgcac

SEQ ID NO: 5044703 - DNA, 25 bp, Homo sapien
tgcccacgcacattgctgtgcacag

SEQ ID NO: 5044704 - DNA, 25 bp, Homo sapien
tgtgcacaggtgcttgcagagaagt

SEQ ID NO: 5044705 - DNA, 25 bp, Homo sapien
tcacagatgcccacgcacattgctg

SEQ ID NO: 5044706 - DNA, 25 bp, Homo sapien
ataaatgagtgtatagttcttggga

SEQ ID NO: 5044707 - DNA, 25 bp, Homo sapien
aatgagtgtatagttcttgggaaag

SEQ ID NO: 5044708 - DNA, 25 bp, Homo sapien
gagtgtatagttcttgggaaagtca

SEQ ID NO: 5044709 - DNA, 25 bp, Homo sapien
tgtatagttcttgggaaagtcagtc

SEQ ID NO: 5044710 - DNA, 25 bp, Homo sapien
cagcagcagggaatgtgcagcccat

SEQ ID NO: 5044711 - DNA, 25 bp, Homo sapien
gcagaatgaggtcacacttcctgtt

SEQ ID NO: 5044712 - DNA, 25 bp, Homo sapien
ggccagctggttacaccctggtcac

SEQ ID NO: 5044713 - DNA, 25 bp, Homo sapien
agctggttacaccctggtcactgga

SEQ ID NO: 5044714 - DNA, 25 bp, Homo sapien
gcagttttaacaatccacggaaatg

SEQ ID NO: 5044715 - DNA, 25 bp, Homo sapien
gattgtacgttgtagagactatctc

SEQ ID NO: 5044716 - DNA, 25 bp, Homo sapien
cagttttaacaatccacggaaatgg

SEQ ID NO: 5044717 - DNA, 25 bp, Homo sapien
cacggaaatggggattgtacgttgt

SEQ ID NO: 5044718 - DNA, 25 bp, Homo sapien
gcttccggcacgtcgcgggcggctg

SEQ ID NO: 5044719 - DNA, 25 bp, Homo sapien
gtcacgtgacaaggccaggcccgct

SEQ ID NO: 5044720 - DNA, 25 bp, Homo sapien
gtcgcgggcggctgacgtcgccggg

SEQ ID NO: 5044721 - DNA, 25 bp, Homo sapien
ggcccaaccctcgtgagtcacgtga

SEQ ID NO: 5044722 - DNA, 25 bp, Homo sapien
ctgagccggcaggccgcctggcccc

SEQ ID NO: 5044723 - DNA, 25 bp, Homo sapien
agaggaggccgagtcggtaagaggc

SEQ ID NO: 5044724 - DNA, 25 bp, Homo sapien
gaggccgagtcggtaagaggcggcg

SEQ ID NO: 5044725 - DNA, 25 bp, Homo sapien
tctggtgtctctctttccggcccgc

SEQ ID NO: 5044726 - DNA, 25 bp, Homo sapien
cattgtcggtctctatgtcttcttg

SEQ ID NO: 5044727 - DNA, 25 bp, Homo sapien
tttggcctggcggtcattctctgac

SEQ ID NO: 5044728 - DNA, 25 bp, Homo sapien
tgtcatctccgaaaacttccactgt

SEQ ID NO: 5044729 - DNA, 25 bp, Homo sapien
tctgaccattgctttacattgtcgg

SEQ ID NO: 5044730 - DNA, 25 bp, Homo sapien
gccctgcttggtggattgcaacctg

SEQ ID NO: 5044731 - DNA, 25 bp, Homo sapien
cgtgaattctcatggtctttagggc

SEQ ID NO: 5044732 - DNA, 25 bp, Homo sapien
tggcagcatattctggccctgcttg

SEQ ID NO: 5044733 - DNA, 25 bp, Homo sapien
gtcattgaggtagttatcaactcta

SEQ ID NO: 5044734 - DNA, 25 bp, Homo sapien
ggtttgttggcatccaaagctgttg

SEQ ID NO: 5044735 - DNA, 25 bp, Homo sapien
tttgttggcatccaaagctgttggg

SEQ ID NO: 5044736 - DNA, 25 bp, Homo sapien
tcaaggtttgttggcatccaaagct

SEQ ID NO: 5044737 - DNA, 25 bp, Homo sapien
aaggtttgttggcatccaaagctgt

SEQ ID NO: 5044738 - DNA, 25 bp, Homo sapien
gttttgaaaaatggacacattcaca

SEQ ID NO: 5044739 - DNA, 25 bp, Homo sapien
tctcatctaagaatgcgacgtattt

SEQ ID NO: 5044740 - DNA, 25 bp, Homo sapien
gaagaaggtaaaaactctcatctaa

SEQ ID NO: 5044741 - DNA, 25 bp, Homo sapien
ttttagtcttttaactctatattgc

SEQ ID NO: 5044742 - DNA, 25 bp, Homo sapien
taacaatgtttctggatactaaagt

SEQ ID NO: 5044743 - DNA, 25 bp, Homo sapien
ttaatacaagtcgaggatttgacgc

SEQ ID NO: 5044744 - DNA, 25 bp, Homo sapien
gtcttcagggaaggctcgcagcaag

SEQ ID NO: 5044745 - DNA, 25 bp, Homo sapien
aggcgatttcacctaaacctcaaag

SEQ ID NO: 5044746 - DNA, 25 bp, Homo sapien
tttgggggagcaagataaattcaca

SEQ ID NO: 5044747 - DNA, 25 bp, Homo sapien
gggagcaagataaattcacactgtt

SEQ ID NO: 5044748 - DNA, 25 bp, Homo sapien
gtgaaattgttcaacatggttaggt

SEQ ID NO: 5044749 - DNA, 25 bp, Homo sapien
tgaaattgttcaacatggttaggtt

SEQ ID NO: 5044750 - DNA, 25 bp, Homo sapien
cagaaaatcttaattctgttagtat

SEQ ID NO: 5044751 - DNA, 25 bp, Homo sapien
tcagaaaatcttaattctgttagta

SEQ ID NO: 5044752 - DNA, 25 bp, Homo sapien
ggtagcattcgatgaaatgcatcag

SEQ ID NO: 5044753 - DNA, 25 bp, Homo sapien
tcccctgagttttcgggtagcattc

SEQ ID NO: 5044754 - DNA, 25 bp, Homo sapien
tcaggatgtccatgagcaggtcccc

SEQ ID NO: 5044755 - DNA, 25 bp, Homo sapien
ctttatgtaacgtcaggatgtccat

SEQ ID NO: 5044756 - DNA, 25 bp, Homo sapien
cattccacagctagagtgatcctct

SEQ ID NO: 5044757 - DNA, 25 bp, Homo sapien
tactgctgtagcctctgaactgtcc

SEQ ID NO: 5044758 - DNA, 25 bp, Homo sapien
gataatgccgtcttagctctcggcc

SEQ ID NO: 5044759 - DNA, 25 bp, Homo sapien
gctctcggcctccagtctataacag

SEQ ID NO: 5044760 - DNA, 25 bp, Homo sapien
tcttgtggccactcagttggagcca

SEQ ID NO: 5044761 - DNA, 25 bp, Homo sapien
cattgtctaggtggctattcaagcg

SEQ ID NO: 5044762 - DNA, 25 bp, Homo sapien
tactggtgtgatcgtagttcattgc

SEQ ID NO: 5044763 - DNA, 25 bp, Homo sapien
taagactaccagcacaggtcatcat

SEQ ID NO: 5044764 - DNA, 25 bp, Homo sapien
caaaattactatcctactggaaggg

SEQ ID NO: 5044765 - DNA, 25 bp, Homo sapien
catattcgactcattgtagagcagg

SEQ ID NO: 5044766 - DNA, 25 bp, Homo sapien
gggtcttagaacactacctgtgatg

SEQ ID NO: 5044767 - DNA, 25 bp, Homo sapien
gctaggcttatttgtggcaatcgga

SEQ ID NO: 5044768 - DNA, 25 bp, Homo sapien
tgaaaaatccgagtaagtgcagtcc

SEQ ID NO: 5044769 - DNA, 25 bp, Homo sapien
taatgagcaacgttagtaggttagc

SEQ ID NO: 5044770 - DNA, 25 bp, Homo sapien
taggttagcagttgatgaaaaatcc

SEQ ID NO: 5044771 - DNA, 25 bp, Homo sapien
tttttgaatctgctcctagtgctag

SEQ ID NO: 5044772 - DNA, 25 bp, Homo sapien
atcttcagtggcagctcaatctcct

SEQ ID NO: 5044773 - DNA, 25 bp, Homo sapien
gctcaatctccttacacacatagaa

SEQ ID NO: 5044774 - DNA, 25 bp, Homo sapien
tcagtggcagctcaatctccttaca

SEQ ID NO: 5044775 - DNA, 25 bp, Homo sapien
acacacatagaaaatgtgcagaacg

SEQ ID NO: 5044776 - DNA, 25 bp, Homo sapien
gctggattggtcttctgaatacttg

SEQ ID NO: 5044777 - DNA, 25 bp, Homo sapien
ctgaatacttgccattccctggcat

SEQ ID NO: 5044778 - DNA, 25 bp, Homo sapien
tggattggtcttctgaatacttgcc

SEQ ID NO: 5044779 - DNA, 25 bp, Homo sapien
ctggctggattggtcttctgaatac

SEQ ID NO: 5044780 - DNA, 25 bp, Homo sapien
gagcacactatagtttgtttcacaa

SEQ ID NO: 5044781 - DNA, 25 bp, Homo sapien
gaatgagagatattgacaggaatgg

SEQ ID NO: 5044782 - DNA, 25 bp, Homo sapien
ttaacactgcattatgcctgcctca

SEQ ID NO: 5044783 - DNA, 25 bp, Homo sapien
gagggacagctttggcagttatttg

SEQ ID NO: 5044784 - DNA, 25 bp, Homo sapien
gcctttcccactggttctcacacag

SEQ ID NO: 5044785 - DNA, 25 bp, Homo sapien
ctggcctttcccactggttctcaca

SEQ ID NO: 5044786 - DNA, 25 bp, Homo sapien
ggaataggttctagcagctctggcc

SEQ ID NO: 5044787 - DNA, 25 bp, Homo sapien
taggttctagcagctctggcctttc

SEQ ID NO: 5044788 - DNA, 25 bp, Homo sapien
cactggggaacattgtaaacgcttc

SEQ ID NO: 5044789 - DNA, 25 bp, Homo sapien
caacaatgccagcagtacactgggg

SEQ ID NO: 5044790 - DNA, 25 bp, Homo sapien
cttgtcaagaatcatgcccttgttc

SEQ ID NO: 5044791 - DNA, 25 bp, Homo sapien
catgcccttgttcatttgcaacaat

SEQ ID NO: 5044792 - DNA, 25 bp, Homo sapien
taggactaggtaggatctctcttgc

SEQ ID NO: 5044793 - DNA, 25 bp, Homo sapien
taattgcttggtaactgccttctgc

SEQ ID NO: 5044794 - DNA, 25 bp, Homo sapien
gcatagtgcctgatagcagctgaag

SEQ ID NO: 5044795 - DNA, 25 bp, Homo sapien
gatgagtggccccttgagcacatgc

SEQ ID NO: 5044796 - DNA, 25 bp, Homo sapien
ttatgacaagcacggttctgttccc

SEQ ID NO: 5044797 - DNA, 25 bp, Homo sapien
cacacgaacatgaacttgtccaggg

SEQ ID NO: 5044798 - DNA, 25 bp, Homo sapien
tatgaggaagtgctattatcacccc

SEQ ID NO: 5044799 - DNA, 25 bp, Homo sapien
tcaactttgtgattactagactggg

SEQ ID NO: 5044800 - DNA, 25 bp, Homo sapien
ttgtcagggacaaccacctgaaggg

SEQ ID NO: 5044801 - DNA, 25 bp, Homo sapien
gcctggccattgtcagggacaacca

SEQ ID NO: 5044802 - DNA, 25 bp, Homo sapien
gggaagggtgggatccagagctcca

SEQ ID NO: 5044803 - DNA, 25 bp, Homo sapien
cacctgaaggggtcaaagacatggg

SEQ ID NO: 5044804 - DNA, 25 bp, Homo sapien
gatcaaggtctcctagctggcaaag

SEQ ID NO: 5044805 - DNA, 25 bp, Homo sapien
gggccgcatatatgcctgccataga

SEQ ID NO: 5044806 - DNA, 25 bp, Homo sapien
gatcaaggtctcctagctggctagc

SEQ ID NO: 5044807 - DNA, 25 bp, Homo sapien
acctgtgaggacaagagcccagagc

SEQ ID NO: 5044808 - DNA, 25 bp, Homo sapien
caatggctcctcatgtctcctggaa

SEQ ID NO: 5044809 - DNA, 25 bp, Homo sapien
gaattgccccattattcctgctgac

SEQ ID NO: 5044810 - DNA, 25 bp, Homo sapien
ggcctttcctaagcctggacctgaa

SEQ ID NO: 5044811 - DNA, 25 bp, Homo sapien
catatcagtgaaatggtcttacccc

SEQ ID NO: 5044812 - DNA, 25 bp, Homo sapien
tcctcctcaacccagaaactctccc

SEQ ID NO: 5044813 - DNA, 25 bp, Homo sapien
cacccatcctcctcaacccagaaac

SEQ ID NO: 5044814 - DNA, 25 bp, Homo sapien
accacccatcctcctcaacccagaa

SEQ ID NO: 5044815 - DNA, 25 bp, Homo sapien
catcctcctcaacccagaaactctc

SEQ ID NO: 5044816 - DNA, 25 bp, Homo sapien
gcttttcgcaagatcccaggcaata

SEQ ID NO: 5044817 - DNA, 25 bp, Homo sapien
ccttatgcgggaagtcaatgtccac

SEQ ID NO: 5044818 - DNA, 25 bp, Homo sapien
ttctaaaatacgtgaggctcccagg

SEQ ID NO: 5044819 - DNA, 25 bp, Homo sapien
gatccaatgtttcgtgatgccacag

SEQ ID NO: 5044820 - DNA, 25 bp, Homo sapien
cctcaaagtaaggtggtgatgagaa

SEQ ID NO: 5044821 - DNA, 25 bp, Homo sapien
ctttcgatcaaaggaggtgttgtcc

SEQ ID NO: 5044822 - DNA, 25 bp, Homo sapien
aggaggtgttgtcctcactggtcag

SEQ ID NO: 5044823 - DNA, 25 bp, Homo sapien
tgcttttcttctttcgatcaaagga

SEQ ID NO: 5044824 - DNA, 25 bp, Homo sapien
gctgaaaagggactcgtctacccca

SEQ ID NO: 5044825 - DNA, 25 bp, Homo sapien
ccaagcgggttctctgttccctcgg

SEQ ID NO: 5044826 - DNA, 25 bp, Homo sapien
aggcaatgctctctcgaaggccata

SEQ ID NO: 5044827 - DNA, 25 bp, Homo sapien
gaaggccatagctgaaaagggactc

SEQ ID NO: 5044828 - DNA, 25 bp, Homo sapien
ggatggctgacacttccagctgtaa

SEQ ID NO: 5044829 - DNA, 25 bp, Homo sapien
tgctagcatagaataaggactcagt

SEQ ID NO: 5044830 - DNA, 25 bp, Homo sapien
tgtgctcggcacacacaccgttttg

SEQ ID NO: 5044831 - DNA, 25 bp, Homo sapien
gaagtcactgtaggattctgctgat

SEQ ID NO: 5044832 - DNA, 25 bp, Homo sapien
tcctccagtccacagtcttctgacg

SEQ ID NO: 5044833 - DNA, 25 bp, Homo sapien
cagtccacagtcttctgacgcaagg

SEQ ID NO: 5044834 - DNA, 25 bp, Homo sapien
ctggggcagccgtgctttgtgtcag

SEQ ID NO: 5044835 - DNA, 25 bp, Homo sapien
tctgacgcaaggtgacaggtgagct

SEQ ID NO: 5044836 - DNA, 25 bp, Homo sapien
gaagcacactcagtctgtcacaggg

SEQ ID NO: 5044837 - DNA, 25 bp, Homo sapien
ggtatactctgcacttagccaggca

SEQ ID NO: 5044838 - DNA, 25 bp, Homo sapien
caccaccaggttttcgacagcacgt

SEQ ID NO: 5044839 - DNA, 25 bp, Homo sapien
tttgagaaatgtaagcgtgccctgg

SEQ ID NO: 5044840 - DNA, 25 bp, Homo sapien
tactcagggccgtagaaatgtgacc

SEQ ID NO: 5044841 - DNA, 25 bp, Homo sapien
agaagaaagacatcctccagctgtc

SEQ ID NO: 5044842 - DNA, 25 bp, Homo sapien
gtctaattcacctctgtctacatgg

SEQ ID NO: 5044843 - DNA, 25 bp, Homo sapien
tgagcatcccgagatgaagtaactt

SEQ ID NO: 5044844 - DNA, 25 bp, Homo sapien
tctgtgtctttagagtgaatccagt

SEQ ID NO: 5044845 - DNA, 25 bp, Homo sapien
gtgtctttagagtgaatccagtgga

SEQ ID NO: 5044846 - DNA, 25 bp, Homo sapien
tgtgtctttagagtgaatccagtgg

SEQ ID NO: 5044847 - DNA, 25 bp, Homo sapien
catctgtgtctttagagtgaatcca

SEQ ID NO: 5044848 - DNA, 25 bp, Homo sapien
tatcagcctgggagaattcagacct

SEQ ID NO: 5044849 - DNA, 25 bp, Homo sapien
aaagttccgattcctgagctgacat

SEQ ID NO: 5044850 - DNA, 25 bp, Homo sapien
taatgggagctcacgattatgggcc

SEQ ID NO: 5044851 - DNA, 25 bp, Homo sapien
gatggcaatgttccgctgggtaaaa

SEQ ID NO: 5044852 - DNA, 25 bp, Homo sapien
ccacggggaagcatgatcggaatgc

SEQ ID NO: 5044853 - DNA, 25 bp, Homo sapien
agcatgatcggaatgctgggaaaga

SEQ ID NO: 5044854 - DNA, 25 bp, Homo sapien
gaagcatgatcggaatgctgggaaa

SEQ ID NO: 5044855 - DNA, 25 bp, Homo sapien
atgatcggaatgctgggaaagaaac

SEQ ID NO: 5044856 - DNA, 25 bp, Homo sapien
tgctctgagcacagcgaagacaggt

SEQ ID NO: 5044857 - DNA, 25 bp, Homo sapien
cagcgaagacaggtagccactgcta

SEQ ID NO: 5044858 - DNA, 25 bp, Homo sapien
cagaggcgtttcatgttggtcttga

SEQ ID NO: 5044859 - DNA, 25 bp, Homo sapien
gctaactcctatagcttcatcgcag

SEQ ID NO: 5044860 - DNA, 25 bp, Homo sapien
cgagagagcatatcatgaaggcagc

SEQ ID NO: 5044861 - DNA, 25 bp, Homo sapien
tgtatggcccacttaaggatgtgca

SEQ ID NO: 5044862 - DNA, 25 bp, Homo sapien
tattaaggcaacatgcacaggcagt

SEQ ID NO: 5044863 - DNA, 25 bp, Homo sapien
ttaatgtacacttcgagagagggca

SEQ ID NO: 5044864 - DNA, 25 bp, Homo sapien
ccagttgttgggcagacggaaaatg

SEQ ID NO: 5044865 - DNA, 25 bp, Homo sapien
cagacggaaaatgcggtaatgcttt

SEQ ID NO: 5044866 - DNA, 25 bp, Homo sapien
ttgggcagacggaaaatgcggtaat

SEQ ID NO: 5044867 - DNA, 25 bp, Homo sapien
gaaaatgcggtaatgctttacctgc

SEQ ID NO: 5044868 - DNA, 25 bp, Homo sapien
tgtctcaccgacagtgagtaaaacc

SEQ ID NO: 5044869 - DNA, 25 bp, Homo sapien
ctgtgtctcaccgacagtgagtaaa

SEQ ID NO: 5044870 - DNA, 25 bp, Homo sapien
gtgtctcaccgacagtgagtaaaac

SEQ ID NO: 5044871 - DNA, 25 bp, Homo sapien
tgtgtctcaccgacagtgagtaaaa

SEQ ID NO: 5044872 - DNA, 25 bp, Homo sapien
tttgtagaggtgcagtgttgctaca

SEQ ID NO: 5044873 - DNA, 25 bp, Homo sapien
ttgtagaggtgcagtgttgctacat

SEQ ID NO: 5044874 - DNA, 25 bp, Homo sapien
tagaggtgcagtgttgctacattgc

SEQ ID NO: 5044875 - DNA, 25 bp, Homo sapien
tctctctgatcatgaaggagccgac

SEQ ID NO: 5044876 - DNA, 25 bp, Homo sapien
tctgatcatgaaggagccgaccttt

SEQ ID NO: 5044877 - DNA, 25 bp, Homo sapien
ggtctcactctctctgatcatgaag

SEQ ID NO: 5044878 - DNA, 25 bp, Homo sapien
gaaggagccgacctttgtgtctggc

SEQ ID NO: 5044879 - DNA, 25 bp, Homo sapien
gcatgtggcatgtagagtcctctgg

SEQ ID NO: 5044880 - DNA, 25 bp, Homo sapien
gtgaagcgacttttacaggaccctc

SEQ ID NO: 5044881 - DNA, 25 bp, Homo sapien
tccagcttccgacacttgacagatg

SEQ ID NO: 5044882 - DNA, 25 bp, Homo sapien
ttcttatctgttgagcctagttttc

SEQ ID NO: 5044883 - DNA, 25 bp, Homo sapien
aactctggccacacatattccaggg

SEQ ID NO: 5044884 - DNA, 25 bp, Homo sapien
tattccagggatgtaactctctcga

SEQ ID NO: 5044885 - DNA, 25 bp, Homo sapien
tcgaccagtgctaagagaaatagct

SEQ ID NO: 5044886 - DNA, 25 bp, Homo sapien
taagagaaatagctttccaccagcc

SEQ ID NO: 5044887 - DNA, 25 bp, Homo sapien
cacggcaaggaagtcgctatccagt

SEQ ID NO: 5044888 - DNA, 25 bp, Homo sapien
agtttctcccctcggcggaatatcg

SEQ ID NO: 5044889 - DNA, 25 bp, Homo sapien
ctgatgtcaggagacgggtagtcac

SEQ ID NO: 5044890 - DNA, 25 bp, Homo sapien
tcagaaatcacacgcagtttctccc

SEQ ID NO: 5044891 - DNA, 25 bp, Homo sapien
cagtctcaactctcttagatgctag

SEQ ID NO: 5044892 - DNA, 25 bp, Homo sapien
tcaactctcttagatgctagaggga

SEQ ID NO: 5044893 - DNA, 25 bp, Homo sapien
ttgagtcttttcagggtcagtctca

SEQ ID NO: 5044894 - DNA, 25 bp, Homo sapien
tcagggtcagtctcaactctcttag

SEQ ID NO: 5044895 - DNA, 25 bp, Homo sapien
gaactccgcccagggcggtgctgca

SEQ ID NO: 5044896 - DNA, 25 bp, Homo sapien
gggcagccatctgcgccagtgaact

SEQ ID NO: 5044897 - DNA, 25 bp, Homo sapien
ccagtgaactccgcccagggcggtg

SEQ ID NO: 5044898 - DNA, 25 bp, Homo sapien
ttccctgtcaggctcggcagacagg

SEQ ID NO: 5044899 - DNA, 25 bp, Homo sapien
gggtggatttcatgctgtttcccat

SEQ ID NO: 5044900 - DNA, 25 bp, Homo sapien
ttttccctggggccgctggtgatgc

SEQ ID NO: 5044901 - DNA, 25 bp, Homo sapien
tctttttccctggggccgctggtga

SEQ ID NO: 5044902 - DNA, 25 bp, Homo sapien
ttccctggggccgctggtgatgccc

SEQ ID NO: 5044903 - DNA, 25 bp, Homo sapien
tccctggggccgctggtgatgccca

SEQ ID NO: 5044904 - DNA, 25 bp, Homo sapien
ggaaagtcaaccgtgccctgagccc

SEQ ID NO: 5044905 - DNA, 25 bp, Homo sapien
ccagtttagagagcatcgtgcatca

SEQ ID NO: 5044906 - DNA, 25 bp, Homo sapien
tataggagacagacggggaaagtca

SEQ ID NO: 5044907 - DNA, 25 bp, Homo sapien
ccctccaagtggagaatgacccagt

SEQ ID NO: 5044908 - DNA, 25 bp, Homo sapien
ctgtgtctgcagctcaggatcaaac

SEQ ID NO: 5044909 - DNA, 25 bp, Homo sapien
gaccaggctcgcaaaagctataaac

SEQ ID NO: 5044910 - DNA, 25 bp, Homo sapien
tgctcaagctaatgcatagtaatat

SEQ ID NO: 5044911 - DNA, 25 bp, Homo sapien
catagtgcaccacagaagggttggc

SEQ ID NO: 5044912 - DNA, 25 bp, Homo sapien
tagtaatattccgaagacaatgacc

SEQ ID NO: 5044913 - DNA, 25 bp, Homo sapien
aagtgaagcgcaaatcccatccttt

SEQ ID NO: 5044914 - DNA, 25 bp, Homo sapien
aaagtgaagcgcaaatcccatcctt

SEQ ID NO: 5044915 - DNA, 25 bp, Homo sapien
tcgacaacgtgggatatgccggcca

SEQ ID NO: 5044916 - DNA, 25 bp, Homo sapien
tctgtttcgcagatctgggtccttt

SEQ ID NO: 5044917 - DNA, 25 bp, Homo sapien
agccctcctcttaataggtttctgt

SEQ ID NO: 5044918 - DNA, 25 bp, Homo sapien
catggcgttgccgtcgacaacgtgg

SEQ ID NO: 5044919 - DNA, 25 bp, Homo sapien
aggggctctaggggcactggcaaga

SEQ ID NO: 5044920 - DNA, 25 bp, Homo sapien
ggggctctaggggcactggcaagac

SEQ ID NO: 5044921 - DNA, 25 bp, Homo sapien
caggggctctaggggcactggcaag

SEQ ID NO: 5044922 - DNA, 25 bp, Homo sapien
cagaggctgcagtaagctgagatcg

SEQ ID NO: 5044923 - DNA, 25 bp, Homo sapien
aggagaatcacttgaacccgtgagg

SEQ ID NO: 5044924 - DNA, 25 bp, Homo sapien
tcccagttactcaggaggctgaggc

SEQ ID NO: 5044925 - DNA, 25 bp, Homo sapien
tgggtgtggtggcagcttcctgtaa

SEQ ID NO: 5044926 - DNA, 25 bp, Homo sapien
tatgaagagctgtctggcatacgga

SEQ ID NO: 5044927 - DNA, 25 bp, Homo sapien
tcagtgacccagacgtgtcagtaca

SEQ ID NO: 5044928 - DNA, 25 bp, Homo sapien
tcagtacagtgagtgggcgtcttat

SEQ ID NO: 5044929 - DNA, 25 bp, Homo sapien
gacgtggctttgatagttcatggaa

SEQ ID NO: 5044930 - DNA, 25 bp, Homo sapien
ggccgacccagaatgttgacacagg

SEQ ID NO: 5044931 - DNA, 25 bp, Homo sapien
gacacaggtgcagctattacggcac

SEQ ID NO: 5044932 - DNA, 25 bp, Homo sapien
gctttctgcctaggaaatgtaaaag

SEQ ID NO: 5044933 - DNA, 25 bp, Homo sapien
acagagttctttggtggccgaccca

SEQ ID NO: 5044934 - DNA, 25 bp, Homo sapien
tggccgcatacttcctctgctagga

SEQ ID NO: 5044935 - DNA, 25 bp, Homo sapien
ttcagtaaccactctgagcaagctt

SEQ ID NO: 5044936 - DNA, 25 bp, Homo sapien
acacactgggcatgactcctgtggg

SEQ ID NO: 5044937 - DNA, 25 bp, Homo sapien
tctgctaggaacgaggaaggcacag

SEQ ID NO: 5044938 - DNA, 25 bp, Homo sapien
cagagcttattgatgaaacaggtaa

SEQ ID NO: 5044939 - DNA, 25 bp, Homo sapien
aaactcaggcacatggggcttcaga

SEQ ID NO: 5044940 - DNA, 25 bp, Homo sapien
tctggaatgctgaccccaagattgc

SEQ ID NO: 5044941 - DNA, 25 bp, Homo sapien
gagtctcaagcagagaaactcaggc

SEQ ID NO: 5044942 - DNA, 25 bp, Homo sapien
gaagctgctgtgtagcaaggctcct

SEQ ID NO: 5044943 - DNA, 25 bp, Homo sapien
aactggtttgtggtctgttcaggag

SEQ ID NO: 5044944 - DNA, 25 bp, Homo sapien
tcatacacgtgacccaagaagagga

SEQ ID NO: 5044945 - DNA, 25 bp, Homo sapien
gctcctttgggtggctgtgtcaccc

SEQ ID NO: 5044946 - DNA, 25 bp, Homo sapien
tgccccgtccaggttctagtgaagc

SEQ ID NO: 5044947 - DNA, 25 bp, Homo sapien
ttctcatccagtgccctactgcccc

SEQ ID NO: 5044948 - DNA, 25 bp, Homo sapien
ctactgccccgtccaggttctagtg

SEQ ID NO: 5044949 - DNA, 25 bp, Homo sapien
ccgtccaggttctagtgaagccacc

SEQ ID NO: 5044950 - DNA, 25 bp, Homo sapien
ctcagaactttctgcatgcattgtg

SEQ ID NO: 5044951 - DNA, 25 bp, Homo sapien
gcattgtgttttctagggcaggcat

SEQ ID NO: 5044952 - DNA, 25 bp, Homo sapien
tcagaactttctgcatgcattgtgt

SEQ ID NO: 5044953 - DNA, 25 bp, Homo sapien
atctcagaactttctgcatgcattg

SEQ ID NO: 5044954 - DNA, 25 bp, Homo sapien
tcaagtcagactattcaaataaacc

SEQ ID NO: 5044955 - DNA, 25 bp, Homo sapien
cttgaattgttagaaggctctgtgg

SEQ ID NO: 5044956 - DNA, 25 bp, Homo sapien
agactattcaaataaacccagtggg

SEQ ID NO: 5044957 - DNA, 25 bp, Homo sapien
ctgtggattgatcaagtcagactat

SEQ ID NO: 5044958 - DNA, 25 bp, Homo sapien
aaatcagaaacagagcgcctccgct

SEQ ID NO: 5044959 - DNA, 25 bp, Homo sapien
tagctttagccacacgatgtaggag

SEQ ID NO: 5044960 - DNA, 25 bp, Homo sapien
tgtgcccctaagcttggccaggagt

SEQ ID NO: 5044961 - DNA, 25 bp, Homo sapien
caggcatctccaaggaaggcgagaa

SEQ ID NO: 5044962 - DNA, 25 bp, Homo sapien
gctcccttagaataaagtatcaggt

SEQ ID NO: 5044963 - DNA, 25 bp, Homo sapien
ccaaccataaaggaagggccaagca

SEQ ID NO: 5044964 - DNA, 25 bp, Homo sapien
tttatatatcattcttacttccaga

SEQ ID NO: 5044965 - DNA, 25 bp, Homo sapien
tacttccagaataggttccagctcc

SEQ ID NO: 5044966 - DNA, 25 bp, Homo sapien
cttctacccagcctacgaggggcag

SEQ ID NO: 5044967 - DNA, 25 bp, Homo sapien
cccagcctacgaggggcagttttct

SEQ ID NO: 5044968 - DNA, 25 bp, Homo sapien
tggaggagaagagcctgtcgctgaa

SEQ ID NO: 5044969 - DNA, 25 bp, Homo sapien
aggagaagagcctgtcgctgaaaat

SEQ ID NO: 5044970 - DNA, 25 bp, Homo sapien
ggcctgactttgtaccccgtgctgg

SEQ ID NO: 5044971 - DNA, 25 bp, Homo sapien
ggtccaagtacatctcgtctctgaa

SEQ ID NO: 5044972 - DNA, 25 bp, Homo sapien
gaagaaagccgactgctccttctgg

SEQ ID NO: 5044973 - DNA, 25 bp, Homo sapien
tctcacggaaagtacccacatttgc

SEQ ID NO: 5044974 - DNA, 25 bp, Homo sapien
ggctgcccactatggtcatcttttt

SEQ ID NO: 5044975 - DNA, 25 bp, Homo sapien
agcaagtgaccagcccttgagctcc

SEQ ID NO: 5044976 - DNA, 25 bp, Homo sapien
tctaagacctacagcaagtgaccag

SEQ ID NO: 5044977 - DNA, 25 bp, Homo sapien
acccgaggctgcccactatggtcat

SEQ ID NO: 5044978 - DNA, 25 bp, Homo sapien
tatagccttccaagcttggcctgtt

SEQ ID NO: 5044979 - DNA, 25 bp, Homo sapien
tcttctggcaagagcagcataaatc

SEQ ID NO: 5044980 - DNA, 25 bp, Homo sapien
tgaaccccatgtacagtcagcactc

SEQ ID NO: 5044981 - DNA, 25 bp, Homo sapien
gagagagcttctcataacgttttga

SEQ ID NO: 5044982 - DNA, 25 bp, Homo sapien
gctacctaggtattatgatgcagca

SEQ ID NO: 5044983 - DNA, 25 bp, Homo sapien
catcagattaagagagctacctagg

SEQ ID NO: 5044984 - DNA, 25 bp, Homo sapien
gtcacatagtcacacacaacgtagt

SEQ ID NO: 5044985 - DNA, 25 bp, Homo sapien
tagtgctgaatcaagccttcccctt

SEQ ID NO: 5044986 - DNA, 25 bp, Homo sapien
taataacagagggacaaacacccgc

SEQ ID NO: 5044987 - DNA, 25 bp, Homo sapien
tcccaagacatcaataggtggtggc

SEQ ID NO: 5044988 - DNA, 25 bp, Homo sapien
cacagtcttagttagtcccaggaac

SEQ ID NO: 5044989 - DNA, 25 bp, Homo sapien
gcagtcaataacaaccttacgggca

SEQ ID NO: 5044990 - DNA, 25 bp, Homo sapien
tctggaaagacttgtgcacaatagt

SEQ ID NO: 5044991 - DNA, 25 bp, Homo sapien
gtactcagcctctcttgccccgatc

SEQ ID NO: 5044992 - DNA, 25 bp, Homo sapien
ataaatacaaatatctcattaagaa

SEQ ID NO: 5044993 - DNA, 25 bp, Homo sapien
aatagtttcccatccgtactcagcc

SEQ ID NO: 5044994 - DNA, 25 bp, Homo sapien
cccagaaatcctcgggtcccagtgg

SEQ ID NO: 5044995 - DNA, 25 bp, Homo sapien
tcctatgagaaaatccacggtgagc

SEQ ID NO: 5044996 - DNA, 25 bp, Homo sapien
gcaggtaacgagtcattgcctctca

SEQ ID NO: 5044997 - DNA, 25 bp, Homo sapien
cccagtggctgacttacaatattca

SEQ ID NO: 5044998 - DNA, 25 bp, Homo sapien
ccagcccagctgtcgaagattgaaa

SEQ ID NO: 5044999 - DNA, 25 bp, Homo sapien
gagagggcacccacgtaatagacct

SEQ ID NO: 5045000 - DNA, 25 bp, Homo sapien
ccattcggcgaaaggttagggagca

SEQ ID NO: 5045001 - DNA, 25 bp, Homo sapien
tgaggatccaagaacgtgaccgggt

SEQ ID NO: 5045002 - DNA, 25 bp, Homo sapien
gccatccagagaagtgacgctggaa

SEQ ID NO: 5045003 - DNA, 25 bp, Homo sapien
tgttcccagcagcacccgagttggg

SEQ ID NO: 5045004 - DNA, 25 bp, Homo sapien
gagacctccatggacttgggcccgg

SEQ ID NO: 5045005 - DNA, 25 bp, Homo sapien
gccctcgctggtgtgggagcggctt

SEQ ID NO: 5045006 - DNA, 25 bp, Homo sapien
gaccgcatcaggcgggtcatgctag

SEQ ID NO: 5045007 - DNA, 25 bp, Homo sapien
tgcgggaccgcatcaggcgggtcat

SEQ ID NO: 5045008 - DNA, 25 bp, Homo sapien
catcaggcgggtcatgctagccgag

SEQ ID NO: 5045009 - DNA, 25 bp, Homo sapien
gaggctgtgcgggaccgcatcaggc

SEQ ID NO: 5045010 - DNA, 25 bp, Homo sapien
cctagtaagggaggacacacgaatt

SEQ ID NO: 5045011 - DNA, 25 bp, Homo sapien
gcaggagccccactagcagatagct

SEQ ID NO: 5045012 - DNA, 25 bp, Homo sapien
tcacaccgtgcagggtaaagcagga

SEQ ID NO: 5045013 - DNA, 25 bp, Homo sapien
taaggccaatgctaggactgcagtc

SEQ ID NO: 5045014 - DNA, 25 bp, Homo sapien
gacacagaattgctcatccaaacct

SEQ ID NO: 5045015 - DNA, 25 bp, Homo sapien
gagcacttccaattccgacacatgc

SEQ ID NO: 5045016 - DNA, 25 bp, Homo sapien
agagcacttccaattccgacacatg

SEQ ID NO: 5045017 - DNA, 25 bp, Homo sapien
cagaattgctcatccaaacctggct

SEQ ID NO: 5045018 - DNA, 25 bp, Homo sapien
tatcccatgccctgcacgaagtact

SEQ ID NO: 5045019 - DNA, 25 bp, Homo sapien
gtatcccatgccctgcacgaagtac

SEQ ID NO: 5045020 - DNA, 25 bp, Homo sapien
tgtatcccatgccctgcacgaagta

SEQ ID NO: 5045021 - DNA, 25 bp, Homo sapien
tcccatgccctgcacgaagtacttg

SEQ ID NO: 5045022 - DNA, 25 bp, Homo sapien
tttggacaggtaaatccactcaggg

SEQ ID NO: 5045023 - DNA, 25 bp, Homo sapien
acaagtaagtggtgggtcctgtaca

SEQ ID NO: 5045024 - DNA, 25 bp, Homo sapien
tgtacattaacccagggctctccaa

SEQ ID NO: 5045025 - DNA, 25 bp, Homo sapien
cgaggtcagtgctaccttagataca

SEQ ID NO: 5045026 - DNA, 25 bp, Homo sapien
tgacccatgatgaccaaggtgtgtc

SEQ ID NO: 5045027 - DNA, 25 bp, Homo sapien
aaggtgtgtctacttggcaaatccc

SEQ ID NO: 5045028 - DNA, 25 bp, Homo sapien
tgtcatccgatgtcacagcaaggta

SEQ ID NO: 5045029 - DNA, 25 bp, Homo sapien
tgaagggatcagttacgtagcaaac

SEQ ID NO: 5045030 - DNA, 25 bp, Homo sapien
ctgcgggaggccgccacagtccgcc

SEQ ID NO: 5045031 - DNA, 25 bp, Homo sapien
tctgcgggaggccgccacagtccgc

SEQ ID NO: 5045032 - DNA, 25 bp, Homo sapien
tgcgggaggccgccacagtccgcca

SEQ ID NO: 5045033 - DNA, 25 bp, Homo sapien
gcgggaggccgccacagtccgccat

SEQ ID NO: 5045034 - DNA, 25 bp, Homo sapien
caggatctctctgacccgaaagggt

SEQ ID NO: 5045035 - DNA, 25 bp, Homo sapien
tttgggtcttcaggccggattcagc

SEQ ID NO: 5045036 - DNA, 25 bp, Homo sapien
gaaccatggaaggtacagctgtccc

SEQ ID NO: 5045037 - DNA, 25 bp, Homo sapien
ttgagggactcgcaaggttccaggc

SEQ ID NO: 5045038 - DNA, 25 bp, Homo sapien
ccgcaagaggccattgcaggctgtg

SEQ ID NO: 5045039 - DNA, 25 bp, Homo sapien
tgtgaaatcaccgaaccgcaagagg

SEQ ID NO: 5045040 - DNA, 25 bp, Homo sapien
ctgtgagactgtgcagccagcctgg

SEQ ID NO: 5045041 - DNA, 25 bp, Homo sapien
tcctaaatggtggacgttcaaagtc

SEQ ID NO: 5045042 - DNA, 25 bp, Homo sapien
cattatgcaagcttgacgcccagca

SEQ ID NO: 5045043 - DNA, 25 bp, Homo sapien
gcgggccctaaagctaacggctgat

SEQ ID NO: 5045044 - DNA, 25 bp, Homo sapien
gacatagacgcagagatacaatcgg

SEQ ID NO: 5045045 - DNA, 25 bp, Homo sapien
gatgcccgaatttttcctccaggcg

SEQ ID NO: 5045046 - DNA, 25 bp, Homo sapien
tcataactggcaaaggactggcgga

SEQ ID NO: 5045047 - DNA, 25 bp, Homo sapien
gagaggcccctctgaaaggttccca

SEQ ID NO: 5045048 - DNA, 25 bp, Homo sapien
tggcggaggttgctacagacactca

SEQ ID NO: 5045049 - DNA, 25 bp, Homo sapien
catgtgctcagatgaacttgctgga

SEQ ID NO: 5045050 - DNA, 25 bp, Homo sapien
gagagtggtctttgttgggtccaat

SEQ ID NO: 5045051 - DNA, 25 bp, Homo sapien
tttgttgggtccaattttgagttgc

SEQ ID NO: 5045052 - DNA, 25 bp, Homo sapien
tgggtccaattttgagttgcactcc

SEQ ID NO: 5045053 - DNA, 25 bp, Homo sapien
cttgaggagagtggtctttgttggg

SEQ ID NO: 5045054 - DNA, 25 bp, Homo sapien
taaacaagccgatgggacacagact

SEQ ID NO: 5045055 - DNA, 25 bp, Homo sapien
catcaggcaccagtcagtttggaaa

SEQ ID NO: 5045056 - DNA, 25 bp, Homo sapien
tccagtcagtcagcccgtaagaaac

SEQ ID NO: 5045057 - DNA, 25 bp, Homo sapien
gcagaatacccatatgtaacccagg

SEQ ID NO: 5045058 - DNA, 25 bp, Homo sapien
cggcatccactgcaggcgagctgtc

SEQ ID NO: 5045059 - DNA, 25 bp, Homo sapien
atccactgcaggcgagctgtcccca

SEQ ID NO: 5045060 - DNA, 25 bp, Homo sapien
actgcaggcgagctgtccccaacca

SEQ ID NO: 5045061 - DNA, 25 bp, Homo sapien
tgcaggcgagctgtccccaaccacc

SEQ ID NO: 5045062 - DNA, 25 bp, Homo sapien
gcaatgacgtgccaggttcccaagt

SEQ ID NO: 5045063 - DNA, 25 bp, Homo sapien
gagcagagaattagcacaaggttcc

SEQ ID NO: 5045064 - DNA, 25 bp, Homo sapien
gacttagctggcaatcaagaccgaa

SEQ ID NO: 5045065 - DNA, 25 bp, Homo sapien
ccacctttatagtgggcagccccga

SEQ ID NO: 5045066 - DNA, 25 bp, Homo sapien
ggttcccggcattggtcgctcaatc

SEQ ID NO: 5045067 - DNA, 25 bp, Homo sapien
gtgggttcccggcattggtcgctca

SEQ ID NO: 5045068 - DNA, 25 bp, Homo sapien
gtgactgtgtgggttcccggcattg

SEQ ID NO: 5045069 - DNA, 25 bp, Homo sapien
tcgctcaatctccaggtcgcgccgg

SEQ ID NO: 5045070 - DNA, 25 bp, Homo sapien
tgcatcattagcatgaggacccctc

SEQ ID NO: 5045071 - DNA, 25 bp, Homo sapien
cagtggccattctggtaagctaccc

SEQ ID NO: 5045072 - DNA, 25 bp, Homo sapien
catccccaacttgagagaggccctg

SEQ ID NO: 5045073 - DNA, 25 bp, Homo sapien
cagacctggttagagggacagcaca

SEQ ID NO: 5045074 - DNA, 25 bp, Homo sapien
gggagaacacaggatctctttgcgc

SEQ ID NO: 5045075 - DNA, 25 bp, Homo sapien
caggatccaaatcatgctctgccac

SEQ ID NO: 5045076 - DNA, 25 bp, Homo sapien
tcacagcctggagttagacaagcag

SEQ ID NO: 5045077 - DNA, 25 bp, Homo sapien
gctcccaacatgagaagctctttcc

SEQ ID NO: 5045078 - DNA, 25 bp, Homo sapien
gttgccggggttcatgtcattcaca

SEQ ID NO: 5045079 - DNA, 25 bp, Homo sapien
tggaccacttccacgttactctgca

SEQ ID NO: 5045080 - DNA, 25 bp, Homo sapien
ctggcggtaggtgtggaccacttcc

SEQ ID NO: 5045081 - DNA, 25 bp, Homo sapien
cattcacaatgtgctggcggtaggt

SEQ ID NO: 5045082 - DNA, 25 bp, Homo sapien
caccatgtccggcagagcttgggtc

SEQ ID NO: 5045083 - DNA, 25 bp, Homo sapien
catgtccggcagagcttgggtccat

SEQ ID NO: 5045084 - DNA, 25 bp, Homo sapien
accatgtccggcagagcttgggtcc

SEQ ID NO: 5045085 - DNA, 25 bp, Homo sapien
ccatgtccggcagagcttgggtcca

SEQ ID NO: 5045086 - DNA, 25 bp, Homo sapien
atacaggctggacggaagggctcct

SEQ ID NO: 5045087 - DNA, 25 bp, Homo sapien
tccccagtgactaggtttgcagcag

SEQ ID NO: 5045088 - DNA, 25 bp, Homo sapien
ttcagaggcccatgcacaagatgca

SEQ ID NO: 5045089 - DNA, 25 bp, Homo sapien
cagctatcatgaagcccagcgggtt

SEQ ID NO: 5045090 - DNA, 25 bp, Homo sapien
tcttcttgcagggatcccgccggcc

SEQ ID NO: 5045091 - DNA, 25 bp, Homo sapien
tcttgcagggatcccgccggcctga

SEQ ID NO: 5045092 - DNA, 25 bp, Homo sapien
atcccgccggcctgacaggccccca

SEQ ID NO: 5045093 - DNA, 25 bp, Homo sapien
gatcccgccggcctgacaggccccc

SEQ ID NO: 5045094 - DNA, 25 bp, Homo sapien
acgttgataaggacaaggccctcca

SEQ ID NO: 5045095 - DNA, 25 bp, Homo sapien
tccgcacaagggttcacgttgataa

SEQ ID NO: 5045096 - DNA, 25 bp, Homo sapien
cagccttccgcacaagggttcacgt

SEQ ID NO: 5045097 - DNA, 25 bp, Homo sapien
caagggttcacgttgataaggacaa

SEQ ID NO: 5045098 - DNA, 25 bp, Homo sapien
cacaactgtggagaatacgggtcat

SEQ ID NO: 5045099 - DNA, 25 bp, Homo sapien
taagcggacaaagcccatgacaaag

SEQ ID NO: 5045100 - DNA, 25 bp, Homo sapien
tacaaaggaacagtggctcttgacc

SEQ ID NO: 5045101 - DNA, 25 bp, Homo sapien
tacacaattgctcggtgaggataca

SEQ ID NO: 5045102 - DNA, 25 bp, Homo sapien
gttcccatgccaataatgcttttca

SEQ ID NO: 5045103 - DNA, 25 bp, Homo sapien
ttcccatgccaataatgcttttcag

SEQ ID NO: 5045104 - DNA, 25 bp, Homo sapien
ctgttcccatgccaataatgctttt

SEQ ID NO: 5045105 - DNA, 25 bp, Homo sapien
tgttcccatgccaataatgcttttc

SEQ ID NO: 5045106 - DNA, 25 bp, Homo sapien
aggggcaggaagatgctagaaacca

SEQ ID NO: 5045107 - DNA, 25 bp, Homo sapien
agtgttcacagagtgacgagctaat

SEQ ID NO: 5045108 - DNA, 25 bp, Homo sapien
taattttagtggtcagtccagatca

SEQ ID NO: 5045109 - DNA, 25 bp, Homo sapien
agtgacgagctaatttcttgcctca

SEQ ID NO: 5045110 - DNA, 25 bp, Homo sapien
aaactgttgaaggactccaggaagc

SEQ ID NO: 5045111 - DNA, 25 bp, Homo sapien
caaactgttgaaggactccaggaag

SEQ ID NO: 5045112 - DNA, 25 bp, Homo sapien
ccaaactgttgaaggactccaggaa

SEQ ID NO: 5045113 - DNA, 25 bp, Homo sapien
cgtccacgtggcagacggcaaagtg

SEQ ID NO: 5045114 - DNA, 25 bp, Homo sapien
aggggcgtccacgtggcagacggca

SEQ ID NO: 5045115 - DNA, 25 bp, Homo sapien
cgtggcagacggcaaagtgctgggt

SEQ ID NO: 5045116 - DNA, 25 bp, Homo sapien
gggaaggaggctgcgccgtcctgct

SEQ ID NO: 5045117 - DNA, 25 bp, Homo sapien
agatgagaaaaaaattaggtgtctc

SEQ ID NO: 5045118 - DNA, 25 bp, Homo sapien
atgagaaaaaaattaggtgtctcgg

SEQ ID NO: 5045119 - DNA, 25 bp, Homo sapien
ctgaagaacagcagtgagggagaga

SEQ ID NO: 5045120 - DNA, 25 bp, Homo sapien
gagaagagaaaaaagtaagatgaga

SEQ ID NO: 5045121 - DNA, 25 bp, Homo sapien
cataattttcaaacgaggaggagca

SEQ ID NO: 5045122 - DNA, 25 bp, Homo sapien
tgtttctggccgatagcctgtgacc

SEQ ID NO: 5045123 - DNA, 25 bp, Homo sapien
tgggcactcagctagacggtatatc

SEQ ID NO: 5045124 - DNA, 25 bp, Homo sapien
catgtggcctggatgagtctcctca

SEQ ID NO: 5045125 - DNA, 25 bp, Homo sapien
gatgacaggccggtttcccttggga

SEQ ID NO: 5045126 - DNA, 25 bp, Homo sapien
cacagcgtgacgtgaacagagccat

SEQ ID NO: 5045127 - DNA, 25 bp, Homo sapien
ccatgtaaagtctcgatgtcctgct

SEQ ID NO: 5045128 - DNA, 25 bp, Homo sapien
ttcatgccgatgtcatggtaggtga

SEQ ID NO: 5045129 - DNA, 25 bp, Homo sapien
ctgaggagacacagcagacagtggg

SEQ ID NO: 5045130 - DNA, 25 bp, Homo sapien
ccagccagccccaggccaccatcgt

SEQ ID NO: 5045131 - DNA, 25 bp, Homo sapien
ttggagaaccccgaagccagccagc

SEQ ID NO: 5045132 - DNA, 25 bp, Homo sapien
ccagccccaggccaccatcgtgctt

SEQ ID NO: 5045133 - DNA, 25 bp, Homo sapien
cagccagccccaggccaccatcgtg

SEQ ID NO: 5045134 - DNA, 25 bp, Homo sapien
tctcagtgggcacccggtatctgct

SEQ ID NO: 5045135 - DNA, 25 bp, Homo sapien
tgtccacaggcctctgcatagctgc

SEQ ID NO: 5045136 - DNA, 25 bp, Homo sapien
taagagatctgatcccgacagatga

SEQ ID NO: 5045137 - DNA, 25 bp, Homo sapien
gatctgatcccgacagatgatggtg

SEQ ID NO: 5045138 - DNA, 25 bp, Homo sapien
tgaggaggatggacaatcacatccc

SEQ ID NO: 5045139 - DNA, 25 bp, Homo sapien
tcacatccccactgcaggaagatac

SEQ ID NO: 5045140 - DNA, 25 bp, Homo sapien
gcaggaagatacaacctcagtgcca

SEQ ID NO: 5045141 - DNA, 25 bp, Homo sapien
gaggaggatggacaatcacatcccc

SEQ ID NO: 5045142 - DNA, 25 bp, Homo sapien
gaaaatacacaccttggtggtggta

SEQ ID NO: 5045143 - DNA, 25 bp, Homo sapien
tgatctctagggacagcctgacaca

SEQ ID NO: 5045144 - DNA, 25 bp, Homo sapien
gaaagcctcgatcatctactagcca

SEQ ID NO: 5045145 - DNA, 25 bp, Homo sapien
ccttggtggtggtatagaaagcctc

SEQ ID NO: 5045146 - DNA, 25 bp, Homo sapien
gagatacttcagttctgggccagta

SEQ ID NO: 5045147 - DNA, 25 bp, Homo sapien
tgtgcaacacatgggtagcggttca

SEQ ID NO: 5045148 - DNA, 25 bp, Homo sapien
cagagaaggctggtttcagtttccc

SEQ ID NO: 5045149 - DNA, 25 bp, Homo sapien
ctattcttggacacagctgaggtgc

SEQ ID NO: 5045150 - DNA, 25 bp, Homo sapien
cccttgcccgcaatgtttgcacaat

SEQ ID NO: 5045151 - DNA, 25 bp, Homo sapien
tctttggccagcactcaagtcagct

SEQ ID NO: 5045152 - DNA, 25 bp, Homo sapien
tgatctacttaaaccaatggaaaga

SEQ ID NO: 5045153 - DNA, 25 bp, Homo sapien
ggtgaggacctagctgagaccactg

SEQ ID NO: 5045154 - DNA, 25 bp, Homo sapien
tgggcctttctatgacctgaatctg

SEQ ID NO: 5045155 - DNA, 25 bp, Homo sapien
tttgtggggtctccttaattcctca

SEQ ID NO: 5045156 - DNA, 25 bp, Homo sapien
taatattgggacatatgggcctttc

SEQ ID NO: 5045157 - DNA, 25 bp, Homo sapien
atctgtacctacacttcctcctttg

SEQ ID NO: 5045158 - DNA, 25 bp, Homo sapien
aggtctacatcctgcatctcccgag

SEQ ID NO: 5045159 - DNA, 25 bp, Homo sapien
tcacctcagcgaggtctacatcctg

SEQ ID NO: 5045160 - DNA, 25 bp, Homo sapien
ggtctacatcctgcatctcccgaga

SEQ ID NO: 5045161 - DNA, 25 bp, Homo sapien
aaggcttcacctcagcgaggtctac

SEQ ID NO: 5045162 - DNA, 25 bp, Homo sapien
gccaaaaggtcaacacttcctgctg

SEQ ID NO: 5045163 - DNA, 25 bp, Homo sapien
aaggccaaaaggtcaacacttcctg

SEQ ID NO: 5045164 - DNA, 25 bp, Homo sapien
ggagacaaaggccaaaaggtcaaca

SEQ ID NO: 5045165 - DNA, 25 bp, Homo sapien
gagacaaaggccaaaaggtcaacac

SEQ ID NO: 5045166 - DNA, 25 bp, Homo sapien
cagtggagttttggcagcacgagta

SEQ ID NO: 5045167 - DNA, 25 bp, Homo sapien
ttttctgcaatacaaccgagatctt

SEQ ID NO: 5045168 - DNA, 25 bp, Homo sapien
tgcaatacaaccgagatcttcctgg

SEQ ID NO: 5045169 - DNA, 25 bp, Homo sapien
gattctcagtggagttttggcagca

SEQ ID NO: 5045170 - DNA, 25 bp, Homo sapien
gccaggaaacgctatcctggtattt

SEQ ID NO: 5045171 - DNA, 25 bp, Homo sapien
tgccagcggcgccagctgggattcg

SEQ ID NO: 5045172 - DNA, 25 bp, Homo sapien
gattcggagacgacgccaggaaacg

SEQ ID NO: 5045173 - DNA, 25 bp, Homo sapien
tattttttcggaccgtctcatcgcc

SEQ ID NO: 5045174 - DNA, 25 bp, Homo sapien
cccacttcagcggtgtctgcaccca

SEQ ID NO: 5045175 - DNA, 25 bp, Homo sapien
aaccccccacttcagcggtgtctgc

SEQ ID NO: 5045176 - DNA, 25 bp, Homo sapien
ttcagcggtgtctgcacccaaagcc

SEQ ID NO: 5045177 - DNA, 25 bp, Homo sapien
gggtgaccgcgcacttgcagctccg

SEQ ID NO: 5045178 - DNA, 25 bp, Homo sapien
ctacaaagggcggtcctggcgctcc

SEQ ID NO: 5045179 - DNA, 25 bp, Homo sapien
cagcggcaccgcacgggcggcccct

SEQ ID NO: 5045180 - DNA, 25 bp, Homo sapien
gtcctggcgctccagcggcaccgca

SEQ ID NO: 5045181 - DNA, 25 bp, Homo sapien
caaagggcggtcctggcgctccagc

SEQ ID NO: 5045182 - DNA, 25 bp, Homo sapien
ctgggagaagagggcgcgggcttac

SEQ ID NO: 5045183 - DNA, 25 bp, Homo sapien
ccgagggcggatggtgaactgacga

SEQ ID NO: 5045184 - DNA, 25 bp, Homo sapien
gagccaggcgaggtttgtttacgtc

SEQ ID NO: 5045185 - DNA, 25 bp, Homo sapien
ggcgactttataggcgccgcggccc

SEQ ID NO: 5045186 - DNA, 25 bp, Homo sapien
tggagccgccgcctgttgcgcaagc

SEQ ID NO: 5045187 - DNA, 25 bp, Homo sapien
cgacaggctccctccgattctcagc

SEQ ID NO: 5045188 - DNA, 25 bp, Homo sapien
tctccagccggattcggctgcctgc

SEQ ID NO: 5045189 - DNA, 25 bp, Homo sapien
ttctcagccttccgtgtcgccaaag

SEQ ID NO: 5045190 - DNA, 25 bp, Homo sapien
ctcgctcccgtttaatctcgtccat

SEQ ID NO: 5045191 - DNA, 25 bp, Homo sapien
tcaggacacatagcctgcaaggctg

SEQ ID NO: 5045192 - DNA, 25 bp, Homo sapien
gacttccagggctcattttcatcac

SEQ ID NO: 5045193 - DNA, 25 bp, Homo sapien
gcaaagacttccagggctcattttc

SEQ ID NO: 5045194 - DNA, 25 bp, Homo sapien
tgcccagcgccccatgcaaagactt

SEQ ID NO: 5045195 - DNA, 25 bp, Homo sapien
ctgcccagcgccccatgcaaagact

SEQ ID NO: 5045196 - DNA, 25 bp, Homo sapien
cagagccgggtggtgtttaaaggct

SEQ ID NO: 5045197 - DNA, 25 bp, Homo sapien
tcagagccgggtggtgtttaaaggc

SEQ ID NO: 5045198 - DNA, 25 bp, Homo sapien
actcttagatggctttgggaaggtc

SEQ ID NO: 5045199 - DNA, 25 bp, Homo sapien
gtggcgggatcccatttcacagttt

SEQ ID NO: 5045200 - DNA, 25 bp, Homo sapien
tgtactcttagatggctttgggaag

SEQ ID NO: 5045201 - DNA, 25 bp, Homo sapien
ctggtggcgggatcccatttcacag

SEQ ID NO: 5045202 - DNA, 25 bp, Homo sapien
gtgcagccttgccaaactctccaag

SEQ ID NO: 5045203 - DNA, 25 bp, Homo sapien
cccagtgcagccttgccaaactctc

SEQ ID NO: 5045204 - DNA, 25 bp, Homo sapien
caatggtctgggcttgggaaattcc

SEQ ID NO: 5045205 - DNA, 25 bp, Homo sapien
aactcgtgggcatgttgcatagaac

SEQ ID NO: 5045206 - DNA, 25 bp, Homo sapien
gttctctggagccatgcaacacagt

SEQ ID NO: 5045207 - DNA, 25 bp, Homo sapien
cacaaagagagtggtgttctctgga

SEQ ID NO: 5045208 - DNA, 25 bp, Homo sapien
caccaagtgtactgtgaagatgcaa

SEQ ID NO: 5045209 - DNA, 25 bp, Homo sapien
tactgtgaagatgcaatccacagca

SEQ ID NO: 5045210 - DNA, 25 bp, Homo sapien
taattgatcaccaagtgtactgtga

SEQ ID NO: 5045211 - DNA, 25 bp, Homo sapien
ctttgataattgatcaccaagtgta

SEQ ID NO: 5045212 - DNA, 25 bp, Homo sapien
cctccagatgctgacttgcttgtcc

SEQ ID NO: 5045213 - DNA, 25 bp, Homo sapien
acatgcacagtgaagaagcaggcaa

SEQ ID NO: 5045214 - DNA, 25 bp, Homo sapien
cctcttccttgaaacattcccctca

SEQ ID NO: 5045215 - DNA, 25 bp, Homo sapien
catggcgtcagccaggtagagaacc

SEQ ID NO: 5045216 - DNA, 25 bp, Homo sapien
cttgttgcaggtttcaaccagacat

SEQ ID NO: 5045217 - DNA, 25 bp, Homo sapien
ttgttgcaggtttcaaccagacata

SEQ ID NO: 5045218 - DNA, 25 bp, Homo sapien
tgttgcaggtttcaaccagacatac

SEQ ID NO: 5045219 - DNA, 25 bp, Homo sapien
aacggtgacagggaagatgcctcca

SEQ ID NO: 5045220 - DNA, 25 bp, Homo sapien
ctgctcatggctctgtgaccattca

SEQ ID NO: 5045221 - DNA, 25 bp, Homo sapien
ttccacctgctcatggctctgtgac

SEQ ID NO: 5045222 - DNA, 25 bp, Homo sapien
acctgcatcttccacctgctcatgg

SEQ ID NO: 5045223 - DNA, 25 bp, Homo sapien
cacagccccatggggtggatctttt

SEQ ID NO: 5045224 - DNA, 25 bp, Homo sapien
ccctgtcctgtttcttaacatcaca

SEQ ID NO: 5045225 - DNA, 25 bp, Homo sapien
tcacagccccatggggtggatcttt

SEQ ID NO: 5045226 - DNA, 25 bp, Homo sapien
tgtagcctttatgcttccctgtcct

SEQ ID NO: 5045227 - DNA, 25 bp, Homo sapien
tacactttgttaaccctcatatgga

SEQ ID NO: 5045228 - DNA, 25 bp, Homo sapien
tattgaaggattattctatgccagg

SEQ ID NO: 5045229 - DNA, 25 bp, Homo sapien
tcatttagtgtacatgccatgccag

SEQ ID NO: 5045230 - DNA, 25 bp, Homo sapien
gacttttgaattcagtggcacttct

SEQ ID NO: 5045231 - DNA, 25 bp, Homo sapien
aagccaggttagcttccagagcagg

SEQ ID NO: 5045232 - DNA, 25 bp, Homo sapien
ggtcttgatgtagccaagaagccag

SEQ ID NO: 5045233 - DNA, 25 bp, Homo sapien
gccagggactaccagcagccctgaa

SEQ ID NO: 5045234 - DNA, 25 bp, Homo sapien
tcttctgtaagcagccgcccaggct

SEQ ID NO: 5045235 - DNA, 25 bp, Homo sapien
gccctgctaatggcagcttggagca

SEQ ID NO: 5045236 - DNA, 25 bp, Homo sapien
ggccctgctaatggcagcttggagc

SEQ ID NO: 5045237 - DNA, 25 bp, Homo sapien
tcgtcacactcggaatctctccaat

SEQ ID NO: 5045238 - DNA, 25 bp, Homo sapien
tctcctccccaggtcttcgtcacac

SEQ ID NO: 5045239 - DNA, 25 bp, Homo sapien
cccaggtcttcgtcacactcggaat

SEQ ID NO: 5045240 - DNA, 25 bp, Homo sapien
tcggaatctctccaatatacctcat

SEQ ID NO: 5045241 - DNA, 25 bp, Homo sapien
gtagcttttgtattgccttacttac

SEQ ID NO: 5045242 - DNA, 25 bp, Homo sapien
ggacactagctatgttctagcaact

SEQ ID NO: 5045243 - DNA, 25 bp, Homo sapien
tattgggcccttattatgatttgca

SEQ ID NO: 5045244 - DNA, 25 bp, Homo sapien
aagttgtgtagtagtagcttttgta

SEQ ID NO: 5045245 - DNA, 25 bp, Homo sapien
tcagtgctcttggacaaaagaatct

SEQ ID NO: 5045246 - DNA, 25 bp, Homo sapien
aagctgaaattctccgtccctacga

SEQ ID NO: 5045247 - DNA, 25 bp, Homo sapien
cgttggtgatgaaccagctgacagg

SEQ ID NO: 5045248 - DNA, 25 bp, Homo sapien
caccactgtagtgcctctggagcaa

SEQ ID NO: 5045249 - DNA, 25 bp, Homo sapien
cattttctccgacggttcacagtcc

SEQ ID NO: 5045250 - DNA, 25 bp, Homo sapien
cagtccatgggaaaacgttcctcca

SEQ ID NO: 5045251 - DNA, 25 bp, Homo sapien
tccgacggttcacagtccatgggaa

SEQ ID NO: 5045252 - DNA, 25 bp, Homo sapien
tctccgacggttcacagtccatggg

SEQ ID NO: 5045253 - DNA, 25 bp, Homo sapien
agctgtgatgtgaggccaaccagga

SEQ ID NO: 5045254 - DNA, 25 bp, Homo sapien
cgtgttagcgccagatgacggcagg

SEQ ID NO: 5045255 - DNA, 25 bp, Homo sapien
tctcctatagaacggatggctgggt

SEQ ID NO: 5045256 - DNA, 25 bp, Homo sapien
ggccgctggtccacattgcagctgt

SEQ ID NO: 5045257 - DNA, 25 bp, Homo sapien
gaaggccagtgttgtcgcgcccatt

SEQ ID NO: 5045258 - DNA, 25 bp, Homo sapien
cagagaacttaggtgactcgccagt

SEQ ID NO: 5045259 - DNA, 25 bp, Homo sapien
tcagcaaacgttcaagcaggtggtg

SEQ ID NO: 5045260 - DNA, 25 bp, Homo sapien
tgaaggaggcgcaaatgcatgaccc

SEQ ID NO: 5045261 - DNA, 25 bp, Homo sapien
gtcattcgaatgcatcccaaccagt

SEQ ID NO: 5045262 - DNA, 25 bp, Homo sapien
tgatttggatcattggaaatattaa

SEQ ID NO: 5045263 - DNA, 25 bp, Homo sapien
cagctgcgtaacgacatggagagag

SEQ ID NO: 5045264 - DNA, 25 bp, Homo sapien
cttgctgaagtcattcgaatgcatc

SEQ ID NO: 5045265 - DNA, 25 bp, Homo sapien
caggctagggttaaagctgacgtcc

SEQ ID NO: 5045266 - DNA, 25 bp, Homo sapien
gctcaggacgtacaaccgatggcag

SEQ ID NO: 5045267 - DNA, 25 bp, Homo sapien
gataatcctgatggcgtgtagccac

SEQ ID NO: 5045268 - DNA, 25 bp, Homo sapien
tcggtaatgccctgatcctgacaag

SEQ ID NO: 5045269 - DNA, 25 bp, Homo sapien
gatgtctgcgatggatataatgata

SEQ ID NO: 5045270 - DNA, 25 bp, Homo sapien
tgtctgcgatggatataatgatacc

SEQ ID NO: 5045271 - DNA, 25 bp, Homo sapien
tctgcgatggatataatgatacccc

SEQ ID NO: 5045272 - DNA, 25 bp, Homo sapien
cagatgtctgcgatggatataatga

SEQ ID NO: 5045273 - DNA, 25 bp, Homo sapien
gctggtgtccagtcatctttagctg

SEQ ID NO: 5045274 - DNA, 25 bp, Homo sapien
ggtgtccagtcatctttagctgggc

SEQ ID NO: 5045275 - DNA, 25 bp, Homo sapien
tgtccagtcatctttagctgggcag

SEQ ID NO: 5045276 - DNA, 25 bp, Homo sapien
ggctggtgtccagtcatctttagct

SEQ ID NO: 5045277 - DNA, 25 bp, Homo sapien
tcgggcttccctgcacaaggtattt

SEQ ID NO: 5045278 - DNA, 25 bp, Homo sapien
tatttttgatccttgccagcggagg

SEQ ID NO: 5045279 - DNA, 25 bp, Homo sapien
gctccagctatagcaaatcagtgcc

SEQ ID NO: 5045280 - DNA, 25 bp, Homo sapien
gaaccagaggttacaaatctgccct

SEQ ID NO: 5045281 - DNA, 25 bp, Homo sapien
agacccagggggttgggatgttgct

SEQ ID NO: 5045282 - DNA, 25 bp, Homo sapien
atctttgtagcttcaggttcagctc

SEQ ID NO: 5045283 - DNA, 25 bp, Homo sapien
gctgacacctcatgggccacctcat

SEQ ID NO: 5045284 - DNA, 25 bp, Homo sapien
ccatctttgtagcttcaggttcagc

SEQ ID NO: 5045285 - DNA, 25 bp, Homo sapien
gacaatttcaacatagcgccggtaa

SEQ ID NO: 5045286 - DNA, 25 bp, Homo sapien
tgtctgatgatctggagtctgcccc

SEQ ID NO: 5045287 - DNA, 25 bp, Homo sapien
taagccaatgagctatctgctgggc

SEQ ID NO: 5045288 - DNA, 25 bp, Homo sapien
tcatatatgggtgtgagctctgccc

SEQ ID NO: 5045289 - DNA, 25 bp, Homo sapien
gaccttgctgagtagatgctgccaa

SEQ ID NO: 5045290 - DNA, 25 bp, Homo sapien
gacagggttatcacgccaagcaaga

SEQ ID NO: 5045291 - DNA, 25 bp, Homo sapien
ggacgttgtccccactcaagacagg

SEQ ID NO: 5045292 - DNA, 25 bp, Homo sapien
ttcgtgcaaagaagggcagcatctc

SEQ ID NO: 5045293 - DNA, 25 bp, Homo sapien
gtcttgcgaaaagcccccgcggatg

SEQ ID NO: 5045294 - DNA, 25 bp, Homo sapien
cccgcggatgggttgttctcccagt

SEQ ID NO: 5045295 - DNA, 25 bp, Homo sapien
gtctgccccgaagccgtacaagtcc

SEQ ID NO: 5045296 - DNA, 25 bp, Homo sapien
ttttattgatggaggccaaggtggc

SEQ ID NO: 5045297 - DNA, 25 bp, Homo sapien
tgggtatcgcccgtgcccttgcagc

SEQ ID NO: 5045298 - DNA, 25 bp, Homo sapien
gtagatgggtatcgcccgtgccctt

SEQ ID NO: 5045299 - DNA, 25 bp, Homo sapien
atgccggtagatgggtatcgcccgt

SEQ ID NO: 5045300 - DNA, 25 bp, Homo sapien
tgaccgagaggatgccggtagatgg

SEQ ID NO: 5045301 - DNA, 25 bp, Homo sapien
caaaggacatggagcgcctgtcaga

SEQ ID NO: 5045302 - DNA, 25 bp, Homo sapien
tacatactgttgtggccatggaggc

SEQ ID NO: 5045303 - DNA, 25 bp, Homo sapien
taatagatacgcctgcacttgtggg

SEQ ID NO: 5045304 - DNA, 25 bp, Homo sapien
cctacaggaccgtgtgaggaggatc

SEQ ID NO: 5045305 - DNA, 25 bp, Homo sapien
tctttgcaggaaccgggatgtaggt

SEQ ID NO: 5045306 - DNA, 25 bp, Homo sapien
tttcactctgatctttgcaggaacc

SEQ ID NO: 5045307 - DNA, 25 bp, Homo sapien
actctgatctttgcaggaaccggga

SEQ ID NO: 5045308 - DNA, 25 bp, Homo sapien
gatctttgcaggaaccgggatgtag

SEQ ID NO: 5045309 - DNA, 25 bp, Homo sapien
accaggatcatgctgacattatctc

SEQ ID NO: 5045310 - DNA, 25 bp, Homo sapien
caagtcgatggtcttgaagggcacc

SEQ ID NO: 5045311 - DNA, 25 bp, Homo sapien
tccaagtcgatggtcttgaagggca

SEQ ID NO: 5045312 - DNA, 25 bp, Homo sapien
ccactccaagtcgatggtcttgaag

SEQ ID NO: 5045313 - DNA, 25 bp, Homo sapien
cccataagaagactccctcaggttg

SEQ ID NO: 5045314 - DNA, 25 bp, Homo sapien
tcaggcccataagaagactccctca

SEQ ID NO: 5045315 - DNA, 25 bp, Homo sapien
gcccgagttgcccacaacggcgcag

SEQ ID NO: 5045316 - DNA, 25 bp, Homo sapien
agttgcccacaacggcgcagcgccg

SEQ ID NO: 5045317 - DNA, 25 bp, Homo sapien
gtgctcccgctcaagccttaacaag

SEQ ID NO: 5045318 - DNA, 25 bp, Homo sapien
gggttgcgtgctcccgctcaagcct

SEQ ID NO: 5045319 - DNA, 25 bp, Homo sapien
ttaacaagaagagcgaggagtaggt

SEQ ID NO: 5045320 - DNA, 25 bp, Homo sapien
tcaagccttaacaagaagagcgagg

SEQ ID NO: 5045321 - DNA, 25 bp, Homo sapien
tcaatcaatgcctgccgcctggtgg

SEQ ID NO: 5045322 - DNA, 25 bp, Homo sapien
agaggctggggcacggatgcaggtg

SEQ ID NO: 5045323 - DNA, 25 bp, Homo sapien
acggggcctcgggtcagcttccctg

SEQ ID NO: 5045324 - DNA, 25 bp, Homo sapien
ggcacggatgcaggtgtccatggtg

SEQ ID NO: 5045325 - DNA, 25 bp, Homo sapien
gtcctgtcttgaggcacgatggctg

SEQ ID NO: 5045326 - DNA, 25 bp, Homo sapien
tcgggcatgatccacaggaactctg

SEQ ID NO: 5045327 - DNA, 25 bp, Homo sapien
tgcactcgggcatgatccacaggaa

SEQ ID NO: 5045328 - DNA, 25 bp, Homo sapien
catgatccacaggaactctggagcc

SEQ ID NO: 5045329 - DNA, 25 bp, Homo sapien
tcctgtttggtttatataaacaggc

SEQ ID NO: 5045330 - DNA, 25 bp, Homo sapien
ctgctgttgtgtaaggtcccttcct

SEQ ID NO: 5045331 - DNA, 25 bp, Homo sapien
taaacagaatcccatggtgacactg

SEQ ID NO: 5045332 - DNA, 25 bp, Homo sapien
tataaacaggctgtgtagtaccctg

SEQ ID NO: 5045333 - DNA, 25 bp, Homo sapien
gtgggccctaaacctgatgacaggt

SEQ ID NO: 5045334 - DNA, 25 bp, Homo sapien
gccacaggaaactaaagccgtgctt

SEQ ID NO: 5045335 - DNA, 25 bp, Homo sapien
tgagcatttaactctgagagcacct

SEQ ID NO: 5045336 - DNA, 25 bp, Homo sapien
gaatcctactaactgcctggcaggg

SEQ ID NO: 5045337 - DNA, 25 bp, Homo sapien
aggccgagagcttgcgctgcccgat

SEQ ID NO: 5045338 - DNA, 25 bp, Homo sapien
aaccaggccgagagcttgcgctgcc

SEQ ID NO: 5045339 - DNA, 25 bp, Homo sapien
ctcatcgaaccaggccgagagcttg

SEQ ID NO: 5045340 - DNA, 25 bp, Homo sapien
tcgaaccaggccgagagcttgcgct

SEQ ID NO: 5045341 - DNA, 25 bp, Homo sapien
cccacgatgggtagcaggaactccc

SEQ ID NO: 5045342 - DNA, 25 bp, Homo sapien
cctgatggtggcctcccacgatggg

SEQ ID NO: 5045343 - DNA, 25 bp, Homo sapien
tggtggcctcccacgatgggtagca

SEQ ID NO: 5045344 - DNA, 25 bp, Homo sapien
ggcctcccacgatgggtagcaggaa

SEQ ID NO: 5045345 - DNA, 25 bp, Homo sapien
acaagggccgctaagctcgacttca

SEQ ID NO: 5045346 - DNA, 25 bp, Homo sapien
tggaggctcaatcaaaagggatggc

SEQ ID NO: 5045347 - DNA, 25 bp, Homo sapien
gacacggctgtgtggtagaccaacg

SEQ ID NO: 5045348 - DNA, 25 bp, Homo sapien
gaattccaagggaggacacaagggc

SEQ ID NO: 5045349 - DNA, 25 bp, Homo sapien
ggtacacaaccagcttgatgaaggc

SEQ ID NO: 5045350 - DNA, 25 bp, Homo sapien
tcgccagggacatggtgggtacaca

SEQ ID NO: 5045351 - DNA, 25 bp, Homo sapien
tccctcaggagcgaggacctcgaag

SEQ ID NO: 5045352 - DNA, 25 bp, Homo sapien
tgtctctcgatcaagctttaaccag

SEQ ID NO: 5045353 - DNA, 25 bp, Homo sapien
ccctggagcgtggtctttttggtct

SEQ ID NO: 5045354 - DNA, 25 bp, Homo sapien
tgcttggaatgctgaagaatggaag

SEQ ID NO: 5045355 - DNA, 25 bp, Homo sapien
tggctctcaccgacaccttgggatt

SEQ ID NO: 5045356 - DNA, 25 bp, Homo sapien
aactgtggttgcacgtctgccctgg

SEQ ID NO: 5045357 - DNA, 25 bp, Homo sapien
gccatggagtccagtagtttggtca

SEQ ID NO: 5045358 - DNA, 25 bp, Homo sapien
gacactcgtctaggtatttcaggga

SEQ ID NO: 5045359 - DNA, 25 bp, Homo sapien
caataggttgaaggccttaagggca

SEQ ID NO: 5045360 - DNA, 25 bp, Homo sapien
taaatgtaatgagccagcttggcta

SEQ ID NO: 5045361 - DNA, 25 bp, Homo sapien
acacattccaggtcccaccaggggg

SEQ ID NO: 5045362 - DNA, 25 bp, Homo sapien
tcgggagatttcatcctcaggctca

SEQ ID NO: 5045363 - DNA, 25 bp, Homo sapien
actgatagggtctttggcagggatg

SEQ ID NO: 5045364 - DNA, 25 bp, Homo sapien
gatcccttgcaccactcagccaagt

SEQ ID NO: 5045365 - DNA, 25 bp, Homo sapien
tagtaatctcggtatgtgcccctgg

SEQ ID NO: 5045366 - DNA, 25 bp, Homo sapien
tactgtgttcccagacgagtgaccc

SEQ ID NO: 5045367 - DNA, 25 bp, Homo sapien
tgacagacggacagatggataaccc

SEQ ID NO: 5045368 - DNA, 25 bp, Homo sapien
taatgggctcaatcctgaactcagg

SEQ ID NO: 5045369 - DNA, 25 bp, Homo sapien
cccccaggctggtgccaataccacc

SEQ ID NO: 5045370 - DNA, 25 bp, Homo sapien
ctcccccaggctggtgccaatacca

SEQ ID NO: 5045371 - DNA, 25 bp, Homo sapien
ccagccccatgaactgctcccccag

SEQ ID NO: 5045372 - DNA, 25 bp, Homo sapien
tgctcccccaggctggtgccaatac

SEQ ID NO: 5045373 - DNA, 25 bp, Homo sapien
gacctgagcccgcacacaggggcct

SEQ ID NO: 5045374 - DNA, 25 bp, Homo sapien
agacagaggtctgtcagccactgca

SEQ ID NO: 5045375 - DNA, 25 bp, Homo sapien
ctgtgatgaaggagggacctgagcc

SEQ ID NO: 5045376 - DNA, 25 bp, Homo sapien
gggcctgagcctaatggctgtgcca

SEQ ID NO: 5045377 - DNA, 25 bp, Homo sapien
cagtgtagttgccaaaactgtttct

SEQ ID NO: 5045378 - DNA, 25 bp, Homo sapien
tctgtggtttttgaatccggattcc

SEQ ID NO: 5045379 - DNA, 25 bp, Homo sapien
ttttgaatccggattcctgccctgc

SEQ ID NO: 5045380 - DNA, 25 bp, Homo sapien
agcacaaggtcagcagtgtagttgc

SEQ ID NO: 5045381 - DNA, 25 bp, Homo sapien
aactaaggaagggatactagaggtg

SEQ ID NO: 5045382 - DNA, 25 bp, Homo sapien
catgcccagcggatttttcttgcta

SEQ ID NO: 5045383 - DNA, 25 bp, Homo sapien
tatgggagcaaacacccagagaatc

SEQ ID NO: 5045384 - DNA, 25 bp, Homo sapien
caaactcaaagagcgggatgttaca

SEQ ID NO: 5045385 - DNA, 25 bp, Homo sapien
gtaactacgcaaccatccagagtgg

SEQ ID NO: 5045386 - DNA, 25 bp, Homo sapien
gcagaccaactatcctcaaagaagg

SEQ ID NO: 5045387 - DNA, 25 bp, Homo sapien
tgctgagtgagattgagtcctgcct

SEQ ID NO: 5045388 - DNA, 25 bp, Homo sapien
ggtgcgcctaagctccgggtttgtc

SEQ ID NO: 5045389 - DNA, 25 bp, Homo sapien
gctgtgtgacctcagtggagtctct

SEQ ID NO: 5045390 - DNA, 25 bp, Homo sapien
tctcttaacctctctgaacctcagt

SEQ ID NO: 5045391 - DNA, 25 bp, Homo sapien
cggctgtgtgacctcagtggagtct

SEQ ID NO: 5045392 - DNA, 25 bp, Homo sapien
cctctctgaacctcagtttcttcat

SEQ ID NO: 5045393 - DNA, 25 bp, Homo sapien
aaatactcgggagacttagcatggg

SEQ ID NO: 5045394 - DNA, 25 bp, Homo sapien
tttctttccctacttggctcagata

SEQ ID NO: 5045395 - DNA, 25 bp, Homo sapien
ggctcagatatacacagtaaatgtt

SEQ ID NO: 5045396 - DNA, 25 bp, Homo sapien
taagtgctcatgtgaagcctctgag

SEQ ID NO: 5045397 - DNA, 25 bp, Homo sapien
tgggagccaggggacctacgtgcag

SEQ ID NO: 5045398 - DNA, 25 bp, Homo sapien
gggagccaggggacctacgtgcaga

SEQ ID NO: 5045399 - DNA, 25 bp, Homo sapien
atgggagccaggggacctacgtgca

SEQ ID NO: 5045400 - DNA, 25 bp, Homo sapien
aagataatgcctccctccaagagag

SEQ ID NO: 5045401 - DNA, 25 bp, Homo sapien
aacatgaaacttaaggctgcctgcc

SEQ ID NO: 5045402 - DNA, 25 bp, Homo sapien
tcatctatgaagcaagcccgtgggt

SEQ ID NO: 5045403 - DNA, 25 bp, Homo sapien
tgcctgccgtgctggagtaaagtct

SEQ ID NO: 5045404 - DNA, 25 bp, Homo sapien
gacaacacgtacaaagcgatctgcc

SEQ ID NO: 5045405 - DNA, 25 bp, Homo sapien
gactttgaataggttattatacctc

SEQ ID NO: 5045406 - DNA, 25 bp, Homo sapien
ggttattatacctcactgagttcca

SEQ ID NO: 5045407 - DNA, 25 bp, Homo sapien
ttgggcatgtggcaagggctcccta

SEQ ID NO: 5045408 - DNA, 25 bp, Homo sapien
ccacaggataaggttccttgacttc

SEQ ID NO: 5045409 - DNA, 25 bp, Homo sapien
tcaactccaccactcatcagtagag

SEQ ID NO: 5045410 - DNA, 25 bp, Homo sapien
aaccacaggataaggttccttgact

SEQ ID NO: 5045411 - DNA, 25 bp, Homo sapien
tcatcagtagaggaaaccacaggat

SEQ ID NO: 5045412 - DNA, 25 bp, Homo sapien
gtatgattcacgcaaataaccagtg

SEQ ID NO: 5045413 - DNA, 25 bp, Homo sapien
ctgtatgattcacgcaaataaccag

SEQ ID NO: 5045414 - DNA, 25 bp, Homo sapien
actgtatgattcacgcaaataacca

SEQ ID NO: 5045415 - DNA, 25 bp, Homo sapien
atgattcacgcaaataaccagtgac

SEQ ID NO: 5045416 - DNA, 25 bp, Homo sapien
aaacagaagtgcttgtagccatagc

SEQ ID NO: 5045417 - DNA, 25 bp, Homo sapien
tctccagcattattatctagtgcct

SEQ ID NO: 5045418 - DNA, 25 bp, Homo sapien
tagccatagcagatagagggcaaag

SEQ ID NO: 5045419 - DNA, 25 bp, Homo sapien
gcacattttggcagtaaatactcat

SEQ ID NO: 5045420 - DNA, 25 bp, Homo sapien
cctagaggaaccaaaatgccgtgaa

SEQ ID NO: 5045421 - DNA, 25 bp, Homo sapien
taacacggaggaatatctactacac

SEQ ID NO: 5045422 - DNA, 25 bp, Homo sapien
ggaaaaacgcagacccagcaacatt

SEQ ID NO: 5045423 - DNA, 25 bp, Homo sapien
gaagtctttgacgtgagcactccca

SEQ ID NO: 5045424 - DNA, 25 bp, Homo sapien
tgttgtgacacgctttagccaatgg

SEQ ID NO: 5045425 - DNA, 25 bp, Homo sapien
tcagggccaactcaactcaaagact

SEQ ID NO: 5045426 - DNA, 25 bp, Homo sapien
aaaaacatgcttcaggcagcctgtg

SEQ ID NO: 5045427 - DNA, 25 bp, Homo sapien
cctcgtctctcgaagtgggagtgta

SEQ ID NO: 5045428 - DNA, 25 bp, Homo sapien
ggagagacttgcctctgtttgccta

SEQ ID NO: 5045429 - DNA, 25 bp, Homo sapien
ccaaaagaggggcttgagcttgtgg

SEQ ID NO: 5045430 - DNA, 25 bp, Homo sapien
ctacaggtgccaagccaaaagaggg

SEQ ID NO: 5045431 - DNA, 25 bp, Homo sapien
tctgtttgcctacaggtgccaagcc

SEQ ID NO: 5045432 - DNA, 25 bp, Homo sapien
taatgacggttatgagcaaggagcc

SEQ ID NO: 5045433 - DNA, 25 bp, Homo sapien
caacagtgtcggcatcgggagtaaa

SEQ ID NO: 5045434 - DNA, 25 bp, Homo sapien
tacagtgtgacgtcaggcaagccac

SEQ ID NO: 5045435 - DNA, 25 bp, Homo sapien
tgagaagtgtccactcttggtccct

SEQ ID NO: 5045436 - DNA, 25 bp, Homo sapien
caaagtgggcagatcgaagtcaaga

SEQ ID NO: 5045437 - DNA, 25 bp, Homo sapien
cctgggaacttatcgaaaggacata

SEQ ID NO: 5045438 - DNA, 25 bp, Homo sapien
caatgggtaacaggtggcaagaacc

SEQ ID NO: 5045439 - DNA, 25 bp, Homo sapien
aatgctaaaggcaacacggtggtgt

SEQ ID NO: 5045440 - DNA, 25 bp, Homo sapien
tgcaaataagcagcaacagggagag

SEQ ID NO: 5045441 - DNA, 25 bp, Homo sapien
atatatatattataggacatggcac

SEQ ID NO: 5045442 - DNA, 25 bp, Homo sapien
gacatggcacaaatgcttgccaaat

SEQ ID NO: 5045443 - DNA, 25 bp, Homo sapien
ttcattgccattgagcaaaatggtg

SEQ ID NO: 5045444 - DNA, 25 bp, Homo sapien
tatatattataggacatggcacaaa

SEQ ID NO: 5045445 - DNA, 25 bp, Homo sapien
ggagcataagccagcatggctttaa

SEQ ID NO: 5045446 - DNA, 25 bp, Homo sapien
tagatgcacatgcaccattcccggc

SEQ ID NO: 5045447 - DNA, 25 bp, Homo sapien
tcaagttctgttcatagctccctgc

SEQ ID NO: 5045448 - DNA, 25 bp, Homo sapien
tgtatgacttgctctactgcaatcc

SEQ ID NO: 5045449 - DNA, 25 bp, Homo sapien
tcagcctttacgatgggccagacac

SEQ ID NO: 5045450 - DNA, 25 bp, Homo sapien
gccagacaccgtacccagctttttg

SEQ ID NO: 5045451 - DNA, 25 bp, Homo sapien
tcacagaactctcccaagtgggtac

SEQ ID NO: 5045452 - DNA, 25 bp, Homo sapien
tatcacgggctcagtgaggaaccac

SEQ ID NO: 5045453 - DNA, 25 bp, Homo sapien
cgggattggccccactgaatcaaga

SEQ ID NO: 5045454 - DNA, 25 bp, Homo sapien
tgaatgaaggtcacgaggctggcaa

SEQ ID NO: 5045455 - DNA, 25 bp, Homo sapien
gcaaagcctctagccaacaactgag

SEQ ID NO: 5045456 - DNA, 25 bp, Homo sapien
aaacaaggccctgcatgaatgaagg

SEQ ID NO: 5045457 - DNA, 25 bp, Homo sapien
ctgagtggcacagcaaaacaccatc

SEQ ID NO: 5045458 - DNA, 25 bp, Homo sapien
gcctgagtggcacagcaaaacacca

SEQ ID NO: 5045459 - DNA, 25 bp, Homo sapien
cagcctgagtggcacagcaaaacac

SEQ ID NO: 5045460 - DNA, 25 bp, Homo sapien
ccagaccagcctgagtggcacagca

SEQ ID NO: 5045461 - DNA, 25 bp, Homo sapien
tgcagtgatggcaatcatgcccaag

SEQ ID NO: 5045462 - DNA, 25 bp, Homo sapien
tctgcagtgatggcaatcatgccca

SEQ ID NO: 5045463 - DNA, 25 bp, Homo sapien
ctgcagtgatggcaatcatgcccaa

SEQ ID NO: 5045464 - DNA, 25 bp, Homo sapien
tccataggctgagtgaccgtccatc

SEQ ID NO: 5045465 - DNA, 25 bp, Homo sapien
agctcaatgcatttgctcactgcag

SEQ ID NO: 5045466 - DNA, 25 bp, Homo sapien
tggtccccaaatggaattgtcctga

SEQ ID NO: 5045467 - DNA, 25 bp, Homo sapien
ggaattgtcctgacccaagctcaat

SEQ ID NO: 5045468 - DNA, 25 bp, Homo sapien
agatgaaatctgaaaatggtaccaa

SEQ ID NO: 5045469 - DNA, 25 bp, Homo sapien
tcattgacatttccagtttaggaag

SEQ ID NO: 5045470 - DNA, 25 bp, Homo sapien
tccagtttaggaagatgaaatctga

SEQ ID NO: 5045471 - DNA, 25 bp, Homo sapien
gaagatgaaatctgaaaatggtacc

SEQ ID NO: 5045472 - DNA, 25 bp, Homo sapien
tacaggtacttgctaaactaagccc

SEQ ID NO: 5045473 - DNA, 25 bp, Homo sapien
tctactctattgtaaagtctgggac

SEQ ID NO: 5045474 - DNA, 25 bp, Homo sapien
tacacttttgagctctgccctagaa

SEQ ID NO: 5045475 - DNA, 25 bp, Homo sapien
tccagggcaggctcatgaatgtgca

SEQ ID NO: 5045476 - DNA, 25 bp, Homo sapien
aagctcagagagtgggtcccctttg

SEQ ID NO: 5045477 - DNA, 25 bp, Homo sapien
cctttgggtgcggtggcatctccct

SEQ ID NO: 5045478 - DNA, 25 bp, Homo sapien
gcgtttgagcaaactgagcagggaa

SEQ ID NO: 5045479 - DNA, 25 bp, Homo sapien
gactccagaggccaacttggctgat

SEQ ID NO: 5045480 - DNA, 25 bp, Homo sapien
ggctggagagtgagaactatgaatc

SEQ ID NO: 5045481 - DNA, 25 bp, Homo sapien
tcaagaaggctaggattgcgctgac

SEQ ID NO: 5045482 - DNA, 25 bp, Homo sapien
catgaccaggtcagcatgagtgaga

SEQ ID NO: 5045483 - DNA, 25 bp, Homo sapien
ggagatgggccctttctgaaaggac

SEQ ID NO: 5045484 - DNA, 25 bp, Homo sapien
ctttccagtcccagcttgaaggcca

SEQ ID NO: 5045485 - DNA, 25 bp, Homo sapien
tttccagtcccagcttgaaggccat

SEQ ID NO: 5045486 - DNA, 25 bp, Homo sapien
gatatactgggtctcgagcctttta

SEQ ID NO: 5045487 - DNA, 25 bp, Homo sapien
caatacaagcttgctcaccgggagg

SEQ ID NO: 5045488 - DNA, 25 bp, Homo sapien
cagtgaatgggcctagaatgaccag

SEQ ID NO: 5045489 - DNA, 25 bp, Homo sapien
taaagtctgtccctggcaaatgtga

SEQ ID NO: 5045490 - DNA, 25 bp, Homo sapien
tccaccaggtggtaggattaacagt

SEQ ID NO: 5045491 - DNA, 25 bp, Homo sapien
tttccaaggttgcaacagcgacgct

SEQ ID NO: 5045492 - DNA, 25 bp, Homo sapien
ttccttttacgtgaagcaggttgcc

SEQ ID NO: 5045493 - DNA, 25 bp, Homo sapien
tagggagctggctaagtttacacgc

SEQ ID NO: 5045494 - DNA, 25 bp, Homo sapien
tccgagtgccatgaattccttgagc

SEQ ID NO: 5045495 - DNA, 25 bp, Homo sapien
gacactcgaccagatgttgatcaag

SEQ ID NO: 5045496 - DNA, 25 bp, Homo sapien
gaatgaagcgaggtagctctaccag

SEQ ID NO: 5045497 - DNA, 25 bp, Homo sapien
taccagggctcaaggcctagatctg

SEQ ID NO: 5045498 - DNA, 25 bp, Homo sapien
tggcctgaatccacatctttatctg

SEQ ID NO: 5045499 - DNA, 25 bp, Homo sapien
tttatctgcaaaatcaggaggaccg

SEQ ID NO: 5045500 - DNA, 25 bp, Homo sapien
tgaatccacatctttatctgcaaaa

SEQ ID NO: 5045501 - DNA, 25 bp, Homo sapien
agggcctggcctgaatccacatctt

SEQ ID NO: 5045502 - DNA, 25 bp, Homo sapien
tgggttgttccgggtgtttgagctc

SEQ ID NO: 5045503 - DNA, 25 bp, Homo sapien
gggccaactcgggtcagggctgtag

SEQ ID NO: 5045504 - DNA, 25 bp, Homo sapien
aagagttgaactgagggccaactcg

SEQ ID NO: 5045505 - DNA, 25 bp, Homo sapien
tgtctgtgaatgtcgctgggttgtt

SEQ ID NO: 5045506 - DNA, 25 bp, Homo sapien
tacttggccaattcaggggatttat

SEQ ID NO: 5045507 - DNA, 25 bp, Homo sapien
tcgagtcttctaaggatctaagaaa

SEQ ID NO: 5045508 - DNA, 25 bp, Homo sapien
ggctccagtcgagtcttctaaggat

SEQ ID NO: 5045509 - DNA, 25 bp, Homo sapien
ttttgggctccagtcgagtcttcta

SEQ ID NO: 5045510 - DNA, 25 bp, Homo sapien
gggtcaacacgataagcgccagcat

SEQ ID NO: 5045511 - DNA, 25 bp, Homo sapien
tagtcaaaaagggagccatgtcctc

SEQ ID NO: 5045512 - DNA, 25 bp, Homo sapien
ggcagcctaaagtaaccggatgtta

SEQ ID NO: 5045513 - DNA, 25 bp, Homo sapien
catgtcctcgagatgtggcaaccgt

SEQ ID NO: 5045514 - DNA, 25 bp, Homo sapien
cccctgctgacttctctgaatgtgg

SEQ ID NO: 5045515 - DNA, 25 bp, Homo sapien
catcccctgctgacttctctgaatg

SEQ ID NO: 5045516 - DNA, 25 bp, Homo sapien
tcccctgctgacttctctgaatgtg

SEQ ID NO: 5045517 - DNA, 25 bp, Homo sapien
cacttcttctgggggtggtaaatgg

SEQ ID NO: 5045518 - DNA, 25 bp, Homo sapien
cactgtgacctctgggacagcaagg

SEQ ID NO: 5045519 - DNA, 25 bp, Homo sapien
tacgcagcctgacagggtatgtcct

SEQ ID NO: 5045520 - DNA, 25 bp, Homo sapien
gaccgagtagtctttcctctctgca

SEQ ID NO: 5045521 - DNA, 25 bp, Homo sapien
tctagaacacccttctgtgggtctc

SEQ ID NO: 5045522 - DNA, 25 bp, Homo sapien
agccaatgctgtgagcgccaccagg

SEQ ID NO: 5045523 - DNA, 25 bp, Homo sapien
gcttccagatcagcgacagccaatg

SEQ ID NO: 5045524 - DNA, 25 bp, Homo sapien
tgtcaagctcacagacgacttcatc

SEQ ID NO: 5045525 - DNA, 25 bp, Homo sapien
catccccataagaagggcttccaga

SEQ ID NO: 5045526 - DNA, 25 bp, Homo sapien
gcaggggtcctaatgtttggggcag

SEQ ID NO: 5045527 - DNA, 25 bp, Homo sapien
ctgagggacccccgcactgggcgcc

SEQ ID NO: 5045528 - DNA, 25 bp, Homo sapien
ggggaggtgcgggaaggcactgagg

SEQ ID NO: 5045529 - DNA, 25 bp, Homo sapien
gatttcagaaaacagccggcagggg

SEQ ID NO: 5045530 - DNA, 25 bp, Homo sapien
gagacaagcggcagtttccacagca

SEQ ID NO: 5045531 - DNA, 25 bp, Homo sapien
gcaccttgccttttcgaagcctctg

SEQ ID NO: 5045532 - DNA, 25 bp, Homo sapien
cgcagagacaagcggcagtttccac

SEQ ID NO: 5045533 - DNA, 25 bp, Homo sapien
cagagacaagcggcagtttccacag

SEQ ID NO: 5045534 - DNA, 25 bp, Homo sapien
ggcgccctggcgactattggaaaac

SEQ ID NO: 5045535 - DNA, 25 bp, Homo sapien
cagcttctacgaacaggccaggagt

SEQ ID NO: 5045536 - DNA, 25 bp, Homo sapien
gaacactgcgttagcacctacgacg

SEQ ID NO: 5045537 - DNA, 25 bp, Homo sapien
ggcacgtctagaagcctaaagggct

SEQ ID NO: 5045538 - DNA, 25 bp, Homo sapien
ttctgggtgcgcacgtgtcccctcg

SEQ ID NO: 5045539 - DNA, 25 bp, Homo sapien
ggagaaccagctcgtcgcaaacttg

SEQ ID NO: 5045540 - DNA, 25 bp, Homo sapien
gaaagccgggcgaatgcctgatgca

SEQ ID NO: 5045541 - DNA, 25 bp, Homo sapien
gggtgcccggaaacaatcacgagaa

SEQ ID NO: 5045542 - DNA, 25 bp, Homo sapien
ccgagccccgcgcatggtacggccg

SEQ ID NO: 5045543 - DNA, 25 bp, Homo sapien
ccgcgcatggtacggccgccgagga

SEQ ID NO: 5045544 - DNA, 25 bp, Homo sapien
caccgagccccgcgcatggtacggc

SEQ ID NO: 5045545 - DNA, 25 bp, Homo sapien
agccccgcgcatggtacggccgccg

SEQ ID NO: 5045546 - DNA, 25 bp, Homo sapien
tgcaaggccaggctaatgcgcgctc

SEQ ID NO: 5045547 - DNA, 25 bp, Homo sapien
aggagcggaaagttgcgccaccgtc

SEQ ID NO: 5045548 - DNA, 25 bp, Homo sapien
attatttcttgggagctgcgacgcc

SEQ ID NO: 5045549 - DNA, 25 bp, Homo sapien
taaacactcgcgcagagaaaggagg

SEQ ID NO: 5045550 - DNA, 25 bp, Homo sapien
gcggattcagagtttcgagttgcca

SEQ ID NO: 5045551 - DNA, 25 bp, Homo sapien
gagtttcgagttgccactaacacga

SEQ ID NO: 5045552 - DNA, 25 bp, Homo sapien
gactccggccgtgctctccttggcc

SEQ ID NO: 5045553 - DNA, 25 bp, Homo sapien
gagttgccactaacacgactccggc

SEQ ID NO: 5045554 - DNA, 25 bp, Homo sapien
tcagctctcttgtcccgggtgtcaa

SEQ ID NO: 5045555 - DNA, 25 bp, Homo sapien
cgcgttcagctctcttgtcccgggt

SEQ ID NO: 5045556 - DNA, 25 bp, Homo sapien
ctcttgtcccgggtgtcaacttcac

SEQ ID NO: 5045557 - DNA, 25 bp, Homo sapien
cactgtccgccacgccgcgttcagc

SEQ ID NO: 5045558 - DNA, 25 bp, Homo sapien
cggatctgcgcctgcttgcagcgga

SEQ ID NO: 5045559 - DNA, 25 bp, Homo sapien
ccagatccggagcagcgcgctctga

SEQ ID NO: 5045560 - DNA, 25 bp, Homo sapien
actcgatccggatactgtcccacgg

SEQ ID NO: 5045561 - DNA, 25 bp, Homo sapien
ggccgctcgtccagaacactggcgg

SEQ ID NO: 5045562 - DNA, 25 bp, Homo sapien
agctcctccagtgtcggccgaagac

SEQ ID NO: 5045563 - DNA, 25 bp, Homo sapien
acttggcgtaggttccccacagagc

SEQ ID NO: 5045564 - DNA, 25 bp, Homo sapien
aaatccgctcgagagcgcctgagcc

SEQ ID NO: 5045565 - DNA, 25 bp, Homo sapien
tgctttcgggaaccgctgcccggga

SEQ ID NO: 5045566 - DNA, 25 bp, Homo sapien
tccctccggtctagggctctttgtc

SEQ ID NO: 5045567 - DNA, 25 bp, Homo sapien
gtgtcgaaactgtctggcatagtgg

SEQ ID NO: 5045568 - DNA, 25 bp, Homo sapien
ctggagccgaggaagcgaggaggcg

SEQ ID NO: 5045569 - DNA, 25 bp, Homo sapien
gcatagtgggctccgccggcggagg

SEQ ID NO: 5045570 - DNA, 25 bp, Homo sapien
ggcgaccgggcagagccacccactt

SEQ ID NO: 5045571 - DNA, 25 bp, Homo sapien
ggagaaggggccgatcccctgctgg

SEQ ID NO: 5045572 - DNA, 25 bp, Homo sapien
cccagaagaactcgagtcgggggca

SEQ ID NO: 5045573 - DNA, 25 bp, Homo sapien
ccagaagaactcgagtcgggggcac

SEQ ID NO: 5045574 - DNA, 25 bp, Homo sapien
cagcaaagctctcagtaatgatggt

SEQ ID NO: 5045575 - DNA, 25 bp, Homo sapien
caaagctctcagtaatgatggttaa

SEQ ID NO: 5045576 - DNA, 25 bp, Homo sapien
cttttggagcaccagcaaagctctc

SEQ ID NO: 5045577 - DNA, 25 bp, Homo sapien
gctctcagtaatgatggttaaggaa

SEQ ID NO: 5045578 - DNA, 25 bp, Homo sapien
tgtgcagtgccatagaagcatctag

SEQ ID NO: 5045579 - DNA, 25 bp, Homo sapien
aagagcagtacctttccaagcccct

SEQ ID NO: 5045580 - DNA, 25 bp, Homo sapien
ctagttccctgcctcaaaggttctg

SEQ ID NO: 5045581 - DNA, 25 bp, Homo sapien
tggagatttgccctcttttaagagc

SEQ ID NO: 5045582 - DNA, 25 bp, Homo sapien
ctacagctgctcatatacatttgtg

SEQ ID NO: 5045583 - DNA, 25 bp, Homo sapien
gtttatcacagaacatgacacgcaa

SEQ ID NO: 5045584 - DNA, 25 bp, Homo sapien
gccatgtgatgagtggatgcagcat

SEQ ID NO: 5045585 - DNA, 25 bp, Homo sapien
tgacacgcaataggtcctgccaagt

SEQ ID NO: 5045586 - DNA, 25 bp, Homo sapien
gagagttgtggtaattccagtccca

SEQ ID NO: 5045587 - DNA, 25 bp, Homo sapien
aattccagtcccacatattcaccag

SEQ ID NO: 5045588 - DNA, 25 bp, Homo sapien
ttcaccagaactcccagatgccttg

SEQ ID NO: 5045589 - DNA, 25 bp, Homo sapien
gaaatgtgagagttgtggtaattcc

SEQ ID NO: 5045590 - DNA, 25 bp, Homo sapien
tgctttctgcgagtcttgcccttac

SEQ ID NO: 5045591 - DNA, 25 bp, Homo sapien
gagtcttgcccttacctggatttgg

SEQ ID NO: 5045592 - DNA, 25 bp, Homo sapien
tctgcgagtcttgcccttacctgga

SEQ ID NO: 5045593 - DNA, 25 bp, Homo sapien
ccttttgctttctgcgagtcttgcc

SEQ ID NO: 5045594 - DNA, 25 bp, Homo sapien
agaggaagcctccacgggtttagag

SEQ ID NO: 5045595 - DNA, 25 bp, Homo sapien
agcctccacgggtttagagattggg

SEQ ID NO: 5045596 - DNA, 25 bp, Homo sapien
aggaagcctccacgggtttagagat

SEQ ID NO: 5045597 - DNA, 25 bp, Homo sapien
ggcctctcataaatgagagaggaag

SEQ ID NO: 5045598 - DNA, 25 bp, Homo sapien
caagaggagatccagagttgggctc

SEQ ID NO: 5045599 - DNA, 25 bp, Homo sapien
tgtcattccaaggtgtcaagaggag

SEQ ID NO: 5045600 - DNA, 25 bp, Homo sapien
tcatgagggacattccaagaggtca

SEQ ID NO: 5045601 - DNA, 25 bp, Homo sapien
catggcggtgccttcctacagtgca

SEQ ID NO: 5045602 - DNA, 25 bp, Homo sapien
tgagcctctgtacaccgggttgtga

SEQ ID NO: 5045603 - DNA, 25 bp, Homo sapien
tcagggcggatgcttgtgagcctct

SEQ ID NO: 5045604 - DNA, 25 bp, Homo sapien
ggagaacctggcatacatgtcccag

SEQ ID NO: 5045605 - DNA, 25 bp, Homo sapien
gagagcatggagtactggagaacct

SEQ ID NO: 5045606 - DNA, 25 bp, Homo sapien
aacacaggcaggtggcacctctcac

SEQ ID NO: 5045607 - DNA, 25 bp, Homo sapien
tggaacacaggcaggtggcacctct

SEQ ID NO: 5045608 - DNA, 25 bp, Homo sapien
tggggcaaacatggaacacaggcag

SEQ ID NO: 5045609 - DNA, 25 bp, Homo sapien
ctggggcaaacatggaacacaggca

SEQ ID NO: 5045610 - DNA, 25 bp, Homo sapien
ctggagaagggagaggttggagaca

SEQ ID NO: 5045611 - DNA, 25 bp, Homo sapien
gagaagggagaggttggagacaagc

SEQ ID NO: 5045612 - DNA, 25 bp, Homo sapien
aagggagaggttggagacaagcgga

SEQ ID NO: 5045613 - DNA, 25 bp, Homo sapien
agggagaggttggagacaagcggag

SEQ ID NO: 5045614 - DNA, 25 bp, Homo sapien
tggctatcaatactcccatcagctg

SEQ ID NO: 5045615 - DNA, 25 bp, Homo sapien
tactcccatcagctgtctcaggtat

SEQ ID NO: 5045616 - DNA, 25 bp, Homo sapien
tatggctatcaatactcccatcagc

SEQ ID NO: 5045617 - DNA, 25 bp, Homo sapien
ctttatggctatcaatactcccatc

SEQ ID NO: 5045618 - DNA, 25 bp, Homo sapien
tttccctggctatatgtattaaaac

SEQ ID NO: 5045619 - DNA, 25 bp, Homo sapien
tactggtgttgggagtgaggatcca

SEQ ID NO: 5045620 - DNA, 25 bp, Homo sapien
cagagcagaacctgagtgggatact

SEQ ID NO: 5045621 - DNA, 25 bp, Homo sapien
tcttacagccttctcatagagggat

SEQ ID NO: 5045622 - DNA, 25 bp, Homo sapien
gtgaggatccaaggaagcaacttct

SEQ ID NO: 5045623 - DNA, 25 bp, Homo sapien
ggtcgccgtggcttaacctctgctt

SEQ ID NO: 5045624 - DNA, 25 bp, Homo sapien
cgaagtcaaggtcgccgtggcttaa

SEQ ID NO: 5045625 - DNA, 25 bp, Homo sapien
cctgccagatccttgcttcaaaggc

SEQ ID NO: 5045626 - DNA, 25 bp, Homo sapien
gagtctgcagtcttgggcgaagtca

SEQ ID NO: 5045627 - DNA, 25 bp, Homo sapien
caattcggtaggtgttgtgccaacg

SEQ ID NO: 5045628 - DNA, 25 bp, Homo sapien
catgggcatagagagtcagcaacaa

SEQ ID NO: 5045629 - DNA, 25 bp, Homo sapien
tgttgttctggttgaatcatgggca

SEQ ID NO: 5045630 - DNA, 25 bp, Homo sapien
tgcaccttttaacgaatcaatgttg

SEQ ID NO: 5045631 - DNA, 25 bp, Homo sapien
gcaggtaagaagggaacaccagtgc

SEQ ID NO: 5045632 - DNA, 25 bp, Homo sapien
tggtttatttggcaggttatcaagg

SEQ ID NO: 5045633 - DNA, 25 bp, Homo sapien
ccaggtgtgttaccaaggatgctgc

SEQ ID NO: 5045634 - DNA, 25 bp, Homo sapien
ggatgaagacttctactagatggtt

SEQ ID NO: 5045635 - DNA, 25 bp, Homo sapien
gtgaggaagagaatgacagtcacag

SEQ ID NO: 5045636 - DNA, 25 bp, Homo sapien
tgaggaagagaatgacagtcacagt

SEQ ID NO: 5045637 - DNA, 25 bp, Homo sapien
tgtgcccagtagtattgaacatgct

SEQ ID NO: 5045638 - DNA, 25 bp, Homo sapien
gtctgcttccatattatgatgtgat

SEQ ID NO: 5045639 - DNA, 25 bp, Homo sapien
tgatttgcaatgaaacgtgtgtgcc

SEQ ID NO: 5045640 - DNA, 25 bp, Homo sapien
caatgaaacgtgtgtgcccagtagt

SEQ ID NO: 5045641 - DNA, 25 bp, Homo sapien
gacaaccctgctcccatttggcctg

SEQ ID NO: 5045642 - DNA, 25 bp, Homo sapien
ccctgctcccatttggcctggattt

SEQ ID NO: 5045643 - DNA, 25 bp, Homo sapien
ctgaggacaaccctgctcccatttg

SEQ ID NO: 5045644 - DNA, 25 bp, Homo sapien
cctgctcccatttggcctggatttg

SEQ ID NO: 5045645 - DNA, 25 bp, Homo sapien
gctgggttcgcgtttctttatgcaa

SEQ ID NO: 5045646 - DNA, 25 bp, Homo sapien
tgagcactcagaattgccgctggca

SEQ ID NO: 5045647 - DNA, 25 bp, Homo sapien
tgtgtgtcagtacgacctacacgtg

SEQ ID NO: 5045648 - DNA, 25 bp, Homo sapien
tggatgcccttaaacgcacatgcct

SEQ ID NO: 5045649 - DNA, 25 bp, Homo sapien
aaagatccaaatcagacttctagag

SEQ ID NO: 5045650 - DNA, 25 bp, Homo sapien
gatgtgcattatcccatcagtgtgc

SEQ ID NO: 5045651 - DNA, 25 bp, Homo sapien
gctgcagaggacaagattagtgaac

SEQ ID NO: 5045652 - DNA, 25 bp, Homo sapien
tacatgagatgccattaatagctaa

SEQ ID NO: 5045653 - DNA, 25 bp, Homo sapien
cagacttgtagtacaagaaatgcta

SEQ ID NO: 5045654 - DNA, 25 bp, Homo sapien
cttcaggtcaaagagatgtaatatt

SEQ ID NO: 5045655 - DNA, 25 bp, Homo sapien
caggtcaaagagatgtaatattcta

SEQ ID NO: 5045656 - DNA, 25 bp, Homo sapien
tgtaatattctatagacgttcaaat

SEQ ID NO: 5045657 - DNA, 25 bp, Homo sapien
tcaggatccgattctgcttttgagc

SEQ ID NO: 5045658 - DNA, 25 bp, Homo sapien
gtttctagtcattaggtccttcagg

SEQ ID NO: 5045659 - DNA, 25 bp, Homo sapien
ggtccttcaggatccgattctgctt

SEQ ID NO: 5045660 - DNA, 25 bp, Homo sapien
gtgtagtcagctggaagtttctagt

SEQ ID NO: 5045661 - DNA, 25 bp, Homo sapien
aggggtagcgataagaggcacattt

SEQ ID NO: 5045662 - DNA, 25 bp, Homo sapien
ttgtgcaagactctggcgattgcat

SEQ ID NO: 5045663 - DNA, 25 bp, Homo sapien
caagactctggcgattgcatacagc

SEQ ID NO: 5045664 - DNA, 25 bp, Homo sapien
tctggcgattgcatacagcggctcc

SEQ ID NO: 5045665 - DNA, 25 bp, Homo sapien
cttgaacttgtgttgtgtaggcatc

SEQ ID NO: 5045666 - DNA, 25 bp, Homo sapien
gcccttgtgtttgcacatgaatcca

SEQ ID NO: 5045667 - DNA, 25 bp, Homo sapien
catgaatccaacttgaacttgtgtt

SEQ ID NO: 5045668 - DNA, 25 bp, Homo sapien
aacttgtgttgtgtaggcatctgcc

SEQ ID NO: 5045669 - DNA, 25 bp, Homo sapien
ctggaatgagagagtgaatcattat

SEQ ID NO: 5045670 - DNA, 25 bp, Homo sapien
gaatgagagagtgaatcattatagc

SEQ ID NO: 5045671 - DNA, 25 bp, Homo sapien
gagagagtgaatcattatagcttcc

SEQ ID NO: 5045672 - DNA, 25 bp, Homo sapien
ggctggaatgagagagtgaatcatt

SEQ ID NO: 5045673 - DNA, 25 bp, Homo sapien
tgtgtttccatcaggccccaatttc

SEQ ID NO: 5045674 - DNA, 25 bp, Homo sapien
ctgtgtttccatcaggccccaattt

SEQ ID NO: 5045675 - DNA, 25 bp, Homo sapien
tgtttccatcaggccccaatttcct

SEQ ID NO: 5045676 - DNA, 25 bp, Homo sapien
tttccatcaggccccaatttcctca

SEQ ID NO: 5045677 - DNA, 25 bp, Homo sapien
gcttggcccaagatacacctcttct

SEQ ID NO: 5045678 - DNA, 25 bp, Homo sapien
atttcttctagcttggcccaagata

SEQ ID NO: 5045679 - DNA, 25 bp, Homo sapien
gatacacctcttctgagttagatac

SEQ ID NO: 5045680 - DNA, 25 bp, Homo sapien
tctagcttggcccaagatacacctc

SEQ ID NO: 5045681 - DNA, 25 bp, Homo sapien
tcagcagactccggaaccccaggag

SEQ ID NO: 5045682 - DNA, 25 bp, Homo sapien
gtctttggagttgccgacatctgag

SEQ ID NO: 5045683 - DNA, 25 bp, Homo sapien
agcagactccggaaccccaggagca

SEQ ID NO: 5045684 - DNA, 25 bp, Homo sapien
ggggcagctcagcagactccggaac

SEQ ID NO: 5045685 - DNA, 25 bp, Homo sapien
cagtggttagtgttcccaggaattt

SEQ ID NO: 5045686 - DNA, 25 bp, Homo sapien
ctcaggtgaatcagcagtggttagt

SEQ ID NO: 5045687 - DNA, 25 bp, Homo sapien
tcaggtgaatcagcagtggttagtg

SEQ ID NO: 5045688 - DNA, 25 bp, Homo sapien
agcagtggttagtgttcccaggaat

SEQ ID NO: 5045689 - DNA, 25 bp, Homo sapien
ctggtcctggtcaatctcagattca

SEQ ID NO: 5045690 - DNA, 25 bp, Homo sapien
actatttccagagtgatatcaaccc

SEQ ID NO: 5045691 - DNA, 25 bp, Homo sapien
agatgctggtcctggtcaatctcag

SEQ ID NO: 5045692 - DNA, 25 bp, Homo sapien
tttccagagtgatatcaacccaggc

SEQ ID NO: 5045693 - DNA, 25 bp, Homo sapien
cgttcacgacctgcactgctgcatg

SEQ ID NO: 5045694 - DNA, 25 bp, Homo sapien
gacctgcactgctgcatgggctgca

SEQ ID NO: 5045695 - DNA, 25 bp, Homo sapien
cagtggagttgtgccgttcacgacc

SEQ ID NO: 5045696 - DNA, 25 bp, Homo sapien
tgcactgctgcatgggctgcatgaa

SEQ ID NO: 5045697 - DNA, 25 bp, Homo sapien
agaaagagaatcactgatatcactt

SEQ ID NO: 5045698 - DNA, 25 bp, Homo sapien
actgatatcacttcacttacatcct

SEQ ID NO: 5045699 - DNA, 25 bp, Homo sapien
gatatcacttcacttacatcctctg

SEQ ID NO: 5045700 - DNA, 25 bp, Homo sapien
gaaagagaatcactgatatcacttc

SEQ ID NO: 5045701 - DNA, 25 bp, Homo sapien
tcctttcttcaagatccaactttac

SEQ ID NO: 5045702 - DNA, 25 bp, Homo sapien
aaacccacatcttatcctttcttca

SEQ ID NO: 5045703 - DNA, 25 bp, Homo sapien
ttctccaaacccacatcttatcctt

SEQ ID NO: 5045704 - DNA, 25 bp, Homo sapien
ttatcctttcttcaagatccaactt

SEQ ID NO: 5045705 - DNA, 25 bp, Homo sapien
cttgcaatatttgggatactgcatt

SEQ ID NO: 5045706 - DNA, 25 bp, Homo sapien
aattctcttattgctggcagccaag

SEQ ID NO: 5045707 - DNA, 25 bp, Homo sapien
gggatactgcattggacacacagga

SEQ ID NO: 5045708 - DNA, 25 bp, Homo sapien
tgggaattctcttattgctggcagc

SEQ ID NO: 5045709 - DNA, 25 bp, Homo sapien
ctgcttttcccaccatccgacctgc

SEQ ID NO: 5045710 - DNA, 25 bp, Homo sapien
ccatccgacctgcttttcccaccat

SEQ ID NO: 5045711 - DNA, 25 bp, Homo sapien
accatccgacctgcttttcccacca

SEQ ID NO: 5045712 - DNA, 25 bp, Homo sapien
ctgacctgtgctttctaccatctga

SEQ ID NO: 5045713 - DNA, 25 bp, Homo sapien
tagtctttccaccatccaacttgtg

SEQ ID NO: 5045714 - DNA, 25 bp, Homo sapien
agtctttccaccatccaacttgtgc

SEQ ID NO: 5045715 - DNA, 25 bp, Homo sapien
gatgttctgatgctgaacccacagg

SEQ ID NO: 5045716 - DNA, 25 bp, Homo sapien
tcaaaggatgttctgatgctgaacc

SEQ ID NO: 5045717 - DNA, 25 bp, Homo sapien
gatgctgaacccacaggtctcccag

SEQ ID NO: 5045718 - DNA, 25 bp, Homo sapien
ggtctcccagctggcccttatcctt

SEQ ID NO: 5045719 - DNA, 25 bp, Homo sapien
tcagcagatgtccaggagaaaggag

SEQ ID NO: 5045720 - DNA, 25 bp, Homo sapien
cagcagatgtccaggagaaaggagg

SEQ ID NO: 5045721 - DNA, 25 bp, Homo sapien
cagatgtccaggagaaaggaggagg

SEQ ID NO: 5045722 - DNA, 25 bp, Homo sapien
gcagatgtccaggagaaaggaggag

SEQ ID NO: 5045723 - DNA, 25 bp, Homo sapien
gtggaattgggagtacgattgggag

SEQ ID NO: 5045724 - DNA, 25 bp, Homo sapien
gaattgggagtacgattgggagtag

SEQ ID NO: 5045725 - DNA, 25 bp, Homo sapien
attgggagtacgattgggagtaggc

SEQ ID NO: 5045726 - DNA, 25 bp, Homo sapien
tgggagtacgattgggagtaggcac

SEQ ID NO: 5045727 - DNA, 25 bp, Homo sapien
tccatgatgtcagtgtcaattccag

SEQ ID NO: 5045728 - DNA, 25 bp, Homo sapien
atttccatgatgtcagtgtcaattc

SEQ ID NO: 5045729 - DNA, 25 bp, Homo sapien
ccaatttccatgatgtcagtgtcaa

SEQ ID NO: 5045730 - DNA, 25 bp, Homo sapien
ttccatgatgtcagtgtcaattcca

SEQ ID NO: 5045731 - DNA, 25 bp, Homo sapien
caattgaacacaaatccgccacttt

SEQ ID NO: 5045732 - DNA, 25 bp, Homo sapien
ctgcatcaattgaacacaaatccgc

SEQ ID NO: 5045733 - DNA, 25 bp, Homo sapien
ttgaacacaaatccgccactttaat

SEQ ID NO: 5045734 - DNA, 25 bp, Homo sapien
gcatcaattgaacacaaatccgcca

SEQ ID NO: 5045735 - DNA, 25 bp, Homo sapien
gctaaacaccctaatcaactggctt

SEQ ID NO: 5045736 - DNA, 25 bp, Homo sapien
agaattcaaacccatgaaaatttag

SEQ ID NO: 5045737 - DNA, 25 bp, Homo sapien
tagttaacagctaaacaccctaatc

SEQ ID NO: 5045738 - DNA, 25 bp, Homo sapien
aacaccctaatcaactggcttcaat

SEQ ID NO: 5045739 - DNA, 25 bp, Homo sapien
aagccccagtaggattgaagctgcc

SEQ ID NO: 5045740 - DNA, 25 bp, Homo sapien
gaagccccagtaggattgaagctgc

SEQ ID NO: 5045741 - DNA, 25 bp, Homo sapien
gcaattcaacatgaaaaatcacctt

SEQ ID NO: 5045742 - DNA, 25 bp, Homo sapien
ttcaacatgaaaaatcaccttgggg

SEQ ID NO: 5045743 - DNA, 25 bp, Homo sapien
atttacagtctaaggcttattcagt

SEQ ID NO: 5045744 - DNA, 25 bp, Homo sapien
tacagtctaaggcttattcagtcat

SEQ ID NO: 5045745 - DNA, 25 bp, Homo sapien
ttcagatttacagtctaaggcttat

SEQ ID NO: 5045746 - DNA, 25 bp, Homo sapien
cagtctaaggcttattcagtcattt

SEQ ID NO: 5045747 - DNA, 25 bp, Homo sapien
attaacagggagagtaggcactgcg

SEQ ID NO: 5045748 - DNA, 25 bp, Homo sapien
tgctattcggcgcattaacagggag

SEQ ID NO: 5045749 - DNA, 25 bp, Homo sapien
agtaggcactgcgttaagccttcta

SEQ ID NO: 5045750 - DNA, 25 bp, Homo sapien
acagggagagtaggcactgcgttaa

SEQ ID NO: 5045751 - DNA, 25 bp, Homo sapien
ggagcctctgtggatctgagcatct

SEQ ID NO: 5045752 - DNA, 25 bp, Homo sapien
tccacttggcaggtttctcttccat

SEQ ID NO: 5045753 - DNA, 25 bp, Homo sapien
caggagcctctgtggatctgagcat

SEQ ID NO: 5045754 - DNA, 25 bp, Homo sapien
ctgcaggagcctctgtggatctgag

SEQ ID NO: 5045755 - DNA, 25 bp, Homo sapien
gaagctcgctacaaagatgaagtag

SEQ ID NO: 5045756 - DNA, 25 bp, Homo sapien
cccgtgggtgctgaagaagctcgct

SEQ ID NO: 5045757 - DNA, 25 bp, Homo sapien
gacatagtatgagcgagggcggaca

SEQ ID NO: 5045758 - DNA, 25 bp, Homo sapien
agggttcttgcaccagcccgtgggt

SEQ ID NO: 5045759 - DNA, 25 bp, Homo sapien
cagagctctcttttagtgccgagca

SEQ ID NO: 5045760 - DNA, 25 bp, Homo sapien
gaggtcaattgcatgcccaaagcca

SEQ ID NO: 5045761 - DNA, 25 bp, Homo sapien
cagagatggctttcaataccagagc

SEQ ID NO: 5045762 - DNA, 25 bp, Homo sapien
gagcagagcgtctcaacttgggcag

SEQ ID NO: 5045763 - DNA, 25 bp, Homo sapien
gagtaagtcttcaaagtagcggtta

SEQ ID NO: 5045764 - DNA, 25 bp, Homo sapien
gatcctatttggtcctgagagtaag

SEQ ID NO: 5045765 - DNA, 25 bp, Homo sapien
ctcttagctggagatggtttctcat

SEQ ID NO: 5045766 - DNA, 25 bp, Homo sapien
tcctagtaacggcacagagctggag

SEQ ID NO: 5045767 - DNA, 25 bp, Homo sapien
agacaatgatctaggccccaggagc

SEQ ID NO: 5045768 - DNA, 25 bp, Homo sapien
gacaatgatctaggccccaggagcc

SEQ ID NO: 5045769 - DNA, 25 bp, Homo sapien
acaatgatctaggccccaggagccc

SEQ ID NO: 5045770 - DNA, 25 bp, Homo sapien
cagacaatgatctaggccccaggag

SEQ ID NO: 5045771 - DNA, 25 bp, Homo sapien
cagccttcaaacatagcctgatttc

SEQ ID NO: 5045772 - DNA, 25 bp, Homo sapien
tgccatgatattcctgccaacttaa

SEQ ID NO: 5045773 - DNA, 25 bp, Homo sapien
tcagccttcaaacatagcctgattt

SEQ ID NO: 5045774 - DNA, 25 bp, Homo sapien
tattcctgccaacttaaatacagac

SEQ ID NO: 5045775 - DNA, 25 bp, Homo sapien
gctccattcatgtatcctgtgatgg

SEQ ID NO: 5045776 - DNA, 25 bp, Homo sapien
tgagctccattcatgtatcctgtga

SEQ ID NO: 5045777 - DNA, 25 bp, Homo sapien
gagctccattcatgtatcctgtgat

SEQ ID NO: 5045778 - DNA, 25 bp, Homo sapien
agctccattcatgtatcctgtgatg

SEQ ID NO: 5045779 - DNA, 25 bp, Homo sapien
ggagtagaccaggtggagatgtgga

SEQ ID NO: 5045780 - DNA, 25 bp, Homo sapien
ggaggagtgtatgaatgccttcaaa

SEQ ID NO: 5045781 - DNA, 25 bp, Homo sapien
ggatgaagaggagtagaccaggtgg

SEQ ID NO: 5045782 - DNA, 25 bp, Homo sapien
caaaggttgtggtgcttgagaggag

SEQ ID NO: 5045783 - DNA, 25 bp, Homo sapien
atttcactgtcccaagcaccgtcta

SEQ ID NO: 5045784 - DNA, 25 bp, Homo sapien
taggatggccaatagagtctgtggt

SEQ ID NO: 5045785 - DNA, 25 bp, Homo sapien
tatgctcttgggtgcaaaaacacag

SEQ ID NO: 5045786 - DNA, 25 bp, Homo sapien
aattgaatgtacacagccttaccca

SEQ ID NO: 5045787 - DNA, 25 bp, Homo sapien
gcatcatcgagtctgatcttccagg

SEQ ID NO: 5045788 - DNA, 25 bp, Homo sapien
tactttgtaggttgatggcagcatc

SEQ ID NO: 5045789 - DNA, 25 bp, Homo sapien
ggcacactggatactttgtaggttg

SEQ ID NO: 5045790 - DNA, 25 bp, Homo sapien
ggctggcctttatgtggactggatt

SEQ ID NO: 5045791 - DNA, 25 bp, Homo sapien
aatttgacctaaaatcattgatcat

SEQ ID NO: 5045792 - DNA, 25 bp, Homo sapien
tccctgaacgtctgacaataggtgg

SEQ ID NO: 5045793 - DNA, 25 bp, Homo sapien
cgtctgacaataggtggacacttga

SEQ ID NO: 5045794 - DNA, 25 bp, Homo sapien
gaacgtctgacaataggtggacact

SEQ ID NO: 5045795 - DNA, 25 bp, Homo sapien
tgaagttccctgaacgtctgacaat

SEQ ID NO: 5045796 - DNA, 25 bp, Homo sapien
gtctcagggtctcagaggattgtat

SEQ ID NO: 5045797 - DNA, 25 bp, Homo sapien
ggtctcagggtctcagaggattgta

SEQ ID NO: 5045798 - DNA, 25 bp, Homo sapien
gggtctcagggtctcagaggattgt

SEQ ID NO: 5045799 - DNA, 25 bp, Homo sapien
cggggtctcagggtctcagaggatt

SEQ ID NO: 5045800 - DNA, 25 bp, Homo sapien
cctaagaggcaggaggggtgatcgt

SEQ ID NO: 5045801 - DNA, 25 bp, Homo sapien
tccttctgccaatagcctgcacagt

SEQ ID NO: 5045802 - DNA, 25 bp, Homo sapien
gatcgtgtgtgtctaaagtttcttc

SEQ ID NO: 5045803 - DNA, 25 bp, Homo sapien
gccaatagcctgcacagttctccta

SEQ ID NO: 5045804 - DNA, 25 bp, Homo sapien
tcccatgcaatgattatcctgtgtg

SEQ ID NO: 5045805 - DNA, 25 bp, Homo sapien
gggatgcaacaattatcccatgcaa

SEQ ID NO: 5045806 - DNA, 25 bp, Homo sapien
tcctgtgtggcttagatggtggttc

SEQ ID NO: 5045807 - DNA, 25 bp, Homo sapien
tagatggtggttctgccttcagaat

SEQ ID NO: 5045808 - DNA, 25 bp, Homo sapien
gcttcctccaaagctcgtgctttat

SEQ ID NO: 5045809 - DNA, 25 bp, Homo sapien
ctgtgcccaggataatgtgtccaag

SEQ ID NO: 5045810 - DNA, 25 bp, Homo sapien
tctgtgcccaggataatgtgtccaa

SEQ ID NO: 5045811 - DNA, 25 bp, Homo sapien
caaagctcgtgctttatcattcacc

SEQ ID NO: 5045812 - DNA, 25 bp, Homo sapien
tcatgaggctcttcctaaaccccca

SEQ ID NO: 5045813 - DNA, 25 bp, Homo sapien
gctcttcctaaacccccagagaaca

SEQ ID NO: 5045814 - DNA, 25 bp, Homo sapien
cttcctaaacccccagagaacaatg

SEQ ID NO: 5045815 - DNA, 25 bp, Homo sapien
cttcatgaggctcttcctaaacccc

SEQ ID NO: 5045816 - DNA, 25 bp, Homo sapien
aactaagaacctgaccccttgactg

SEQ ID NO: 5045817 - DNA, 25 bp, Homo sapien
gatgatgtctgtcagcttgagagag

SEQ ID NO: 5045818 - DNA, 25 bp, Homo sapien
cctgaccccttgactgcattcttta

SEQ ID NO: 5045819 - DNA, 25 bp, Homo sapien
aatagaggaaagattgtatcccttg

SEQ ID NO: 5045820 - DNA, 25 bp, Homo sapien
cttctggcacgaggaagaaaccagg

SEQ ID NO: 5045821 - DNA, 25 bp, Homo sapien
ttctggcacgaggaagaaaccaggg

SEQ ID NO: 5045822 - DNA, 25 bp, Homo sapien
ggaagaaaccaggggtgatccacat

SEQ ID NO: 5045823 - DNA, 25 bp, Homo sapien
cgaggaagaaaccaggggtgatcca

SEQ ID NO: 5045824 - DNA, 25 bp, Homo sapien
tggggccccttgcttcacctggcat

SEQ ID NO: 5045825 - DNA, 25 bp, Homo sapien
atttctggggccccttgcttcacct

SEQ ID NO: 5045826 - DNA, 25 bp, Homo sapien
ttctggggccccttgcttcacctgg

SEQ ID NO: 5045827 - DNA, 25 bp, Homo sapien
acatttctggggccccttgcttcac

SEQ ID NO: 5045828 - DNA, 25 bp, Homo sapien
caacagccattgagagagggaagtc

SEQ ID NO: 5045829 - DNA, 25 bp, Homo sapien
cacatcattatgagcaacagcgtca

SEQ ID NO: 5045830 - DNA, 25 bp, Homo sapien
ccccttcagtgctcgtaactgcaga

SEQ ID NO: 5045831 - DNA, 25 bp, Homo sapien
ttccatgtgatgcaagcaacttgcc

SEQ ID NO: 5045832 - DNA, 25 bp, Homo sapien
tctttctgcttgcttttcttctcca

SEQ ID NO: 5045833 - DNA, 25 bp, Homo sapien
tgtggcattctctttctgcttgctt

SEQ ID NO: 5045834 - DNA, 25 bp, Homo sapien
atgtggcattctctttctgcttgct

SEQ ID NO: 5045835 - DNA, 25 bp, Homo sapien
ctttctgcttgcttttcttctccat

SEQ ID NO: 5045836 - DNA, 25 bp, Homo sapien
ggctgaagacgtagccctgttggtt

SEQ ID NO: 5045837 - DNA, 25 bp, Homo sapien
gttatgtctgtgtgcgcctgcccca

SEQ ID NO: 5045838 - DNA, 25 bp, Homo sapien
tagccctgttggttggttatgtctg

SEQ ID NO: 5045839 - DNA, 25 bp, Homo sapien
ctttagagggctcaatctccctcag

SEQ ID NO: 5045840 - DNA, 25 bp, Homo sapien
aatgcaatgtgcgtagaacccgtaa

SEQ ID NO: 5045841 - DNA, 25 bp, Homo sapien
gacaccagcctaggtcaaggagaga

SEQ ID NO: 5045842 - DNA, 25 bp, Homo sapien
caaactgcctttgggtcgatgagta

SEQ ID NO: 5045843 - DNA, 25 bp, Homo sapien
tcagctaccgactagtttgggccaa

SEQ ID NO: 5045844 - DNA, 25 bp, Homo sapien
gataaaattcccgtctgagccacac

SEQ ID NO: 5045845 - DNA, 25 bp, Homo sapien
cacacagcaagtaagagttgccctg

SEQ ID NO: 5045846 - DNA, 25 bp, Homo sapien
gctgttcctaggatccatgccctgg

SEQ ID NO: 5045847 - DNA, 25 bp, Homo sapien
gagtgccaggtaggctcatttccat

SEQ ID NO: 5045848 - DNA, 25 bp, Homo sapien
gtgcacaatggcaaccgtagctcaa

SEQ ID NO: 5045849 - DNA, 25 bp, Homo sapien
tgattggatagcataagcaatgacc

SEQ ID NO: 5045850 - DNA, 25 bp, Homo sapien
gcaaccgtagctcaaccttgcagag

SEQ ID NO: 5045851 - DNA, 25 bp, Homo sapien
gcataagcaatgacctcaacgctgt

SEQ ID NO: 5045852 - DNA, 25 bp, Homo sapien
cgccataatccacagctgtgccttc

SEQ ID NO: 5045853 - DNA, 25 bp, Homo sapien
taatccacagctgtgccttctccat

SEQ ID NO: 5045854 - DNA, 25 bp, Homo sapien
gccataatccacagctgtgccttct

SEQ ID NO: 5045855 - DNA, 25 bp, Homo sapien
cataatccacagctgtgccttctcc

SEQ ID NO: 5045856 - DNA, 25 bp, Homo sapien
aaatactctcccatgcattggtcat

SEQ ID NO: 5045857 - DNA, 25 bp, Homo sapien
catgcattggtcatgataaggacaa

SEQ ID NO: 5045858 - DNA, 25 bp, Homo sapien
ggtcatgataaggacaatgtcatgg

SEQ ID NO: 5045859 - DNA, 25 bp, Homo sapien
tctcccatgcattggtcatgataag

SEQ ID NO: 5045860 - DNA, 25 bp, Homo sapien
tttctcaactgaacacaacctggtg

SEQ ID NO: 5045861 - DNA, 25 bp, Homo sapien
cttttctcaactgaacacaacctgg

SEQ ID NO: 5045862 - DNA, 25 bp, Homo sapien
tctcaactgaacacaacctggtgtg

SEQ ID NO: 5045863 - DNA, 25 bp, Homo sapien
ttctcaactgaacacaacctggtgt

SEQ ID NO: 5045864 - DNA, 25 bp, Homo sapien
caggtatcaatgatacactgatgga

SEQ ID NO: 5045865 - DNA, 25 bp, Homo sapien
acaggtatcaatgatacactgatgg

SEQ ID NO: 5045866 - DNA, 25 bp, Homo sapien
gacaggtatcaatgatacactgatg

SEQ ID NO: 5045867 - DNA, 25 bp, Homo sapien
ctgacaggtatcaatgatacactga

SEQ ID NO: 5045868 - DNA, 25 bp, Homo sapien
ttttgaagggtgagtgtggaagcca

SEQ ID NO: 5045869 - DNA, 25 bp, Homo sapien
ggtgagtgtggaagccaggataggt

SEQ ID NO: 5045870 - DNA, 25 bp, Homo sapien
agtgtggaagccaggataggttctt

SEQ ID NO: 5045871 - DNA, 25 bp, Homo sapien
aagccttttgaagggtgagtgtgga

SEQ ID NO: 5045872 - DNA, 25 bp, Homo sapien
gctatattccagtccctttgtgtga

SEQ ID NO: 5045873 - DNA, 25 bp, Homo sapien
tgaacagggtttcattcctcctctg

SEQ ID NO: 5045874 - DNA, 25 bp, Homo sapien
cctctgcagtccagcgagggaacag

SEQ ID NO: 5045875 - DNA, 25 bp, Homo sapien
caaagtgcgcttggaatccagatca

SEQ ID NO: 5045876 - DNA, 25 bp, Homo sapien
gatactgcctcacataagggctgac

SEQ ID NO: 5045877 - DNA, 25 bp, Homo sapien
tggatactgcctcacataagggctg

SEQ ID NO: 5045878 - DNA, 25 bp, Homo sapien
tcagtggatactgcctcacataagg

SEQ ID NO: 5045879 - DNA, 25 bp, Homo sapien
agtggatactgcctcacataagggc

SEQ ID NO: 5045880 - DNA, 25 bp, Homo sapien
tatgcatacattttgggcccccatg

SEQ ID NO: 5045881 - DNA, 25 bp, Homo sapien
tctttccacatgtgggatgcggcag

SEQ ID NO: 5045882 - DNA, 25 bp, Homo sapien
cttcagataagctagctctacaggg

SEQ ID NO: 5045883 - DNA, 25 bp, Homo sapien
tttgggcccccatgtcaatcgccag

SEQ ID NO: 5045884 - DNA, 25 bp, Homo sapien
gcatgaatcaggtctgtgactctgg

SEQ ID NO: 5045885 - DNA, 25 bp, Homo sapien
ttctgtgacatcgaagataaaacac

SEQ ID NO: 5045886 - DNA, 25 bp, Homo sapien
catcatcattcactacatactgggt

SEQ ID NO: 5045887 - DNA, 25 bp, Homo sapien
aagagttctgtgacatcgaagataa

SEQ ID NO: 5045888 - DNA, 25 bp, Homo sapien
agcctccgttcatcttcctgccgaa

SEQ ID NO: 5045889 - DNA, 25 bp, Homo sapien
tgccagcctccgttcatcttcctgc

SEQ ID NO: 5045890 - DNA, 25 bp, Homo sapien
ccgttcatcttcctgccgaaatgtc

SEQ ID NO: 5045891 - DNA, 25 bp, Homo sapien
atcttcctgccgaaatgtcctcctt

SEQ ID NO: 5045892 - DNA, 25 bp, Homo sapien
actccacagtcttgatataaaatcg

SEQ ID NO: 5045893 - DNA, 25 bp, Homo sapien
catattcaggatacaaactcagtct

SEQ ID NO: 5045894 - DNA, 25 bp, Homo sapien
aactgaggcacataagggttgaaca

SEQ ID NO: 5045895 - DNA, 25 bp, Homo sapien
tctgggctaaaataatcaaaccatc

SEQ ID NO: 5045896 - DNA, 25 bp, Homo sapien
ttctgaaacacaaccacagtgaagg

SEQ ID NO: 5045897 - DNA, 25 bp, Homo sapien
tgaaacacaaccacagtgaaggctt

SEQ ID NO: 5045898 - DNA, 25 bp, Homo sapien
ctcttctgaaacacaaccacagtga

SEQ ID NO: 5045899 - DNA, 25 bp, Homo sapien
tctgaaacacaaccacagtgaaggc

SEQ ID NO: 5045900 - DNA, 25 bp, Homo sapien
accagcccggcctggtgtggcgtat

SEQ ID NO: 5045901 - DNA, 25 bp, Homo sapien
gctatttccttgtcgtccttcacca

SEQ ID NO: 5045902 - DNA, 25 bp, Homo sapien
gcctggtgtggcgtattttcagcca

SEQ ID NO: 5045903 - DNA, 25 bp, Homo sapien
taggatccctgctatttccttgtcg

SEQ ID NO: 5045904 - DNA, 25 bp, Homo sapien
gatatacctcgttttcctccagaat

SEQ ID NO: 5045905 - DNA, 25 bp, Homo sapien
tgatatacctcgttttcctccagaa

SEQ ID NO: 5045906 - DNA, 25 bp, Homo sapien
ttgatatacctcgttttcctccaga

SEQ ID NO: 5045907 - DNA, 25 bp, Homo sapien
cttgatatacctcgttttcctccag

SEQ ID NO: 5045908 - DNA, 25 bp, Homo sapien
gaatctgctgagaaagatcataggg

SEQ ID NO: 5045909 - DNA, 25 bp, Homo sapien
acgaggttgagcttgtggataaaca

SEQ ID NO: 5045910 - DNA, 25 bp, Homo sapien
aaacactggacagagacccaagtta

SEQ ID NO: 5045911 - DNA, 25 bp, Homo sapien
tgagaaagatcataggggccgccct

SEQ ID NO: 5045912 - DNA, 25 bp, Homo sapien
cagaggacaggaagaccggtgttta

SEQ ID NO: 5045913 - DNA, 25 bp, Homo sapien
agagcaggacatgcaattgatacgc

SEQ ID NO: 5045914 - DNA, 25 bp, Homo sapien
gatacgcttgtgcttgtaatgcagc

SEQ ID NO: 5045915 - DNA, 25 bp, Homo sapien
ttgtgcttgtaatgcagcggcccca

SEQ ID NO: 5045916 - DNA, 25 bp, Homo sapien
cacaatgagttaggtagcctcttcc

SEQ ID NO: 5045917 - DNA, 25 bp, Homo sapien
cacaaatgagctagggttgccatcc

SEQ ID NO: 5045918 - DNA, 25 bp, Homo sapien
catccttggcaatagtggctcccag

SEQ ID NO: 5045919 - DNA, 25 bp, Homo sapien
gaaaactcacaatatccccaacaga

SEQ ID NO: 5045920 - DNA, 25 bp, Homo sapien
attgggcattttcttgccagaatgt

SEQ ID NO: 5045921 - DNA, 25 bp, Homo sapien
taatcttctaacatgatgtcttcag

SEQ ID NO: 5045922 - DNA, 25 bp, Homo sapien
cagtagcagcacatgtaatgaagct

SEQ ID NO: 5045923 - DNA, 25 bp, Homo sapien
caagacggtgatattttcgggataa

SEQ ID NO: 5045924 - DNA, 25 bp, Homo sapien
tggtgcaccctgatagtttgggcat

SEQ ID NO: 5045925 - DNA, 25 bp, Homo sapien
ggtgaaatggtggtgcaccctgata

SEQ ID NO: 5045926 - DNA, 25 bp, Homo sapien
gtggtgcaccctgatagtttgggca

SEQ ID NO: 5045927 - DNA, 25 bp, Homo sapien
gaaatggtggtgcaccctgatagtt

SEQ ID NO: 5045928 - DNA, 25 bp, Homo sapien
caagtttataggcaattttctgggc

SEQ ID NO: 5045929 - DNA, 25 bp, Homo sapien
tgggcctgttcagccatcaataaaa

SEQ ID NO: 5045930 - DNA, 25 bp, Homo sapien
tctttgtgttggttctgatgcaagt

SEQ ID NO: 5045931 - DNA, 25 bp, Homo sapien
ttttctgggcctgttcagccatcaa

SEQ ID NO: 5045932 - DNA, 25 bp, Homo sapien
tccaaagatgctttcaaggacactt

SEQ ID NO: 5045933 - DNA, 25 bp, Homo sapien
cattatcagaggaaatccacacggc

SEQ ID NO: 5045934 - DNA, 25 bp, Homo sapien
cacacggcttctccaaagatgcttt

SEQ ID NO: 5045935 - DNA, 25 bp, Homo sapien
ttcatgtccattatcagaggaaatc

SEQ ID NO: 5045936 - DNA, 25 bp, Homo sapien
cggttccgatggtaaccacatggat

SEQ ID NO: 5045937 - DNA, 25 bp, Homo sapien
gacggttccgatggtaaccacatgg

SEQ ID NO: 5045938 - DNA, 25 bp, Homo sapien
ctgacggttccgatggtaaccacat

SEQ ID NO: 5045939 - DNA, 25 bp, Homo sapien
ttccgatggtaaccacatggatggt

SEQ ID NO: 5045940 - DNA, 25 bp, Homo sapien
cacacaaccatagccacacagagta

SEQ ID NO: 5045941 - DNA, 25 bp, Homo sapien
gtatgacctgtctccattatattgt

SEQ ID NO: 5045942 - DNA, 25 bp, Homo sapien
tcatatccttggtcctgaaccactc

SEQ ID NO: 5045943 - DNA, 25 bp, Homo sapien
catatccttggtcctgaaccactca

SEQ ID NO: 5045944 - DNA, 25 bp, Homo sapien
ctctgccacttttgatcaaagttct

SEQ ID NO: 5045945 - DNA, 25 bp, Homo sapien
gccacttttgatcaaagttctttca

SEQ ID NO: 5045946 - DNA, 25 bp, Homo sapien
cttgtcttccccacctcacgtccca

SEQ ID NO: 5045947 - DNA, 25 bp, Homo sapien
cacgtcccacaccaagatacttcat

SEQ ID NO: 5045948 - DNA, 25 bp, Homo sapien
gacaggctgatttgagagttccaga

SEQ ID NO: 5045949 - DNA, 25 bp, Homo sapien
gtggtagaggaagagatctgaattt

SEQ ID NO: 5045950 - DNA, 25 bp, Homo sapien
cactcagaagatctcctggtgtgcc

SEQ ID NO: 5045951 - DNA, 25 bp, Homo sapien
aattctcccatctatcactgggtgg

SEQ ID NO: 5045952 - DNA, 25 bp, Homo sapien
ctctgaggtaagagataggcaaggt

SEQ ID NO: 5045953 - DNA, 25 bp, Homo sapien
tctcaagattagacacatcagacat

SEQ ID NO: 5045954 - DNA, 25 bp, Homo sapien
agtctcaagattagacacatcagac

SEQ ID NO: 5045955 - DNA, 25 bp, Homo sapien
ttctctgaggtaagagataggcaag

SEQ ID NO: 5045956 - DNA, 25 bp, Homo sapien
gacttccaaagttagggcatgaaag

SEQ ID NO: 5045957 - DNA, 25 bp, Homo sapien
catgcccttgtatagaagtgactca

SEQ ID NO: 5045958 - DNA, 25 bp, Homo sapien
atgcttcctagctttcatgcccttg

SEQ ID NO: 5045959 - DNA, 25 bp, Homo sapien
gatgatgtgatagacagcttctaag

SEQ ID NO: 5045960 - DNA, 25 bp, Homo sapien
ctgttcctgaattagcagctgccat

SEQ ID NO: 5045961 - DNA, 25 bp, Homo sapien
gctacctgctgagagatatcccaga

SEQ ID NO: 5045962 - DNA, 25 bp, Homo sapien
cagatgctgactggccactaataat

SEQ ID NO: 5045963 - DNA, 25 bp, Homo sapien
tagtctggctgcctgtttgccatct

SEQ ID NO: 5045964 - DNA, 25 bp, Homo sapien
gagtttccggcactctgaccagttg

SEQ ID NO: 5045965 - DNA, 25 bp, Homo sapien
tggaggattccaagctaggctttcc

SEQ ID NO: 5045966 - DNA, 25 bp, Homo sapien
tcgaacataaaaccgcagatgtggg

SEQ ID NO: 5045967 - DNA, 25 bp, Homo sapien
tagtaattctgcagaagccccaggg

SEQ ID NO: 5045968 - DNA, 25 bp, Homo sapien
ggatccctgagtaagatcaggaccc

SEQ ID NO: 5045969 - DNA, 25 bp, Homo sapien
atccctgagtaagatcaggacccca

SEQ ID NO: 5045970 - DNA, 25 bp, Homo sapien
tgggatccctgagtaagatcaggac

SEQ ID NO: 5045971 - DNA, 25 bp, Homo sapien
gatccctgagtaagatcaggacccc

SEQ ID NO: 5045972 - DNA, 25 bp, Homo sapien
ccatagcccttcaacttcccaatct

SEQ ID NO: 5045973 - DNA, 25 bp, Homo sapien
tagcccttcaacttcccaatcttca

SEQ ID NO: 5045974 - DNA, 25 bp, Homo sapien
agcccttcaacttcccaatcttcaa

SEQ ID NO: 5045975 - DNA, 25 bp, Homo sapien
catagcccttcaacttcccaatctt

SEQ ID NO: 5045976 - DNA, 25 bp, Homo sapien
tgagggcaggagatagtaacctgtt

SEQ ID NO: 5045977 - DNA, 25 bp, Homo sapien
tgttatacaaaggtataacaaccac

SEQ ID NO: 5045978 - DNA, 25 bp, Homo sapien
gatagtaacctgttatacaaaggta

SEQ ID NO: 5045979 - DNA, 25 bp, Homo sapien
gcaggagatagtaacctgttataca

SEQ ID NO: 5045980 - DNA, 25 bp, Homo sapien
ttgcattctgagctctcactggctt

SEQ ID NO: 5045981 - DNA, 25 bp, Homo sapien
cactggcttctatatccatcatttc

SEQ ID NO: 5045982 - DNA, 25 bp, Homo sapien
tgcatttgcattctgagctctcact

SEQ ID NO: 5045983 - DNA, 25 bp, Homo sapien
tggcttctatatccatcatttccca

SEQ ID NO: 5045984 - DNA, 25 bp, Homo sapien
ttaagggtggatgagagccaaacac

SEQ ID NO: 5045985 - DNA, 25 bp, Homo sapien
tcgcaggaatacaagcctcgttggg

SEQ ID NO: 5045986 - DNA, 25 bp, Homo sapien
gggttattatcaacgtctgcagagg

SEQ ID NO: 5045987 - DNA, 25 bp, Homo sapien
gaggctcatggtcccatcgcaggaa

SEQ ID NO: 5045988 - DNA, 25 bp, Homo sapien
caaggcctttctgattggacagtgc

SEQ ID NO: 5045989 - DNA, 25 bp, Homo sapien
ggactggacttctgaaattcttgga

SEQ ID NO: 5045990 - DNA, 25 bp, Homo sapien
gccaacacagtgctggtggaatatt

SEQ ID NO: 5045991 - DNA, 25 bp, Homo sapien
ctgaaacacaccacggcagcagaag

SEQ ID NO: 5045992 - DNA, 25 bp, Homo sapien
gctgtcacagtcaggagttgcctct

SEQ ID NO: 5045993 - DNA, 25 bp, Homo sapien
tggcatcaaagggagacagagccgc

SEQ ID NO: 5045994 - DNA, 25 bp, Homo sapien
ggccctcgctggcatcaaagggaga

SEQ ID NO: 5045995 - DNA, 25 bp, Homo sapien
gacagagccgctgtcacagtcagga

SEQ ID NO: 5045996 - DNA, 25 bp, Homo sapien
cagctgcattttagccatctatggg

SEQ ID NO: 5045997 - DNA, 25 bp, Homo sapien
gtcaacaccttgagggaagaggcca

SEQ ID NO: 5045998 - DNA, 25 bp, Homo sapien
caccttgagggaagaggccatatct

SEQ ID NO: 5045999 - DNA, 25 bp, Homo sapien
ttagccatctatgggccagctcctt

SEQ ID NO: 5046000 - DNA, 25 bp, Homo sapien
caacagcggcaaaattgtgtgctct

SEQ ID NO: 5046001 - DNA, 25 bp, Homo sapien
cgtgtgtgacatccaacagcggcaa

SEQ ID NO: 5046002 - DNA, 25 bp, Homo sapien
tccaacagcggcaaaattgtgtgct

SEQ ID NO: 5046003 - DNA, 25 bp, Homo sapien
tgacatccaacagcggcaaaattgt

SEQ ID NO: 5046004 - DNA, 25 bp, Homo sapien
gtgccaaggcaggtaagaacactcc

SEQ ID NO: 5046005 - DNA, 25 bp, Homo sapien
gtggctggtgcgtttattaagtccc

SEQ ID NO: 5046006 - DNA, 25 bp, Homo sapien
tgattccagttcctcgcctacgagt

SEQ ID NO: 5046007 - DNA, 25 bp, Homo sapien
agagacatttacaaaggcggagctg

SEQ ID NO: 5046008 - DNA, 25 bp, Homo sapien
agagctaggtgagcaagtcaaaggc

SEQ ID NO: 5046009 - DNA, 25 bp, Homo sapien
tagtgagagctaggtgagcaagtca

SEQ ID NO: 5046010 - DNA, 25 bp, Homo sapien
ccatagtgagagctaggtgagcaag

SEQ ID NO: 5046011 - DNA, 25 bp, Homo sapien
tcccccatagtgagagctaggtgag

SEQ ID NO: 5046012 - DNA, 25 bp, Homo sapien
gagagcttctctgaacactttatcc

SEQ ID NO: 5046013 - DNA, 25 bp, Homo sapien
ttctctgaacactttatccccaatc

SEQ ID NO: 5046014 - DNA, 25 bp, Homo sapien
gcttctctgaacactttatccccaa

SEQ ID NO: 5046015 - DNA, 25 bp, Homo sapien
gagcttctctgaacactttatcccc

SEQ ID NO: 5046016 - DNA, 25 bp, Homo sapien
gaaagtactgaccagaagactcagg

SEQ ID NO: 5046017 - DNA, 25 bp, Homo sapien
gaaatacaatgcaccactaaccagt

SEQ ID NO: 5046018 - DNA, 25 bp, Homo sapien
tcaacttcatcagacccaggaggct

SEQ ID NO: 5046019 - DNA, 25 bp, Homo sapien
tagaaagccaagtggaacacagttg

SEQ ID NO: 5046020 - DNA, 25 bp, Homo sapien
cacggagtcaacagagacctgattc

SEQ ID NO: 5046021 - DNA, 25 bp, Homo sapien
tcactggtgccctttgtcacctgga

SEQ ID NO: 5046022 - DNA, 25 bp, Homo sapien
tggccactggcaagcagcacattgc

SEQ ID NO: 5046023 - DNA, 25 bp, Homo sapien
tattgtttctctgtctaatgtggaa

SEQ ID NO: 5046024 - DNA, 25 bp, Homo sapien
gagtcagctgcataagcctttcaca

SEQ ID NO: 5046025 - DNA, 25 bp, Homo sapien
gctcttaaccctgcaatccacagtg

SEQ ID NO: 5046026 - DNA, 25 bp, Homo sapien
aaaaaggaagtggatgattctcttc

SEQ ID NO: 5046027 - DNA, 25 bp, Homo sapien
gattctcttcacagtgggactgctg

SEQ ID NO: 5046028 - DNA, 25 bp, Homo sapien
gtgaggagccgtgtaactttgcaca

SEQ ID NO: 5046029 - DNA, 25 bp, Homo sapien
tgaggagccgtgtaactttgcacat

SEQ ID NO: 5046030 - DNA, 25 bp, Homo sapien
ggtgaggagccgtgtaactttgcac

SEQ ID NO: 5046031 - DNA, 25 bp, Homo sapien
attaaccagtctgtcttccccaaca

SEQ ID NO: 5046032 - DNA, 25 bp, Homo sapien
aagcatttagaaacacaagcagtat

SEQ ID NO: 5046033 - DNA, 25 bp, Homo sapien
gtcaagactgtctggcatagcacag

SEQ ID NO: 5046034 - DNA, 25 bp, Homo sapien
tctgcacacagcattaaccagtctg

SEQ ID NO: 5046035 - DNA, 25 bp, Homo sapien
ctgaagggttaccagttctgtcgtt

SEQ ID NO: 5046036 - DNA, 25 bp, Homo sapien
caaactgaagggttaccagttctgt

SEQ ID NO: 5046037 - DNA, 25 bp, Homo sapien
aactgaagggttaccagttctgtcg

SEQ ID NO: 5046038 - DNA, 25 bp, Homo sapien
actgaagggttaccagttctgtcgt

SEQ ID NO: 5046039 - DNA, 25 bp, Homo sapien
agccagcccagtgtgagttccttcc

SEQ ID NO: 5046040 - DNA, 25 bp, Homo sapien
tgtggatgcatgaaagagccagccc

SEQ ID NO: 5046041 - DNA, 25 bp, Homo sapien
gagccagcccagtgtgagttccttc

SEQ ID NO: 5046042 - DNA, 25 bp, Homo sapien
gatgcatgaaagagccagcccagtg

SEQ ID NO: 5046043 - DNA, 25 bp, Homo sapien
ccaggtacaacattcagtttagccc

SEQ ID NO: 5046044 - DNA, 25 bp, Homo sapien
tcccaggtacaacattcagtttagc

SEQ ID NO: 5046045 - DNA, 25 bp, Homo sapien
ttcccaggtacaacattcagtttag

SEQ ID NO: 5046046 - DNA, 25 bp, Homo sapien
caggtacaacattcagtttagccct

SEQ ID NO: 5046047 - DNA, 25 bp, Homo sapien
taaaagctgctgtctaaaatgcagt

SEQ ID NO: 5046048 - DNA, 25 bp, Homo sapien
tctaaaatgcagtcattgagaggtg

SEQ ID NO: 5046049 - DNA, 25 bp, Homo sapien
ggataagctggcagcaggaaattcc

SEQ ID NO: 5046050 - DNA, 25 bp, Homo sapien
tggagtgtaaaacctataaaagctg

SEQ ID NO: 5046051 - DNA, 25 bp, Homo sapien
gcatcaagttcgatttaaagcacag

SEQ ID NO: 5046052 - DNA, 25 bp, Homo sapien
caagttcgatttaaagcacagacac

SEQ ID NO: 5046053 - DNA, 25 bp, Homo sapien
tcaagttcgatttaaagcacagaca

SEQ ID NO: 5046054 - DNA, 25 bp, Homo sapien
ctgcatcaagttcgatttaaagcac

SEQ ID NO: 5046055 - DNA, 25 bp, Homo sapien
tcccgtcccgttcccaaggcttgca

SEQ ID NO: 5046056 - DNA, 25 bp, Homo sapien
tcccgttcccaaggcttgcagacat

SEQ ID NO: 5046057 - DNA, 25 bp, Homo sapien
cttaggttccctgcagtctggaacc

SEQ ID NO: 5046058 - DNA, 25 bp, Homo sapien
ccgtcccgttcccaaggcttgcaga

SEQ ID NO: 5046059 - DNA, 25 bp, Homo sapien
ctcagctttggcctgcctggagcca

SEQ ID NO: 5046060 - DNA, 25 bp, Homo sapien
gcctggagccattcctttccaagaa

SEQ ID NO: 5046061 - DNA, 25 bp, Homo sapien
ccttcctgttgtcttggctcagctt

SEQ ID NO: 5046062 - DNA, 25 bp, Homo sapien
agaaagagtccaccaagccaaatgt

SEQ ID NO: 5046063 - DNA, 25 bp, Homo sapien
gcaggctcgaacttcggcaaggagc

SEQ ID NO: 5046064 - DNA, 25 bp, Homo sapien
cagctccattggtgtagggcaggct

SEQ ID NO: 5046065 - DNA, 25 bp, Homo sapien
ctctcgtgcaccaacaacacagctc

SEQ ID NO: 5046066 - DNA, 25 bp, Homo sapien
ttggtgtagggcaggctcgaacttc

SEQ ID NO: 5046067 - DNA, 25 bp, Homo sapien
tcgagcccttcaacatcaatgataa

SEQ ID NO: 5046068 - DNA, 25 bp, Homo sapien
gagccatgtctcatccaactcgagc

SEQ ID NO: 5046069 - DNA, 25 bp, Homo sapien
caactcgagcccttcaacatcaatg

SEQ ID NO: 5046070 - DNA, 25 bp, Homo sapien
gtgtggagccatgtctcatccaact

SEQ ID NO: 5046071 - DNA, 25 bp, Homo sapien
ctggctctggcattaggccgaaagt

SEQ ID NO: 5046072 - DNA, 25 bp, Homo sapien
tggcattaggccgaaagttgaattc

SEQ ID NO: 5046073 - DNA, 25 bp, Homo sapien
taggccgaaagttgaattctggctg

SEQ ID NO: 5046074 - DNA, 25 bp, Homo sapien
gggttgatttccaccttccagagcc

SEQ ID NO: 5046075 - DNA, 25 bp, Homo sapien
cagggcccagctggatctctgtacc

SEQ ID NO: 5046076 - DNA, 25 bp, Homo sapien
gatctctgtaccttcggtgcacaca

SEQ ID NO: 5046077 - DNA, 25 bp, Homo sapien
ccagctggatctctgtaccttcggt

SEQ ID NO: 5046078 - DNA, 25 bp, Homo sapien
gtaccttcggtgcacacaagtccca

SEQ ID NO: 5046079 - DNA, 25 bp, Homo sapien
atagcagcaaagacgaccagcggtc

SEQ ID NO: 5046080 - DNA, 25 bp, Homo sapien
ctcaacaaggggtggatcattcatc

SEQ ID NO: 5046081 - DNA, 25 bp, Homo sapien
agtatagcagcaaagacgaccagcg

SEQ ID NO: 5046082 - DNA, 25 bp, Homo sapien
caacaaggggtggatcattcatccc

SEQ ID NO: 5046083 - DNA, 25 bp, Homo sapien
acaaccctgtagcgtcagggctagg

SEQ ID NO: 5046084 - DNA, 25 bp, Homo sapien
cacaaccctgtagcgtcagggctag

SEQ ID NO: 5046085 - DNA, 25 bp, Homo sapien
tcacaaccctgtagcgtcagggcta

SEQ ID NO: 5046086 - DNA, 25 bp, Homo sapien
gataccagcctggagctagagtggc

SEQ ID NO: 5046087 - DNA, 25 bp, Homo sapien
taggagaagccagtttcttatcctg

SEQ ID NO: 5046088 - DNA, 25 bp, Homo sapien
gtttcttatcctgcaacttggaaaa

SEQ ID NO: 5046089 - DNA, 25 bp, Homo sapien
aaagaatctgacctacggacagttc

SEQ ID NO: 5046090 - DNA, 25 bp, Homo sapien
tcagctgcgaggctttacgtcttcc

SEQ ID NO: 5046091 - DNA, 25 bp, Homo sapien
ccacggcaacctatcagctgcgagg

SEQ ID NO: 5046092 - DNA, 25 bp, Homo sapien
gcaacctatcagctgcgaggcttta

SEQ ID NO: 5046093 - DNA, 25 bp, Homo sapien
tgcgaggctttacgtcttcccctgg

SEQ ID NO: 5046094 - DNA, 25 bp, Homo sapien
tctctctcaaattggcactggcttt

SEQ ID NO: 5046095 - DNA, 25 bp, Homo sapien
tttcatagggatggccatgcagtcc

SEQ ID NO: 5046096 - DNA, 25 bp, Homo sapien
ccttgacacagtttgttccagcaaa

SEQ ID NO: 5046097 - DNA, 25 bp, Homo sapien
agggaggtagggaacatctgtccct

SEQ ID NO: 5046098 - DNA, 25 bp, Homo sapien
ctggggaggggaaatgccggcagcc

SEQ ID NO: 5046099 - DNA, 25 bp, Homo sapien
aaggaagcctctcttccagaccaca

SEQ ID NO: 5046100 - DNA, 25 bp, Homo sapien
gaaatgccggcagccccaaggaagc

SEQ ID NO: 5046101 - DNA, 25 bp, Homo sapien
ccaaggaagcctctcttccagacca

SEQ ID NO: 5046102 - DNA, 25 bp, Homo sapien
cccgaagtgggactcggaatgtcag

SEQ ID NO: 5046103 - DNA, 25 bp, Homo sapien
agtgcagccaccagtaacaccaagg

SEQ ID NO: 5046104 - DNA, 25 bp, Homo sapien
cattcctgcagatgtcgtaagagac

SEQ ID NO: 5046105 - DNA, 25 bp, Homo sapien
aagtgggactcggaatgtcagtgca

SEQ ID NO: 5046106 - DNA, 25 bp, Homo sapien
gcagcagaccacagagcttcgtaca

SEQ ID NO: 5046107 - DNA, 25 bp, Homo sapien
gcagaccacagagcttcgtacattc

SEQ ID NO: 5046108 - DNA, 25 bp, Homo sapien
agaccacagagcttcgtacattcat

SEQ ID NO: 5046109 - DNA, 25 bp, Homo sapien
cacgcagcagaccacagagcttcgt

SEQ ID NO: 5046110 - DNA, 25 bp, Homo sapien
agaaggcagtgcgctgacagtggaa

SEQ ID NO: 5046111 - DNA, 25 bp, Homo sapien
agtgcgctgacagtggaaagctgtg

SEQ ID NO: 5046112 - DNA, 25 bp, Homo sapien
tgagaaggcagtgcgctgacagtgg

SEQ ID NO: 5046113 - DNA, 25 bp, Homo sapien
gtgagaaggcagtgcgctgacagtg

SEQ ID NO: 5046114 - DNA, 25 bp, Homo sapien
cttgggaggcctgccatgtacagca

SEQ ID NO: 5046115 - DNA, 25 bp, Homo sapien
ctggattatctgaccccagttgggt

SEQ ID NO: 5046116 - DNA, 25 bp, Homo sapien
tacaggagagtttgcaggacacagt

SEQ ID NO: 5046117 - DNA, 25 bp, Homo sapien
catgaggaggaatacaggcggcctt

SEQ ID NO: 5046118 - DNA, 25 bp, Homo sapien
gatcgatgagcacatccacacgatg

SEQ ID NO: 5046119 - DNA, 25 bp, Homo sapien
ccacacgatgccctggagtatcaat

SEQ ID NO: 5046120 - DNA, 25 bp, Homo sapien
ttgccctgcagcgtatcgatcgatg

SEQ ID NO: 5046121 - DNA, 25 bp, Homo sapien
cctggagtatcaataagcacatgca

SEQ ID NO: 5046122 - DNA, 25 bp, Homo sapien
gagtactcgccctgcagtgtattga

SEQ ID NO: 5046123 - DNA, 25 bp, Homo sapien
gccctgcagtgtatccatgagcaca

SEQ ID NO: 5046124 - DNA, 25 bp, Homo sapien
cctgcagagtatcgatgagcacatg

SEQ ID NO: 5046125 - DNA, 25 bp, Homo sapien
cagagtatcgatgagcacatgcaca

SEQ ID NO: 5046126 - DNA, 25 bp, Homo sapien
ctgcagagtatcgatcagcacatgc

SEQ ID NO: 5046127 - DNA, 25 bp, Homo sapien
cagagtatcgatcagcacatgcaca

SEQ ID NO: 5046128 - DNA, 25 bp, Homo sapien
agagtatcgatcagcacatgcacac

SEQ ID NO: 5046129 - DNA, 25 bp, Homo sapien
gcagagtatcgatcagcacatgcac

SEQ ID NO: 5046130 - DNA, 25 bp, Homo sapien
tatcgatcagcacatgcacacgacg

SEQ ID NO: 5046131 - DNA, 25 bp, Homo sapien
tatcgatgagcacatgcacacgacg

SEQ ID NO: 5046132 - DNA, 25 bp, Homo sapien
cagtacttgccgtgcagagtatcga

SEQ ID NO: 5046133 - DNA, 25 bp, Homo sapien
cagagtatcgatgagcacatgcaca

SEQ ID NO: 5046134 - DNA, 25 bp, Homo sapien
tgcggagtatcaacaagcacatgca

SEQ ID NO: 5046135 - DNA, 25 bp, Homo sapien
tgcacacaacaccctggagtactca

SEQ ID NO: 5046136 - DNA, 25 bp, Homo sapien
agagtatcgatgagcacatgcacac

SEQ ID NO: 5046137 - DNA, 25 bp, Homo sapien
tgcagagtatcgatgagcacatgca

SEQ ID NO: 5046138 - DNA, 25 bp, Homo sapien
gcacacaacaccctggagtactcac

SEQ ID NO: 5046139 - DNA, 25 bp, Homo sapien
cagagtatcgatgagcacatgcaca

SEQ ID NO: 5046140 - DNA, 25 bp, Homo sapien
tatcgatcagcacatgcacacgacg

SEQ ID NO: 5046141 - DNA, 25 bp, Homo sapien
tatcgatgagcacatgcacacgacg

SEQ ID NO: 5046142 - DNA, 25 bp, Homo sapien
cagcgtatcgatgagcacatgcaca

SEQ ID NO: 5046143 - DNA, 25 bp, Homo sapien
tatcgatcagcacatgcacacgacg

SEQ ID NO: 5046144 - DNA, 25 bp, Homo sapien
cagagtatcgatgagcacatgcaca

SEQ ID NO: 5046145 - DNA, 25 bp, Homo sapien
cagcgtatcgatgagcacatgcaca

SEQ ID NO: 5046146 - DNA, 25 bp, Homo sapien
tggagtatcgatgagcacatgcaca

SEQ ID NO: 5046147 - DNA, 25 bp, Homo sapien
ccctgcagcgtatcgatcagcacat

SEQ ID NO: 5046148 - DNA, 25 bp, Homo sapien
gccctgcagtgtatccatgagcaca

SEQ ID NO: 5046149 - DNA, 25 bp, Homo sapien
tatcgatcagcacatgcacacgacg

SEQ ID NO: 5046150 - DNA, 25 bp, Homo sapien
tatcgatgagcacatgcacacgacg

SEQ ID NO: 5046151 - DNA, 25 bp, Homo sapien
gtaccagccctgcagcgtatcgatg

SEQ ID NO: 5046152 - DNA, 25 bp, Homo sapien
tatcgatgagcacatgcacgcgacg

SEQ ID NO: 5046153 - DNA, 25 bp, Homo sapien
cagcgtatcgatgagcacatgcaca

SEQ ID NO: 5046154 - DNA, 25 bp, Homo sapien
cgtatcgatgagcacatgcacgcga

SEQ ID NO: 5046155 - DNA, 25 bp, Homo sapien
ctgcagcgtatcaatgagcacatgc

SEQ ID NO: 5046156 - DNA, 25 bp, Homo sapien
gcagcgtatcaatgagcacatgcac

SEQ ID NO: 5046157 - DNA, 25 bp, Homo sapien
agcgtatcaatgagcacatgcacac

SEQ ID NO: 5046158 - DNA, 25 bp, Homo sapien
cagcgtatcaatgagcacatgcaca

SEQ ID NO: 5046159 - DNA, 25 bp, Homo sapien
tatcgatgagcacatgcacacgacg

SEQ ID NO: 5046160 - DNA, 25 bp, Homo sapien
tctccctgcagcgtatcgatgagca

SEQ ID NO: 5046161 - DNA, 25 bp, Homo sapien
cctgcagcgtatcgatgagcacatg

SEQ ID NO: 5046162 - DNA, 25 bp, Homo sapien
cagcgtatcgatgagcacatgcaca

SEQ ID NO: 5046163 - DNA, 25 bp, Homo sapien
ggagtatcgatgagcacgtgcacac

SEQ ID NO: 5046164 - DNA, 25 bp, Homo sapien
acgtgcacacaacaccctggagtac

SEQ ID NO: 5046165 - DNA, 25 bp, Homo sapien
gtgcacacaacaccctggagtactc

SEQ ID NO: 5046166 - DNA, 25 bp, Homo sapien
ctgcggagtatcgatgagcacgtgc

SEQ ID NO: 5046167 - DNA, 25 bp, Homo sapien
gcagtgtattgatcagtacatacac

SEQ ID NO: 5046168 - DNA, 25 bp, Homo sapien
gtgtattgatcagtacatacacaca

SEQ ID NO: 5046169 - DNA, 25 bp, Homo sapien
cagtgtattgatcagtacatacaca

SEQ ID NO: 5046170 - DNA, 25 bp, Homo sapien
agtgtattgatcagtacatacacac

SEQ ID NO: 5046171 - DNA, 25 bp, Homo sapien
cacacaacaccctggagtacttggt

SEQ ID NO: 5046172 - DNA, 25 bp, Homo sapien
gacatgcaggtaacaccctggagta

SEQ ID NO: 5046173 - DNA, 25 bp, Homo sapien
caggtaacaccctggagtacttgcc

SEQ ID NO: 5046174 - DNA, 25 bp, Homo sapien
aggacatgcaggtaacaccctggag

SEQ ID NO: 5046175 - DNA, 25 bp, Homo sapien
cagagtatcaatgaggacatgcagg

SEQ ID NO: 5046176 - DNA, 25 bp, Homo sapien
tgtgcagtatttatcagcacatgca

SEQ ID NO: 5046177 - DNA, 25 bp, Homo sapien
cagtatttatcagcacatgcacaca

SEQ ID NO: 5046178 - DNA, 25 bp, Homo sapien
catgtgcagtatttatcagcacatg

SEQ ID NO: 5046179 - DNA, 25 bp, Homo sapien
tgcagtatttatcagcacatgcaca

SEQ ID NO: 5046180 - DNA, 25 bp, Homo sapien
ggtggagtgagctcgcccaccagcc

SEQ ID NO: 5046181 - DNA, 25 bp, Homo sapien
gaggaccagcgggaacgaagggcca

SEQ ID NO: 5046182 - DNA, 25 bp, Homo sapien
gggtggagtgagctcgcccaccagc

SEQ ID NO: 5046183 - DNA, 25 bp, Homo sapien
cagcgggaacgaagggccaggggtg

SEQ ID NO: 5046184 - DNA, 25 bp, Homo sapien
gcttgatcctggacaacttggagga

SEQ ID NO: 5046185 - DNA, 25 bp, Homo sapien
tgtttcccctgggtcgtgctctcgc

SEQ ID NO: 5046186 - DNA, 25 bp, Homo sapien
tgtgtctgccatatccttcatctgc

SEQ ID NO: 5046187 - DNA, 25 bp, Homo sapien
cgctggcctccagatctctgtgtct

SEQ ID NO: 5046188 - DNA, 25 bp, Homo sapien
aatctgggtcgaaattcacatccca

SEQ ID NO: 5046189 - DNA, 25 bp, Homo sapien
acaggaaaatctgggtcgaaattca

SEQ ID NO: 5046190 - DNA, 25 bp, Homo sapien
aggaggcaacccctgcaaggccagg

SEQ ID NO: 5046191 - DNA, 25 bp, Homo sapien
gaggcaacccctgcaaggccaggac

SEQ ID NO: 5046192 - DNA, 25 bp, Homo sapien
ggttgagtggatctattggagtgtg

SEQ ID NO: 5046193 - DNA, 25 bp, Homo sapien
gtggatctattggagtgtgaggggt

SEQ ID NO: 5046194 - DNA, 25 bp, Homo sapien
agtggatctattggagtgtgagggg

SEQ ID NO: 5046195 - DNA, 25 bp, Homo sapien
gggggttgagtggatctattggagt

SEQ ID NO: 5046196 - DNA, 25 bp, Homo sapien
tggatttggaatcaaatggtctttt

SEQ ID NO: 5046197 - DNA, 25 bp, Homo sapien
tattcccactgtgggtagactgatg

SEQ ID NO: 5046198 - DNA, 25 bp, Homo sapien
gaatcctggatttcatccaagggca

SEQ ID NO: 5046199 - DNA, 25 bp, Homo sapien
taaaagtattcccactgtgggtaga

SEQ ID NO: 5046200 - DNA, 25 bp, Homo sapien
cttggaccagccctgggtctcttgt

SEQ ID NO: 5046201 - DNA, 25 bp, Homo sapien
tagccaccctggcacctcgcctctg

SEQ ID NO: 5046202 - DNA, 25 bp, Homo sapien
tgcaatgacttctgctcacacttgg

SEQ ID NO: 5046203 - DNA, 25 bp, Homo sapien
tcacacttggccacgtggccctgga

SEQ ID NO: 5046204 - DNA, 25 bp, Homo sapien
tccttagaatgggaggcgaacagtg

SEQ ID NO: 5046205 - DNA, 25 bp, Homo sapien
tctcaccagactgcatagcggttgc

SEQ ID NO: 5046206 - DNA, 25 bp, Homo sapien
tctatgtgatggctgtctccctctc

SEQ ID NO: 5046207 - DNA, 25 bp, Homo sapien
tgcagatgaacatttggcacctaga

SEQ ID NO: 5046208 - DNA, 25 bp, Homo sapien
gatgctgagggggactgggagtctc

SEQ ID NO: 5046209 - DNA, 25 bp, Homo sapien
ggggactgggagtctctgtttgaat

SEQ ID NO: 5046210 - DNA, 25 bp, Homo sapien
gggctgtgattcagggaagatgctg

SEQ ID NO: 5046211 - DNA, 25 bp, Homo sapien
gctggggctgtgattcagggaagat

SEQ ID NO: 5046212 - DNA, 25 bp, Homo sapien
cctgtggtattgctggtgatgctga

SEQ ID NO: 5046213 - DNA, 25 bp, Homo sapien
cccaagttggactaggagagtccta

SEQ ID NO: 5046214 - DNA, 25 bp, Homo sapien
aaaggagagcaccattctgcgggta

SEQ ID NO: 5046215 - DNA, 25 bp, Homo sapien
agagtcctatcaggctgctgggcag

SEQ ID NO: 5046216 - DNA, 25 bp, Homo sapien
acgtagacgatgaactccgaggcct

SEQ ID NO: 5046217 - DNA, 25 bp, Homo sapien
tggaccgtctcctggatcatgaccg

SEQ ID NO: 5046218 - DNA, 25 bp, Homo sapien
tgcatggcctcctgcacgtagacga

SEQ ID NO: 5046219 - DNA, 25 bp, Homo sapien
tccacggacgcttgctggaccgtct

SEQ ID NO: 5046220 - DNA, 25 bp, Homo sapien
tcatggattctatggccaggccttt

SEQ ID NO: 5046221 - DNA, 25 bp, Homo sapien
gcaagaccaaatgccagctggtgct

SEQ ID NO: 5046222 - DNA, 25 bp, Homo sapien
gaagctccaagctgccagattccag

SEQ ID NO: 5046223 - DNA, 25 bp, Homo sapien
ggagagccttctgggtatccgtcag

SEQ ID NO: 5046224 - DNA, 25 bp, Homo sapien
gtattctagcatgtcaatcactcat

SEQ ID NO: 5046225 - DNA, 25 bp, Homo sapien
ctttcactctacagaacttttgtca

SEQ ID NO: 5046226 - DNA, 25 bp, Homo sapien
ttaccagctaccagtagactgcaag

SEQ ID NO: 5046227 - DNA, 25 bp, Homo sapien
agcatgtcaatcactcattctttca

SEQ ID NO: 5046228 - DNA, 25 bp, Homo sapien
taaacgatgtgttagtaactctgca

SEQ ID NO: 5046229 - DNA, 25 bp, Homo sapien
caagttctcagaaccagccaggagg

SEQ ID NO: 5046230 - DNA, 25 bp, Homo sapien
cagcgtgcctgacctgaaggtaaac

SEQ ID NO: 5046231 - DNA, 25 bp, Homo sapien
cacttcttggaaggtggcattggcc

SEQ ID NO: 5046232 - DNA, 25 bp, Homo sapien
gactagatggctcaactggtctcca

SEQ ID NO: 5046233 - DNA, 25 bp, Homo sapien
tcctgggtccatcgggctgagactc

SEQ ID NO: 5046234 - DNA, 25 bp, Homo sapien
gctgagactccacgtgctacggcaa

SEQ ID NO: 5046235 - DNA, 25 bp, Homo sapien
tcctaggaagagctgccctgctgtt

SEQ ID NO: 5046236 - DNA, 25 bp, Homo sapien
tccactaccggccaacacagctgca

SEQ ID NO: 5046237 - DNA, 25 bp, Homo sapien
tctgcaacactgagactccactacc

SEQ ID NO: 5046238 - DNA, 25 bp, Homo sapien
cctgtttcctaagccccaggcactg

SEQ ID NO: 5046239 - DNA, 25 bp, Homo sapien
gctgccacctgcaacacggacttgt

SEQ ID NO: 5046240 - DNA, 25 bp, Homo sapien
cagcaggtgctcgataaagctgcgg

SEQ ID NO: 5046241 - DNA, 25 bp, Homo sapien
aggacactgtctcggtgcctgctgg

SEQ ID NO: 5046242 - DNA, 25 bp, Homo sapien
gatcgatccgctgccctttagtggg

SEQ ID NO: 5046243 - DNA, 25 bp, Homo sapien
ctttagtgggccatctcgaggacac

SEQ ID NO: 5046244 - DNA, 25 bp, Homo sapien
aatggaagcgaccagaagcagaaac

SEQ ID NO: 5046245 - DNA, 25 bp, Homo sapien
ctaaatggaagcgaccagaagcaga

SEQ ID NO: 5046246 - DNA, 25 bp, Homo sapien
ctgctaaatggaagcgaccagaagc

SEQ ID NO: 5046247 - DNA, 25 bp, Homo sapien
taaatggaagcgaccagaagcagaa

SEQ ID NO: 5046248 - DNA, 25 bp, Homo sapien
cttagaaacacagggagaaggagag

SEQ ID NO: 5046249 - DNA, 25 bp, Homo sapien
agaaacacagggagaaggagagaac

SEQ ID NO: 5046250 - DNA, 25 bp, Homo sapien
aaacacagggagaaggagagaacct

SEQ ID NO: 5046251 - DNA, 25 bp, Homo sapien
acacagggagaaggagagaacctga

SEQ ID NO: 5046252 - DNA, 25 bp, Homo sapien
ttaaccacagtcaccgtccctggtg

SEQ ID NO: 5046253 - DNA, 25 bp, Homo sapien
gcttaaccacagtcaccgtccctgg

SEQ ID NO: 5046254 - DNA, 25 bp, Homo sapien
gggtctcggcgcccagctcaatgat

SEQ ID NO: 5046255 - DNA, 25 bp, Homo sapien
gtggcgtcatgggtctcggcgccca

SEQ ID NO: 5046256 - DNA, 25 bp, Homo sapien
atgttcacggccgtggggtccagtc

SEQ ID NO: 5046257 - DNA, 25 bp, Homo sapien
ggatgttcacggccgtggggtccag

SEQ ID NO: 5046258 - DNA, 25 bp, Homo sapien
gcaggatgttcacggccgtggggtc

SEQ ID NO: 5046259 - DNA, 25 bp, Homo sapien
ctgcaggatgttcacggccgtgggg

SEQ ID NO: 5046260 - DNA, 25 bp, Homo sapien
ttatcaagccctagcattattgctc

SEQ ID NO: 5046261 - DNA, 25 bp, Homo sapien
tccatggactcccttaatgaccctt

SEQ ID NO: 5046262 - DNA, 25 bp, Homo sapien
tgaccctttatcaagccctagcatt

SEQ ID NO: 5046263 - DNA, 25 bp, Homo sapien
tgaggcgaggttctaattccgcatc

SEQ ID NO: 5046264 - DNA, 25 bp, Homo sapien
gactgtaagcaaatccttacagcac

SEQ ID NO: 5046265 - DNA, 25 bp, Homo sapien
aacctcctaagccagactgtaagca

SEQ ID NO: 5046266 - DNA, 25 bp, Homo sapien
agggctcacaacctcctaagccaga

SEQ ID NO: 5046267 - DNA, 25 bp, Homo sapien
taagccagactgtaagcaaatcctt

SEQ ID NO: 5046268 - DNA, 25 bp, Homo sapien
ctcccatgtcaggagtgcaattagg

SEQ ID NO: 5046269 - DNA, 25 bp, Homo sapien
tcccatgtcaggagtgcaattagga

SEQ ID NO: 5046270 - DNA, 25 bp, Homo sapien
tggagatactgggtggagggctcct

SEQ ID NO: 5046271 - DNA, 25 bp, Homo sapien
cagaggtgtatctcaggtcctggag

SEQ ID NO: 5046272 - DNA, 25 bp, Homo sapien
gtgtcccttgaacgtcttcttcggc

SEQ ID NO: 5046273 - DNA, 25 bp, Homo sapien
gaacgtcttcttcggcctctgtgat

SEQ ID NO: 5046274 - DNA, 25 bp, Homo sapien
cagctgacggtggaaggggtagggt

SEQ ID NO: 5046275 - DNA, 25 bp, Homo sapien
ccatggggcagctgacggtggaagg

SEQ ID NO: 5046276 - DNA, 25 bp, Homo sapien
gggtagggtgggtgattacacagag

SEQ ID NO: 5046277 - DNA, 25 bp, Homo sapien
gtagggtgggtgattacacagagga

SEQ ID NO: 5046278 - DNA, 25 bp, Homo sapien
tgaaacactaggtgactaattgttt

SEQ ID NO: 5046279 - DNA, 25 bp, Homo sapien
catcaacatccgcaataatcatagc

SEQ ID NO: 5046280 - DNA, 25 bp, Homo sapien
gactaattgtttttgcatagatgaa

SEQ ID NO: 5046281 - DNA, 25 bp, Homo sapien
tcaacatccgcaataatcatagcag

SEQ ID NO: 5046282 - DNA, 25 bp, Homo sapien
aagtgcctattgaactcccatttgg

SEQ ID NO: 5046283 - DNA, 25 bp, Homo sapien
catttggtgccatatacaaagctgc

SEQ ID NO: 5046284 - DNA, 25 bp, Homo sapien
gctgcaaacaggacacttcaaacca

SEQ ID NO: 5046285 - DNA, 25 bp, Homo sapien
tgtttgttcttcaagtgcctattga

SEQ ID NO: 5046286 - DNA, 25 bp, Homo sapien
aacatccccaacaccacagctgtct

SEQ ID NO: 5046287 - DNA, 25 bp, Homo sapien
caacatccccaacaccacagctgtc

SEQ ID NO: 5046288 - DNA, 25 bp, Homo sapien
acatccccaacaccacagctgtctg

SEQ ID NO: 5046289 - DNA, 25 bp, Homo sapien
cccaacaccacagctgtctggaact

SEQ ID NO: 5046290 - DNA, 25 bp, Homo sapien
tctcctctatgccagtgcttccgca

SEQ ID NO: 5046291 - DNA, 25 bp, Homo sapien
attccagcaggtcattccctagtcg

SEQ ID NO: 5046292 - DNA, 25 bp, Homo sapien
gtcattccctagtcgcaaactctgg

SEQ ID NO: 5046293 - DNA, 25 bp, Homo sapien
tagtcgcaaactctggcttcccatc

SEQ ID NO: 5046294 - DNA, 25 bp, Homo sapien
cattttctctcagcctacccctaac

SEQ ID NO: 5046295 - DNA, 25 bp, Homo sapien
ctcagcctacccctaactatgctcc

SEQ ID NO: 5046296 - DNA, 25 bp, Homo sapien
tctctcagcctacccctaactatgc

SEQ ID NO: 5046297 - DNA, 25 bp, Homo sapien
ttttctctcagcctacccctaacta

SEQ ID NO: 5046298 - DNA, 25 bp, Homo sapien
cttttattggcaaagccctccacgt

SEQ ID NO: 5046299 - DNA, 25 bp, Homo sapien
ttttattggcaaagccctccacgtc

SEQ ID NO: 5046300 - DNA, 25 bp, Homo sapien
gccctccacgtcctcagctacttct

SEQ ID NO: 5046301 - DNA, 25 bp, Homo sapien
acttttattggcaaagccctccacg

SEQ ID NO: 5046302 - DNA, 25 bp, Homo sapien
gcactgatcctcagccctgttagac

SEQ ID NO: 5046303 - DNA, 25 bp, Homo sapien
gactcaatgcccctttctacaacaa

SEQ ID NO: 5046304 - DNA, 25 bp, Homo sapien
caagttttgaaaccctgcatgggtg

SEQ ID NO: 5046305 - DNA, 25 bp, Homo sapien
ttgtgggtgagagttcccctccgcc

SEQ ID NO: 5046306 - DNA, 25 bp, Homo sapien
tgtcgcctaggctcggtatccagac

SEQ ID NO: 5046307 - DNA, 25 bp, Homo sapien
taggctcggtatccagacattcttc

SEQ ID NO: 5046308 - DNA, 25 bp, Homo sapien
tactctgtcccgtgtcgcctaggct

SEQ ID NO: 5046309 - DNA, 25 bp, Homo sapien
gtcccgtgtcgcctaggctcggtat

SEQ ID NO: 5046310 - DNA, 25 bp, Homo sapien
cttcagaaaggccttcctgggactc

SEQ ID NO: 5046311 - DNA, 25 bp, Homo sapien
tcatctttaagcaccacctcttcag

SEQ ID NO: 5046312 - DNA, 25 bp, Homo sapien
cttctcctcatctttaagcaccacc

SEQ ID NO: 5046313 - DNA, 25 bp, Homo sapien
tctttaagcaccacctcttcagaaa

SEQ ID NO: 5046314 - DNA, 25 bp, Homo sapien
ccttggtgccggtctatcttcccct

SEQ ID NO: 5046315 - DNA, 25 bp, Homo sapien
tgttcagtgttatccgagggcctgc

SEQ ID NO: 5046316 - DNA, 25 bp, Homo sapien
tagaaagaggtgctgttagtgatgc

SEQ ID NO: 5046317 - DNA, 25 bp, Homo sapien
ttatccgagggcctgccttggtgcc

SEQ ID NO: 5046318 - DNA, 25 bp, Homo sapien
agtcctaaagcctcacaaacagtcc

SEQ ID NO: 5046319 - DNA, 25 bp, Homo sapien
ctcatcctctgtgtggagtcctaaa

SEQ ID NO: 5046320 - DNA, 25 bp, Homo sapien
aactcaaatccctgtacagccttct

SEQ ID NO: 5046321 - DNA, 25 bp, Homo sapien
tatgcaggtccagtgatgtcccaaa

SEQ ID NO: 5046322 - DNA, 25 bp, Homo sapien
cagattggagccagagaccttccca

SEQ ID NO: 5046323 - DNA, 25 bp, Homo sapien
gaaaacgaaggcacatgctcgccgt

SEQ ID NO: 5046324 - DNA, 25 bp, Homo sapien
catttcatggctattacagcgagcg

SEQ ID NO: 5046325 - DNA, 25 bp, Homo sapien
tctatttccgtgcatcagccctgtc

SEQ ID NO: 5046326 - DNA, 25 bp, Homo sapien
tgaagaatgaacatcactggcacat

SEQ ID NO: 5046327 - DNA, 25 bp, Homo sapien
ttatgtagcagaactgaactgcagg

SEQ ID NO: 5046328 - DNA, 25 bp, Homo sapien
tatgtagcagaactgaactgcagga

SEQ ID NO: 5046329 - DNA, 25 bp, Homo sapien
aactgcaggatgtcagcagctcttc

SEQ ID NO: 5046330 - DNA, 25 bp, Homo sapien
gcagctcttcccaatgggggacttg

SEQ ID NO: 5046331 - DNA, 25 bp, Homo sapien
cccagctcgctggcccctcgcctac

SEQ ID NO: 5046332 - DNA, 25 bp, Homo sapien
agtaatggcaatgggcacagcggaa

SEQ ID NO: 5046333 - DNA, 25 bp, Homo sapien
tactcctcattagggtgcttcctgt

SEQ ID NO: 5046334 - DNA, 25 bp, Homo sapien
cttgctggatgagcacctccgctgc

SEQ ID NO: 5046335 - DNA, 25 bp, Homo sapien
tgcttcctgttgtagtgccgcttca

SEQ ID NO: 5046336 - DNA, 25 bp, Homo sapien
gagatgagcaggccccatcacctgt

SEQ ID NO: 5046337 - DNA, 25 bp, Homo sapien
ctgagatgagcaggccccatcacct

SEQ ID NO: 5046338 - DNA, 25 bp, Homo sapien
cctgagatgagcaggccccatcacc

SEQ ID NO: 5046339 - DNA, 25 bp, Homo sapien
agatgagcaggccccatcacctgtg

SEQ ID NO: 5046340 - DNA, 25 bp, Homo sapien
tccactgtccaattcatcaatcttt

SEQ ID NO: 5046341 - DNA, 25 bp, Homo sapien
agagctaaaccagcaactgcaatgt

SEQ ID NO: 5046342 - DNA, 25 bp, Homo sapien
tctattaagacctcaaacactacct

SEQ ID NO: 5046343 - DNA, 25 bp, Homo sapien
ttcaccactgttgcccagaagagct

SEQ ID NO: 5046344 - DNA, 25 bp, Homo sapien
tgtcctctcatctttgaagcttaga

SEQ ID NO: 5046345 - DNA, 25 bp, Homo sapien
gaaaatgtcctctcatctttgaagc

SEQ ID NO: 5046346 - DNA, 25 bp, Homo sapien
gagagaaaatgtcctctcatctttg

SEQ ID NO: 5046347 - DNA, 25 bp, Homo sapien
catctttgaagcttagatcagctcc

SEQ ID NO: 5046348 - DNA, 25 bp, Homo sapien
tgcaagagcagttcccccttctccc

SEQ ID NO: 5046349 - DNA, 25 bp, Homo sapien
tgctgcaagagcagttcccccttct

SEQ ID NO: 5046350 - DNA, 25 bp, Homo sapien
cgcctgctgcaagagcagttccccc

SEQ ID NO: 5046351 - DNA, 25 bp, Homo sapien
gcctgctgcaagagcagttccccct

SEQ ID NO: 5046352 - DNA, 25 bp, Homo sapien
tcttgatagctaaacatacagctgc

SEQ ID NO: 5046353 - DNA, 25 bp, Homo sapien
tctgccccttggttcagtagtttcc

SEQ ID NO: 5046354 - DNA, 25 bp, Homo sapien
gctaactttacactccatcagcatt

SEQ ID NO: 5046355 - DNA, 25 bp, Homo sapien
tttgattgaagattttgctcgagtc

SEQ ID NO: 5046356 - DNA, 25 bp, Homo sapien
tcagggacagaggagtgatctgagc

SEQ ID NO: 5046357 - DNA, 25 bp, Homo sapien
gagctatttgtcaaacagcagagag

SEQ ID NO: 5046358 - DNA, 25 bp, Homo sapien
cagagagggttattctgtttcagaa

SEQ ID NO: 5046359 - DNA, 25 bp, Homo sapien
gacagaggagtgatctgagctattt

SEQ ID NO: 5046360 - DNA, 25 bp, Homo sapien
cctttttgtggacttgcacattcac

SEQ ID NO: 5046361 - DNA, 25 bp, Homo sapien
tccctttttgtggacttgcacattc

SEQ ID NO: 5046362 - DNA, 25 bp, Homo sapien
ccctttttgtggacttgcacattca

SEQ ID NO: 5046363 - DNA, 25 bp, Homo sapien
gaattccctttttgtggacttgcac

SEQ ID NO: 5046364 - DNA, 25 bp, Homo sapien
ggagcttcacagaggaatgagccaa

SEQ ID NO: 5046365 - DNA, 25 bp, Homo sapien
gaatgagccaaagggcaaacttcct

SEQ ID NO: 5046366 - DNA, 25 bp, Homo sapien
tggtgcacttggagcttcacagagg

SEQ ID NO: 5046367 - DNA, 25 bp, Homo sapien
agctcttggtgcacttggagcttca

SEQ ID NO: 5046368 - DNA, 25 bp, Homo sapien
gaaagcatacgcagcaggtccagca

SEQ ID NO: 5046369 - DNA, 25 bp, Homo sapien
tttgaaagcatacgcagcaggtcca

SEQ ID NO: 5046370 - DNA, 25 bp, Homo sapien
cactttttgaaagcatacgcagcag

SEQ ID NO: 5046371 - DNA, 25 bp, Homo sapien
ctgtgcgatgcaaaaaatgggtgag

SEQ ID NO: 5046372 - DNA, 25 bp, Homo sapien
agccttcctctaaatcactccagtg

SEQ ID NO: 5046373 - DNA, 25 bp, Homo sapien
tatgcaaagatcgtgccttttcttc

SEQ ID NO: 5046374 - DNA, 25 bp, Homo sapien
atctgaaagcaaaaatacgtgtccc

SEQ ID NO: 5046375 - DNA, 25 bp, Homo sapien
cgtgtccctaaagcctgcaagcctt

SEQ ID NO: 5046376 - DNA, 25 bp, Homo sapien
gacatgctgttccatgtgccgcagc

SEQ ID NO: 5046377 - DNA, 25 bp, Homo sapien
tgggccgctgtgtagtcacacaccg

SEQ ID NO: 5046378 - DNA, 25 bp, Homo sapien
gagacatgctgttccatgtgccgca

SEQ ID NO: 5046379 - DNA, 25 bp, Homo sapien
cacacaccgtgcacttaaactgctt

SEQ ID NO: 5046380 - DNA, 25 bp, Homo sapien
agctcccactgtgaatgaagtgcca

SEQ ID NO: 5046381 - DNA, 25 bp, Homo sapien
ctcccactgtgaatgaagtgccagg

SEQ ID NO: 5046382 - DNA, 25 bp, Homo sapien
atgagcgtcgccaggccaacagctc

SEQ ID NO: 5046383 - DNA, 25 bp, Homo sapien
agcggaggacaagatgagcgtcgcc

SEQ ID NO: 5046384 - DNA, 25 bp, Homo sapien
tcctggagtgtgaggtctgcagaaa

SEQ ID NO: 5046385 - DNA, 25 bp, Homo sapien
tgctggcccagaatatcaagggtct

SEQ ID NO: 5046386 - DNA, 25 bp, Homo sapien
tctgcagaaattcaagagctgagcc

SEQ ID NO: 5046387 - DNA, 25 bp, Homo sapien
aagggtctggaccatctcacaagga

SEQ ID NO: 5046388 - DNA, 25 bp, Homo sapien
agagttcgaacttcgcttcccgttg

SEQ ID NO: 5046389 - DNA, 25 bp, Homo sapien
ccgttgactctccacgttgaaggaa

SEQ ID NO: 5046390 - DNA, 25 bp, Homo sapien
tcgaacttcgcttcccgttgactct

SEQ ID NO: 5046391 - DNA, 25 bp, Homo sapien
caatgtggtaggtgggggagccagc

SEQ ID NO: 5046392 - DNA, 25 bp, Homo sapien
ggatatggaagcacaaaggcaccca

SEQ ID NO: 5046393 - DNA, 25 bp, Homo sapien
ctcaagcaggaagttattcccagct

SEQ ID NO: 5046394 - DNA, 25 bp, Homo sapien
gctggatatggaagcacaaaggcac

SEQ ID NO: 5046395 - DNA, 25 bp, Homo sapien
caagcaggaagttattcccagctgg

SEQ ID NO: 5046396 - DNA, 25 bp, Homo sapien
cactggcaccgacacacccagtaag

SEQ ID NO: 5046397 - DNA, 25 bp, Homo sapien
actggcaccgacacacccagtaagt

SEQ ID NO: 5046398 - DNA, 25 bp, Homo sapien
ccactggcaccgacacacccagtaa

SEQ ID NO: 5046399 - DNA, 25 bp, Homo sapien
gtgacgattcatatgagccttgagg

SEQ ID NO: 5046400 - DNA, 25 bp, Homo sapien
gaggttactcttgctacgagttgca

SEQ ID NO: 5046401 - DNA, 25 bp, Homo sapien
tgcagtgtgaaggagtttgtgactt

SEQ ID NO: 5046402 - DNA, 25 bp, Homo sapien
tgctacgagttgcatactcacacaa

SEQ ID NO: 5046403 - DNA, 25 bp, Homo sapien
cccttccaccttctgaattccttct

SEQ ID NO: 5046404 - DNA, 25 bp, Homo sapien
tctgcccttccaccttctgaattcc

SEQ ID NO: 5046405 - DNA, 25 bp, Homo sapien
tctctccattccctcatctccattc

SEQ ID NO: 5046406 - DNA, 25 bp, Homo sapien
cattccctcatctccattctgccct

SEQ ID NO: 5046407 - DNA, 25 bp, Homo sapien
gagacctatgaaggagtgcacacct

SEQ ID NO: 5046408 - DNA, 25 bp, Homo sapien
tctctcagtgtgctaaggaaattct

SEQ ID NO: 5046409 - DNA, 25 bp, Homo sapien
cagggatgtgaagatacggcttcct

SEQ ID NO: 5046410 - DNA, 25 bp, Homo sapien
cactacaattgcaatgagacctatg

SEQ ID NO: 5046411 - DNA, 25 bp, Homo sapien
cttcatgagcccaaatatgacgctg

SEQ ID NO: 5046412 - DNA, 25 bp, Homo sapien
taaaagtcacaatatgggcatttca

SEQ ID NO: 5046413 - DNA, 25 bp, Homo sapien
tgagcccaaatatgacgctgaaggt

SEQ ID NO: 5046414 - DNA, 25 bp, Homo sapien
aaatatgacgctgaaggtctgagcc

SEQ ID NO: 5046415 - DNA, 25 bp, Homo sapien
ttcagctgaaccctcctcccgagaa

SEQ ID NO: 5046416 - DNA, 25 bp, Homo sapien
ggctctctttccaattagccctttc

SEQ ID NO: 5046417 - DNA, 25 bp, Homo sapien
tctttccaattagccctttcagctg

SEQ ID NO: 5046418 - DNA, 25 bp, Homo sapien
tcctcccgagaacctcagaaatggt

SEQ ID NO: 5046419 - DNA, 25 bp, Homo sapien
taaataaacctcattgctaagcagc

SEQ ID NO: 5046420 - DNA, 25 bp, Homo sapien
acaggaggaatcaaggtgtgcctca

SEQ ID NO: 5046421 - DNA, 25 bp, Homo sapien
tgtcaaaaggagtcagagcacctca

SEQ ID NO: 5046422 - DNA, 25 bp, Homo sapien
cacctcaggggaagttagacataaa

SEQ ID NO: 5046423 - DNA, 25 bp, Homo sapien
acacaatacacttgtctgctttcct

SEQ ID NO: 5046424 - DNA, 25 bp, Homo sapien
cacacaatacacttgtctgctttcc

SEQ ID NO: 5046425 - DNA, 25 bp, Homo sapien
tttatcaatcgatcctctgaaaaag

SEQ ID NO: 5046426 - DNA, 25 bp, Homo sapien
ggatggttggtcttgatatgtgact

SEQ ID NO: 5046427 - DNA, 25 bp, Homo sapien
acaggacaagaataactccttttgt

SEQ ID NO: 5046428 - DNA, 25 bp, Homo sapien
aaagacttttcacaaacaggacaag

SEQ ID NO: 5046429 - DNA, 25 bp, Homo sapien
actggggcgcagataggttgttcat

SEQ ID NO: 5046430 - DNA, 25 bp, Homo sapien
ctcggtgtcccactggggcgcagat

SEQ ID NO: 5046431 - DNA, 25 bp, Homo sapien
cctcggtgtcccactggggcgcaga

SEQ ID NO: 5046432 - DNA, 25 bp, Homo sapien
ggcgcagataggttgttcatcctgc

SEQ ID NO: 5046433 - DNA, 25 bp, Homo sapien
aaaaataatttgcaggctcaaaaga

SEQ ID NO: 5046434 - DNA, 25 bp, Homo sapien
agtaaatacaaatagcttccccttg

SEQ ID NO: 5046435 - DNA, 25 bp, Homo sapien
cttggtacccttggcttcattacaa

SEQ ID NO: 5046436 - DNA, 25 bp, Homo sapien
tatgttggcaatatggtccacctgc

SEQ ID NO: 5046437 - DNA, 25 bp, Homo sapien
caaatgacatgcgatagccggtaca

SEQ ID NO: 5046438 - DNA, 25 bp, Homo sapien
gaaaatctcaatgcccgacacgtag

SEQ ID NO: 5046439 - DNA, 25 bp, Homo sapien
taaacacgtggtaaatagggagcca

SEQ ID NO: 5046440 - DNA, 25 bp, Homo sapien
ttaagactgcacaaggagctgaccc

SEQ ID NO: 5046441 - DNA, 25 bp, Homo sapien
cattgtgttacaagatcctccacca

SEQ ID NO: 5046442 - DNA, 25 bp, Homo sapien
tgttacaagatcctccaccaaagac

SEQ ID NO: 5046443 - DNA, 25 bp, Homo sapien
tcattcattgtgttacaagatcctc

SEQ ID NO: 5046444 - DNA, 25 bp, Homo sapien
gggccagatgtgcttcctttataac

SEQ ID NO: 5046445 - DNA, 25 bp, Homo sapien
ttttcaacgtattagagactcttgc

SEQ ID NO: 5046446 - DNA, 25 bp, Homo sapien
taaaataaacgtgcttcaaagacat

SEQ ID NO: 5046447 - DNA, 25 bp, Homo sapien
tctactatgctcttactctgaacca

SEQ ID NO: 5046448 - DNA, 25 bp, Homo sapien
aattcaacctctcaaccacgttcag

SEQ ID NO: 5046449 - DNA, 25 bp, Homo sapien
gggctgccgcttgggcttgctactt

SEQ ID NO: 5046450 - DNA, 25 bp, Homo sapien
ggagacggggctgccgcttgggctt

SEQ ID NO: 5046451 - DNA, 25 bp, Homo sapien
ttgagaaagcaatgagcacccaggg

SEQ ID NO: 5046452 - DNA, 25 bp, Homo sapien
cagcagagacacctacatataagca

SEQ ID NO: 5046453 - DNA, 25 bp, Homo sapien
gtgggtgcggacatgcatatcaaaa

SEQ ID NO: 5046454 - DNA, 25 bp, Homo sapien
agtagtcacagccatcggtgggaca

SEQ ID NO: 5046455 - DNA, 25 bp, Homo sapien
tactgtgtttctgaattacgtggcg

SEQ ID NO: 5046456 - DNA, 25 bp, Homo sapien
taatacagatgttcccgggtgtggg

SEQ ID NO: 5046457 - DNA, 25 bp, Homo sapien
gaccacagcatgatggttgtggaca

SEQ ID NO: 5046458 - DNA, 25 bp, Homo sapien
gacagggccacgcaccggcgctgcc

SEQ ID NO: 5046459 - DNA, 25 bp, Homo sapien
accacagcatgatggttgtggacag

SEQ ID NO: 5046460 - DNA, 25 bp, Homo sapien
ggtgaccacagcatgatggttgtgg

SEQ ID NO: 5046461 - DNA, 25 bp, Homo sapien
tcaggaccttcatgaaagcggtgat

SEQ ID NO: 5046462 - DNA, 25 bp, Homo sapien
ttccggatccgctcacacaagctgg

SEQ ID NO: 5046463 - DNA, 25 bp, Homo sapien
tcaggggcagctttgcaagagtcag

SEQ ID NO: 5046464 - DNA, 25 bp, Homo sapien
agcggtgatgcctgaccggtgctca

SEQ ID NO: 5046465 - DNA, 25 bp, Homo sapien
gaacgagcaatagtcgcaggcgaac

SEQ ID NO: 5046466 - DNA, 25 bp, Homo sapien
gacgaacttcttgcggcagacggca

SEQ ID NO: 5046467 - DNA, 25 bp, Homo sapien
tgaacttgcgctcacagatgtggca

SEQ ID NO: 5046468 - DNA, 25 bp, Homo sapien
tgtctccgtggaccagcatatggcg

SEQ ID NO: 5046469 - DNA, 25 bp, Homo sapien
cagatgacagcatggttacatctgg

SEQ ID NO: 5046470 - DNA, 25 bp, Homo sapien
ggagaccttgaatgttcctcatgaa

SEQ ID NO: 5046471 - DNA, 25 bp, Homo sapien
gaatgttcctcatgaactctacatc

SEQ ID NO: 5046472 - DNA, 25 bp, Homo sapien
catggttacatctggagaccttgaa

SEQ ID NO: 5046473 - DNA, 25 bp, Homo sapien
taggatagctgagaaaacttgagga

SEQ ID NO: 5046474 - DNA, 25 bp, Homo sapien
gtcagtaatagagctggcatgtggc

SEQ ID NO: 5046475 - DNA, 25 bp, Homo sapien
gcaggcagtaacaggaggctactgc

SEQ ID NO: 5046476 - DNA, 25 bp, Homo sapien
tactgctgacttgtaccacactgtt

SEQ ID NO: 5046477 - DNA, 25 bp, Homo sapien
gctctgtcagtaatagagctggcat

SEQ ID NO: 5046478 - DNA, 25 bp, Homo sapien
cgtattcctggtagcctctccgagg

SEQ ID NO: 5046479 - DNA, 25 bp, Homo sapien
tcattggttgctcataaggtgtctg

SEQ ID NO: 5046480 - DNA, 25 bp, Homo sapien
gctgaatggcgtattcctggtagcc

SEQ ID NO: 5046481 - DNA, 25 bp, Homo sapien
agaatttgtagctcctgtttcaggg

SEQ ID NO: 5046482 - DNA, 25 bp, Homo sapien
tgaggggacgaagaaaactaactgc

SEQ ID NO: 5046483 - DNA, 25 bp, Homo sapien
gcaggagcagcacggcggagctgtg

SEQ ID NO: 5046484 - DNA, 25 bp, Homo sapien
ctgtgggactacagcaagagcagcg

SEQ ID NO: 5046485 - DNA, 25 bp, Homo sapien
ggaaccactactccagcaggagcag

SEQ ID NO: 5046486 - DNA, 25 bp, Homo sapien
tggcacagacttgccaagggtcttg

SEQ ID NO: 5046487 - DNA, 25 bp, Homo sapien
ttcctttcccgcttggtgcagtcac

SEQ ID NO: 5046488 - DNA, 25 bp, Homo sapien
tctgtgttctgactcagactgtgac

SEQ ID NO: 5046489 - DNA, 25 bp, Homo sapien
tctgactcagactgtgacatcaggc

SEQ ID NO: 5046490 - DNA, 25 bp, Homo sapien
ttcgaggctttttcccgatcatctt

SEQ ID NO: 5046491 - DNA, 25 bp, Homo sapien
tgtgaccgtggtcttttcgaggctt

SEQ ID NO: 5046492 - DNA, 25 bp, Homo sapien
cttcgtgtgcagttaaaaccacact

SEQ ID NO: 5046493 - DNA, 25 bp, Homo sapien
cacacttatgatgggtttcttcgcc

SEQ ID NO: 5046494 - DNA, 25 bp, Homo sapien
tccttgtatcccatggcccaaacgt

SEQ ID NO: 5046495 - DNA, 25 bp, Homo sapien
tggcccaaacgtgactctggcagcg

SEQ ID NO: 5046496 - DNA, 25 bp, Homo sapien
tctggcagcggctaaggtggaacca

SEQ ID NO: 5046497 - DNA, 25 bp, Homo sapien
gcggctaaggtggaaccagtgctct

SEQ ID NO: 5046498 - DNA, 25 bp, Homo sapien
taggtctggtgtgtcgtagatgctc

SEQ ID NO: 5046499 - DNA, 25 bp, Homo sapien
tagatgctcaatacttcttcgtgga

SEQ ID NO: 5046500 - DNA, 25 bp, Homo sapien
tcaaagttgcgttttgtcccctgaa

SEQ ID NO: 5046501 - DNA, 25 bp, Homo sapien
tcttcgtggaaagcaaggagggtac

SEQ ID NO: 5046502 - DNA, 25 bp, Homo sapien
tctggtggttctagacagccatgag

SEQ ID NO: 5046503 - DNA, 25 bp, Homo sapien
catctggtggttctagacagccatg

SEQ ID NO: 5046504 - DNA, 25 bp, Homo sapien
ggtggttctagacagccatgagagc

SEQ ID NO: 5046505 - DNA, 25 bp, Homo sapien
tggtggttctagacagccatgagag

SEQ ID NO: 5046506 - DNA, 25 bp, Homo sapien
tgccgtaaaccacaggcttgattca

SEQ ID NO: 5046507 - DNA, 25 bp, Homo sapien
tgagctgccgtaaaccacaggcttg

SEQ ID NO: 5046508 - DNA, 25 bp, Homo sapien
cttgcacatgcacaaaagccctctg

SEQ ID NO: 5046509 - DNA, 25 bp, Homo sapien
tgcacatgcacaaaagccctctgag

SEQ ID NO: 5046510 - DNA, 25 bp, Homo sapien
gcttgggcccagctgtgctaaaggc

SEQ ID NO: 5046511 - DNA, 25 bp, Homo sapien
cccagctgtgctaaaggctgaggta

SEQ ID NO: 5046512 - DNA, 25 bp, Homo sapien
taaaggctgaggtagacgaagtaag

SEQ ID NO: 5046513 - DNA, 25 bp, Homo sapien
ctgtgctaaaggctgaggtagacga

SEQ ID NO: 5046514 - DNA, 25 bp, Homo sapien
ttagagagttgaccctaagggcagt

SEQ ID NO: 5046515 - DNA, 25 bp, Homo sapien
cagactggggaacggccacagaccc

SEQ ID NO: 5046516 - DNA, 25 bp, Homo sapien
ggccacagacccagctgaacttctg

SEQ ID NO: 5046517 - DNA, 25 bp, Homo sapien
tcaaacccagagcttgacctgaggt

SEQ ID NO: 5046518 - DNA, 25 bp, Homo sapien
cagcagaaaatgatcggagagaact

SEQ ID NO: 5046519 - DNA, 25 bp, Homo sapien
agaactagattctctgaagggctca

SEQ ID NO: 5046520 - DNA, 25 bp, Homo sapien
tcaggcagtgcagaaactacagaca

SEQ ID NO: 5046521 - DNA, 25 bp, Homo sapien
aagggattctcgagaagacagcaga

SEQ ID NO: 5046522 - DNA, 25 bp, Homo sapien
taatgcagatgtgcttccgcagctg

SEQ ID NO: 5046523 - DNA, 25 bp, Homo sapien
cccaaattcagcacgataatgcaga

SEQ ID NO: 5046524 - DNA, 25 bp, Homo sapien
tggagaacttccgacagcacttgct

SEQ ID NO: 5046525 - DNA, 25 bp, Homo sapien
tctgtgctggacttcttcgtggacc

SEQ ID NO: 5046526 - DNA, 25 bp, Homo sapien
gagccctgctttgggtggcaaaagc

SEQ ID NO: 5046527 - DNA, 25 bp, Homo sapien
gaaggatccccaggtcagatgagtt

SEQ ID NO: 5046528 - DNA, 25 bp, Homo sapien
aagtcaggggtcttatactcgtcag

SEQ ID NO: 5046529 - DNA, 25 bp, Homo sapien
aggagccctgctttgggtggcaaaa

SEQ ID NO: 5046530 - DNA, 25 bp, Homo sapien
tgaatggcactgtctctcactaatg

SEQ ID NO: 5046531 - DNA, 25 bp, Homo sapien
gagagggaggtgaatctccgggaag

SEQ ID NO: 5046532 - DNA, 25 bp, Homo sapien
tgcattcagttgctcctccgccagc

SEQ ID NO: 5046533 - DNA, 25 bp, Homo sapien
gctgtagatcagtgatgagagggag

SEQ ID NO: 5046534 - DNA, 25 bp, Homo sapien
ccgactgatttggtgagaagaggtt

SEQ ID NO: 5046535 - DNA, 25 bp, Homo sapien
taatctcatcaacattaaccccttc

SEQ ID NO: 5046536 - DNA, 25 bp, Homo sapien
taataatctcatcaacattaacccc

SEQ ID NO: 5046537 - DNA, 25 bp, Homo sapien
tgaaacgtgggagaggagttccgac

SEQ ID NO: 5046538 - DNA, 25 bp, Homo sapien
gtgtctctctggcagtcacctccat

SEQ ID NO: 5046539 - DNA, 25 bp, Homo sapien
cagattgtgtctctctggcagtcac

SEQ ID NO: 5046540 - DNA, 25 bp, Homo sapien
gattgtgtctctctggcagtcacct

SEQ ID NO: 5046541 - DNA, 25 bp, Homo sapien
attgtgtctctctggcagtcacctc

SEQ ID NO: 5046542 - DNA, 25 bp, Homo sapien
gagacacagatctgcagaggagtca

SEQ ID NO: 5046543 - DNA, 25 bp, Homo sapien
ggaaggagtacattggcccaagacg

SEQ ID NO: 5046544 - DNA, 25 bp, Homo sapien
tggaaacagcatctggctagccttg

SEQ ID NO: 5046545 - DNA, 25 bp, Homo sapien
caagacgggtgggactgacaccaaa

SEQ ID NO: 5046546 - DNA, 25 bp, Homo sapien
accactgctattcaacccagtgttg

SEQ ID NO: 5046547 - DNA, 25 bp, Homo sapien
ctcaccactgctattcaacccagtg

SEQ ID NO: 5046548 - DNA, 25 bp, Homo sapien
tcaccactgctattcaacccagtgt

SEQ ID NO: 5046549 - DNA, 25 bp, Homo sapien
cactgctattcaacccagtgttgga

SEQ ID NO: 5046550 - DNA, 25 bp, Homo sapien
ggcaaacagggtatggagcggacct

SEQ ID NO: 5046551 - DNA, 25 bp, Homo sapien
cgaagcttccagaggcaggaacagg

SEQ ID NO: 5046552 - DNA, 25 bp, Homo sapien
ggtatggagcggacctccagcaaac

SEQ ID NO: 5046553 - DNA, 25 bp, Homo sapien
ctttgttgttctgcagcctccactg

SEQ ID NO: 5046554 - DNA, 25 bp, Homo sapien
gagcacctggaagaggtttgtcaga

SEQ ID NO: 5046555 - DNA, 25 bp, Homo sapien
tcagaaaaggggaagttgaactgct

SEQ ID NO: 5046556 - DNA, 25 bp, Homo sapien
cacagaagcacgtgtggagaaggca

SEQ ID NO: 5046557 - DNA, 25 bp, Homo sapien
gagaaggcagagatccctgtggctg

SEQ ID NO: 5046558 - DNA, 25 bp, Homo sapien
tagcaggtccattcacacacatgtc

SEQ ID NO: 5046559 - DNA, 25 bp, Homo sapien
gcaggtccattcacacacatgtccc

SEQ ID NO: 5046560 - DNA, 25 bp, Homo sapien
gtagcaggtccattcacacacatgt

SEQ ID NO: 5046561 - DNA, 25 bp, Homo sapien
agcaggtccattcacacacatgtcc

SEQ ID NO: 5046562 - DNA, 25 bp, Homo sapien
gaagcgaaactcagtcctttcactg

SEQ ID NO: 5046563 - DNA, 25 bp, Homo sapien
tttcactgaaatacgctcacctcca

SEQ ID NO: 5046564 - DNA, 25 bp, Homo sapien
gggcaagtcccttcagggccatggc

SEQ ID NO: 5046565 - DNA, 25 bp, Homo sapien
ttctctgttcatgccccacaaacaa

SEQ ID NO: 5046566 - DNA, 25 bp, Homo sapien
cctccgccgcttcccacggagcatg

SEQ ID NO: 5046567 - DNA, 25 bp, Homo sapien
ccgcttcccacggagcatgcagagg

SEQ ID NO: 5046568 - DNA, 25 bp, Homo sapien
ttcccacggagcatgcagaggtgag

SEQ ID NO: 5046569 - DNA, 25 bp, Homo sapien
gcttcccacggagcatgcagaggtg

SEQ ID NO: 5046570 - DNA, 25 bp, Homo sapien
cctgctgacgcttcgctttttattt

SEQ ID NO: 5046571 - DNA, 25 bp, Homo sapien
tgctgacgcttcgctttttattttt

SEQ ID NO: 5046572 - DNA, 25 bp, Homo sapien
ccctgctgacgcttcgctttttatt

SEQ ID NO: 5046573 - DNA, 25 bp, Homo sapien
ggggcggggcgccctgctgacgctt

SEQ ID NO: 5046574 - DNA, 25 bp, Homo sapien
cgaatctgcggcatccaacatggcg

SEQ ID NO: 5046575 - DNA, 25 bp, Homo sapien
aacatggcggatggagtcttcgccc

SEQ ID NO: 5046576 - DNA, 25 bp, Homo sapien
gcagacgcctgcgtagcggacgtcc

SEQ ID NO: 5046577 - DNA, 25 bp, Homo sapien
ccggcagggccgagctaacgcgcat

SEQ ID NO: 5046578 - DNA, 25 bp, Homo sapien
ggaacataatttcacaggatgcttt

SEQ ID NO: 5046579 - DNA, 25 bp, Homo sapien
aatcagaggtgggaataatcagttt

SEQ ID NO: 5046580 - DNA, 25 bp, Homo sapien
gcgacctcaaaataatggatcttgg

SEQ ID NO: 5046581 - DNA, 25 bp, Homo sapien
tacatacaggcgacctcaaaataat

SEQ ID NO: 5046582 - DNA, 25 bp, Homo sapien
ggttgttgatctacaagttgagcca

SEQ ID NO: 5046583 - DNA, 25 bp, Homo sapien
tatcacaacaactgtagatctatgg

SEQ ID NO: 5046584 - DNA, 25 bp, Homo sapien
cagaatggcctgaaacatattgcta

SEQ ID NO: 5046585 - DNA, 25 bp, Homo sapien
gctgggttagtgctgaaaggacaaa

SEQ ID NO: 5046586 - DNA, 25 bp, Homo sapien
tgaggaacaacttgacgaacacaca

SEQ ID NO: 5046587 - DNA, 25 bp, Homo sapien
tgcatgaggaacaacttgacgaaca

SEQ ID NO: 5046588 - DNA, 25 bp, Homo sapien
aggaacaacttgacgaacacacatt

SEQ ID NO: 5046589 - DNA, 25 bp, Homo sapien
ctcctgcatgaggaacaacttgacg

SEQ ID NO: 5046590 - DNA, 25 bp, Homo sapien
tgtagggctctttccctaccagtcc

SEQ ID NO: 5046591 - DNA, 25 bp, Homo sapien
ttctttcatcaccaagtttcctcct

SEQ ID NO: 5046592 - DNA, 25 bp, Homo sapien
caagtttcctccttcctgtagggct

SEQ ID NO: 5046593 - DNA, 25 bp, Homo sapien
cacttcttctttcatcaccaagttt

SEQ ID NO: 5046594 - DNA, 25 bp, Homo sapien
agggaagcacgggaacccgcaggca

SEQ ID NO: 5046595 - DNA, 25 bp, Homo sapien
tatatctatgcacctcatcagggaa

SEQ ID NO: 5046596 - DNA, 25 bp, Homo sapien
gaacccgcaggcactgctagtagga

SEQ ID NO: 5046597 - DNA, 25 bp, Homo sapien
ttatatatctatgcacctcatcagg

SEQ ID NO: 5046598 - DNA, 25 bp, Homo sapien
ttttgtaccttgtcccgagagccat

SEQ ID NO: 5046599 - DNA, 25 bp, Homo sapien
cttcgtaagccctgaactttcgact

SEQ ID NO: 5046600 - DNA, 25 bp, Homo sapien
tctctttagcttggcaaatactccc

SEQ ID NO: 5046601 - DNA, 25 bp, Homo sapien
tactcccaagacaaaagtggttgca

SEQ ID NO: 5046602 - DNA, 25 bp, Homo sapien
taaagtcttccagatatcagtggac

SEQ ID NO: 5046603 - DNA, 25 bp, Homo sapien
gattactcaagatcctaatagcact

SEQ ID NO: 5046604 - DNA, 25 bp, Homo sapien
ctagaaatctaagctcagttgagag

SEQ ID NO: 5046605 - DNA, 25 bp, Homo sapien
cagttgagagtggttaacatcagga

SEQ ID NO: 5046606 - DNA, 25 bp, Homo sapien
gatactgcaaggtgcaatgccctca

SEQ ID NO: 5046607 - DNA, 25 bp, Homo sapien
gaaaggtgcaggtttcaacacgcca

SEQ ID NO: 5046608 - DNA, 25 bp, Homo sapien
aacaaaggccttgcatcaggcagga

SEQ ID NO: 5046609 - DNA, 25 bp, Homo sapien
tagcgctgtgatctcccaggagcaa

SEQ ID NO: 5046610 - DNA, 25 bp, Homo sapien
gtggctggccctctaatattcagtg

SEQ ID NO: 5046611 - DNA, 25 bp, Homo sapien
ggtaagtaccttccacgtctgtggc

SEQ ID NO: 5046612 - DNA, 25 bp, Homo sapien
tgaaatggtatctaactgtgctgac

SEQ ID NO: 5046613 - DNA, 25 bp, Homo sapien
cagacatgcaattgtcctagtgcca

SEQ ID NO: 5046614 - DNA, 25 bp, Homo sapien
ccaatacagctatctaattgactgt

SEQ ID NO: 5046615 - DNA, 25 bp, Homo sapien
gcatttaaaccatattccacatgga

SEQ ID NO: 5046616 - DNA, 25 bp, Homo sapien
tgccaggcgagtgataacctctacc

SEQ ID NO: 5046617 - DNA, 25 bp, Homo sapien
agttgcctaccccaaaacatgaaga

SEQ ID NO: 5046618 - DNA, 25 bp, Homo sapien
taatcacaggtcttatgtctgttgg

SEQ ID NO: 5046619 - DNA, 25 bp, Homo sapien
tgcttcagctgcaacacactttttg

SEQ ID NO: 5046620 - DNA, 25 bp, Homo sapien
tacttcaggccttacgttattggct

SEQ ID NO: 5046621 - DNA, 25 bp, Homo sapien
atttctatgcacacaaccagttgtc

SEQ ID NO: 5046622 - DNA, 25 bp, Homo sapien
tgttagttcacaactgcctcacacc

SEQ ID NO: 5046623 - DNA, 25 bp, Homo sapien
tatatgtatattggatcttccatga

SEQ ID NO: 5046624 - DNA, 25 bp, Homo sapien
caagagttgtatactacacattctg

SEQ ID NO: 5046625 - DNA, 25 bp, Homo sapien
tctgtgctgcattctagcttattcc

SEQ ID NO: 5046626 - DNA, 25 bp, Homo sapien
tggcaaatgagacataagctgggag

SEQ ID NO: 5046627 - DNA, 25 bp, Homo sapien
gagttctctgttacaccatagccta

SEQ ID NO: 5046628 - DNA, 25 bp, Homo sapien
catgttacgcagttgtggcaaatga

SEQ ID NO: 5046629 - DNA, 25 bp, Homo sapien
cactagctgatacactttgaagagc

SEQ ID NO: 5046630 - DNA, 25 bp, Homo sapien
gatagtgtgctacgtcagaggtccc

SEQ ID NO: 5046631 - DNA, 25 bp, Homo sapien
tcaatcatgcctacagactgcaggg

SEQ ID NO: 5046632 - DNA, 25 bp, Homo sapien
tgaactgactattcccagagggtgg

SEQ ID NO: 5046633 - DNA, 25 bp, Homo sapien
gactgagttaatcaccggcgaccaa

SEQ ID NO: 5046634 - DNA, 25 bp, Homo sapien
gccaatccatgtattacagctgagt

SEQ ID NO: 5046635 - DNA, 25 bp, Homo sapien
ctcccagccaatccatgtattacag

SEQ ID NO: 5046636 - DNA, 25 bp, Homo sapien
catgtattacagctgagtgtaggat

SEQ ID NO: 5046637 - DNA, 25 bp, Homo sapien
cagctgaagtaaacatccacctccc

SEQ ID NO: 5046638 - DNA, 25 bp, Homo sapien
gtatgatgcatcaaccaatcttcat

SEQ ID NO: 5046639 - DNA, 25 bp, Homo sapien
gcatcaaccaatcttcattaagaag

SEQ ID NO: 5046640 - DNA, 25 bp, Homo sapien
tgatgaccagtatgatgcatcaacc

SEQ ID NO: 5046641 - DNA, 25 bp, Homo sapien
ccaatcttcattaagaagattcctc

SEQ ID NO: 5046642 - DNA, 25 bp, Homo sapien
tgacgtcttgcagtttttcttagag

SEQ ID NO: 5046643 - DNA, 25 bp, Homo sapien
tctgattaggagctgtaatatcact

SEQ ID NO: 5046644 - DNA, 25 bp, Homo sapien
tagcaaatgtaaacaggcttagtgg

SEQ ID NO: 5046645 - DNA, 25 bp, Homo sapien
ggagagttctgattaggagctgtaa

SEQ ID NO: 5046646 - DNA, 25 bp, Homo sapien
gaatgcagctaaagatttctgaggt

SEQ ID NO: 5046647 - DNA, 25 bp, Homo sapien
tatcaagaggatgtctgtgaatagc

SEQ ID NO: 5046648 - DNA, 25 bp, Homo sapien
tccgggacagaattatatcaagagg

SEQ ID NO: 5046649 - DNA, 25 bp, Homo sapien
ctcaactccactccgggacagaatt

SEQ ID NO: 5046650 - DNA, 25 bp, Homo sapien
atctgactgaaagcttagctgtgtc

SEQ ID NO: 5046651 - DNA, 25 bp, Homo sapien
tccagtcggggatgtttacaacaac

SEQ ID NO: 5046652 - DNA, 25 bp, Homo sapien
ttccagtcggggatgtttacaacaa

SEQ ID NO: 5046653 - DNA, 25 bp, Homo sapien
tctgactgaaagcttagctgtgtct

SEQ ID NO: 5046654 - DNA, 25 bp, Homo sapien
aatttctagtgctgaacaatagctg

SEQ ID NO: 5046655 - DNA, 25 bp, Homo sapien
cagacataaatgttgccagtcatca

SEQ ID NO: 5046656 - DNA, 25 bp, Homo sapien
caatagctgtgacatcttgaaacaa

SEQ ID NO: 5046657 - DNA, 25 bp, Homo sapien
agagaaagtggttcaccaagtgcaa

SEQ ID NO: 5046658 - DNA, 25 bp, Homo sapien
tgtctccagctgatttaggttaggg

SEQ ID NO: 5046659 - DNA, 25 bp, Homo sapien
tcctggcagaggatctaaactgagt

SEQ ID NO: 5046660 - DNA, 25 bp, Homo sapien
tgcctgctgccctgacgttattgtt

SEQ ID NO: 5046661 - DNA, 25 bp, Homo sapien
taggttagggatgtacagttcaagg

SEQ ID NO: 5046662 - DNA, 25 bp, Homo sapien
tacttgactaatgaggatgctgcac

SEQ ID NO: 5046663 - DNA, 25 bp, Homo sapien
tatggatacaagatgaccttcactg

SEQ ID NO: 5046664 - DNA, 25 bp, Homo sapien
cctaggtaggcacatgatacttgac

SEQ ID NO: 5046665 - DNA, 25 bp, Homo sapien
taaaccagttaccacaagtctccaa

SEQ ID NO: 5046666 - DNA, 25 bp, Homo sapien
ggtaacgtctgcagtcccatctact

SEQ ID NO: 5046667 - DNA, 25 bp, Homo sapien
ctactttgccgaattctgaagacac

SEQ ID NO: 5046668 - DNA, 25 bp, Homo sapien
taagatcgtagcaagagtcacaggg

SEQ ID NO: 5046669 - DNA, 25 bp, Homo sapien
agtcacagggaatggtaacgtctgc

SEQ ID NO: 5046670 - DNA, 25 bp, Homo sapien
gtgaaacatactgtccaacaacaaa

SEQ ID NO: 5046671 - DNA, 25 bp, Homo sapien
caacaacaaagtacactttaatcat

SEQ ID NO: 5046672 - DNA, 25 bp, Homo sapien
tggatagcttattcaccctttcaca

SEQ ID NO: 5046673 - DNA, 25 bp, Homo sapien
tttggatagcttattcaccctttca

SEQ ID NO: 5046674 - DNA, 25 bp, Homo sapien
gatagcttattcaccctttcacaga

SEQ ID NO: 5046675 - DNA, 25 bp, Homo sapien
atagcttattcaccctttcacagaa

SEQ ID NO: 5046676 - DNA, 25 bp, Homo sapien
tgcttttgctagagacttgctggga

SEQ ID NO: 5046677 - DNA, 25 bp, Homo sapien
tcatcatgctcgtatctgaaaccag

SEQ ID NO: 5046678 - DNA, 25 bp, Homo sapien
caactcttaaggtccattcagctaa

SEQ ID NO: 5046679 - DNA, 25 bp, Homo sapien
tatgctagtcaattgccacatggac

SEQ ID NO: 5046680 - DNA, 25 bp, Homo sapien
tacttgcaatcagcacctctaggct

SEQ ID NO: 5046681 - DNA, 25 bp, Homo sapien
tattgtggcttgtaagaccctacac

SEQ ID NO: 5046682 - DNA, 25 bp, Homo sapien
ctacttagtctgaagtgggctttca

SEQ ID NO: 5046683 - DNA, 25 bp, Homo sapien
cactttagaggctttgcactatctc

SEQ ID NO: 5046684 - DNA, 25 bp, Homo sapien
cactaactaaactaccttggatgag

SEQ ID NO: 5046685 - DNA, 25 bp, Homo sapien
tactgcttgtggactttagaccaaa

SEQ ID NO: 5046686 - DNA, 25 bp, Homo sapien
gagtgtctgacaacaaggtgctttt

SEQ ID NO: 5046687 - DNA, 25 bp, Homo sapien
ggtataactgcttgttggcctctgc

SEQ ID NO: 5046688 - DNA, 25 bp, Homo sapien
gttcacctgtggtagaatatacaag

SEQ ID NO: 5046689 - DNA, 25 bp, Homo sapien
tacttttggtaaagagagaactcaa

SEQ ID NO: 5046690 - DNA, 25 bp, Homo sapien
aaaatgtcacccaaaaaatgagttg

SEQ ID NO: 5046691 - DNA, 25 bp, Homo sapien
tagtgcccctcaagcaagctctaaa

SEQ ID NO: 5046692 - DNA, 25 bp, Homo sapien
tgagaaagcagcctccgccgcgtcc

SEQ ID NO: 5046693 - DNA, 25 bp, Homo sapien
agaaagcagcctccgccgcgtccgt

SEQ ID NO: 5046694 - DNA, 25 bp, Homo sapien
aaagcagcctccgccgcgtccgtca

SEQ ID NO: 5046695 - DNA, 25 bp, Homo sapien
aagcagcctccgccgcgtccgtcat

SEQ ID NO: 5046696 - DNA, 25 bp, Homo sapien
tttactattattaccagcatcaaca

SEQ ID NO: 5046697 - DNA, 25 bp, Homo sapien
ttactattattaccagcatcaacat

SEQ ID NO: 5046698 - DNA, 25 bp, Homo sapien
tcaacatctttctcgccattgtaag

SEQ ID NO: 5046699 - DNA, 25 bp, Homo sapien
tgtaagtcaagacattggaaaaagt

SEQ ID NO: 5046700 - DNA, 25 bp, Homo sapien
agagtcagaagtggaatttccgcct

SEQ ID NO: 5046701 - DNA, 25 bp, Homo sapien
tgcagcatgctgagtgagctttccg

SEQ ID NO: 5046702 - DNA, 25 bp, Homo sapien
tgagctttccgttctcgctgagatg

SEQ ID NO: 5046703 - DNA, 25 bp, Homo sapien
aatttccgcctgatgttttatgtca

SEQ ID NO: 5046704 - DNA, 25 bp, Homo sapien
tctgtgggccttgtatggtcctcct

SEQ ID NO: 5046705 - DNA, 25 bp, Homo sapien
ccccagcaggaggtaccgtgtgtat

SEQ ID NO: 5046706 - DNA, 25 bp, Homo sapien
gggatgccattgctccaaaaatact

SEQ ID NO: 5046707 - DNA, 25 bp, Homo sapien
cctgtaggtcttgagaattgcaact

SEQ ID NO: 5046708 - DNA, 25 bp, Homo sapien
taatgaagccgcttctaacatagtg

SEQ ID NO: 5046709 - DNA, 25 bp, Homo sapien
gcagtattaatgaagccgcttctaa

SEQ ID NO: 5046710 - DNA, 25 bp, Homo sapien
taggggagcagtattaatgaagccg

SEQ ID NO: 5046711 - DNA, 25 bp, Homo sapien
catttccatttaggggagcagtatt

SEQ ID NO: 5046712 - DNA, 25 bp, Homo sapien
catttctgccgatcttgacttcaaa

SEQ ID NO: 5046713 - DNA, 25 bp, Homo sapien
tatgctttccccagtaccagttatt

SEQ ID NO: 5046714 - DNA, 25 bp, Homo sapien
cttcaaaaatttccccagatacgat

SEQ ID NO: 5046715 - DNA, 25 bp, Homo sapien
ccaatttctagatccctcaccttat

SEQ ID NO: 5046716 - DNA, 25 bp, Homo sapien
gaaggctgcacatctatggaaccca

SEQ ID NO: 5046717 - DNA, 25 bp, Homo sapien
tgcacatctatggaacccatagagg

SEQ ID NO: 5046718 - DNA, 25 bp, Homo sapien
ggctgcacatctatggaacccatag

SEQ ID NO: 5046719 - DNA, 25 bp, Homo sapien
ttggaaggctgcacatctatggaac

SEQ ID NO: 5046720 - DNA, 25 bp, Homo sapien
cccacgagctctgaagttgctctta

SEQ ID NO: 5046721 - DNA, 25 bp, Homo sapien
aggttgaaaacatctgaacccacga

SEQ ID NO: 5046722 - DNA, 25 bp, Homo sapien
gaaaacatctgaacccacgagctct

SEQ ID NO: 5046723 - DNA, 25 bp, Homo sapien
ctctgaagttgctcttagtaatgta

SEQ ID NO: 5046724 - DNA, 25 bp, Homo sapien
tcaagttatgcccatggtggaggta

SEQ ID NO: 5046725 - DNA, 25 bp, Homo sapien
taccattgactgtgtaagcctgaca

SEQ ID NO: 5046726 - DNA, 25 bp, Homo sapien
gatgataaatatcgccaggacccta

SEQ ID NO: 5046727 - DNA, 25 bp, Homo sapien
tcaccaagcctgtgggtaagcctgc

SEQ ID NO: 5046728 - DNA, 25 bp, Homo sapien
aaagaacatcctgtatggtagaggt

SEQ ID NO: 5046729 - DNA, 25 bp, Homo sapien
tcaagaggtagcctgcaagggtctt

SEQ ID NO: 5046730 - DNA, 25 bp, Homo sapien
caaacagccatgtaaacggagaggc

SEQ ID NO: 5046731 - DNA, 25 bp, Homo sapien
caagggtcttgcagctttgatccaa

SEQ ID NO: 5046732 - DNA, 25 bp, Homo sapien
gctacctgaacagatcaagtgctgg

SEQ ID NO: 5046733 - DNA, 25 bp, Homo sapien
tgtgtaagtgtggatatctttgaat

SEQ ID NO: 5046734 - DNA, 25 bp, Homo sapien
tatgttgatacacttgatagtgtcc

SEQ ID NO: 5046735 - DNA, 25 bp, Homo sapien
ggagcttcttataggtgcagattaa

SEQ ID NO: 5046736 - DNA, 25 bp, Homo sapien
ctggtgagagatcttaatagaagta

SEQ ID NO: 5046737 - DNA, 25 bp, Homo sapien
gaataatgccacctatcttcagtgt

SEQ ID NO: 5046738 - DNA, 25 bp, Homo sapien
gaacatatatcatagtgcctgtcat

SEQ ID NO: 5046739 - DNA, 25 bp, Homo sapien
caaaggcttgcatgctgacacagag

SEQ ID NO: 5046740 - DNA, 25 bp, Homo sapien
tagctaggatctcaacccttctgaa

SEQ ID NO: 5046741 - DNA, 25 bp, Homo sapien
gaatgaatcaggagtggacagcagg

SEQ ID NO: 5046742 - DNA, 25 bp, Homo sapien
tgaatgaatcaggagtggacagcag

SEQ ID NO: 5046743 - DNA, 25 bp, Homo sapien
cctgcggggggctgaatgaatcagg

SEQ ID NO: 5046744 - DNA, 25 bp, Homo sapien
ctgaatgaatcaggagtggacagca

SEQ ID NO: 5046745 - DNA, 25 bp, Homo sapien
tcagggtcattggaaccacaggctc

SEQ ID NO: 5046746 - DNA, 25 bp, Homo sapien
tcttatgtgtaaagtggatcttccc

SEQ ID NO: 5046747 - DNA, 25 bp, Homo sapien
gatcttcccaaccacgaaaatcagg

SEQ ID NO: 5046748 - DNA, 25 bp, Homo sapien
cagattgcagtcctgtgataaatca

SEQ ID NO: 5046749 - DNA, 25 bp, Homo sapien
gagccacagctcctcgtgctctgtc

SEQ ID NO: 5046750 - DNA, 25 bp, Homo sapien
gccacagctcctcgtgctctgtcat

SEQ ID NO: 5046751 - DNA, 25 bp, Homo sapien
ggtagagccacagctcctcgtgctc

SEQ ID NO: 5046752 - DNA, 25 bp, Homo sapien
ctggtagagccacagctcctcgtgc

SEQ ID NO: 5046753 - DNA, 25 bp, Homo sapien
tgcctgtctccctttgtttatgatt

SEQ ID NO: 5046754 - DNA, 25 bp, Homo sapien
ctgcctgtctccctttgtttatgat

SEQ ID NO: 5046755 - DNA, 25 bp, Homo sapien
cctgcctgtctccctttgtttatga

SEQ ID NO: 5046756 - DNA, 25 bp, Homo sapien
gcctgtctccctttgtttatgatta

SEQ ID NO: 5046757 - DNA, 25 bp, Homo sapien
ccgtaattctccatttgtggctcca

SEQ ID NO: 5046758 - DNA, 25 bp, Homo sapien
ctgaagcccctgaagccgtaattct

SEQ ID NO: 5046759 - DNA, 25 bp, Homo sapien
tgaagccgtaattctccatttgtgg

SEQ ID NO: 5046760 - DNA, 25 bp, Homo sapien
gcccctgaagccgtaattctccatt

SEQ ID NO: 5046761 - DNA, 25 bp, Homo sapien
ggtagctgagaacacgggagcttca

SEQ ID NO: 5046762 - DNA, 25 bp, Homo sapien
gagaatcccgttggataagcctagg

SEQ ID NO: 5046763 - DNA, 25 bp, Homo sapien
aaatgacagacaccacgggagggaa

SEQ ID NO: 5046764 - DNA, 25 bp, Homo sapien
ttcagcgttcaagataggagaatcc

SEQ ID NO: 5046765 - DNA, 25 bp, Homo sapien
gccttgggccgctcaaccttttgtg

SEQ ID NO: 5046766 - DNA, 25 bp, Homo sapien
gaaatataagtcttgtcccaggcac

SEQ ID NO: 5046767 - DNA, 25 bp, Homo sapien
caggagaggctcaagactctgaggc

SEQ ID NO: 5046768 - DNA, 25 bp, Homo sapien
ttttgttagctttagcaggctgctc

SEQ ID NO: 5046769 - DNA, 25 bp, Homo sapien
ccagcatgcgttccatgatgctggc

SEQ ID NO: 5046770 - DNA, 25 bp, Homo sapien
tgtcacgggtaatcagccatcccag

SEQ ID NO: 5046771 - DNA, 25 bp, Homo sapien
tgtgaggtgtcatatggtgcccagc

SEQ ID NO: 5046772 - DNA, 25 bp, Homo sapien
gaaacagaggacagcttaataaagg

SEQ ID NO: 5046773 - DNA, 25 bp, Homo sapien
tcaagggctataggagagagctcaa

SEQ ID NO: 5046774 - DNA, 25 bp, Homo sapien
gagagctcaagagggccagcccact

SEQ ID NO: 5046775 - DNA, 25 bp, Homo sapien
tctggcctgtggaccagattcatca

SEQ ID NO: 5046776 - DNA, 25 bp, Homo sapien
catcagctccgtttgctggctaccc

SEQ ID NO: 5046777 - DNA, 25 bp, Homo sapien
gaacggtcccagtctctgtgtaatg

SEQ ID NO: 5046778 - DNA, 25 bp, Homo sapien
actcagaagagaaagcgactcaggc

SEQ ID NO: 5046779 - DNA, 25 bp, Homo sapien
ggatctctcttatatcttctcgaga

SEQ ID NO: 5046780 - DNA, 25 bp, Homo sapien
ttctcgagatagtgggaacggtccc

SEQ ID NO: 5046781 - DNA, 25 bp, Homo sapien
tttttctatgcaggaattcaggacc

SEQ ID NO: 5046782 - DNA, 25 bp, Homo sapien
ggagtctgagcataccttagctggc

SEQ ID NO: 5046783 - DNA, 25 bp, Homo sapien
tcagtttctgcaagaccggagtctg

SEQ ID NO: 5046784 - DNA, 25 bp, Homo sapien
ggaaatggtcatgtcccttctgaga

SEQ ID NO: 5046785 - DNA, 25 bp, Homo sapien
gcattaaataattcagagaccatac

SEQ ID NO: 5046786 - DNA, 25 bp, Homo sapien
tgtggcattaaataattcagagacc

SEQ ID NO: 5046787 - DNA, 25 bp, Homo sapien
tgttgggtaccaaatgctcatcaga

SEQ ID NO: 5046788 - DNA, 25 bp, Homo sapien
taggaattctctatcacacctggtg

SEQ ID NO: 5046789 - DNA, 25 bp, Homo sapien
gccaattccaatccaagtgcacgtg

SEQ ID NO: 5046790 - DNA, 25 bp, Homo sapien
ggtgtagtccagtcccatacaaggt

SEQ ID NO: 5046791 - DNA, 25 bp, Homo sapien
tctggtgactgtattggccatggaa

SEQ ID NO: 5046792 - DNA, 25 bp, Homo sapien
tagtctggtgactgtattggccatg

SEQ ID NO: 5046793 - DNA, 25 bp, Homo sapien
agtctggtgactgtattggccatgg

SEQ ID NO: 5046794 - DNA, 25 bp, Homo sapien
tggtgactgtattggccatggaaaa

SEQ ID NO: 5046795 - DNA, 25 bp, Homo sapien
cctcttggtcctaaccacatttctt

SEQ ID NO: 5046796 - DNA, 25 bp, Homo sapien
aaatgcttccaggcattggatgtgg

SEQ ID NO: 5046797 - DNA, 25 bp, Homo sapien
agcctcttggtcctaaccacatttc

SEQ ID NO: 5046798 - DNA, 25 bp, Homo sapien
aatgcttccaggcattggatgtgga

SEQ ID NO: 5046799 - DNA, 25 bp, Homo sapien
tctggtgcttattggccttgatgtc

SEQ ID NO: 5046800 - DNA, 25 bp, Homo sapien
tgcttattggccttgatgtctacag

SEQ ID NO: 5046801 - DNA, 25 bp, Homo sapien
ttgatgtctacagtgaacataagtg

SEQ ID NO: 5046802 - DNA, 25 bp, Homo sapien
tgaacataagtgtgctgttgccttt

SEQ ID NO: 5046803 - DNA, 25 bp, Homo sapien
cactgaaatgtggatgatatgcaat

SEQ ID NO: 5046804 - DNA, 25 bp, Homo sapien
cctggtggtgctcttagagaatttg

SEQ ID NO: 5046805 - DNA, 25 bp, Homo sapien
tgatgatggagtagtggtcaggctt

SEQ ID NO: 5046806 - DNA, 25 bp, Homo sapien
tcttagagaatttgggctgccttga

SEQ ID NO: 5046807 - DNA, 25 bp, Homo sapien
tggttttaggagaggtcaaagcttc

SEQ ID NO: 5046808 - DNA, 25 bp, Homo sapien
ttaggagaggtcaaagcttccttct

SEQ ID NO: 5046809 - DNA, 25 bp, Homo sapien
agaggtcaaagcttccttctttgtg

SEQ ID NO: 5046810 - DNA, 25 bp, Homo sapien
aggtcaaagcttccttctttgtgtt

SEQ ID NO: 5046811 - DNA, 25 bp, Homo sapien
aggaatgaatgtcccactcaggtcc

SEQ ID NO: 5046812 - DNA, 25 bp, Homo sapien
tgctggactccacaaagtgtcacaa

SEQ ID NO: 5046813 - DNA, 25 bp, Homo sapien
gaaaggcagcgatttcccttgtctg

SEQ ID NO: 5046814 - DNA, 25 bp, Homo sapien
caaagttcagcgcactgtccgtggt

SEQ ID NO: 5046815 - DNA, 25 bp, Homo sapien
tgtccacctcgaaaacgaacagatt

SEQ ID NO: 5046816 - DNA, 25 bp, Homo sapien
gaagacaatgaattgtaatgtccac

SEQ ID NO: 5046817 - DNA, 25 bp, Homo sapien
gattttataatggttggagaacaaa

SEQ ID NO: 5046818 - DNA, 25 bp, Homo sapien
tgtaatgtccacctcgaaaacgaac

SEQ ID NO: 5046819 - DNA, 25 bp, Homo sapien
agactatgggcaggtagacttggca

SEQ ID NO: 5046820 - DNA, 25 bp, Homo sapien
tcttgcacagtgaatcctatggccc

SEQ ID NO: 5046821 - DNA, 25 bp, Homo sapien
caaagcccatgcaccttcgtgtgga

SEQ ID NO: 5046822 - DNA, 25 bp, Homo sapien
caagtttggcgtagcccatagggca

SEQ ID NO: 5046823 - DNA, 25 bp, Homo sapien
gatggcctctgaagactgccctcct

SEQ ID NO: 5046824 - DNA, 25 bp, Homo sapien
ctgaacccaatgctgatctgatggc

SEQ ID NO: 5046825 - DNA, 25 bp, Homo sapien
ctgatggcctctgaagactgccctc

SEQ ID NO: 5046826 - DNA, 25 bp, Homo sapien
acccaatgctgatctgatggcctct

SEQ ID NO: 5046827 - DNA, 25 bp, Homo sapien
agctttgccgtaccagtgctgagcc

SEQ ID NO: 5046828 - DNA, 25 bp, Homo sapien
acagctttgccgtaccagtgctgag

SEQ ID NO: 5046829 - DNA, 25 bp, Homo sapien
gacacagctttgccgtaccagtgct

SEQ ID NO: 5046830 - DNA, 25 bp, Homo sapien
ctttgccgtaccagtgctgagccac

SEQ ID NO: 5046831 - DNA, 25 bp, Homo sapien
atgtctacagtgtatgtgactatta

SEQ ID NO: 5046832 - DNA, 25 bp, Homo sapien
agatgtctacagtgtatgtgactat

SEQ ID NO: 5046833 - DNA, 25 bp, Homo sapien
tgtctacagtgtatgtgactattac

SEQ ID NO: 5046834 - DNA, 25 bp, Homo sapien
gatgtctacagtgtatgtgactatt

SEQ ID NO: 5046835 - DNA, 25 bp, Homo sapien
gggacagagaccaagaaaattctgc

SEQ ID NO: 5046836 - DNA, 25 bp, Homo sapien
gaaaccaattgggaacaagccatgg

SEQ ID NO: 5046837 - DNA, 25 bp, Homo sapien
tatgaatcggaagcagcagctcatc

SEQ ID NO: 5046838 - DNA, 25 bp, Homo sapien
tctgcgctgggtaaaccaggaaccc

SEQ ID NO: 5046839 - DNA, 25 bp, Homo sapien
caaaccatatggtatacaagtacag

SEQ ID NO: 5046840 - DNA, 25 bp, Homo sapien
aaagagttttgcaatgaaatcgtgc

SEQ ID NO: 5046841 - DNA, 25 bp, Homo sapien
tgtccaaaaagtctttagatcctct

SEQ ID NO: 5046842 - DNA, 25 bp, Homo sapien
aaacttgaacagcttgagttctgtt

SEQ ID NO: 5046843 - DNA, 25 bp, Homo sapien
tgaggtctgggattttgaacctgac

SEQ ID NO: 5046844 - DNA, 25 bp, Homo sapien
gaggtctgggattttgaacctgaca

SEQ ID NO: 5046845 - DNA, 25 bp, Homo sapien
tagcagctgcagaaaaagcaccact

SEQ ID NO: 5046846 - DNA, 25 bp, Homo sapien
cctagcagctgcagaaaaagcacca

SEQ ID NO: 5046847 - DNA, 25 bp, Homo sapien
aagcaccactatttggtgatggtgt

SEQ ID NO: 5046848 - DNA, 25 bp, Homo sapien
gcagctgcagaaaaagcaccactat

SEQ ID NO: 5046849 - DNA, 25 bp, Homo sapien
ctccatttccttctccacattttct

SEQ ID NO: 5046850 - DNA, 25 bp, Homo sapien
ttcatatttcttcctctccatccat

SEQ ID NO: 5046851 - DNA, 25 bp, Homo sapien
ttccttctccacattttcttcatat

SEQ ID NO: 5046852 - DNA, 25 bp, Homo sapien
ttcctctccatccatcttttcttca

SEQ ID NO: 5046853 - DNA, 25 bp, Homo sapien
ttctcagaggcggtggcatttagct

SEQ ID NO: 5046854 - DNA, 25 bp, Homo sapien
tggatcttgaatgatcgccaggaat

SEQ ID NO: 5046855 - DNA, 25 bp, Homo sapien
tcgccaggaatttgccaagcagacc

SEQ ID NO: 5046856 - DNA, 25 bp, Homo sapien
ggtggcatttagctggatcttgaat

SEQ ID NO: 5046857 - DNA, 25 bp, Homo sapien
gcagctgggactgaatgctgaacct

SEQ ID NO: 5046858 - DNA, 25 bp, Homo sapien
gaggtcattggagcagccacctgat

SEQ ID NO: 5046859 - DNA, 25 bp, Homo sapien
ttggagcagccacctgatctgcagc

SEQ ID NO: 5046860 - DNA, 25 bp, Homo sapien
ctgggactgaatgctgaacctctgc

SEQ ID NO: 5046861 - DNA, 25 bp, Homo sapien
tgctctgcacatcctgaagtgtcct

SEQ ID NO: 5046862 - DNA, 25 bp, Homo sapien
tgcctctgggtaccatccagggccc

SEQ ID NO: 5046863 - DNA, 25 bp, Homo sapien
gctctgcacatcctgaagtgtcctc

SEQ ID NO: 5046864 - DNA, 25 bp, Homo sapien
cagtgccagagtgcactgagagtgt

SEQ ID NO: 5046865 - DNA, 25 bp, Homo sapien
catgaggaaggccattgcgggtcag

SEQ ID NO: 5046866 - DNA, 25 bp, Homo sapien
tcagtattgccacctgggcagggac

SEQ ID NO: 5046867 - DNA, 25 bp, Homo sapien
gccattgcgggtcagtattgccacc

SEQ ID NO: 5046868 - DNA, 25 bp, Homo sapien
caaggaggtgttgggagcatgagga

SEQ ID NO: 5046869 - DNA, 25 bp, Homo sapien
ctatctttctgcttcgctgtattcc

SEQ ID NO: 5046870 - DNA, 25 bp, Homo sapien
tgcttcgctgtattcctctccactg

SEQ ID NO: 5046871 - DNA, 25 bp, Homo sapien
tataccgctcgctgctggttgtgct

SEQ ID NO: 5046872 - DNA, 25 bp, Homo sapien
caatctctgttcgtgactacctctc

SEQ ID NO: 5046873 - DNA, 25 bp, Homo sapien
tggttctgggaatagtacctttgct

SEQ ID NO: 5046874 - DNA, 25 bp, Homo sapien
ggagctggttctgggaatagtacct

SEQ ID NO: 5046875 - DNA, 25 bp, Homo sapien
tagtacctttgcttacagggtctgc

SEQ ID NO: 5046876 - DNA, 25 bp, Homo sapien
tctgggaatagtacctttgcttaca

SEQ ID NO: 5046877 - DNA, 25 bp, Homo sapien
tttcaaatcccacagctttcagaat

SEQ ID NO: 5046878 - DNA, 25 bp, Homo sapien
tctgggccagcagtaactgagttca

SEQ ID NO: 5046879 - DNA, 25 bp, Homo sapien
gctgctttgtacttccacagctctg

SEQ ID NO: 5046880 - DNA, 25 bp, Homo sapien
gtcttgatataagctctcccaggag

SEQ ID NO: 5046881 - DNA, 25 bp, Homo sapien
ggaggcatccatacacattgtgcaa

SEQ ID NO: 5046882 - DNA, 25 bp, Homo sapien
gatgcctgattacccgttaaattga

SEQ ID NO: 5046883 - DNA, 25 bp, Homo sapien
gtttctctgacaggcggctggatga

SEQ ID NO: 5046884 - DNA, 25 bp, Homo sapien
gatcctcggtagagagcgatgcctg

SEQ ID NO: 5046885 - DNA, 25 bp, Homo sapien
ctggaggggccattaagtctgatgc

SEQ ID NO: 5046886 - DNA, 25 bp, Homo sapien
aaatgtcagtgtggcagagtgggag

SEQ ID NO: 5046887 - DNA, 25 bp, Homo sapien
ttgtcacctcctagtggtgtgacct

SEQ ID NO: 5046888 - DNA, 25 bp, Homo sapien
tgggaggagcatagccctggaaagg

SEQ ID NO: 5046889 - DNA, 25 bp, Homo sapien
ggccttgtcacctcctagtggtgtg

SEQ ID NO: 5046890 - DNA, 25 bp, Homo sapien
aaggagatgatctaacttcatgcga

SEQ ID NO: 5046891 - DNA, 25 bp, Homo sapien
gctggacagccgttgacattttgtt

SEQ ID NO: 5046892 - DNA, 25 bp, Homo sapien
ttgttttagcctggtttgacttgga

SEQ ID NO: 5046893 - DNA, 25 bp, Homo sapien
taacttcatgcgagaggtcaagaag

SEQ ID NO: 5046894 - DNA, 25 bp, Homo sapien
ggattttagtttcaataactctgat

SEQ ID NO: 5046895 - DNA, 25 bp, Homo sapien
caaagtctacttcttctatgaactc

SEQ ID NO: 5046896 - DNA, 25 bp, Homo sapien
aataactctgatttgtgagtccctc

SEQ ID NO: 5046897 - DNA, 25 bp, Homo sapien
cttcttctatgaactcaaggatttt

SEQ ID NO: 5046898 - DNA, 25 bp, Homo sapien
tgttgagttcaggggagacttttac

SEQ ID NO: 5046899 - DNA, 25 bp, Homo sapien
ctgttgagttcaggggagactttta

SEQ ID NO: 5046900 - DNA, 25 bp, Homo sapien
gcctggcatgcacgcagaatttata

SEQ ID NO: 5046901 - DNA, 25 bp, Homo sapien
gtaaaaccgtaatcccacagatgga

SEQ ID NO: 5046902 - DNA, 25 bp, Homo sapien
gggacagcttgacagaacagataaa

SEQ ID NO: 5046903 - DNA, 25 bp, Homo sapien
ggctcaggccttctagtcacaaaag

SEQ ID NO: 5046904 - DNA, 25 bp, Homo sapien
tcttcatgtggggtctctaaaggtt

SEQ ID NO: 5046905 - DNA, 25 bp, Homo sapien
ttcatgtggggtctctaaaggttct

SEQ ID NO: 5046906 - DNA, 25 bp, Homo sapien
tttcttcatgtggggtctctaaagg

SEQ ID NO: 5046907 - DNA, 25 bp, Homo sapien
catgtggggtctctaaaggttcttt

SEQ ID NO: 5046908 - DNA, 25 bp, Homo sapien
tgttaagtgttaaggccctggcact

SEQ ID NO: 5046909 - DNA, 25 bp, Homo sapien
tttgagagatgcttgaaaggcaccc

SEQ ID NO: 5046910 - DNA, 25 bp, Homo sapien
gatgctccacagtatgctttgagag

SEQ ID NO: 5046911 - DNA, 25 bp, Homo sapien
gacagcaggcaagcagatgctccac

SEQ ID NO: 5046912 - DNA, 25 bp, Homo sapien
taatggaccatcaggatccaaccat

SEQ ID NO: 5046913 - DNA, 25 bp, Homo sapien
cacaatgtcctctgaccctacagaa

SEQ ID NO: 5046914 - DNA, 25 bp, Homo sapien
actaatggaccatcaggatccaacc

SEQ ID NO: 5046915 - DNA, 25 bp, Homo sapien
cagaatattccttaccatgacccat

SEQ ID NO: 5046916 - DNA, 25 bp, Homo sapien
ctccatactgtccacaagaagccag

SEQ ID NO: 5046917 - DNA, 25 bp, Homo sapien
tggaaaggcataatggaaaacttca

SEQ ID NO: 5046918 - DNA, 25 bp, Homo sapien
tcattctcgaatctccatctactag

SEQ ID NO: 5046919 - DNA, 25 bp, Homo sapien
gaatctccatctactagtcccactg

SEQ ID NO: 5046920 - DNA, 25 bp, Homo sapien
tctcatggtgacaagcccctcagca

SEQ ID NO: 5046921 - DNA, 25 bp, Homo sapien
ctcatggtgacaagcccctcagcag

SEQ ID NO: 5046922 - DNA, 25 bp, Homo sapien
tcatggtgacaagcccctcagcagc

SEQ ID NO: 5046923 - DNA, 25 bp, Homo sapien
taccctgacaaagagtaaactcgca

SEQ ID NO: 5046924 - DNA, 25 bp, Homo sapien
ccatctctgggagtttaccctgaca

SEQ ID NO: 5046925 - DNA, 25 bp, Homo sapien
ggcaatggctgaactaagaggccct

SEQ ID NO: 5046926 - DNA, 25 bp, Homo sapien
gcgtattgaagagcctgtccacctg

SEQ ID NO: 5046927 - DNA, 25 bp, Homo sapien
tcttcttcactaaatttgcagcccc

SEQ ID NO: 5046928 - DNA, 25 bp, Homo sapien
ttcttcactaaatttgcagcccctg

SEQ ID NO: 5046929 - DNA, 25 bp, Homo sapien
cacccttgtgctcttttgcctgcat

SEQ ID NO: 5046930 - DNA, 25 bp, Homo sapien
tctgacaattgtcaaacctcctctc

SEQ ID NO: 5046931 - DNA, 25 bp, Homo sapien
tcaagggccccaatcacaaagggag

SEQ ID NO: 5046932 - DNA, 25 bp, Homo sapien
gtattaaataatccccagtgagcaa

SEQ ID NO: 5046933 - DNA, 25 bp, Homo sapien
tagagtgagttctcgcccagatgaa

SEQ ID NO: 5046934 - DNA, 25 bp, Homo sapien
caccaaggtcctgcttagattcatc

SEQ ID NO: 5046935 - DNA, 25 bp, Homo sapien
cttccccaacagactccagaaaaat

SEQ ID NO: 5046936 - DNA, 25 bp, Homo sapien
gaggtctgatctcactcaagaaagc

SEQ ID NO: 5046937 - DNA, 25 bp, Homo sapien
gaaagcattccgctccatgcagtag

SEQ ID NO: 5046938 - DNA, 25 bp, Homo sapien
catgcagtagtgatgaaggcgagca

SEQ ID NO: 5046939 - DNA, 25 bp, Homo sapien
tgacagttcttgaatccaggacagc

SEQ ID NO: 5046940 - DNA, 25 bp, Homo sapien
gctgggtcaccttgagctgaggaat

SEQ ID NO: 5046941 - DNA, 25 bp, Homo sapien
agctgggtcaccttgagctgaggaa

SEQ ID NO: 5046942 - DNA, 25 bp, Homo sapien
ctgggtcaccttgagctgaggaatc

SEQ ID NO: 5046943 - DNA, 25 bp, Homo sapien
cacaaggccggagatgaacatgagg

SEQ ID NO: 5046944 - DNA, 25 bp, Homo sapien
acctgatatgatgggccctggagca

SEQ ID NO: 5046945 - DNA, 25 bp, Homo sapien
atgaggaattctttcggagcacaac

SEQ ID NO: 5046946 - DNA, 25 bp, Homo sapien
tcaagggcggattcacaaggccgga

SEQ ID NO: 5046947 - DNA, 25 bp, Homo sapien
gagctggcgatatctcaccagggaa

SEQ ID NO: 5046948 - DNA, 25 bp, Homo sapien
tggacttctctaaccacatgttgga

SEQ ID NO: 5046949 - DNA, 25 bp, Homo sapien
catggtttcagccagcttcacgcag

SEQ ID NO: 5046950 - DNA, 25 bp, Homo sapien
tgttggaaccttgggcacttatgca

SEQ ID NO: 5046951 - DNA, 25 bp, Homo sapien
actggccagtaccagaataggcttg

SEQ ID NO: 5046952 - DNA, 25 bp, Homo sapien
ccagtaccagaataggcttgcaggg

SEQ ID NO: 5046953 - DNA, 25 bp, Homo sapien
ggaagtcatccttctgtgtagcatc

SEQ ID NO: 5046954 - DNA, 25 bp, Homo sapien
tcagagcctccacacatgtgaaggc

SEQ ID NO: 5046955 - DNA, 25 bp, Homo sapien
tcaaccctctcctgatgacccagat

SEQ ID NO: 5046956 - DNA, 25 bp, Homo sapien
tcctcttcatcaaccctctcctgat

SEQ ID NO: 5046957 - DNA, 25 bp, Homo sapien
catcaaccctctcctgatgacccag

SEQ ID NO: 5046958 - DNA, 25 bp, Homo sapien
tcttcatcaaccctctcctgatgac

SEQ ID NO: 5046959 - DNA, 25 bp, Homo sapien
ctgggcaccagaagaatggaagagc

SEQ ID NO: 5046960 - DNA, 25 bp, Homo sapien
gaatggaagagctgttggggtaatg

SEQ ID NO: 5046961 - DNA, 25 bp, Homo sapien
ttggggtaatgtggatgtaagcaat

SEQ ID NO: 5046962 - DNA, 25 bp, Homo sapien
ggaagagctgttggggtaatgtgga

SEQ ID NO: 5046963 - DNA, 25 bp, Homo sapien
attttaagttagtcaagtgaacaat

SEQ ID NO: 5046964 - DNA, 25 bp, Homo sapien
aagttagtcaagtgaacaatctgga

SEQ ID NO: 5046965 - DNA, 25 bp, Homo sapien
taagttagtcaagtgaacaatctgg

SEQ ID NO: 5046966 - DNA, 25 bp, Homo sapien
tttaagttagtcaagtgaacaatct

SEQ ID NO: 5046967 - DNA, 25 bp, Homo sapien
taccataccctgattcaccccaaag

SEQ ID NO: 5046968 - DNA, 25 bp, Homo sapien
ggaagggtcccatgacctaccatac

SEQ ID NO: 5046969 - DNA, 25 bp, Homo sapien
gattcaccccaaagcctacaatcaa

SEQ ID NO: 5046970 - DNA, 25 bp, Homo sapien
gaagggtcccatgacctaccatacc

SEQ ID NO: 5046971 - DNA, 25 bp, Homo sapien
taacaggagctgaaattgtggcaat

SEQ ID NO: 5046972 - DNA, 25 bp, Homo sapien
ccaataacaggagctgaaattgtgg

SEQ ID NO: 5046973 - DNA, 25 bp, Homo sapien
ttgtggcaataatcaatagtttacc

SEQ ID NO: 5046974 - DNA, 25 bp, Homo sapien
gcatcattctgataccaaagccggg

SEQ ID NO: 5046975 - DNA, 25 bp, Homo sapien
gaagctggagggtgtgcacttttat

SEQ ID NO: 5046976 - DNA, 25 bp, Homo sapien
ccaggctggctagtccaattgaagc

SEQ ID NO: 5046977 - DNA, 25 bp, Homo sapien
aattgaagctgccaatctccttcca

SEQ ID NO: 5046978 - DNA, 25 bp, Homo sapien
ccacatcaggaataaagtccaggct

SEQ ID NO: 5046979 - DNA, 25 bp, Homo sapien
ggaggtgcgagagggcaccttgaga

SEQ ID NO: 5046980 - DNA, 25 bp, Homo sapien
gccttcctagaggatggaggtgcga

SEQ ID NO: 5046981 - DNA, 25 bp, Homo sapien
gcaggactcagcttgaacatgaaag

SEQ ID NO: 5046982 - DNA, 25 bp, Homo sapien
gctgagtgcctcgaaggacctgagc

SEQ ID NO: 5046983 - DNA, 25 bp, Homo sapien
gccctgcaggcgttgtttcaccagg

SEQ ID NO: 5046984 - DNA, 25 bp, Homo sapien
ggcttggccctgcaggcgttgtttc

SEQ ID NO: 5046985 - DNA, 25 bp, Homo sapien
caggcgttgtttcaccaggcagagt

SEQ ID NO: 5046986 - DNA, 25 bp, Homo sapien
tgcaggcgttgtttcaccaggcaga

SEQ ID NO: 5046987 - DNA, 25 bp, Homo sapien
ttggcgtagacctgctgctgtgtat

SEQ ID NO: 5046988 - DNA, 25 bp, Homo sapien
agcaggcactgttttaatagtctct

SEQ ID NO: 5046989 - DNA, 25 bp, Homo sapien
agctctgctggcattacttggcgta

SEQ ID NO: 5046990 - DNA, 25 bp, Homo sapien
cattacttggcgtagacctgctgct

SEQ ID NO: 5046991 - DNA, 25 bp, Homo sapien
tcttaatgactaaatcccgactgct

SEQ ID NO: 5046992 - DNA, 25 bp, Homo sapien
caaagtcataggtgctggcgggcat

SEQ ID NO: 5046993 - DNA, 25 bp, Homo sapien
gctgtgagcaatcttcctgataaaa

SEQ ID NO: 5046994 - DNA, 25 bp, Homo sapien
gccactcataacctgaagtccttga

SEQ ID NO: 5046995 - DNA, 25 bp, Homo sapien
cagatgttactaggtccttccaatt

SEQ ID NO: 5046996 - DNA, 25 bp, Homo sapien
gacagatgttactaggtccttccaa

SEQ ID NO: 5046997 - DNA, 25 bp, Homo sapien
ctctgacagatgttactaggtcctt

SEQ ID NO: 5046998 - DNA, 25 bp, Homo sapien
ctgacagatgttactaggtccttcc

SEQ ID NO: 5046999 - DNA, 25 bp, Homo sapien
tgaggagcagccaaaacacgcattt

SEQ ID NO: 5047000 - DNA, 25 bp, Homo sapien
atgacaagctggcagatccggcctc

SEQ ID NO: 5047001 - DNA, 25 bp, Homo sapien
aatggatttccctgcctgatgacaa

SEQ ID NO: 5047002 - DNA, 25 bp, Homo sapien
gcttagtgttccttcctgcgccaga

SEQ ID NO: 5047003 - DNA, 25 bp, Homo sapien
ctcctcggtgctgaaaaagaagtcc

SEQ ID NO: 5047004 - DNA, 25 bp, Homo sapien
tgaaaaagaagtccctctggcgtct

SEQ ID NO: 5047005 - DNA, 25 bp, Homo sapien
ataaaaccttctgaggcactgtgga

SEQ ID NO: 5047006 - DNA, 25 bp, Homo sapien
tgtggagctctcctcggtgctgaaa

SEQ ID NO: 5047007 - DNA, 25 bp, Homo sapien
tatcgatacgctcagaacagttcct

SEQ ID NO: 5047008 - DNA, 25 bp, Homo sapien
cctttcccgatctgtttgtaactgg

SEQ ID NO: 5047009 - DNA, 25 bp, Homo sapien
gcttcatcatttatcgatacgctca

SEQ ID NO: 5047010 - DNA, 25 bp, Homo sapien
tctttgcctgcaaatttccctgcct

SEQ ID NO: 5047011 - DNA, 25 bp, Homo sapien
tagttgcggtcttgaccctctacca

SEQ ID NO: 5047012 - DNA, 25 bp, Homo sapien
cccactccccctgatggagtaatgt

SEQ ID NO: 5047013 - DNA, 25 bp, Homo sapien
ccttcatgttcaggtagcagagcct

SEQ ID NO: 5047014 - DNA, 25 bp, Homo sapien
cttcatgttcaggtagcagagcctc

SEQ ID NO: 5047015 - DNA, 25 bp, Homo sapien
tggtcttttcttcgtgatcacagga

SEQ ID NO: 5047016 - DNA, 25 bp, Homo sapien
tcttcgtgatcacaggatggctgct

SEQ ID NO: 5047017 - DNA, 25 bp, Homo sapien
aagctgacgggtggtgtctctgagc

SEQ ID NO: 5047018 - DNA, 25 bp, Homo sapien
aacaagtgacgccaaagtcgaaagc

SEQ ID NO: 5047019 - DNA, 25 bp, Homo sapien
ccttaggtttaataggattcttcat

SEQ ID NO: 5047020 - DNA, 25 bp, Homo sapien
caccagcacgaagagtccaacataa

SEQ ID NO: 5047021 - DNA, 25 bp, Homo sapien
cgaagagtccaacataaccaggaaa

SEQ ID NO: 5047022 - DNA, 25 bp, Homo sapien
ttctggtccaccagcacgaagagtc

SEQ ID NO: 5047023 - DNA, 25 bp, Homo sapien
gcttgtatgacttaatcaagcattg

SEQ ID NO: 5047024 - DNA, 25 bp, Homo sapien
aggcccagcaagcttgtatgactta

SEQ ID NO: 5047025 - DNA, 25 bp, Homo sapien
ccagcaagcttgtatgacttaatca

SEQ ID NO: 5047026 - DNA, 25 bp, Homo sapien
tatgacttaatcaagcattgttttc

SEQ ID NO: 5047027 - DNA, 25 bp, Homo sapien
ggctctacggtcatcctcttcaaag

SEQ ID NO: 5047028 - DNA, 25 bp, Homo sapien
atatcagacttggctctacggtcat

SEQ ID NO: 5047029 - DNA, 25 bp, Homo sapien
caaagtcggcgactgtaaactgcat

SEQ ID NO: 5047030 - DNA, 25 bp, Homo sapien
catcctcttcaaagtcggcgactgt

SEQ ID NO: 5047031 - DNA, 25 bp, Homo sapien
ttgtgcctttgtgcctgtcagtgag

SEQ ID NO: 5047032 - DNA, 25 bp, Homo sapien
tagaagcttgcaggaaactgtacac

SEQ ID NO: 5047033 - DNA, 25 bp, Homo sapien
tttccaatatgcacagcaccagaga

SEQ ID NO: 5047034 - DNA, 25 bp, Homo sapien
gcattcttgggatgcgagttatcag

SEQ ID NO: 5047035 - DNA, 25 bp, Homo sapien
ccacagcagatctgtaatatctgac

SEQ ID NO: 5047036 - DNA, 25 bp, Homo sapien
tggtaatacggccatcaacctcaaa

SEQ ID NO: 5047037 - DNA, 25 bp, Homo sapien
aatgagccacatggtaatacggcca

SEQ ID NO: 5047038 - DNA, 25 bp, Homo sapien
tgtggaccacagcagatctgtaata

SEQ ID NO: 5047039 - DNA, 25 bp, Homo sapien
aacagttgcatcgtatgtaaaacca

SEQ ID NO: 5047040 - DNA, 25 bp, Homo sapien
taaaaacctcccattgcaagggcat

SEQ ID NO: 5047041 - DNA, 25 bp, Homo sapien
aggctttgccatgcgctttgctgtg

SEQ ID NO: 5047042 - DNA, 25 bp, Homo sapien
ccagtgggacataggtgcaagtgat

SEQ ID NO: 5047043 - DNA, 25 bp, Homo sapien
gttgtctgcctatgggacccctgta

SEQ ID NO: 5047044 - DNA, 25 bp, Homo sapien
gcatgtgaactccttcataaaccgg

SEQ ID NO: 5047045 - DNA, 25 bp, Homo sapien
gacccctgtagatgtgcagcatcta

SEQ ID NO: 5047046 - DNA, 25 bp, Homo sapien
tagccttggaatcaagggtgttaac

SEQ ID NO: 5047047 - DNA, 25 bp, Homo sapien
cagaaaaggattgaggagatgtgtg

SEQ ID NO: 5047048 - DNA, 25 bp, Homo sapien
tgagaaatgacagcgcagaaaagga

SEQ ID NO: 5047049 - DNA, 25 bp, Homo sapien
aaaggattgaggagatgtgtgagtc

SEQ ID NO: 5047050 - DNA, 25 bp, Homo sapien
gatgagaaatgacagcgcagaaaag

SEQ ID NO: 5047051 - DNA, 25 bp, Homo sapien
acaggcaggtcatccagtggagcct

SEQ ID NO: 5047052 - DNA, 25 bp, Homo sapien
tgcagagatgctttattgagtgatg

SEQ ID NO: 5047053 - DNA, 25 bp, Homo sapien
gtagcttctatccacaggcaggtca

SEQ ID NO: 5047054 - DNA, 25 bp, Homo sapien
tgacttctctgtagccctcagcaga

SEQ ID NO: 5047055 - DNA, 25 bp, Homo sapien
gagtggtgcccaacaaggagaaaga

SEQ ID NO: 5047056 - DNA, 25 bp, Homo sapien
tctcagaagtaatggagaaccaaac

SEQ ID NO: 5047057 - DNA, 25 bp, Homo sapien
tatgggcacagcctggtaaggagaa

SEQ ID NO: 5047058 - DNA, 25 bp, Homo sapien
gagggcattctaggttatgggcaca

SEQ ID NO: 5047059 - DNA, 25 bp, Homo sapien
cttgtccaggttagtgagcatgatg

SEQ ID NO: 5047060 - DNA, 25 bp, Homo sapien
gatggaggcatggtctgctgaccca

SEQ ID NO: 5047061 - DNA, 25 bp, Homo sapien
tagaataatggcatggtcctgttgt

SEQ ID NO: 5047062 - DNA, 25 bp, Homo sapien
gctgaccaatcttgtccaggttagt

SEQ ID NO: 5047063 - DNA, 25 bp, Homo sapien
tgtgagaacctctcgccagcatctc

SEQ ID NO: 5047064 - DNA, 25 bp, Homo sapien
ccagggctacgtccacacccagcct

SEQ ID NO: 5047065 - DNA, 25 bp, Homo sapien
tttcccagggctacgtccacaccca

SEQ ID NO: 5047066 - DNA, 25 bp, Homo sapien
tctctgctgtcttaaacttgccacc

SEQ ID NO: 5047067 - DNA, 25 bp, Homo sapien
tagaactgtggtgctttgcaatcag

SEQ ID NO: 5047068 - DNA, 25 bp, Homo sapien
ttgcaaacccaagtgtgaaaatacg

SEQ ID NO: 5047069 - DNA, 25 bp, Homo sapien
tctttgtgtcagtcgaaatgccaca

SEQ ID NO: 5047070 - DNA, 25 bp, Homo sapien
tgcaatcagctggagctaggccaaa

SEQ ID NO: 5047071 - DNA, 25 bp, Homo sapien
tccttgacacattaggagaccccgc

SEQ ID NO: 5047072 - DNA, 25 bp, Homo sapien
tctgtgatacctgaggtgaagccct

SEQ ID NO: 5047073 - DNA, 25 bp, Homo sapien
cacctgcagaaagtaggccggacct

SEQ ID NO: 5047074 - DNA, 25 bp, Homo sapien
cacctctgatgataagccttgggaa

SEQ ID NO: 5047075 - DNA, 25 bp, Homo sapien
ttctaggagataaagaagcttccat

SEQ ID NO: 5047076 - DNA, 25 bp, Homo sapien
ggaaaagagtgaagcgtgtggaggg

SEQ ID NO: 5047077 - DNA, 25 bp, Homo sapien
catttctaggagataaagaagcttc

SEQ ID NO: 5047078 - DNA, 25 bp, Homo sapien
taaagctggattggtaagcagaagg

SEQ ID NO: 5047079 - DNA, 25 bp, Homo sapien
accccggtggagggactggacaatg

SEQ ID NO: 5047080 - DNA, 25 bp, Homo sapien
tgagccttaaaggtgacgtcaggga

SEQ ID NO: 5047081 - DNA, 25 bp, Homo sapien
tagtgtccaagggaccttccaggca

SEQ ID NO: 5047082 - DNA, 25 bp, Homo sapien
tgaggtatggcagcgtagtgtccaa

SEQ ID NO: 5047083 - DNA, 25 bp, Homo sapien
cccacagccacggttcactgaggta

SEQ ID NO: 5047084 - DNA, 25 bp, Homo sapien
ccgtcgctcccgctgaccaccatca

SEQ ID NO: 5047085 - DNA, 25 bp, Homo sapien
cgtcgctcccgctgaccaccatcat

SEQ ID NO: 5047086 - DNA, 25 bp, Homo sapien
cttcctcccggcactccgtcgctcc

SEQ ID NO: 5047087 - DNA, 25 bp, Homo sapien
ccggcactccgtcgctcccgctgac

SEQ ID NO: 5047088 - DNA, 25 bp, Homo sapien
cctctaataatgatccttctactct

SEQ ID NO: 5047089 - DNA, 25 bp, Homo sapien
atttttggagttacatagtaggtgt

SEQ ID NO: 5047090 - DNA, 25 bp, Homo sapien
cagcctctaataatgatccttctac

SEQ ID NO: 5047091 - DNA, 25 bp, Homo sapien
cccagcctctaataatgatccttct

SEQ ID NO: 5047092 - DNA, 25 bp, Homo sapien
tccactgagggtgtagggcaacttg

SEQ ID NO: 5047093 - DNA, 25 bp, Homo sapien
tattcttcagtcctatatgaggcca

SEQ ID NO: 5047094 - DNA, 25 bp, Homo sapien
tcccagttgagagcatcacaatgag

SEQ ID NO: 5047095 - DNA, 25 bp, Homo sapien
tcagcatgctgctaagctctcccag

SEQ ID NO: 5047096 - DNA, 25 bp, Homo sapien
acaagtacaagtgtgagggagccac

SEQ ID NO: 5047097 - DNA, 25 bp, Homo sapien
caacaagatgagttgtgaaggaaca

SEQ ID NO: 5047098 - DNA, 25 bp, Homo sapien
aaggaacaagtacaagtgtgaggga

SEQ ID NO: 5047099 - DNA, 25 bp, Homo sapien
tggaggggcactgcgtccaggaagg

SEQ ID NO: 5047100 - DNA, 25 bp, Homo sapien
gccccaaacacttgcttgtcttgga

SEQ ID NO: 5047101 - DNA, 25 bp, Homo sapien
gagccatcatccatgggccctactg

SEQ ID NO: 5047102 - DNA, 25 bp, Homo sapien
ctgaggactgtgagccatcatccat

SEQ ID NO: 5047103 - DNA, 25 bp, Homo sapien
catgggccctactgtatcctttatt

SEQ ID NO: 5047104 - DNA, 25 bp, Homo sapien
gccactcatggaggtcctaaagtaa

SEQ ID NO: 5047105 - DNA, 25 bp, Homo sapien
ggcgcacagtggtatcagactcctt

SEQ ID NO: 5047106 - DNA, 25 bp, Homo sapien
ccgccatatgctcaagggtaactta

SEQ ID NO: 5047107 - DNA, 25 bp, Homo sapien
tatgcccctggcgtgtcaggttctg

SEQ ID NO: 5047108 - DNA, 25 bp, Homo sapien
caacaggtatggctacgaagactga

SEQ ID NO: 5047109 - DNA, 25 bp, Homo sapien
taaagttgatcgaggttgcccaggt

SEQ ID NO: 5047110 - DNA, 25 bp, Homo sapien
tgctaatgcttgcagaccaacaggt

SEQ ID NO: 5047111 - DNA, 25 bp, Homo sapien
tggagcgttgcacatgccagctgtc

SEQ ID NO: 5047112 - DNA, 25 bp, Homo sapien
cctgtgtacaggatggccagctgac

SEQ ID NO: 5047113 - DNA, 25 bp, Homo sapien
ccagaggtggtgataacttgatgca

SEQ ID NO: 5047114 - DNA, 25 bp, Homo sapien
tattaccaagtcaggcagtgacggg

SEQ ID NO: 5047115 - DNA, 25 bp, Homo sapien
gatgcactgttgaaatacaccaagt

SEQ ID NO: 5047116 - DNA, 25 bp, Homo sapien
cagggcagatggatacagagacaga

SEQ ID NO: 5047117 - DNA, 25 bp, Homo sapien
catccaccaaatactgacaggaggg

SEQ ID NO: 5047118 - DNA, 25 bp, Homo sapien
aaagtggtggcttgtgactacctga

SEQ ID NO: 5047119 - DNA, 25 bp, Homo sapien
caggatggctcgattctcttgtcaa

SEQ ID NO: 5047120 - DNA, 25 bp, Homo sapien
cacggatccagaatgaatgctgagt

SEQ ID NO: 5047121 - DNA, 25 bp, Homo sapien
gacaaatgaattggcctcagatggc

SEQ ID NO: 5047122 - DNA, 25 bp, Homo sapien
cacagatgacgaggaccagatgtgt

SEQ ID NO: 5047123 - DNA, 25 bp, Homo sapien
tgctgttccgggactgcattttggg

SEQ ID NO: 5047124 - DNA, 25 bp, Homo sapien
tagtgtcataaaggccaaggacttg

SEQ ID NO: 5047125 - DNA, 25 bp, Homo sapien
tgagaagctagtcccagacctggat

SEQ ID NO: 5047126 - DNA, 25 bp, Homo sapien
gattaggatttcacagtatggcact

SEQ ID NO: 5047127 - DNA, 25 bp, Homo sapien
gagcgcctggtcagtctaaccacaa

SEQ ID NO: 5047128 - DNA, 25 bp, Homo sapien
gagcagaagattcagtgcccttgct

SEQ ID NO: 5047129 - DNA, 25 bp, Homo sapien
aggagggtctggagcagaagattca

SEQ ID NO: 5047130 - DNA, 25 bp, Homo sapien
gtttcccagtgcatagccctcctcc

SEQ ID NO: 5047131 - DNA, 25 bp, Homo sapien
tcccagtgcatagccctcctccaca

SEQ ID NO: 5047132 - DNA, 25 bp, Homo sapien
tactcaaggtctggactgtcaccgg

SEQ ID NO: 5047133 - DNA, 25 bp, Homo sapien
taagtgttccaatgaagccgctggg

SEQ ID NO: 5047134 - DNA, 25 bp, Homo sapien
taagtcataaacatagggctggcac

SEQ ID NO: 5047135 - DNA, 25 bp, Homo sapien
tgttgcgagaaccatagtgaatcct

SEQ ID NO: 5047136 - DNA, 25 bp, Homo sapien
gggattgagaagagcagccacaagc

SEQ ID NO: 5047137 - DNA, 25 bp, Homo sapien
ctgggattgagaagagcagccacaa

SEQ ID NO: 5047138 - DNA, 25 bp, Homo sapien
agaagagcagccacaagcagcctac

SEQ ID NO: 5047139 - DNA, 25 bp, Homo sapien
ttgagaagagcagccacaagcagcc

SEQ ID NO: 5047140 - DNA, 25 bp, Homo sapien
aggtgcgacagtcacaggtccttca

SEQ ID NO: 5047141 - DNA, 25 bp, Homo sapien
acagaggtgcgacagtcacaggtcc

SEQ ID NO: 5047142 - DNA, 25 bp, Homo sapien
aggccggggcgaagcaccacgacca

SEQ ID NO: 5047143 - DNA, 25 bp, Homo sapien
cagaggtgcgacagtcacaggtcct

SEQ ID NO: 5047144 - DNA, 25 bp, Homo sapien
caggctgtttaaccccagaggcttt

SEQ ID NO: 5047145 - DNA, 25 bp, Homo sapien
ctccacttgacggatgaggaccctg

SEQ ID NO: 5047146 - DNA, 25 bp, Homo sapien
taagtttggttgtcatctccacttg

SEQ ID NO: 5047147 - DNA, 25 bp, Homo sapien
aatccaggctgtttaaccccagagg

SEQ ID NO: 5047148 - DNA, 25 bp, Homo sapien
tagagcttccaagatttctaccacc

SEQ ID NO: 5047149 - DNA, 25 bp, Homo sapien
agtgagggcagttgagtactcgggt

SEQ ID NO: 5047150 - DNA, 25 bp, Homo sapien
cactcccctcgggtttgtaaagctg

SEQ ID NO: 5047151 - DNA, 25 bp, Homo sapien
agtactcgggtctgggacttagagc

SEQ ID NO: 5047152 - DNA, 25 bp, Homo sapien
gacattgaggccgggacttgagctg

SEQ ID NO: 5047153 - DNA, 25 bp, Homo sapien
acattgaggccgggacttgagctgg

SEQ ID NO: 5047154 - DNA, 25 bp, Homo sapien
tctgagctggcggatctcaggaggt

SEQ ID NO: 5047155 - DNA, 25 bp, Homo sapien
cgctctgagctcaggcgcggagaaa

SEQ ID NO: 5047156 - DNA, 25 bp, Homo sapien
gcgcggagaaaggacggcgcccctg

SEQ ID NO: 5047157 - DNA, 25 bp, Homo sapien
tctcaggaggttggcgctctgagct

SEQ ID NO: 5047158 - DNA, 25 bp, Homo sapien
ttgggcgagccacttgacttctctg

SEQ ID NO: 5047159 - DNA, 25 bp, Homo sapien
ttcccagtccgtgcatctgaaaggc

SEQ ID NO: 5047160 - DNA, 25 bp, Homo sapien
tctgaaaggctgtaatagcgtcgtg

SEQ ID NO: 5047161 - DNA, 25 bp, Homo sapien
gcggtcccgctgctattcctcagag

SEQ ID NO: 5047162 - DNA, 25 bp, Homo sapien
tgcagggttgaacaagcagaaaagc

SEQ ID NO: 5047163 - DNA, 25 bp, Homo sapien
gagtgaaatgcagggttgaacaagc

SEQ ID NO: 5047164 - DNA, 25 bp, Homo sapien
tgtggttgcacagtagggatccttc

SEQ ID NO: 5047165 - DNA, 25 bp, Homo sapien
gttctgagtgaaatgcagggttgaa

SEQ ID NO: 5047166 - DNA, 25 bp, Homo sapien
gccagaggagcgattgaaaccgcaa

SEQ ID NO: 5047167 - DNA, 25 bp, Homo sapien
gaaaccgcaaattgagtgccaacag

SEQ ID NO: 5047168 - DNA, 25 bp, Homo sapien
gagttatccgcagtttcagatgcca

SEQ ID NO: 5047169 - DNA, 25 bp, Homo sapien
tgccaaagggaaactccgaaagcca

SEQ ID NO: 5047170 - DNA, 25 bp, Homo sapien
tggtgtaccacccattcagaaccaa

SEQ ID NO: 5047171 - DNA, 25 bp, Homo sapien
gacatgctgcccatcgtttggtgta

SEQ ID NO: 5047172 - DNA, 25 bp, Homo sapien
tcagaaccaacagcgataatcccct

SEQ ID NO: 5047173 - DNA, 25 bp, Homo sapien
tcttaggctcattaggaatgtctcc

SEQ ID NO: 5047174 - DNA, 25 bp, Homo sapien
gcactagccttggctctggtactca

SEQ ID NO: 5047175 - DNA, 25 bp, Homo sapien
ggctctggtactcagactcagttgg

SEQ ID NO: 5047176 - DNA, 25 bp, Homo sapien
ctctggtactcagactcagttggag

SEQ ID NO: 5047177 - DNA, 25 bp, Homo sapien
gctctggtactcagactcagttgga

SEQ ID NO: 5047178 - DNA, 25 bp, Homo sapien
gcatgcttcttgagccataagctga

SEQ ID NO: 5047179 - DNA, 25 bp, Homo sapien
tggtgaccacgtggcttccaaattg

SEQ ID NO: 5047180 - DNA, 25 bp, Homo sapien
gctcagcaagtgtggtggagtagct

SEQ ID NO: 5047181 - DNA, 25 bp, Homo sapien
acaggctcctccgtccggaaagctt

SEQ ID NO: 5047182 - DNA, 25 bp, Homo sapien
tagacgacgcgctttgtggcttccc

SEQ ID NO: 5047183 - DNA, 25 bp, Homo sapien
tggtagtggttggacttagatcttc

SEQ ID NO: 5047184 - DNA, 25 bp, Homo sapien
agcacatgcatgctgaaactgctgc

SEQ ID NO: 5047185 - DNA, 25 bp, Homo sapien
aatgtttttggttagtgttgctact

SEQ ID NO: 5047186 - DNA, 25 bp, Homo sapien
ttttgtagtaagttctgttaagata

SEQ ID NO: 5047187 - DNA, 25 bp, Homo sapien
tgtagtaagttctgttaagataatt

SEQ ID NO: 5047188 - DNA, 25 bp, Homo sapien
gttaagataattggtgctgtcactg

SEQ ID NO: 5047189 - DNA, 25 bp, Homo sapien
tagtaagttctgttaagataattgg

SEQ ID NO: 5047190 - DNA, 25 bp, Homo sapien
tggtttgtaactgcccatgctggct

SEQ ID NO: 5047191 - DNA, 25 bp, Homo sapien
catgctggctgtcattgccgtcaga

SEQ ID NO: 5047192 - DNA, 25 bp, Homo sapien
catgatggattgtggcaagtaaaca

SEQ ID NO: 5047193 - DNA, 25 bp, Homo sapien
tatacagcactgaacccaaagcatg

SEQ ID NO: 5047194 - DNA, 25 bp, Homo sapien
acttggagtgtttgatgcttgaatc

SEQ ID NO: 5047195 - DNA, 25 bp, Homo sapien
tggagatacttggagtgtttgatgc

SEQ ID NO: 5047196 - DNA, 25 bp, Homo sapien
agtgtttgatgcttgaatcctgtca

SEQ ID NO: 5047197 - DNA, 25 bp, Homo sapien
gatttggagatacttggagtgtttg

SEQ ID NO: 5047198 - DNA, 25 bp, Homo sapien
gagtggccgtatgcccagtcatgag

SEQ ID NO: 5047199 - DNA, 25 bp, Homo sapien
cagtcatgaggcactcctggactca

SEQ ID NO: 5047200 - DNA, 25 bp, Homo sapien
cagcatgccagagactccatttggg

SEQ ID NO: 5047201 - DNA, 25 bp, Homo sapien
gcagtaaagcagtctggaccagagg

SEQ ID NO: 5047202 - DNA, 25 bp, Homo sapien
ttaacagtggatatgtcggaaatgc

SEQ ID NO: 5047203 - DNA, 25 bp, Homo sapien
gatatgtcggaaatgctccggcagt

SEQ ID NO: 5047204 - DNA, 25 bp, Homo sapien
aaatcagctatgctgttaacagtgg

SEQ ID NO: 5047205 - DNA, 25 bp, Homo sapien
gagtgccagttgagtcagaaaatca

SEQ ID NO: 5047206 - DNA, 25 bp, Homo sapien
ttctttgatctgaagtggactggat

SEQ ID NO: 5047207 - DNA, 25 bp, Homo sapien
tggactggattgagcccatctgctg

SEQ ID NO: 5047208 - DNA, 25 bp, Homo sapien
gatagatttcatagccctgcctaca

SEQ ID NO: 5047209 - DNA, 25 bp, Homo sapien
gatctgaagtggactggattgagcc

SEQ ID NO: 5047210 - DNA, 25 bp, Homo sapien
gaacattcattaacctttgctgtaa

SEQ ID NO: 5047211 - DNA, 25 bp, Homo sapien
gtttcttgagcatcaaaactttgtt

SEQ ID NO: 5047212 - DNA, 25 bp, Homo sapien
gctgtaattgtctccctaatggctt

SEQ ID NO: 5047213 - DNA, 25 bp, Homo sapien
tgtttcttgagcatcaaaactttgt

SEQ ID NO: 5047214 - DNA, 25 bp, Homo sapien
agagaagtcttgtccttgcaaaatg

SEQ ID NO: 5047215 - DNA, 25 bp, Homo sapien
gctttttgcactcttcggtccttgg

SEQ ID NO: 5047216 - DNA, 25 bp, Homo sapien
tatgctgttgtatagtaattctcgc

SEQ ID NO: 5047217 - DNA, 25 bp, Homo sapien
ccttggccttataacgtatgaattc

SEQ ID NO: 5047218 - DNA, 25 bp, Homo sapien
gacagctgtgtaagtgaggtttcca

SEQ ID NO: 5047219 - DNA, 25 bp, Homo sapien
cccaagatggcaatactaggtgcat

SEQ ID NO: 5047220 - DNA, 25 bp, Homo sapien
ggtcagtttcttgacgcaacccaag

SEQ ID NO: 5047221 - DNA, 25 bp, Homo sapien
tgtccaatttctggctagcctggtg

SEQ ID NO: 5047222 - DNA, 25 bp, Homo sapien
tcctcctgttgactaacccgactgt

SEQ ID NO: 5047223 - DNA, 25 bp, Homo sapien
gcttgtagtcttgctccagctcgtt

SEQ ID NO: 5047224 - DNA, 25 bp, Homo sapien
ccccataaggaagagagctagttga

SEQ ID NO: 5047225 - DNA, 25 bp, Homo sapien
taacatcggatatgctactgccctc

SEQ ID NO: 5047226 - DNA, 25 bp, Homo sapien
ctgcaagtgtaaaggcataaatgct

SEQ ID NO: 5047227 - DNA, 25 bp, Homo sapien
aaaagattccatgccttgacaccca

SEQ ID NO: 5047228 - DNA, 25 bp, Homo sapien
tgacacccagtgtagttggacttgg

SEQ ID NO: 5047229 - DNA, 25 bp, Homo sapien
gagaaatactgtaacctggctcata

SEQ ID NO: 5047230 - DNA, 25 bp, Homo sapien
catttctaatggtatcggaagagcc

SEQ ID NO: 5047231 - DNA, 25 bp, Homo sapien
caaaagagaaatagcaccactgtca

SEQ ID NO: 5047232 - DNA, 25 bp, Homo sapien
tagcaccactgtcatttgaacaatg

SEQ ID NO: 5047233 - DNA, 25 bp, Homo sapien
gagaaatagcaccactgtcatttga

SEQ ID NO: 5047234 - DNA, 25 bp, Homo sapien
tgtcatttgaacaatggctagttac

SEQ ID NO: 5047235 - DNA, 25 bp, Homo sapien
accttctccagcactcagtgtgacc

SEQ ID NO: 5047236 - DNA, 25 bp, Homo sapien
acaccttctccagcactcagtgtga

SEQ ID NO: 5047237 - DNA, 25 bp, Homo sapien
gccacgtcagcatattatataacac

SEQ ID NO: 5047238 - DNA, 25 bp, Homo sapien
acgtcagcatattatataacacctt

SEQ ID NO: 5047239 - DNA, 25 bp, Homo sapien
cagaatgtctacaatcctctgcaat

SEQ ID NO: 5047240 - DNA, 25 bp, Homo sapien
agctttccgaagtagaaatccctct

SEQ ID NO: 5047241 - DNA, 25 bp, Homo sapien
acagaatgtctacaatcctctgcaa

SEQ ID NO: 5047242 - DNA, 25 bp, Homo sapien
ctttccgaagtagaaatccctctct

SEQ ID NO: 5047243 - DNA, 25 bp, Homo sapien
gcccattgcgcacaccagggtcttt

SEQ ID NO: 5047244 - DNA, 25 bp, Homo sapien
atcgtgcccattgcgcacaccaggg

SEQ ID NO: 5047245 - DNA, 25 bp, Homo sapien
tcagctgcctcatcgtgcccattgc

SEQ ID NO: 5047246 - DNA, 25 bp, Homo sapien
aacggtaagtttcaatacattgagt

SEQ ID NO: 5047247 - DNA, 25 bp, Homo sapien
ggcagccttaggagccacagcagtt

SEQ ID NO: 5047248 - DNA, 25 bp, Homo sapien
gctgcactgctagaactgagaggtt

SEQ ID NO: 5047249 - DNA, 25 bp, Homo sapien
tctctgtgttgagatgggcctcagg

SEQ ID NO: 5047250 - DNA, 25 bp, Homo sapien
tcttgggtgtattcagagctggagc

SEQ ID NO: 5047251 - DNA, 25 bp, Homo sapien
ccatcctcttaaaacctactggtag

SEQ ID NO: 5047252 - DNA, 25 bp, Homo sapien
catcctcttaaaacctactggtagt

SEQ ID NO: 5047253 - DNA, 25 bp, Homo sapien
cacccatcctcttaaaacctactgg

SEQ ID NO: 5047254 - DNA, 25 bp, Homo sapien
tttctggcagacctgttcgagggta

SEQ ID NO: 5047255 - DNA, 25 bp, Homo sapien
ggaagggaccagctgtaaaagacaa

SEQ ID NO: 5047256 - DNA, 25 bp, Homo sapien
tgattcagccaagtaccagtaagtt

SEQ ID NO: 5047257 - DNA, 25 bp, Homo sapien
taagacagtttagcctgaaggccag

SEQ ID NO: 5047258 - DNA, 25 bp, Homo sapien
gagagatggccgtagaaagacctta

SEQ ID NO: 5047259 - DNA, 25 bp, Homo sapien
gattacggacatggactcagtgagg

SEQ ID NO: 5047260 - DNA, 25 bp, Homo sapien
gattcctacggtgagtgactggcca

SEQ ID NO: 5047261 - DNA, 25 bp, Homo sapien
tatgtttgagttggtcgccgtgtgc

SEQ ID NO: 5047262 - DNA, 25 bp, Homo sapien
ggtttgctgaatgcaggctacctaa

SEQ ID NO: 5047263 - DNA, 25 bp, Homo sapien
gaagtgaagttcaacccaatgcaac

SEQ ID NO: 5047264 - DNA, 25 bp, Homo sapien
taaattggtctctgtggacacatgg

SEQ ID NO: 5047265 - DNA, 25 bp, Homo sapien
acctttgttcagtacggatttagca

SEQ ID NO: 5047266 - DNA, 25 bp, Homo sapien
acagcaaagggcgtctacagagacc

SEQ ID NO: 5047267 - DNA, 25 bp, Homo sapien
gagtggactaactcaagacacaagg

SEQ ID NO: 5047268 - DNA, 25 bp, Homo sapien
tactgtctgatgttgtgaaatagcc

SEQ ID NO: 5047269 - DNA, 25 bp, Homo sapien
aaggcaccttcagcgaggacagcaa

SEQ ID NO: 5047270 - DNA, 25 bp, Homo sapien
cttgagtggcacgttaaactacgca

SEQ ID NO: 5047271 - DNA, 25 bp, Homo sapien
tgaacacctcgctccatgctggaag

SEQ ID NO: 5047272 - DNA, 25 bp, Homo sapien
tccaaatggtatcgagctgcttgag

SEQ ID NO: 5047273 - DNA, 25 bp, Homo sapien
gactaattgaggtcgcactcgccaa

SEQ ID NO: 5047274 - DNA, 25 bp, Homo sapien
agactgtaaaaggaattgtgaccca

SEQ ID NO: 5047275 - DNA, 25 bp, Homo sapien
gaaaggcccagatcactatccgaca

SEQ ID NO: 5047276 - DNA, 25 bp, Homo sapien
tatccgacaggaactttcctacttg

SEQ ID NO: 5047277 - DNA, 25 bp, Homo sapien
tgatgctccaccagacctgattttt

SEQ ID NO: 5047278 - DNA, 25 bp, Homo sapien
ggccgacaggctctctgaggaaaca

SEQ ID NO: 5047279 - DNA, 25 bp, Homo sapien
caagtgtattgttaagggctggccc

SEQ ID NO: 5047280 - DNA, 25 bp, Homo sapien
tggagcttatttacatcagcaagtg

SEQ ID NO: 5047281 - DNA, 25 bp, Homo sapien
gagagctgaaagtcctgcgaccctt

SEQ ID NO: 5047282 - DNA, 25 bp, Homo sapien
tacaagcctgtgtgttagagcggtg

SEQ ID NO: 5047283 - DNA, 25 bp, Homo sapien
tctctctcagaaacgcgtagaatac

SEQ ID NO: 5047284 - DNA, 25 bp, Homo sapien
gatgtgtccagtacacatttctctc

SEQ ID NO: 5047285 - DNA, 25 bp, Homo sapien
gaaacgcgtagaatacaagcctgtg

SEQ ID NO: 5047286 - DNA, 25 bp, Homo sapien
tcctgcagttctgctgctccactga

SEQ ID NO: 5047287 - DNA, 25 bp, Homo sapien
actgatcctccatgccggatccaca

SEQ ID NO: 5047288 - DNA, 25 bp, Homo sapien
gcagttctgctgctccactgatcct

SEQ ID NO: 5047289 - DNA, 25 bp, Homo sapien
tgcagttctgctgctccactgatcc

SEQ ID NO: 5047290 - DNA, 25 bp, Homo sapien
cccacacacctccatggtctattct

SEQ ID NO: 5047291 - DNA, 25 bp, Homo sapien
acacacctccatggtctattcttac

SEQ ID NO: 5047292 - DNA, 25 bp, Homo sapien
tgtgttccaacgctgcagctggccc

SEQ ID NO: 5047293 - DNA, 25 bp, Homo sapien
gcagctggccccacacacctccatg

SEQ ID NO: 5047294 - DNA, 25 bp, Homo sapien
caaaggcgtccctgaccctgtcaga

SEQ ID NO: 5047295 - DNA, 25 bp, Homo sapien
acctgcagtgtcactcgatcccaaa

SEQ ID NO: 5047296 - DNA, 25 bp, Homo sapien
agtgtcactcgatcccaaaggcgtc

SEQ ID NO: 5047297 - DNA, 25 bp, Homo sapien
tgaccctgtcagagatattccttcc

SEQ ID NO: 5047298 - DNA, 25 bp, Homo sapien
aagctccatccataggagccctggt

SEQ ID NO: 5047299 - DNA, 25 bp, Homo sapien
tcagactctaaaccacctcatgcct

SEQ ID NO: 5047300 - DNA, 25 bp, Homo sapien
gcttttccaagataggccaacctgc

SEQ ID NO: 5047301 - DNA, 25 bp, Homo sapien
ggccatagaagtatctctcctctct

SEQ ID NO: 5047302 - DNA, 25 bp, Homo sapien
cttgaagattctatcatggagtact

SEQ ID NO: 5047303 - DNA, 25 bp, Homo sapien
ccaaggtgacctcagacacaggcct

SEQ ID NO: 5047304 - DNA, 25 bp, Homo sapien
acacaggcctaccagctttcttgaa

SEQ ID NO: 5047305 - DNA, 25 bp, Homo sapien
gaggtcctactactctcagggttgg

SEQ ID NO: 5047306 - DNA, 25 bp, Homo sapien
acttgtgctgaagtcgtttctgcct

SEQ ID NO: 5047307 - DNA, 25 bp, Homo sapien
cttgtgctgaagtcgtttctgcctc

SEQ ID NO: 5047308 - DNA, 25 bp, Homo sapien
agctattaatttagctccgaggtgc

SEQ ID NO: 5047309 - DNA, 25 bp, Homo sapien
tgagctattaatttagctccgaggt

SEQ ID NO: 5047310 - DNA, 25 bp, Homo sapien
tcctctttagcttcatgaataatgg

SEQ ID NO: 5047311 - DNA, 25 bp, Homo sapien
gcctcctctttagcttcatgaataa

SEQ ID NO: 5047312 - DNA, 25 bp, Homo sapien
ctctttagcttcatgaataatggtg

SEQ ID NO: 5047313 - DNA, 25 bp, Homo sapien
tgtccacacccgcagcctcctcttt

SEQ ID NO: 5047314 - DNA, 25 bp, Homo sapien
tcttcccaaaggtacagctccgtgt

SEQ ID NO: 5047315 - DNA, 25 bp, Homo sapien
gatggtgaggatcatcgccaccctg

SEQ ID NO: 5047316 - DNA, 25 bp, Homo sapien
acaaggagggtgaaatggatgcccc

SEQ ID NO: 5047317 - DNA, 25 bp, Homo sapien
tgagtgacgacctccaagtgctgta

SEQ ID NO: 5047318 - DNA, 25 bp, Homo sapien
aatcgattcaggagtcgggagtccg

SEQ ID NO: 5047319 - DNA, 25 bp, Homo sapien
tgcattttaagaagagcggacttgg

SEQ ID NO: 5047320 - DNA, 25 bp, Homo sapien
tgttctgattagaaagaacaggcat

SEQ ID NO: 5047321 - DNA, 25 bp, Homo sapien
agcggacttggtgtcatgcggcatt

SEQ ID NO: 5047322 - DNA, 25 bp, Homo sapien
tgtaatgacgaaggatgacccagcc

SEQ ID NO: 5047323 - DNA, 25 bp, Homo sapien
aatgagatactgactgcagagctcc

SEQ ID NO: 5047324 - DNA, 25 bp, Homo sapien
ggttctggtcggttcaatgagatac

SEQ ID NO: 5047325 - DNA, 25 bp, Homo sapien
atgacccagcctgcggcactgagct

SEQ ID NO: 5047326 - DNA, 25 bp, Homo sapien
tcctagactagcagccatccagcca

SEQ ID NO: 5047327 - DNA, 25 bp, Homo sapien
tgactgtggaagaatcctggatttc

SEQ ID NO: 5047328 - DNA, 25 bp, Homo sapien
caaggattctgaatacgagtgactg

SEQ ID NO: 5047329 - DNA, 25 bp, Homo sapien
agcaaggattctgaatacgagtgac

SEQ ID NO: 5047330 - DNA, 25 bp, Homo sapien
ttcctttgaggtccactccctaaga

SEQ ID NO: 5047331 - DNA, 25 bp, Homo sapien
ttgaggtccactccctaagaacaat

SEQ ID NO: 5047332 - DNA, 25 bp, Homo sapien
tttcaatctccatgttaattgcaac

SEQ ID NO: 5047333 - DNA, 25 bp, Homo sapien
gaatttcaatctccatgttaattgc

SEQ ID NO: 5047334 - DNA, 25 bp, Homo sapien
tttgaatttcaatctccatgttaat

SEQ ID NO: 5047335 - DNA, 25 bp, Homo sapien
aatctccatgttaattgcaacatac

SEQ ID NO: 5047336 - DNA, 25 bp, Homo sapien
atcacaagcggtgccagggatgcct

SEQ ID NO: 5047337 - DNA, 25 bp, Homo sapien
tggagaacctggatcacaagcggtg

SEQ ID NO: 5047338 - DNA, 25 bp, Homo sapien
tgcagcccacaatgtaagtgctggg

SEQ ID NO: 5047339 - DNA, 25 bp, Homo sapien
gctccatagagacctgaaaatccag

SEQ ID NO: 5047340 - DNA, 25 bp, Homo sapien
tcttcacctctatctgagagccact

SEQ ID NO: 5047341 - DNA, 25 bp, Homo sapien
cctctatctgagagccactcaggag

SEQ ID NO: 5047342 - DNA, 25 bp, Homo sapien
tcccttcttcacctctatctgagag

SEQ ID NO: 5047343 - DNA, 25 bp, Homo sapien
cacctctatctgagagccactcagg

SEQ ID NO: 5047344 - DNA, 25 bp, Homo sapien
ttatgaagtctttcagcccggcagt

SEQ ID NO: 5047345 - DNA, 25 bp, Homo sapien
tgaagtctttcagcccggcagttat

SEQ ID NO: 5047346 - DNA, 25 bp, Homo sapien
tttcagcccggcagttatttctttg

SEQ ID NO: 5047347 - DNA, 25 bp, Homo sapien
cacttcagccatctggcaattatga

SEQ ID NO: 5047348 - DNA, 25 bp, Homo sapien
tggacttcgatatttttgggcctct

SEQ ID NO: 5047349 - DNA, 25 bp, Homo sapien
tcgaatcttaactcggaaccttgag

SEQ ID NO: 5047350 - DNA, 25 bp, Homo sapien
tgggcctctcttgtagcagcttagc

SEQ ID NO: 5047351 - DNA, 25 bp, Homo sapien
gcagcttagcctgtcccttcaggaa

SEQ ID NO: 5047352 - DNA, 25 bp, Homo sapien
tgaagttttcctttcctcagagatt

SEQ ID NO: 5047353 - DNA, 25 bp, Homo sapien
tcctttcctcagagattgtttttaa

SEQ ID NO: 5047354 - DNA, 25 bp, Homo sapien
agttttcctttcctcagagattgtt

SEQ ID NO: 5047355 - DNA, 25 bp, Homo sapien
ttcctttcctcagagattgttttta

SEQ ID NO: 5047356 - DNA, 25 bp, Homo sapien
tatacccaagggttggcagagcaag

SEQ ID NO: 5047357 - DNA, 25 bp, Homo sapien
gttggcagagcaaggcgtgcattct

SEQ ID NO: 5047358 - DNA, 25 bp, Homo sapien
ttttatacccaagggttggcagagc

SEQ ID NO: 5047359 - DNA, 25 bp, Homo sapien
caaggcgtgcattcttcttggtgag

SEQ ID NO: 5047360 - DNA, 25 bp, Homo sapien
gggctgcaccaagtgtgcatcccat

SEQ ID NO: 5047361 - DNA, 25 bp, Homo sapien
tggggctgcaccaagtgtgcatccc

SEQ ID NO: 5047362 - DNA, 25 bp, Homo sapien
gataagtttcagagagagagaagcg

SEQ ID NO: 5047363 - DNA, 25 bp, Homo sapien
gctgcaccaagtgtgcatcccattt

SEQ ID NO: 5047364 - DNA, 25 bp, Homo sapien
tttgtagtcactgtaggaaaactca

SEQ ID NO: 5047365 - DNA, 25 bp, Homo sapien
tcacccaagtgataggcagcaatgg

SEQ ID NO: 5047366 - DNA, 25 bp, Homo sapien
gaatcaattttgtacatatggccat

SEQ ID NO: 5047367 - DNA, 25 bp, Homo sapien
gcccctttctctggtagtgaatcaa

SEQ ID NO: 5047368 - DNA, 25 bp, Homo sapien
gaaaggcactttgagcatcctccat

SEQ ID NO: 5047369 - DNA, 25 bp, Homo sapien
gaggcattttagcaagtccagcttg

SEQ ID NO: 5047370 - DNA, 25 bp, Homo sapien
ccatgaataatgtagcatcatgaca

SEQ ID NO: 5047371 - DNA, 25 bp, Homo sapien
gggccttagcaaagcacatacgctc

SEQ ID NO: 5047372 - DNA, 25 bp, Homo sapien
cctctgagagtggtcccagaagcct

SEQ ID NO: 5047373 - DNA, 25 bp, Homo sapien
tccaaatgctccatccagagagtct

SEQ ID NO: 5047374 - DNA, 25 bp, Homo sapien
aatgctccatccagagagtcttctg

SEQ ID NO: 5047375 - DNA, 25 bp, Homo sapien
tgtggcctctgagagtggtcccaga

SEQ ID NO: 5047376 - DNA, 25 bp, Homo sapien
atttcttagcactggaatatcagtg

SEQ ID NO: 5047377 - DNA, 25 bp, Homo sapien
tagcactggaatatcagtgggtgag

SEQ ID NO: 5047378 - DNA, 25 bp, Homo sapien
actggaatatcagtgggtgagccct

SEQ ID NO: 5047379 - DNA, 25 bp, Homo sapien
tcttagcactggaatatcagtgggt

SEQ ID NO: 5047380 - DNA, 25 bp, Homo sapien
ggatttgaaccagtttctgtttgct

SEQ ID NO: 5047381 - DNA, 25 bp, Homo sapien
tcccaaagccagacgctgaaatggg

SEQ ID NO: 5047382 - DNA, 25 bp, Homo sapien
cagacgctgaaatggggcaatgcaa

SEQ ID NO: 5047383 - DNA, 25 bp, Homo sapien
caggatttgaaccagtttctgtttg

SEQ ID NO: 5047384 - DNA, 25 bp, Homo sapien
atctgtcgttgcctcaccaggtggg

SEQ ID NO: 5047385 - DNA, 25 bp, Homo sapien
actatgagcagctggcaacaccctg

SEQ ID NO: 5047386 - DNA, 25 bp, Homo sapien
caccctggtttggtgttgcaagcct

SEQ ID NO: 5047387 - DNA, 25 bp, Homo sapien
aggatgcagacccttgtccccaatc

SEQ ID NO: 5047388 - DNA, 25 bp, Homo sapien
accctgctgaaccaggtctctctgc

SEQ ID NO: 5047389 - DNA, 25 bp, Homo sapien
ttttgcctttgccttcgcagcattg

SEQ ID NO: 5047390 - DNA, 25 bp, Homo sapien
ccctgctgaaccaggtctctctgcc

SEQ ID NO: 5047391 - DNA, 25 bp, Homo sapien
tgcctttgccttcgcagcattgctg

SEQ ID NO: 5047392 - DNA, 25 bp, Homo sapien
aagcgcatgggctcaaggtgctccc

SEQ ID NO: 5047393 - DNA, 25 bp, Homo sapien
gcgcatgggctcaaggtgctcccac

SEQ ID NO: 5047394 - DNA, 25 bp, Homo sapien
cagaaagcgcatgggctcaaggtgc

SEQ ID NO: 5047395 - DNA, 25 bp, Homo sapien
gaaagcgcatgggctcaaggtgctc

SEQ ID NO: 5047396 - DNA, 25 bp, Homo sapien
tgcatccaggagctctcggcccttt

SEQ ID NO: 5047397 - DNA, 25 bp, Homo sapien
ccctttgggcatttgatcggcctga

SEQ ID NO: 5047398 - DNA, 25 bp, Homo sapien
cttaaagtacttgtgaggctctgaa

SEQ ID NO: 5047399 - DNA, 25 bp, Homo sapien
atttgatcggcctgagctaatgtgc

SEQ ID NO: 5047400 - DNA, 25 bp, Homo sapien
aaaatcctacttgacctgagtccaa

SEQ ID NO: 5047401 - DNA, 25 bp, Homo sapien
gtaaaatcctacttgacctgagtcc

SEQ ID NO: 5047402 - DNA, 25 bp, Homo sapien
ttctagtaaaatcctacttgacctg

SEQ ID NO: 5047403 - DNA, 25 bp, Homo sapien
tagtaaaatcctacttgacctgagt

SEQ ID NO: 5047404 - DNA, 25 bp, Homo sapien
atcatagaggtcacatctggagtgc

SEQ ID NO: 5047405 - DNA, 25 bp, Homo sapien
gaaatcatagaggtcacatctggag

SEQ ID NO: 5047406 - DNA, 25 bp, Homo sapien
tcatagaggtcacatctggagtgca

SEQ ID NO: 5047407 - DNA, 25 bp, Homo sapien
cattaatggaggaagattctgtgct

SEQ ID NO: 5047408 - DNA, 25 bp, Homo sapien
tcatgtcattgacctttccaagccc

SEQ ID NO: 5047409 - DNA, 25 bp, Homo sapien
agcccactgccgctcttcgcctgct

SEQ ID NO: 5047410 - DNA, 25 bp, Homo sapien
ttgacgtctgagtgaaaactgggtg

SEQ ID NO: 5047411 - DNA, 25 bp, Homo sapien
taactgcaagcaggaccaggtgtga

SEQ ID NO: 5047412 - DNA, 25 bp, Homo sapien
ggctagtcacggaacataactgcaa

SEQ ID NO: 5047413 - DNA, 25 bp, Homo sapien
tcacggaacataactgcaagcagga

SEQ ID NO: 5047414 - DNA, 25 bp, Homo sapien
gaacataactgcaagcaggaccagg

SEQ ID NO: 5047415 - DNA, 25 bp, Homo sapien
ccagcgtgttttgaatgaaactcta

SEQ ID NO: 5047416 - DNA, 25 bp, Homo sapien
tccaaatacacgatgggtaccagcg

SEQ ID NO: 5047417 - DNA, 25 bp, Homo sapien
caatgtagctggtagtcactgtccc

SEQ ID NO: 5047418 - DNA, 25 bp, Homo sapien
tggacaaaggagcacgcaggaaatc

SEQ ID NO: 5047419 - DNA, 25 bp, Homo sapien
tattcaggtcgtccacgtgaccact

SEQ ID NO: 5047420 - DNA, 25 bp, Homo sapien
gtcgtccacgtgaccactttggcag

SEQ ID NO: 5047421 - DNA, 25 bp, Homo sapien
tcaggtcgtccacgtgaccactttg

SEQ ID NO: 5047422 - DNA, 25 bp, Homo sapien
gtcttattcaggtcgtccacgtgac

SEQ ID NO: 5047423 - DNA, 25 bp, Homo sapien
tatcctgcagcagtagatactctcc

SEQ ID NO: 5047424 - DNA, 25 bp, Homo sapien
cacccactatggacccaggaatttg

SEQ ID NO: 5047425 - DNA, 25 bp, Homo sapien
gtttaatcctagacatcctctaagg

SEQ ID NO: 5047426 - DNA, 25 bp, Homo sapien
cctctaaggtcaatttcatatggca

SEQ ID NO: 5047427 - DNA, 25 bp, Homo sapien
gattatatgttgactttgaatcacc

SEQ ID NO: 5047428 - DNA, 25 bp, Homo sapien
gcaccatgaagattatatgttgact

SEQ ID NO: 5047429 - DNA, 25 bp, Homo sapien
cctctatggactgctggataatatc

SEQ ID NO: 5047430 - DNA, 25 bp, Homo sapien
cttgtggagcctttggtatattttc

SEQ ID NO: 5047431 - DNA, 25 bp, Homo sapien
ttagggtgaagattggcctcggggc

SEQ ID NO: 5047432 - DNA, 25 bp, Homo sapien
agggtgaagattggcctcggggcac

SEQ ID NO: 5047433 - DNA, 25 bp, Homo sapien
gggtgaagattggcctcggggcacc

SEQ ID NO: 5047434 - DNA, 25 bp, Homo sapien
tagggtgaagattggcctcggggca

SEQ ID NO: 5047435 - DNA, 25 bp, Homo sapien
cctgagagatgagggtggttcatcc

SEQ ID NO: 5047436 - DNA, 25 bp, Homo sapien
atgagggtggttcatccccgagtgc

SEQ ID NO: 5047437 - DNA, 25 bp, Homo sapien
cccgagtgcagctctagaagtggat

SEQ ID NO: 5047438 - DNA, 25 bp, Homo sapien
tccccgagtgcagctctagaagtgg

SEQ ID NO: 5047439 - DNA, 25 bp, Homo sapien
tgtcccaggtttttgactgagaaac

SEQ ID NO: 5047440 - DNA, 25 bp, Homo sapien
aggatgcttgatcccatttatggct

SEQ ID NO: 5047441 - DNA, 25 bp, Homo sapien
ccaggtttttgactgagaaacagga

SEQ ID NO: 5047442 - DNA, 25 bp, Homo sapien
ggttatggaaagagagatggcaagg

SEQ ID NO: 5047443 - DNA, 25 bp, Homo sapien
tgtcagcgtaacgttgtgtacttac

SEQ ID NO: 5047444 - DNA, 25 bp, Homo sapien
gcaaaactgtcagcgtaacgttgtg

SEQ ID NO: 5047445 - DNA, 25 bp, Homo sapien
aactgtcagcgtaacgttgtgtact

SEQ ID NO: 5047446 - DNA, 25 bp, Homo sapien
cagcaaaactgtcagcgtaacgttg

SEQ ID NO: 5047447 - DNA, 25 bp, Homo sapien
tcatgtgttcaggcagcgatccctg

SEQ ID NO: 5047448 - DNA, 25 bp, Homo sapien
tgtgttcaggcagcgatccctgcag

SEQ ID NO: 5047449 - DNA, 25 bp, Homo sapien
ttcaggcagcgatccctgcagttgc

SEQ ID NO: 5047450 - DNA, 25 bp, Homo sapien
tcaggcagcgatccctgcagttgcc

SEQ ID NO: 5047451 - DNA, 25 bp, Homo sapien
tgaatgaatgacttgaggcctgtgg

SEQ ID NO: 5047452 - DNA, 25 bp, Homo sapien
ccattgcaggcattcagtaacatcc

SEQ ID NO: 5047453 - DNA, 25 bp, Homo sapien
attcagtaacatcctcctgcaggga

SEQ ID NO: 5047454 - DNA, 25 bp, Homo sapien
ctgcagggagtctgagtgaatgaat

SEQ ID NO: 5047455 - DNA, 25 bp, Homo sapien
tctgggaccagaggacaagtaggtc

SEQ ID NO: 5047456 - DNA, 25 bp, Homo sapien
ccatcagcttagacttatgttttaa

SEQ ID NO: 5047457 - DNA, 25 bp, Homo sapien
tttacttttagatatgtccatcagc

SEQ ID NO: 5047458 - DNA, 25 bp, Homo sapien
caagtaggtctcattctgcagctca

SEQ ID NO: 5047459 - DNA, 25 bp, Homo sapien
ttttgtacaatgtcacccctcgcct

SEQ ID NO: 5047460 - DNA, 25 bp, Homo sapien
cagatctccagtaatgtggctttca

SEQ ID NO: 5047461 - DNA, 25 bp, Homo sapien
cgcctgttattgtttgctattagac

SEQ ID NO: 5047462 - DNA, 25 bp, Homo sapien
ctattagacagatctccagtaatgt

SEQ ID NO: 5047463 - DNA, 25 bp, Homo sapien
ggaaatcaagcttccgcctgccctt

SEQ ID NO: 5047464 - DNA, 25 bp, Homo sapien
tgtctacacggagaaactccagcat

SEQ ID NO: 5047465 - DNA, 25 bp, Homo sapien
tgcccttgcgctgtctacacggaga

SEQ ID NO: 5047466 - DNA, 25 bp, Homo sapien
tccagcatgactgaaggcagcctgc

SEQ ID NO: 5047467 - DNA, 25 bp, Homo sapien
catttagaagtaaatttgtctgctt

SEQ ID NO: 5047468 - DNA, 25 bp, Homo sapien
taaggcaggtaagaaaggcagactc

SEQ ID NO: 5047469 - DNA, 25 bp, Homo sapien
ctaaggcaggtaagaaaggcagact

SEQ ID NO: 5047470 - DNA, 25 bp, Homo sapien
gactcagcaggaacatttagaagta

SEQ ID NO: 5047471 - DNA, 25 bp, Homo sapien
gaatgcagttttgtggattggtaac

SEQ ID NO: 5047472 - DNA, 25 bp, Homo sapien
caatttgcaattactcttacgtgga

SEQ ID NO: 5047473 - DNA, 25 bp, Homo sapien
catctgtgtttgtccgctctctctg

SEQ ID NO: 5047474 - DNA, 25 bp, Homo sapien
ggttacagtggcttttgaatccatc

SEQ ID NO: 5047475 - DNA, 25 bp, Homo sapien
tgcgttgcctctgattcaatttgca

SEQ ID NO: 5047476 - DNA, 25 bp, Homo sapien
ctttctggtgggttttgctctctat

SEQ ID NO: 5047477 - DNA, 25 bp, Homo sapien
tgtgctctcatctgtcacctggagg

SEQ ID NO: 5047478 - DNA, 25 bp, Homo sapien
tctggtgggttttgctctctatgca

SEQ ID NO: 5047479 - DNA, 25 bp, Homo sapien
tgcctcagccaatgtgctctcatct

SEQ ID NO: 5047480 - DNA, 25 bp, Homo sapien
tccggtggctgcaatgatccaactt

SEQ ID NO: 5047481 - DNA, 25 bp, Homo sapien
tgcaatgatccaactttccatctga

SEQ ID NO: 5047482 - DNA, 25 bp, Homo sapien
cttgacttcagctctttccggtggc

SEQ ID NO: 5047483 - DNA, 25 bp, Homo sapien
gactagaatcaaaggataaatggtc

SEQ ID NO: 5047484 - DNA, 25 bp, Homo sapien
ccttgcctatcaagctgagctgcat

SEQ ID NO: 5047485 - DNA, 25 bp, Homo sapien
tgtactgtaaatatatctatgatca

SEQ ID NO: 5047486 - DNA, 25 bp, Homo sapien
tatctatgatcattgtcctgtgcct

SEQ ID NO: 5047487 - DNA, 25 bp, Homo sapien
agtcagttgctcacttgtactgtaa

SEQ ID NO: 5047488 - DNA, 25 bp, Homo sapien
ttctgtctgcctcagtggaaaagtg

SEQ ID NO: 5047489 - DNA, 25 bp, Homo sapien
gcttgggaagatggatcaatatggc

SEQ ID NO: 5047490 - DNA, 25 bp, Homo sapien
tcagcttgggaagatggatcaatat

SEQ ID NO: 5047491 - DNA, 25 bp, Homo sapien
cagtggaaaagtgcaattccaggta

SEQ ID NO: 5047492 - DNA, 25 bp, Homo sapien
ggagtacatgcactctctttccatc

SEQ ID NO: 5047493 - DNA, 25 bp, Homo sapien
gagaaactcaaaaacatagggagta

SEQ ID NO: 5047494 - DNA, 25 bp, Homo sapien
actcaaaaacatagggagtacatgc

SEQ ID NO: 5047495 - DNA, 25 bp, Homo sapien
aacatagggagtacatgcactctct

SEQ ID NO: 5047496 - DNA, 25 bp, Homo sapien
tgtgctggcctgaaacttcagtgtc

SEQ ID NO: 5047497 - DNA, 25 bp, Homo sapien
cttcagtgtctcctggtcctctatg

SEQ ID NO: 5047498 - DNA, 25 bp, Homo sapien
cctctatggcctctagatttgcttc

SEQ ID NO: 5047499 - DNA, 25 bp, Homo sapien
gtcctctatggcctctagatttgct

SEQ ID NO: 5047500 - DNA, 25 bp, Homo sapien
gacatatcaggttaatcttctcagg

SEQ ID NO: 5047501 - DNA, 25 bp, Homo sapien
tgagaatagaacaaggctgccgaac

SEQ ID NO: 5047502 - DNA, 25 bp, Homo sapien
taccaggaaaatgcgagcaaacaat

SEQ ID NO: 5047503 - DNA, 25 bp, Homo sapien
caaacaattttgagcttaacttcca

SEQ ID NO: 5047504 - DNA, 25 bp, Homo sapien
ttggaatgtgctccctttcgcaggt

SEQ ID NO: 5047505 - DNA, 25 bp, Homo sapien
tacttggaatgtgctccctttcgca

SEQ ID NO: 5047506 - DNA, 25 bp, Homo sapien
aatgtgctccctttcgcaggtgtcc

SEQ ID NO: 5047507 - DNA, 25 bp, Homo sapien
gctccctttcgcaggtgtcctggat

SEQ ID NO: 5047508 - DNA, 25 bp, Homo sapien
tgatttcccgcttatctccatcccc

SEQ ID NO: 5047509 - DNA, 25 bp, Homo sapien
catcccctgaatctgggatgacatt

SEQ ID NO: 5047510 - DNA, 25 bp, Homo sapien
tgtatttaccgaagagtttgtaaga

SEQ ID NO: 5047511 - DNA, 25 bp, Homo sapien
tgggatgacatttgacattctcggt

SEQ ID NO: 5047512 - DNA, 25 bp, Homo sapien
ccaggagcgggatttctggcatgct

SEQ ID NO: 5047513 - DNA, 25 bp, Homo sapien
aaacgccttggtgcctcaccacaaa

SEQ ID NO: 5047514 - DNA, 25 bp, Homo sapien
tcccaggagcgggatttctggcatg

SEQ ID NO: 5047515 - DNA, 25 bp, Homo sapien
ttggctcttctctccgggcaaacgc

SEQ ID NO: 5047516 - DNA, 25 bp, Homo sapien
tcataggtgcaactgcattcacctt

SEQ ID NO: 5047517 - DNA, 25 bp, Homo sapien
tttcataggtgcaactgcattcacc

SEQ ID NO: 5047518 - DNA, 25 bp, Homo sapien
ctttcataggtgcaactgcattcac

SEQ ID NO: 5047519 - DNA, 25 bp, Homo sapien
ttcataggtgcaactgcattcacct

SEQ ID NO: 5047520 - DNA, 25 bp, Homo sapien
tctccttgccggacaccccagctct

SEQ ID NO: 5047521 - DNA, 25 bp, Homo sapien
tcaggctctgcctacagaccaccat

SEQ ID NO: 5047522 - DNA, 25 bp, Homo sapien
tcatctccttgccggacaccccagc

SEQ ID NO: 5047523 - DNA, 25 bp, Homo sapien
tctcaggctctgcctacagaccacc

SEQ ID NO: 5047524 - DNA, 25 bp, Homo sapien
catggtccctgaggtggagggtagg

SEQ ID NO: 5047525 - DNA, 25 bp, Homo sapien
gtccctgaggtggagggtaggagct

SEQ ID NO: 5047526 - DNA, 25 bp, Homo sapien
ctgtgcctttcttctccgtgggcat

SEQ ID NO: 5047527 - DNA, 25 bp, Homo sapien
ttctccgtgggcatggtccctgagg

SEQ ID NO: 5047528 - DNA, 25 bp, Homo sapien
gaagaggctgctgatgtgctgctca

SEQ ID NO: 5047529 - DNA, 25 bp, Homo sapien
tgcagctgggaagaggctgctgatg

SEQ ID NO: 5047530 - DNA, 25 bp, Homo sapien
aagaggctgctgatgtgctgctcat

SEQ ID NO: 5047531 - DNA, 25 bp, Homo sapien
gctgggaagaggctgctgatgtgct

SEQ ID NO: 5047532 - DNA, 25 bp, Homo sapien
tcatgcaagtcgaagagttgtggtt

SEQ ID NO: 5047533 - DNA, 25 bp, Homo sapien
aacagaaggagctttgcatcagaac

SEQ ID NO: 5047534 - DNA, 25 bp, Homo sapien
tcgaagagttgtggttgcatgctgt

SEQ ID NO: 5047535 - DNA, 25 bp, Homo sapien
agttgtagaagcgacgtcctgaaac

SEQ ID NO: 5047536 - DNA, 25 bp, Homo sapien
ggacagctcatccactttctcttca

SEQ ID NO: 5047537 - DNA, 25 bp, Homo sapien
ctggacagacaaaagcaatagtgag

SEQ ID NO: 5047538 - DNA, 25 bp, Homo sapien
gacaccaccaatcagcacattgagt

SEQ ID NO: 5047539 - DNA, 25 bp, Homo sapien
cacattgagtaaagcagttggcggt

SEQ ID NO: 5047540 - DNA, 25 bp, Homo sapien
tgtgctcccatccacatctctttcc

SEQ ID NO: 5047541 - DNA, 25 bp, Homo sapien
tccctgtgctcccatccacatctct

SEQ ID NO: 5047542 - DNA, 25 bp, Homo sapien
cattccagcagcatgggaacagcat

SEQ ID NO: 5047543 - DNA, 25 bp, Homo sapien
ttatcttttaccaaaacattccagc

SEQ ID NO: 5047544 - DNA, 25 bp, Homo sapien
agaggtgaggatacagggaaaacca

SEQ ID NO: 5047545 - DNA, 25 bp, Homo sapien
ctggtttcatatgtaaagagtttgg

SEQ ID NO: 5047546 - DNA, 25 bp, Homo sapien
tagatataaaacctcaaagggagac

SEQ ID NO: 5047547 - DNA, 25 bp, Homo sapien
ggccaatccattttaacaatgagta

SEQ ID NO: 5047548 - DNA, 25 bp, Homo sapien
cttgacaggagataatgagtccttt

SEQ ID NO: 5047549 - DNA, 25 bp, Homo sapien
ccatgcttctgaattaaattgcagg

SEQ ID NO: 5047550 - DNA, 25 bp, Homo sapien
ggagataatgagtcctttgcctctt

SEQ ID NO: 5047551 - DNA, 25 bp, Homo sapien
cagtccatgcttctgaattaaattg

SEQ ID NO: 5047552 - DNA, 25 bp, Homo sapien
tttggttcaacagcattgctgtctc

SEQ ID NO: 5047553 - DNA, 25 bp, Homo sapien
tgctgtctccttacacgtcagcttc

SEQ ID NO: 5047554 - DNA, 25 bp, Homo sapien
ttggttcaacagcattgctgtctcc

SEQ ID NO: 5047555 - DNA, 25 bp, Homo sapien
gatccaaaattgagctgactgccat

SEQ ID NO: 5047556 - DNA, 25 bp, Homo sapien
tccagttggtggctctcctatccat

SEQ ID NO: 5047557 - DNA, 25 bp, Homo sapien
tgcctcctcaggtatccttagtcca

SEQ ID NO: 5047558 - DNA, 25 bp, Homo sapien
catgggtgagaaactgatccaaaat

SEQ ID NO: 5047559 - DNA, 25 bp, Homo sapien
tctcttcatcatttgctgcttcaac

SEQ ID NO: 5047560 - DNA, 25 bp, Homo sapien
tcatttgctgcttcaacagtcccag

SEQ ID NO: 5047561 - DNA, 25 bp, Homo sapien
ttaaatgagcttctcttcatcattt

SEQ ID NO: 5047562 - DNA, 25 bp, Homo sapien
tgagcttctcttcatcatttgctgc

SEQ ID NO: 5047563 - DNA, 25 bp, Homo sapien
tcttgataaaatattccgataatgt

SEQ ID NO: 5047564 - DNA, 25 bp, Homo sapien
gagtacgtttgacagctctgaactg

SEQ ID NO: 5047565 - DNA, 25 bp, Homo sapien
tattccgataatgtatagagtacgt

SEQ ID NO: 5047566 - DNA, 25 bp, Homo sapien
aagtcgctctcagtacatccccatg

SEQ ID NO: 5047567 - DNA, 25 bp, Homo sapien
gatgtctaatagtctgccctctcaa

SEQ ID NO: 5047568 - DNA, 25 bp, Homo sapien
ggtaaatgatttagcagaggttgga

SEQ ID NO: 5047569 - DNA, 25 bp, Homo sapien
acttagtgagtggttctgtaggatc

SEQ ID NO: 5047570 - DNA, 25 bp, Homo sapien
tctgctgatccatccacatatgaac

SEQ ID NO: 5047571 - DNA, 25 bp, Homo sapien
tttggcgttcacagtcctccagtgc

SEQ ID NO: 5047572 - DNA, 25 bp, Homo sapien
ctttggcgttcacagtcctccagtg

SEQ ID NO: 5047573 - DNA, 25 bp, Homo sapien
tggcgttcacagtcctccagtgccc

SEQ ID NO: 5047574 - DNA, 25 bp, Homo sapien
ttggcgttcacagtcctccagtgcc

SEQ ID NO: 5047575 - DNA, 25 bp, Homo sapien
gaccctaggcagatctgatgttcag

SEQ ID NO: 5047576 - DNA, 25 bp, Homo sapien
ctggtgattctttttcggccgcaaa

SEQ ID NO: 5047577 - DNA, 25 bp, Homo sapien
aacaccattgtttctggaccctagg

SEQ ID NO: 5047578 - DNA, 25 bp, Homo sapien
ggtggtactccactatcagagatgc

SEQ ID NO: 5047579 - DNA, 25 bp, Homo sapien
tgagagcgttctccgagaaaccgtt

SEQ ID NO: 5047580 - DNA, 25 bp, Homo sapien
agaaaccgtttgagacatgtgctgt

SEQ ID NO: 5047581 - DNA, 25 bp, Homo sapien
gatgggtctctgataagccaagagc

SEQ ID NO: 5047582 - DNA, 25 bp, Homo sapien
tggcgtcatgagtaagaggcaccac

SEQ ID NO: 5047583 - DNA, 25 bp, Homo sapien
ctgggagttctctccagactgggag

SEQ ID NO: 5047584 - DNA, 25 bp, Homo sapien
tggcaaagaatttttggcgaagtcc

SEQ ID NO: 5047585 - DNA, 25 bp, Homo sapien
cacaagcaactgcaactgggagttc

SEQ ID NO: 5047586 - DNA, 25 bp, Homo sapien
ggcgaagtcctcacaagcaactgca

SEQ ID NO: 5047587 - DNA, 25 bp, Homo sapien
gcatggtagcagatcaaggcaggaa

SEQ ID NO: 5047588 - DNA, 25 bp, Homo sapien
gaagccgtagctccttgatgttgga

SEQ ID NO: 5047589 - DNA, 25 bp, Homo sapien
tttcataggaacttggcagagccac

SEQ ID NO: 5047590 - DNA, 25 bp, Homo sapien
gacttggaggcatcatagcatggta

SEQ ID NO: 5047591 - DNA, 25 bp, Homo sapien
gctgctattgtggttcttgcatcag

SEQ ID NO: 5047592 - DNA, 25 bp, Homo sapien
gattatttcattaccaagtggcaac

SEQ ID NO: 5047593 - DNA, 25 bp, Homo sapien
agtggcaacgttgccttcagaaaag

SEQ ID NO: 5047594 - DNA, 25 bp, Homo sapien
tgttctgcccattgccaagccatta

SEQ ID NO: 5047595 - DNA, 25 bp, Homo sapien
caattgaatttctggcacctgttgg

SEQ ID NO: 5047596 - DNA, 25 bp, Homo sapien
caaccacagacaacaattgaatttc

SEQ ID NO: 5047597 - DNA, 25 bp, Homo sapien
aatagtaactcatattaaccaggac

SEQ ID NO: 5047598 - DNA, 25 bp, Homo sapien
tattaaccaggacaaccacagacaa

SEQ ID NO: 5047599 - DNA, 25 bp, Homo sapien
tgtttagctggaggtgtcgaataca

SEQ ID NO: 5047600 - DNA, 25 bp, Homo sapien
tgtcgaatacagatccttgtcctgc

SEQ ID NO: 5047601 - DNA, 25 bp, Homo sapien
gaatacagatccttgtcctgctctt

SEQ ID NO: 5047602 - DNA, 25 bp, Homo sapien
gctggaggtgtcgaatacagatcct

SEQ ID NO: 5047603 - DNA, 25 bp, Homo sapien
gcaaataaatctgagcgggattggg

SEQ ID NO: 5047604 - DNA, 25 bp, Homo sapien
tgcaaataaatctgagcgggattgg

SEQ ID NO: 5047605 - DNA, 25 bp, Homo sapien
gacccctgaggagccctggagcccc

SEQ ID NO: 5047606 - DNA, 25 bp, Homo sapien
ttttggctgctgcttggacccctga

SEQ ID NO: 5047607 - DNA, 25 bp, Homo sapien
gagccctggagccccggcgccccat

SEQ ID NO: 5047608 - DNA, 25 bp, Homo sapien
ctccttttggctgctgcttggaccc

SEQ ID NO: 5047609 - DNA, 25 bp, Homo sapien
ctggaaacacagtttggaaaccatc

SEQ ID NO: 5047610 - DNA, 25 bp, Homo sapien
tttggaaaccatcacactggcttct

SEQ ID NO: 5047611 - DNA, 25 bp, Homo sapien
cagtttggaaaccatcacactggct

SEQ ID NO: 5047612 - DNA, 25 bp, Homo sapien
aaacacagtttggaaaccatcacac

SEQ ID NO: 5047613 - DNA, 25 bp, Homo sapien
ccatgtgcatgttttgatataatgc

SEQ ID NO: 5047614 - DNA, 25 bp, Homo sapien
ctaagtccaggtcagctgatgtcca

SEQ ID NO: 5047615 - DNA, 25 bp, Homo sapien
tctctgacactttgatggccactaa

SEQ ID NO: 5047616 - DNA, 25 bp, Homo sapien
aggtcagctgatgtccatgtgcatg

SEQ ID NO: 5047617 - DNA, 25 bp, Homo sapien
gtgaaggcaagtgggcacattccct

SEQ ID NO: 5047618 - DNA, 25 bp, Homo sapien
gactctgtgaggatctggttgagtt

SEQ ID NO: 5047619 - DNA, 25 bp, Homo sapien
gctgcaggacaagctccacaatcag

SEQ ID NO: 5047620 - DNA, 25 bp, Homo sapien
gtttgattctgatcatccaagcaca

SEQ ID NO: 5047621 - DNA, 25 bp, Homo sapien
gttcctgccaactatctgatggctc

SEQ ID NO: 5047622 - DNA, 25 bp, Homo sapien
aaagttttgatagtgtgggtgccag

SEQ ID NO: 5047623 - DNA, 25 bp, Homo sapien
gatggctcttggaccctgcattctg

SEQ ID NO: 5047624 - DNA, 25 bp, Homo sapien
tgggttcaagttcctgccaactatc

SEQ ID NO: 5047625 - DNA, 25 bp, Homo sapien
gcctggataaaccagataaactgag

SEQ ID NO: 5047626 - DNA, 25 bp, Homo sapien
ctggataaaccagataaactgagga

SEQ ID NO: 5047627 - DNA, 25 bp, Homo sapien
gataaactgaggaatcaaaaggcat

SEQ ID NO: 5047628 - DNA, 25 bp, Homo sapien
ctgaggaatcaaaaggcatattcag

SEQ ID NO: 5047629 - DNA, 25 bp, Homo sapien
acaaacaatggattcactgacgctc

SEQ ID NO: 5047630 - DNA, 25 bp, Homo sapien
gctccactttcaacacccgaaccaa

SEQ ID NO: 5047631 - DNA, 25 bp, Homo sapien
caatggattcactgacgctcaccat

SEQ ID NO: 5047632 - DNA, 25 bp, Homo sapien
aacaatggattcactgacgctcacc

SEQ ID NO: 5047633 - DNA, 25 bp, Homo sapien
taaaagtcagacacacgcgtaaatg

SEQ ID NO: 5047634 - DNA, 25 bp, Homo sapien
tctccttgttggtactaacaagaat

SEQ ID NO: 5047635 - DNA, 25 bp, Homo sapien
aagaatacaccagtccacgtcacca

SEQ ID NO: 5047636 - DNA, 25 bp, Homo sapien
tcagacacacgcgtaaatgaagggt

SEQ ID NO: 5047637 - DNA, 25 bp, Homo sapien
gatacataggcacactcataaatct

SEQ ID NO: 5047638 - DNA, 25 bp, Homo sapien
tgcttcaagttctgggtttaaatgc

SEQ ID NO: 5047639 - DNA, 25 bp, Homo sapien
ttatttacagatacataggcacact

SEQ ID NO: 5047640 - DNA, 25 bp, Homo sapien
tatgcttcaagttctgggtttaaat

SEQ ID NO: 5047641 - DNA, 25 bp, Homo sapien
catggatgtagggttgcagctgaac

SEQ ID NO: 5047642 - DNA, 25 bp, Homo sapien
tggatgtagggttgcagctgaactt

SEQ ID NO: 5047643 - DNA, 25 bp, Homo sapien
ggatgtagggttgcagctgaacttg

SEQ ID NO: 5047644 - DNA, 25 bp, Homo sapien
ccatggatgtagggttgcagctgaa

SEQ ID NO: 5047645 - DNA, 25 bp, Homo sapien
gtacagagtcttagtgtgcccttta

SEQ ID NO: 5047646 - DNA, 25 bp, Homo sapien
tttgtacagagtcttagtgtgccct

SEQ ID NO: 5047647 - DNA, 25 bp, Homo sapien
gagtcttagtgtgccctttactgtc

SEQ ID NO: 5047648 - DNA, 25 bp, Homo sapien
gtgtgccctttactgtctttcaatc

SEQ ID NO: 5047649 - DNA, 25 bp, Homo sapien
cctcaagatcaaggtttccggtcat

SEQ ID NO: 5047650 - DNA, 25 bp, Homo sapien
ggcagggatgctcgagtttttcttg

SEQ ID NO: 5047651 - DNA, 25 bp, Homo sapien
tttctcctctactgcggcagggatg

SEQ ID NO: 5047652 - DNA, 25 bp, Homo sapien
ttcttgctcctactccccttcttct

SEQ ID NO: 5047653 - DNA, 25 bp, Homo sapien
cgttgtcatgtcctgagcctgccaa

SEQ ID NO: 5047654 - DNA, 25 bp, Homo sapien
ctccgttgtcatgtcctgagcctgc

SEQ ID NO: 5047655 - DNA, 25 bp, Homo sapien
cttgttttggtgtcttctacgtctc

SEQ ID NO: 5047656 - DNA, 25 bp, Homo sapien
tttggtgtcttctacgtctccttcc

SEQ ID NO: 5047657 - DNA, 25 bp, Homo sapien
gggagcagctcttgttactgtggtt

SEQ ID NO: 5047658 - DNA, 25 bp, Homo sapien
tacagggcaaggcaccaacagcgtc

SEQ ID NO: 5047659 - DNA, 25 bp, Homo sapien
accaacagcgtctgccacgttggcc

SEQ ID NO: 5047660 - DNA, 25 bp, Homo sapien
gttactgtggttattgaatcttctg

SEQ ID NO: 5047661 - DNA, 25 bp, Homo sapien
taggtagatgcaacttatcatgcat

SEQ ID NO: 5047662 - DNA, 25 bp, Homo sapien
ttgaaacaggcagattaggtcactg

SEQ ID NO: 5047663 - DNA, 25 bp, Homo sapien
tcctggcagaatagtttgtcgatga

SEQ ID NO: 5047664 - DNA, 25 bp, Homo sapien
atggcccattgatttgctttcattg

SEQ ID NO: 5047665 - DNA, 25 bp, Homo sapien
aagtcggcgggacactgaaaggtca

SEQ ID NO: 5047666 - DNA, 25 bp, Homo sapien
tggcagcgactgacttccctgttaa

SEQ ID NO: 5047667 - DNA, 25 bp, Homo sapien
gacaacatgagtagaaagactgcct

SEQ ID NO: 5047668 - DNA, 25 bp, Homo sapien
gcctgggattcctactatgacctat

SEQ ID NO: 5047669 - DNA, 25 bp, Homo sapien
ggccagctttgcagaggccttattg

SEQ ID NO: 5047670 - DNA, 25 bp, Homo sapien
gcagaggccttattgctcccattca

SEQ ID NO: 5047671 - DNA, 25 bp, Homo sapien
cagctttgcagaggccttattgctc

SEQ ID NO: 5047672 - DNA, 25 bp, Homo sapien
ccttattgctcccattcaggccatg

SEQ ID NO: 5047673 - DNA, 25 bp, Homo sapien
gaccccatcaataagcatcactctg

SEQ ID NO: 5047674 - DNA, 25 bp, Homo sapien
aacgttctttattctcacctccgca

SEQ ID NO: 5047675 - DNA, 25 bp, Homo sapien
cactctgagagcagtactaattttc

SEQ ID NO: 5047676 - DNA, 25 bp, Homo sapien
tcctgtctcagcgtgtggaactgct

SEQ ID NO: 5047677 - DNA, 25 bp, Homo sapien
ggatgggaaggtcccctcagattcc

SEQ ID NO: 5047678 - DNA, 25 bp, Homo sapien
gatgggaaggtcccctcagattcct

SEQ ID NO: 5047679 - DNA, 25 bp, Homo sapien
catggatgggaaggtcccctcagat

SEQ ID NO: 5047680 - DNA, 25 bp, Homo sapien
atcatggatgggaaggtcccctcag

SEQ ID NO: 5047681 - DNA, 25 bp, Homo sapien
tgtagtgcaagcgagtccccaataa

SEQ ID NO: 5047682 - DNA, 25 bp, Homo sapien
gatttgttcctttgcgcctaatgta

SEQ ID NO: 5047683 - DNA, 25 bp, Homo sapien
cctggtccaccaaattgcgttgttt

SEQ ID NO: 5047684 - DNA, 25 bp, Homo sapien
tgcgttgttttttgagtgagaagac

SEQ ID NO: 5047685 - DNA, 25 bp, Homo sapien
tcatggctttgcacagcgcactgtg

SEQ ID NO: 5047686 - DNA, 25 bp, Homo sapien
atggctttgcacagcgcactgtgcc

SEQ ID NO: 5047687 - DNA, 25 bp, Homo sapien
catggctttgcacagcgcactgtgc

SEQ ID NO: 5047688 - DNA, 25 bp, Homo sapien
tggctttgcacagcgcactgtgcca

SEQ ID NO: 5047689 - DNA, 25 bp, Homo sapien
gggtcgatgctgagtctatgttttt

SEQ ID NO: 5047690 - DNA, 25 bp, Homo sapien
catagggtcgatgctgagtctatgt

SEQ ID NO: 5047691 - DNA, 25 bp, Homo sapien
tagggtcgatgctgagtctatgttt

SEQ ID NO: 5047692 - DNA, 25 bp, Homo sapien
tcatagggtcgatgctgagtctatg

SEQ ID NO: 5047693 - DNA, 25 bp, Homo sapien
gaatgcctgctagcttgggtactgg

SEQ ID NO: 5047694 - DNA, 25 bp, Homo sapien
caggaccttctgctatgaagttttc

SEQ ID NO: 5047695 - DNA, 25 bp, Homo sapien
tgtgtaatcatgtgtcttgcagttc

SEQ ID NO: 5047696 - DNA, 25 bp, Homo sapien
tgggtactggtctttcaggaccttc

SEQ ID NO: 5047697 - DNA, 25 bp, Homo sapien
gattctcagttccatactccctctg

SEQ ID NO: 5047698 - DNA, 25 bp, Homo sapien
tcgagtcttctgtgtagtggcaagg

SEQ ID NO: 5047699 - DNA, 25 bp, Homo sapien
tctaatgcagggatcccgacagcct

SEQ ID NO: 5047700 - DNA, 25 bp, Homo sapien
tcttgcgtgccatagcaggttctag

SEQ ID NO: 5047701 - DNA, 25 bp, Homo sapien
ttcttggaccaacacactatctcat

SEQ ID NO: 5047702 - DNA, 25 bp, Homo sapien
tgtagggctgaatctcagtcttgca

SEQ ID NO: 5047703 - DNA, 25 bp, Homo sapien
tgaatctcagtcttgcatttcccca

SEQ ID NO: 5047704 - DNA, 25 bp, Homo sapien
tgtggcagctgtgcctcttgttgta

SEQ ID NO: 5047705 - DNA, 25 bp, Homo sapien
gacttcattgcactagccttcaaaa

SEQ ID NO: 5047706 - DNA, 25 bp, Homo sapien
ccttcaaaacaattaggcataatgg

SEQ ID NO: 5047707 - DNA, 25 bp, Homo sapien
taatggtaaatcagggtaaactaca

SEQ ID NO: 5047708 - DNA, 25 bp, Homo sapien
aaggagcacatagggctgacttcat

SEQ ID NO: 5047709 - DNA, 25 bp, Homo sapien
gatgtgcagatgcagcttgcctttc

SEQ ID NO: 5047710 - DNA, 25 bp, Homo sapien
cagatgcagcttgcctttccagctt

SEQ ID NO: 5047711 - DNA, 25 bp, Homo sapien
ttgccctggtggagatgtgcagatg

SEQ ID NO: 5047712 - DNA, 25 bp, Homo sapien
gccctggtggagatgtgcagatgca

SEQ ID NO: 5047713 - DNA, 25 bp, Homo sapien
tccaaatgaagttgtagcactccca

SEQ ID NO: 5047714 - DNA, 25 bp, Homo sapien
actccaaatgaagttgtagcactcc

SEQ ID NO: 5047715 - DNA, 25 bp, Homo sapien
aatgaagttgtagcactcccattca

SEQ ID NO: 5047716 - DNA, 25 bp, Homo sapien
gaagttgtagcactcccattcaatg

SEQ ID NO: 5047717 - DNA, 25 bp, Homo sapien
ttgtgccagttcagtattcagacac

SEQ ID NO: 5047718 - DNA, 25 bp, Homo sapien
ggtatccgtgatttgtgccagttca

SEQ ID NO: 5047719 - DNA, 25 bp, Homo sapien
taaacatctgtaccgatacactgac

SEQ ID NO: 5047720 - DNA, 25 bp, Homo sapien
tctggtggattaatggtggtatccg

SEQ ID NO: 5047721 - DNA, 25 bp, Homo sapien
ctggagtccaaatatctttatgatc

SEQ ID NO: 5047722 - DNA, 25 bp, Homo sapien
tggagtccaaatatctttatgatct

SEQ ID NO: 5047723 - DNA, 25 bp, Homo sapien
gttaaagtggtctgtaagggagctg

SEQ ID NO: 5047724 - DNA, 25 bp, Homo sapien
atgttaaagtggtctgtaagggagc

SEQ ID NO: 5047725 - DNA, 25 bp, Homo sapien
tgttaaagtggtctgtaagggagct

SEQ ID NO: 5047726 - DNA, 25 bp, Homo sapien
tgggtttcactcgtgtttgctcaag

SEQ ID NO: 5047727 - DNA, 25 bp, Homo sapien
taagtgggtttcactcgtgtttgct

SEQ ID NO: 5047728 - DNA, 25 bp, Homo sapien
ggtttcactcgtgtttgctcaagag

SEQ ID NO: 5047729 - DNA, 25 bp, Homo sapien
tttcactcgtgtttgctcaagagca

SEQ ID NO: 5047730 - DNA, 25 bp, Homo sapien
ttctttccttctcctgcgctgacat

SEQ ID NO: 5047731 - DNA, 25 bp, Homo sapien
tctttccttctcctgcgctgacata

SEQ ID NO: 5047732 - DNA, 25 bp, Homo sapien
tcacccttcctgatgagaaggtgat

SEQ ID NO: 5047733 - DNA, 25 bp, Homo sapien
tcctgatgagaaggtgatttccttc

SEQ ID NO: 5047734 - DNA, 25 bp, Homo sapien
tgcattcatgcatgtctccacgcag

SEQ ID NO: 5047735 - DNA, 25 bp, Homo sapien
ctccacgcagtttctccagacaagg

SEQ ID NO: 5047736 - DNA, 25 bp, Homo sapien
catgtggaccctcgtttgagagacc

SEQ ID NO: 5047737 - DNA, 25 bp, Homo sapien
cacgcagtttctccagacaaggctg

SEQ ID NO: 5047738 - DNA, 25 bp, Homo sapien
gatgtggtggcttcctgtgcctgga

SEQ ID NO: 5047739 - DNA, 25 bp, Homo sapien
tgcttgatgtggtggcttcctgtgc

SEQ ID NO: 5047740 - DNA, 25 bp, Homo sapien
tgtggtggcttcctgtgcctggact

SEQ ID NO: 5047741 - DNA, 25 bp, Homo sapien
catgcttgatgtggtggcttcctgt

SEQ ID NO: 5047742 - DNA, 25 bp, Homo sapien
acagggggtgtttcatggcctggac

SEQ ID NO: 5047743 - DNA, 25 bp, Homo sapien
cctggacaagcaggtaaaaatccag

SEQ ID NO: 5047744 - DNA, 25 bp, Homo sapien
caatgacctcaatgatggcagatac

SEQ ID NO: 5047745 - DNA, 25 bp, Homo sapien
ggcctggacaagcaggtaaaaatcc

SEQ ID NO: 5047746 - DNA, 25 bp, Homo sapien
gtgccaagccatactacagcaaagg

SEQ ID NO: 5047747 - DNA, 25 bp, Homo sapien
cctcgggctgataattggcaactgt

SEQ ID NO: 5047748 - DNA, 25 bp, Homo sapien
cggtaatttggagtagtgccaagcc

SEQ ID NO: 5047749 - DNA, 25 bp, Homo sapien
tattttctgcattgactatctggca

SEQ ID NO: 5047750 - DNA, 25 bp, Homo sapien
gagacagatttgaccaccagtccac

SEQ ID NO: 5047751 - DNA, 25 bp, Homo sapien
atgttattgttgttagcgtagtgac

SEQ ID NO: 5047752 - DNA, 25 bp, Homo sapien
tgacagtcttccaaacacgcttgag

SEQ ID NO: 5047753 - DNA, 25 bp, Homo sapien
cacgcttgagacagatttgaccacc

SEQ ID NO: 5047754 - DNA, 25 bp, Homo sapien
tccaatagctcttccggtaacagct

SEQ ID NO: 5047755 - DNA, 25 bp, Homo sapien
tttgaccgccagcttccaatagctc

SEQ ID NO: 5047756 - DNA, 25 bp, Homo sapien
attgctcacatttgaccgccagctt

SEQ ID NO: 5047757 - DNA, 25 bp, Homo sapien
tagctcttccggtaacagctgatct

SEQ ID NO: 5047758 - DNA, 25 bp, Homo sapien
gtttactcctgagtccatactcagc

SEQ ID NO: 5047759 - DNA, 25 bp, Homo sapien
tttactcctgagtccatactcagca

SEQ ID NO: 5047760 - DNA, 25 bp, Homo sapien
gagagctgtactgccattaatgtga

SEQ ID NO: 5047761 - DNA, 25 bp, Homo sapien
cgtgttatttattaacatgcgagcc

SEQ ID NO: 5047762 - DNA, 25 bp, Homo sapien
tagttcacattgagcagagcaggtg

SEQ ID NO: 5047763 - DNA, 25 bp, Homo sapien
tctgccattgtcgaggagagctgta

SEQ ID NO: 5047764 - DNA, 25 bp, Homo sapien
gttgctgggtagaatgaaggactcc

SEQ ID NO: 5047765 - DNA, 25 bp, Homo sapien
ttgctgggtagaatgaaggactcct

SEQ ID NO: 5047766 - DNA, 25 bp, Homo sapien
tctcctgaggacctttttacagaaa

SEQ ID NO: 5047767 - DNA, 25 bp, Homo sapien
aaataatctgccataatttctgact

SEQ ID NO: 5047768 - DNA, 25 bp, Homo sapien
ggaaaacgtcgcttgtctgtataaa

SEQ ID NO: 5047769 - DNA, 25 bp, Homo sapien
aatagcatggtcagatttgctgttg

SEQ ID NO: 5047770 - DNA, 25 bp, Homo sapien
gaaaatagcatggtcagatttgctg

SEQ ID NO: 5047771 - DNA, 25 bp, Homo sapien
tttgctgttggaaaacgtcgcttgt

SEQ ID NO: 5047772 - DNA, 25 bp, Homo sapien
cagcaaatgttctttggatgccttt

SEQ ID NO: 5047773 - DNA, 25 bp, Homo sapien
agcaaatgttctttggatgcctttg

SEQ ID NO: 5047774 - DNA, 25 bp, Homo sapien
acagcaaatgttctttggatgcctt

SEQ ID NO: 5047775 - DNA, 25 bp, Homo sapien
aagggacatctacagattttgactc

SEQ ID NO: 5047776 - DNA, 25 bp, Homo sapien
gacatctacagattttgactcttcg

SEQ ID NO: 5047777 - DNA, 25 bp, Homo sapien
tcaagggacatctacagattttgac

SEQ ID NO: 5047778 - DNA, 25 bp, Homo sapien
tctacagattttgactcttcgacag

SEQ ID NO: 5047779 - DNA, 25 bp, Homo sapien
atttcccttttcacataggcctcct

SEQ ID NO: 5047780 - DNA, 25 bp, Homo sapien
gcccagtgttcttatgtccttaaca

SEQ ID NO: 5047781 - DNA, 25 bp, Homo sapien
gaaaaatggtccagtatttgacatc

SEQ ID NO: 5047782 - DNA, 25 bp, Homo sapien
ccttttcacataggcctcctgtgaa

SEQ ID NO: 5047783 - DNA, 25 bp, Homo sapien
tgaaccattcagtgctttagattct

SEQ ID NO: 5047784 - DNA, 25 bp, Homo sapien
aaccattcagtgctttagattctgc

SEQ ID NO: 5047785 - DNA, 25 bp, Homo sapien
tctgaaccattcagtgctttagatt

SEQ ID NO: 5047786 - DNA, 25 bp, Homo sapien
ctgctgactttgcctgcatgctcat

SEQ ID NO: 5047787 - DNA, 25 bp, Homo sapien
ttccaccaaactggctgattgtatt

SEQ ID NO: 5047788 - DNA, 25 bp, Homo sapien
ttttttgtgcttccaccaaactggc

SEQ ID NO: 5047789 - DNA, 25 bp, Homo sapien
caaactggctgattgtatttgacat

SEQ ID NO: 5047790 - DNA, 25 bp, Homo sapien
acttttttgtgcttccaccaaactg

SEQ ID NO: 5047791 - DNA, 25 bp, Homo sapien
gcagttcaccatatgcacattcatg

SEQ ID NO: 5047792 - DNA, 25 bp, Homo sapien
tccataaagcagttcaccatatgca

SEQ ID NO: 5047793 - DNA, 25 bp, Homo sapien
tggcaaaggaaaaactagctatgcg

SEQ ID NO: 5047794 - DNA, 25 bp, Homo sapien
tagctatgcgttcaaagccatccaa

SEQ ID NO: 5047795 - DNA, 25 bp, Homo sapien
agaggattctaagagttaagtatgc

SEQ ID NO: 5047796 - DNA, 25 bp, Homo sapien
tcttgaggccagtgacgttgtgcat

SEQ ID NO: 5047797 - DNA, 25 bp, Homo sapien
tctgctcctgtgctatgtggaactt

SEQ ID NO: 5047798 - DNA, 25 bp, Homo sapien
cattctgctcctgtgctatgtggaa

SEQ ID NO: 5047799 - DNA, 25 bp, Homo sapien
gctcctgtgctatgtggaactttga

SEQ ID NO: 5047800 - DNA, 25 bp, Homo sapien
tgctcctgtgctatgtggaactttg

SEQ ID NO: 5047801 - DNA, 25 bp, Homo sapien
ggctcactggtatgtcgtgggtctc

SEQ ID NO: 5047802 - DNA, 25 bp, Homo sapien
cactggtatgtcgtgggtctccttc

SEQ ID NO: 5047803 - DNA, 25 bp, Homo sapien
ctggtatgtcgtgggtctccttcta

SEQ ID NO: 5047804 - DNA, 25 bp, Homo sapien
ttagggctcactggtatgtcgtggg

SEQ ID NO: 5047805 - DNA, 25 bp, Homo sapien
aacattcctgatctatctatcctgg

SEQ ID NO: 5047806 - DNA, 25 bp, Homo sapien
taatagtcttccttcggatctgaag

SEQ ID NO: 5047807 - DNA, 25 bp, Homo sapien
gcttggctggcaacaggttcccagg

SEQ ID NO: 5047808 - DNA, 25 bp, Homo sapien
gggcttccactaacgcctgccatga

SEQ ID NO: 5047809 - DNA, 25 bp, Homo sapien
caaaaccctggctatcttggtgagt

SEQ ID NO: 5047810 - DNA, 25 bp, Homo sapien
tgcaggcacttcctgattgcaaaga

SEQ ID NO: 5047811 - DNA, 25 bp, Homo sapien
aatatgcctctttgggtccatcatg

SEQ ID NO: 5047812 - DNA, 25 bp, Homo sapien
catgaggaggcatcaaggacttctt

SEQ ID NO: 5047813 - DNA, 25 bp, Homo sapien
tagctcatctccacaccaagagatc

SEQ ID NO: 5047814 - DNA, 25 bp, Homo sapien
ttctagctcatctccacaccaagag

SEQ ID NO: 5047815 - DNA, 25 bp, Homo sapien
ttttctagctcatctccacaccaag

SEQ ID NO: 5047816 - DNA, 25 bp, Homo sapien
gctcatctccacaccaagagatcat

SEQ ID NO: 5047817 - DNA, 25 bp, Homo sapien
tgaagctcagacttgtaaggtatgt

SEQ ID NO: 5047818 - DNA, 25 bp, Homo sapien
ttaagcatctaaccctttaggagac

SEQ ID NO: 5047819 - DNA, 25 bp, Homo sapien
tgtaaatggcccaagtgtaactccc

SEQ ID NO: 5047820 - DNA, 25 bp, Homo sapien
ggagacatcaaggattcccccactc

SEQ ID NO: 5047821 - DNA, 25 bp, Homo sapien
tagctaatgcttgctccacctgtcc

SEQ ID NO: 5047822 - DNA, 25 bp, Homo sapien
ttttagaagtcaaagaggccatcca

SEQ ID NO: 5047823 - DNA, 25 bp, Homo sapien
gtaacacgctgtgaggtggtccaga

SEQ ID NO: 5047824 - DNA, 25 bp, Homo sapien
tgcattatcagatcatggccacatg

SEQ ID NO: 5047825 - DNA, 25 bp, Homo sapien
gacttagaatacaggtctctccact

SEQ ID NO: 5047826 - DNA, 25 bp, Homo sapien
tggacttagaatacaggtctctcca

SEQ ID NO: 5047827 - DNA, 25 bp, Homo sapien
ctctggacttagaatacaggtctct

SEQ ID NO: 5047828 - DNA, 25 bp, Homo sapien
ttagaatacaggtctctccactcac

SEQ ID NO: 5047829 - DNA, 25 bp, Homo sapien
tccctcacactgtgtggatttacct

SEQ ID NO: 5047830 - DNA, 25 bp, Homo sapien
caagaagagcattaccaggagacac

SEQ ID NO: 5047831 - DNA, 25 bp, Homo sapien
gaagagcattaccaggagacaccct

SEQ ID NO: 5047832 - DNA, 25 bp, Homo sapien
gtggatttaccttggcttaagtgtg

SEQ ID NO: 5047833 - DNA, 25 bp, Homo sapien
tagacagcatcattaatcgaacaag

SEQ ID NO: 5047834 - DNA, 25 bp, Homo sapien
cgtgaaatacgattcataagcggat

SEQ ID NO: 5047835 - DNA, 25 bp, Homo sapien
cacacccgtggcaaacaatttcttc

SEQ ID NO: 5047836 - DNA, 25 bp, Homo sapien
tcataagcggatagagaactttgct

SEQ ID NO: 5047837 - DNA, 25 bp, Homo sapien
cttcacaacagcgaagataccgatg

SEQ ID NO: 5047838 - DNA, 25 bp, Homo sapien
cagcaatatgcaaggctccagataa

SEQ ID NO: 5047839 - DNA, 25 bp, Homo sapien
catctagtcagcaatatgcaaggct

SEQ ID NO: 5047840 - DNA, 25 bp, Homo sapien
acaacagcgaagataccgatgtgtc

SEQ ID NO: 5047841 - DNA, 25 bp, Homo sapien
gtccgtcacttcacttacagggcaa

SEQ ID NO: 5047842 - DNA, 25 bp, Homo sapien
catgcaggcactagaaggttttccc

SEQ ID NO: 5047843 - DNA, 25 bp, Homo sapien
agatagcctggccttgaacgctggc

SEQ ID NO: 5047844 - DNA, 25 bp, Homo sapien
taggcactgtaacacagcggccaag

SEQ ID NO: 5047845 - DNA, 25 bp, Homo sapien
ctccttgcttgggactggctatggg

SEQ ID NO: 5047846 - DNA, 25 bp, Homo sapien
ccttgcttgggactggctatgggtt

SEQ ID NO: 5047847 - DNA, 25 bp, Homo sapien
gggactggctatgggttgtcttcct

SEQ ID NO: 5047848 - DNA, 25 bp, Homo sapien
cttgggactggctatgggttgtctt

SEQ ID NO: 5047849 - DNA, 25 bp, Homo sapien
gaatgcagctctaattccgacacca

SEQ ID NO: 5047850 - DNA, 25 bp, Homo sapien
cattttgcactcttgagcagcctga

SEQ ID NO: 5047851 - DNA, 25 bp, Homo sapien
gacaccacgggactgtttaattcag

SEQ ID NO: 5047852 - DNA, 25 bp, Homo sapien
tcttcccaggtgaaagcaaacgaat

SEQ ID NO: 5047853 - DNA, 25 bp, Homo sapien
cctgtgagctgaggatctgccaaag

SEQ ID NO: 5047854 - DNA, 25 bp, Homo sapien
actgtaactgctcgttccagattca

SEQ ID NO: 5047855 - DNA, 25 bp, Homo sapien
ctgtcactgtaactgctcgttccag

SEQ ID NO: 5047856 - DNA, 25 bp, Homo sapien
agctgaggatctgccaaagctgtca

SEQ ID NO: 5047857 - DNA, 25 bp, Homo sapien
tattgtgaccttattgtcttctggt

SEQ ID NO: 5047858 - DNA, 25 bp, Homo sapien
tcctcattcccctcatggttgacct

SEQ ID NO: 5047859 - DNA, 25 bp, Homo sapien
tactgctctaaagccagactcttcc

SEQ ID NO: 5047860 - DNA, 25 bp, Homo sapien
tgaccttattgtcttctggtgtttg

SEQ ID NO: 5047861 - DNA, 25 bp, Homo sapien
ggctccaaaactgggtagagcttca

SEQ ID NO: 5047862 - DNA, 25 bp, Homo sapien
aaaactgggtagagcttcaccttca

SEQ ID NO: 5047863 - DNA, 25 bp, Homo sapien
tccaaaactgggtagagcttcacct

SEQ ID NO: 5047864 - DNA, 25 bp, Homo sapien
ttcttgggctccaaaactgggtaga

SEQ ID NO: 5047865 - DNA, 25 bp, Homo sapien
ttctctccagtacaagttgcctctt

SEQ ID NO: 5047866 - DNA, 25 bp, Homo sapien
tctccagtacaagttgcctcttctt

SEQ ID NO: 5047867 - DNA, 25 bp, Homo sapien
taggcattctctccagtacaagttg

SEQ ID NO: 5047868 - DNA, 25 bp, Homo sapien
gcattctctccagtacaagttgcct

SEQ ID NO: 5047869 - DNA, 25 bp, Homo sapien
ctactctactgaaccacgtagaatc

SEQ ID NO: 5047870 - DNA, 25 bp, Homo sapien
tatggggtagaaaggcaacacatgc

SEQ ID NO: 5047871 - DNA, 25 bp, Homo sapien
catgtccacaaggacacagtatggg

SEQ ID NO: 5047872 - DNA, 25 bp, Homo sapien
ccacgtagaatcctgtcctccctca

SEQ ID NO: 5047873 - DNA, 25 bp, Homo sapien
gtgtagatttgaaggatagagtcat

SEQ ID NO: 5047874 - DNA, 25 bp, Homo sapien
gcagtgtagatttgaaggatagagt

SEQ ID NO: 5047875 - DNA, 25 bp, Homo sapien
cagtgtagatttgaaggatagagtc

SEQ ID NO: 5047876 - DNA, 25 bp, Homo sapien
ggcagtgtagatttgaaggatagag

SEQ ID NO: 5047877 - DNA, 25 bp, Homo sapien
actaacaccatcactgattctctct

SEQ ID NO: 5047878 - DNA, 25 bp, Homo sapien
tgcttgacactaacaccatcactga

SEQ ID NO: 5047879 - DNA, 25 bp, Homo sapien
cattatgcttgacactaacaccatc

SEQ ID NO: 5047880 - DNA, 25 bp, Homo sapien
tgtgtgtctagcattgtcttagttc

SEQ ID NO: 5047881 - DNA, 25 bp, Homo sapien
cactgggtgagggccataggaaaat

SEQ ID NO: 5047882 - DNA, 25 bp, Homo sapien
taagaatgcacagtccactgggtga

SEQ ID NO: 5047883 - DNA, 25 bp, Homo sapien
tgctgtggaatccagtttagattcg

SEQ ID NO: 5047884 - DNA, 25 bp, Homo sapien
caaaagcgagttccattctgctgtg

SEQ ID NO: 5047885 - DNA, 25 bp, Homo sapien
tacaggatcttgtatcagccccact

SEQ ID NO: 5047886 - DNA, 25 bp, Homo sapien
aggatcttgtatcagccccactcag

SEQ ID NO: 5047887 - DNA, 25 bp, Homo sapien
ccacaggccctacaggatcttgtat

SEQ ID NO: 5047888 - DNA, 25 bp, Homo sapien
gccctacaggatcttgtatcagccc

SEQ ID NO: 5047889 - DNA, 25 bp, Homo sapien
tcttttattggtgctgtgttgattc

SEQ ID NO: 5047890 - DNA, 25 bp, Homo sapien
ggaccaggggtaccaagacgtctgc

SEQ ID NO: 5047891 - DNA, 25 bp, Homo sapien
gtaccaagacgtctgctggcttctt

SEQ ID NO: 5047892 - DNA, 25 bp, Homo sapien
cttttattggtgctgtgttgattcc

SEQ ID NO: 5047893 - DNA, 25 bp, Homo sapien
gaagagcagggcttttttaggtgaa

SEQ ID NO: 5047894 - DNA, 25 bp, Homo sapien
cagtccccttcttacgttgattggg

SEQ ID NO: 5047895 - DNA, 25 bp, Homo sapien
cacatagacaaggtgccacaaatgg

SEQ ID NO: 5047896 - DNA, 25 bp, Homo sapien
ttgcccctctctcatgagataggat

SEQ ID NO: 5047897 - DNA, 25 bp, Homo sapien
caagtgttccactggaaatgtggct

SEQ ID NO: 5047898 - DNA, 25 bp, Homo sapien
tgtggcttctataacccattgccac

SEQ ID NO: 5047899 - DNA, 25 bp, Homo sapien
tctaaaaatctctcaagtgttccac

SEQ ID NO: 5047900 - DNA, 25 bp, Homo sapien
gcttctataacccattgccacatgg

SEQ ID NO: 5047901 - DNA, 25 bp, Homo sapien
gacaaaatagctgattactaatgag

SEQ ID NO: 5047902 - DNA, 25 bp, Homo sapien
ggattgtacccatgtactgatggag

SEQ ID NO: 5047903 - DNA, 25 bp, Homo sapien
gctgaaattcacaccctcggattgt

SEQ ID NO: 5047904 - DNA, 25 bp, Homo sapien
ctgatggagtcaacaagaaagtgac

SEQ ID NO: 5047905 - DNA, 25 bp, Homo sapien
catagaatcttgctcagacatacac

SEQ ID NO: 5047906 - DNA, 25 bp, Homo sapien
cacttcaagcccacaatctgtttct

SEQ ID NO: 5047907 - DNA, 25 bp, Homo sapien
aagttcaggagttgccctggagcaa

SEQ ID NO: 5047908 - DNA, 25 bp, Homo sapien
ccatagctggggaaatgcatagaat

SEQ ID NO: 5047909 - DNA, 25 bp, Homo sapien
aatagggcagatggatgcaggaccc

SEQ ID NO: 5047910 - DNA, 25 bp, Homo sapien
aaatagggcagatggatgcaggacc

SEQ ID NO: 5047911 - DNA, 25 bp, Homo sapien
caatgcagcatcagcttcacttcca

SEQ ID NO: 5047912 - DNA, 25 bp, Homo sapien
ggccaatgcagcatcagcttcactt

SEQ ID NO: 5047913 - DNA, 25 bp, Homo sapien
ttgctcatactcctcaaacagtctg

SEQ ID NO: 5047914 - DNA, 25 bp, Homo sapien
gctcatactcctcaaacagtctgtt

SEQ ID NO: 5047915 - DNA, 25 bp, Homo sapien
tactcctcaaacagtctgtttttgc

SEQ ID NO: 5047916 - DNA, 25 bp, Homo sapien
catactcctcaaacagtctgttttt

SEQ ID NO: 5047917 - DNA, 25 bp, Homo sapien
cacttaggctactatggccttcttt

SEQ ID NO: 5047918 - DNA, 25 bp, Homo sapien
ttcacttaggctactatggccttct

SEQ ID NO: 5047919 - DNA, 25 bp, Homo sapien
ccttcacttaggctactatggcctt

SEQ ID NO: 5047920 - DNA, 25 bp, Homo sapien
ttaggctactatggccttcttttcc

SEQ ID NO: 5047921 - DNA, 25 bp, Homo sapien
tattctattccatccgtagttgtgg

SEQ ID NO: 5047922 - DNA, 25 bp, Homo sapien
attccatccgtagttgtggagcccc

SEQ ID NO: 5047923 - DNA, 25 bp, Homo sapien
ttattctattccatccgtagttgtg

SEQ ID NO: 5047924 - DNA, 25 bp, Homo sapien
tctattccatccgtagttgtggagc

SEQ ID NO: 5047925 - DNA, 25 bp, Homo sapien
ttaatgctgtccaagaagcccgcag

SEQ ID NO: 5047926 - DNA, 25 bp, Homo sapien
tggcaagcattgcactgagaatgag

SEQ ID NO: 5047927 - DNA, 25 bp, Homo sapien
tgatctctcagaggactggtctggt

SEQ ID NO: 5047928 - DNA, 25 bp, Homo sapien
ctggtctggtaatgagtggcaagca

SEQ ID NO: 5047929 - DNA, 25 bp, Homo sapien
ggctgttggatatctgtttccacat

SEQ ID NO: 5047930 - DNA, 25 bp, Homo sapien
agtctcagggctgttggatatctgt

SEQ ID NO: 5047931 - DNA, 25 bp, Homo sapien
tcagggctgttggatatctgtttcc

SEQ ID NO: 5047932 - DNA, 25 bp, Homo sapien
cagggctgttggatatctgtttcca

SEQ ID NO: 5047933 - DNA, 25 bp, Homo sapien
tttgaaattggaagccactcaagac

SEQ ID NO: 5047934 - DNA, 25 bp, Homo sapien
gccactcaagactagaggtagtacc

SEQ ID NO: 5047935 - DNA, 25 bp, Homo sapien
aagccactcaagactagaggtagta

SEQ ID NO: 5047936 - DNA, 25 bp, Homo sapien
actcaagactagaggtagtaccttc

SEQ ID NO: 5047937 - DNA, 25 bp, Homo sapien
tggaatccaaggtaggatctaaagt

SEQ ID NO: 5047938 - DNA, 25 bp, Homo sapien
ggtaggatctaaagtttcttcatcc

SEQ ID NO: 5047939 - DNA, 25 bp, Homo sapien
atccaaggtaggatctaaagtttct

SEQ ID NO: 5047940 - DNA, 25 bp, Homo sapien
caaggtaggatctaaagtttcttca

SEQ ID NO: 5047941 - DNA, 25 bp, Homo sapien
tagaggataccactgattggcccaa

SEQ ID NO: 5047942 - DNA, 25 bp, Homo sapien
acagatccagagtaggatatagagg

SEQ ID NO: 5047943 - DNA, 25 bp, Homo sapien
cattcatcagtaggatagtagcctt

SEQ ID NO: 5047944 - DNA, 25 bp, Homo sapien
tagtagcctttacaaggtaatgact

SEQ ID NO: 5047945 - DNA, 25 bp, Homo sapien
ggactgtcccatgtggcttcgagct

SEQ ID NO: 5047946 - DNA, 25 bp, Homo sapien
cttgcatcactagggcacccatcat

SEQ ID NO: 5047947 - DNA, 25 bp, Homo sapien
actgtcccatgtggcttcgagctcc

SEQ ID NO: 5047948 - DNA, 25 bp, Homo sapien
cccatcataaggagtggcagagcaa

SEQ ID NO: 5047949 - DNA, 25 bp, Homo sapien
ctgtctgagctcaacatagacaaat

SEQ ID NO: 5047950 - DNA, 25 bp, Homo sapien
aatcatccagcatgaaccaatccag

SEQ ID NO: 5047951 - DNA, 25 bp, Homo sapien
catctgtctgagctcaacatagaca

SEQ ID NO: 5047952 - DNA, 25 bp, Homo sapien
agaatcatccagcatgaaccaatcc

SEQ ID NO: 5047953 - DNA, 25 bp, Homo sapien
ggaattaagccatgtttctgagcta

SEQ ID NO: 5047954 - DNA, 25 bp, Homo sapien
caaatggaattaagccatgtttctg

SEQ ID NO: 5047955 - DNA, 25 bp, Homo sapien
tgagctatgctccaagaggtcttct

SEQ ID NO: 5047956 - DNA, 25 bp, Homo sapien
tgtttctgagctatgctccaagagg

SEQ ID NO: 5047957 - DNA, 25 bp, Homo sapien
tttggagtaggtagagtaagagtaa

SEQ ID NO: 5047958 - DNA, 25 bp, Homo sapien
cagtttggagtaggtagagtaagag

SEQ ID NO: 5047959 - DNA, 25 bp, Homo sapien
ttggagtaggtagagtaagagtaag

SEQ ID NO: 5047960 - DNA, 25 bp, Homo sapien
gtttggagtaggtagagtaagagta

SEQ ID NO: 5047961 - DNA, 25 bp, Homo sapien
tcctggtctgcatcgctgtaaccca

SEQ ID NO: 5047962 - DNA, 25 bp, Homo sapien
atcgctgtaacccacacaatgctac

SEQ ID NO: 5047963 - DNA, 25 bp, Homo sapien
gtaacccacacaatgctaccatgca

SEQ ID NO: 5047964 - DNA, 25 bp, Homo sapien
ttcctggtctgcatcgctgtaaccc

SEQ ID NO: 5047965 - DNA, 25 bp, Homo sapien
ctcacatacctttaccaacatctgg

SEQ ID NO: 5047966 - DNA, 25 bp, Homo sapien
gagatggagattcctaaaaaagtca

SEQ ID NO: 5047967 - DNA, 25 bp, Homo sapien
aaatgggtgctgctattgtctcaca

SEQ ID NO: 5047968 - DNA, 25 bp, Homo sapien
taagtcccctctgaaatcctgcaat

SEQ ID NO: 5047969 - DNA, 25 bp, Homo sapien
gtgttgtttcttcttgacaagtcgc

SEQ ID NO: 5047970 - DNA, 25 bp, Homo sapien
acttattgtaacagtgtttctcgtg

SEQ ID NO: 5047971 - DNA, 25 bp, Homo sapien
tcttcttgacaagtcgcgtacttat

SEQ ID NO: 5047972 - DNA, 25 bp, Homo sapien
gacaagtcgcgtacttattgtaaca

SEQ ID NO: 5047973 - DNA, 25 bp, Homo sapien
agcttcagaggtgtacatctcacag

SEQ ID NO: 5047974 - DNA, 25 bp, Homo sapien
gcttcagaggtgtacatctcacaga

SEQ ID NO: 5047975 - DNA, 25 bp, Homo sapien
ttcagaggtgtacatctcacagaaa

SEQ ID NO: 5047976 - DNA, 25 bp, Homo sapien
cagcttcagaggtgtacatctcaca

SEQ ID NO: 5047977 - DNA, 25 bp, Homo sapien
tccaactccccaaggaacagtgagt

SEQ ID NO: 5047978 - DNA, 25 bp, Homo sapien
ccactccacaagtacttgaggaggc

SEQ ID NO: 5047979 - DNA, 25 bp, Homo sapien
caaggaacagtgagttcattaactc

SEQ ID NO: 5047980 - DNA, 25 bp, Homo sapien
tgtgaatgtcaaggaccactccaca

SEQ ID NO: 5047981 - DNA, 25 bp, Homo sapien
agaattgcggattttgctcgccaca

SEQ ID NO: 5047982 - DNA, 25 bp, Homo sapien
gaattcctgagaattgcggattttg

SEQ ID NO: 5047983 - DNA, 25 bp, Homo sapien
ctgagaattgcggattttgctcgcc

SEQ ID NO: 5047984 - DNA, 25 bp, Homo sapien
ttcctgagaattgcggattttgctc

SEQ ID NO: 5047985 - DNA, 25 bp, Homo sapien
tttcaataccagagatggggagcat

SEQ ID NO: 5047986 - DNA, 25 bp, Homo sapien
ttttcaataccagagatggggagca

SEQ ID NO: 5047987 - DNA, 25 bp, Homo sapien
ccttttcaataccagagatggggag

SEQ ID NO: 5047988 - DNA, 25 bp, Homo sapien
ctccttttcaataccagagatgggg

SEQ ID NO: 5047989 - DNA, 25 bp, Homo sapien
gaaaatgaagtcctgctattgctcc

SEQ ID NO: 5047990 - DNA, 25 bp, Homo sapien
cgagtttgtcgtccaacacttgtca

SEQ ID NO: 5047991 - DNA, 25 bp, Homo sapien
cctgctattgctccacgagtttgtc

SEQ ID NO: 5047992 - DNA, 25 bp, Homo sapien
cttaaatatagtcaagcgagtgaac

SEQ ID NO: 5047993 - DNA, 25 bp, Homo sapien
agacaccaagtccatgagagggaac

SEQ ID NO: 5047994 - DNA, 25 bp, Homo sapien
catgagagggaacaagagcaccata

SEQ ID NO: 5047995 - DNA, 25 bp, Homo sapien
gtttgacaagggcagctgaatcagt

SEQ ID NO: 5047996 - DNA, 25 bp, Homo sapien
gacagtttgacaagggcagctgaat

SEQ ID NO: 5047997 - DNA, 25 bp, Homo sapien
taaggctcaaggtagcacttgtccg

SEQ ID NO: 5047998 - DNA, 25 bp, Homo sapien
cactgtctatgcatgtattgaggaa

SEQ ID NO: 5047999 - DNA, 25 bp, Homo sapien
tatgaattaggtgcagtctgaaagc

SEQ ID NO: 5048000 - DNA, 25 bp, Homo sapien
cagtattcagctgcatgtcgtgcca

SEQ ID NO: 5048001 - DNA, 25 bp, Homo sapien
ccttagagaaatcttccccagtgag

SEQ ID NO: 5048002 - DNA, 25 bp, Homo sapien
ttccccagtgagcaggaggtgaatg

SEQ ID NO: 5048003 - DNA, 25 bp, Homo sapien
tgaatggctgggatccccagctcca

SEQ ID NO: 5048004 - DNA, 25 bp, Homo sapien
aggtgaatggctgggatccccagct

SEQ ID NO: 5048005 - DNA, 25 bp, Homo sapien
tatttgtttgggcaattctcctcca

SEQ ID NO: 5048006 - DNA, 25 bp, Homo sapien
taaaaataatgctagctactataac

SEQ ID NO: 5048007 - DNA, 25 bp, Homo sapien
tctcagggacctattgtagcataac

SEQ ID NO: 5048008 - DNA, 25 bp, Homo sapien
caaagatctatttcttacagaggca

SEQ ID NO: 5048009 - DNA, 25 bp, Homo sapien
tcctgcacgtggctaacttcaactt

SEQ ID NO: 5048010 - DNA, 25 bp, Homo sapien
gcgcattgttgaatacaaggcttcc

SEQ ID NO: 5048011 - DNA, 25 bp, Homo sapien
ttgtaagatacaaagcgcattgttg

SEQ ID NO: 5048012 - DNA, 25 bp, Homo sapien
tgcacgtggctaacttcaacttgat

SEQ ID NO: 5048013 - DNA, 25 bp, Homo sapien
gcttgatcccacttgtacattgctt

SEQ ID NO: 5048014 - DNA, 25 bp, Homo sapien
tcccccagtttgccatacatgtctg

SEQ ID NO: 5048015 - DNA, 25 bp, Homo sapien
ctatgttgcttgatcccacttgtac

SEQ ID NO: 5048016 - DNA, 25 bp, Homo sapien
gttgcttgatcccacttgtacattg

SEQ ID NO: 5048017 - DNA, 25 bp, Homo sapien
cggaccctaaattcagctggattga

SEQ ID NO: 5048018 - DNA, 25 bp, Homo sapien
ggccatcttccggaaacttgatagc

SEQ ID NO: 5048019 - DNA, 25 bp, Homo sapien
tgtgctgaatgacatggccatcttc

SEQ ID NO: 5048020 - DNA, 25 bp, Homo sapien
gatcccacgattgcaaaggcagtga

SEQ ID NO: 5048021 - DNA, 25 bp, Homo sapien
gcaagttttctccatgcacccatgt

SEQ ID NO: 5048022 - DNA, 25 bp, Homo sapien
ctttcatatgtaagatactttgaga

SEQ ID NO: 5048023 - DNA, 25 bp, Homo sapien
ttcatatgtaagatactttgagagg

SEQ ID NO: 5048024 - DNA, 25 bp, Homo sapien
tttcatatgtaagatactttgagag

SEQ ID NO: 5048025 - DNA, 25 bp, Homo sapien
atcagcaaccttctgcatccctgaa

SEQ ID NO: 5048026 - DNA, 25 bp, Homo sapien
tgccttcagtgtgttgttttatcct

SEQ ID NO: 5048027 - DNA, 25 bp, Homo sapien
ctgccttcagtgtgttgttttatcc

SEQ ID NO: 5048028 - DNA, 25 bp, Homo sapien
gtctggcatcagcaaccttctgcat

SEQ ID NO: 5048029 - DNA, 25 bp, Homo sapien
gtattaacttggcaagggattcgac

SEQ ID NO: 5048030 - DNA, 25 bp, Homo sapien
ggcatgggatccacttagatatttt

SEQ ID NO: 5048031 - DNA, 25 bp, Homo sapien
ttaacttggcaagggattcgaccat

SEQ ID NO: 5048032 - DNA, 25 bp, Homo sapien
atgcactttctatggcatgggatcc

SEQ ID NO: 5048033 - DNA, 25 bp, Homo sapien
tccagtccaactgccataagctgct

SEQ ID NO: 5048034 - DNA, 25 bp, Homo sapien
tccaactgccataagctgctttgcc

SEQ ID NO: 5048035 - DNA, 25 bp, Homo sapien
gccataagctgctttgccatacaaa

SEQ ID NO: 5048036 - DNA, 25 bp, Homo sapien
ctcaattacacttccagtccaactg

SEQ ID NO: 5048037 - DNA, 25 bp, Homo sapien
gtgcatgaacacaaatccagacctg

SEQ ID NO: 5048038 - DNA, 25 bp, Homo sapien
cacaaatccagacctggactccagg

SEQ ID NO: 5048039 - DNA, 25 bp, Homo sapien
tttggtttccgtgatctagtcttcc

SEQ ID NO: 5048040 - DNA, 25 bp, Homo sapien
ctgggtgcatgaacacaaatccaga

SEQ ID NO: 5048041 - DNA, 25 bp, Homo sapien
catttatggcaagatgaatgcccac

SEQ ID NO: 5048042 - DNA, 25 bp, Homo sapien
atgagcaggtggtcaggccgctctt

SEQ ID NO: 5048043 - DNA, 25 bp, Homo sapien
ggaaattgcatatgatgtccttttg

SEQ ID NO: 5048044 - DNA, 25 bp, Homo sapien
tatggcaagatgaatgcccacaggt

SEQ ID NO: 5048045 - DNA, 25 bp, Homo sapien
ctaggaggaaaaatacattcgggca

SEQ ID NO: 5048046 - DNA, 25 bp, Homo sapien
taggaggaaaaatacattcgggcac

SEQ ID NO: 5048047 - DNA, 25 bp, Homo sapien
ccctggcattccgttcatggccgta

SEQ ID NO: 5048048 - DNA, 25 bp, Homo sapien
tgatgcttgagagtgccctggcatt

SEQ ID NO: 5048049 - DNA, 25 bp, Homo sapien
catggccgtaagtcttaaatctgtc

SEQ ID NO: 5048050 - DNA, 25 bp, Homo sapien
gcacacacttagataggctccaatg

SEQ ID NO: 5048051 - DNA, 25 bp, Homo sapien
cagggtgaacgtagctgccatagtt

SEQ ID NO: 5048052 - DNA, 25 bp, Homo sapien
ccatgtgcaaccagggtgaacgtag

SEQ ID NO: 5048053 - DNA, 25 bp, Homo sapien
gctgccatagttcccttgaagtctg

SEQ ID NO: 5048054 - DNA, 25 bp, Homo sapien
agtctgccactgctgtgatcgtcat

SEQ ID NO: 5048055 - DNA, 25 bp, Homo sapien
gatgtgttgccactgcagtttcact

SEQ ID NO: 5048056 - DNA, 25 bp, Homo sapien
caactagctctagtgaggtggccac

SEQ ID NO: 5048057 - DNA, 25 bp, Homo sapien
cctcaatgaggtgtaaagcattggc

SEQ ID NO: 5048058 - DNA, 25 bp, Homo sapien
ggtgtgaagcccaactggcccattt

SEQ ID NO: 5048059 - DNA, 25 bp, Homo sapien
taaagcattggctatgcagtgggtg

SEQ ID NO: 5048060 - DNA, 25 bp, Homo sapien
agtctttcaacttaagtgtatgcag

SEQ ID NO: 5048061 - DNA, 25 bp, Homo sapien
taagtgtatgcagatgaaggttttg

SEQ ID NO: 5048062 - DNA, 25 bp, Homo sapien
tgacggtcaaggagagggtagatgt

SEQ ID NO: 5048063 - DNA, 25 bp, Homo sapien
tctttgtgtagctgacggtcaagga

SEQ ID NO: 5048064 - DNA, 25 bp, Homo sapien
agctcttcttcagatcactttgtgc

SEQ ID NO: 5048065 - DNA, 25 bp, Homo sapien
tgtgccaatatttgtatgtctttga

SEQ ID NO: 5048066 - DNA, 25 bp, Homo sapien
tataggtccagctacacagctcttc

SEQ ID NO: 5048067 - DNA, 25 bp, Homo sapien
tgtctgtgtccacttctataggtcc

SEQ ID NO: 5048068 - DNA, 25 bp, Homo sapien
gacgaatcccagaacgcactcatgg

SEQ ID NO: 5048069 - DNA, 25 bp, Homo sapien
cagaacgcactcatggcaagacaaa

SEQ ID NO: 5048070 - DNA, 25 bp, Homo sapien
tttgattattcgtgctgacgaatcc

SEQ ID NO: 5048071 - DNA, 25 bp, Homo sapien
gacaaaggattttgtggtctccagc

SEQ ID NO: 5048072 - DNA, 25 bp, Homo sapien
taattaagggcggcagcgttgacag

SEQ ID NO: 5048073 - DNA, 25 bp, Homo sapien
aaagattataattaagggcggcagc

SEQ ID NO: 5048074 - DNA, 25 bp, Homo sapien
aattaagggcggcagcgttgacaga

SEQ ID NO: 5048075 - DNA, 25 bp, Homo sapien
gattataattaagggcggcagcgtt

SEQ ID NO: 5048076 - DNA, 25 bp, Homo sapien
tgtcagcagtattggtgaattcaaa

SEQ ID NO: 5048077 - DNA, 25 bp, Homo sapien
tgcactgggtcagacgttcaggaga

SEQ ID NO: 5048078 - DNA, 25 bp, Homo sapien
ttatgatttgcactgggtcagacgt

SEQ ID NO: 5048079 - DNA, 25 bp, Homo sapien
catggcacacatggaggcgctgcct

SEQ ID NO: 5048080 - DNA, 25 bp, Homo sapien
tgcattcagcattggtatgaaaacc

SEQ ID NO: 5048081 - DNA, 25 bp, Homo sapien
catgatcacgttaaagtaattgtag

SEQ ID NO: 5048082 - DNA, 25 bp, Homo sapien
gtatgaaaacccatgatcacgttaa

SEQ ID NO: 5048083 - DNA, 25 bp, Homo sapien
ctgaagccaagagtaattgtgcatt

SEQ ID NO: 5048084 - DNA, 25 bp, Homo sapien
agacaattctttactgctgaaaaca

SEQ ID NO: 5048085 - DNA, 25 bp, Homo sapien
aagacaattctttactgctgaaaac

SEQ ID NO: 5048086 - DNA, 25 bp, Homo sapien
gacaattctttactgctgaaaacat

SEQ ID NO: 5048087 - DNA, 25 bp, Homo sapien
cttgaatctcttgttgaagcaagaa

SEQ ID NO: 5048088 - DNA, 25 bp, Homo sapien
gaagccatatgaacatggaacattc

SEQ ID NO: 5048089 - DNA, 25 bp, Homo sapien
ggaacattctccgaattacctcacc

SEQ ID NO: 5048090 - DNA, 25 bp, Homo sapien
aacagaacagcagaagccatatgaa

SEQ ID NO: 5048091 - DNA, 25 bp, Homo sapien
tctgggtctcttctttgctgcccac

SEQ ID NO: 5048092 - DNA, 25 bp, Homo sapien
tgggtctcttctttgctgcccacca

SEQ ID NO: 5048093 - DNA, 25 bp, Homo sapien
ttctgggtctcttctttgctgccca

SEQ ID NO: 5048094 - DNA, 25 bp, Homo sapien
gggtctcttctttgctgcccaccat

SEQ ID NO: 5048095 - DNA, 25 bp, Homo sapien
cattagggaaagatgggcttttgct

SEQ ID NO: 5048096 - DNA, 25 bp, Homo sapien
gagcagttttctaaggtcattccaa

SEQ ID NO: 5048097 - DNA, 25 bp, Homo sapien
tcagtttggatgacaccttcattaa

SEQ ID NO: 5048098 - DNA, 25 bp, Homo sapien
tgagccatgtagctgactcagagtt

SEQ ID NO: 5048099 - DNA, 25 bp, Homo sapien
ctggtgaatgttatcatcaagcatg

SEQ ID NO: 5048100 - DNA, 25 bp, Homo sapien
ttcacaggggaagacttcaaatcta

SEQ ID NO: 5048101 - DNA, 25 bp, Homo sapien
catgcttaacggctgccaatgagat

SEQ ID NO: 5048102 - DNA, 25 bp, Homo sapien
gcatgttggcaacaactgtttttga

SEQ ID NO: 5048103 - DNA, 25 bp, Homo sapien
ttgtggtgaattcttccttactggc

SEQ ID NO: 5048104 - DNA, 25 bp, Homo sapien
tgtggtgaattcttccttactggcc

SEQ ID NO: 5048105 - DNA, 25 bp, Homo sapien
tggtgaattcttccttactggccat

SEQ ID NO: 5048106 - DNA, 25 bp, Homo sapien
gtggtgaattcttccttactggcca

SEQ ID NO: 5048107 - DNA, 25 bp, Homo sapien
tttaggaattaccatcggacttgaa

SEQ ID NO: 5048108 - DNA, 25 bp, Homo sapien
tattccatttggatgatttaggaat

SEQ ID NO: 5048109 - DNA, 25 bp, Homo sapien
gatgatttaggaattaccatcggac

SEQ ID NO: 5048110 - DNA, 25 bp, Homo sapien
ccatcggacttgaattgcattgtgt

SEQ ID NO: 5048111 - DNA, 25 bp, Homo sapien
gccacagtacgtggccttcaaagca

SEQ ID NO: 5048112 - DNA, 25 bp, Homo sapien
gccaatgttctgtgtgatctgtaac

SEQ ID NO: 5048113 - DNA, 25 bp, Homo sapien
gctcttactcgtgcagtccattgca

SEQ ID NO: 5048114 - DNA, 25 bp, Homo sapien
ctctgcatgggtttcgtcaagctct

SEQ ID NO: 5048115 - DNA, 25 bp, Homo sapien
tggcgctcacagacaagacattctt

SEQ ID NO: 5048116 - DNA, 25 bp, Homo sapien
tattctgtagaaggctcaatggtca

SEQ ID NO: 5048117 - DNA, 25 bp, Homo sapien
cattcaactcccttagtggcgctca

SEQ ID NO: 5048118 - DNA, 25 bp, Homo sapien
tgcagcaatccctgacaaggcacct

SEQ ID NO: 5048119 - DNA, 25 bp, Homo sapien
cactttcgtgactttgtgataatta

SEQ ID NO: 5048120 - DNA, 25 bp, Homo sapien
gcacagatcccccagacatgggcgt

SEQ ID NO: 5048121 - DNA, 25 bp, Homo sapien
tctcccactttcgtgactttgtgat

SEQ ID NO: 5048122 - DNA, 25 bp, Homo sapien
tgtttctcccactttcgtgactttg

SEQ ID NO: 5048123 - DNA, 25 bp, Homo sapien
tatctctccaaagtggctgttgcat

SEQ ID NO: 5048124 - DNA, 25 bp, Homo sapien
gcttatctctccaaagtggctgttg

SEQ ID NO: 5048125 - DNA, 25 bp, Homo sapien
ttatctctccaaagtggctgttgca

SEQ ID NO: 5048126 - DNA, 25 bp, Homo sapien
tggcttatctctccaaagtggctgt

SEQ ID NO: 5048127 - DNA, 25 bp, Homo sapien
ttgctgtttctcctcgaatgctgac

SEQ ID NO: 5048128 - DNA, 25 bp, Homo sapien
ggtctgtgttgacgtaactgatgca

SEQ ID NO: 5048129 - DNA, 25 bp, Homo sapien
cacttgtctagagtgagataccacc

SEQ ID NO: 5048130 - DNA, 25 bp, Homo sapien
gacttgttggctgtaacccttgcct

SEQ ID NO: 5048131 - DNA, 25 bp, Homo sapien
tgtgaaatgccatgtagaggcaaag

SEQ ID NO: 5048132 - DNA, 25 bp, Homo sapien
aaatgccatgtagaggcaaagtcat

SEQ ID NO: 5048133 - DNA, 25 bp, Homo sapien
tgaaatgccatgtagaggcaaagtc

SEQ ID NO: 5048134 - DNA, 25 bp, Homo sapien
gaaatgccatgtagaggcaaagtca

SEQ ID NO: 5048135 - DNA, 25 bp, Homo sapien
tcgccttccaccatccgatcctcag

SEQ ID NO: 5048136 - DNA, 25 bp, Homo sapien
atcctcagtgaaatccccggttaga

SEQ ID NO: 5048137 - DNA, 25 bp, Homo sapien
cctcagtgaaatccccggttagaag

SEQ ID NO: 5048138 - DNA, 25 bp, Homo sapien
tccaccatccgatcctcagtgaaat

SEQ ID NO: 5048139 - DNA, 25 bp, Homo sapien
tctaagcccaccagattctattaat

SEQ ID NO: 5048140 - DNA, 25 bp, Homo sapien
gtctaagcccaccagattctattaa

SEQ ID NO: 5048141 - DNA, 25 bp, Homo sapien
tcaagtcagacaaatagaaatgatg

SEQ ID NO: 5048142 - DNA, 25 bp, Homo sapien
gatactttgtctttgggaagtggaa

SEQ ID NO: 5048143 - DNA, 25 bp, Homo sapien
ccaggtggtgagatgttgaaacatt

SEQ ID NO: 5048144 - DNA, 25 bp, Homo sapien
gaaatgatgaaggatggcaatagga

SEQ ID NO: 5048145 - DNA, 25 bp, Homo sapien
gaacatgcattgttgggaaacagca

SEQ ID NO: 5048146 - DNA, 25 bp, Homo sapien
catgggcaacgagagctgcataaac

SEQ ID NO: 5048147 - DNA, 25 bp, Homo sapien
ttgctaccaggtgataggaacatgc

SEQ ID NO: 5048148 - DNA, 25 bp, Homo sapien
atgaaagcatggccagaacatgggc

SEQ ID NO: 5048149 - DNA, 25 bp, Homo sapien
tgtgcccttagaggaatccccagag

SEQ ID NO: 5048150 - DNA, 25 bp, Homo sapien
gctgtattgcagaagtgcaactcgg

SEQ ID NO: 5048151 - DNA, 25 bp, Homo sapien
tccccagagtcctgataaaccagct

SEQ ID NO: 5048152 - DNA, 25 bp, Homo sapien
gccactgcttactgaatgacacctt

SEQ ID NO: 5048153 - DNA, 25 bp, Homo sapien
tttagtaccgtttcctgcagacagt

SEQ ID NO: 5048154 - DNA, 25 bp, Homo sapien
cctatccaaacgtaatgaggttgag

SEQ ID NO: 5048155 - DNA, 25 bp, Homo sapien
taggagatgagctgactatggccat

SEQ ID NO: 5048156 - DNA, 25 bp, Homo sapien
tgcagacagttggttcctatccaaa

SEQ ID NO: 5048157 - DNA, 25 bp, Homo sapien
ctctgttagcaagaagttaccccag

SEQ ID NO: 5048158 - DNA, 25 bp, Homo sapien
agcagagcctaaagcctgactgcag

SEQ ID NO: 5048159 - DNA, 25 bp, Homo sapien
tagcaagaagttaccccagacacag

SEQ ID NO: 5048160 - DNA, 25 bp, Homo sapien
cacagtccttggcacgtggggccag

SEQ ID NO: 5048161 - DNA, 25 bp, Homo sapien
tgacagctgaaaggtcagtcacctc

SEQ ID NO: 5048162 - DNA, 25 bp, Homo sapien
gctgaaaggtcagtcacctcaggtt

SEQ ID NO: 5048163 - DNA, 25 bp, Homo sapien
tcagtcacctcaggtttacatgcca

SEQ ID NO: 5048164 - DNA, 25 bp, Homo sapien
gcaggtgacagctgaaaggtcagtc

SEQ ID NO: 5048165 - DNA, 25 bp, Homo sapien
gacaagaactcatgcacctgtttgg

SEQ ID NO: 5048166 - DNA, 25 bp, Homo sapien
tggcaaggctttgtcgattttgcac

SEQ ID NO: 5048167 - DNA, 25 bp, Homo sapien
gcttagacaagaactcatgcacctg

SEQ ID NO: 5048168 - DNA, 25 bp, Homo sapien
gcactaacaatagtgcgataatcat

SEQ ID NO: 5048169 - DNA, 25 bp, Homo sapien
gcattttaacaaatgtccatcacgc

SEQ ID NO: 5048170 - DNA, 25 bp, Homo sapien
aaagcattttaacaaatgtccatca

SEQ ID NO: 5048171 - DNA, 25 bp, Homo sapien
agcattttaacaaatgtccatcacg

SEQ ID NO: 5048172 - DNA, 25 bp, Homo sapien
caaaagcattttaacaaatgtccat

SEQ ID NO: 5048173 - DNA, 25 bp, Homo sapien
tgtcccttttaccagatctgtacgt

SEQ ID NO: 5048174 - DNA, 25 bp, Homo sapien
ctgcatgaagtgatactgattagac

SEQ ID NO: 5048175 - DNA, 25 bp, Homo sapien
ataatgttgtggacactgttattgc

SEQ ID NO: 5048176 - DNA, 25 bp, Homo sapien
gccatagctatttcccttcctgtcc

SEQ ID NO: 5048177 - DNA, 25 bp, Homo sapien
aaaaggtatcttggacactggagcc

SEQ ID NO: 5048178 - DNA, 25 bp, Homo sapien
aaaggtatcttggacactggagccg

SEQ ID NO: 5048179 - DNA, 25 bp, Homo sapien
caaaaaggtatcttggacactggag

SEQ ID NO: 5048180 - DNA, 25 bp, Homo sapien
aaggtatcttggacactggagccgc

SEQ ID NO: 5048181 - DNA, 25 bp, Homo sapien
tatatatataagacacccggcagaa

SEQ ID NO: 5048182 - DNA, 25 bp, Homo sapien
ctggtaggaagatcccaaggtctgt

SEQ ID NO: 5048183 - DNA, 25 bp, Homo sapien
tcacaatcaggctgaacctggagct

SEQ ID NO: 5048184 - DNA, 25 bp, Homo sapien
tgacgcaggactaactgaggtgtct

SEQ ID NO: 5048185 - DNA, 25 bp, Homo sapien
ttcatatccccaccaaaatagtaaa

SEQ ID NO: 5048186 - DNA, 25 bp, Homo sapien
gcttcatatccccaccaaaatagta

SEQ ID NO: 5048187 - DNA, 25 bp, Homo sapien
catgcttcatatccccaccaaaata

SEQ ID NO: 5048188 - DNA, 25 bp, Homo sapien
tgcttcatatccccaccaaaatagt

SEQ ID NO: 5048189 - DNA, 25 bp, Homo sapien
agacaaaacatttcgtttgaagaag

SEQ ID NO: 5048190 - DNA, 25 bp, Homo sapien
gcaggaaggtgtcatctccggatga

SEQ ID NO: 5048191 - DNA, 25 bp, Homo sapien
gactagtatcggctcagaaagcaag

SEQ ID NO: 5048192 - DNA, 25 bp, Homo sapien
tttgaagaaggtggggactagtatc

SEQ ID NO: 5048193 - DNA, 25 bp, Homo sapien
tggtgggaggtatggcattcactgc

SEQ ID NO: 5048194 - DNA, 25 bp, Homo sapien
ccagaagggattgagtattgttggg

SEQ ID NO: 5048195 - DNA, 25 bp, Homo sapien
tatggcattcactgctccaagtgga

SEQ ID NO: 5048196 - DNA, 25 bp, Homo sapien
gaggtatggcattcactgctccaag

SEQ ID NO: 5048197 - DNA, 25 bp, Homo sapien
gcgataaatgcaccctaaacgtctt

SEQ ID NO: 5048198 - DNA, 25 bp, Homo sapien
cagggattgaatagcgcatgcgata

SEQ ID NO: 5048199 - DNA, 25 bp, Homo sapien
gaggattctacatagccagcaggga

SEQ ID NO: 5048200 - DNA, 25 bp, Homo sapien
tagatgttcgctgttaagtttgcag

SEQ ID NO: 5048201 - DNA, 25 bp, Homo sapien
ggtatagctggatttttgttgaacc

SEQ ID NO: 5048202 - DNA, 25 bp, Homo sapien
ctcttggtatagctggatttttgtt

SEQ ID NO: 5048203 - DNA, 25 bp, Homo sapien
caaacaatgtgtattccactgtccc

SEQ ID NO: 5048204 - DNA, 25 bp, Homo sapien
gttgaaccaaacaatgtgtattcca

SEQ ID NO: 5048205 - DNA, 25 bp, Homo sapien
ctgagttgaagtatccgaagacttc

SEQ ID NO: 5048206 - DNA, 25 bp, Homo sapien
gttgaagtatccgaagacttctgtc

SEQ ID NO: 5048207 - DNA, 25 bp, Homo sapien
gaagtatccgaagacttctgtcatc

SEQ ID NO: 5048208 - DNA, 25 bp, Homo sapien
gtatccgaagacttctgtcatctgg

SEQ ID NO: 5048209 - DNA, 25 bp, Homo sapien
attgtgttattacggcctccacaac

SEQ ID NO: 5048210 - DNA, 25 bp, Homo sapien
cttgaattgtgttattacggcctcc

SEQ ID NO: 5048211 - DNA, 25 bp, Homo sapien
tgaattgtgttattacggcctccac

SEQ ID NO: 5048212 - DNA, 25 bp, Homo sapien
gaattgtgttattacggcctccaca

SEQ ID NO: 5048213 - DNA, 25 bp, Homo sapien
gcacagcactatgccgcttaaaagg

SEQ ID NO: 5048214 - DNA, 25 bp, Homo sapien
gaaggcacagcactatgccgcttaa

SEQ ID NO: 5048215 - DNA, 25 bp, Homo sapien
cactatgccgcttaaaaggagggag

SEQ ID NO: 5048216 - DNA, 25 bp, Homo sapien
agaagaaggcacagcactatgccgc

SEQ ID NO: 5048217 - DNA, 25 bp, Homo sapien
tcaaattgaggctctagcaacacga

SEQ ID NO: 5048218 - DNA, 25 bp, Homo sapien
aactcttcccaccttacagttgata

SEQ ID NO: 5048219 - DNA, 25 bp, Homo sapien
ctgttcaaattgaggctctagcaac

SEQ ID NO: 5048220 - DNA, 25 bp, Homo sapien
tcttcccaccttacagttgataaaa

SEQ ID NO: 5048221 - DNA, 25 bp, Homo sapien
ttagttacattctctcgtccagctt

SEQ ID NO: 5048222 - DNA, 25 bp, Homo sapien
gagatcaacatccactttatccctc

SEQ ID NO: 5048223 - DNA, 25 bp, Homo sapien
aagagatcaacatccactttatccc

SEQ ID NO: 5048224 - DNA, 25 bp, Homo sapien
ttctctcgtccagcttccggagcta

SEQ ID NO: 5048225 - DNA, 25 bp, Homo sapien
tacaatcagattaactacactgtgg

SEQ ID NO: 5048226 - DNA, 25 bp, Homo sapien
cacccactgtggacattatttaatg

SEQ ID NO: 5048227 - DNA, 25 bp, Homo sapien
cagcaggcagcaaagtaatgtacaa

SEQ ID NO: 5048228 - DNA, 25 bp, Homo sapien
taatgcttctgtggacagagtccgg

SEQ ID NO: 5048229 - DNA, 25 bp, Homo sapien
gctctctcttgaggagcaggcttgg

SEQ ID NO: 5048230 - DNA, 25 bp, Homo sapien
ggagcaggcttggccatattccgca

SEQ ID NO: 5048231 - DNA, 25 bp, Homo sapien
caggcttggccatattccgcagggc

SEQ ID NO: 5048232 - DNA, 25 bp, Homo sapien
ctctctcttgaggagcaggcttggc

SEQ ID NO: 5048233 - DNA, 25 bp, Homo sapien
tgctgtgcttcatgtttcaaagatg

SEQ ID NO: 5048234 - DNA, 25 bp, Homo sapien
gctgtgcttcatgtttcaaagatga

SEQ ID NO: 5048235 - DNA, 25 bp, Homo sapien
atgctgtgcttcatgtttcaaagat

SEQ ID NO: 5048236 - DNA, 25 bp, Homo sapien
agagtttctagtcccacatgtagag

SEQ ID NO: 5048237 - DNA, 25 bp, Homo sapien
ctagtcccacatgtagagcttggta

SEQ ID NO: 5048238 - DNA, 25 bp, Homo sapien
aaagctgtaagagtttctagtccca

SEQ ID NO: 5048239 - DNA, 25 bp, Homo sapien
gctgtaagagtttctagtcccacat

SEQ ID NO: 5048240 - DNA, 25 bp, Homo sapien
taaaagcgtgttctccagagctgta

SEQ ID NO: 5048241 - DNA, 25 bp, Homo sapien
tgtaggatcctgtggtggttccaca

SEQ ID NO: 5048242 - DNA, 25 bp, Homo sapien
taaagtaaaagcgtgttctccagag

SEQ ID NO: 5048243 - DNA, 25 bp, Homo sapien
ggatcctgtggtggttccacaatga

SEQ ID NO: 5048244 - DNA, 25 bp, Homo sapien
ccactgctactttaagtagaggagc

SEQ ID NO: 5048245 - DNA, 25 bp, Homo sapien
gctactttaagtagaggagctccac

SEQ ID NO: 5048246 - DNA, 25 bp, Homo sapien
ctgctactttaagtagaggagctcc

SEQ ID NO: 5048247 - DNA, 25 bp, Homo sapien
tactttaagtagaggagctccactt

SEQ ID NO: 5048248 - DNA, 25 bp, Homo sapien
gcttttctgctagacgcagccccag

SEQ ID NO: 5048249 - DNA, 25 bp, Homo sapien
gtgggctaacactcttcaactcaag

SEQ ID NO: 5048250 - DNA, 25 bp, Homo sapien
ccttgttccatggttcaccctcttt

SEQ ID NO: 5048251 - DNA, 25 bp, Homo sapien
cctctttatcctctagttttgatgg

SEQ ID NO: 5048252 - DNA, 25 bp, Homo sapien
tctgaagagctccacatgctgatgc

SEQ ID NO: 5048253 - DNA, 25 bp, Homo sapien
gattagcgagtgttctctgaagagc

SEQ ID NO: 5048254 - DNA, 25 bp, Homo sapien
cagcacagacatcgattagcgagtg

SEQ ID NO: 5048255 - DNA, 25 bp, Homo sapien
caatatctggaaatggagtaggtga

SEQ ID NO: 5048256 - DNA, 25 bp, Homo sapien
tgatggtagggcacattgtcttgcc

SEQ ID NO: 5048257 - DNA, 25 bp, Homo sapien
gatggtagggcacattgtcttgcca

SEQ ID NO: 5048258 - DNA, 25 bp, Homo sapien
ggaagtggtcagtgcatccctgatg

SEQ ID NO: 5048259 - DNA, 25 bp, Homo sapien
cttggaagtggtcagtgcatccctg

SEQ ID NO: 5048260 - DNA, 25 bp, Homo sapien
gaacaagtcgttcagcaaatagcgc

SEQ ID NO: 5048261 - DNA, 25 bp, Homo sapien
gttcagcaaatagcgccaccctgtg

SEQ ID NO: 5048262 - DNA, 25 bp, Homo sapien
caccctgtggattagagttctatga

SEQ ID NO: 5048263 - DNA, 25 bp, Homo sapien
tcataactgaacaagtcgttcagca

SEQ ID NO: 5048264 - DNA, 25 bp, Homo sapien
tatagaagagccattgcctatagaa

SEQ ID NO: 5048265 - DNA, 25 bp, Homo sapien
ctctgataggactcaggtaatatag

SEQ ID NO: 5048266 - DNA, 25 bp, Homo sapien
cattgcctatagaatctggaaccat

SEQ ID NO: 5048267 - DNA, 25 bp, Homo sapien
caggtaatatagaagagccattgcc

SEQ ID NO: 5048268 - DNA, 25 bp, Homo sapien
ccttgcagaaagattgtgccagtca

SEQ ID NO: 5048269 - DNA, 25 bp, Homo sapien
gcaagctcgggatccactacagtgt

SEQ ID NO: 5048270 - DNA, 25 bp, Homo sapien
tgttggagctatcccacactcttcc

SEQ ID NO: 5048271 - DNA, 25 bp, Homo sapien
tcgggaagcagtaagctaatatcct

SEQ ID NO: 5048272 - DNA, 25 bp, Homo sapien
aactgaagagttacattgatgaaac

SEQ ID NO: 5048273 - DNA, 25 bp, Homo sapien
gcaggatacaccagtaaaatttcaa

SEQ ID NO: 5048274 - DNA, 25 bp, Homo sapien
ctgaacaggtcataaggcatattat

SEQ ID NO: 5048275 - DNA, 25 bp, Homo sapien
tatgacaaatgtaacttctaaagtt

SEQ ID NO: 5048276 - DNA, 25 bp, Homo sapien
gagattattcttcccgtcgcttgca

SEQ ID NO: 5048277 - DNA, 25 bp, Homo sapien
tacatatggtcttgggatgccaccg

SEQ ID NO: 5048278 - DNA, 25 bp, Homo sapien
ttttctttgtaatgcctactgctgg

SEQ ID NO: 5048279 - DNA, 25 bp, Homo sapien
gtcgcttgcactgacactacttcct

SEQ ID NO: 5048280 - DNA, 25 bp, Homo sapien
ggtatcaaccacctgtatgtaagtg

SEQ ID NO: 5048281 - DNA, 25 bp, Homo sapien
catggctcttggtgtcagctatacc

SEQ ID NO: 5048282 - DNA, 25 bp, Homo sapien
tcctgtctcacagtgtcgtggtcct

SEQ ID NO: 5048283 - DNA, 25 bp, Homo sapien
gctataccatgcctaacttgctccg

SEQ ID NO: 5048284 - DNA, 25 bp, Homo sapien
tcaaaatctaagcttcttagtatgt

SEQ ID NO: 5048285 - DNA, 25 bp, Homo sapien
cagtgttatctattcatgcttattt

SEQ ID NO: 5048286 - DNA, 25 bp, Homo sapien
cgacaacccaatccttattggtttg

SEQ ID NO: 5048287 - DNA, 25 bp, Homo sapien
tcttagtatgttacccaaatccatt

SEQ ID NO: 5048288 - DNA, 25 bp, Homo sapien
ctgtcagtctcatgaggtcagaggc

SEQ ID NO: 5048289 - DNA, 25 bp, Homo sapien
ctcctctcactcaacaaggagccat

SEQ ID NO: 5048290 - DNA, 25 bp, Homo sapien
ctctcactcaacaaggagccatcag

SEQ ID NO: 5048291 - DNA, 25 bp, Homo sapien
tcctctcactcaacaaggagccatc

SEQ ID NO: 5048292 - DNA, 25 bp, Homo sapien
tctctctacttggtatacgtcagtg

SEQ ID NO: 5048293 - DNA, 25 bp, Homo sapien
accaccaacagacctgaagacatag

SEQ ID NO: 5048294 - DNA, 25 bp, Homo sapien
tgaagacatagccagtgtcctcatc

SEQ ID NO: 5048295 - DNA, 25 bp, Homo sapien
agtgtgattgcccttagtgtctttt

SEQ ID NO: 5048296 - DNA, 25 bp, Homo sapien
ctcaaccactcctagaatgtctgta

SEQ ID NO: 5048297 - DNA, 25 bp, Homo sapien
caaccactcctagaatgtctgtaag

SEQ ID NO: 5048298 - DNA, 25 bp, Homo sapien
aaccactcctagaatgtctgtaagt

SEQ ID NO: 5048299 - DNA, 25 bp, Homo sapien
tcaaccactcctagaatgtctgtaa

SEQ ID NO: 5048300 - DNA, 25 bp, Homo sapien
tggaggagttgccatgcaggacaca

SEQ ID NO: 5048301 - DNA, 25 bp, Homo sapien
tagaaggttcaatgtctcaccgacc

SEQ ID NO: 5048302 - DNA, 25 bp, Homo sapien
catgcccttgggtatcacagtacac

SEQ ID NO: 5048303 - DNA, 25 bp, Homo sapien
tatatctgctatagtggcctccacc

SEQ ID NO: 5048304 - DNA, 25 bp, Homo sapien
ttatattaactctttggctccatca

SEQ ID NO: 5048305 - DNA, 25 bp, Homo sapien
tatattaactctttggctccatcac

SEQ ID NO: 5048306 - DNA, 25 bp, Homo sapien
ttaattgtaaagaatgaggaatgca

SEQ ID NO: 5048307 - DNA, 25 bp, Homo sapien
ttgtaaagaatgaggaatgcaatac

SEQ ID NO: 5048308 - DNA, 25 bp, Homo sapien
gttgaggattgggtgtaagggctgc

SEQ ID NO: 5048309 - DNA, 25 bp, Homo sapien
ggattgggtgtaagggctgctcttc

SEQ ID NO: 5048310 - DNA, 25 bp, Homo sapien
cctgatgcactgtaggcccctaata

SEQ ID NO: 5048311 - DNA, 25 bp, Homo sapien
taacatggatccatgcctgatgcac

SEQ ID NO: 5048312 - DNA, 25 bp, Homo sapien
ggcccttgttactgaggtccccaca

SEQ ID NO: 5048313 - DNA, 25 bp, Homo sapien
gagcactggtggctaactgactgga

SEQ ID NO: 5048314 - DNA, 25 bp, Homo sapien
taagatacccagcatggcactgcag

SEQ ID NO: 5048315 - DNA, 25 bp, Homo sapien
gaagacgcaaagctcttcttccagt

SEQ ID NO: 5048316 - DNA, 25 bp, Homo sapien
ccagcttctgtccatctgtaacaca

SEQ ID NO: 5048317 - DNA, 25 bp, Homo sapien
gtgtctgcagaggacaatgccttgt

SEQ ID NO: 5048318 - DNA, 25 bp, Homo sapien
ttgagttggactctaatgtctgcat

SEQ ID NO: 5048319 - DNA, 25 bp, Homo sapien
cttggcaaatagaaggcgctcaaaa

SEQ ID NO: 5048320 - DNA, 25 bp, Homo sapien
tcaaaactggctgttgagttggact

SEQ ID NO: 5048321 - DNA, 25 bp, Homo sapien
aatagaaggcgctcaaaactggctg

SEQ ID NO: 5048322 - DNA, 25 bp, Homo sapien
ctcatgccatatcctgttttccatc

SEQ ID NO: 5048323 - DNA, 25 bp, Homo sapien
ttgtttctcccatgaacgtgtcctc

SEQ ID NO: 5048324 - DNA, 25 bp, Homo sapien
tgtttctcccatgaacgtgtcctcc

SEQ ID NO: 5048325 - DNA, 25 bp, Homo sapien
tagaccgatgcaatttctctcatgc

SEQ ID NO: 5048326 - DNA, 25 bp, Homo sapien
ttgaagagtgtggtaagggctccaa

SEQ ID NO: 5048327 - DNA, 25 bp, Homo sapien
gaagagtgtggtaagggctccaaca

SEQ ID NO: 5048328 - DNA, 25 bp, Homo sapien
aaagccttcagaaatcttatagcag

SEQ ID NO: 5048329 - DNA, 25 bp, Homo sapien
ggctccaacactcctacggcataaa

SEQ ID NO: 5048330 - DNA, 25 bp, Homo sapien
tagtttgatccatttattagtatca

SEQ ID NO: 5048331 - DNA, 25 bp, Homo sapien
ttagtttgatccatttattagtatc

SEQ ID NO: 5048332 - DNA, 25 bp, Homo sapien
agtttgatccatttattagtatcat

SEQ ID NO: 5048333 - DNA, 25 bp, Homo sapien
tgcaggtccacctggacttgtcttt

SEQ ID NO: 5048334 - DNA, 25 bp, Homo sapien
cagggaagctgccacgtctctaggg

SEQ ID NO: 5048335 - DNA, 25 bp, Homo sapien
agctgccacgtctctagggtttgca

SEQ ID NO: 5048336 - DNA, 25 bp, Homo sapien
tttgcaggtccacctggacttgtct

SEQ ID NO: 5048337 - DNA, 25 bp, Homo sapien
ctctggcaaggtacccaaacgtggt

SEQ ID NO: 5048338 - DNA, 25 bp, Homo sapien
ttcatatgctttcgttccaactcca

SEQ ID NO: 5048339 - DNA, 25 bp, Homo sapien
caactccactccaagactgacttga

SEQ ID NO: 5048340 - DNA, 25 bp, Homo sapien
aacgtggttctttatctatgatggc

SEQ ID NO: 5048341 - DNA, 25 bp, Homo sapien
aataatgatagttacgatcgtaacc

SEQ ID NO: 5048342 - DNA, 25 bp, Homo sapien
taatgatagttacgatcgtaaccat

SEQ ID NO: 5048343 - DNA, 25 bp, Homo sapien
ttttaataatgatagttacgatcgt

SEQ ID NO: 5048344 - DNA, 25 bp, Homo sapien
ttaataatgatagttacgatcgtaa

SEQ ID NO: 5048345 - DNA, 25 bp, Homo sapien
aaagggcattggcaaattccacaga

SEQ ID NO: 5048346 - DNA, 25 bp, Homo sapien
cactccacttgtttcagcgtagaga

SEQ ID NO: 5048347 - DNA, 25 bp, Homo sapien
cttttcctcggattggatctccagg

SEQ ID NO: 5048348 - DNA, 25 bp, Homo sapien
aagttgtcagggctctgttcacaca

SEQ ID NO: 5048349 - DNA, 25 bp, Homo sapien
acggagctagcaagcctttcctaca

SEQ ID NO: 5048350 - DNA, 25 bp, Homo sapien
cacttgaacggttgatgcatctgag

SEQ ID NO: 5048351 - DNA, 25 bp, Homo sapien
tgcatctgagaaacggagctagcaa

SEQ ID NO: 5048352 - DNA, 25 bp, Homo sapien
catggcaacacttgaacggttgatg

SEQ ID NO: 5048353 - DNA, 25 bp, Homo sapien
catgctgcgcacaggggctgactca

SEQ ID NO: 5048354 - DNA, 25 bp, Homo sapien
caggtcttctaggagaatccacata

SEQ ID NO: 5048355 - DNA, 25 bp, Homo sapien
gagaatccacatatgggccacaatg

SEQ ID NO: 5048356 - DNA, 25 bp, Homo sapien
gtgggagtggccatgctgcgcacag

SEQ ID NO: 5048357 - DNA, 25 bp, Homo sapien
ggtaaagggtttcaataacatcagc

SEQ ID NO: 5048358 - DNA, 25 bp, Homo sapien
tgaatgcgtttgcaggtaaagggtt

SEQ ID NO: 5048359 - DNA, 25 bp, Homo sapien
caggtaaagggtttcaataacatca

SEQ ID NO: 5048360 - DNA, 25 bp, Homo sapien
tcatgaatgcgtttgcaggtaaagg

SEQ ID NO: 5048361 - DNA, 25 bp, Homo sapien
ccatggttcgtctcaaggtgacaac

SEQ ID NO: 5048362 - DNA, 25 bp, Homo sapien
tccatgggcccatgataaaagtgca

SEQ ID NO: 5048363 - DNA, 25 bp, Homo sapien
caaaccttcggtaaggcagaagcca

SEQ ID NO: 5048364 - DNA, 25 bp, Homo sapien
gagggtttgcctctcgcctattgag

SEQ ID NO: 5048365 - DNA, 25 bp, Homo sapien
cccacaaccaaattttgaacataat

SEQ ID NO: 5048366 - DNA, 25 bp, Homo sapien
tgtacccacaaccaaattttgaaca

SEQ ID NO: 5048367 - DNA, 25 bp, Homo sapien
atgtattaaggtttatgcatcctgt

SEQ ID NO: 5048368 - DNA, 25 bp, Homo sapien
cataatgtattaaggtttatgcatc

SEQ ID NO: 5048369 - DNA, 25 bp, Homo sapien
acagctggttacctgataacattgg

SEQ ID NO: 5048370 - DNA, 25 bp, Homo sapien
agctggttacctgataacattgggt

SEQ ID NO: 5048371 - DNA, 25 bp, Homo sapien
ccacagctggttacctgataacatt

SEQ ID NO: 5048372 - DNA, 25 bp, Homo sapien
aaacccactatctccagaaacactt

SEQ ID NO: 5048373 - DNA, 25 bp, Homo sapien
ctgtatttgaataagcaggcagcat

SEQ ID NO: 5048374 - DNA, 25 bp, Homo sapien
gcactgctgtctcctgcgatgaaga

SEQ ID NO: 5048375 - DNA, 25 bp, Homo sapien
caggagcatcttcagtcagtggatg

SEQ ID NO: 5048376 - DNA, 25 bp, Homo sapien
gcatcttcagtcagtggatgaggtt

SEQ ID NO: 5048377 - DNA, 25 bp, Homo sapien
tgtctcctgcgatgaagacttgcag

SEQ ID NO: 5048378 - DNA, 25 bp, Homo sapien
gggaagcaacacagtcataatgtct

SEQ ID NO: 5048379 - DNA, 25 bp, Homo sapien
gcaacacagtcataatgtctggcag

SEQ ID NO: 5048380 - DNA, 25 bp, Homo sapien
cataatgtctggcagtataccagta

SEQ ID NO: 5048381 - DNA, 25 bp, Homo sapien
tctggcagtataccagtatagtatg

SEQ ID NO: 5048382 - DNA, 25 bp, Homo sapien
tctctaatcttagtcaatttgtact

SEQ ID NO: 5048383 - DNA, 25 bp, Homo sapien
tccagaagtgcccataggtgagcag

SEQ ID NO: 5048384 - DNA, 25 bp, Homo sapien
ttagtcaatttgtacttcattttga

SEQ ID NO: 5048385 - DNA, 25 bp, Homo sapien
gaagtgcccataggtgagcagttac

SEQ ID NO: 5048386 - DNA, 25 bp, Homo sapien
gagtggcctgattcaacctggatag

SEQ ID NO: 5048387 - DNA, 25 bp, Homo sapien
cctggataggtcttgtagttccaaa

SEQ ID NO: 5048388 - DNA, 25 bp, Homo sapien
tgggtcaggaataactgtgtctgct

SEQ ID NO: 5048389 - DNA, 25 bp, Homo sapien
gttccaaatctgatggctcatctag

SEQ ID NO: 5048390 - DNA, 25 bp, Homo sapien
ctttgtgcatcacagattcctcctc

SEQ ID NO: 5048391 - DNA, 25 bp, Homo sapien
ctccaaaattaaggaaatgtaatgc

SEQ ID NO: 5048392 - DNA, 25 bp, Homo sapien
cacagattcctcctccaaaattaag

SEQ ID NO: 5048393 - DNA, 25 bp, Homo sapien
cagattcctcctccaaaattaagga

SEQ ID NO: 5048394 - DNA, 25 bp, Homo sapien
tccaatacagtaggaattgcaatgg

SEQ ID NO: 5048395 - DNA, 25 bp, Homo sapien
ttaatccgacagcaaccacaacgtc

SEQ ID NO: 5048396 - DNA, 25 bp, Homo sapien
tgtgagagaattgctggcgtccttc

SEQ ID NO: 5048397 - DNA, 25 bp, Homo sapien
ggcgtccttcaacaagactagggct

SEQ ID NO: 5048398 - DNA, 25 bp, Homo sapien
ggaagtcatcaaaccattttggaaa

SEQ ID NO: 5048399 - DNA, 25 bp, Homo sapien
acagatttaagactctcatggcagg

SEQ ID NO: 5048400 - DNA, 25 bp, Homo sapien
aataaagattagtggtgccatcatc

SEQ ID NO: 5048401 - DNA, 25 bp, Homo sapien
ggcaggaagtcatcaaaccattttg

SEQ ID NO: 5048402 - DNA, 25 bp, Homo sapien
tctattcggacaggtttattgttgt

SEQ ID NO: 5048403 - DNA, 25 bp, Homo sapien
cataataaaattgacagctgtgcta

SEQ ID NO: 5048404 - DNA, 25 bp, Homo sapien
tgtgtttattctgttcgatcgaaat

SEQ ID NO: 5048405 - DNA, 25 bp, Homo sapien
catcatatagttgttctgagtctat

SEQ ID NO: 5048406 - DNA, 25 bp, Homo sapien
agcgcccaggcttctaagggctgaa

SEQ ID NO: 5048407 - DNA, 25 bp, Homo sapien
gcattgtcactctcaattattcgga

SEQ ID NO: 5048408 - DNA, 25 bp, Homo sapien
tccctgaagagagctgcattgtcac

SEQ ID NO: 5048409 - DNA, 25 bp, Homo sapien
gaaaatggaattccctgaagagagc

SEQ ID NO: 5048410 - DNA, 25 bp, Homo sapien
ccagattgggagactgactttggca

SEQ ID NO: 5048411 - DNA, 25 bp, Homo sapien
cttgcggatatgagctggctcgtct

SEQ ID NO: 5048412 - DNA, 25 bp, Homo sapien
ggacttgagaacagctatatttagt

SEQ ID NO: 5048413 - DNA, 25 bp, Homo sapien
cttgggcttgtggacttgagaacag

SEQ ID NO: 5048414 - DNA, 25 bp, Homo sapien
acttctttcctgaaagctgtcactg

SEQ ID NO: 5048415 - DNA, 25 bp, Homo sapien
aagctgtcactgtcttgttcgtcat

SEQ ID NO: 5048416 - DNA, 25 bp, Homo sapien
ctttcctgaaagctgtcactgtctt

SEQ ID NO: 5048417 - DNA, 25 bp, Homo sapien
ttctttcctgaaagctgtcactgtc

SEQ ID NO: 5048418 - DNA, 25 bp, Homo sapien
tctctggtctgtagtggccggaaac

SEQ ID NO: 5048419 - DNA, 25 bp, Homo sapien
aactgtgcctgaattgcagggaccc

SEQ ID NO: 5048420 - DNA, 25 bp, Homo sapien
ggacccatgtgactcatctagctct

SEQ ID NO: 5048421 - DNA, 25 bp, Homo sapien
tagtggccggaaactgtgcctgaat

SEQ ID NO: 5048422 - DNA, 25 bp, Homo sapien
aatatgatacgttctctttcatcag

SEQ ID NO: 5048423 - DNA, 25 bp, Homo sapien
gatgaatatgatacgttctctttca

SEQ ID NO: 5048424 - DNA, 25 bp, Homo sapien
tgtttattttgctccaaccatgaag

SEQ ID NO: 5048425 - DNA, 25 bp, Homo sapien
catgaagctaccacaatagatataa

SEQ ID NO: 5048426 - DNA, 25 bp, Homo sapien
gataatgccagatagagtccaggag

SEQ ID NO: 5048427 - DNA, 25 bp, Homo sapien
caccttgtcattcctttaggtaatc

SEQ ID NO: 5048428 - DNA, 25 bp, Homo sapien
cttataggtgctgttcctaaacacc

SEQ ID NO: 5048429 - DNA, 25 bp, Homo sapien
ggtgctaaaccaaccaatttgacaa

SEQ ID NO: 5048430 - DNA, 25 bp, Homo sapien
agattcccctctagactcctctgcc

SEQ ID NO: 5048431 - DNA, 25 bp, Homo sapien
attcccctctagactcctctgccag

SEQ ID NO: 5048432 - DNA, 25 bp, Homo sapien
acagattcccctctagactcctctg

SEQ ID NO: 5048433 - DNA, 25 bp, Homo sapien
cccctctagactcctctgccagcat

SEQ ID NO: 5048434 - DNA, 25 bp, Homo sapien
gctggtttactgggggcttcacttc

SEQ ID NO: 5048435 - DNA, 25 bp, Homo sapien
tgcaacgttttccagggctggttta

SEQ ID NO: 5048436 - DNA, 25 bp, Homo sapien
cagggctggtttactgggggcttca

SEQ ID NO: 5048437 - DNA, 25 bp, Homo sapien
ctgcaacgttttccagggctggttt

SEQ ID NO: 5048438 - DNA, 25 bp, Homo sapien
aggaagtgatgtgggctaagtacag

SEQ ID NO: 5048439 - DNA, 25 bp, Homo sapien
acagaaccttgtccaatgaacagga

SEQ ID NO: 5048440 - DNA, 25 bp, Homo sapien
ctgcatgggtgggttttccagggaa

SEQ ID NO: 5048441 - DNA, 25 bp, Homo sapien
cagcagcctttgaatgagcggggca

SEQ ID NO: 5048442 - DNA, 25 bp, Homo sapien
ccttgattcctgacaaggaaaaact

SEQ ID NO: 5048443 - DNA, 25 bp, Homo sapien
agaatcagggttggtgtacccacta

SEQ ID NO: 5048444 - DNA, 25 bp, Homo sapien
cctgagccttgattcctgacaagga

SEQ ID NO: 5048445 - DNA, 25 bp, Homo sapien
cagggttggtgtacccactacaagg

SEQ ID NO: 5048446 - DNA, 25 bp, Homo sapien
agagtatctgaacaaaagtgctgta

SEQ ID NO: 5048447 - DNA, 25 bp, Homo sapien
tggtgtttattgagaattatacttc

SEQ ID NO: 5048448 - DNA, 25 bp, Homo sapien
cacatgaaattcaagctcccttttc

SEQ ID NO: 5048449 - DNA, 25 bp, Homo sapien
gctataatacttgatggccccaagc

SEQ ID NO: 5048450 - DNA, 25 bp, Homo sapien
ggaattcagtccaattttcaggaga

SEQ ID NO: 5048451 - DNA, 25 bp, Homo sapien
agagggactgttgctcttataaaca

SEQ ID NO: 5048452 - DNA, 25 bp, Homo sapien
aagttgccgacttgttggaattcag

SEQ ID NO: 5048453 - DNA, 25 bp, Homo sapien
taaacagaggtagtaaagtgcagca

SEQ ID NO: 5048454 - DNA, 25 bp, Homo sapien
atgagatcgcattcctccacacgag

SEQ ID NO: 5048455 - DNA, 25 bp, Homo sapien
tccacacgagggctcttcaaaaaat

SEQ ID NO: 5048456 - DNA, 25 bp, Homo sapien
gttcaaagagaactcggtagcctct

SEQ ID NO: 5048457 - DNA, 25 bp, Homo sapien
ccttggagtaagcagattgagaaac

SEQ ID NO: 5048458 - DNA, 25 bp, Homo sapien
cagtaattttcagtccattcagcag

SEQ ID NO: 5048459 - DNA, 25 bp, Homo sapien
tttcagtccattcagcagttccctc

SEQ ID NO: 5048460 - DNA, 25 bp, Homo sapien
ctggagtctttataaatgaccaacc

SEQ ID NO: 5048461 - DNA, 25 bp, Homo sapien
tcagcagttccctctgagaaatcct

SEQ ID NO: 5048462 - DNA, 25 bp, Homo sapien
gggcgcagctaaggcctgtgaaaaa

SEQ ID NO: 5048463 - DNA, 25 bp, Homo sapien
gcaatggagtcctcctggtgcacac

SEQ ID NO: 5048464 - DNA, 25 bp, Homo sapien
ccagccagcgcagtatgattagatg

SEQ ID NO: 5048465 - DNA, 25 bp, Homo sapien
catgactggatgatatgggagtcct

SEQ ID NO: 5048466 - DNA, 25 bp, Homo sapien
ccttttgtgagttgcagatgcttga

SEQ ID NO: 5048467 - DNA, 25 bp, Homo sapien
ctccttttgtgagttgcagatgctt

SEQ ID NO: 5048468 - DNA, 25 bp, Homo sapien
acgacttttggcgagctccttttgt

SEQ ID NO: 5048469 - DNA, 25 bp, Homo sapien
tcttgttggctctacgacttttggc

SEQ ID NO: 5048470 - DNA, 25 bp, Homo sapien
gaagaaccagagtctatgcccagct

SEQ ID NO: 5048471 - DNA, 25 bp, Homo sapien
aatgcactcatcagagggacagggc

SEQ ID NO: 5048472 - DNA, 25 bp, Homo sapien
catgtgctgcacgactagggaacaa

SEQ ID NO: 5048473 - DNA, 25 bp, Homo sapien
caattataatagatgctcagaggcc

SEQ ID NO: 5048474 - DNA, 25 bp, Homo sapien
taatctctcagtaagccagtagtgg

SEQ ID NO: 5048475 - DNA, 25 bp, Homo sapien
tatcagcaggagcttcacacgtgtg

SEQ ID NO: 5048476 - DNA, 25 bp, Homo sapien
gctaaagctctccaccgatcgtaag

SEQ ID NO: 5048477 - DNA, 25 bp, Homo sapien
gaggtctgtaaaagcaggtctcagc

SEQ ID NO: 5048478 - DNA, 25 bp, Homo sapien
cagtccttggcttcaaccagagggc

SEQ ID NO: 5048479 - DNA, 25 bp, Homo sapien
cgttgtgtcggattaaagtgcagtc

SEQ ID NO: 5048480 - DNA, 25 bp, Homo sapien
tccagcacagcgatgtgagcggctc

SEQ ID NO: 5048481 - DNA, 25 bp, Homo sapien
ggcccaggaggttgttgatcatttc

SEQ ID NO: 5048482 - DNA, 25 bp, Homo sapien
gtctttgagggcagttttacacatt

SEQ ID NO: 5048483 - DNA, 25 bp, Homo sapien
tttgagggcagttttacacatttca

SEQ ID NO: 5048484 - DNA, 25 bp, Homo sapien
tgtctttgagggcagttttacacat

SEQ ID NO: 5048485 - DNA, 25 bp, Homo sapien
gctgaatgaaatggcacataacggt

SEQ ID NO: 5048486 - DNA, 25 bp, Homo sapien
gagaagcaaccagcacgacgttttt

SEQ ID NO: 5048487 - DNA, 25 bp, Homo sapien
gaagcaaccagcacgacgtttttaa

SEQ ID NO: 5048488 - DNA, 25 bp, Homo sapien
agaagcaaccagcacgacgttttta

SEQ ID NO: 5048489 - DNA, 25 bp, Homo sapien
ccagcacgacgtttttaaaatactg

SEQ ID NO: 5048490 - DNA, 25 bp, Homo sapien
cctgaaggtcagctgcagtagagac

SEQ ID NO: 5048491 - DNA, 25 bp, Homo sapien
agttggtagaggaaacatttgcgca

SEQ ID NO: 5048492 - DNA, 25 bp, Homo sapien
cgcaaatcagcattatccctgaagg

SEQ ID NO: 5048493 - DNA, 25 bp, Homo sapien
gaggaaacatttgcgcaaatcagca

SEQ ID NO: 5048494 - DNA, 25 bp, Homo sapien
gatgttgccaagagaatggccaatg

SEQ ID NO: 5048495 - DNA, 25 bp, Homo sapien
ggccgtgtgaggaccgatcggatga

SEQ ID NO: 5048496 - DNA, 25 bp, Homo sapien
gaccgatcggatgatgatgttgcca

SEQ ID NO: 5048497 - DNA, 25 bp, Homo sapien
gagtgacaggaacgtgtggagtttg

SEQ ID NO: 5048498 - DNA, 25 bp, Homo sapien
tattaaaagtcacaagttagcttag

SEQ ID NO: 5048499 - DNA, 25 bp, Homo sapien
ccccagcattaactacctgtggttt

SEQ ID NO: 5048500 - DNA, 25 bp, Homo sapien
gtcacaagttagcttagctcagtgg

SEQ ID NO: 5048501 - DNA, 25 bp, Homo sapien
cttagctcagtggtatacagaaggc

SEQ ID NO: 5048502 - DNA, 25 bp, Homo sapien
tccgtcatagtatcaaaatctgcaa

SEQ ID NO: 5048503 - DNA, 25 bp, Homo sapien
tccaataaccgatccgtcatagtat

SEQ ID NO: 5048504 - DNA, 25 bp, Homo sapien
gttgaatgatttcatccaataaccg

SEQ ID NO: 5048505 - DNA, 25 bp, Homo sapien
aattcgggatatggagaggttgtac

SEQ ID NO: 5048506 - DNA, 25 bp, Homo sapien
gggagccccagttctatgaaagtct

SEQ ID NO: 5048507 - DNA, 25 bp, Homo sapien
aagtctttaccagccggaggtctgc

SEQ ID NO: 5048508 - DNA, 25 bp, Homo sapien
ttctatgaaagtctttaccagccgg

SEQ ID NO: 5048509 - DNA, 25 bp, Homo sapien
taccagccggaggtctgcactgttc

SEQ ID NO: 5048510 - DNA, 25 bp, Homo sapien
gacacagacaaccaggtgaattcca

SEQ ID NO: 5048511 - DNA, 25 bp, Homo sapien
catggacacagacaaccaggtgaat

SEQ ID NO: 5048512 - DNA, 25 bp, Homo sapien
cagacaaccaggtgaattccatctt

SEQ ID NO: 5048513 - DNA, 25 bp, Homo sapien
aggccatggacacagacaaccaggt

SEQ ID NO: 5048514 - DNA, 25 bp, Homo sapien
ttaagtcactgtacagaaatccttc

SEQ ID NO: 5048515 - DNA, 25 bp, Homo sapien
gtcactgtacagaaatccttcaatc

SEQ ID NO: 5048516 - DNA, 25 bp, Homo sapien
tcagaagctagtacagttaagtcac

SEQ ID NO: 5048517 - DNA, 25 bp, Homo sapien
ctggtgggaaatatggtatatcaga

SEQ ID NO: 5048518 - DNA, 25 bp, Homo sapien
caacgtgctggaatgggtagaaaca

SEQ ID NO: 5048519 - DNA, 25 bp, Homo sapien
actgacttcctcatccaacgtgctg

SEQ ID NO: 5048520 - DNA, 25 bp, Homo sapien
gataagttcacaacctccacagcct

SEQ ID NO: 5048521 - DNA, 25 bp, Homo sapien
gtagaaacaactccaaaggatccca

SEQ ID NO: 5048522 - DNA, 25 bp, Homo sapien
acctgggaatgaacggaatgggtca

SEQ ID NO: 5048523 - DNA, 25 bp, Homo sapien
cctgggaatgaacggaatgggtcac

SEQ ID NO: 5048524 - DNA, 25 bp, Homo sapien
ggaccccatgatggaagtgcctgcc

SEQ ID NO: 5048525 - DNA, 25 bp, Homo sapien
agatgggaccccatgatggaagtgc

SEQ ID NO: 5048526 - DNA, 25 bp, Homo sapien
tgagagagaccctcaacctctgaga

SEQ ID NO: 5048527 - DNA, 25 bp, Homo sapien
gacgtacagctcaattcaggcacct

SEQ ID NO: 5048528 - DNA, 25 bp, Homo sapien
tgttgatggcatcagcagctgacgt

SEQ ID NO: 5048529 - DNA, 25 bp, Homo sapien
catccataatgcaaggtgaaccgct

SEQ ID NO: 5048530 - DNA, 25 bp, Homo sapien
ccctgctggttgtcagcatctaaaa

SEQ ID NO: 5048531 - DNA, 25 bp, Homo sapien
gacagtgtccttgagcatcaaactg

SEQ ID NO: 5048532 - DNA, 25 bp, Homo sapien
ttggtttcaacacctggagtgttct

SEQ ID NO: 5048533 - DNA, 25 bp, Homo sapien
cagagtcaccacaaagttgagagca

SEQ ID NO: 5048534 - DNA, 25 bp, Homo sapien
ttgctgcttggtgtccgcatcttca

SEQ ID NO: 5048535 - DNA, 25 bp, Homo sapien
agcctcctctgggctactgatgtgg

SEQ ID NO: 5048536 - DNA, 25 bp, Homo sapien
ctgcttggtgtccgcatcttcagca

SEQ ID NO: 5048537 - DNA, 25 bp, Homo sapien
tgctgcttggtgtccgcatcttcag

SEQ ID NO: 5048538 - DNA, 25 bp, Homo sapien
ggtgcaagacttcccgatcactggg

SEQ ID NO: 5048539 - DNA, 25 bp, Homo sapien
tgaccccggatagcactgagagttc

SEQ ID NO: 5048540 - DNA, 25 bp, Homo sapien
catgtcttcgaacaaacgggtgcaa

SEQ ID NO: 5048541 - DNA, 25 bp, Homo sapien
gatgaagatctcttgatgaccccgg

SEQ ID NO: 5048542 - DNA, 25 bp, Homo sapien
cagcatcagatgtttggccagtcca

SEQ ID NO: 5048543 - DNA, 25 bp, Homo sapien
gccactggatatgtcccagcatcag

SEQ ID NO: 5048544 - DNA, 25 bp, Homo sapien
tacgtcaatgtaggtcagcactggg

SEQ ID NO: 5048545 - DNA, 25 bp, Homo sapien
cctgagattcagagcacatgtccat

SEQ ID NO: 5048546 - DNA, 25 bp, Homo sapien
catgctagtgaggtactccgagttc

SEQ ID NO: 5048547 - DNA, 25 bp, Homo sapien
tgtcgcagggcagtccacgtatctg

SEQ ID NO: 5048548 - DNA, 25 bp, Homo sapien
cagggtgttccaatcgccgtcgatg

SEQ ID NO: 5048549 - DNA, 25 bp, Homo sapien
tccgagttccggatatccagggaca

SEQ ID NO: 5048550 - DNA, 25 bp, Homo sapien
tgtgaacttaggctggtgtgcacag

SEQ ID NO: 5048551 - DNA, 25 bp, Homo sapien
cctgtgaacttaggctggtgtgcac

SEQ ID NO: 5048552 - DNA, 25 bp, Homo sapien
ctgtgaacttaggctggtgtgcaca

SEQ ID NO: 5048553 - DNA, 25 bp, Homo sapien
gcaagtttttggtgctccatgtaaa

SEQ ID NO: 5048554 - DNA, 25 bp, Homo sapien
caggactgcaagtttttggtgctcc

SEQ ID NO: 5048555 - DNA, 25 bp, Homo sapien
ttggtgctccatgtaaaagaaggcc

SEQ ID NO: 5048556 - DNA, 25 bp, Homo sapien
tttggtgctccatgtaaaagaaggc

SEQ ID NO: 5048557 - DNA, 25 bp, Homo sapien
cctgcacggtcatggtagagacacg

SEQ ID NO: 5048558 - DNA, 25 bp, Homo sapien
gaggctaaggaagttcacaacgcca

SEQ ID NO: 5048559 - DNA, 25 bp, Homo sapien
tagaggccaatcctaatgcttgatc

SEQ ID NO: 5048560 - DNA, 25 bp, Homo sapien
cgaaagcacgaagatctagaggcca

SEQ ID NO: 5048561 - DNA, 25 bp, Homo sapien
tcctgggtgagataagtggtcactt

SEQ ID NO: 5048562 - DNA, 25 bp, Homo sapien
tcatcatgtgggacgtgagccaggc

SEQ ID NO: 5048563 - DNA, 25 bp, Homo sapien
actgggtccacagagtcatcatgtg

SEQ ID NO: 5048564 - DNA, 25 bp, Homo sapien
gttcctgggtgagataagtggtcac

SEQ ID NO: 5048565 - DNA, 25 bp, Homo sapien
ctggagaggcaaaaaaggtggtatt

SEQ ID NO: 5048566 - DNA, 25 bp, Homo sapien
gaagtcaggagcagtcttcttcctg

SEQ ID NO: 5048567 - DNA, 25 bp, Homo sapien
gagaggcaaaaaaggtggtattcaa

SEQ ID NO: 5048568 - DNA, 25 bp, Homo sapien
attcaaggctcctgactccatgaag

SEQ ID NO: 5048569 - DNA, 25 bp, Homo sapien
aactcttcaaggtaccccagatcca

SEQ ID NO: 5048570 - DNA, 25 bp, Homo sapien
caaactcttcaaggtaccccagatc

SEQ ID NO: 5048571 - DNA, 25 bp, Homo sapien
ccaaactcttcaaggtaccccagat

SEQ ID NO: 5048572 - DNA, 25 bp, Homo sapien
gagaagaccctttggacagaaatgc

SEQ ID NO: 5048573 - DNA, 25 bp, Homo sapien
ccacatttcttacgggagattcctg

SEQ ID NO: 5048574 - DNA, 25 bp, Homo sapien
gctacagtttaataccaggagaacc

SEQ ID NO: 5048575 - DNA, 25 bp, Homo sapien
gagtaactcgaattctggagaggtg

SEQ ID NO: 5048576 - DNA, 25 bp, Homo sapien
tttcatcactatggacttgtctgtc

SEQ ID NO: 5048577 - DNA, 25 bp, Homo sapien
cttttcatcactatggacttgtctg

SEQ ID NO: 5048578 - DNA, 25 bp, Homo sapien
tccctgcgcaccttcccccgtcacc

SEQ ID NO: 5048579 - DNA, 25 bp, Homo sapien
tcatcactatggacttgtctgtcct

SEQ ID NO: 5048580 - DNA, 25 bp, Homo sapien
tgcgatgtccactcctgttttagat

SEQ ID NO: 5048581 - DNA, 25 bp, Homo sapien
tcagttcagtgccatccacccaggt

SEQ ID NO: 5048582 - DNA, 25 bp, Homo sapien
agttcagtgccatccacccaggtgc

SEQ ID NO: 5048583 - DNA, 25 bp, Homo sapien
actcctgttttagatctcagttcag

SEQ ID NO: 5048584 - DNA, 25 bp, Homo sapien
taaagcctgtggcaatgcagtcact

SEQ ID NO: 5048585 - DNA, 25 bp, Homo sapien
tcaaaaccaagagccggtagtcctg

SEQ ID NO: 5048586 - DNA, 25 bp, Homo sapien
atccagccacatccgtgcagcagtt

SEQ ID NO: 5048587 - DNA, 25 bp, Homo sapien
tccgtgcagcagttggctaatttag

SEQ ID NO: 5048588 - DNA, 25 bp, Homo sapien
cagggctgcagcaaggatagagcct

SEQ ID NO: 5048589 - DNA, 25 bp, Homo sapien
gggctgcagcaaggatagagcctgg

SEQ ID NO: 5048590 - DNA, 25 bp, Homo sapien
ccagggctgcagcaaggatagagcc

SEQ ID NO: 5048591 - DNA, 25 bp, Homo sapien
ggctgcagcaaggatagagcctggt

SEQ ID NO: 5048592 - DNA, 25 bp, Homo sapien
tattgtcattgttgcagtgactgca

SEQ ID NO: 5048593 - DNA, 25 bp, Homo sapien
aggccaggtatgttggtattgtcat

SEQ ID NO: 5048594 - DNA, 25 bp, Homo sapien
gggagccagcattccctaggccagg

SEQ ID NO: 5048595 - DNA, 25 bp, Homo sapien
agggagccagcattccctaggccag

SEQ ID NO: 5048596 - DNA, 25 bp, Homo sapien
agaccccagcgccagttctccaatt

SEQ ID NO: 5048597 - DNA, 25 bp, Homo sapien
gaccccagcgccagttctccaatta

SEQ ID NO: 5048598 - DNA, 25 bp, Homo sapien
accccagcgccagttctccaattac

SEQ ID NO: 5048599 - DNA, 25 bp, Homo sapien
gagcacagctgagaaagtgtttctt

SEQ ID NO: 5048600 - DNA, 25 bp, Homo sapien
aagtgtttcttcaacagcaagggcc

SEQ ID NO: 5048601 - DNA, 25 bp, Homo sapien
ctgtagctctgagcacagctgagaa

SEQ ID NO: 5048602 - DNA, 25 bp, Homo sapien
agtgtttcttcaacagcaagggcct

SEQ ID NO: 5048603 - DNA, 25 bp, Homo sapien
gctctgggatgtcccgcatgatcac

SEQ ID NO: 5048604 - DNA, 25 bp, Homo sapien
cttgtgtgcgtgctgcatgcagttc

SEQ ID NO: 5048605 - DNA, 25 bp, Homo sapien
agaccccggtaagcgtggaggagca

SEQ ID NO: 5048606 - DNA, 25 bp, Homo sapien
gcagctctgggatgtcccgcatgat

SEQ ID NO: 5048607 - DNA, 25 bp, Homo sapien
tcattgatggcctcggtgaacgtgt

SEQ ID NO: 5048608 - DNA, 25 bp, Homo sapien
gctcattgatggcctcggtgaacgt

SEQ ID NO: 5048609 - DNA, 25 bp, Homo sapien
ctcattgatggcctcggtgaacgtg

SEQ ID NO: 5048610 - DNA, 25 bp, Homo sapien
acgctcattgatggcctcggtgaac

SEQ ID NO: 5048611 - DNA, 25 bp, Homo sapien
acctgccgctcctgtctgtgcaagt

SEQ ID NO: 5048612 - DNA, 25 bp, Homo sapien
cctgccgctcctgtctgtgcaagtg

SEQ ID NO: 5048613 - DNA, 25 bp, Homo sapien
agcatcacctccacctacacacagg

SEQ ID NO: 5048614 - DNA, 25 bp, Homo sapien
ccacccacgcacagttcagtatcac

SEQ ID NO: 5048615 - DNA, 25 bp, Homo sapien
cacgcacagttcagtatcacctcca

SEQ ID NO: 5048616 - DNA, 25 bp, Homo sapien
ctccacctctgcaaggctccagcat

SEQ ID NO: 5048617 - DNA, 25 bp, Homo sapien
tggcaatgactattccaccagggcc

SEQ ID NO: 5048618 - DNA, 25 bp, Homo sapien
tcaagaaggacaactgtgagtacag

SEQ ID NO: 5048619 - DNA, 25 bp, Homo sapien
gattccaagattaggtacacaggtg

SEQ ID NO: 5048620 - DNA, 25 bp, Homo sapien
tcttgttccgaaatgtcagtggtga

SEQ ID NO: 5048621 - DNA, 25 bp, Homo sapien
cacttaatatgaggtctgctctctc

SEQ ID NO: 5048622 - DNA, 25 bp, Homo sapien
gaaaagcatccgtttctgagccatg

SEQ ID NO: 5048623 - DNA, 25 bp, Homo sapien
ctttaatcctgctatcaaggcaacc

SEQ ID NO: 5048624 - DNA, 25 bp, Homo sapien
tacagtattgttagctctaggcatt

SEQ ID NO: 5048625 - DNA, 25 bp, Homo sapien
tgtcttcattactaagagcagtcat

SEQ ID NO: 5048626 - DNA, 25 bp, Homo sapien
cacaatgctgtttggtcagtttctg

SEQ ID NO: 5048627 - DNA, 25 bp, Homo sapien
agcacaatgctgtttggtcagtttc

SEQ ID NO: 5048628 - DNA, 25 bp, Homo sapien
gcacaatgctgtttggtcagtttct

SEQ ID NO: 5048629 - DNA, 25 bp, Homo sapien
agacagcttcagagtggcaaccttg

SEQ ID NO: 5048630 - DNA, 25 bp, Homo sapien
ggcaaccttgtacgttttctcaatg

SEQ ID NO: 5048631 - DNA, 25 bp, Homo sapien
cactctgaggaagatactgttctac

SEQ ID NO: 5048632 - DNA, 25 bp, Homo sapien
tgttctacgattctctgcaattcga

SEQ ID NO: 5048633 - DNA, 25 bp, Homo sapien
gctcgtattgctatgaaagtccagt

SEQ ID NO: 5048634 - DNA, 25 bp, Homo sapien
gattttttacgccaatcagctcgta

SEQ ID NO: 5048635 - DNA, 25 bp, Homo sapien
gccaatcagctcgtattgctatgaa

SEQ ID NO: 5048636 - DNA, 25 bp, Homo sapien
ctccctgtgattttttacgccaatc

SEQ ID NO: 5048637 - DNA, 25 bp, Homo sapien
tctgaaggggatgtttcaaagaagc

SEQ ID NO: 5048638 - DNA, 25 bp, Homo sapien
tgaatctcatagaacatacactctg

SEQ ID NO: 5048639 - DNA, 25 bp, Homo sapien
tctcatagaacatacactctgcaaa

SEQ ID NO: 5048640 - DNA, 25 bp, Homo sapien
gaagcatgaatctcatagaacatac

SEQ ID NO: 5048641 - DNA, 25 bp, Homo sapien
tgaggaagtcggcttgcagtaccca

SEQ ID NO: 5048642 - DNA, 25 bp, Homo sapien
agtacccagctccaaagaccaagtt

SEQ ID NO: 5048643 - DNA, 25 bp, Homo sapien
tgggccacctttaccaagccaggag

SEQ ID NO: 5048644 - DNA, 25 bp, Homo sapien
gactgttcttgtccggtgtctgggc

SEQ ID NO: 5048645 - DNA, 25 bp, Homo sapien
tcagggctgcctctgaacttcatac

SEQ ID NO: 5048646 - DNA, 25 bp, Homo sapien
aagtgcaggccaagcgttcggctgc

SEQ ID NO: 5048647 - DNA, 25 bp, Homo sapien
cacagacaggtggaaatagtcgaac

SEQ ID NO: 5048648 - DNA, 25 bp, Homo sapien
gacggtcaccgagatcacagacagg

SEQ ID NO: 5048649 - DNA, 25 bp, Homo sapien
aacatgaccgggacctggtggtgca

SEQ ID NO: 5048650 - DNA, 25 bp, Homo sapien
aggcaagcatgtgagctcacgtgag

SEQ ID NO: 5048651 - DNA, 25 bp, Homo sapien
catgtgagctcacgtgagaaatggt

SEQ ID NO: 5048652 - DNA, 25 bp, Homo sapien
ctcacgtgagaaatggtgggttgcc

SEQ ID NO: 5048653 - DNA, 25 bp, Homo sapien
acgtgagaaatggtgggttgcccct

SEQ ID NO: 5048654 - DNA, 25 bp, Homo sapien
gttgaaaatctacttcactcagtgc

SEQ ID NO: 5048655 - DNA, 25 bp, Homo sapien
tgctgttcactgtccgtaaagtgca

SEQ ID NO: 5048656 - DNA, 25 bp, Homo sapien
gaaaatctacttcactcagtgcgtc

SEQ ID NO: 5048657 - DNA, 25 bp, Homo sapien
gtaaagtgcagatccaccttgagtt

SEQ ID NO: 5048658 - DNA, 25 bp, Homo sapien
gatggagcagtgaactcgcagtgaa

SEQ ID NO: 5048659 - DNA, 25 bp, Homo sapien
gagcagtgaactcgcagtgaaatcc

SEQ ID NO: 5048660 - DNA, 25 bp, Homo sapien
cagtgaactcgcagtgaaatcccac

SEQ ID NO: 5048661 - DNA, 25 bp, Homo sapien
gaactcgcagtgaaatcccacttgg

SEQ ID NO: 5048662 - DNA, 25 bp, Homo sapien
ctgtgataggacttggtctcctcct

SEQ ID NO: 5048663 - DNA, 25 bp, Homo sapien
gaagcccttttcatccgtaaccaca

SEQ ID NO: 5048664 - DNA, 25 bp, Homo sapien
gtgataggacttggtctcctcctca

SEQ ID NO: 5048665 - DNA, 25 bp, Homo sapien
tttcatccgtaaccacaaagcccat

SEQ ID NO: 5048666 - DNA, 25 bp, Homo sapien
atggtggatgctcatccctgtttgg

SEQ ID NO: 5048667 - DNA, 25 bp, Homo sapien
agggccatcaaacagggcacatggt

SEQ ID NO: 5048668 - DNA, 25 bp, Homo sapien
tggatgctcatccctgtttggaaag

SEQ ID NO: 5048669 - DNA, 25 bp, Homo sapien
ggtggatgctcatccctgtttggaa

SEQ ID NO: 5048670 - DNA, 25 bp, Homo sapien
ggctggtggtagattcatgacttac

SEQ ID NO: 5048671 - DNA, 25 bp, Homo sapien
gaacagccatgatagggaacagcta

SEQ ID NO: 5048672 - DNA, 25 bp, Homo sapien
tgatagggaacagctacttgtggct

SEQ ID NO: 5048673 - DNA, 25 bp, Homo sapien
ctacttgtggctggtggtagattca

SEQ ID NO: 5048674 - DNA, 25 bp, Homo sapien
cacggtgctgtcatggacacaggct

SEQ ID NO: 5048675 - DNA, 25 bp, Homo sapien
aagatctgaaagacccggctgtgca

SEQ ID NO: 5048676 - DNA, 25 bp, Homo sapien
catttatgggtacctcttcattccg

SEQ ID NO: 5048677 - DNA, 25 bp, Homo sapien
aatgaactcggaagaccacagcatc

SEQ ID NO: 5048678 - DNA, 25 bp, Homo sapien
cagtaggaacccatgaactccaata

SEQ ID NO: 5048679 - DNA, 25 bp, Homo sapien
atgaactccaatactgtcctgtacc

SEQ ID NO: 5048680 - DNA, 25 bp, Homo sapien
gaactccaatactgtcctgtacctg

SEQ ID NO: 5048681 - DNA, 25 bp, Homo sapien
aatcagtaggaacccatgaactcca

SEQ ID NO: 5048682 - DNA, 25 bp, Homo sapien
tgtggaatagcgaatgaatattccc

SEQ ID NO: 5048683 - DNA, 25 bp, Homo sapien
tggaatagcgaatgaatattcccat

SEQ ID NO: 5048684 - DNA, 25 bp, Homo sapien
gtctgtggaatagcgaatgaatatt

SEQ ID NO: 5048685 - DNA, 25 bp, Homo sapien
tgtgtctgtggaatagcgaatgaat

SEQ ID NO: 5048686 - DNA, 25 bp, Homo sapien
tagtgtcacctgttgaatcttgccc

SEQ ID NO: 5048687 - DNA, 25 bp, Homo sapien
gagaaatgatgcaagatcccacaca

SEQ ID NO: 5048688 - DNA, 25 bp, Homo sapien
gaccttgcaggataagtagacacaa

SEQ ID NO: 5048689 - DNA, 25 bp, Homo sapien
gcatttactgctcaacaacactcgg

SEQ ID NO: 5048690 - DNA, 25 bp, Homo sapien
cttccagtcaacattatggtgcaga

SEQ ID NO: 5048691 - DNA, 25 bp, Homo sapien
ccacaatcggctggccctttatatg

SEQ ID NO: 5048692 - DNA, 25 bp, Homo sapien
ggctccagggccacaatcggctggc

SEQ ID NO: 5048693 - DNA, 25 bp, Homo sapien
ggtgcagaggcaaccaccaagtttg

SEQ ID NO: 5048694 - DNA, 25 bp, Homo sapien
tatttagaatttgttgaggcaaagg

SEQ ID NO: 5048695 - DNA, 25 bp, Homo sapien
tcaggatatgctcagatatttagaa

SEQ ID NO: 5048696 - DNA, 25 bp, Homo sapien
gatatgctcagatatttagaatttg

SEQ ID NO: 5048697 - DNA, 25 bp, Homo sapien
gttgaggcaaaggaagcattgctca

SEQ ID NO: 5048698 - DNA, 25 bp, Homo sapien
gtccccaaacagtggcaggctagga

SEQ ID NO: 5048699 - DNA, 25 bp, Homo sapien
ttgtgagtaacacaagctggctgca

SEQ ID NO: 5048700 - DNA, 25 bp, Homo sapien
ggctgcttggtatctcccttagaga

SEQ ID NO: 5048701 - DNA, 25 bp, Homo sapien
tcactaaaggagatgggatgtccac

SEQ ID NO: 5048702 - DNA, 25 bp, Homo sapien
taggtcttggattccggtaataatc

SEQ ID NO: 5048703 - DNA, 25 bp, Homo sapien
tcttggattccggtaataatccatt

SEQ ID NO: 5048704 - DNA, 25 bp, Homo sapien
aataatccattatgtctttagcctt

SEQ ID NO: 5048705 - DNA, 25 bp, Homo sapien
cattatgtctttagccttatttgta

SEQ ID NO: 5048706 - DNA, 25 bp, Homo sapien
cagtttctctgtagatggaaacctc

SEQ ID NO: 5048707 - DNA, 25 bp, Homo sapien
tccttggccacaggtccagtttctc

SEQ ID NO: 5048708 - DNA, 25 bp, Homo sapien
tgttagcccggttttcctctggaca

SEQ ID NO: 5048709 - DNA, 25 bp, Homo sapien
tctctgtagatggaaacctctattt

SEQ ID NO: 5048710 - DNA, 25 bp, Homo sapien
ataaactcattcactgagctctgct

SEQ ID NO: 5048711 - DNA, 25 bp, Homo sapien
caataaactcattcactgagctctg

SEQ ID NO: 5048712 - DNA, 25 bp, Homo sapien
atcaataaactcattcactgagctc

SEQ ID NO: 5048713 - DNA, 25 bp, Homo sapien
caatcaataaactcattcactgagc

SEQ ID NO: 5048714 - DNA, 25 bp, Homo sapien
ccaggagacccgcttagcgcaagga

SEQ ID NO: 5048715 - DNA, 25 bp, Homo sapien
gaagtggttccagctcggtggtatc

SEQ ID NO: 5048716 - DNA, 25 bp, Homo sapien
ctcggtggtatcttcccaggagacc

SEQ ID NO: 5048717 - DNA, 25 bp, Homo sapien
gagacccgcttagcgcaaggaggaa

SEQ ID NO: 5048718 - DNA, 25 bp, Homo sapien
gaatcatctaaactgctaggaaagg

SEQ ID NO: 5048719 - DNA, 25 bp, Homo sapien
cacaggaagggctgacgtctagctc

SEQ ID NO: 5048720 - DNA, 25 bp, Homo sapien
tatctacagaatatgggtgccggcc

SEQ ID NO: 5048721 - DNA, 25 bp, Homo sapien
ccatcatgttggttctctcggtgac

SEQ ID NO: 5048722 - DNA, 25 bp, Homo sapien
tgcatcagtgtgaacgtccaatgag

SEQ ID NO: 5048723 - DNA, 25 bp, Homo sapien
aaattttgattagaggcagaagtga

SEQ ID NO: 5048724 - DNA, 25 bp, Homo sapien
taaaagtctaatcttgtcactgctg

SEQ ID NO: 5048725 - DNA, 25 bp, Homo sapien
gaagacagctctgatggataggact

SEQ ID NO: 5048726 - DNA, 25 bp, Homo sapien
tcccatgcagcagctgttaatgcca

SEQ ID NO: 5048727 - DNA, 25 bp, Homo sapien
aactcattgtactgggtgaagtttc

SEQ ID NO: 5048728 - DNA, 25 bp, Homo sapien
taaaactcattgtactgggtgaagt

SEQ ID NO: 5048729 - DNA, 25 bp, Homo sapien
ggtgaagtttcccatgcagcagctg

SEQ ID NO: 5048730 - DNA, 25 bp, Homo sapien
tcccgtcagaaatgcatacagataa

SEQ ID NO: 5048731 - DNA, 25 bp, Homo sapien
cgagagtctatttccgttcccctgg

SEQ ID NO: 5048732 - DNA, 25 bp, Homo sapien
gatagttggccagaaataggactgc

SEQ ID NO: 5048733 - DNA, 25 bp, Homo sapien
gcttccaatgaacggcgagagtcta

SEQ ID NO: 5048734 - DNA, 25 bp, Homo sapien
cttgtgctggttcttgttctgacat

SEQ ID NO: 5048735 - DNA, 25 bp, Homo sapien
tgctggttcttgttctgacatatgt

SEQ ID NO: 5048736 - DNA, 25 bp, Homo sapien
tgtgctggttcttgttctgacatat

SEQ ID NO: 5048737 - DNA, 25 bp, Homo sapien
tctgacatatgtatatttagaacct

SEQ ID NO: 5048738 - DNA, 25 bp, Homo sapien
ccttcaaggtcactcggatctggta

SEQ ID NO: 5048739 - DNA, 25 bp, Homo sapien
caaggtcactcggatctggtaatac

SEQ ID NO: 5048740 - DNA, 25 bp, Homo sapien
caccttcaaggtcactcggatctgg

SEQ ID NO: 5048741 - DNA, 25 bp, Homo sapien
cagtctgtgggggatccttgaagac

SEQ ID NO: 5048742 - DNA, 25 bp, Homo sapien
gtctcctgtggctcattgagctcat

SEQ ID NO: 5048743 - DNA, 25 bp, Homo sapien
tagtaatgacaaagggtaaagccat

SEQ ID NO: 5048744 - DNA, 25 bp, Homo sapien
agtaatgacaaagggtaaagccatt

SEQ ID NO: 5048745 - DNA, 25 bp, Homo sapien
gtagtaatgacaaagggtaaagcca

SEQ ID NO: 5048746 - DNA, 25 bp, Homo sapien
cttattatcatccacaaacagtacg

SEQ ID NO: 5048747 - DNA, 25 bp, Homo sapien
gctgtcatccttattatcatccaca

SEQ ID NO: 5048748 - DNA, 25 bp, Homo sapien
tcatccttattatcatccacaaaca

SEQ ID NO: 5048749 - DNA, 25 bp, Homo sapien
atgctgtcatccttattatcatcca

SEQ ID NO: 5048750 - DNA, 25 bp, Homo sapien
ccacacagctaggagttaacccagg

SEQ ID NO: 5048751 - DNA, 25 bp, Homo sapien
cacagctaggagttaacccaggagg

SEQ ID NO: 5048752 - DNA, 25 bp, Homo sapien
ctgacatagacggagagaggatgat

SEQ ID NO: 5048753 - DNA, 25 bp, Homo sapien
tgacatagacggagagaggatgatg

SEQ ID NO: 5048754 - DNA, 25 bp, Homo sapien
caacatttgacatacggctggccac

SEQ ID NO: 5048755 - DNA, 25 bp, Homo sapien
taaaggcatggaacggatcctcgca

SEQ ID NO: 5048756 - DNA, 25 bp, Homo sapien
taattggccaggcttagagtgccca

SEQ ID NO: 5048757 - DNA, 25 bp, Homo sapien
taatgccccttgtgaagtagcagca

SEQ ID NO: 5048758 - DNA, 25 bp, Homo sapien
aatgagccttggaggtaagtctatc

SEQ ID NO: 5048759 - DNA, 25 bp, Homo sapien
cacctgcacgtgaaatgccaaattc

SEQ ID NO: 5048760 - DNA, 25 bp, Homo sapien
ctatcatgaggatttactgatatca

SEQ ID NO: 5048761 - DNA, 25 bp, Homo sapien
gccttggaggtaagtctatcatgag

SEQ ID NO: 5048762 - DNA, 25 bp, Homo sapien
cctctctgaaagagatccacattat

SEQ ID NO: 5048763 - DNA, 25 bp, Homo sapien
tgtagctctaccgaaaactcaaccg

SEQ ID NO: 5048764 - DNA, 25 bp, Homo sapien
tttcagacatgatctttttggctca

SEQ ID NO: 5048765 - DNA, 25 bp, Homo sapien
taaaatttatgtagctctaccgaaa

SEQ ID NO: 5048766 - DNA, 25 bp, Homo sapien
tcttggggttgtcggctttccatta

SEQ ID NO: 5048767 - DNA, 25 bp, Homo sapien
ggttgtcggctttccattatcccca

SEQ ID NO: 5048768 - DNA, 25 bp, Homo sapien
catgtgactcctttcttggggttgt

SEQ ID NO: 5048769 - DNA, 25 bp, Homo sapien
tgactcctttcttggggttgtcggc

SEQ ID NO: 5048770 - DNA, 25 bp, Homo sapien
agactgtatgtagggacgaaataag

SEQ ID NO: 5048771 - DNA, 25 bp, Homo sapien
cgagactgtatgtagggacgaaata

SEQ ID NO: 5048772 - DNA, 25 bp, Homo sapien
atggtcgagactgtatgtagggacg

SEQ ID NO: 5048773 - DNA, 25 bp, Homo sapien
gtcgagactgtatgtagggacgaaa

SEQ ID NO: 5048774 - DNA, 25 bp, Homo sapien
gattctgactgatttagccatcaag

SEQ ID NO: 5048775 - DNA, 25 bp, Homo sapien
tgtacaatggagatgagaacctgcc

SEQ ID NO: 5048776 - DNA, 25 bp, Homo sapien
cacagcatgtcaacataggtgggca

SEQ ID NO: 5048777 - DNA, 25 bp, Homo sapien
gaacctgccacatagagctgttgta

SEQ ID NO: 5048778 - DNA, 25 bp, Homo sapien
taactgaagcagtcatggttcctgg

SEQ ID NO: 5048779 - DNA, 25 bp, Homo sapien
ggtaaagcttcataggccgacctca

SEQ ID NO: 5048780 - DNA, 25 bp, Homo sapien
gcttacctgtgcaagaatggaccca

SEQ ID NO: 5048781 - DNA, 25 bp, Homo sapien
tatccaccaggagctgtacaaggca

SEQ ID NO: 5048782 - DNA, 25 bp, Homo sapien
gcatttgttggtacttctccagaac

SEQ ID NO: 5048783 - DNA, 25 bp, Homo sapien
tctcgggcagtaagagcatttgttg

SEQ ID NO: 5048784 - DNA, 25 bp, Homo sapien
tttgccgtaaacatcagtagcctcc

SEQ ID NO: 5048785 - DNA, 25 bp, Homo sapien
aaagtgtcagttctcgggcagtaag

SEQ ID NO: 5048786 - DNA, 25 bp, Homo sapien
aaaaaatcctccatgtccgtgacag

SEQ ID NO: 5048787 - DNA, 25 bp, Homo sapien
gagggcgttcctcagattatcaaca

SEQ ID NO: 5048788 - DNA, 25 bp, Homo sapien
tatcaacagtctcaaggaccaggcg

SEQ ID NO: 5048789 - DNA, 25 bp, Homo sapien
tgacagtctgtcactagagagggcg

SEQ ID NO: 5048790 - DNA, 25 bp, Homo sapien
ctaccctggaagtgaagataaaggg

SEQ ID NO: 5048791 - DNA, 25 bp, Homo sapien
tggctgctgacttgttgctgtacat

SEQ ID NO: 5048792 - DNA, 25 bp, Homo sapien
ataccctacactgggtgaagagctc

SEQ ID NO: 5048793 - DNA, 25 bp, Homo sapien
tcttccttcaagctcagccgcagag

SEQ ID NO: 5048794 - DNA, 25 bp, Homo sapien
ttgtcacctaccaattctcttcctt

SEQ ID NO: 5048795 - DNA, 25 bp, Homo sapien
gtcaccttctctagggataccttca

SEQ ID NO: 5048796 - DNA, 25 bp, Homo sapien
ggatgtccatgagcctctgggagtt

SEQ ID NO: 5048797 - DNA, 25 bp, Homo sapien
aatttcctcatgtgaattccatggg

SEQ ID NO: 5048798 - DNA, 25 bp, Homo sapien
tcattggatctggatgtccatgagc

SEQ ID NO: 5048799 - DNA, 25 bp, Homo sapien
ggatctggatgtccatgagcctctg

SEQ ID NO: 5048800 - DNA, 25 bp, Homo sapien
gctctgtttctgtaggctgttgtca

SEQ ID NO: 5048801 - DNA, 25 bp, Homo sapien
tgtcatcaggttgtataataaaatc

SEQ ID NO: 5048802 - DNA, 25 bp, Homo sapien
gatcgctctgtttctgtaggctgtt

SEQ ID NO: 5048803 - DNA, 25 bp, Homo sapien
tctgtttctgtaggctgttgtcatc

SEQ ID NO: 5048804 - DNA, 25 bp, Homo sapien
cagtagatgcttttaagagacaagc

SEQ ID NO: 5048805 - DNA, 25 bp, Homo sapien
tggctaagtcgggatgaaaatccac

SEQ ID NO: 5048806 - DNA, 25 bp, Homo sapien
ggtgtagctggcatcccgttgcact

SEQ ID NO: 5048807 - DNA, 25 bp, Homo sapien
tgcacttttgctggtcagtagatgc

SEQ ID NO: 5048808 - DNA, 25 bp, Homo sapien
ctttgtgaagtccatgcagggacat

SEQ ID NO: 5048809 - DNA, 25 bp, Homo sapien
gacttaggagatccataccttcccg

SEQ ID NO: 5048810 - DNA, 25 bp, Homo sapien
gcattcttagctggtcacggaggac

SEQ ID NO: 5048811 - DNA, 25 bp, Homo sapien
aagtctgcctcactctaaaggttgc

SEQ ID NO: 5048812 - DNA, 25 bp, Homo sapien
ctcttctcttcactctccttgccca

SEQ ID NO: 5048813 - DNA, 25 bp, Homo sapien
tcttctcttcactctccttgcccat

SEQ ID NO: 5048814 - DNA, 25 bp, Homo sapien
gaaagcctgagtatcaaccatgacc

SEQ ID NO: 5048815 - DNA, 25 bp, Homo sapien
tctggctgccttgtgcacagtagac

SEQ ID NO: 5048816 - DNA, 25 bp, Homo sapien
tacctgaagtcaagcatctctgcag

SEQ ID NO: 5048817 - DNA, 25 bp, Homo sapien
cctatcaatggtcaaaggtccctag

SEQ ID NO: 5048818 - DNA, 25 bp, Homo sapien
gtgtgcagccacctagaaattattc

SEQ ID NO: 5048819 - DNA, 25 bp, Homo sapien
taaaatctccctcacgagtcactcc

SEQ ID NO: 5048820 - DNA, 25 bp, Homo sapien
cactcctgagatgggtgtgcagcca

SEQ ID NO: 5048821 - DNA, 25 bp, Homo sapien
actccatccacaccggaggtggagg

SEQ ID NO: 5048822 - DNA, 25 bp, Homo sapien
gggaccatgaccatcttcttagttc

SEQ ID NO: 5048823 - DNA, 25 bp, Homo sapien
ggttgggaccatgaccatcttctta

SEQ ID NO: 5048824 - DNA, 25 bp, Homo sapien
tgtctcccatgtgtaaccaaaggag

SEQ ID NO: 5048825 - DNA, 25 bp, Homo sapien
gttcttggtggttgggaccatgacc

SEQ ID NO: 5048826 - DNA, 25 bp, Homo sapien
tgaaggccattcaacaccagatttc

SEQ ID NO: 5048827 - DNA, 25 bp, Homo sapien
gacaatcaagtgcactagttccagg

SEQ ID NO: 5048828 - DNA, 25 bp, Homo sapien
caaaactcgacatccctgtgagatg

SEQ ID NO: 5048829 - DNA, 25 bp, Homo sapien
tactatactggagctgaaatcaagg

SEQ ID NO: 5048830 - DNA, 25 bp, Homo sapien
cgtctgcacaggtggtcatgttaga

SEQ ID NO: 5048831 - DNA, 25 bp, Homo sapien
cacagaccgagatggcaaaagcagc

SEQ ID NO: 5048832 - DNA, 25 bp, Homo sapien
tgttagaagtaaggctcattcactc

SEQ ID NO: 5048833 - DNA, 25 bp, Homo sapien
ggcctttctgcagcctacgtctgca

SEQ ID NO: 5048834 - DNA, 25 bp, Homo sapien
catcacactgtatggacagcccagg

SEQ ID NO: 5048835 - DNA, 25 bp, Homo sapien
tgttgccctgagtgaatcttggacc

SEQ ID NO: 5048836 - DNA, 25 bp, Homo sapien
aattgttattctaggcagggacacc

SEQ ID NO: 5048837 - DNA, 25 bp, Homo sapien
aaagcgagatagtttgccagtggcc

SEQ ID NO: 5048838 - DNA, 25 bp, Homo sapien
tggctccaaggaccccaatggccaa

SEQ ID NO: 5048839 - DNA, 25 bp, Homo sapien
caccccagtgcggtcttctcctgag

SEQ ID NO: 5048840 - DNA, 25 bp, Homo sapien
gaagaacgggtctgtgcattcgcct

SEQ ID NO: 5048841 - DNA, 25 bp, Homo sapien
ttcgcctggatcacagggaatcgct

SEQ ID NO: 5048842 - DNA, 25 bp, Homo sapien
tcaagacctgtccagatgtgcagca

SEQ ID NO: 5048843 - DNA, 25 bp, Homo sapien
taaaccacattttgcggcggaatcg

SEQ ID NO: 5048844 - DNA, 25 bp, Homo sapien
taccaccgacgagagagttttgcag

SEQ ID NO: 5048845 - DNA, 25 bp, Homo sapien
ggaatcgctgttccgtgacagaaag

SEQ ID NO: 5048846 - DNA, 25 bp, Homo sapien
tcctctttcgccgtctctggccgcc

SEQ ID NO: 5048847 - DNA, 25 bp, Homo sapien
ccgcagcacctgcgagctggtgttg

SEQ ID NO: 5048848 - DNA, 25 bp, Homo sapien
tctctggccgccaacagttgcggcg

SEQ ID NO: 5048849 - DNA, 25 bp, Homo sapien
gcacctgcgagctggtgttgggtcc

SEQ ID NO: 5048850 - DNA, 25 bp, Homo sapien
gatgggctcctcacttcatgctgaa

SEQ ID NO: 5048851 - DNA, 25 bp, Homo sapien
agtggccttcaaccagccagccggc

SEQ ID NO: 5048852 - DNA, 25 bp, Homo sapien
catgctgaacgtgggggttcacaga

SEQ ID NO: 5048853 - DNA, 25 bp, Homo sapien
gccagccggcccgtcatccgatggg

SEQ ID NO: 5048854 - DNA, 25 bp, Homo sapien
tcacctttacttcaagaggcagttc

SEQ ID NO: 5048855 - DNA, 25 bp, Homo sapien
ttcacctttacttcaagaggcagtt

SEQ ID NO: 5048856 - DNA, 25 bp, Homo sapien
ctatgtcctggttcacctttacttc

SEQ ID NO: 5048857 - DNA, 25 bp, Homo sapien
cacctttacttcaagaggcagttca

SEQ ID NO: 5048858 - DNA, 25 bp, Homo sapien
gagtgaaacgcagggcagtgaattc

SEQ ID NO: 5048859 - DNA, 25 bp, Homo sapien
attcatggataacccttttgtgcag

SEQ ID NO: 5048860 - DNA, 25 bp, Homo sapien
gataacccttttgtgcagtacaagg

SEQ ID NO: 5048861 - DNA, 25 bp, Homo sapien
cagagtgaaacgcagggcagtgaat

SEQ ID NO: 5048862 - DNA, 25 bp, Homo sapien
tgtggttgctgatagagacacagcc

SEQ ID NO: 5048863 - DNA, 25 bp, Homo sapien
gaataagtgcatcgtctttaagtgc

SEQ ID NO: 5048864 - DNA, 25 bp, Homo sapien
gctatgtgttcaattgcatcctcca

SEQ ID NO: 5048865 - DNA, 25 bp, Homo sapien
ggatgtaacccacaaagccagttga

SEQ ID NO: 5048866 - DNA, 25 bp, Homo sapien
aataataatctgaccgaccggcagc

SEQ ID NO: 5048867 - DNA, 25 bp, Homo sapien
taaaatgggcagttacgcgtcagat

SEQ ID NO: 5048868 - DNA, 25 bp, Homo sapien
gacagagccgccttggagatacaaa

SEQ ID NO: 5048869 - DNA, 25 bp, Homo sapien
tcaagggctgcctcttcaacatagg

SEQ ID NO: 5048870 - DNA, 25 bp, Homo sapien
aaggctggcgaagtaggcacactgg

SEQ ID NO: 5048871 - DNA, 25 bp, Homo sapien
gctggcgaagtaggcacactgggaa

SEQ ID NO: 5048872 - DNA, 25 bp, Homo sapien
tggcgaagtaggcacactgggaagg

SEQ ID NO: 5048873 - DNA, 25 bp, Homo sapien
ccggccgggcagcaaggctggcgaa

SEQ ID NO: 5048874 - DNA, 25 bp, Homo sapien
ctttagcatagccaggttccccggg

SEQ ID NO: 5048875 - DNA, 25 bp, Homo sapien
tccatctttagcatagccaggttcc

SEQ ID NO: 5048876 - DNA, 25 bp, Homo sapien
gcatagccaggttccccgggttgac

SEQ ID NO: 5048877 - DNA, 25 bp, Homo sapien
ccaggaagtccatctttagcatagc

SEQ ID NO: 5048878 - DNA, 25 bp, Homo sapien
cagggggtcccatctcgcctcggag

SEQ ID NO: 5048879 - DNA, 25 bp, Homo sapien
atctcgcctcggaggccaactccag

SEQ ID NO: 5048880 - DNA, 25 bp, Homo sapien
gtcccatctcgcctcggaggccaac

SEQ ID NO: 5048881 - DNA, 25 bp, Homo sapien
ggattccagggggtcccatctcgcc

SEQ ID NO: 5048882 - DNA, 25 bp, Homo sapien
gccttgagatgacttcatgtacgcc

SEQ ID NO: 5048883 - DNA, 25 bp, Homo sapien
tctgggccaggaggtaggcgagtct

SEQ ID NO: 5048884 - DNA, 25 bp, Homo sapien
ggcatctgggccaggaggtaggcga

SEQ ID NO: 5048885 - DNA, 25 bp, Homo sapien
ttgagatgacttcatgtacgccggg

SEQ ID NO: 5048886 - DNA, 25 bp, Homo sapien
tcttcttgaataagccgacgcaggg

SEQ ID NO: 5048887 - DNA, 25 bp, Homo sapien
cagggtttccatggatggagactcc

SEQ ID NO: 5048888 - DNA, 25 bp, Homo sapien
tccccagctcttcttgaataagccg

SEQ ID NO: 5048889 - DNA, 25 bp, Homo sapien
aataagccgacgcagggtttccatg

SEQ ID NO: 5048890 - DNA, 25 bp, Homo sapien
acagccaccaggaactgacgcgact

SEQ ID NO: 5048891 - DNA, 25 bp, Homo sapien
ggtcatccagacctgggctctgaga

SEQ ID NO: 5048892 - DNA, 25 bp, Homo sapien
ggacatggaggtcatccagacctgg

SEQ ID NO: 5048893 - DNA, 25 bp, Homo sapien
gaactgacgcgactgcagagcatca

SEQ ID NO: 5048894 - DNA, 25 bp, Homo sapien
tggaaatcccggctggcctggaggc

SEQ ID NO: 5048895 - DNA, 25 bp, Homo sapien
gggtccaactggtccattctcccca

SEQ ID NO: 5048896 - DNA, 25 bp, Homo sapien
ctgggggtccaactggtccattctc

SEQ ID NO: 5048897 - DNA, 25 bp, Homo sapien
tcctggaaatcccggctggcctgga

SEQ ID NO: 5048898 - DNA, 25 bp, Homo sapien
tccatgtccgtgtcgtgcaacagtg

SEQ ID NO: 5048899 - DNA, 25 bp, Homo sapien
ccccacttgcgaagaaagccgagat

SEQ ID NO: 5048900 - DNA, 25 bp, Homo sapien
tgaggctgaccaaacgcaggattgt

SEQ ID NO: 5048901 - DNA, 25 bp, Homo sapien
gattgtgggcaaacgagacgcataa

SEQ ID NO: 5048902 - DNA, 25 bp, Homo sapien
cctttctcctttgaatccaggctct

SEQ ID NO: 5048903 - DNA, 25 bp, Homo sapien
aggctctccaggcttcccagggacc

SEQ ID NO: 5048904 - DNA, 25 bp, Homo sapien
ccaggctctccaggcttcccaggga

SEQ ID NO: 5048905 - DNA, 25 bp, Homo sapien
atccaggctctccaggcttcccagg

SEQ ID NO: 5048906 - DNA, 25 bp, Homo sapien
ctgggactcctttctctcctggttc

SEQ ID NO: 5048907 - DNA, 25 bp, Homo sapien
tccttgcctgggactcctttctctc

SEQ ID NO: 5048908 - DNA, 25 bp, Homo sapien
ctccttgcctgggactcctttctct

SEQ ID NO: 5048909 - DNA, 25 bp, Homo sapien
ggactcctttctctcctggttctcc

SEQ ID NO: 5048910 - DNA, 25 bp, Homo sapien
agccaggtatcttgggccccactgg

SEQ ID NO: 5048911 - DNA, 25 bp, Homo sapien
gccaggtatcttgggccccactggg

SEQ ID NO: 5048912 - DNA, 25 bp, Homo sapien
gaagtcctgggctgccattttcccc

SEQ ID NO: 5048913 - DNA, 25 bp, Homo sapien
cacggggacccaggaagccaggaag

SEQ ID NO: 5048914 - DNA, 25 bp, Homo sapien
gacccaggaagccaggaagtcctgg

SEQ ID NO: 5048915 - DNA, 25 bp, Homo sapien
tcctgggctgccattttcccctttg

SEQ ID NO: 5048916 - DNA, 25 bp, Homo sapien
cacatagcagccaaagagaactcac

SEQ ID NO: 5048917 - DNA, 25 bp, Homo sapien
cctgatgccatcacatagcagccaa

SEQ ID NO: 5048918 - DNA, 25 bp, Homo sapien
tcacatagcagccaaagagaactca

SEQ ID NO: 5048919 - DNA, 25 bp, Homo sapien
ccatcacatagcagccaaagagaac

SEQ ID NO: 5048920 - DNA, 25 bp, Homo sapien
gagatcccggtgatccattcttgcc

SEQ ID NO: 5048921 - DNA, 25 bp, Homo sapien
caggctctcctggagatcccggtga

SEQ ID NO: 5048922 - DNA, 25 bp, Homo sapien
ctggagatcccggtgatccattctt

SEQ ID NO: 5048923 - DNA, 25 bp, Homo sapien
ggctctcctggagatcccggtgatc

SEQ ID NO: 5048924 - DNA, 25 bp, Homo sapien
gaccctgtggcccagtgggtccagt

SEQ ID NO: 5048925 - DNA, 25 bp, Homo sapien
gtggcccagtgggtccagtgtcacc

SEQ ID NO: 5048926 - DNA, 25 bp, Homo sapien
tggtccttggggaccctgtggccca

SEQ ID NO: 5048927 - DNA, 25 bp, Homo sapien
tccttggggaccctgtggcccagtg

SEQ ID NO: 5048928 - DNA, 25 bp, Homo sapien
actctgcatctcacacgtccagcca

SEQ ID NO: 5048929 - DNA, 25 bp, Homo sapien
ccagttccatgatgccactctgcat

SEQ ID NO: 5048930 - DNA, 25 bp, Homo sapien
gtgcctctgcatctgaccaatcggc

SEQ ID NO: 5048931 - DNA, 25 bp, Homo sapien
tgaccaatcggccagttccatgatg

SEQ ID NO: 5048932 - DNA, 25 bp, Homo sapien
taggttggaggcgccaatctcatcc

SEQ ID NO: 5048933 - DNA, 25 bp, Homo sapien
ggttggaggcgccaatctcatcctt

SEQ ID NO: 5048934 - DNA, 25 bp, Homo sapien
aggttggaggcgccaatctcatcct

SEQ ID NO: 5048935 - DNA, 25 bp, Homo sapien
tgccaaccaatcctgtgatgtcatc

SEQ ID NO: 5048936 - DNA, 25 bp, Homo sapien
ccaggaagccccatggcaccagact

SEQ ID NO: 5048937 - DNA, 25 bp, Homo sapien
gaagccccatggcaccagactctcc

SEQ ID NO: 5048938 - DNA, 25 bp, Homo sapien
tcctggtaacccttcctgaccagga

SEQ ID NO: 5048939 - DNA, 25 bp, Homo sapien
aggaagccccatggcaccagactct

SEQ ID NO: 5048940 - DNA, 25 bp, Homo sapien
caaaaaagcctgctattagggaagg

SEQ ID NO: 5048941 - DNA, 25 bp, Homo sapien
acaaaaaagcctgctattagggaag

SEQ ID NO: 5048942 - DNA, 25 bp, Homo sapien
gttgaggtctgtggcggccctgagt

SEQ ID NO: 5048943 - DNA, 25 bp, Homo sapien
caggggccctgtcaacttccatacg

SEQ ID NO: 5048944 - DNA, 25 bp, Homo sapien
gccctgtcaacttccatacgcagag

SEQ ID NO: 5048945 - DNA, 25 bp, Homo sapien
aggtctgtggcgcacccaaggccag

SEQ ID NO: 5048946 - DNA, 25 bp, Homo sapien
ctctctgtgcagctcaagcagggaa

SEQ ID NO: 5048947 - DNA, 25 bp, Homo sapien
tctctgtgcagctcaagcagggaag

SEQ ID NO: 5048948 - DNA, 25 bp, Homo sapien
ttggccatgatgtctggcccccaga

SEQ ID NO: 5048949 - DNA, 25 bp, Homo sapien
ccggggaccgggtgcaccagaatcg

SEQ ID NO: 5048950 - DNA, 25 bp, Homo sapien
caccagaatcgcctgtgtgtccctt

SEQ ID NO: 5048951 - DNA, 25 bp, Homo sapien
gcaccagaatcgcctgtgtgtccct

SEQ ID NO: 5048952 - DNA, 25 bp, Homo sapien
ggggaccgggtgcaccagaatcgcc

SEQ ID NO: 5048953 - DNA, 25 bp, Homo sapien
cctctggtcctggtagacctggctc

SEQ ID NO: 5048954 - DNA, 25 bp, Homo sapien
accctctggtcctggtagacctggc

SEQ ID NO: 5048955 - DNA, 25 bp, Homo sapien
gcaccctctggtcctggtagacctg

SEQ ID NO: 5048956 - DNA, 25 bp, Homo sapien
ctctggtcctggtagacctggctct

SEQ ID NO: 5048957 - DNA, 25 bp, Homo sapien
tggcagggcgacctgtgacgtacac

SEQ ID NO: 5048958 - DNA, 25 bp, Homo sapien
cttaaaagagcttgtcaggacactc

SEQ ID NO: 5048959 - DNA, 25 bp, Homo sapien
ggcgacctgtgacgtacacagcctt

SEQ ID NO: 5048960 - DNA, 25 bp, Homo sapien
gagcttgtcaggacactcttgctat

SEQ ID NO: 5048961 - DNA, 25 bp, Homo sapien
gccatttcctttctccggatctctg

SEQ ID NO: 5048962 - DNA, 25 bp, Homo sapien
gatctctggatctgtaaatttggga

SEQ ID NO: 5048963 - DNA, 25 bp, Homo sapien
tagagggtgtacatagcctggctcc

SEQ ID NO: 5048964 - DNA, 25 bp, Homo sapien
ccttggaaatcatatgcagcccatt

SEQ ID NO: 5048965 - DNA, 25 bp, Homo sapien
ggtgtctgcctccttgtggagcagt

SEQ ID NO: 5048966 - DNA, 25 bp, Homo sapien
gatgctgccattttccaaccacatc

SEQ ID NO: 5048967 - DNA, 25 bp, Homo sapien
ctgccattttccaaccacatcccct

SEQ ID NO: 5048968 - DNA, 25 bp, Homo sapien
cccacccagggaggtgtctgcctcc

SEQ ID NO: 5048969 - DNA, 25 bp, Homo sapien
gggggacccggctttccatctctgc

SEQ ID NO: 5048970 - DNA, 25 bp, Homo sapien
ggacccggctttccatctctgccct

SEQ ID NO: 5048971 - DNA, 25 bp, Homo sapien
cagggggacccggctttccatctct

SEQ ID NO: 5048972 - DNA, 25 bp, Homo sapien
gggacccggctttccatctctgccc

SEQ ID NO: 5048973 - DNA, 25 bp, Homo sapien
ggattccgggtaatccagatgggcc

SEQ ID NO: 5048974 - DNA, 25 bp, Homo sapien
tgggattccgggtaatccagatggg

SEQ ID NO: 5048975 - DNA, 25 bp, Homo sapien
attccgggtaatccagatgggcctt

SEQ ID NO: 5048976 - DNA, 25 bp, Homo sapien
gattccgggtaatccagatgggcct

SEQ ID NO: 5048977 - DNA, 25 bp, Homo sapien
caggaccttgaggtgttgtgcatac

SEQ ID NO: 5048978 - DNA, 25 bp, Homo sapien
ggtgcatgcatagaggatggtttat

SEQ ID NO: 5048979 - DNA, 25 bp, Homo sapien
ccagaggctcctacatgttttacca

SEQ ID NO: 5048980 - DNA, 25 bp, Homo sapien
gcatacaggactgtacacaagtggg

SEQ ID NO: 5048981 - DNA, 25 bp, Homo sapien
tccagcagctcctgcaattccatct

SEQ ID NO: 5048982 - DNA, 25 bp, Homo sapien
ccttggattcctggtggtccagcag

SEQ ID NO: 5048983 - DNA, 25 bp, Homo sapien
cagctcctgcaattccatctgcccc

SEQ ID NO: 5048984 - DNA, 25 bp, Homo sapien
cagcagctcctgcaattccatctgc

SEQ ID NO: 5048985 - DNA, 25 bp, Homo sapien
ggacaagggtctcatgtggaaccca

SEQ ID NO: 5048986 - DNA, 25 bp, Homo sapien
tccagaaatcctctccttgcaaggt

SEQ ID NO: 5048987 - DNA, 25 bp, Homo sapien
cactatactttcaaacagggtattt

SEQ ID NO: 5048988 - DNA, 25 bp, Homo sapien
ccttttcggtggtctttcagtcatt

SEQ ID NO: 5048989 - DNA, 25 bp, Homo sapien
gggccccatgaaacctggaactcca

SEQ ID NO: 5048990 - DNA, 25 bp, Homo sapien
cccatgaaacctggaactccaggat

SEQ ID NO: 5048991 - DNA, 25 bp, Homo sapien
tgaaacctggaactccaggatgacc

SEQ ID NO: 5048992 - DNA, 25 bp, Homo sapien
gccccatgaaacctggaactccagg

SEQ ID NO: 5048993 - DNA, 25 bp, Homo sapien
ctgatcacctttctgcccaacctca

SEQ ID NO: 5048994 - DNA, 25 bp, Homo sapien
tgatcacctttctgcccaacctcac

SEQ ID NO: 5048995 - DNA, 25 bp, Homo sapien
ctgcaccacgttctccttgacttcc

SEQ ID NO: 5048996 - DNA, 25 bp, Homo sapien
tctgcaccacgttctccttgacttc

SEQ ID NO: 5048997 - DNA, 25 bp, Homo sapien
atctgcaccacgttctccttgactt

SEQ ID NO: 5048998 - DNA, 25 bp, Homo sapien
catctgcaccacgttctccttgact

SEQ ID NO: 5048999 - DNA, 25 bp, Homo sapien
ctccaggtggccttcacaggttacc

SEQ ID NO: 5049000 - DNA, 25 bp, Homo sapien
caggtggccttcacaggttacccct

SEQ ID NO: 5049001 - DNA, 25 bp, Homo sapien
tccaggtggccttcacaggttaccc

SEQ ID NO: 5049002 - DNA, 25 bp, Homo sapien
cttcacaggttaccccttgttccat

SEQ ID NO: 5049003 - DNA, 25 bp, Homo sapien
ctgggggccctggtaggcctggagg

SEQ ID NO: 5049004 - DNA, 25 bp, Homo sapien
gccctggtaggcctggaggcccagc

SEQ ID NO: 5049005 - DNA, 25 bp, Homo sapien
ctgtggtccagctattcctgggggc

SEQ ID NO: 5049006 - DNA, 25 bp, Homo sapien
gtggtccagctattcctgggggccc

SEQ ID NO: 5049007 - DNA, 25 bp, Homo sapien
gccaggagggcagtcattgcacaca

SEQ ID NO: 5049008 - DNA, 25 bp, Homo sapien
caggagggcagtcattgcacacatc

SEQ ID NO: 5049009 - DNA, 25 bp, Homo sapien
tggctttcctgggacacctttgtcc

SEQ ID NO: 5049010 - DNA, 25 bp, Homo sapien
aaacctggtagaccagggaggcctg

SEQ ID NO: 5049011 - DNA, 25 bp, Homo sapien
taagctatccccacgacatgctggg

SEQ ID NO: 5049012 - DNA, 25 bp, Homo sapien
taaacatttagtgtagcatagctcc

SEQ ID NO: 5049013 - DNA, 25 bp, Homo sapien
tcattgaccctcacagtatctcagg

SEQ ID NO: 5049014 - DNA, 25 bp, Homo sapien
tctgcagtgcccaataaggcagcca

SEQ ID NO: 5049015 - DNA, 25 bp, Homo sapien
tcccctggagacagtagtgaagaga

SEQ ID NO: 5049016 - DNA, 25 bp, Homo sapien
cccctggagacagtagtgaagagag

SEQ ID NO: 5049017 - DNA, 25 bp, Homo sapien
gtcccctggagacagtagtgaagag

SEQ ID NO: 5049018 - DNA, 25 bp, Homo sapien
tttctcctggatttcctggtgcacc

SEQ ID NO: 5049019 - DNA, 25 bp, Homo sapien
ggcttgccaggaggccctctttctc

SEQ ID NO: 5049020 - DNA, 25 bp, Homo sapien
ctctttctcctggatttcctggtgc

SEQ ID NO: 5049021 - DNA, 25 bp, Homo sapien
cggcttgccaggaggccctctttct

SEQ ID NO: 5049022 - DNA, 25 bp, Homo sapien
gggaatccaggtaagcctcgtgatc

SEQ ID NO: 5049023 - DNA, 25 bp, Homo sapien
agggaatccaggtaagcctcgtgat

SEQ ID NO: 5049024 - DNA, 25 bp, Homo sapien
cagggaatccaggtaagcctcgtga

SEQ ID NO: 5049025 - DNA, 25 bp, Homo sapien
ggaatccaggtaagcctcgtgatcc

SEQ ID NO: 5049026 - DNA, 25 bp, Homo sapien
ggattcctcccatagaaactcatcc

SEQ ID NO: 5049027 - DNA, 25 bp, Homo sapien
tgctttgattcgagcaggattcctc

SEQ ID NO: 5049028 - DNA, 25 bp, Homo sapien
gagcaggattcctcccatagaaact

SEQ ID NO: 5049029 - DNA, 25 bp, Homo sapien
gattcgagcaggattcctcccatag

SEQ ID NO: 5049030 - DNA, 25 bp, Homo sapien
gatcctttgtctcctggtggtccgg

SEQ ID NO: 5049031 - DNA, 25 bp, Homo sapien
gggatcctttgtctcctggtggtcc

SEQ ID NO: 5049032 - DNA, 25 bp, Homo sapien
cctttgtctcctggtggtccggaag

SEQ ID NO: 5049033 - DNA, 25 bp, Homo sapien
tgtctcctggtggtccggaagggcc

SEQ ID NO: 5049034 - DNA, 25 bp, Homo sapien
tcctttcacagtagttcccagggag

SEQ ID NO: 5049035 - DNA, 25 bp, Homo sapien
ttcccagggaggatggatatgtatt

SEQ ID NO: 5049036 - DNA, 25 bp, Homo sapien
tgttcctttcacagtagttcccagg

SEQ ID NO: 5049037 - DNA, 25 bp, Homo sapien
aactgtgttcctttcacagtagttc

SEQ ID NO: 5049038 - DNA, 25 bp, Homo sapien
ggctcagatccaggctttaggagga

SEQ ID NO: 5049039 - DNA, 25 bp, Homo sapien
ggcaagaggtgggctcagatccagg

SEQ ID NO: 5049040 - DNA, 25 bp, Homo sapien
caggcaagaggtgggctcagatcca

SEQ ID NO: 5049041 - DNA, 25 bp, Homo sapien
cagatccaggctttaggaggacagc

SEQ ID NO: 5049042 - DNA, 25 bp, Homo sapien
gagaccagcgggaaaacgcacgagt

SEQ ID NO: 5049043 - DNA, 25 bp, Homo sapien
gctgagcaggaagtgtggaaatgga

SEQ ID NO: 5049044 - DNA, 25 bp, Homo sapien
agcgggaaaacgcacgagtgatgca

SEQ ID NO: 5049045 - DNA, 25 bp, Homo sapien
gcagggagtgccgaagagggctcgg

SEQ ID NO: 5049046 - DNA, 25 bp, Homo sapien
tgtgtggctttacaccttcctcagc

SEQ ID NO: 5049047 - DNA, 25 bp, Homo sapien
catgaagcaatacaggagccctgga

SEQ ID NO: 5049048 - DNA, 25 bp, Homo sapien
cctggttatacatgaagcaatacag

SEQ ID NO: 5049049 - DNA, 25 bp, Homo sapien
gaaggtggtgtgtggctttacacct

SEQ ID NO: 5049050 - DNA, 25 bp, Homo sapien
ctttctgtaagggctgataaggtga

SEQ ID NO: 5049051 - DNA, 25 bp, Homo sapien
taggcgggaacatatttcatgggtg

SEQ ID NO: 5049052 - DNA, 25 bp, Homo sapien
ggtgaattgtgtccgcctccacagc

SEQ ID NO: 5049053 - DNA, 25 bp, Homo sapien
gtggggtgaattgtgtccgcctcca

SEQ ID NO: 5049054 - DNA, 25 bp, Homo sapien
agcaaccccaatgcctgggtcacca

SEQ ID NO: 5049055 - DNA, 25 bp, Homo sapien
ccaatgcctgggtcaccacggctgc

SEQ ID NO: 5049056 - DNA, 25 bp, Homo sapien
aaccccaatgcctgggtcaccacgg

SEQ ID NO: 5049057 - DNA, 25 bp, Homo sapien
cagcaaccccaatgcctgggtcacc

SEQ ID NO: 5049058 - DNA, 25 bp, Homo sapien
tcaaggacgaccactcccggaccaa

SEQ ID NO: 5049059 - DNA, 25 bp, Homo sapien
ttcaaggacgaccactcccggacca

SEQ ID NO: 5049060 - DNA, 25 bp, Homo sapien
ccactcccggaccaaccttgaccat

SEQ ID NO: 5049061 - DNA, 25 bp, Homo sapien
taacacattgccctcccagtgcaca

SEQ ID NO: 5049062 - DNA, 25 bp, Homo sapien
cagtgcacagttttctgaccctctg

SEQ ID NO: 5049063 - DNA, 25 bp, Homo sapien
tcccagtgcacagttttctgaccct

SEQ ID NO: 5049064 - DNA, 25 bp, Homo sapien
cctcccagtgcacagttttctgacc

SEQ ID NO: 5049065 - DNA, 25 bp, Homo sapien
ggcacccacagttttcttggacaag

SEQ ID NO: 5049066 - DNA, 25 bp, Homo sapien
aacatggaagtggactgaggtaacc

SEQ ID NO: 5049067 - DNA, 25 bp, Homo sapien
tttcaaacggcaactcgtggcaccc

SEQ ID NO: 5049068 - DNA, 25 bp, Homo sapien
aatggaacacgatgagctgagaaac

SEQ ID NO: 5049069 - DNA, 25 bp, Homo sapien
ggagtccaggtgatccacggagtcc

SEQ ID NO: 5049070 - DNA, 25 bp, Homo sapien
tccagggagtccaggtgatccacgg

SEQ ID NO: 5049071 - DNA, 25 bp, Homo sapien
cagggagtccaggtgatccacggag

SEQ ID NO: 5049072 - DNA, 25 bp, Homo sapien
gggagtccaggtgatccacggagtc

SEQ ID NO: 5049073 - DNA, 25 bp, Homo sapien
tggtttctacaggcactgggacccc

SEQ ID NO: 5049074 - DNA, 25 bp, Homo sapien
ctacaggcactgggacccccgacct

SEQ ID NO: 5049075 - DNA, 25 bp, Homo sapien
ctggtttctacaggcactgggaccc

SEQ ID NO: 5049076 - DNA, 25 bp, Homo sapien
tttctacaggcactgggacccccga

SEQ ID NO: 5049077 - DNA, 25 bp, Homo sapien
caggagcaccaggatctcccctggg

SEQ ID NO: 5049078 - DNA, 25 bp, Homo sapien
gagcaccaggatctcccctgggacc

SEQ ID NO: 5049079 - DNA, 25 bp, Homo sapien
ggctgccttcttcccccgctgcacc

SEQ ID NO: 5049080 - DNA, 25 bp, Homo sapien
ccctgggaccaactggccctgggct

SEQ ID NO: 5049081 - DNA, 25 bp, Homo sapien
cctggggtgcctctgaggccgggag

SEQ ID NO: 5049082 - DNA, 25 bp, Homo sapien
gggtgcctctgaggccgggagcacc

SEQ ID NO: 5049083 - DNA, 25 bp, Homo sapien
ttctcaccacgctccccatctttcc

SEQ ID NO: 5049084 - DNA, 25 bp, Homo sapien
accacgctccccatctttccctggg

SEQ ID NO: 5049085 - DNA, 25 bp, Homo sapien
tgggaccgggggcaccgacatgtcc

SEQ ID NO: 5049086 - DNA, 25 bp, Homo sapien
actgggaccgggggcaccgacatgt

SEQ ID NO: 5049087 - DNA, 25 bp, Homo sapien
ccactgggaccgggggcaccgacat

SEQ ID NO: 5049088 - DNA, 25 bp, Homo sapien
gccactgggaccgggggcaccgaca

SEQ ID NO: 5049089 - DNA, 25 bp, Homo sapien
aggcaggccgatcatagggactcac

SEQ ID NO: 5049090 - DNA, 25 bp, Homo sapien
ccccatgtgcaccttcctgtccctt

SEQ ID NO: 5049091 - DNA, 25 bp, Homo sapien
gagccccatgtgcaccttcctgtcc

SEQ ID NO: 5049092 - DNA, 25 bp, Homo sapien
aggagccccatgtgcaccttcctgt

SEQ ID NO: 5049093 - DNA, 25 bp, Homo sapien
ggagccccatgtgcaccttcctgtc

SEQ ID NO: 5049094 - DNA, 25 bp, Homo sapien
gccccaattctccaggacggccctg

SEQ ID NO: 5049095 - DNA, 25 bp, Homo sapien
cctgaggccccaattctccaggacg

SEQ ID NO: 5049096 - DNA, 25 bp, Homo sapien
gaggccccaattctccaggacggcc

SEQ ID NO: 5049097 - DNA, 25 bp, Homo sapien
ccccaattctccaggacggccctgc

SEQ ID NO: 5049098 - DNA, 25 bp, Homo sapien
gggtataatttgagatccaaggagg

SEQ ID NO: 5049099 - DNA, 25 bp, Homo sapien
tccaaggaggggacgtagctagcgt

SEQ ID NO: 5049100 - DNA, 25 bp, Homo sapien
gtaagcacacaagttgccatgaacc

SEQ ID NO: 5049101 - DNA, 25 bp, Homo sapien
gggacgttgcaatgggtataatttg

SEQ ID NO: 5049102 - DNA, 25 bp, Homo sapien
gagtccgggtctccaggtaaccagc

SEQ ID NO: 5049103 - DNA, 25 bp, Homo sapien
gtgcagatctacagctggtcagcct

SEQ ID NO: 5049104 - DNA, 25 bp, Homo sapien
tcctgggtgtggaatgcacggtgca

SEQ ID NO: 5049105 - DNA, 25 bp, Homo sapien
ctggtcagcctttggagtccgggtc

SEQ ID NO: 5049106 - DNA, 25 bp, Homo sapien
ctggatcgcccttctctcctttggg

SEQ ID NO: 5049107 - DNA, 25 bp, Homo sapien
tctctcctttgggcccttgttctcc

SEQ ID NO: 5049108 - DNA, 25 bp, Homo sapien
cttctctcctttgggcccttgttct

SEQ ID NO: 5049109 - DNA, 25 bp, Homo sapien
cgcccttctctcctttgggcccttg

SEQ ID NO: 5049110 - DNA, 25 bp, Homo sapien
gcatctgagagtggcttcctggctc

SEQ ID NO: 5049111 - DNA, 25 bp, Homo sapien
gccagtcccggggagactcaggcaa

SEQ ID NO: 5049112 - DNA, 25 bp, Homo sapien
gtcaaacagaataacactttccaaa

SEQ ID NO: 5049113 - DNA, 25 bp, Homo sapien
ttgccatggtgacgaagccagtccc

SEQ ID NO: 5049114 - DNA, 25 bp, Homo sapien
tgtgtccctcatgcagtgagtacct

SEQ ID NO: 5049115 - DNA, 25 bp, Homo sapien
gtgtccctcatgcagtgagtacctg

SEQ ID NO: 5049116 - DNA, 25 bp, Homo sapien
gggcatccgtggatgtggtgtgaac

SEQ ID NO: 5049117 - DNA, 25 bp, Homo sapien
gcatccgtggatgtggtgtgaacag

SEQ ID NO: 5049118 - DNA, 25 bp, Homo sapien
ccgtggatgtggtgtgaacagggat

SEQ ID NO: 5049119 - DNA, 25 bp, Homo sapien
catccgtggatgtggtgtgaacagg

SEQ ID NO: 5049120 - DNA, 25 bp, Homo sapien
aaaagtagcttcctatatcttgccc

SEQ ID NO: 5049121 - DNA, 25 bp, Homo sapien
taactctaagaggtggactatctgt

SEQ ID NO: 5049122 - DNA, 25 bp, Homo sapien
gactacagatgattacttacagcca

SEQ ID NO: 5049123 - DNA, 25 bp, Homo sapien
cagaagtaaaccacagaatgaagtt

SEQ ID NO: 5049124 - DNA, 25 bp, Homo sapien
tccaggtaacccgggagggcctgca

SEQ ID NO: 5049125 - DNA, 25 bp, Homo sapien
caggtaacccgggagggcctgcagg

SEQ ID NO: 5049126 - DNA, 25 bp, Homo sapien
gagggcctgcaggaccagcttcacc

SEQ ID NO: 5049127 - DNA, 25 bp, Homo sapien
cccgggagggcctgcaggaccagct

SEQ ID NO: 5049128 - DNA, 25 bp, Homo sapien
taattgatggtcagaatgagagcaa

SEQ ID NO: 5049129 - DNA, 25 bp, Homo sapien
cagaatgagagcaagtttctcctac

SEQ ID NO: 5049130 - DNA, 25 bp, Homo sapien
aataataattgatggtcagaatgag

SEQ ID NO: 5049131 - DNA, 25 bp, Homo sapien
aataattgatggtcagaatgagagc

SEQ ID NO: 5049132 - DNA, 25 bp, Homo sapien
cttttcacctcggtcacctttcagt

SEQ ID NO: 5049133 - DNA, 25 bp, Homo sapien
acctcggtcacctttcagtcctgga

SEQ ID NO: 5049134 - DNA, 25 bp, Homo sapien
ggtcacctttcagtcctggaagtcc

SEQ ID NO: 5049135 - DNA, 25 bp, Homo sapien
ttttcacctcggtcacctttcagtc

SEQ ID NO: 5049136 - DNA, 25 bp, Homo sapien
ggagcccctgggaggcctgcttctc

SEQ ID NO: 5049137 - DNA, 25 bp, Homo sapien
tctcctctcacacctgggaagcctg

SEQ ID NO: 5049138 - DNA, 25 bp, Homo sapien
gagcccctgggaggcctgcttctcc

SEQ ID NO: 5049139 - DNA, 25 bp, Homo sapien
ttctctcctctcacacctgggaagc

SEQ ID NO: 5049140 - DNA, 25 bp, Homo sapien
cttctctccaggtcggcctgccagg

SEQ ID NO: 5049141 - DNA, 25 bp, Homo sapien
tctccaggtcggcctgccaggccct

SEQ ID NO: 5049142 - DNA, 25 bp, Homo sapien
ccaggccctgctccccaatttctcc

SEQ ID NO: 5049143 - DNA, 25 bp, Homo sapien
tgccaggccctgctccccaatttct

SEQ ID NO: 5049144 - DNA, 25 bp, Homo sapien
taattagcactttgtggtccggatg

SEQ ID NO: 5049145 - DNA, 25 bp, Homo sapien
cataccaccactcacaaatgattaa

SEQ ID NO: 5049146 - DNA, 25 bp, Homo sapien
gggctttatctctgatccaagagca

SEQ ID NO: 5049147 - DNA, 25 bp, Homo sapien
tccccttggaggaatacaacagttc

SEQ ID NO: 5049148 - DNA, 25 bp, Homo sapien
gaatagcaagcataatgggaaaaag

SEQ ID NO: 5049149 - DNA, 25 bp, Homo sapien
tagcaagcataatgggaaaaagagg

SEQ ID NO: 5049150 - DNA, 25 bp, Homo sapien
ctcagaatagcaagcataatgggaa

SEQ ID NO: 5049151 - DNA, 25 bp, Homo sapien
cagaatagcaagcataatgggaaaa

SEQ ID NO: 5049152 - DNA, 25 bp, Homo sapien
tggttttccaggcagaccatcttcc

SEQ ID NO: 5049153 - DNA, 25 bp, Homo sapien
gttttccaggcagaccatcttcccc

SEQ ID NO: 5049154 - DNA, 25 bp, Homo sapien
ttttccaggcagaccatcttcccct

SEQ ID NO: 5049155 - DNA, 25 bp, Homo sapien
ggttttccaggcagaccatcttccc

SEQ ID NO: 5049156 - DNA, 25 bp, Homo sapien
ctggaaggaatacagagcaaagtta

SEQ ID NO: 5049157 - DNA, 25 bp, Homo sapien
gcaaagttaacaggagacgggccat

SEQ ID NO: 5049158 - DNA, 25 bp, Homo sapien
gaatacagagcaaagttaacaggag

SEQ ID NO: 5049159 - DNA, 25 bp, Homo sapien
tacagagcaaagttaacaggagacg

SEQ ID NO: 5049160 - DNA, 25 bp, Homo sapien
tggtccatttggcccgtcctttcca

SEQ ID NO: 5049161 - DNA, 25 bp, Homo sapien
gagctgtttttgcagccagaatgca

SEQ ID NO: 5049162 - DNA, 25 bp, Homo sapien
ttcaaaccaggagctgtttttgcag

SEQ ID NO: 5049163 - DNA, 25 bp, Homo sapien
attaagttgtttcaaaccaggagct

SEQ ID NO: 5049164 - DNA, 25 bp, Homo sapien
ccaggagctgtttttgcagccagaa

SEQ ID NO: 5049165 - DNA, 25 bp, Homo sapien
cagcgcggcactgaattcatgtcca

SEQ ID NO: 5049166 - DNA, 25 bp, Homo sapien
ctgagtgcccagcgcggcactgaat

SEQ ID NO: 5049167 - DNA, 25 bp, Homo sapien
ggcactgaattcatgtccagtaccc

SEQ ID NO: 5049168 - DNA, 25 bp, Homo sapien
gaattcatgtccagtaccctttggc

SEQ ID NO: 5049169 - DNA, 25 bp, Homo sapien
ccgggaagccgatctctccaggcaa

SEQ ID NO: 5049170 - DNA, 25 bp, Homo sapien
ctttcccgggaagccgatctctcca

SEQ ID NO: 5049171 - DNA, 25 bp, Homo sapien
gggaagccgatctctccaggcaaac

SEQ ID NO: 5049172 - DNA, 25 bp, Homo sapien
ttcccgggaagccgatctctccagg

SEQ ID NO: 5049173 - DNA, 25 bp, Homo sapien
ctgggacaccagggggtcctggagg

SEQ ID NO: 5049174 - DNA, 25 bp, Homo sapien
cctgggacaccagggggtcctggag

SEQ ID NO: 5049175 - DNA, 25 bp, Homo sapien
gcctgggacaccagggggtcctgga

SEQ ID NO: 5049176 - DNA, 25 bp, Homo sapien
tgggctacagatgggtcctgatgag

SEQ ID NO: 5049177 - DNA, 25 bp, Homo sapien
ctacagatgggtcctgatgagcctc

SEQ ID NO: 5049178 - DNA, 25 bp, Homo sapien
ttggtgggctacagatgggtcctga

SEQ ID NO: 5049179 - DNA, 25 bp, Homo sapien
ggctacagatgggtcctgatgagcc

SEQ ID NO: 5049180 - DNA, 25 bp, Homo sapien
cagccaacagttccacatgaagaga

SEQ ID NO: 5049181 - DNA, 25 bp, Homo sapien
gctgcattcataaaggccggctgct

SEQ ID NO: 5049182 - DNA, 25 bp, Homo sapien
tgaagagagtgtgggcctgcacagg

SEQ ID NO: 5049183 - DNA, 25 bp, Homo sapien
gctgctgttgaaggtattgcgtttt

SEQ ID NO: 5049184 - DNA, 25 bp, Homo sapien
cacaagaagacgtgtatggtcacac

SEQ ID NO: 5049185 - DNA, 25 bp, Homo sapien
aggagcgactttgccgtgaaggtct

SEQ ID NO: 5049186 - DNA, 25 bp, Homo sapien
tcagaggccacgggctgtcatagtg

SEQ ID NO: 5049187 - DNA, 25 bp, Homo sapien
ttggaagtaactgaaggagcacaag

SEQ ID NO: 5049188 - DNA, 25 bp, Homo sapien
gggaattctgtacactgcaaaggcc

SEQ ID NO: 5049189 - DNA, 25 bp, Homo sapien
tccacactgtggtaccctgtggggg

SEQ ID NO: 5049190 - DNA, 25 bp, Homo sapien
tgtacactgcaaaggcccggcagag

SEQ ID NO: 5049191 - DNA, 25 bp, Homo sapien
caggggcttgccatgttttgtccac

SEQ ID NO: 5049192 - DNA, 25 bp, Homo sapien
ctgcagccccagcaatccagggatt

SEQ ID NO: 5049193 - DNA, 25 bp, Homo sapien
gccccagcaatccagggattccagg

SEQ ID NO: 5049194 - DNA, 25 bp, Homo sapien
tgcagccccagcaatccagggattc

SEQ ID NO: 5049195 - DNA, 25 bp, Homo sapien
cagccccagcaatccagggattcca

SEQ ID NO: 5049196 - DNA, 25 bp, Homo sapien
tgatcaacctccttaatgcccagct

SEQ ID NO: 5049197 - DNA, 25 bp, Homo sapien
cactgctgcagtggccttgagccag

SEQ ID NO: 5049198 - DNA, 25 bp, Homo sapien
tgggtcttccgccaaaacattcagg

SEQ ID NO: 5049199 - DNA, 25 bp, Homo sapien
cattcaggattcagacgtaactgca

SEQ ID NO: 5049200 - DNA, 25 bp, Homo sapien
cttgcaaaccaggaggtccatccct

SEQ ID NO: 5049201 - DNA, 25 bp, Homo sapien
ccttgcaaaccaggaggtccatccc

SEQ ID NO: 5049202 - DNA, 25 bp, Homo sapien
accttgcaaaccaggaggtccatcc

SEQ ID NO: 5049203 - DNA, 25 bp, Homo sapien
ggcgccttggtgacctctgggtcct

SEQ ID NO: 5049204 - DNA, 25 bp, Homo sapien
ccgagctcctggaggaccgggggcg

SEQ ID NO: 5049205 - DNA, 25 bp, Homo sapien
gcgccttggtgacctctgggtcctg

SEQ ID NO: 5049206 - DNA, 25 bp, Homo sapien
tggaggaccgggggcgccttggtga

SEQ ID NO: 5049207 - DNA, 25 bp, Homo sapien
gttcccctttcaagccctcttgctg

SEQ ID NO: 5049208 - DNA, 25 bp, Homo sapien
ctgttcccctttcaagccctcttgc

SEQ ID NO: 5049209 - DNA, 25 bp, Homo sapien
cccctttcaagccctcttgctgcac

SEQ ID NO: 5049210 - DNA, 25 bp, Homo sapien
ttcccctttcaagccctcttgctgc

SEQ ID NO: 5049211 - DNA, 25 bp, Homo sapien
caccaggtggccccgcaggtcccac

SEQ ID NO: 5049212 - DNA, 25 bp, Homo sapien
aggtggccccgcaggtcccacgtca

SEQ ID NO: 5049213 - DNA, 25 bp, Homo sapien
caggtggccccgcaggtcccacgtc

SEQ ID NO: 5049214 - DNA, 25 bp, Homo sapien
gtggccccgcaggtcccacgtcacc

SEQ ID NO: 5049215 - DNA, 25 bp, Homo sapien
cacagaaacgacaaacatttcagca

SEQ ID NO: 5049216 - DNA, 25 bp, Homo sapien
catttcagcatagttactggtgcca

SEQ ID NO: 5049217 - DNA, 25 bp, Homo sapien
aaacatttcagcatagttactggtg

SEQ ID NO: 5049218 - DNA, 25 bp, Homo sapien
tcagcatagttactggtgccacctt

SEQ ID NO: 5049219 - DNA, 25 bp, Homo sapien
cccagggcacagagcccttgacagc

SEQ ID NO: 5049220 - DNA, 25 bp, Homo sapien
ccttgacagccccaggctcgctcac

SEQ ID NO: 5049221 - DNA, 25 bp, Homo sapien
cagagcccttgacagccccaggctc

SEQ ID NO: 5049222 - DNA, 25 bp, Homo sapien
gcacagagcccttgacagccccagg

SEQ ID NO: 5049223 - DNA, 25 bp, Homo sapien
gggtcctgccacaccagaagggccg

SEQ ID NO: 5049224 - DNA, 25 bp, Homo sapien
ggggtcctgccacaccagaagggcc

SEQ ID NO: 5049225 - DNA, 25 bp, Homo sapien
ggtcctgccacaccagaagggccgg

SEQ ID NO: 5049226 - DNA, 25 bp, Homo sapien
aggcttcccagggaatccatccagg

SEQ ID NO: 5049227 - DNA, 25 bp, Homo sapien
gcttcccagggaatccatccaggcc

SEQ ID NO: 5049228 - DNA, 25 bp, Homo sapien
agggaatccatccaggcctcgctct

SEQ ID NO: 5049229 - DNA, 25 bp, Homo sapien
tcccagggaatccatccaggcctcg

SEQ ID NO: 5049230 - DNA, 25 bp, Homo sapien
aaagaggttagtgaccacaggcagc

SEQ ID NO: 5049231 - DNA, 25 bp, Homo sapien
aagaggttagtgaccacaggcagca

SEQ ID NO: 5049232 - DNA, 25 bp, Homo sapien
taaagaggttagtgaccacaggcag

SEQ ID NO: 5049233 - DNA, 25 bp, Homo sapien
tccagagcttgtctaaggtacctgc

SEQ ID NO: 5049234 - DNA, 25 bp, Homo sapien
gcacacagcgggtacccagtaaata

SEQ ID NO: 5049235 - DNA, 25 bp, Homo sapien
gccactaactgggagaggcatcacc

SEQ ID NO: 5049236 - DNA, 25 bp, Homo sapien
tgcacttgctctcataactcattgg

SEQ ID NO: 5049237 - DNA, 25 bp, Homo sapien
gagccagctcttttgtgagtcacca

SEQ ID NO: 5049238 - DNA, 25 bp, Homo sapien
gatggaaaccttcttgctgatataa

SEQ ID NO: 5049239 - DNA, 25 bp, Homo sapien
tgcaaagctgaccttcagaggtgcg

SEQ ID NO: 5049240 - DNA, 25 bp, Homo sapien
tgtaagcacccaccaatacgagagc

SEQ ID NO: 5049241 - DNA, 25 bp, Homo sapien
gtctaaccctgagcgtggagtaccc

SEQ ID NO: 5049242 - DNA, 25 bp, Homo sapien
ggcagcttcctgttggccgtctcat

SEQ ID NO: 5049243 - DNA, 25 bp, Homo sapien
gcagcttcctgttggccgtctcatc

SEQ ID NO: 5049244 - DNA, 25 bp, Homo sapien
ccagggtttcgtctaaccctgagcg

SEQ ID NO: 5049245 - DNA, 25 bp, Homo sapien
ccgcacatcgccaaaaagtcccatt

SEQ ID NO: 5049246 - DNA, 25 bp, Homo sapien
cgcacatcgccaaaaagtcccattc

SEQ ID NO: 5049247 - DNA, 25 bp, Homo sapien
gcacatcgccaaaaagtcccattcc

SEQ ID NO: 5049248 - DNA, 25 bp, Homo sapien
ccttttcacctcgttctccttggag

SEQ ID NO: 5049249 - DNA, 25 bp, Homo sapien
ctcctcgagttcccttttcacctcg

SEQ ID NO: 5049250 - DNA, 25 bp, Homo sapien
tttcacctcgttctccttggagacc

SEQ ID NO: 5049251 - DNA, 25 bp, Homo sapien
tctcctcgagttcccttttcacctc

SEQ ID NO: 5049252 - DNA, 25 bp, Homo sapien
gtggcagggatggtgatagtgagga

SEQ ID NO: 5049253 - DNA, 25 bp, Homo sapien
gcagggatggtgatagtgaggaccc

SEQ ID NO: 5049254 - DNA, 25 bp, Homo sapien
cagggatggtgatagtgaggaccct

SEQ ID NO: 5049255 - DNA, 25 bp, Homo sapien
gggatggtgatagtgaggaccctgt

SEQ ID NO: 5049256 - DNA, 25 bp, Homo sapien
cagcaaccagcaggccaggcaatgg

SEQ ID NO: 5049257 - DNA, 25 bp, Homo sapien
gcagcaaccagcaggccaggcaatg

SEQ ID NO: 5049258 - DNA, 25 bp, Homo sapien
agcaaccagcaggccaggcaatggc

SEQ ID NO: 5049259 - DNA, 25 bp, Homo sapien
gcaaccagcaggccaggcaatggcg

SEQ ID NO: 5049260 - DNA, 25 bp, Homo sapien
atgtcctgtgtatctatgtgagctc

SEQ ID NO: 5049261 - DNA, 25 bp, Homo sapien
tgtgtatctatgtgagctccctgtg

SEQ ID NO: 5049262 - DNA, 25 bp, Homo sapien
gtgtatctatgtgagctccctgtgg

SEQ ID NO: 5049263 - DNA, 25 bp, Homo sapien
tcctgtgtatctatgtgagctccct

SEQ ID NO: 5049264 - DNA, 25 bp, Homo sapien
gatctaccctgcttcttgatgtgag

SEQ ID NO: 5049265 - DNA, 25 bp, Homo sapien
gctaagaattcagtagactccaccc

SEQ ID NO: 5049266 - DNA, 25 bp, Homo sapien
cacttcattggcatcagtaaggcaa

SEQ ID NO: 5049267 - DNA, 25 bp, Homo sapien
tacaagagtacagtacaggacaggc

SEQ ID NO: 5049268 - DNA, 25 bp, Homo sapien
ggtagaacccctgcccagacaagtg

SEQ ID NO: 5049269 - DNA, 25 bp, Homo sapien
tgcccagacaagtgccttcacttac

SEQ ID NO: 5049270 - DNA, 25 bp, Homo sapien
ctggtttttgattcctggagaaggg

SEQ ID NO: 5049271 - DNA, 25 bp, Homo sapien
tgattcctggagaaggggtagaacc

SEQ ID NO: 5049272 - DNA, 25 bp, Homo sapien
ggagctccgacacgtccaggaggtc

SEQ ID NO: 5049273 - DNA, 25 bp, Homo sapien
aggagctccgacacgtccaggaggt

SEQ ID NO: 5049274 - DNA, 25 bp, Homo sapien
tgttggcacaggtctcgccagcaga

SEQ ID NO: 5049275 - DNA, 25 bp, Homo sapien
ggcacaggtctcgccagcagacact

SEQ ID NO: 5049276 - DNA, 25 bp, Homo sapien
gttggcacaggtctcgccagcagac

SEQ ID NO: 5049277 - DNA, 25 bp, Homo sapien
ttggcacaggtctcgccagcagaca

SEQ ID NO: 5049278 - DNA, 25 bp, Homo sapien
gagcatcagaagggcccagctcaca

SEQ ID NO: 5049279 - DNA, 25 bp, Homo sapien
ggagcatcagaagggcccagctcac

SEQ ID NO: 5049280 - DNA, 25 bp, Homo sapien
atgccgacctcacccggcagccccg

SEQ ID NO: 5049281 - DNA, 25 bp, Homo sapien
gcatgccgacctcacccggcagccc

SEQ ID NO: 5049282 - DNA, 25 bp, Homo sapien
ccgcatgccgacctcacccggcagc

SEQ ID NO: 5049283 - DNA, 25 bp, Homo sapien
tgccgacctcacccggcagccccgg

SEQ ID NO: 5049284 - DNA, 25 bp, Homo sapien
tgtggctggaagtcaacaaaattaa

SEQ ID NO: 5049285 - DNA, 25 bp, Homo sapien
ctgtggctggaagtcaacaaaatta

SEQ ID NO: 5049286 - DNA, 25 bp, Homo sapien
tctgtggctggaagtcaacaaaatt

SEQ ID NO: 5049287 - DNA, 25 bp, Homo sapien
tctcatgcctttgctgccgtctctc

SEQ ID NO: 5049288 - DNA, 25 bp, Homo sapien
ctcatgcctttgctgccgtctctcc

SEQ ID NO: 5049289 - DNA, 25 bp, Homo sapien
gtgcaaagacacaacactgacttac

SEQ ID NO: 5049290 - DNA, 25 bp, Homo sapien
acaaagggactgtgcaaagacacaa

SEQ ID NO: 5049291 - DNA, 25 bp, Homo sapien
cagagacaaagggactgtgcaaaga

SEQ ID NO: 5049292 - DNA, 25 bp, Homo sapien
cagcagagacaaagggactgtgcaa

SEQ ID NO: 5049293 - DNA, 25 bp, Homo sapien
gtaagttgcttgcagttctcaggct

SEQ ID NO: 5049294 - DNA, 25 bp, Homo sapien
gaccaggagggtctaatcctgggcc

SEQ ID NO: 5049295 - DNA, 25 bp, Homo sapien
gcttgcagttctcaggcttgggacc

SEQ ID NO: 5049296 - DNA, 25 bp, Homo sapien
ttgggaccaggagggtctaatcctg

SEQ ID NO: 5049297 - DNA, 25 bp, Homo sapien
gaggggtagtaacttcatgtgggtg

SEQ ID NO: 5049298 - DNA, 25 bp, Homo sapien
ctgaggggtagtaacttcatgtggg

SEQ ID NO: 5049299 - DNA, 25 bp, Homo sapien
ggtagtaacttcatgtgggtgggga

SEQ ID NO: 5049300 - DNA, 25 bp, Homo sapien
tagtaacttcatgtgggtggggact

SEQ ID NO: 5049301 - DNA, 25 bp, Homo sapien
gcaaccctgcagctgaacgcagagg

SEQ ID NO: 5049302 - DNA, 25 bp, Homo sapien
gatggcacgccctcgaatgaccagt

SEQ ID NO: 5049303 - DNA, 25 bp, Homo sapien
cagggatgtcttgatgggatgggct

SEQ ID NO: 5049304 - DNA, 25 bp, Homo sapien
ctctggtgggttgggcaaccctgca

SEQ ID NO: 5049305 - DNA, 25 bp, Homo sapien
tggggaggggggcaaccatctagca

SEQ ID NO: 5049306 - DNA, 25 bp, Homo sapien
aggggggcaaccatctagcaggaaa

SEQ ID NO: 5049307 - DNA, 25 bp, Homo sapien
gggcaaccatctagcaggaaattat

SEQ ID NO: 5049308 - DNA, 25 bp, Homo sapien
gcaaccatctagcaggaaattatcc

SEQ ID NO: 5049309 - DNA, 25 bp, Homo sapien
tgcttggtcccaggtgaattttcat

SEQ ID NO: 5049310 - DNA, 25 bp, Homo sapien
gaattttcattttatagtgaatagc

SEQ ID NO: 5049311 - DNA, 25 bp, Homo sapien
ctgtgcttggtcccaggtgaatttt

SEQ ID NO: 5049312 - DNA, 25 bp, Homo sapien
tgaattttcattttatagtgaatag

SEQ ID NO: 5049313 - DNA, 25 bp, Homo sapien
taaccagctctgtcaccttggccat

SEQ ID NO: 5049314 - DNA, 25 bp, Homo sapien
tccccttggccaaaaggtcctatgc

SEQ ID NO: 5049315 - DNA, 25 bp, Homo sapien
aaccggcccaatggctcctatgtct

SEQ ID NO: 5049316 - DNA, 25 bp, Homo sapien
gccaaccggcccaatggctcctatg

SEQ ID NO: 5049317 - DNA, 25 bp, Homo sapien
ccttaggtccaggagcgccaaccgg

SEQ ID NO: 5049318 - DNA, 25 bp, Homo sapien
ttaggtccaggagcgccaaccggcc

SEQ ID NO: 5049319 - DNA, 25 bp, Homo sapien
atggggccagcaactcccatttcac

SEQ ID NO: 5049320 - DNA, 25 bp, Homo sapien
tttggaccagggagccccatggggc

SEQ ID NO: 5049321 - DNA, 25 bp, Homo sapien
gccccatggggccagcaactcccat

SEQ ID NO: 5049322 - DNA, 25 bp, Homo sapien
cccatggggccagcaactcccattt

SEQ ID NO: 5049323 - DNA, 25 bp, Homo sapien
tgtccgaattaactgagaactcccc

SEQ ID NO: 5049324 - DNA, 25 bp, Homo sapien
caagggaggccagagttcgatgtcc

SEQ ID NO: 5049325 - DNA, 25 bp, Homo sapien
agggttccctgtacctcacggtctg

SEQ ID NO: 5049326 - DNA, 25 bp, Homo sapien
tccctgtacctcacggtctggcttt

SEQ ID NO: 5049327 - DNA, 25 bp, Homo sapien
gctgaaggtggactgcagacaatac

SEQ ID NO: 5049328 - DNA, 25 bp, Homo sapien
cacccagggttctgctggggctgaa

SEQ ID NO: 5049329 - DNA, 25 bp, Homo sapien
ctggggctgaaggtggactgcagac

SEQ ID NO: 5049330 - DNA, 25 bp, Homo sapien
ggggctgaaggtggactgcagacaa

SEQ ID NO: 5049331 - DNA, 25 bp, Homo sapien
gctctgtcaccacggtcacctggca

SEQ ID NO: 5049332 - DNA, 25 bp, Homo sapien
tcaaaaacccaatctgttcactgcc

SEQ ID NO: 5049333 - DNA, 25 bp, Homo sapien
aaaaacccaatctgttcactgcctg

SEQ ID NO: 5049334 - DNA, 25 bp, Homo sapien
ggctctgtcaccacggtcacctggc

SEQ ID NO: 5049335 - DNA, 25 bp, Homo sapien
gtctatctgcatgccacagaagccc

SEQ ID NO: 5049336 - DNA, 25 bp, Homo sapien
agcacctgctgtctatctgcatgcc

SEQ ID NO: 5049337 - DNA, 25 bp, Homo sapien
cctgctgtctatctgcatgccacag

SEQ ID NO: 5049338 - DNA, 25 bp, Homo sapien
tctgactccacaaccaggtccatct

SEQ ID NO: 5049339 - DNA, 25 bp, Homo sapien
atcacaacaagtctccaattctgcg

SEQ ID NO: 5049340 - DNA, 25 bp, Homo sapien
aattctgcgtgtctcgagtcacaat

SEQ ID NO: 5049341 - DNA, 25 bp, Homo sapien
ggacccgaggggatatcacaacaag

SEQ ID NO: 5049342 - DNA, 25 bp, Homo sapien
aatagatcacaatccgctgtaggtc

SEQ ID NO: 5049343 - DNA, 25 bp, Homo sapien
ctatcacctcctttaatatgacagc

SEQ ID NO: 5049344 - DNA, 25 bp, Homo sapien
tatcacctcctttaatatgacagcc

SEQ ID NO: 5049345 - DNA, 25 bp, Homo sapien
atcacctcctttaatatgacagccc

SEQ ID NO: 5049346 - DNA, 25 bp, Homo sapien
tgtggagaacactgagggcacttag

SEQ ID NO: 5049347 - DNA, 25 bp, Homo sapien
acactgagggcacttagctcccaag

SEQ ID NO: 5049348 - DNA, 25 bp, Homo sapien
cttagctcccaaggcttctccccgg

SEQ ID NO: 5049349 - DNA, 25 bp, Homo sapien
ggagaacactgagggcacttagctc

SEQ ID NO: 5049350 - DNA, 25 bp, Homo sapien
ctgcagaaggccccctggtactcac

SEQ ID NO: 5049351 - DNA, 25 bp, Homo sapien
acactgtcgtagaggcgcttgccaa

SEQ ID NO: 5049352 - DNA, 25 bp, Homo sapien
tcctcgatgggtagtgtctgcacca

SEQ ID NO: 5049353 - DNA, 25 bp, Homo sapien
tctttcatggcacccacagcgttgt

SEQ ID NO: 5049354 - DNA, 25 bp, Homo sapien
gccagtcccggtcaaagaggtcatt

SEQ ID NO: 5049355 - DNA, 25 bp, Homo sapien
tttcctcaccggactgtgtgctggt

SEQ ID NO: 5049356 - DNA, 25 bp, Homo sapien
gggatttggatttggcagagaacaa

SEQ ID NO: 5049357 - DNA, 25 bp, Homo sapien
tttgtctatgacttgagaacaaggg

SEQ ID NO: 5049358 - DNA, 25 bp, Homo sapien
gaaagtttagtcagtatctcccagc

SEQ ID NO: 5049359 - DNA, 25 bp, Homo sapien
ggatgctgtactggtcgatgacctg

SEQ ID NO: 5049360 - DNA, 25 bp, Homo sapien
gatgacctgccagatataccagtct

SEQ ID NO: 5049361 - DNA, 25 bp, Homo sapien
ggcgtactcatcaggtaaaccttgg

SEQ ID NO: 5049362 - DNA, 25 bp, Homo sapien
cggaaggttgtgacaaaggcgtact

SEQ ID NO: 5049363 - DNA, 25 bp, Homo sapien
ccaaggtgatggtaacagcagatgg

SEQ ID NO: 5049364 - DNA, 25 bp, Homo sapien
gcagaaagctcacgaatgggatttg

SEQ ID NO: 5049365 - DNA, 25 bp, Homo sapien
accaaggtgatggtaacagcagatg

SEQ ID NO: 5049366 - DNA, 25 bp, Homo sapien
gaaagctcacgaatgggatttgtgc

SEQ ID NO: 5049367 - DNA, 25 bp, Homo sapien
cccatgttttcctcgtgaggtccct

SEQ ID NO: 5049368 - DNA, 25 bp, Homo sapien
tttccttcacactgaacaaatccat

SEQ ID NO: 5049369 - DNA, 25 bp, Homo sapien
tccgtacataggaactctgagctcc

SEQ ID NO: 5049370 - DNA, 25 bp, Homo sapien
aggatcccatccgtacataggaact

SEQ ID NO: 5049371 - DNA, 25 bp, Homo sapien
cactgaacaaatccatcaggtcaaa

SEQ ID NO: 5049372 - DNA, 25 bp, Homo sapien
gagccgggtgcttctataccaaggg

SEQ ID NO: 5049373 - DNA, 25 bp, Homo sapien
tttaagacagcagagcacggtgaca

SEQ ID NO: 5049374 - DNA, 25 bp, Homo sapien
gatgactgcccctaggaaactctgg

SEQ ID NO: 5049375 - DNA, 25 bp, Homo sapien
cacctaaggagcagtagagccgggt

SEQ ID NO: 5049376 - DNA, 25 bp, Homo sapien
ccattggtgtgcttaaagcgatctc

SEQ ID NO: 5049377 - DNA, 25 bp, Homo sapien
ctccattggtgtgcttaaagcgatc

SEQ ID NO: 5049378 - DNA, 25 bp, Homo sapien
cattggtgtgcttaaagcgatctcc

SEQ ID NO: 5049379 - DNA, 25 bp, Homo sapien
attggtgtgcttaaagcgatctcct

SEQ ID NO: 5049380 - DNA, 25 bp, Homo sapien
cctctaggccagagtgtatcagcac

SEQ ID NO: 5049381 - DNA, 25 bp, Homo sapien
ttgcatttctcctctaggccagagt

SEQ ID NO: 5049382 - DNA, 25 bp, Homo sapien
tctcctctaggccagagtgtatcag

SEQ ID NO: 5049383 - DNA, 25 bp, Homo sapien
catttctcctctaggccagagtgta

SEQ ID NO: 5049384 - DNA, 25 bp, Homo sapien
tgccaggtagcagcaggcgctgctc

SEQ ID NO: 5049385 - DNA, 25 bp, Homo sapien
tctgccaggtagcagcaggcgctgc

SEQ ID NO: 5049386 - DNA, 25 bp, Homo sapien
gccaggtagcagcaggcgctgctca

SEQ ID NO: 5049387 - DNA, 25 bp, Homo sapien
ccaggtagcagcaggcgctgctcat

SEQ ID NO: 5049388 - DNA, 25 bp, Homo sapien
tgtctgtgaggaacatctggcatct

SEQ ID NO: 5049389 - DNA, 25 bp, Homo sapien
tgggcactggtgcatccctgaggca

SEQ ID NO: 5049390 - DNA, 25 bp, Homo sapien
caggtcagcggacagaacgggatat

SEQ ID NO: 5049391 - DNA, 25 bp, Homo sapien
gcatctggtgcggccttcccaagga

SEQ ID NO: 5049392 - DNA, 25 bp, Homo sapien
tgtaaaacaagttctgccaggataa

SEQ ID NO: 5049393 - DNA, 25 bp, Homo sapien
caagtgtaaaacaagttctgccagg

SEQ ID NO: 5049394 - DNA, 25 bp, Homo sapien
ctactcattctctgacaagtgtaaa

SEQ ID NO: 5049395 - DNA, 25 bp, Homo sapien
aagtgtaaaacaagttctgccagga

SEQ ID NO: 5049396 - DNA, 25 bp, Homo sapien
gacccgataagctatataaagctcg

SEQ ID NO: 5049397 - DNA, 25 bp, Homo sapien
gctatataaagctcgttttgtggcc

SEQ ID NO: 5049398 - DNA, 25 bp, Homo sapien
agtgacccgataagctatataaagc

SEQ ID NO: 5049399 - DNA, 25 bp, Homo sapien
agctcgttttgtggccacgacaaag

SEQ ID NO: 5049400 - DNA, 25 bp, Homo sapien
actcttgggaggggccgcatggggc

SEQ ID NO: 5049401 - DNA, 25 bp, Homo sapien
tcactcttgggaggggccgcatggg

SEQ ID NO: 5049402 - DNA, 25 bp, Homo sapien
cttgggaggggccgcatggggcccg

SEQ ID NO: 5049403 - DNA, 25 bp, Homo sapien
gaggggccgcatggggcccgggcgc

SEQ ID NO: 5049404 - DNA, 25 bp, Homo sapien
ccagatcgtagtggacacttttgca

SEQ ID NO: 5049405 - DNA, 25 bp, Homo sapien
gtcgatggcattgaagtcggacacg

SEQ ID NO: 5049406 - DNA, 25 bp, Homo sapien
tgatgtagcggagcgcgtctcccgt

SEQ ID NO: 5049407 - DNA, 25 bp, Homo sapien
agtcccaactcgaaggccgtggtgg

SEQ ID NO: 5049408 - DNA, 25 bp, Homo sapien
ttttgaaaatccaagggacaatctg

SEQ ID NO: 5049409 - DNA, 25 bp, Homo sapien
tttgaaaatccaagggacaatctgc

SEQ ID NO: 5049410 - DNA, 25 bp, Homo sapien
tctagttttgaaaatccaagggaca

SEQ ID NO: 5049411 - DNA, 25 bp, Homo sapien
tgaaaatccaagggacaatctgcat

SEQ ID NO: 5049412 - DNA, 25 bp, Homo sapien
cccatgctcacggacacatgctgtc

SEQ ID NO: 5049413 - DNA, 25 bp, Homo sapien
ccatgctcacggacacatgctgtct

SEQ ID NO: 5049414 - DNA, 25 bp, Homo sapien
gcccatgctcacggacacatgctgt

SEQ ID NO: 5049415 - DNA, 25 bp, Homo sapien
aggccagccacagcgttccctcgga

SEQ ID NO: 5049416 - DNA, 25 bp, Homo sapien
gaggccagccacagcgttccctcgg

SEQ ID NO: 5049417 - DNA, 25 bp, Homo sapien
cagcgttccctcggaggccggccat

SEQ ID NO: 5049418 - DNA, 25 bp, Homo sapien
ccacagcgttccctcggaggccggc

SEQ ID NO: 5049419 - DNA, 25 bp, Homo sapien
caggaagagacgctgttagggtcta

SEQ ID NO: 5049420 - DNA, 25 bp, Homo sapien
ggaagagacgctgttagggtctaca

SEQ ID NO: 5049421 - DNA, 25 bp, Homo sapien
aggaagagacgctgttagggtctac

SEQ ID NO: 5049422 - DNA, 25 bp, Homo sapien
ccaggaagagacgctgttagggtct

SEQ ID NO: 5049423 - DNA, 25 bp, Homo sapien
aacactctctgggtatctgccagga

SEQ ID NO: 5049424 - DNA, 25 bp, Homo sapien
gcaaagagatgtcggtctggccacc

SEQ ID NO: 5049425 - DNA, 25 bp, Homo sapien
ggccttgggctggttgtctcagaca

SEQ ID NO: 5049426 - DNA, 25 bp, Homo sapien
catccgcttgcaggaatgtgaagaa

SEQ ID NO: 5049427 - DNA, 25 bp, Homo sapien
cagctgaagtctgtgaccttcagca

SEQ ID NO: 5049428 - DNA, 25 bp, Homo sapien
tcagctgaagtctgtgaccttcagc

SEQ ID NO: 5049429 - DNA, 25 bp, Homo sapien
agtaagtgtggaggctttccccagg

SEQ ID NO: 5049430 - DNA, 25 bp, Homo sapien
ctgggggtcacctgtcagccactcg

SEQ ID NO: 5049431 - DNA, 25 bp, Homo sapien
aaacaagacccgcagtaagtgtgga

SEQ ID NO: 5049432 - DNA, 25 bp, Homo sapien
tcagactctaaacaagacccgcagt

SEQ ID NO: 5049433 - DNA, 25 bp, Homo sapien
ggagagtcgagtctcctgtgccctg

SEQ ID NO: 5049434 - DNA, 25 bp, Homo sapien
acttgagcccgtggagagtcgagtc

SEQ ID NO: 5049435 - DNA, 25 bp, Homo sapien
gcccgtggagagtcgagtctcctgt

SEQ ID NO: 5049436 - DNA, 25 bp, Homo sapien
gaaagacttgagcccgtggagagtc

SEQ ID NO: 5049437 - DNA, 25 bp, Homo sapien
ggtcttgagagcagaattcttctgc

SEQ ID NO: 5049438 - DNA, 25 bp, Homo sapien
atatcgtgctatcctcacaaaggcc

SEQ ID NO: 5049439 - DNA, 25 bp, Homo sapien
gaagttccaggcaactaaactgcac

SEQ ID NO: 5049440 - DNA, 25 bp, Homo sapien
ttctgctccatatcgtgctatcctc

SEQ ID NO: 5049441 - DNA, 25 bp, Homo sapien
tgcgtcagatttcccccatgtagtc

SEQ ID NO: 5049442 - DNA, 25 bp, Homo sapien
cgtcagatttcccccatgtagtcat

SEQ ID NO: 5049443 - DNA, 25 bp, Homo sapien
ctgcgtcagatttcccccatgtagt

SEQ ID NO: 5049444 - DNA, 25 bp, Homo sapien
cctgcgtcagatttcccccatgtag

SEQ ID NO: 5049445 - DNA, 25 bp, Homo sapien
gcgtgagcgtgtagcataaaatgcc

SEQ ID NO: 5049446 - DNA, 25 bp, Homo sapien
tggcaggtagcccatgactgactcg

SEQ ID NO: 5049447 - DNA, 25 bp, Homo sapien
gactgactcgctgtcttttgcgtga

SEQ ID NO: 5049448 - DNA, 25 bp, Homo sapien
gagtgaactgatgcccttaggtgtg

SEQ ID NO: 5049449 - DNA, 25 bp, Homo sapien
gccacctggttttcatgaccctcat

SEQ ID NO: 5049450 - DNA, 25 bp, Homo sapien
tgagaactccccaatgccacctggt

SEQ ID NO: 5049451 - DNA, 25 bp, Homo sapien
caatgccacctggttttcatgaccc

SEQ ID NO: 5049452 - DNA, 25 bp, Homo sapien
tttctttctgagaactccccaatgc

SEQ ID NO: 5049453 - DNA, 25 bp, Homo sapien
caagacccgaagaagatgcagctag

SEQ ID NO: 5049454 - DNA, 25 bp, Homo sapien
gggagacgttcattgaagcaagacc

SEQ ID NO: 5049455 - DNA, 25 bp, Homo sapien
gatccctgtgccctgaaagagtagg

SEQ ID NO: 5049456 - DNA, 25 bp, Homo sapien
gcagctaggtctgtgaacgtatcag

SEQ ID NO: 5049457 - DNA, 25 bp, Homo sapien
gacactggaagccacgtggttaaaa

SEQ ID NO: 5049458 - DNA, 25 bp, Homo sapien
ctgacactggaagccacgtggttaa

SEQ ID NO: 5049459 - DNA, 25 bp, Homo sapien
tgacactggaagccacgtggttaaa

SEQ ID NO: 5049460 - DNA, 25 bp, Homo sapien
ggaaggaccatacagagcggtgtga

SEQ ID NO: 5049461 - DNA, 25 bp, Homo sapien
aaggaccatacagagcggtgtgagg

SEQ ID NO: 5049462 - DNA, 25 bp, Homo sapien
ggaccatacagagcggtgtgagggc

SEQ ID NO: 5049463 - DNA, 25 bp, Homo sapien
gaaggaccatacagagcggtgtgag

SEQ ID NO: 5049464 - DNA, 25 bp, Homo sapien
cactggaagccatgtggttaaaacc

SEQ ID NO: 5049465 - DNA, 25 bp, Homo sapien
tggaagccatgtggttaaaaccctg

SEQ ID NO: 5049466 - DNA, 25 bp, Homo sapien
ctgacactggaagccatgtggttaa

SEQ ID NO: 5049467 - DNA, 25 bp, Homo sapien
gacactggaagccatgtggttaaaa

SEQ ID NO: 5049468 - DNA, 25 bp, Homo sapien
ggaaggaccatacagagcggtgtga

SEQ ID NO: 5049469 - DNA, 25 bp, Homo sapien
aaggaccatacagagcggtgtgagg

SEQ ID NO: 5049470 - DNA, 25 bp, Homo sapien
ggaccatacagagcggtgtgagggc

SEQ ID NO: 5049471 - DNA, 25 bp, Homo sapien
gaaggaccatacagagcggtgtgag

SEQ ID NO: 5049472 - DNA, 25 bp, Homo sapien
tgacactggaagccacgtggttaaa

SEQ ID NO: 5049473 - DNA, 25 bp, Homo sapien
gacactggaagccacgtggttaaaa

SEQ ID NO: 5049474 - DNA, 25 bp, Homo sapien
ctgacactggaagccacgtggttaa

SEQ ID NO: 5049475 - DNA, 25 bp, Homo sapien
ggaaggaccatacagagcggtgtga

SEQ ID NO: 5049476 - DNA, 25 bp, Homo sapien
ggaccatacagagcggtgtgagggc

SEQ ID NO: 5049477 - DNA, 25 bp, Homo sapien
gaaggaccatacagagcggtgtgag

SEQ ID NO: 5049478 - DNA, 25 bp, Homo sapien
aaggaccatacagagcggtgtgagg

SEQ ID NO: 5049479 - DNA, 25 bp, Homo sapien
tgacactggaagccacgtggttaaa

SEQ ID NO: 5049480 - DNA, 25 bp, Homo sapien
gacactggaagccacgtggttaaaa

SEQ ID NO: 5049481 - DNA, 25 bp, Homo sapien
ctgacactggaagccacgtggttaa

SEQ ID NO: 5049482 - DNA, 25 bp, Homo sapien
aaggaccatacagagcggtgtgagg

SEQ ID NO: 5049483 - DNA, 25 bp, Homo sapien
ggaaggaccatacagagcggtgtga

SEQ ID NO: 5049484 - DNA, 25 bp, Homo sapien
ggaccatacagagcggtgtgagggc

SEQ ID NO: 5049485 - DNA, 25 bp, Homo sapien
gaaggaccatacagagcggtgtgag

SEQ ID NO: 5049486 - DNA, 25 bp, Homo sapien
tgacactggaagccacgtggttaaa

SEQ ID NO: 5049487 - DNA, 25 bp, Homo sapien
gacactggaagccacgtggttaaaa

SEQ ID NO: 5049488 - DNA, 25 bp, Homo sapien
ctgacactggaagccacgtggttaa

SEQ ID NO: 5049489 - DNA, 25 bp, Homo sapien
tggacaatccagaagatgactcact

SEQ ID NO: 5049490 - DNA, 25 bp, Homo sapien
cagaagatgactcactttggcagcc

SEQ ID NO: 5049491 - DNA, 25 bp, Homo sapien
ctggaagccacgtggacaatccaga

SEQ ID NO: 5049492 - DNA, 25 bp, Homo sapien
ccacgtggacaatccagaagatgac

SEQ ID NO: 5049493 - DNA, 25 bp, Homo sapien
ggcatagtggaacgttgattccttt

SEQ ID NO: 5049494 - DNA, 25 bp, Homo sapien
caggcatagtggaacgttgattcct

SEQ ID NO: 5049495 - DNA, 25 bp, Homo sapien
tagtggaacgttgattcctttgctg

SEQ ID NO: 5049496 - DNA, 25 bp, Homo sapien
catagtggaacgttgattcctttgc

SEQ ID NO: 5049497 - DNA, 25 bp, Homo sapien
atcaaaggtgttggatgctggaaac

SEQ ID NO: 5049498 - DNA, 25 bp, Homo sapien
tggaaacgtgcccagatctggttgt

SEQ ID NO: 5049499 - DNA, 25 bp, Homo sapien
taattaaatcaaaggtgttggatgc

SEQ ID NO: 5049500 - DNA, 25 bp, Homo sapien
cgtgcccagatctggttgtaagcag

SEQ ID NO: 5049501 - DNA, 25 bp, Homo sapien
gggaatcttcgcaaacacattgtag

SEQ ID NO: 5049502 - DNA, 25 bp, Homo sapien
ggaatcttcgcaaacacattgtagc

SEQ ID NO: 5049503 - DNA, 25 bp, Homo sapien
agggaatcttcgcaaacacattgta

SEQ ID NO: 5049504 - DNA, 25 bp, Homo sapien
tacatagaatgtgacgaggtaaggc

SEQ ID NO: 5049505 - DNA, 25 bp, Homo sapien
gaaagtcttagaccgcagaccgaca

SEQ ID NO: 5049506 - DNA, 25 bp, Homo sapien
gcagggagggcatcaatatcacaaa

SEQ ID NO: 5049507 - DNA, 25 bp, Homo sapien
catatctcagtaaggtaagggtggc

SEQ ID NO: 5049508 - DNA, 25 bp, Homo sapien
ggaggacatggaggcattcagcaga

SEQ ID NO: 5049509 - DNA, 25 bp, Homo sapien
ctttgaggatgtggcactttagcca

SEQ ID NO: 5049510 - DNA, 25 bp, Homo sapien
agtctaccgtgttagggcagaagga

SEQ ID NO: 5049511 - DNA, 25 bp, Homo sapien
gcagaaggcaacttaatgaacattt

SEQ ID NO: 5049512 - DNA, 25 bp, Homo sapien
caatctccattattgatgctataga

SEQ ID NO: 5049513 - DNA, 25 bp, Homo sapien
ttagtatttgatggtagcagcgtcc

SEQ ID NO: 5049514 - DNA, 25 bp, Homo sapien
gcagcgtcctgtttagcttggtgaa

SEQ ID NO: 5049515 - DNA, 25 bp, Homo sapien
tctccaagttgtagagtccatgcac

SEQ ID NO: 5049516 - DNA, 25 bp, Homo sapien
taaaccaggtgcctgtgccaacgtc

SEQ ID NO: 5049517 - DNA, 25 bp, Homo sapien
tgttccaaggatagtcaggattcca

SEQ ID NO: 5049518 - DNA, 25 bp, Homo sapien
tcccatggagtgcttcagtaattag

SEQ ID NO: 5049519 - DNA, 25 bp, Homo sapien
acctattaagtgtttggcagcagca

SEQ ID NO: 5049520 - DNA, 25 bp, Homo sapien
cattcgaggctaggtgggcactgtt

SEQ ID NO: 5049521 - DNA, 25 bp, Homo sapien
gaatgtcaggactacacccaggaag

SEQ ID NO: 5049522 - DNA, 25 bp, Homo sapien
gatgtgagctgttgacctgttccct

SEQ ID NO: 5049523 - DNA, 25 bp, Homo sapien
gaaggagccgctctgcttattgcaa

SEQ ID NO: 5049524 - DNA, 25 bp, Homo sapien
gctgtcttctgcgtccagtcgatgg

SEQ ID NO: 5049525 - DNA, 25 bp, Homo sapien
cttgctgtcttctgcgtccagtcga

SEQ ID NO: 5049526 - DNA, 25 bp, Homo sapien
tactgtaccaacttgctgtcttctg

SEQ ID NO: 5049527 - DNA, 25 bp, Homo sapien
tttccaggtactgtaccaacttgct

SEQ ID NO: 5049528 - DNA, 25 bp, Homo sapien
tcttgggaccttcaatagcctcgga

SEQ ID NO: 5049529 - DNA, 25 bp, Homo sapien
catcattatgcagggtcttgggacc

SEQ ID NO: 5049530 - DNA, 25 bp, Homo sapien
tcctgctgagaagcaccagtgcaag

SEQ ID NO: 5049531 - DNA, 25 bp, Homo sapien
tcaatgacttggtactgtcctggac

SEQ ID NO: 5049532 - DNA, 25 bp, Homo sapien
gcattggtgttagtagctcccctgt

SEQ ID NO: 5049533 - DNA, 25 bp, Homo sapien
atccaagatgtgcattggtgttagt

SEQ ID NO: 5049534 - DNA, 25 bp, Homo sapien
gtgttagtagctcccctgttgcctg

SEQ ID NO: 5049535 - DNA, 25 bp, Homo sapien
tgtgcattggtgttagtagctcccc

SEQ ID NO: 5049536 - DNA, 25 bp, Homo sapien
aacattattcaaaaccgtcttgcag

SEQ ID NO: 5049537 - DNA, 25 bp, Homo sapien
ggtggtttttctagccatattttca

SEQ ID NO: 5049538 - DNA, 25 bp, Homo sapien
gactgtgtcccacttaacgttgctg

SEQ ID NO: 5049539 - DNA, 25 bp, Homo sapien
accgtcttgcagatctcatgtgaga

SEQ ID NO: 5049540 - DNA, 25 bp, Homo sapien
cataagtggtgagtttatctttgcc

SEQ ID NO: 5049541 - DNA, 25 bp, Homo sapien
cctgtggtgctcataagtggtgagt

SEQ ID NO: 5049542 - DNA, 25 bp, Homo sapien
taagtggtgagtttatctttgccac

SEQ ID NO: 5049543 - DNA, 25 bp, Homo sapien
aagcttataaacctgtggtgctcat

SEQ ID NO: 5049544 - DNA, 25 bp, Homo sapien
caagtggcccagtgatgggcaccca

SEQ ID NO: 5049545 - DNA, 25 bp, Homo sapien
tggctggttctagcctcgcaagtgg

SEQ ID NO: 5049546 - DNA, 25 bp, Homo sapien
tagcctcgcaagtggcccagtgatg

SEQ ID NO: 5049547 - DNA, 25 bp, Homo sapien
gttctagcctcgcaagtggcccagt

SEQ ID NO: 5049548 - DNA, 25 bp, Homo sapien
tcttccacagaagttagtgtctcca

SEQ ID NO: 5049549 - DNA, 25 bp, Homo sapien
tagcctggcatcgagggtcctctcg

SEQ ID NO: 5049550 - DNA, 25 bp, Homo sapien
tccagcgactgtatcatggtcaggt

SEQ ID NO: 5049551 - DNA, 25 bp, Homo sapien
ccctccacgcatagacggaatgact

SEQ ID NO: 5049552 - DNA, 25 bp, Homo sapien
cccagatcctcataaaattccttca

SEQ ID NO: 5049553 - DNA, 25 bp, Homo sapien
ccagatcctcataaaattccttcat

SEQ ID NO: 5049554 - DNA, 25 bp, Homo sapien
ccccagatcctcataaaattccttc

SEQ ID NO: 5049555 - DNA, 25 bp, Homo sapien
gactgtagaggaaattgtgaccaag

SEQ ID NO: 5049556 - DNA, 25 bp, Homo sapien
ggatcccatcgactgctcagaagct

SEQ ID NO: 5049557 - DNA, 25 bp, Homo sapien
gggatcccatcgactgctcagaagc

SEQ ID NO: 5049558 - DNA, 25 bp, Homo sapien
ttgtgaccaaggatccaagtagaat

SEQ ID NO: 5049559 - DNA, 25 bp, Homo sapien
caccatggacaaagccgacagcacc

SEQ ID NO: 5049560 - DNA, 25 bp, Homo sapien
gcaccatggacaaagccgacagcac

SEQ ID NO: 5049561 - DNA, 25 bp, Homo sapien
atagatcacatctctccccgtaggg

SEQ ID NO: 5049562 - DNA, 25 bp, Homo sapien
catgggctgttctccctataggagg

SEQ ID NO: 5049563 - DNA, 25 bp, Homo sapien
ccctataggaggagaagttattatc

SEQ ID NO: 5049564 - DNA, 25 bp, Homo sapien
gaagttattatcatagatcacatct

SEQ ID NO: 5049565 - DNA, 25 bp, Homo sapien
ccagccatgatggagtggcaagcag

SEQ ID NO: 5049566 - DNA, 25 bp, Homo sapien
cctccagccatgatggagtggcaag

SEQ ID NO: 5049567 - DNA, 25 bp, Homo sapien
tagatcgaattctcccctgaggact

SEQ ID NO: 5049568 - DNA, 25 bp, Homo sapien
gaaatgccaccacctagatcgaatt

SEQ ID NO: 5049569 - DNA, 25 bp, Homo sapien
aggtgtgaatatccccaaggacctg

SEQ ID NO: 5049570 - DNA, 25 bp, Homo sapien
ttaggtgtgaatatccccaaggacc

SEQ ID NO: 5049571 - DNA, 25 bp, Homo sapien
taggtgtgaatatccccaaggacct

SEQ ID NO: 5049572 - DNA, 25 bp, Homo sapien
cttgtaggaaatgaattccagttgc

SEQ ID NO: 5049573 - DNA, 25 bp, Homo sapien
ggcttgtaggaaatgaattccagtt

SEQ ID NO: 5049574 - DNA, 25 bp, Homo sapien
gcttgtaggaaatgaattccagttg

SEQ ID NO: 5049575 - DNA, 25 bp, Homo sapien
ataaggaggagctctgggtacaatt

SEQ ID NO: 5049576 - DNA, 25 bp, Homo sapien
cataaggaggagctctgggtacaat

SEQ ID NO: 5049577 - DNA, 25 bp, Homo sapien
aggagctctcacgaaccagcattgc

SEQ ID NO: 5049578 - DNA, 25 bp, Homo sapien
cgaaccagcattgcattatcaatct

SEQ ID NO: 5049579 - DNA, 25 bp, Homo sapien
cattgcattatcaatctccttggcc

SEQ ID NO: 5049580 - DNA, 25 bp, Homo sapien
gctctcacgaaccagcattgcatta

SEQ ID NO: 5049581 - DNA, 25 bp, Homo sapien
attcaggaatatgatcatcatgtcc

SEQ ID NO: 5049582 - DNA, 25 bp, Homo sapien
acatgcatacatccatgcaggaaaa

SEQ ID NO: 5049583 - DNA, 25 bp, Homo sapien
cacatgcatacatccatgcaggaaa

SEQ ID NO: 5049584 - DNA, 25 bp, Homo sapien
acacatgcatacatccatgcaggaa

SEQ ID NO: 5049585 - DNA, 25 bp, Homo sapien
ggcattgtccaagtccaggataggg

SEQ ID NO: 5049586 - DNA, 25 bp, Homo sapien
tccagtatggacatcataaaatgca

SEQ ID NO: 5049587 - DNA, 25 bp, Homo sapien
ctcctctccagtatggacatcataa

SEQ ID NO: 5049588 - DNA, 25 bp, Homo sapien
tggcattgtccaagtccaggatagg

SEQ ID NO: 5049589 - DNA, 25 bp, Homo sapien
tgcccgtgacacagtccatcaatgt

SEQ ID NO: 5049590 - DNA, 25 bp, Homo sapien
aacttgcgcatatgcccgtgacaca

SEQ ID NO: 5049591 - DNA, 25 bp, Homo sapien
gacacagtccatcaatgttgtccat

SEQ ID NO: 5049592 - DNA, 25 bp, Homo sapien
atcatgcaacttgcgcatatgcccg

SEQ ID NO: 5049593 - DNA, 25 bp, Homo sapien
atgaaaactttacagttgtaccagt

SEQ ID NO: 5049594 - DNA, 25 bp, Homo sapien
cttcatgaaaactttacagttgtac

SEQ ID NO: 5049595 - DNA, 25 bp, Homo sapien
ctttacagttgtaccagttccccat

SEQ ID NO: 5049596 - DNA, 25 bp, Homo sapien
tcatgaaaactttacagttgtacca

SEQ ID NO: 5049597 - DNA, 25 bp, Homo sapien
tttacttcacagaagtaaataatgc

SEQ ID NO: 5049598 - DNA, 25 bp, Homo sapien
aacccttcatcatcgcctgaagatg

SEQ ID NO: 5049599 - DNA, 25 bp, Homo sapien
ccttcatcatcgcctgaagatggag

SEQ ID NO: 5049600 - DNA, 25 bp, Homo sapien
acccttcatcatcgcctgaagatgg

SEQ ID NO: 5049601 - DNA, 25 bp, Homo sapien
ttaacccttcatcatcgcctgaaga

SEQ ID NO: 5049602 - DNA, 25 bp, Homo sapien
tgcaccttctgaatcaggagacagg

SEQ ID NO: 5049603 - DNA, 25 bp, Homo sapien
tgggcaacacgaagcccttgtcatc

SEQ ID NO: 5049604 - DNA, 25 bp, Homo sapien
tctgcaccttctgaatcaggagaca

SEQ ID NO: 5049605 - DNA, 25 bp, Homo sapien
gaagcccttgtcatctgcaccttct

SEQ ID NO: 5049606 - DNA, 25 bp, Homo sapien
ttcagtttcttaaggataaccacaa

SEQ ID NO: 5049607 - DNA, 25 bp, Homo sapien
ggataaccacaatgtccaagtttgg

SEQ ID NO: 5049608 - DNA, 25 bp, Homo sapien
gtttcttaaggataaccacaatgtc

SEQ ID NO: 5049609 - DNA, 25 bp, Homo sapien
agtacagaggtaacgtaggtttcag

SEQ ID NO: 5049610 - DNA, 25 bp, Homo sapien
gaaggtacgttggagtccacatcac

SEQ ID NO: 5049611 - DNA, 25 bp, Homo sapien
gtttgaaggtacgttggagtccaca

SEQ ID NO: 5049612 - DNA, 25 bp, Homo sapien
ggtacgttggagtccacatcactct

SEQ ID NO: 5049613 - DNA, 25 bp, Homo sapien
tagtttgaaggtacgttggagtcca

SEQ ID NO: 5049614 - DNA, 25 bp, Homo sapien
acttcctggatgtgttacttcctgg

SEQ ID NO: 5049615 - DNA, 25 bp, Homo sapien
agctcaatactcctatagccatact

SEQ ID NO: 5049616 - DNA, 25 bp, Homo sapien
ggtctcagctcaatactcctatagc

SEQ ID NO: 5049617 - DNA, 25 bp, Homo sapien
tgtgatgctgcaccacagaaacatg

SEQ ID NO: 5049618 - DNA, 25 bp, Homo sapien
tctgaaatcatgaaacgggacttag

SEQ ID NO: 5049619 - DNA, 25 bp, Homo sapien
taggattcaaatctagccggacact

SEQ ID NO: 5049620 - DNA, 25 bp, Homo sapien
gccggacactgttgaataagcagaa

SEQ ID NO: 5049621 - DNA, 25 bp, Homo sapien
tgtctctcggaacaagtgctctgtg

SEQ ID NO: 5049622 - DNA, 25 bp, Homo sapien
ctgcagcacagagcaatctggacat

SEQ ID NO: 5049623 - DNA, 25 bp, Homo sapien
tcccagagtcctggggtgcaagccc

SEQ ID NO: 5049624 - DNA, 25 bp, Homo sapien
ccagagtcctggggtgcaagcccat

SEQ ID NO: 5049625 - DNA, 25 bp, Homo sapien
tttcccagagtcctggggtgcaagc

SEQ ID NO: 5049626 - DNA, 25 bp, Homo sapien
gtttcccagagtcctggggtgcaag

SEQ ID NO: 5049627 - DNA, 25 bp, Homo sapien
tcttgctgtgtcaaacccataatag

SEQ ID NO: 5049628 - DNA, 25 bp, Homo sapien
caaacccataatagcagttgtaaga

SEQ ID NO: 5049629 - DNA, 25 bp, Homo sapien
acatggcaaagcgtttctcttgctg

SEQ ID NO: 5049630 - DNA, 25 bp, Homo sapien
agactcccactggcatacctgctga

SEQ ID NO: 5049631 - DNA, 25 bp, Homo sapien
cacaaaaacgggtggttctggctga

SEQ ID NO: 5049632 - DNA, 25 bp, Homo sapien
ttcagggatctcatagggtccacaa

SEQ ID NO: 5049633 - DNA, 25 bp, Homo sapien
gctgaagtcgactcccttatgtcag

SEQ ID NO: 5049634 - DNA, 25 bp, Homo sapien
ctattcagggatctcatagggtcca

SEQ ID NO: 5049635 - DNA, 25 bp, Homo sapien
tgtcataatgaccagacttcttacg

SEQ ID NO: 5049636 - DNA, 25 bp, Homo sapien
gaccagacttcttacgaatttgcca

SEQ ID NO: 5049637 - DNA, 25 bp, Homo sapien
tacgaatttgccaggacagcacaag

SEQ ID NO: 5049638 - DNA, 25 bp, Homo sapien
cagcacaagggagtggtcatcatgg

SEQ ID NO: 5049639 - DNA, 25 bp, Homo sapien
cttcttcctgcatgggctttaccat

SEQ ID NO: 5049640 - DNA, 25 bp, Homo sapien
gggaacccttcttcctgcatgggct

SEQ ID NO: 5049641 - DNA, 25 bp, Homo sapien
acccttcttcctgcatgggctttac

SEQ ID NO: 5049642 - DNA, 25 bp, Homo sapien
aaaggggaacccttcttcctgcatg

SEQ ID NO: 5049643 - DNA, 25 bp, Homo sapien
taagagaatcttagttccatgtcat

SEQ ID NO: 5049644 - DNA, 25 bp, Homo sapien
ggcaatgcttgcagagcatcagcag

SEQ ID NO: 5049645 - DNA, 25 bp, Homo sapien
catgtcataaggcaatgcttgcaga

SEQ ID NO: 5049646 - DNA, 25 bp, Homo sapien
cagagcatcagcaggaactgtgtgg

SEQ ID NO: 5049647 - DNA, 25 bp, Homo sapien
tgacccctgtttccagggtcacttc

SEQ ID NO: 5049648 - DNA, 25 bp, Homo sapien
cgatctccttggtagggccactgct

SEQ ID NO: 5049649 - DNA, 25 bp, Homo sapien
tttgaaagtaacagaactctgaata

SEQ ID NO: 5049650 - DNA, 25 bp, Homo sapien
cagatggtttgatccgagttttgaa

SEQ ID NO: 5049651 - DNA, 25 bp, Homo sapien
taagtatagcgtaacaacaatcact

SEQ ID NO: 5049652 - DNA, 25 bp, Homo sapien
gcttctcagatggtttgatccgagt

SEQ ID NO: 5049653 - DNA, 25 bp, Homo sapien
tggactcccctgacatcaatgcagg

SEQ ID NO: 5049654 - DNA, 25 bp, Homo sapien
gagggctgcttcctgatacttgcac

SEQ ID NO: 5049655 - DNA, 25 bp, Homo sapien
gagcaggtcttcactggactcccct

SEQ ID NO: 5049656 - DNA, 25 bp, Homo sapien
gggatgatcccacatacccagttca

SEQ ID NO: 5049657 - DNA, 25 bp, Homo sapien
gcccgtagaagtttgtgctgagatg

SEQ ID NO: 5049658 - DNA, 25 bp, Homo sapien
gggactccagaaggcataacaaata

SEQ ID NO: 5049659 - DNA, 25 bp, Homo sapien
agaagggcccgtagaagtttgtgct

SEQ ID NO: 5049660 - DNA, 25 bp, Homo sapien
caaataaaggagcattctcagagtc

SEQ ID NO: 5049661 - DNA, 25 bp, Homo sapien
ctctctcaggctggtgttgctgtac

SEQ ID NO: 5049662 - DNA, 25 bp, Homo sapien
tctctctcaggctggtgttgctgta

SEQ ID NO: 5049663 - DNA, 25 bp, Homo sapien
tctctcaggctggtgttgctgtact

SEQ ID NO: 5049664 - DNA, 25 bp, Homo sapien
ctagaccctcgttcttgaggggccg

SEQ ID NO: 5049665 - DNA, 25 bp, Homo sapien
catgacttgagctcccatgggaccc

SEQ ID NO: 5049666 - DNA, 25 bp, Homo sapien
gcctggtggtcatagacaccctgta

SEQ ID NO: 5049667 - DNA, 25 bp, Homo sapien
caaggtgatgaacccttttcttgcc

SEQ ID NO: 5049668 - DNA, 25 bp, Homo sapien
gcatgtgctgcttttgaggaactct

SEQ ID NO: 5049669 - DNA, 25 bp, Homo sapien
ggaaggtacaggtgctctgcgcggt

SEQ ID NO: 5049670 - DNA, 25 bp, Homo sapien
tcagtggacacggacttgcagttca

SEQ ID NO: 5049671 - DNA, 25 bp, Homo sapien
gcagttcaggttctgcatgctctgc

SEQ ID NO: 5049672 - DNA, 25 bp, Homo sapien
tgctctgcgcggtgtcctcagtgga

SEQ ID NO: 5049673 - DNA, 25 bp, Homo sapien
gtggtgtccccagctatgaaaactg

SEQ ID NO: 5049674 - DNA, 25 bp, Homo sapien
tcacccatgtcaaacggtgtaaggg

SEQ ID NO: 5049675 - DNA, 25 bp, Homo sapien
tctgggccagaggttccatttaaga

SEQ ID NO: 5049676 - DNA, 25 bp, Homo sapien
gcaggtctactgtgctaagcttaaa

SEQ ID NO: 5049677 - DNA, 25 bp, Homo sapien
ctcctggatgtttttggaggataaa

SEQ ID NO: 5049678 - DNA, 25 bp, Homo sapien
cctggatgtttttggaggataaact

SEQ ID NO: 5049679 - DNA, 25 bp, Homo sapien
tcctggatgtttttggaggataaac

SEQ ID NO: 5049680 - DNA, 25 bp, Homo sapien
ctggatgtttttggaggataaactt

SEQ ID NO: 5049681 - DNA, 25 bp, Homo sapien
tcctccagggattcccgcatacaga

SEQ ID NO: 5049682 - DNA, 25 bp, Homo sapien
tatcctccagggattcccgcataca

SEQ ID NO: 5049683 - DNA, 25 bp, Homo sapien
ctgagtatcctccagggattcccgc

SEQ ID NO: 5049684 - DNA, 25 bp, Homo sapien
gagtatcctccagggattcccgcat

SEQ ID NO: 5049685 - DNA, 25 bp, Homo sapien
gccctgtttacacgagaagcctgag

SEQ ID NO: 5049686 - DNA, 25 bp, Homo sapien
gacgatttccccaactgagtagtga

SEQ ID NO: 5049687 - DNA, 25 bp, Homo sapien
ggatttttatccgaagctggtgcca

SEQ ID NO: 5049688 - DNA, 25 bp, Homo sapien
tgaggctgcctcacttacagaagga

SEQ ID NO: 5049689 - DNA, 25 bp, Homo sapien
ctcctctcttcaggacctgggctta

SEQ ID NO: 5049690 - DNA, 25 bp, Homo sapien
cctctcttcaggacctgggcttagc

SEQ ID NO: 5049691 - DNA, 25 bp, Homo sapien
cttcaggacctgggcttagccactg

SEQ ID NO: 5049692 - DNA, 25 bp, Homo sapien
ctcttcaggacctgggcttagccac

SEQ ID NO: 5049693 - DNA, 25 bp, Homo sapien
caccgtggtttcagttgccctagag

SEQ ID NO: 5049694 - DNA, 25 bp, Homo sapien
cacccgtgtgtttggattgaatgac

SEQ ID NO: 5049695 - DNA, 25 bp, Homo sapien
tctttacatggtggcgtatcgctgc

SEQ ID NO: 5049696 - DNA, 25 bp, Homo sapien
agtcatgccctctttgtcaccgtgg

SEQ ID NO: 5049697 - DNA, 25 bp, Homo sapien
catgggctggatgtctacttggaca

SEQ ID NO: 5049698 - DNA, 25 bp, Homo sapien
gccatttgtgaaggtgccatctcca

SEQ ID NO: 5049699 - DNA, 25 bp, Homo sapien
aaaatatatacagggctgcgtaccg

SEQ ID NO: 5049700 - DNA, 25 bp, Homo sapien
gaaagatgcaaacccttgtgtaagt

SEQ ID NO: 5049701 - DNA, 25 bp, Homo sapien
ggcatctggttcactgggcactgag

SEQ ID NO: 5049702 - DNA, 25 bp, Homo sapien
tcaacgtgctcagtcaatagtggct

SEQ ID NO: 5049703 - DNA, 25 bp, Homo sapien
gaaacaggtgatgtccttggaagac

SEQ ID NO: 5049704 - DNA, 25 bp, Homo sapien
atcggcagcccgagttgcacaaagg

SEQ ID NO: 5049705 - DNA, 25 bp, Homo sapien
aatgcagctgaagtcagctcagcca

SEQ ID NO: 5049706 - DNA, 25 bp, Homo sapien
tggaggggggatattttccaatgca

SEQ ID NO: 5049707 - DNA, 25 bp, Homo sapien
tattttccaatgcagctgaagtcag

SEQ ID NO: 5049708 - DNA, 25 bp, Homo sapien
ctccccacactggcgtcctgtccat

SEQ ID NO: 5049709 - DNA, 25 bp, Homo sapien
tatgagaaatacctggcgtggcagc

SEQ ID NO: 5049710 - DNA, 25 bp, Homo sapien
tcggctttggcagtgagacccagca

SEQ ID NO: 5049711 - DNA, 25 bp, Homo sapien
tcacgatagcagcactgagaaggct

SEQ ID NO: 5049712 - DNA, 25 bp, Homo sapien
cgaaaggttacttagccacagcagg

SEQ ID NO: 5049713 - DNA, 25 bp, Homo sapien
taaagtcccctcagtgaatctggag

SEQ ID NO: 5049714 - DNA, 25 bp, Homo sapien
cttgagacaggccagtaaaccgtgt

SEQ ID NO: 5049715 - DNA, 25 bp, Homo sapien
gagaactgtcaactttggcctagag

SEQ ID NO: 5049716 - DNA, 25 bp, Homo sapien
tgaggttcgcagactccttcgaagg

SEQ ID NO: 5049717 - DNA, 25 bp, Homo sapien
aagatggtttgggtcgtcttgccca

SEQ ID NO: 5049718 - DNA, 25 bp, Homo sapien
gatagcgcataccagtttaacaaag

SEQ ID NO: 5049719 - DNA, 25 bp, Homo sapien
tctgaactggcaagctaagatggtt

SEQ ID NO: 5049720 - DNA, 25 bp, Homo sapien
ggaaaaggaaccacagccacatact

SEQ ID NO: 5049721 - DNA, 25 bp, Homo sapien
taaggcatagtctgctgggaaggaa

SEQ ID NO: 5049722 - DNA, 25 bp, Homo sapien
taagaaaagacgagttggaccaatg

SEQ ID NO: 5049723 - DNA, 25 bp, Homo sapien
atccatgcttcatgctcagatgtga

SEQ ID NO: 5049724 - DNA, 25 bp, Homo sapien
tggaccaatggaaattaacaccaac

SEQ ID NO: 5049725 - DNA, 25 bp, Homo sapien
gatgtgaatgaccatgctgttgcgg

SEQ ID NO: 5049726 - DNA, 25 bp, Homo sapien
aagcttggcgctgaaggagttctgc

SEQ ID NO: 5049727 - DNA, 25 bp, Homo sapien
cgccatagtcctgcgagcggtagca

SEQ ID NO: 5049728 - DNA, 25 bp, Homo sapien
ctctggtggtcggtaaagctgtgta

SEQ ID NO: 5049729 - DNA, 25 bp, Homo sapien
gaacccaatggtagtcaacgtgatg

SEQ ID NO: 5049730 - DNA, 25 bp, Homo sapien
gacacgtcagtgttgcgcatgccac

SEQ ID NO: 5049731 - DNA, 25 bp, Homo sapien
gcaggtagcgcacgaaggtgttcat

SEQ ID NO: 5049732 - DNA, 25 bp, Homo sapien
aaagctaaaggccacgtagagcggc

SEQ ID NO: 5049733 - DNA, 25 bp, Homo sapien
gatgagaagaacagagagagcaagt

SEQ ID NO: 5049734 - DNA, 25 bp, Homo sapien
tgggaaggggatgagaagaacagag

SEQ ID NO: 5049735 - DNA, 25 bp, Homo sapien
tgtgggaaggggatgagaagaacag

SEQ ID NO: 5049736 - DNA, 25 bp, Homo sapien
ggggatgagaagaacagagagagca

SEQ ID NO: 5049737 - DNA, 25 bp, Homo sapien
tgccgctccttcctgcatgaagctg

SEQ ID NO: 5049738 - DNA, 25 bp, Homo sapien
tctgacggctctagctcacacttct

SEQ ID NO: 5049739 - DNA, 25 bp, Homo sapien
ccccaggatcctctgccgctccttc

SEQ ID NO: 5049740 - DNA, 25 bp, Homo sapien
cctgcatgaagctgcctctgacggc

SEQ ID NO: 5049741 - DNA, 25 bp, Homo sapien
tagaagagaacctccagttcacccg

SEQ ID NO: 5049742 - DNA, 25 bp, Homo sapien
gaagagaacctccagttcacccggc

SEQ ID NO: 5049743 - DNA, 25 bp, Homo sapien
gagaacctccagttcacccggccca

SEQ ID NO: 5049744 - DNA, 25 bp, Homo sapien
ctagaagagaacctccagttcaccc

SEQ ID NO: 5049745 - DNA, 25 bp, Homo sapien
gccggtgatgcccaactcgacaggg

SEQ ID NO: 5049746 - DNA, 25 bp, Homo sapien
gcccaactcgacagggcaggccggt

SEQ ID NO: 5049747 - DNA, 25 bp, Homo sapien
cagtcagaggcaactgacacccggg

SEQ ID NO: 5049748 - DNA, 25 bp, Homo sapien
ctccacagtcagaggcaactgacac

SEQ ID NO: 5049749 - DNA, 25 bp, Homo sapien
ggaagcctgcggcaagcatcccact

SEQ ID NO: 5049750 - DNA, 25 bp, Homo sapien
cactcatcctcccatgagcttcggc

SEQ ID NO: 5049751 - DNA, 25 bp, Homo sapien
tggctcccacggaagcctgcggcaa

SEQ ID NO: 5049752 - DNA, 25 bp, Homo sapien
tcaggccccggaatgaactcggcat

SEQ ID NO: 5049753 - DNA, 25 bp, Homo sapien
ccagagatgagcttggacccgttga

SEQ ID NO: 5049754 - DNA, 25 bp, Homo sapien
tggggcaccggttggctccagagat

SEQ ID NO: 5049755 - DNA, 25 bp, Homo sapien
gatgagcttggacccgttgatttgg

SEQ ID NO: 5049756 - DNA, 25 bp, Homo sapien
ttaattatgtaagccctgaagcctg

SEQ ID NO: 5049757 - DNA, 25 bp, Homo sapien
tgtgcagtgctgacaatttgctgct

SEQ ID NO: 5049758 - DNA, 25 bp, Homo sapien
cagtgctgacaatttgctgctgtcc

SEQ ID NO: 5049759 - DNA, 25 bp, Homo sapien
gtgctgacaatttgctgctgtcccc

SEQ ID NO: 5049760 - DNA, 25 bp, Homo sapien
aatgatgcaccttgtaggggccccc

SEQ ID NO: 5049761 - DNA, 25 bp, Homo sapien
agattttctggagcgctgaggtggg

SEQ ID NO: 5049762 - DNA, 25 bp, Homo sapien
ctgactaggcagattttctggagcg

SEQ ID NO: 5049763 - DNA, 25 bp, Homo sapien
cagattttctggagcgctgaggtgg

SEQ ID NO: 5049764 - DNA, 25 bp, Homo sapien
actaggcagattttctggagcgctg

SEQ ID NO: 5049765 - DNA, 25 bp, Homo sapien
ccacgtgggctcccattctcagacc

SEQ ID NO: 5049766 - DNA, 25 bp, Homo sapien
acgtgggctcccattctcagaccaa

SEQ ID NO: 5049767 - DNA, 25 bp, Homo sapien
cacgtgggctcccattctcagacca

SEQ ID NO: 5049768 - DNA, 25 bp, Homo sapien
attcagattcgtgggctgctgtttt

SEQ ID NO: 5049769 - DNA, 25 bp, Homo sapien
ggcacactcgctcggggctcgcacg

SEQ ID NO: 5049770 - DNA, 25 bp, Homo sapien
tccccgaagggtgaggctcggaggc

SEQ ID NO: 5049771 - DNA, 25 bp, Homo sapien
cacactcgctcggggctcgcacgcc

SEQ ID NO: 5049772 - DNA, 25 bp, Homo sapien
tcaggcacactcgctcggggctcgc

SEQ ID NO: 5049773 - DNA, 25 bp, Homo sapien
ggtgcggttccgactgcaggatcac

SEQ ID NO: 5049774 - DNA, 25 bp, Homo sapien
aaggagccggcgaatttccactgga

SEQ ID NO: 5049775 - DNA, 25 bp, Homo sapien
ccgtgatcgcaaagtagaaggagcc

SEQ ID NO: 5049776 - DNA, 25 bp, Homo sapien
cagacgatgagggacagagtccgca

SEQ ID NO: 5049777 - DNA, 25 bp, Homo sapien
gggcatgtcccgcaggctcacagcc

SEQ ID NO: 5049778 - DNA, 25 bp, Homo sapien
agcaaggagccggcgcggggggcat

SEQ ID NO: 5049779 - DNA, 25 bp, Homo sapien
tgtcccgcaggctcacagccgcgcg

SEQ ID NO: 5049780 - DNA, 25 bp, Homo sapien
cgcaggctcacagccgcgcgcgtcc

SEQ ID NO: 5049781 - DNA, 25 bp, Homo sapien
tctgaatcctaaggattttgcctct

SEQ ID NO: 5049782 - DNA, 25 bp, Homo sapien
gaggaacgagaaacactgatgcccc

SEQ ID NO: 5049783 - DNA, 25 bp, Homo sapien
agttgagttcaagggagtcatggca

SEQ ID NO: 5049784 - DNA, 25 bp, Homo sapien
atgcaaaggcaatggagcattcagg

SEQ ID NO: 5049785 - DNA, 25 bp, Homo sapien
tctcccctgggtagtgacaactctg

SEQ ID NO: 5049786 - DNA, 25 bp, Homo sapien
gagtatgggcacttcaggaccgcca

SEQ ID NO: 5049787 - DNA, 25 bp, Homo sapien
ccagagcgggttaggagaacttcct

SEQ ID NO: 5049788 - DNA, 25 bp, Homo sapien
gacctggttcagatcttggcccaag

SEQ ID NO: 5049789 - DNA, 25 bp, Homo sapien
tgtccgtggtgctaaaggcgttcct

SEQ ID NO: 5049790 - DNA, 25 bp, Homo sapien
aaggccaggcggaatacaacaagca

SEQ ID NO: 5049791 - DNA, 25 bp, Homo sapien
gagtccagatctaacgggcatagtc

SEQ ID NO: 5049792 - DNA, 25 bp, Homo sapien
tgtgcacatcgctatcctgagcatg

SEQ ID NO: 5049793 - DNA, 25 bp, Homo sapien
ggagcatagcaatgtggcctgttaa

SEQ ID NO: 5049794 - DNA, 25 bp, Homo sapien
cacaggacatgtggatggaattaaa

SEQ ID NO: 5049795 - DNA, 25 bp, Homo sapien
tacctaatacattaagccatgcagg

SEQ ID NO: 5049796 - DNA, 25 bp, Homo sapien
gcctgttaagggttccaggagaaga

SEQ ID NO: 5049797 - DNA, 25 bp, Homo sapien
gaatttcagatgacggagcatgacg

SEQ ID NO: 5049798 - DNA, 25 bp, Homo sapien
agcatgacggctgcatgattatggg

SEQ ID NO: 5049799 - DNA, 25 bp, Homo sapien
cagatgacggagcatgacggctgca

SEQ ID NO: 5049800 - DNA, 25 bp, Homo sapien
ttccttgtgaatttcagatgacgga

SEQ ID NO: 5049801 - DNA, 25 bp, Homo sapien
gagggaccaaggatcagaagggcag

SEQ ID NO: 5049802 - DNA, 25 bp, Homo sapien
ccaaggatcagaagggcagaaccaa

SEQ ID NO: 5049803 - DNA, 25 bp, Homo sapien
ccaactcgctcagctagtgaagtgc

SEQ ID NO: 5049804 - DNA, 25 bp, Homo sapien
gctagtgaagtgcaatggacatgat

SEQ ID NO: 5049805 - DNA, 25 bp, Homo sapien
ctggccttcaggaggtttctgaatg

SEQ ID NO: 5049806 - DNA, 25 bp, Homo sapien
ttcaggaggtttctgaatgcaccag

SEQ ID NO: 5049807 - DNA, 25 bp, Homo sapien
ccttcaggaggtttctgaatgcacc

SEQ ID NO: 5049808 - DNA, 25 bp, Homo sapien
caggaggtttctgaatgcaccaggg

SEQ ID NO: 5049809 - DNA, 25 bp, Homo sapien
aactgctggactgtattgccaggta

SEQ ID NO: 5049810 - DNA, 25 bp, Homo sapien
tgctggactgtattgccaggtagcc

SEQ ID NO: 5049811 - DNA, 25 bp, Homo sapien
agcagcaactgctggactgtattgc

SEQ ID NO: 5049812 - DNA, 25 bp, Homo sapien
attgccaggtagccagtagcgtggg

SEQ ID NO: 5049813 - DNA, 25 bp, Homo sapien
tatctaatctggatctgtggctgga

SEQ ID NO: 5049814 - DNA, 25 bp, Homo sapien
cttggagcacacacaaggcctgact

SEQ ID NO: 5049815 - DNA, 25 bp, Homo sapien
gaggatactgcgctgtcactgagac

SEQ ID NO: 5049816 - DNA, 25 bp, Homo sapien
cacggtaaagctccaaacgcttgga

SEQ ID NO: 5049817 - DNA, 25 bp, Homo sapien
tgtatcttgatctattgtgcttttg

SEQ ID NO: 5049818 - DNA, 25 bp, Homo sapien
tcttgatctattgtgcttttgaaag

SEQ ID NO: 5049819 - DNA, 25 bp, Homo sapien
tatcttgatctattgtgcttttgaa

SEQ ID NO: 5049820 - DNA, 25 bp, Homo sapien
ctgtatcttgatctattgtgctttt

SEQ ID NO: 5049821 - DNA, 25 bp, Homo sapien
cacgttctgaggcatagaaaattta

SEQ ID NO: 5049822 - DNA, 25 bp, Homo sapien
acaggggatgtgtatcctttctacc

SEQ ID NO: 5049823 - DNA, 25 bp, Homo sapien
cagttcaggtcactcttctacaggg

SEQ ID NO: 5049824 - DNA, 25 bp, Homo sapien
cagatgtcaaatgcaactccagttc

SEQ ID NO: 5049825 - DNA, 25 bp, Homo sapien
gatgggcacccgctttgggatttcc

SEQ ID NO: 5049826 - DNA, 25 bp, Homo sapien
cagcctgtgtatggtccagggaaca

SEQ ID NO: 5049827 - DNA, 25 bp, Homo sapien
tggacatttgcccaccacgggtgga

SEQ ID NO: 5049828 - DNA, 25 bp, Homo sapien
ggagggcctctcttggcatcaacca

SEQ ID NO: 5049829 - DNA, 25 bp, Homo sapien
caggcctgcgcctccagggcacaca

SEQ ID NO: 5049830 - DNA, 25 bp, Homo sapien
aggcctgcgcctccagggcacacac

SEQ ID NO: 5049831 - DNA, 25 bp, Homo sapien
tcaggcctgcgcctccagggcacac

SEQ ID NO: 5049832 - DNA, 25 bp, Homo sapien
ctgtcctcgtggaaccggatgtgga

SEQ ID NO: 5049833 - DNA, 25 bp, Homo sapien
aagtctcccgtgtagaggaagagga

SEQ ID NO: 5049834 - DNA, 25 bp, Homo sapien
agggccccgaggcaggccgactggc

SEQ ID NO: 5049835 - DNA, 25 bp, Homo sapien
tgtggaggaagaagtctcccgtgta

SEQ ID NO: 5049836 - DNA, 25 bp, Homo sapien
cccacgaaggagacggtgtcgtgca

SEQ ID NO: 5049837 - DNA, 25 bp, Homo sapien
ggtcacatggctgtccgtccaccag

SEQ ID NO: 5049838 - DNA, 25 bp, Homo sapien
tgcacgccgttctggtggtcctgga

SEQ ID NO: 5049839 - DNA, 25 bp, Homo sapien
accacagtgagggcgaagggcccta

SEQ ID NO: 5049840 - DNA, 25 bp, Homo sapien
cctgacgctgactcttccccatgac

SEQ ID NO: 5049841 - DNA, 25 bp, Homo sapien
tgtccgagagcattaagcttcctga

SEQ ID NO: 5049842 - DNA, 25 bp, Homo sapien
cagagcagaggtctgtttttgtccg

SEQ ID NO: 5049843 - DNA, 25 bp, Homo sapien
ggcatacaggcaccaaatcccctga

SEQ ID NO: 5049844 - DNA, 25 bp, Homo sapien
actctgggcccgaacaagcggtgtc

SEQ ID NO: 5049845 - DNA, 25 bp, Homo sapien
caatgagaacatgtgaccgcatggc

SEQ ID NO: 5049846 - DNA, 25 bp, Homo sapien
gtaggattcgtgaccccgtcagcag

SEQ ID NO: 5049847 - DNA, 25 bp, Homo sapien
tctaatgaccgtgatgatgatggcg

SEQ ID NO: 5049848 - DNA, 25 bp, Homo sapien
gatcagaggaaatgggctcatttct

SEQ ID NO: 5049849 - DNA, 25 bp, Homo sapien
ggaaatgggctcatttctgcagggc

SEQ ID NO: 5049850 - DNA, 25 bp, Homo sapien
gaggaaatgggctcatttctgcagg

SEQ ID NO: 5049851 - DNA, 25 bp, Homo sapien
gggatcagaggaaatgggctcattt

SEQ ID NO: 5049852 - DNA, 25 bp, Homo sapien
tcccccagcattcggcttctatcgg

SEQ ID NO: 5049853 - DNA, 25 bp, Homo sapien
agcattcggcttctatcggcgctcc

SEQ ID NO: 5049854 - DNA, 25 bp, Homo sapien
gctcccccagcattcggcttctatc

SEQ ID NO: 5049855 - DNA, 25 bp, Homo sapien
cccagcattcggcttctatcggcgc

SEQ ID NO: 5049856 - DNA, 25 bp, Homo sapien
tcacttgtgagagcagctggtgagc

SEQ ID NO: 5049857 - DNA, 25 bp, Homo sapien
ttgtggtcacttgtgagagcagctg

SEQ ID NO: 5049858 - DNA, 25 bp, Homo sapien
agctggtgagcccaacacaggtagg

SEQ ID NO: 5049859 - DNA, 25 bp, Homo sapien
gtgagagcagctggtgagcccaaca

SEQ ID NO: 5049860 - DNA, 25 bp, Homo sapien
agcagctcaagctgggtcctctcct

SEQ ID NO: 5049861 - DNA, 25 bp, Homo sapien
tgccttccccagtagagtggctcca

SEQ ID NO: 5049862 - DNA, 25 bp, Homo sapien
agtagagtggctccaccaccggcag

SEQ ID NO: 5049863 - DNA, 25 bp, Homo sapien
ccatgccttccccagtagagtggct

SEQ ID NO: 5049864 - DNA, 25 bp, Homo sapien
tgattccacagcttgggactccagc

SEQ ID NO: 5049865 - DNA, 25 bp, Homo sapien
gtctgggctctgccaaacactgctt

SEQ ID NO: 5049866 - DNA, 25 bp, Homo sapien
ctccggctgtcgtgacccgtgcagg

SEQ ID NO: 5049867 - DNA, 25 bp, Homo sapien
tcgtgacccgtgcaggactcaggct

SEQ ID NO: 5049868 - DNA, 25 bp, Homo sapien
tgtgaccccaatgagccccaagagg

SEQ ID NO: 5049869 - DNA, 25 bp, Homo sapien
tgaccccaatgagccccaagaggag

SEQ ID NO: 5049870 - DNA, 25 bp, Homo sapien
gtgaccccaatgagccccaagagga

SEQ ID NO: 5049871 - DNA, 25 bp, Homo sapien
ctgtgaccccaatgagccccaagag

SEQ ID NO: 5049872 - DNA, 25 bp, Homo sapien
cccccttgggcgtgacactccccat

SEQ ID NO: 5049873 - DNA, 25 bp, Homo sapien
gcactcccccttgggcgtgacactc

SEQ ID NO: 5049874 - DNA, 25 bp, Homo sapien
tcccccttgggcgtgacactcccca

SEQ ID NO: 5049875 - DNA, 25 bp, Homo sapien
cagggcactcccccttgggcgtgac

SEQ ID NO: 5049876 - DNA, 25 bp, Homo sapien
caacgtccataagccatgagaaccc

SEQ ID NO: 5049877 - DNA, 25 bp, Homo sapien
tggaatggcccttctgtgcagtcct

SEQ ID NO: 5049878 - DNA, 25 bp, Homo sapien
cagtcctctttgcttgcaacgtcca

SEQ ID NO: 5049879 - DNA, 25 bp, Homo sapien
cctgggacagctgtttggaatggcc

SEQ ID NO: 5049880 - DNA, 25 bp, Homo sapien
cctccatccagggatgccagggccc

SEQ ID NO: 5049881 - DNA, 25 bp, Homo sapien
ccaccctccatccagggatgccagg

SEQ ID NO: 5049882 - DNA, 25 bp, Homo sapien
caccctccatccagggatgccaggg

SEQ ID NO: 5049883 - DNA, 25 bp, Homo sapien
accctccatccagggatgccagggc

SEQ ID NO: 5049884 - DNA, 25 bp, Homo sapien
gctttatggcttggatgtgagatga

SEQ ID NO: 5049885 - DNA, 25 bp, Homo sapien
gagatgatggttggagcttaggtgc

SEQ ID NO: 5049886 - DNA, 25 bp, Homo sapien
caggatcctcgggtcgaaggcttta

SEQ ID NO: 5049887 - DNA, 25 bp, Homo sapien
ctgggtgagccccttcggaagccag

SEQ ID NO: 5049888 - DNA, 25 bp, Homo sapien
cagtgccctgcgacttcccctgctc

SEQ ID NO: 5049889 - DNA, 25 bp, Homo sapien
agtgccctgcgacttcccctgctcc

SEQ ID NO: 5049890 - DNA, 25 bp, Homo sapien
aagacttcctgaagcacatccagcc

SEQ ID NO: 5049891 - DNA, 25 bp, Homo sapien
agcccccagcaacccgccatggcct

SEQ ID NO: 5049892 - DNA, 25 bp, Homo sapien
tccaggaagacttcctgaagcacat

SEQ ID NO: 5049893 - DNA, 25 bp, Homo sapien
cccagcaacccgccatggcctgcat

SEQ ID NO: 5049894 - DNA, 25 bp, Homo sapien
gggccaaagccatcggtcttggctg

SEQ ID NO: 5049895 - DNA, 25 bp, Homo sapien
gaaggacgggccaaagccatcggtc

SEQ ID NO: 5049896 - DNA, 25 bp, Homo sapien
caaagccatcggtcttggctgcctg

SEQ ID NO: 5049897 - DNA, 25 bp, Homo sapien
gtgatgagatggccctcggccagcc

SEQ ID NO: 5049898 - DNA, 25 bp, Homo sapien
gaatcagtgaacctaggagcatgca

SEQ ID NO: 5049899 - DNA, 25 bp, Homo sapien
tcctcggataacttgtgctgagtga

SEQ ID NO: 5049900 - DNA, 25 bp, Homo sapien
gagccatgagctccgagcctcgtct

SEQ ID NO: 5049901 - DNA, 25 bp, Homo sapien
accctccaggtcctcggataacttg

SEQ ID NO: 5049902 - DNA, 25 bp, Homo sapien
aggacagcatgtcgcaggaggagcc

SEQ ID NO: 5049903 - DNA, 25 bp, Homo sapien
ccagggattagggatgaggacagca

SEQ ID NO: 5049904 - DNA, 25 bp, Homo sapien
ggtataaggacagcaggtcgcagga

SEQ ID NO: 5049905 - DNA, 25 bp, Homo sapien
gaggacagcatgtcgcaggaggagc

SEQ ID NO: 5049906 - DNA, 25 bp, Homo sapien
gcaagaggaatacagggtctccacg

SEQ ID NO: 5049907 - DNA, 25 bp, Homo sapien
cagggacgagaaccaacagcagttg

SEQ ID NO: 5049908 - DNA, 25 bp, Homo sapien
atacagggtctccacgggccatctt

SEQ ID NO: 5049909 - DNA, 25 bp, Homo sapien
tactcgtgcagggacgagaaccaac

SEQ ID NO: 5049910 - DNA, 25 bp, Homo sapien
gatccacatggagacccagatccac

SEQ ID NO: 5049911 - DNA, 25 bp, Homo sapien
gatccacatccaacttgagcagctc

SEQ ID NO: 5049912 - DNA, 25 bp, Homo sapien
cagatccacatccaacttgagcagc

SEQ ID NO: 5049913 - DNA, 25 bp, Homo sapien
gcccagatccacatggagacccaga

SEQ ID NO: 5049914 - DNA, 25 bp, Homo sapien
cattctgcacaagtagcagtggatg

SEQ ID NO: 5049915 - DNA, 25 bp, Homo sapien
gtagcagtggatggcccagaagtca

SEQ ID NO: 5049916 - DNA, 25 bp, Homo sapien
gagtcacctgacatcaggtccatgg

SEQ ID NO: 5049917 - DNA, 25 bp, Homo sapien
catcctgagtcacctgacatcaggt

SEQ ID NO: 5049918 - DNA, 25 bp, Homo sapien
catgaaaattccgtgccctgtctcc

SEQ ID NO: 5049919 - DNA, 25 bp, Homo sapien
tagcccacccatgtaatccgggata

SEQ ID NO: 5049920 - DNA, 25 bp, Homo sapien
tgaggataaccctgtagacacatgg

SEQ ID NO: 5049921 - DNA, 25 bp, Homo sapien
tagagcagtaacaggaagaatgtcc

SEQ ID NO: 5049922 - DNA, 25 bp, Homo sapien
cagcatcccagcccggacacctcct

SEQ ID NO: 5049923 - DNA, 25 bp, Homo sapien
agcatcccagcccggacacctcctg

SEQ ID NO: 5049924 - DNA, 25 bp, Homo sapien
catcccagcccggacacctcctgag

SEQ ID NO: 5049925 - DNA, 25 bp, Homo sapien
tcccagcccggacacctcctgagcc

SEQ ID NO: 5049926 - DNA, 25 bp, Homo sapien
cccggttgggtgtgatgggattcac

SEQ ID NO: 5049927 - DNA, 25 bp, Homo sapien
aaggttccatgctgtaaggaggctg

SEQ ID NO: 5049928 - DNA, 25 bp, Homo sapien
tgtgtgctctcgtgagtcccctgca

SEQ ID NO: 5049929 - DNA, 25 bp, Homo sapien
gacgtgaccagggaagcccttcttc

SEQ ID NO: 5049930 - DNA, 25 bp, Homo sapien
tcgaaatctgacaaggcacgtacac

SEQ ID NO: 5049931 - DNA, 25 bp, Homo sapien
tcagcgagctctttgccaagggcag

SEQ ID NO: 5049932 - DNA, 25 bp, Homo sapien
tcgcgtggagcagctagtgagacct

SEQ ID NO: 5049933 - DNA, 25 bp, Homo sapien
ataaaggtccgccagagtgagcaca

SEQ ID NO: 5049934 - DNA, 25 bp, Homo sapien
tgacttccgcgatcataaggagggt

SEQ ID NO: 5049935 - DNA, 25 bp, Homo sapien
tctttgcgtgatgcttgccgtgcct

SEQ ID NO: 5049936 - DNA, 25 bp, Homo sapien
gacaaacgtgtgtgacagcacagca

SEQ ID NO: 5049937 - DNA, 25 bp, Homo sapien
tcctccacggctcagggtgggactc

SEQ ID NO: 5049938 - DNA, 25 bp, Homo sapien
gcatcacatgtggtaagcgccccat

SEQ ID NO: 5049939 - DNA, 25 bp, Homo sapien
ggctgaagtgctgcgtctcaaacca

SEQ ID NO: 5049940 - DNA, 25 bp, Homo sapien
tgagctgcctaacaacctgctgaag

SEQ ID NO: 5049941 - DNA, 25 bp, Homo sapien
gactgccaattggtttgctcagcac

SEQ ID NO: 5049942 - DNA, 25 bp, Homo sapien
caggacgagctggttcaggagtcct

SEQ ID NO: 5049943 - DNA, 25 bp, Homo sapien
tgctccaggacgagctggttcagga

SEQ ID NO: 5049944 - DNA, 25 bp, Homo sapien
tccaggacgagctggttcaggagtc

SEQ ID NO: 5049945 - DNA, 25 bp, Homo sapien
aggtgctccaggacgagctggttca

SEQ ID NO: 5049946 - DNA, 25 bp, Homo sapien
gtgagccttggtcaaggaaaacgca

SEQ ID NO: 5049947 - DNA, 25 bp, Homo sapien
tgagccttggtcaaggaaaacgcaa

SEQ ID NO: 5049948 - DNA, 25 bp, Homo sapien
gagccttggtcaaggaaaacgcaac

SEQ ID NO: 5049949 - DNA, 25 bp, Homo sapien
gccttggtcaaggaaaacgcaactc

SEQ ID NO: 5049950 - DNA, 25 bp, Homo sapien
catgcatatccgacttcctttcagc

SEQ ID NO: 5049951 - DNA, 25 bp, Homo sapien
ctgcatgcatatccgacttcctttc

SEQ ID NO: 5049952 - DNA, 25 bp, Homo sapien
gcatgcatatccgacttcctttcag

SEQ ID NO: 5049953 - DNA, 25 bp, Homo sapien
atgcatatccgacttcctttcagcc

SEQ ID NO: 5049954 - DNA, 25 bp, Homo sapien
ctgggcaaaggtgcccccaggccca

SEQ ID NO: 5049955 - DNA, 25 bp, Homo sapien
caggcccaggtggcccctggaaaag

SEQ ID NO: 5049956 - DNA, 25 bp, Homo sapien
ttcttagaggttggaaccctgggca

SEQ ID NO: 5049957 - DNA, 25 bp, Homo sapien
tcttagaggttggaaccctgggcaa

SEQ ID NO: 5049958 - DNA, 25 bp, Homo sapien
tgcttggggtttgcaaattgcccct

SEQ ID NO: 5049959 - DNA, 25 bp, Homo sapien
gcagatgcccagcttgctgtggatc

SEQ ID NO: 5049960 - DNA, 25 bp, Homo sapien
aaactctcaaagttgaacttgtcca

SEQ ID NO: 5049961 - DNA, 25 bp, Homo sapien
ggaaactctcaaagttgaacttgtc

SEQ ID NO: 5049962 - DNA, 25 bp, Homo sapien
gttgagtttgacaacagtaccaggt

SEQ ID NO: 5049963 - DNA, 25 bp, Homo sapien
ctctcagttgagtttgacaacagta

SEQ ID NO: 5049964 - DNA, 25 bp, Homo sapien
tgagtttgacaacagtaccaggttc

SEQ ID NO: 5049965 - DNA, 25 bp, Homo sapien
cagttgagtttgacaacagtaccag

SEQ ID NO: 5049966 - DNA, 25 bp, Homo sapien
cccgctaagtggagctgaacctata

SEQ ID NO: 5049967 - DNA, 25 bp, Homo sapien
tggagagaacgactcagtagagagc

SEQ ID NO: 5049968 - DNA, 25 bp, Homo sapien
gactcaatgcctcagacatagcagg

SEQ ID NO: 5049969 - DNA, 25 bp, Homo sapien
cagagtcctcagaagagcggagaca

SEQ ID NO: 5049970 - DNA, 25 bp, Homo sapien
gatcatctccgtgtgggttcttcgc

SEQ ID NO: 5049971 - DNA, 25 bp, Homo sapien
ggttcttcgcatgctgtgacacaca

SEQ ID NO: 5049972 - DNA, 25 bp, Homo sapien
gcaaacttggtttcaagcgcccacg

SEQ ID NO: 5049973 - DNA, 25 bp, Homo sapien
gcaaatgctctaagacaggaaggga

SEQ ID NO: 5049974 - DNA, 25 bp, Homo sapien
atgaaattggaaaacgacgaatgaa

SEQ ID NO: 5049975 - DNA, 25 bp, Homo sapien
caaaagtagtttccggcctctggag

SEQ ID NO: 5049976 - DNA, 25 bp, Homo sapien
tatgaaattggaaaacgacgaatga

SEQ ID NO: 5049977 - DNA, 25 bp, Homo sapien
ccagggcaaagtcgaaggcggtact

SEQ ID NO: 5049978 - DNA, 25 bp, Homo sapien
ggcacgggtgaaaccacactgagca

SEQ ID NO: 5049979 - DNA, 25 bp, Homo sapien
cggaaggcacgggtgaaaccacact

SEQ ID NO: 5049980 - DNA, 25 bp, Homo sapien
tcactggcgctgaccccggaaggca

SEQ ID NO: 5049981 - DNA, 25 bp, Homo sapien
gcaggatgctgcctgttcacctctg

SEQ ID NO: 5049982 - DNA, 25 bp, Homo sapien
caggatgctgcctgttcacctctgc

SEQ ID NO: 5049983 - DNA, 25 bp, Homo sapien
tgccagaagtgtctggaagtttcca

SEQ ID NO: 5049984 - DNA, 25 bp, Homo sapien
ggtccccgagacaaactggtgagct

SEQ ID NO: 5049985 - DNA, 25 bp, Homo sapien
gccagaagtgtctggaagtttccaa

SEQ ID NO: 5049986 - DNA, 25 bp, Homo sapien
gggagacacagggtccccgagacaa

SEQ ID NO: 5049987 - DNA, 25 bp, Homo sapien
cactggtgtcaggacttggtgtctc

SEQ ID NO: 5049988 - DNA, 25 bp, Homo sapien
gccaggtgcggagccgtgagggtca

SEQ ID NO: 5049989 - DNA, 25 bp, Homo sapien
tgcaagcaccacaagagaattaacc

SEQ ID NO: 5049990 - DNA, 25 bp, Homo sapien
ggtctgacaggaatgcaagcaccac

SEQ ID NO: 5049991 - DNA, 25 bp, Homo sapien
ccaggcttggcttaagaaccgtgta

SEQ ID NO: 5049992 - DNA, 25 bp, Homo sapien
aggcttggcttaagaaccgtgtagg

SEQ ID NO: 5049993 - DNA, 25 bp, Homo sapien
cttaagaaccgtgtaggtggtgaga

SEQ ID NO: 5049994 - DNA, 25 bp, Homo sapien
cttggcttaagaaccgtgtaggtgg

SEQ ID NO: 5049995 - DNA, 25 bp, Homo sapien
accccaggtgtccccttctcaaatg

SEQ ID NO: 5049996 - DNA, 25 bp, Homo sapien
ttctcaaatggctgtggcagctcca

SEQ ID NO: 5049997 - DNA, 25 bp, Homo sapien
tctcaaatggctgtggcagctccat

SEQ ID NO: 5049998 - DNA, 25 bp, Homo sapien
ctcacttccaagaccccaggtgtcc

SEQ ID NO: 5049999 - DNA, 25 bp, Homo sapien
gctgcaccctctaaatgcggtgtcc

SEQ ID NO: 5050000 - DNA, 25 bp, Homo sapien
cgctcagatcctgccggcggtccat

SEQ ID NO: 5050001 - DNA, 25 bp, Homo sapien
agcagccgcagcgtttgggtgcttc

SEQ ID NO: 5050002 - DNA, 25 bp, Homo sapien
tgcttcggtgccaggtccgctgcac

SEQ ID NO: 5050003 - DNA, 25 bp, Homo sapien
gccgagtgtgcatctgacccacaga

SEQ ID NO: 5050004 - DNA, 25 bp, Homo sapien
cgaagtaaggtagagccatttccac

SEQ ID NO: 5050005 - DNA, 25 bp, Homo sapien
gtctgaggtctgtaaggtgctgtcc

SEQ ID NO: 5050006 - DNA, 25 bp, Homo sapien
ctgtccggcgttgcgaagtaaggta

SEQ ID NO: 5050007 - DNA, 25 bp, Homo sapien
tgctgggtcctcaaatgtgggctct

SEQ ID NO: 5050008 - DNA, 25 bp, Homo sapien
tttaacagcaaagatgcccggatgc

SEQ ID NO: 5050009 - DNA, 25 bp, Homo sapien
tacggtggtacgatcgatctcggct

SEQ ID NO: 5050010 - DNA, 25 bp, Homo sapien
tgttgctacttcctcagacgccatc

SEQ ID NO: 5050011 - DNA, 25 bp, Homo sapien
cttgaatagtcactacggtatctct

SEQ ID NO: 5050012 - DNA, 25 bp, Homo sapien
gggagacaaactgcccatcctctga

SEQ ID NO: 5050013 - DNA, 25 bp, Homo sapien
atagtcactacggtatctctgaaag

SEQ ID NO: 5050014 - DNA, 25 bp, Homo sapien
gaggacttggggtggattatctcca

SEQ ID NO: 5050015 - DNA, 25 bp, Homo sapien
cggtcagctcatgctcggtggagtt

SEQ ID NO: 5050016 - DNA, 25 bp, Homo sapien
aggatgagtgcctcgctgctcctgg

SEQ ID NO: 5050017 - DNA, 25 bp, Homo sapien
gcactcgccggcgtgcaggatgagt

SEQ ID NO: 5050018 - DNA, 25 bp, Homo sapien
tgctgacggtcagctcatgctcggt

SEQ ID NO: 5050019 - DNA, 25 bp, Homo sapien
aacattcattagctctgacagctgc

SEQ ID NO: 5050020 - DNA, 25 bp, Homo sapien
tagcacagcgtcaacagggtgccgc

SEQ ID NO: 5050021 - DNA, 25 bp, Homo sapien
tcaccatttatatcatgtagcacag

SEQ ID NO: 5050022 - DNA, 25 bp, Homo sapien
tgccttccccagaggtttggcgctt

SEQ ID NO: 5050023 - DNA, 25 bp, Homo sapien
atggcacaggaatgagcagcatcaa

SEQ ID NO: 5050024 - DNA, 25 bp, Homo sapien
cggtgcttacgaaatggcacaggaa

SEQ ID NO: 5050025 - DNA, 25 bp, Homo sapien
caggaatgagcagcatcaatacaca

SEQ ID NO: 5050026 - DNA, 25 bp, Homo sapien
agaatacggtgcttacgaaatggca

SEQ ID NO: 5050027 - DNA, 25 bp, Homo sapien
acacagtccacaacacaggtagaaa

SEQ ID NO: 5050028 - DNA, 25 bp, Homo sapien
gaatacctgcattatactcaccaag

SEQ ID NO: 5050029 - DNA, 25 bp, Homo sapien
catttcaagttttgggatgctcaac

SEQ ID NO: 5050030 - DNA, 25 bp, Homo sapien
gatgctcaacccacgttatgttcaa

SEQ ID NO: 5050031 - DNA, 25 bp, Homo sapien
tctgatggtaaacaagggcctccct

SEQ ID NO: 5050032 - DNA, 25 bp, Homo sapien
catgcactgtgcagagagactaccc

SEQ ID NO: 5050033 - DNA, 25 bp, Homo sapien
caagagatgctcacgacggctatgg

SEQ ID NO: 5050034 - DNA, 25 bp, Homo sapien
actaatgtgttagcctgggatcccc

SEQ ID NO: 5050035 - DNA, 25 bp, Homo sapien
tggatgacacatggaactcgggagc

SEQ ID NO: 5050036 - DNA, 25 bp, Homo sapien
gatagaatgtcaacctgctcctgcc

SEQ ID NO: 5050037 - DNA, 25 bp, Homo sapien
gatcattcgctaggagacagtgcag

SEQ ID NO: 5050038 - DNA, 25 bp, Homo sapien
taaaatgggtcctctcaagacagac

SEQ ID NO: 5050039 - DNA, 25 bp, Homo sapien
ggcagcgtccagaggataacagcac

SEQ ID NO: 5050040 - DNA, 25 bp, Homo sapien
agcctggcttgatgctgcgcatgcg

SEQ ID NO: 5050041 - DNA, 25 bp, Homo sapien
agggcgacagcttgcttggcagacc

SEQ ID NO: 5050042 - DNA, 25 bp, Homo sapien
agcaccgtcaaagaggaagcagggc

SEQ ID NO: 5050043 - DNA, 25 bp, Homo sapien
tctatcggacagaagggcacatgat

SEQ ID NO: 5050044 - DNA, 25 bp, Homo sapien
cacattatggggtatctatcggaca

SEQ ID NO: 5050045 - DNA, 25 bp, Homo sapien
gatgatcaacatgtatcgtattttt

SEQ ID NO: 5050046 - DNA, 25 bp, Homo sapien
ggagacctagatttactgatgtgga

SEQ ID NO: 5050047 - DNA, 25 bp, Homo sapien
ggaagtagagttccatcccctctaa

SEQ ID NO: 5050048 - DNA, 25 bp, Homo sapien
tgtataacaagtttgaatgactagc

SEQ ID NO: 5050049 - DNA, 25 bp, Homo sapien
tcttccctccacaaaatcaaggtac

SEQ ID NO: 5050050 - DNA, 25 bp, Homo sapien
gagtatctaagaggcctgttcaagg

SEQ ID NO: 5050051 - DNA, 25 bp, Homo sapien
gcagagggtcaccgtaagttctgaa

SEQ ID NO: 5050052 - DNA, 25 bp, Homo sapien
cttgcagagggtcaccgtaagttct

SEQ ID NO: 5050053 - DNA, 25 bp, Homo sapien
tgcagagggtcaccgtaagttctga

SEQ ID NO: 5050054 - DNA, 25 bp, Homo sapien
ttgcagagggtcaccgtaagttctg

SEQ ID NO: 5050055 - DNA, 25 bp, Homo sapien
gaggaatgtaacacccccagatagg

SEQ ID NO: 5050056 - DNA, 25 bp, Homo sapien
gaatgccaatgtcagagggttctcg

SEQ ID NO: 5050057 - DNA, 25 bp, Homo sapien
tgggatgcccgacgcaacacccagg

SEQ ID NO: 5050058 - DNA, 25 bp, Homo sapien
ttctcgggagtgtgcatgggatgcc

SEQ ID NO: 5050059 - DNA, 25 bp, Homo sapien
caggccgtgaataaataggactgct

SEQ ID NO: 5050060 - DNA, 25 bp, Homo sapien
gtctagcaggccgtgaataaatagg

SEQ ID NO: 5050061 - DNA, 25 bp, Homo sapien
tggagtctagcaggccgtgaataaa

SEQ ID NO: 5050062 - DNA, 25 bp, Homo sapien
taaataggactgctcttccttccca

SEQ ID NO: 5050063 - DNA, 25 bp, Homo sapien
tgttacgaaaatacttgcaggagtc

SEQ ID NO: 5050064 - DNA, 25 bp, Homo sapien
cattttgttgcatgtaccagcagtt

SEQ ID NO: 5050065 - DNA, 25 bp, Homo sapien
cacttttcggagataacaggtcatt

SEQ ID NO: 5050066 - DNA, 25 bp, Homo sapien
gaggaactgcctgactgattttcta

SEQ ID NO: 5050067 - DNA, 25 bp, Homo sapien
tctgaccaccctagttacaatttat

SEQ ID NO: 5050068 - DNA, 25 bp, Homo sapien
tggaattagtagtaatgccacctct

SEQ ID NO: 5050069 - DNA, 25 bp, Homo sapien
tagggatgtcccatcacacccggct

SEQ ID NO: 5050070 - DNA, 25 bp, Homo sapien
tggcacgatcgtaggtcactcaagg

SEQ ID NO: 5050071 - DNA, 25 bp, Homo sapien
tacacatacaaagtaggtggagctg

SEQ ID NO: 5050072 - DNA, 25 bp, Homo sapien
aaataacaactaggcactttcggag

SEQ ID NO: 5050073 - DNA, 25 bp, Homo sapien
tgacgttttcaactaccatggtggg

SEQ ID NO: 5050074 - DNA, 25 bp, Homo sapien
aaaataaaccagttgcggtcctctg

SEQ ID NO: 5050075 - DNA, 25 bp, Homo sapien
ccccttcgaggatagacaggtaagc

SEQ ID NO: 5050076 - DNA, 25 bp, Homo sapien
cgaggatagacaggtaagcatttaa

SEQ ID NO: 5050077 - DNA, 25 bp, Homo sapien
accgcccccttcgaggatagacagg

SEQ ID NO: 5050078 - DNA, 25 bp, Homo sapien
ggaggaggggctgcacgggatcccc

SEQ ID NO: 5050079 - DNA, 25 bp, Homo sapien
acaccaggacgagctcggaggtgaa

SEQ ID NO: 5050080 - DNA, 25 bp, Homo sapien
ctagccggacacgaacaccaggacg

SEQ ID NO: 5050081 - DNA, 25 bp, Homo sapien
ggacacgaacaccaggacgagctcg

SEQ ID NO: 5050082 - DNA, 25 bp, Homo sapien
cgaacaccaggacgagctcggaggt

SEQ ID NO: 5050083 - DNA, 25 bp, Homo sapien
ctacggaggaatgggagccacagag

SEQ ID NO: 5050084 - DNA, 25 bp, Homo sapien
ttcattcacctccagcttctagatt

SEQ ID NO: 5050085 - DNA, 25 bp, Homo sapien
gtccccagctggcaggagcttcatt

SEQ ID NO: 5050086 - DNA, 25 bp, Homo sapien
cagctggcaggagcttcattcacct

SEQ ID NO: 5050087 - DNA, 25 bp, Homo sapien
ggcagttctcatgtaacacctggtt

SEQ ID NO: 5050088 - DNA, 25 bp, Homo sapien
tcagcaacttggccccatggcacgg

SEQ ID NO: 5050089 - DNA, 25 bp, Homo sapien
agcaacttggccccatggcacggat

SEQ ID NO: 5050090 - DNA, 25 bp, Homo sapien
gagaggcagttctcatgtaacacct

SEQ ID NO: 5050091 - DNA, 25 bp, Homo sapien
gagagattcctgtaatatccttcag

SEQ ID NO: 5050092 - DNA, 25 bp, Homo sapien
gggagggtgctgactcgggtgaaaa

SEQ ID NO: 5050093 - DNA, 25 bp, Homo sapien
gggtgaaaaatacagacggctcgac

SEQ ID NO: 5050094 - DNA, 25 bp, Homo sapien
ggcccgggcctccagagtatttgaa

SEQ ID NO: 5050095 - DNA, 25 bp, Homo sapien
gaagccaccatattgtttcgcacag

SEQ ID NO: 5050096 - DNA, 25 bp, Homo sapien
ccttggctcgtgtgaacagtgctgc

SEQ ID NO: 5050097 - DNA, 25 bp, Homo sapien
catgactacatattgacaggttccc

SEQ ID NO: 5050098 - DNA, 25 bp, Homo sapien
taatggccatcctaagggacacaaa

SEQ ID NO: 5050099 - DNA, 25 bp, Homo sapien
tgtttgtacccaacacaagacttgg

SEQ ID NO: 5050100 - DNA, 25 bp, Homo sapien
gagtctctgtgatcctgcaaagccc

SEQ ID NO: 5050101 - DNA, 25 bp, Homo sapien
tcaataaacagcacggagcacgttc

SEQ ID NO: 5050102 - DNA, 25 bp, Homo sapien
cacctgctagggaatcatcaacttt

SEQ ID NO: 5050103 - DNA, 25 bp, Homo sapien
taaaagctcactgcgggcagggacc

SEQ ID NO: 5050104 - DNA, 25 bp, Homo sapien
gcacaagtgcttggatccttcaaca

SEQ ID NO: 5050105 - DNA, 25 bp, Homo sapien
cacgctgcagcacaagtgcttggat

SEQ ID NO: 5050106 - DNA, 25 bp, Homo sapien
cagaataaaagctcactgcgggcag

SEQ ID NO: 5050107 - DNA, 25 bp, Homo sapien
gctagtaaaccacagagctcaggtg

SEQ ID NO: 5050108 - DNA, 25 bp, Homo sapien
gaatagcaactgtcgttcggcaagg

SEQ ID NO: 5050109 - DNA, 25 bp, Homo sapien
cactaaggtgttacgcatgcaggaa

SEQ ID NO: 5050110 - DNA, 25 bp, Homo sapien
tgagaacccctgcaggagaaacctg

SEQ ID NO: 5050111 - DNA, 25 bp, Homo sapien
ccccccagccaagactatccacaac

SEQ ID NO: 5050112 - DNA, 25 bp, Homo sapien
ccccagccaagactatccacaacaa

SEQ ID NO: 5050113 - DNA, 25 bp, Homo sapien
ccagccaagactatccacaacaatc

SEQ ID NO: 5050114 - DNA, 25 bp, Homo sapien
agccaagactatccacaacaatcat

SEQ ID NO: 5050115 - DNA, 25 bp, Homo sapien
taatgatagtaatggccgggcatga

SEQ ID NO: 5050116 - DNA, 25 bp, Homo sapien
gtaatggccgggcatgagggctcat

SEQ ID NO: 5050117 - DNA, 25 bp, Homo sapien
taaatgcaaggaaaccttctcttta

SEQ ID NO: 5050118 - DNA, 25 bp, Homo sapien
aaaagtaagtctggaataatttcag

SEQ ID NO: 5050119 - DNA, 25 bp, Homo sapien
taacaaatggtgcagggaaagctga

SEQ ID NO: 5050120 - DNA, 25 bp, Homo sapien
ggaaagctgaacacccacaagcaga

SEQ ID NO: 5050121 - DNA, 25 bp, Homo sapien
ctgatcttcagtaaaggcgccaaga

SEQ ID NO: 5050122 - DNA, 25 bp, Homo sapien
gaaatgcttcatgacttggtctctg

SEQ ID NO: 5050123 - DNA, 25 bp, Homo sapien
ggcccagcgtctgatccaggatgag

SEQ ID NO: 5050124 - DNA, 25 bp, Homo sapien
tacatgcagtaggtggcccagcgtc

SEQ ID NO: 5050125 - DNA, 25 bp, Homo sapien
acatgcagtaggtggcccagcgtct

SEQ ID NO: 5050126 - DNA, 25 bp, Homo sapien
ccagcgtctgatccaggatgagctc

SEQ ID NO: 5050127 - DNA, 25 bp, Homo sapien
tgccagtctccgaccacctgcacca

SEQ ID NO: 5050128 - DNA, 25 bp, Homo sapien
gccagtctccgaccacctgcaccac

SEQ ID NO: 5050129 - DNA, 25 bp, Homo sapien
ccagtctccgaccacctgcaccacg

SEQ ID NO: 5050130 - DNA, 25 bp, Homo sapien
tacagaagtgctcgcgaatgtgaca

SEQ ID NO: 5050131 - DNA, 25 bp, Homo sapien
ggcacgtctactctggacttctggg

SEQ ID NO: 5050132 - DNA, 25 bp, Homo sapien
tctaagcgcattgcatacagaagtg

SEQ ID NO: 5050133 - DNA, 25 bp, Homo sapien
caacggctggcattccagctgagct

SEQ ID NO: 5050134 - DNA, 25 bp, Homo sapien
tccatagagccacacatgatcaaag

SEQ ID NO: 5050135 - DNA, 25 bp, Homo sapien
ctccatagagccacacatgatcaaa

SEQ ID NO: 5050136 - DNA, 25 bp, Homo sapien
cacacacagactctccatagagcca

SEQ ID NO: 5050137 - DNA, 25 bp, Homo sapien
atagagccacacatgatcaaagcca

SEQ ID NO: 5050138 - DNA, 25 bp, Homo sapien
ccgacacattggatgtagagccaat

SEQ ID NO: 5050139 - DNA, 25 bp, Homo sapien
gctgccaagtgttcggatgcccttc

SEQ ID NO: 5050140 - DNA, 25 bp, Homo sapien
tcactgtagaggcatccgacacatt

SEQ ID NO: 5050141 - DNA, 25 bp, Homo sapien
aaatatccttctgaagctggacacg

SEQ ID NO: 5050142 - DNA, 25 bp, Homo sapien
gccttctctagcacacagcatgtct

SEQ ID NO: 5050143 - DNA, 25 bp, Homo sapien
acagcatgtcttcaaagcaagcctg

SEQ ID NO: 5050144 - DNA, 25 bp, Homo sapien
ctcaggcccagccttctctagcaca

SEQ ID NO: 5050145 - DNA, 25 bp, Homo sapien
tagcacacagcatgtcttcaaagca

SEQ ID NO: 5050146 - DNA, 25 bp, Homo sapien
tgggtactcaaaaatatggctgttg

SEQ ID NO: 5050147 - DNA, 25 bp, Homo sapien
gggtactcaaaaatatggctgttga

SEQ ID NO: 5050148 - DNA, 25 bp, Homo sapien
gcttcagcaggtcttcaacgccatg

SEQ ID NO: 5050149 - DNA, 25 bp, Homo sapien
gatgttaacaggatccctctggcca

SEQ ID NO: 5050150 - DNA, 25 bp, Homo sapien
taaagggcgtgacgtgctagacacc

SEQ ID NO: 5050151 - DNA, 25 bp, Homo sapien
catttcaggaagagcggtgcctctc

SEQ ID NO: 5050152 - DNA, 25 bp, Homo sapien
taaattgtcagtcgcgttgagtgca

SEQ ID NO: 5050153 - DNA, 25 bp, Homo sapien
gacgtgagacattcctatgctgaga

SEQ ID NO: 5050154 - DNA, 25 bp, Homo sapien
tctgatactgacagccacgagcgtg

SEQ ID NO: 5050155 - DNA, 25 bp, Homo sapien
aattgagaaaatgcagaagctgccc

SEQ ID NO: 5050156 - DNA, 25 bp, Homo sapien
ttgccagtcgcagggtaatacactc

SEQ ID NO: 5050157 - DNA, 25 bp, Homo sapien
taatacactcgcctgcatcgtgggt

SEQ ID NO: 5050158 - DNA, 25 bp, Homo sapien
ttagtgcgtggctacagacgtgccg

SEQ ID NO: 5050159 - DNA, 25 bp, Homo sapien
cagtctacaaggcaagaacgcccgt

SEQ ID NO: 5050160 - DNA, 25 bp, Homo sapien
cgtgatcctgcgcagccttccgcag

SEQ ID NO: 5050161 - DNA, 25 bp, Homo sapien
ggtactgacgccctccgtgatcctg

SEQ ID NO: 5050162 - DNA, 25 bp, Homo sapien
gcagtccgcagggtactgacgctct

SEQ ID NO: 5050163 - DNA, 25 bp, Homo sapien
gctctcctgaatcttccgcagcgtt

SEQ ID NO: 5050164 - DNA, 25 bp, Homo sapien
gcgatccgcagagtattgacgccca

SEQ ID NO: 5050165 - DNA, 25 bp, Homo sapien
agatacccagctaggtctcagcgcg

SEQ ID NO: 5050166 - DNA, 25 bp, Homo sapien
tctgcagccttccacagggtaggaa

SEQ ID NO: 5050167 - DNA, 25 bp, Homo sapien
cagggaactgcggaaagagtgccac

SEQ ID NO: 5050168 - DNA, 25 bp, Homo sapien
tgtaacagaatgtagttaaaaccag

SEQ ID NO: 5050169 - DNA, 25 bp, Homo sapien
cagaaaatgcatattggagagtagt

SEQ ID NO: 5050170 - DNA, 25 bp, Homo sapien
tactagagtccaaactgtaacagaa

SEQ ID NO: 5050171 - DNA, 25 bp, Homo sapien
taatgtaacttatgatgctttgtaa

SEQ ID NO: 5050172 - DNA, 25 bp, Homo sapien
gatctagcagtacctcctctgtgaa

SEQ ID NO: 5050173 - DNA, 25 bp, Homo sapien
aatcgcatcttcattacctaactca

SEQ ID NO: 5050174 - DNA, 25 bp, Homo sapien
tcgtctcctcctagatctagcagta

SEQ ID NO: 5050175 - DNA, 25 bp, Homo sapien
ctttaatcgcatcttcattacctaa

SEQ ID NO: 5050176 - DNA, 25 bp, Homo sapien
gctctcaaactcatagcggcaggga

SEQ ID NO: 5050177 - DNA, 25 bp, Homo sapien
cagggacggtatttccagcaggacc

SEQ ID NO: 5050178 - DNA, 25 bp, Homo sapien
ggagattgacacaagcagcgccatc

SEQ ID NO: 5050179 - DNA, 25 bp, Homo sapien
agaaagtaaagagcacaggcccagc

SEQ ID NO: 5050180 - DNA, 25 bp, Homo sapien
gcacctggccattatactctatttt

SEQ ID NO: 5050181 - DNA, 25 bp, Homo sapien
tggccattatactctatttttttgg

SEQ ID NO: 5050182 - DNA, 25 bp, Homo sapien
acctggccattatactctatttttt

SEQ ID NO: 5050183 - DNA, 25 bp, Homo sapien
ccgcacctggccattatactctatt

SEQ ID NO: 5050184 - DNA, 25 bp, Homo sapien
attttgcacctgttaaaagagtcca

SEQ ID NO: 5050185 - DNA, 25 bp, Homo sapien
tattttgcacctgttaaaagagtcc

SEQ ID NO: 5050186 - DNA, 25 bp, Homo sapien
gatcatgctggcagctatctggaag

SEQ ID NO: 5050187 - DNA, 25 bp, Homo sapien
ttttgcacctgttaaaagagtccat

SEQ ID NO: 5050188 - DNA, 25 bp, Homo sapien
caaaggattctgtaatgtctgagta

SEQ ID NO: 5050189 - DNA, 25 bp, Homo sapien
aggcctctgatagccatgtctgtca

SEQ ID NO: 5050190 - DNA, 25 bp, Homo sapien
aaggacacgtaatagaagctgggcc

SEQ ID NO: 5050191 - DNA, 25 bp, Homo sapien
tctgagtatcttagtggacaccctg

SEQ ID NO: 5050192 - DNA, 25 bp, Homo sapien
tgcacacattctcccaagtggatct

SEQ ID NO: 5050193 - DNA, 25 bp, Homo sapien
gcctcttgctcaaatgcagacctca

SEQ ID NO: 5050194 - DNA, 25 bp, Homo sapien
gatacctcaaattactgcctctgca

SEQ ID NO: 5050195 - DNA, 25 bp, Homo sapien
tctgtttggatgtcacacagatacc

SEQ ID NO: 5050196 - DNA, 25 bp, Homo sapien
gctgtggtaacaagcagcctccaaa

SEQ ID NO: 5050197 - DNA, 25 bp, Homo sapien
caggactttgctcaccttatgctgg

SEQ ID NO: 5050198 - DNA, 25 bp, Homo sapien
ggttatttaaacttctgctcagcag

SEQ ID NO: 5050199 - DNA, 25 bp, Homo sapien
gctcagcagtttacatgtgcccctg

SEQ ID NO: 5050200 - DNA, 25 bp, Homo sapien
tgaaagagattgtcaagcagactcg

SEQ ID NO: 5050201 - DNA, 25 bp, Homo sapien
tctttacacaattcaaatgagggca

SEQ ID NO: 5050202 - DNA, 25 bp, Homo sapien
caagcagactcggaggaaaccagat

SEQ ID NO: 5050203 - DNA, 25 bp, Homo sapien
gcattttgcggtacgtaacttcttc

SEQ ID NO: 5050204 - DNA, 25 bp, Homo sapien
tttcacagtcggccccccaatgagg

SEQ ID NO: 5050205 - DNA, 25 bp, Homo sapien
ccagcttgccctgaaggccacgtag

SEQ ID NO: 5050206 - DNA, 25 bp, Homo sapien
tgaactttcacagtcggccccccaa

SEQ ID NO: 5050207 - DNA, 25 bp, Homo sapien
ttccagcttgccctgaaggccacgt

SEQ ID NO: 5050208 - DNA, 25 bp, Homo sapien
taaccatggcaactgcctccaagaa

SEQ ID NO: 5050209 - DNA, 25 bp, Homo sapien
agcattcatgctggggcagtcgaca

SEQ ID NO: 5050210 - DNA, 25 bp, Homo sapien
aagaatagcatcatctgcagcagca

SEQ ID NO: 5050211 - DNA, 25 bp, Homo sapien
gggcagtcgacagaatggttataaa

SEQ ID NO: 5050212 - DNA, 25 bp, Homo sapien
agcagccccggtgtccacatggcag

SEQ ID NO: 5050213 - DNA, 25 bp, Homo sapien
tgcagtggcctcacattggagacaa

SEQ ID NO: 5050214 - DNA, 25 bp, Homo sapien
ggtgtgggccggcaccgcagcagcc

SEQ ID NO: 5050215 - DNA, 25 bp, Homo sapien
tgctggtccagatgcaacagtaggc

SEQ ID NO: 5050216 - DNA, 25 bp, Homo sapien
cactcagaataggttccaagtcgca

SEQ ID NO: 5050217 - DNA, 25 bp, Homo sapien
gctggcaaggacaaatcaaagcctg

SEQ ID NO: 5050218 - DNA, 25 bp, Homo sapien
tttggccaggaactaaatcccacac

SEQ ID NO: 5050219 - DNA, 25 bp, Homo sapien
ttggaccaagaacctagctaactgt

SEQ ID NO: 5050220 - DNA, 25 bp, Homo sapien
cctgctgagcttccctatgggacat

SEQ ID NO: 5050221 - DNA, 25 bp, Homo sapien
gaaaaggctcccgttgctctgatga

SEQ ID NO: 5050222 - DNA, 25 bp, Homo sapien
gtgccctagctcaagcacgattcca

SEQ ID NO: 5050223 - DNA, 25 bp, Homo sapien
tcaataatacccaaccccactgtgg

SEQ ID NO: 5050224 - DNA, 25 bp, Homo sapien
tctgtgagccattactgatttcatc

SEQ ID NO: 5050225 - DNA, 25 bp, Homo sapien
cattcacactgttttataacttgcc

SEQ ID NO: 5050226 - DNA, 25 bp, Homo sapien
tttttataagaacaggatcatatca

SEQ ID NO: 5050227 - DNA, 25 bp, Homo sapien
acacagaaataacccttgttaacat

SEQ ID NO: 5050228 - DNA, 25 bp, Homo sapien
taatttcattccctgttgttggaca

SEQ ID NO: 5050229 - DNA, 25 bp, Homo sapien
ggatttcaagttagggatgcccgat

SEQ ID NO: 5050230 - DNA, 25 bp, Homo sapien
aatggctcagcaactagatttgggc

SEQ ID NO: 5050231 - DNA, 25 bp, Homo sapien
gatgcccgatctgcacaactgttca

SEQ ID NO: 5050232 - DNA, 25 bp, Homo sapien
tatcacagggccacaagagaggcac

SEQ ID NO: 5050233 - DNA, 25 bp, Homo sapien
agtctgctgctatctgagtgccgaa

SEQ ID NO: 5050234 - DNA, 25 bp, Homo sapien
gaataactgaatgaagcgctgaatg

SEQ ID NO: 5050235 - DNA, 25 bp, Homo sapien
tctgagtccagaaatcagttcagcc

SEQ ID NO: 5050236 - DNA, 25 bp, Homo sapien
aatgaatgactttggtgggaaacgg

SEQ ID NO: 5050237 - DNA, 25 bp, Homo sapien
cacaaacagcaagggataaaagtac

SEQ ID NO: 5050238 - DNA, 25 bp, Homo sapien
tcacaaacagcaagggataaaagta

SEQ ID NO: 5050239 - DNA, 25 bp, Homo sapien
gtcaaagcgcaccaagagctgaggt

SEQ ID NO: 5050240 - DNA, 25 bp, Homo sapien
caaagcgcaccaagagctgaggtcc

SEQ ID NO: 5050241 - DNA, 25 bp, Homo sapien
ctgtcgagtcaaagcgcaccaagag

SEQ ID NO: 5050242 - DNA, 25 bp, Homo sapien
cgagtcaaagcgcaccaagagctga

SEQ ID NO: 5050243 - DNA, 25 bp, Homo sapien
tgaattgccttcagtcagggtacag

SEQ ID NO: 5050244 - DNA, 25 bp, Homo sapien
aaaaatcttctggttagcccactca

SEQ ID NO: 5050245 - DNA, 25 bp, Homo sapien
tgccttcagtcagggtacagatctt

SEQ ID NO: 5050246 - DNA, 25 bp, Homo sapien
ccactcagtgtcacatgaaacttgg

SEQ ID NO: 5050247 - DNA, 25 bp, Homo sapien
tgagaatatatggacgcatagaggg

SEQ ID NO: 5050248 - DNA, 25 bp, Homo sapien
aattgagatttacacatattctcac

SEQ ID NO: 5050249 - DNA, 25 bp, Homo sapien
tggaaacggtatacaactcagtgac

SEQ ID NO: 5050250 - DNA, 25 bp, Homo sapien
tatgactaatggacactgggcttaa

SEQ ID NO: 5050251 - DNA, 25 bp, Homo sapien
tggtgttgcctggtttcagtcgtca

SEQ ID NO: 5050252 - DNA, 25 bp, Homo sapien
gcctggtttcagtcgtcaaatctca

SEQ ID NO: 5050253 - DNA, 25 bp, Homo sapien
cagaatctattcaattacaattcaa

SEQ ID NO: 5050254 - DNA, 25 bp, Homo sapien
cgtcaaatctcagaatctattcaat

SEQ ID NO: 5050255 - DNA, 25 bp, Homo sapien
tacgcaattaagcaagcagcacctg

SEQ ID NO: 5050256 - DNA, 25 bp, Homo sapien
aacgaaatctgacgacatccacggg

SEQ ID NO: 5050257 - DNA, 25 bp, Homo sapien
cacgggtttaatcctgacactgcca

SEQ ID NO: 5050258 - DNA, 25 bp, Homo sapien
agtttccaggcttctaccacagagg

SEQ ID NO: 5050259 - DNA, 25 bp, Homo sapien
taaagctgctatgggcatcggtcat

SEQ ID NO: 5050260 - DNA, 25 bp, Homo sapien
taacacgtagagtattcccatcacc

SEQ ID NO: 5050261 - DNA, 25 bp, Homo sapien
tgtgttgggcataccggtagctcgt

SEQ ID NO: 5050262 - DNA, 25 bp, Homo sapien
cactgccacgtggtattgcactgca

SEQ ID NO: 5050263 - DNA, 25 bp, Homo sapien
taagcatactgttgagcacagaggc

SEQ ID NO: 5050264 - DNA, 25 bp, Homo sapien
tgtgatgcattttgtcagaggctca

SEQ ID NO: 5050265 - DNA, 25 bp, Homo sapien
tagcaagtgggcttctatttccagt

SEQ ID NO: 5050266 - DNA, 25 bp, Homo sapien
tcttaccggccttaggaggaaagca

SEQ ID NO: 5050267 - DNA, 25 bp, Homo sapien
ggccagtatgatagtctctaccact

SEQ ID NO: 5050268 - DNA, 25 bp, Homo sapien
tgttgagcttacttctaccaccttg

SEQ ID NO: 5050269 - DNA, 25 bp, Homo sapien
gaagctctgttattgggtgtataca

SEQ ID NO: 5050270 - DNA, 25 bp, Homo sapien
taccaagagtggtgatatctccaac

SEQ ID NO: 5050271 - DNA, 25 bp, Homo sapien
acaagaggtctacaattatcatcag

SEQ ID NO: 5050272 - DNA, 25 bp, Homo sapien
gttcaatttaagacctcatgcatgc

SEQ ID NO: 5050273 - DNA, 25 bp, Homo sapien
cctggatctccaactagactcttat

SEQ ID NO: 5050274 - DNA, 25 bp, Homo sapien
gcatttctcaggctaattctcagtt

SEQ ID NO: 5050275 - DNA, 25 bp, Homo sapien
ccaatgtcagcagtcgtgggctgag

SEQ ID NO: 5050276 - DNA, 25 bp, Homo sapien
gccaatgtcagcagtcgtgggctga

SEQ ID NO: 5050277 - DNA, 25 bp, Homo sapien
caatgtcagcagtcgtgggctgaga

SEQ ID NO: 5050278 - DNA, 25 bp, Homo sapien
accaaatacgaggtttctgcatctc

SEQ ID NO: 5050279 - DNA, 25 bp, Homo sapien
gtgagtgggaatgtacagctggtga

SEQ ID NO: 5050280 - DNA, 25 bp, Homo sapien
ccaaatacgaggtttctgcatctct

SEQ ID NO: 5050281 - DNA, 25 bp, Homo sapien
aaatgctgggatcttgacagtgtga

SEQ ID NO: 5050282 - DNA, 25 bp, Homo sapien
gattgcgtatcccttttcccaagtg

SEQ ID NO: 5050283 - DNA, 25 bp, Homo sapien
ccaagtgcttgggaccgtaagtgtt

SEQ ID NO: 5050284 - DNA, 25 bp, Homo sapien
tgcaggtccactcatatgcgggttt

SEQ ID NO: 5050285 - DNA, 25 bp, Homo sapien
ccagtgggagtgagcatcaggtcaa

SEQ ID NO: 5050286 - DNA, 25 bp, Homo sapien
ttttgcttcgcatttgcagctctta

SEQ ID NO: 5050287 - DNA, 25 bp, Homo sapien
agctctctctatggtcttatcttcc

SEQ ID NO: 5050288 - DNA, 25 bp, Homo sapien
tttgcttcgcatttgcagctcttag

SEQ ID NO: 5050289 - DNA, 25 bp, Homo sapien
ctggttttcagctctctctatggtc

SEQ ID NO: 5050290 - DNA, 25 bp, Homo sapien
acacctgtgacactaaaacacactc

SEQ ID NO: 5050291 - DNA, 25 bp, Homo sapien
gatccactgtacagatcacacctgt

SEQ ID NO: 5050292 - DNA, 25 bp, Homo sapien
cacacctgtgacactaaaacacact

SEQ ID NO: 5050293 - DNA, 25 bp, Homo sapien
atccactgtacagatcacacctgtg

SEQ ID NO: 5050294 - DNA, 25 bp, Homo sapien
actgtacagatcacacctgtgatac

SEQ ID NO: 5050295 - DNA, 25 bp, Homo sapien
cactgtacagatcacacctgtgata

SEQ ID NO: 5050296 - DNA, 25 bp, Homo sapien
ccactgtacagatcacacctgtgat

SEQ ID NO: 5050297 - DNA, 25 bp, Homo sapien
actcaatgatccactacacagcttg

SEQ ID NO: 5050298 - DNA, 25 bp, Homo sapien
caatgatccactacacagcttgcac

SEQ ID NO: 5050299 - DNA, 25 bp, Homo sapien
tcaatgatccactacacagcttgca

SEQ ID NO: 5050300 - DNA, 25 bp, Homo sapien
acactcaatgatccactacacagct

SEQ ID NO: 5050301 - DNA, 25 bp, Homo sapien
aaaacactcagcaatccactgtaca

SEQ ID NO: 5050302 - DNA, 25 bp, Homo sapien
ctaaaacactcagcaatccactgta

SEQ ID NO: 5050303 - DNA, 25 bp, Homo sapien
cacattgaacaattcacatacagac

SEQ ID NO: 5050304 - DNA, 25 bp, Homo sapien
ctaaaacacattgaacaattcacat

SEQ ID NO: 5050305 - DNA, 25 bp, Homo sapien
gatccaccatacagctcacacctgt

SEQ ID NO: 5050306 - DNA, 25 bp, Homo sapien
cacacctgtgacactaaaacacact

SEQ ID NO: 5050307 - DNA, 25 bp, Homo sapien
aaaacacactcaacgatccaccata

SEQ ID NO: 5050308 - DNA, 25 bp, Homo sapien
taaaacacactcaacgatccaccat

SEQ ID NO: 5050309 - DNA, 25 bp, Homo sapien
acctgtgacactaaaacactcaaca

SEQ ID NO: 5050310 - DNA, 25 bp, Homo sapien
cctgtgacactaaaacactcaacaa

SEQ ID NO: 5050311 - DNA, 25 bp, Homo sapien
ctgtgacactaaaacactcaacaat

SEQ ID NO: 5050312 - DNA, 25 bp, Homo sapien
cagctctcaggaagcggagcattcc

SEQ ID NO: 5050313 - DNA, 25 bp, Homo sapien
aagcgggtaaaaagctgaggttcat

SEQ ID NO: 5050314 - DNA, 25 bp, Homo sapien
tgttgacatactaaggatggtctcc

SEQ ID NO: 5050315 - DNA, 25 bp, Homo sapien
cattccctgcagttgggttctgtgc

SEQ ID NO: 5050316 - DNA, 25 bp, Homo sapien
cgcggtgacagcgtcttgcaaagat

SEQ ID NO: 5050317 - DNA, 25 bp, Homo sapien
ggtgacagcgtcttgcaaagatttc

SEQ ID NO: 5050318 - DNA, 25 bp, Homo sapien
tggtgcttcgcggtgacagcgtctt

SEQ ID NO: 5050319 - DNA, 25 bp, Homo sapien
gtgttttgctgccacgaatcataac

SEQ ID NO: 5050320 - DNA, 25 bp, Homo sapien
ccgtaaggatgcttgtggtccagtc

SEQ ID NO: 5050321 - DNA, 25 bp, Homo sapien
catgtaccatttctatgagacacac

SEQ ID NO: 5050322 - DNA, 25 bp, Homo sapien
catttctatgagacacaccggaagt

SEQ ID NO: 5050323 - DNA, 25 bp, Homo sapien
caccggaagtgtccgtaaggatgct

SEQ ID NO: 5050324 - DNA, 25 bp, Homo sapien
accatcactgacataggccctgaag

SEQ ID NO: 5050325 - DNA, 25 bp, Homo sapien
gcacagcaaaccatcactgacatag

SEQ ID NO: 5050326 - DNA, 25 bp, Homo sapien
gttcagacagtgtttgttgctcagc

SEQ ID NO: 5050327 - DNA, 25 bp, Homo sapien
tgtttgttgctcagcacagcaaacc

SEQ ID NO: 5050328 - DNA, 25 bp, Homo sapien
tcaaggagtaactggcataatacgt

SEQ ID NO: 5050329 - DNA, 25 bp, Homo sapien
caaatcaggctgctgtaagtgttca

SEQ ID NO: 5050330 - DNA, 25 bp, Homo sapien
gcataatacgtgttttcctcgccgc

SEQ ID NO: 5050331 - DNA, 25 bp, Homo sapien
tcctcgccgctgatgggaacagcca

SEQ ID NO: 5050332 - DNA, 25 bp, Homo sapien
catcaaagccagaccacatctctac

SEQ ID NO: 5050333 - DNA, 25 bp, Homo sapien
tcatcaaagccagaccacatctcta

SEQ ID NO: 5050334 - DNA, 25 bp, Homo sapien
gtcatcaaagccagaccacatctct

SEQ ID NO: 5050335 - DNA, 25 bp, Homo sapien
cctaagttgtctttacagattcttt

SEQ ID NO: 5050336 - DNA, 25 bp, Homo sapien
taggcacgtcatatccaactcagag

SEQ ID NO: 5050337 - DNA, 25 bp, Homo sapien
catgcacagagcttaagggaggcct

SEQ ID NO: 5050338 - DNA, 25 bp, Homo sapien
tcaaaggcctcgagtgcaggataca

SEQ ID NO: 5050339 - DNA, 25 bp, Homo sapien
tgttgttaacaaccagcaggactgt

SEQ ID NO: 5050340 - DNA, 25 bp, Homo sapien
tatgcaagagttcctcggtaaacgg

SEQ ID NO: 5050341 - DNA, 25 bp, Homo sapien
gcagccatagcaacgaggatcacct

SEQ ID NO: 5050342 - DNA, 25 bp, Homo sapien
taagagcctatcctgtgagacacag

SEQ ID NO: 5050343 - DNA, 25 bp, Homo sapien
ggacaatttcgatgcaagtgcctga

SEQ ID NO: 5050344 - DNA, 25 bp, Homo sapien
gaacacagatcgtgaaagggcccac

SEQ ID NO: 5050345 - DNA, 25 bp, Homo sapien
tataaccccgcatctggacttacag

SEQ ID NO: 5050346 - DNA, 25 bp, Homo sapien
gccagtgaatccctaccgtaacaag

SEQ ID NO: 5050347 - DNA, 25 bp, Homo sapien
tatattcaatgccatggcgagccag

SEQ ID NO: 5050348 - DNA, 25 bp, Homo sapien
tcatgggtctgctactatacacggg

SEQ ID NO: 5050349 - DNA, 25 bp, Homo sapien
taagagctccgtcgatagccgcttg

SEQ ID NO: 5050350 - DNA, 25 bp, Homo sapien
tacttggtagctccgtgcatgtgcc

SEQ ID NO: 5050351 - DNA, 25 bp, Homo sapien
tgaaggaccccacttatgccaggtg

SEQ ID NO: 5050352 - DNA, 25 bp, Homo sapien
gctgtagtcgcctgctttgttgctc

SEQ ID NO: 5050353 - DNA, 25 bp, Homo sapien
cttcacgtggctgtagtcgcctgct

SEQ ID NO: 5050354 - DNA, 25 bp, Homo sapien
ttgctctcgggtgggttcacaggtt

SEQ ID NO: 5050355 - DNA, 25 bp, Homo sapien
gttcacaggtttgccctccactcgg

SEQ ID NO: 5050356 - DNA, 25 bp, Homo sapien
tggacaggggaaagccactcacact

SEQ ID NO: 5050357 - DNA, 25 bp, Homo sapien
ctggacaggggaaagccactcacac

SEQ ID NO: 5050358 - DNA, 25 bp, Homo sapien
aggggaaagccactcacactgattc

SEQ ID NO: 5050359 - DNA, 25 bp, Homo sapien
ggaaagccactcacactgattccat

SEQ ID NO: 5050360 - DNA, 25 bp, Homo sapien
ctctgcgtttggaccacgcagagcc

SEQ ID NO: 5050361 - DNA, 25 bp, Homo sapien
tgcgtttggaccacgcagagcccat

SEQ ID NO: 5050362 - DNA, 25 bp, Homo sapien
tctgcgtttggaccacgcagagccc

SEQ ID NO: 5050363 - DNA, 25 bp, Homo sapien
ctgcgtttggaccacgcagagccca

SEQ ID NO: 5050364 - DNA, 25 bp, Homo sapien
tactggcagtcattgatcctaggca

SEQ ID NO: 5050365 - DNA, 25 bp, Homo sapien
tcatactggcagtcattgatcctag

SEQ ID NO: 5050366 - DNA, 25 bp, Homo sapien
tcgcagtcatactggcagtcattga

SEQ ID NO: 5050367 - DNA, 25 bp, Homo sapien
ctgctcgcagtcatactggcagtca

SEQ ID NO: 5050368 - DNA, 25 bp, Homo sapien
tcactgggtcaaaactgtacaccat

SEQ ID NO: 5050369 - DNA, 25 bp, Homo sapien
ttctgtagcacatcactgggtcaaa

SEQ ID NO: 5050370 - DNA, 25 bp, Homo sapien
tctgtagcacatcactgggtcaaaa

SEQ ID NO: 5050371 - DNA, 25 bp, Homo sapien
caggcacaagcacataacatgctcc

SEQ ID NO: 5050372 - DNA, 25 bp, Homo sapien
aagagccaacgtccaaccaagactg

SEQ ID NO: 5050373 - DNA, 25 bp, Homo sapien
tcctttgctggacaaagacactggc

SEQ ID NO: 5050374 - DNA, 25 bp, Homo sapien
tttcacagggagtccagactgtcac

SEQ ID NO: 5050375 - DNA, 25 bp, Homo sapien
agtggtccaggagacgtcggttccg

SEQ ID NO: 5050376 - DNA, 25 bp, Homo sapien
tccaggagacgtcggttccggctgc

SEQ ID NO: 5050377 - DNA, 25 bp, Homo sapien
tggtccaggagacgtcggttccggc

SEQ ID NO: 5050378 - DNA, 25 bp, Homo sapien
gtccaggagacgtcggttccggctg

SEQ ID NO: 5050379 - DNA, 25 bp, Homo sapien
gggcatattcagcttacgggtgttg

SEQ ID NO: 5050380 - DNA, 25 bp, Homo sapien
aggttattagacagatgtctggggc

SEQ ID NO: 5050381 - DNA, 25 bp, Homo sapien
gcatattcagcttacgggtgttgga

SEQ ID NO: 5050382 - DNA, 25 bp, Homo sapien
tattcagcttacgggtgttggaaaa

SEQ ID NO: 5050383 - DNA, 25 bp, Homo sapien
caggccccggagaaagctgctcctt

SEQ ID NO: 5050384 - DNA, 25 bp, Homo sapien
gagggagcaggccccggagaaagct

SEQ ID NO: 5050385 - DNA, 25 bp, Homo sapien
ggaagagggagcaggccccggagaa

SEQ ID NO: 5050386 - DNA, 25 bp, Homo sapien
gagcaggccccggagaaagctgctc

SEQ ID NO: 5050387 - DNA, 25 bp, Homo sapien
taacaaagtgcccaggagatgtctc

SEQ ID NO: 5050388 - DNA, 25 bp, Homo sapien
tttattactttcagacacatacagt

SEQ ID NO: 5050389 - DNA, 25 bp, Homo sapien
tctaggaccctgacgtgctaattaa

SEQ ID NO: 5050390 - DNA, 25 bp, Homo sapien
ggttgctacacagtatctaggaccc

SEQ ID NO: 5050391 - DNA, 25 bp, Homo sapien
tgttgattgtgaacgtggccacctt

SEQ ID NO: 5050392 - DNA, 25 bp, Homo sapien
gctcaagaagtcgccatacaatttt

SEQ ID NO: 5050393 - DNA, 25 bp, Homo sapien
ttgatgttgattgtgaacgtggcca

SEQ ID NO: 5050394 - DNA, 25 bp, Homo sapien
gattgtgaacgtggccaccttccca

SEQ ID NO: 5050395 - DNA, 25 bp, Homo sapien
tccatgctcccgaggcgttgaacat

SEQ ID NO: 5050396 - DNA, 25 bp, Homo sapien
cgttgaacatgacaggtctcacaga

SEQ ID NO: 5050397 - DNA, 25 bp, Homo sapien
caactaagtgggagtttgattttca

SEQ ID NO: 5050398 - DNA, 25 bp, Homo sapien
tttgtaaacttctccagcgtgaccc

SEQ ID NO: 5050399 - DNA, 25 bp, Homo sapien
tttaatgattagttgctgactttct

SEQ ID NO: 5050400 - DNA, 25 bp, Homo sapien
caccagaagaaggttgcaatgaatg

SEQ ID NO: 5050401 - DNA, 25 bp, Homo sapien
ctttagtggtgagaactttcgaggt

SEQ ID NO: 5050402 - DNA, 25 bp, Homo sapien
tttcgaggtgacctccagtttctcc

SEQ ID NO: 5050403 - DNA, 25 bp, Homo sapien
gtcactgaacacaccgaagaccgtg

SEQ ID NO: 5050404 - DNA, 25 bp, Homo sapien
ggttatccagcaaacagtcactgaa

SEQ ID NO: 5050405 - DNA, 25 bp, Homo sapien
tggcaacgcgggaatgacttccact

SEQ ID NO: 5050406 - DNA, 25 bp, Homo sapien
gagccactggtttttattcccggca

SEQ ID NO: 5050407 - DNA, 25 bp, Homo sapien
aataactgccatataaacccaaaag

SEQ ID NO: 5050408 - DNA, 25 bp, Homo sapien
gacgagcgtcactgggtacagacca

SEQ ID NO: 5050409 - DNA, 25 bp, Homo sapien
tacagaccagattcagccggaagag

SEQ ID NO: 5050410 - DNA, 25 bp, Homo sapien
cgttcacagtaatcgttccagtcgt

SEQ ID NO: 5050411 - DNA, 25 bp, Homo sapien
tcgtctgcgggaccccgacgagcgt

SEQ ID NO: 5050412 - DNA, 25 bp, Homo sapien
tcaaacggcattgggttatatacca

SEQ ID NO: 5050413 - DNA, 25 bp, Homo sapien
ggttatataccatcagctgaacttc

SEQ ID NO: 5050414 - DNA, 25 bp, Homo sapien
tttcaactcgaagttcaaacggcat

SEQ ID NO: 5050415 - DNA, 25 bp, Homo sapien
acatctccttgaacccactggaaat

SEQ ID NO: 5050416 - DNA, 25 bp, Homo sapien
ttctgaggaccttcaatgggaggga

SEQ ID NO: 5050417 - DNA, 25 bp, Homo sapien
gaccttcaatgggagggagctcacc

SEQ ID NO: 5050418 - DNA, 25 bp, Homo sapien
tgggagggagctcacccgacctcct

SEQ ID NO: 5050419 - DNA, 25 bp, Homo sapien
accagcttctgaggaccttcaatgg

SEQ ID NO: 5050420 - DNA, 25 bp, Homo sapien
tccctgttgcgggacacactgtgca

SEQ ID NO: 5050421 - DNA, 25 bp, Homo sapien
tattttgtcctagaagtagtgggaa

SEQ ID NO: 5050422 - DNA, 25 bp, Homo sapien
tagtgggaaggcacaagaattagcc

SEQ ID NO: 5050423 - DNA, 25 bp, Homo sapien
gctgtcatctgtggacccacggcac

SEQ ID NO: 5050424 - DNA, 25 bp, Homo sapien
tggttgacacgttctgacccagcaa

SEQ ID NO: 5050425 - DNA, 25 bp, Homo sapien
ttcttgttccgctcttctccacggt

SEQ ID NO: 5050426 - DNA, 25 bp, Homo sapien
gatgaaaggacttttggttgacacg

SEQ ID NO: 5050427 - DNA, 25 bp, Homo sapien
tctccacggttgtgtgcgataattg

SEQ ID NO: 5050428 - DNA, 25 bp, Homo sapien
gcaggaaggttcaatagtttcacat

SEQ ID NO: 5050429 - DNA, 25 bp, Homo sapien
tagcaggaaggttcaatagtttcac

SEQ ID NO: 5050430 - DNA, 25 bp, Homo sapien
ctagcaggaaggttcaatagtttca

SEQ ID NO: 5050431 - DNA, 25 bp, Homo sapien
aggaaggttcaatagtttcacatgc

SEQ ID NO: 5050432 - DNA, 25 bp, Homo sapien
atttcattctgtatctgtttccact

SEQ ID NO: 5050433 - DNA, 25 bp, Homo sapien
tagcggatcagaaccatttcattct

SEQ ID NO: 5050434 - DNA, 25 bp, Homo sapien
gcctttatcatagcggatcagaacc

SEQ ID NO: 5050435 - DNA, 25 bp, Homo sapien
gtgtgcccttcattatgcctttatc

SEQ ID NO: 5050436 - DNA, 25 bp, Homo sapien
catatatgcatttcttaagggagtg

SEQ ID NO: 5050437 - DNA, 25 bp, Homo sapien
tttcttaagggagtgatggaactaa

SEQ ID NO: 5050438 - DNA, 25 bp, Homo sapien
tatgcatttcttaagggagtgatgg

SEQ ID NO: 5050439 - DNA, 25 bp, Homo sapien
catttcttaagggagtgatggaact

SEQ ID NO: 5050440 - DNA, 25 bp, Homo sapien
attcaacacacaaggtcacctgggg

SEQ ID NO: 5050441 - DNA, 25 bp, Homo sapien
cattcaacacacaaggtcacctggg

SEQ ID NO: 5050442 - DNA, 25 bp, Homo sapien
tcattcaacacacaaggtcacctgg

SEQ ID NO: 5050443 - DNA, 25 bp, Homo sapien
gcttggtgaagggcaccggtggcag

SEQ ID NO: 5050444 - DNA, 25 bp, Homo sapien
aagcttggtgaagggcaccggtggc

SEQ ID NO: 5050445 - DNA, 25 bp, Homo sapien
ccgccagggagggcgatgggctcca

SEQ ID NO: 5050446 - DNA, 25 bp, Homo sapien
cgccagggagggcgatgggctccat

SEQ ID NO: 5050447 - DNA, 25 bp, Homo sapien
cccaggacacttggacgtatagttc

SEQ ID NO: 5050448 - DNA, 25 bp, Homo sapien
gacacttggacgtatagttctctag

SEQ ID NO: 5050449 - DNA, 25 bp, Homo sapien
acttggacgtatagttctctaggct

SEQ ID NO: 5050450 - DNA, 25 bp, Homo sapien
caggacacttggacgtatagttctc

SEQ ID NO: 5050451 - DNA, 25 bp, Homo sapien
aaagccaacagaagccggatgcggt

SEQ ID NO: 5050452 - DNA, 25 bp, Homo sapien
aatgaccccaaggagagctaggacc

SEQ ID NO: 5050453 - DNA, 25 bp, Homo sapien
gcagatcagattggcaatgccccac

SEQ ID NO: 5050454 - DNA, 25 bp, Homo sapien
tggcaagccttttgaggagggtaaa

SEQ ID NO: 5050455 - DNA, 25 bp, Homo sapien
tgagatccaacaaccactgagtaag

SEQ ID NO: 5050456 - DNA, 25 bp, Homo sapien
tgatcagaggagttcacacacatga

SEQ ID NO: 5050457 - DNA, 25 bp, Homo sapien
gaatgagtcttccaggcgattaaca

SEQ ID NO: 5050458 - DNA, 25 bp, Homo sapien
tacagtctttagtgggtgcagcccc

SEQ ID NO: 5050459 - DNA, 25 bp, Homo sapien
cgtgatcagcggtgctgtgagagtg

SEQ ID NO: 5050460 - DNA, 25 bp, Homo sapien
ggcacgtgatcagcggtgctgtgag

SEQ ID NO: 5050461 - DNA, 25 bp, Homo sapien
gtgtcagatgggcacgtgatcagcg

SEQ ID NO: 5050462 - DNA, 25 bp, Homo sapien
gatgggcacgtgatcagcggtgctg

SEQ ID NO: 5050463 - DNA, 25 bp, Homo sapien
ctggctgagaaacaatctttgggta

SEQ ID NO: 5050464 - DNA, 25 bp, Homo sapien
gctgagaaacaatctttgggtaaca

SEQ ID NO: 5050465 - DNA, 25 bp, Homo sapien
gaaacaatctttgggtaacaatcac

SEQ ID NO: 5050466 - DNA, 25 bp, Homo sapien
gagaaacaatctttgggtaacaatc

SEQ ID NO: 5050467 - DNA, 25 bp, Homo sapien
tatagcaaatcgaaggtccaaagaa

SEQ ID NO: 5050468 - DNA, 25 bp, Homo sapien
gcaaatcgaaggtccaaagaaacca

SEQ ID NO: 5050469 - DNA, 25 bp, Homo sapien
atatagcaaatcgaaggtccaaaga

SEQ ID NO: 5050470 - DNA, 25 bp, Homo sapien
tagcaaatcgaaggtccaaagaaac

SEQ ID NO: 5050471 - DNA, 25 bp, Homo sapien
tcctccttgtcccttattatccgaa

SEQ ID NO: 5050472 - DNA, 25 bp, Homo sapien
tcctgtgcagattttccagctcctc

SEQ ID NO: 5050473 - DNA, 25 bp, Homo sapien
gatgtaaagggagcggctgctcctg

SEQ ID NO: 5050474 - DNA, 25 bp, Homo sapien
gtcccttattatccgaacagtactc

SEQ ID NO: 5050475 - DNA, 25 bp, Homo sapien
aagtggacttgagattcacaccaga

SEQ ID NO: 5050476 - DNA, 25 bp, Homo sapien
tagtatccctgtctaacccatctaa

SEQ ID NO: 5050477 - DNA, 25 bp, Homo sapien
catctaactacacctgtaaggatgg

SEQ ID NO: 5050478 - DNA, 25 bp, Homo sapien
tatcaaatatgctagagagagatgc

SEQ ID NO: 5050479 - DNA, 25 bp, Homo sapien
tttaaacatatattctcctccagta

SEQ ID NO: 5050480 - DNA, 25 bp, Homo sapien
aaacatatattctcctccagtattt

SEQ ID NO: 5050481 - DNA, 25 bp, Homo sapien
attctcctccagtatttctggtaga

SEQ ID NO: 5050482 - DNA, 25 bp, Homo sapien
ttctcctccagtatttctggtagac

SEQ ID NO: 5050483 - DNA, 25 bp, Homo sapien
cctggagaaaaacgctgacactgag

SEQ ID NO: 5050484 - DNA, 25 bp, Homo sapien
tcaatgagaaccctcgctgtatttt

SEQ ID NO: 5050485 - DNA, 25 bp, Homo sapien
cacctggagaaaaacgctgacactg

SEQ ID NO: 5050486 - DNA, 25 bp, Homo sapien
gaaccctcgctgtattttcctgtag

SEQ ID NO: 5050487 - DNA, 25 bp, Homo sapien
tcccatggagggagacaagcatgga

SEQ ID NO: 5050488 - DNA, 25 bp, Homo sapien
cacttggcatctagcctttgccagg

SEQ ID NO: 5050489 - DNA, 25 bp, Homo sapien
atgcacttggcatctagcctttgcc

SEQ ID NO: 5050490 - DNA, 25 bp, Homo sapien
aagcatggaccaactaaatacgtaa

SEQ ID NO: 5050491 - DNA, 25 bp, Homo sapien
ctgtgcttactgaggtgaggtatgt

SEQ ID NO: 5050492 - DNA, 25 bp, Homo sapien
gaggtatgtggggacactgccacca

SEQ ID NO: 5050493 - DNA, 25 bp, Homo sapien
gggactgtgcttactgaggtgaggt

SEQ ID NO: 5050494 - DNA, 25 bp, Homo sapien
ccgtggggactgtgcttactgaggt

SEQ ID NO: 5050495 - DNA, 25 bp, Homo sapien
gcagaagccttgtctccttgctgaa

SEQ ID NO: 5050496 - DNA, 25 bp, Homo sapien
cccaagcgcgtagggaaacaggtca

SEQ ID NO: 5050497 - DNA, 25 bp, Homo sapien
ggctgatcccatgagtacgtcccaa

SEQ ID NO: 5050498 - DNA, 25 bp, Homo sapien
aaaaagcagatagcacccaggagca

SEQ ID NO: 5050499 - DNA, 25 bp, Homo sapien
cctgatccgacaagaagtccagcat

SEQ ID NO: 5050500 - DNA, 25 bp, Homo sapien
gatccgacaagaagtccagcatggt

SEQ ID NO: 5050501 - DNA, 25 bp, Homo sapien
tgatccgacaagaagtccagcatgg

SEQ ID NO: 5050502 - DNA, 25 bp, Homo sapien
ctgatccgacaagaagtccagcatg

SEQ ID NO: 5050503 - DNA, 25 bp, Homo sapien
gaggcgtagaccaattcatggagca

SEQ ID NO: 5050504 - DNA, 25 bp, Homo sapien
gacaggtgtctgacagagagggcag

SEQ ID NO: 5050505 - DNA, 25 bp, Homo sapien
cccatccttcgggaggcgtagacca

SEQ ID NO: 5050506 - DNA, 25 bp, Homo sapien
atggagcaaacgcatctggaccgca

SEQ ID NO: 5050507 - DNA, 25 bp, Homo sapien
gggcccagcaccccgcacaggctgc

SEQ ID NO: 5050508 - DNA, 25 bp, Homo sapien
gcacaggctgcaactgcacggcgac

SEQ ID NO: 5050509 - DNA, 25 bp, Homo sapien
aggctgcaactgcacggcgaccctg

SEQ ID NO: 5050510 - DNA, 25 bp, Homo sapien
ccgcacaggctgcaactgcacggcg

SEQ ID NO: 5050511 - DNA, 25 bp, Homo sapien
tatacacatatacccaaggatattt

SEQ ID NO: 5050512 - DNA, 25 bp, Homo sapien
ctgggttcattgatttgtgctaaac

SEQ ID NO: 5050513 - DNA, 25 bp, Homo sapien
gaatgcatagctcaggtatacacat

SEQ ID NO: 5050514 - DNA, 25 bp, Homo sapien
tgctaaactaactaaatctcatgag

SEQ ID NO: 5050515 - DNA, 25 bp, Homo sapien
aagattcaagaatccgagccccaag

SEQ ID NO: 5050516 - DNA, 25 bp, Homo sapien
catgccaatgaactcaaaggcaatt

SEQ ID NO: 5050517 - DNA, 25 bp, Homo sapien
gactcccactgataaagattcaaga

SEQ ID NO: 5050518 - DNA, 25 bp, Homo sapien
atttctgactcccactgataaagat

SEQ ID NO: 5050519 - DNA, 25 bp, Homo sapien
agccaccagcaccaaccacgatgtc

SEQ ID NO: 5050520 - DNA, 25 bp, Homo sapien
gggcagggatctagtcattctggag

SEQ ID NO: 5050521 - DNA, 25 bp, Homo sapien
accagcaccaaccacgatgtctgcc

SEQ ID NO: 5050522 - DNA, 25 bp, Homo sapien
agggcagggatctagtcattctgga

SEQ ID NO: 5050523 - DNA, 25 bp, Homo sapien
gcaggggctgaaacagcatgtgacc

SEQ ID NO: 5050524 - DNA, 25 bp, Homo sapien
gggctgaaacagcatgtgaccatca

SEQ ID NO: 5050525 - DNA, 25 bp, Homo sapien
caggggctgaaacagcatgtgacca

SEQ ID NO: 5050526 - DNA, 25 bp, Homo sapien
agggcaggggctgaaacagcatgtg

SEQ ID NO: 5050527 - DNA, 25 bp, Homo sapien
cttagcgccagcaaggggactccag

SEQ ID NO: 5050528 - DNA, 25 bp, Homo sapien
agcgccagcaaggggactccagtac

SEQ ID NO: 5050529 - DNA, 25 bp, Homo sapien
tagcgccagcaaggggactccagta

SEQ ID NO: 5050530 - DNA, 25 bp, Homo sapien
ttagcgccagcaaggggactccagt

SEQ ID NO: 5050531 - DNA, 25 bp, Homo sapien
catagagctcggagaggatgctgta

SEQ ID NO: 5050532 - DNA, 25 bp, Homo sapien
gaaatctttgggatccagcgacaga

SEQ ID NO: 5050533 - DNA, 25 bp, Homo sapien
actgtagccgggcagcgtttccagg

SEQ ID NO: 5050534 - DNA, 25 bp, Homo sapien
cagacttgcgatggaagccgatcag

SEQ ID NO: 5050535 - DNA, 25 bp, Homo sapien
agaggaatcggcattgtcttcctac

SEQ ID NO: 5050536 - DNA, 25 bp, Homo sapien
gaatcggcattgtcttcctaccacc

SEQ ID NO: 5050537 - DNA, 25 bp, Homo sapien
tggggccctcgtcagccctcatctg

SEQ ID NO: 5050538 - DNA, 25 bp, Homo sapien
ctaccacctctcgaccttccttcac

SEQ ID NO: 5050539 - DNA, 25 bp, Homo sapien
gtccacacacccctgccagacttag

SEQ ID NO: 5050540 - DNA, 25 bp, Homo sapien
cccctgccagacttaggttcctgag

SEQ ID NO: 5050541 - DNA, 25 bp, Homo sapien
tcctgagacatggctcagagcccat

SEQ ID NO: 5050542 - DNA, 25 bp, Homo sapien
aggttcctgagacatggctcagagc

SEQ ID NO: 5050543 - DNA, 25 bp, Homo sapien
catgagaccacgtctgttttgctgc

SEQ ID NO: 5050544 - DNA, 25 bp, Homo sapien
aggctagcagacgacggacacagcg

SEQ ID NO: 5050545 - DNA, 25 bp, Homo sapien
gctgaacgctcaaggctagcagacg

SEQ ID NO: 5050546 - DNA, 25 bp, Homo sapien
ttttgctgcccgctgaacgctcaag

SEQ ID NO: 5050547 - DNA, 25 bp, Homo sapien
catattagccaaagtcatttccagg

SEQ ID NO: 5050548 - DNA, 25 bp, Homo sapien
ggttacataactattccaggtcgca

SEQ ID NO: 5050549 - DNA, 25 bp, Homo sapien
ccaggtcgcacagtgaggaaatggc

SEQ ID NO: 5050550 - DNA, 25 bp, Homo sapien
ctcagcagtgaattccgtaaaacga

SEQ ID NO: 5050551 - DNA, 25 bp, Homo sapien
tccagttgttaacggcaagccagtc

SEQ ID NO: 5050552 - DNA, 25 bp, Homo sapien
tgcttcaggctttcggagggtccgt

SEQ ID NO: 5050553 - DNA, 25 bp, Homo sapien
catactattaagaggcagagacaca

SEQ ID NO: 5050554 - DNA, 25 bp, Homo sapien
gattccctgcatgcccaattgagca

SEQ ID NO: 5050555 - DNA, 25 bp, Homo sapien
tgttggttcatttgcccggcatcac

SEQ ID NO: 5050556 - DNA, 25 bp, Homo sapien
gctgtttccctcatactacgtggcc

SEQ ID NO: 5050557 - DNA, 25 bp, Homo sapien
cataaactgcaagatacggacctct

SEQ ID NO: 5050558 - DNA, 25 bp, Homo sapien
agcacttagagcatcaggctccggg

SEQ ID NO: 5050559 - DNA, 25 bp, Homo sapien
gctccgtttctgaattgcaaggaca

SEQ ID NO: 5050560 - DNA, 25 bp, Homo sapien
gacacgtacagccttgatgcacgct

SEQ ID NO: 5050561 - DNA, 25 bp, Homo sapien
gatgcacgcttccaactcaatcact

SEQ ID NO: 5050562 - DNA, 25 bp, Homo sapien
aaggttaatgtaaactgcattctga

SEQ ID NO: 5050563 - DNA, 25 bp, Homo sapien
gctgtaataggaaatcgcctcttta

SEQ ID NO: 5050564 - DNA, 25 bp, Homo sapien
tagcacgtccgatctcagtactggt

SEQ ID NO: 5050565 - DNA, 25 bp, Homo sapien
cagtactggtgtcagggttgatgcc

SEQ ID NO: 5050566 - DNA, 25 bp, Homo sapien
tgtcttcagggctaaggcagttctt

SEQ ID NO: 5050567 - DNA, 25 bp, Homo sapien
gagagtgagcatctcccacaaatcc

SEQ ID NO: 5050568 - DNA, 25 bp, Homo sapien
gcctgccacccatctgtataacctc

SEQ ID NO: 5050569 - DNA, 25 bp, Homo sapien
acctcacaaggccaaagacgtgcat

SEQ ID NO: 5050570 - DNA, 25 bp, Homo sapien
tgagcctgccacccatctgtataac

SEQ ID NO: 5050571 - DNA, 25 bp, Homo sapien
ctatgcaatgtgatttgctgatata

SEQ ID NO: 5050572 - DNA, 25 bp, Homo sapien
caatgtgatttgctgatatattatc

SEQ ID NO: 5050573 - DNA, 25 bp, Homo sapien
tgcaatgtgatttgctgatatatta

SEQ ID NO: 5050574 - DNA, 25 bp, Homo sapien
tatgcaatgtgatttgctgatatat

SEQ ID NO: 5050575 - DNA, 25 bp, Homo sapien
ctggatcaatgagaacttcctgtgc

SEQ ID NO: 5050576 - DNA, 25 bp, Homo sapien
tggatcaatgagaacttcctgtgcc

SEQ ID NO: 5050577 - DNA, 25 bp, Homo sapien
ggatcaatgagaacttcctgtgccc

SEQ ID NO: 5050578 - DNA, 25 bp, Homo sapien
ccaggatagtgatagatgacagaag

SEQ ID NO: 5050579 - DNA, 25 bp, Homo sapien
ctggaacctccgagctccactcttc

SEQ ID NO: 5050580 - DNA, 25 bp, Homo sapien
cccaccagttccaccaggatagtga

SEQ ID NO: 5050581 - DNA, 25 bp, Homo sapien
ccggtgtctattggctgcttcagca

SEQ ID NO: 5050582 - DNA, 25 bp, Homo sapien
agagttaatacaagtcagctggatc

SEQ ID NO: 5050583 - DNA, 25 bp, Homo sapien
ggatcttctatcagcttctacattc

SEQ ID NO: 5050584 - DNA, 25 bp, Homo sapien
taaagtactggaggaatggcattat

SEQ ID NO: 5050585 - DNA, 25 bp, Homo sapien
tcaggcctaagtagcttgtggacaa

SEQ ID NO: 5050586 - DNA, 25 bp, Homo sapien
gggaaggcatatgggcagtaccagt

SEQ ID NO: 5050587 - DNA, 25 bp, Homo sapien
gcacctgctgcacatgccctagtct

SEQ ID NO: 5050588 - DNA, 25 bp, Homo sapien
gcatatgggcagtaccagtctttct

SEQ ID NO: 5050589 - DNA, 25 bp, Homo sapien
aaggcatatgggcagtaccagtctt

SEQ ID NO: 5050590 - DNA, 25 bp, Homo sapien
gagtacttagggagacaatgctctt

SEQ ID NO: 5050591 - DNA, 25 bp, Homo sapien
tgatacaataaggagtacttaggga

SEQ ID NO: 5050592 - DNA, 25 bp, Homo sapien
taaggagtacttagggagacaatgc

SEQ ID NO: 5050593 - DNA, 25 bp, Homo sapien
caataaggagtacttagggagacaa

SEQ ID NO: 5050594 - DNA, 25 bp, Homo sapien
aaagtcattcacagaacgcagcagc

SEQ ID NO: 5050595 - DNA, 25 bp, Homo sapien
aagtcattcacagaacgcagcagct

SEQ ID NO: 5050596 - DNA, 25 bp, Homo sapien
gcacaggtcccccacgtgcttccgc

SEQ ID NO: 5050597 - DNA, 25 bp, Homo sapien
cacaggtcccccacgtgcttccgca

SEQ ID NO: 5050598 - DNA, 25 bp, Homo sapien
gccttggcaccgcttcttgtaatgt

SEQ ID NO: 5050599 - DNA, 25 bp, Homo sapien
cttttcagacccaataacacactca

SEQ ID NO: 5050600 - DNA, 25 bp, Homo sapien
cagacccaataacacactcacaggg

SEQ ID NO: 5050601 - DNA, 25 bp, Homo sapien
tttcagacccaataacacactcaca

SEQ ID NO: 5050602 - DNA, 25 bp, Homo sapien
tcagacccaataacacactcacagg

SEQ ID NO: 5050603 - DNA, 25 bp, Homo sapien
tgtacaagacaactctaaaggactc

SEQ ID NO: 5050604 - DNA, 25 bp, Homo sapien
catattagcaagaaagttggccagg

SEQ ID NO: 5050605 - DNA, 25 bp, Homo sapien
tagcctcgtgtctagtgcccaaaag

SEQ ID NO: 5050606 - DNA, 25 bp, Homo sapien
gaagtaagtctcaaaatctggcgtg

SEQ ID NO: 5050607 - DNA, 25 bp, Homo sapien
ttggactccagcacgatgaacagtg

SEQ ID NO: 5050608 - DNA, 25 bp, Homo sapien
tgatgaggcccacgactttgcggtg

SEQ ID NO: 5050609 - DNA, 25 bp, Homo sapien
cctgtagcggatgtagaggactcgc

SEQ ID NO: 5050610 - DNA, 25 bp, Homo sapien
catacagtgtggagccgtagatctc

SEQ ID NO: 5050611 - DNA, 25 bp, Homo sapien
gtgtgtcgggggctatcctggacat

SEQ ID NO: 5050612 - DNA, 25 bp, Homo sapien
tgtgtgtcgggggctatcctggaca

SEQ ID NO: 5050613 - DNA, 25 bp, Homo sapien
tttaggacggcaatgttcctgggcc

SEQ ID NO: 5050614 - DNA, 25 bp, Homo sapien
tatgactaccttagaaacacgggac

SEQ ID NO: 5050615 - DNA, 25 bp, Homo sapien
gacaacgcatcctaacacgggaaaa

SEQ ID NO: 5050616 - DNA, 25 bp, Homo sapien
catccacccggtgctttgtttcagg

SEQ ID NO: 5050617 - DNA, 25 bp, Homo sapien
taacagacattcacgttgggaaggt

SEQ ID NO: 5050618 - DNA, 25 bp, Homo sapien
ttaacagacattcacgttgggaagg

SEQ ID NO: 5050619 - DNA, 25 bp, Homo sapien
atgccgcccagctagatcgcaggca

SEQ ID NO: 5050620 - DNA, 25 bp, Homo sapien
ttatcccagagagcaccgcctgatg

SEQ ID NO: 5050621 - DNA, 25 bp, Homo sapien
ttggagttgacagcgcgcttatccc

SEQ ID NO: 5050622 - DNA, 25 bp, Homo sapien
tccctgggataagttggagttgaca

SEQ ID NO: 5050623 - DNA, 25 bp, Homo sapien
ccccagccgcgcgtcccagaccccg

SEQ ID NO: 5050624 - DNA, 25 bp, Homo sapien
gggcggggggctccagcgccgcgga

SEQ ID NO: 5050625 - DNA, 25 bp, Homo sapien
ggctccagcgccgcggacggcccgg

SEQ ID NO: 5050626 - DNA, 25 bp, Homo sapien
gggctccagcgccgcggacggcccg

SEQ ID NO: 5050627 - DNA, 25 bp, Homo sapien
cggggggctccagcgccgcggacgg

SEQ ID NO: 5050628 - DNA, 25 bp, Homo sapien
gccaacaggagcaagggcgcctcga

SEQ ID NO: 5050629 - DNA, 25 bp, Homo sapien
ttcagcgggtgtgggacacggcctt

SEQ ID NO: 5050630 - DNA, 25 bp, Homo sapien
ccttggacagatgtaagcagagcgc

SEQ ID NO: 5050631 - DNA, 25 bp, Homo sapien
tcccggacaggtgtccgccgagtct

SEQ ID NO: 5050632 - DNA, 25 bp, Homo sapien
ggctctgggctggcgcttcctactg

SEQ ID NO: 5050633 - DNA, 25 bp, Homo sapien
tctgggctggcgcttcctactggcg

SEQ ID NO: 5050634 - DNA, 25 bp, Homo sapien
gctggcgcttcctactggcggccga

SEQ ID NO: 5050635 - DNA, 25 bp, Homo sapien
tggcgcttcctactggcggccgagc

SEQ ID NO: 5050636 - DNA, 25 bp, Homo sapien
ttcagggcgcgcagctcaaatttca

SEQ ID NO: 5050637 - DNA, 25 bp, Homo sapien
tggcgcgcggtcttgatccccagct

SEQ ID NO: 5050638 - DNA, 25 bp, Homo sapien
ccgggaggcacgtgaggtgcgagcc

SEQ ID NO: 5050639 - DNA, 25 bp, Homo sapien
cctgggagcgcctccaggatcgcag

SEQ ID NO: 5050640 - DNA, 25 bp, Homo sapien
gagtgtctccctgacaacgcacaag

SEQ ID NO: 5050641 - DNA, 25 bp, Homo sapien
aaacaaatagagctgatttccagcc

SEQ ID NO: 5050642 - DNA, 25 bp, Homo sapien
ataaaacatatcttcagggcaaaac

SEQ ID NO: 5050643 - DNA, 25 bp, Homo sapien
gaagttttcaacagaggtgcccagg

SEQ ID NO: 5050644 - DNA, 25 bp, Homo sapien
tacgaccgcatggaggccgtgcagt

SEQ ID NO: 5050645 - DNA, 25 bp, Homo sapien
ggtgttacgaccgcatggaggccgt

SEQ ID NO: 5050646 - DNA, 25 bp, Homo sapien
gttacgaccgcatggaggccgtgca

SEQ ID NO: 5050647 - DNA, 25 bp, Homo sapien
tgttacgaccgcatggaggccgtgc

SEQ ID NO: 5050648 - DNA, 25 bp, Homo sapien
ctcagtgattgagcgctagccagga

SEQ ID NO: 5050649 - DNA, 25 bp, Homo sapien
cggtttcagtcgaagcgtgggctcc

SEQ ID NO: 5050650 - DNA, 25 bp, Homo sapien
gaagaaactcggactcaacctcaag

SEQ ID NO: 5050651 - DNA, 25 bp, Homo sapien
ctaagtcgagccaccctaagttggg

SEQ ID NO: 5050652 - DNA, 25 bp, Homo sapien
tcaacactgtgactcgtacgccctg

SEQ ID NO: 5050653 - DNA, 25 bp, Homo sapien
aatcaacactgtgactcgtacgccc

SEQ ID NO: 5050654 - DNA, 25 bp, Homo sapien
gccaatcaacactgtgactcgtacg

SEQ ID NO: 5050655 - DNA, 25 bp, Homo sapien
cggccaatcaacactgtgactcgta

SEQ ID NO: 5050656 - DNA, 25 bp, Homo sapien
tctggattccctccggctgcgtgga

SEQ ID NO: 5050657 - DNA, 25 bp, Homo sapien
gctgcgtggaaatcccggagcactg

SEQ ID NO: 5050658 - DNA, 25 bp, Homo sapien
ccagcgccggtagctgaggcatcaa

SEQ ID NO: 5050659 - DNA, 25 bp, Homo sapien
gcctccggtagcagtgcgcatgctc

SEQ ID NO: 5050660 - DNA, 25 bp, Homo sapien
ctgacacccggctcttcacgcagaa

SEQ ID NO: 5050661 - DNA, 25 bp, Homo sapien
tcttcacgcagaaccgaagattcat

SEQ ID NO: 5050662 - DNA, 25 bp, Homo sapien
cggctcttcacgcagaaccgaagat

SEQ ID NO: 5050663 - DNA, 25 bp, Homo sapien
gctcttcacgcagaaccgaagattc

SEQ ID NO: 5050664 - DNA, 25 bp, Homo sapien
cccaatcggaacctatcctacacaa

SEQ ID NO: 5050665 - DNA, 25 bp, Homo sapien
caatcggaacctatcctacacaagg

SEQ ID NO: 5050666 - DNA, 25 bp, Homo sapien
ggtcccaatcggaacctatcctaca

SEQ ID NO: 5050667 - DNA, 25 bp, Homo sapien
ttggtcccaatcggaacctatccta

SEQ ID NO: 5050668 - DNA, 25 bp, Homo sapien
aatgcatccgtctcagtcagcttcc

SEQ ID NO: 5050669 - DNA, 25 bp, Homo sapien
cagggcaggcccattctgataaaga

SEQ ID NO: 5050670 - DNA, 25 bp, Homo sapien
cccctggaaatgcatccgtctcagt

SEQ ID NO: 5050671 - DNA, 25 bp, Homo sapien
cattctgataaagagagttcccatt

SEQ ID NO: 5050672 - DNA, 25 bp, Homo sapien
ctgctcctcaggcccaagcaccttc

SEQ ID NO: 5050673 - DNA, 25 bp, Homo sapien
ctcctcaggcccaagcaccttccgt

SEQ ID NO: 5050674 - DNA, 25 bp, Homo sapien
ctcaggcccaagcaccttccgtctc

SEQ ID NO: 5050675 - DNA, 25 bp, Homo sapien
cctcaggcccaagcaccttccgtct

SEQ ID NO: 5050676 - DNA, 25 bp, Homo sapien
tgttcagagtcctagtgtggagagc

SEQ ID NO: 5050677 - DNA, 25 bp, Homo sapien
cacaaaaaagaagtggcctgaggcc

SEQ ID NO: 5050678 - DNA, 25 bp, Homo sapien
tgcacatgcccagttggtcccactg

SEQ ID NO: 5050679 - DNA, 25 bp, Homo sapien
cagcagcgaaacattggcccaggat

SEQ ID NO: 5050680 - DNA, 25 bp, Homo sapien
tatgtttgcacagctagaagtgctt

SEQ ID NO: 5050681 - DNA, 25 bp, Homo sapien
gcatggaaacccagacaaaacgccg

SEQ ID NO: 5050682 - DNA, 25 bp, Homo sapien
cagataatggcctgaatacagggat

SEQ ID NO: 5050683 - DNA, 25 bp, Homo sapien
gctaagaagctcctataagctcggg

SEQ ID NO: 5050684 - DNA, 25 bp, Homo sapien
ccgttgctgtgatggctgccaacag

SEQ ID NO: 5050685 - DNA, 25 bp, Homo sapien
aacaggcagggagctcacagagctg

SEQ ID NO: 5050686 - DNA, 25 bp, Homo sapien
tgccaacaggcagggagctcacaga

SEQ ID NO: 5050687 - DNA, 25 bp, Homo sapien
cagagcccgttgctgtgatggctgc

SEQ ID NO: 5050688 - DNA, 25 bp, Homo sapien
tcgtgaagacaaagtgagcccctaa

SEQ ID NO: 5050689 - DNA, 25 bp, Homo sapien
cagaaacttagagtgaagccgctca

SEQ ID NO: 5050690 - DNA, 25 bp, Homo sapien
catgagaatggtgcaaggtactgtc

SEQ ID NO: 5050691 - DNA, 25 bp, Homo sapien
catgactgagaaggaggcacgtcac

SEQ ID NO: 5050692 - DNA, 25 bp, Homo sapien
tgccctgttatgctgcccgggctaa

SEQ ID NO: 5050693 - DNA, 25 bp, Homo sapien
cagacacactggcttttcagttcct

SEQ ID NO: 5050694 - DNA, 25 bp, Homo sapien
gcatgcaccacctcgagttcaaaat

SEQ ID NO: 5050695 - DNA, 25 bp, Homo sapien
ttggtaaccacacctcccgtgctct

SEQ ID NO: 5050696 - DNA, 25 bp, Homo sapien
tgctcaattatttgcgccaggacct

SEQ ID NO: 5050697 - DNA, 25 bp, Homo sapien
tcctggcagaagttaagttggtggc

SEQ ID NO: 5050698 - DNA, 25 bp, Homo sapien
gccaaaatgtgctccctgtctcagt

SEQ ID NO: 5050699 - DNA, 25 bp, Homo sapien
cagtaagctgtgctgatactccaca

SEQ ID NO: 5050700 - DNA, 25 bp, Homo sapien
aggctctgcacaccgtctctcggag

SEQ ID NO: 5050701 - DNA, 25 bp, Homo sapien
gtctctgtgattccggccttacgcg

SEQ ID NO: 5050702 - DNA, 25 bp, Homo sapien
tgcctgtcagacctcggcgagcacg

SEQ ID NO: 5050703 - DNA, 25 bp, Homo sapien
ccacgttcctgggttctcgtaatca

SEQ ID NO: 5050704 - DNA, 25 bp, Homo sapien
ccctagcaaccactggtgttttctg

SEQ ID NO: 5050705 - DNA, 25 bp, Homo sapien
cttagggtaaatgtttggctcctct

SEQ ID NO: 5050706 - DNA, 25 bp, Homo sapien
cattcagtaaaatcaccctttttag

SEQ ID NO: 5050707 - DNA, 25 bp, Homo sapien
accaatcgataggacagttctgcca

SEQ ID NO: 5050708 - DNA, 25 bp, Homo sapien
gcttaaacacgacaatagatgctca

SEQ ID NO: 5050709 - DNA, 25 bp, Homo sapien
ccaacctcttgatgacatggagaaa

SEQ ID NO: 5050710 - DNA, 25 bp, Homo sapien
aatagagaaatgtgaagacgggctc

SEQ ID NO: 5050711 - DNA, 25 bp, Homo sapien
taatatagggcaaccttcgagccag

SEQ ID NO: 5050712 - DNA, 25 bp, Homo sapien
gcccggcacgtcttattactgagaa

SEQ ID NO: 5050713 - DNA, 25 bp, Homo sapien
tagagcttaagtatcaacctgatgg

SEQ ID NO: 5050714 - DNA, 25 bp, Homo sapien
gatcgccatagtaggaaaagtctag

SEQ ID NO: 5050715 - DNA, 25 bp, Homo sapien
tgagatcctgcagcaaaaagcctcc

SEQ ID NO: 5050716 - DNA, 25 bp, Homo sapien
tctggctcgcccctttctgtccatg

SEQ ID NO: 5050717 - DNA, 25 bp, Homo sapien
gatgaaatcgacaacagtccgtttg

SEQ ID NO: 5050718 - DNA, 25 bp, Homo sapien
cagggccgctgctgaatgcaggcct

SEQ ID NO: 5050719 - DNA, 25 bp, Homo sapien
cacaaagccacgagctctggctcgc

SEQ ID NO: 5050720 - DNA, 25 bp, Homo sapien
caagcgtggacatcttcaagacaca

SEQ ID NO: 5050721 - DNA, 25 bp, Homo sapien
cacctgaaacgaggcccttggagct

SEQ ID NO: 5050722 - DNA, 25 bp, Homo sapien
ggtggtactacctgaagaaagctta

SEQ ID NO: 5050723 - DNA, 25 bp, Homo sapien
tgcaagcacaagacatggtcacatg

SEQ ID NO: 5050724 - DNA, 25 bp, Homo sapien
tggaatttcaatgcaacgccaccct

SEQ ID NO: 5050725 - DNA, 25 bp, Homo sapien
ctttgaagaggaactgggatggcag

SEQ ID NO: 5050726 - DNA, 25 bp, Homo sapien
catactgtaggatttgagtcacgcg

SEQ ID NO: 5050727 - DNA, 25 bp, Homo sapien
taaaatccactatcaaactcaggcc

SEQ ID NO: 5050728 - DNA, 25 bp, Homo sapien
ggcttagttccccagagaaacgcag

SEQ ID NO: 5050729 - DNA, 25 bp, Homo sapien
cactgaggaccggactttaaaggca

SEQ ID NO: 5050730 - DNA, 25 bp, Homo sapien
tgttttccgcaatgagaccgagtgc

SEQ ID NO: 5050731 - DNA, 25 bp, Homo sapien
tgactatgagaacaagaccaccagg

SEQ ID NO: 5050732 - DNA, 25 bp, Homo sapien
taaattctcacaaacgcgaagatgg

SEQ ID NO: 5050733 - DNA, 25 bp, Homo sapien
cgcgtgcaggaagcttgcggtggat

SEQ ID NO: 5050734 - DNA, 25 bp, Homo sapien
cagcattccggagatgcgcgtgcag

SEQ ID NO: 5050735 - DNA, 25 bp, Homo sapien
gtggatctgcgtgctgcagctccca

SEQ ID NO: 5050736 - DNA, 25 bp, Homo sapien
caagattttgccacacctgcgcagg

SEQ ID NO: 5050737 - DNA, 25 bp, Homo sapien
ttccggaatgaaagcacgcaacgca

SEQ ID NO: 5050738 - DNA, 25 bp, Homo sapien
gagtgagagtaacccgaggtcccaa

SEQ ID NO: 5050739 - DNA, 25 bp, Homo sapien
tcaagatcgggcaacatatggaacc

SEQ ID NO: 5050740 - DNA, 25 bp, Homo sapien
tgaaagaagcataagcgagggcacc

SEQ ID NO: 5050741 - DNA, 25 bp, Homo sapien
gaaggactcatccagttcccagagg

SEQ ID NO: 5050742 - DNA, 25 bp, Homo sapien
taatggcactggtgtgactcggaca

SEQ ID NO: 5050743 - DNA, 25 bp, Homo sapien
tcaacagacacgaagctaaagggcg

SEQ ID NO: 5050744 - DNA, 25 bp, Homo sapien
ggaaaatctgagcttaggacacaca

SEQ ID NO: 5050745 - DNA, 25 bp, Homo sapien
cattcaaaggagtgtgagaccacca

SEQ ID NO: 5050746 - DNA, 25 bp, Homo sapien
aaaacaacaggacggtggctttgcg

SEQ ID NO: 5050747 - DNA, 25 bp, Homo sapien
ggtcagcctcaaacaaacagcgtgg

SEQ ID NO: 5050748 - DNA, 25 bp, Homo sapien
gtcacagtcctataggacaaatctg

SEQ ID NO: 5050749 - DNA, 25 bp, Homo sapien
cacagtcctataggacaaatctgat

SEQ ID NO: 5050750 - DNA, 25 bp, Homo sapien
tatcaccacagacccgtattcttta

SEQ ID NO: 5050751 - DNA, 25 bp, Homo sapien
tgattagactgtcagtatattgtct

SEQ ID NO: 5050752 - DNA, 25 bp, Homo sapien
tcagtcgaggaacttgggtgagcca

SEQ ID NO: 5050753 - DNA, 25 bp, Homo sapien
gctccttagttcaggccgggtgaag

SEQ ID NO: 5050754 - DNA, 25 bp, Homo sapien
taaagccctgagttcatagactggt

SEQ ID NO: 5050755 - DNA, 25 bp, Homo sapien
gagcatcgcctggaaatcaacttta

SEQ ID NO: 5050756 - DNA, 25 bp, Homo sapien
gaatcccactcggtacacaatcgct

SEQ ID NO: 5050757 - DNA, 25 bp, Homo sapien
ccatctgttggtctgagtgtagctg

SEQ ID NO: 5050758 - DNA, 25 bp, Homo sapien
agtgtagctggtctcgtgaatccca

SEQ ID NO: 5050759 - DNA, 25 bp, Homo sapien
tcatgttcgatgctggctgtcacgg

SEQ ID NO: 5050760 - DNA, 25 bp, Homo sapien
cgcagagtgtcttggtgaacctgga

SEQ ID NO: 5050761 - DNA, 25 bp, Homo sapien
ttggccagtgcttggtggtctcgcc

SEQ ID NO: 5050762 - DNA, 25 bp, Homo sapien
tcgcccgttactctgcccagaggta

SEQ ID NO: 5050763 - DNA, 25 bp, Homo sapien
ttggtgaacctggaccgccttggcc

SEQ ID NO: 5050764 - DNA, 25 bp, Homo sapien
cttatccaccaggtggtacctggcc

SEQ ID NO: 5050765 - DNA, 25 bp, Homo sapien
ccttatccaccaggtggtacctggc

SEQ ID NO: 5050766 - DNA, 25 bp, Homo sapien
caggtgagcgtagtatgctggcgct

SEQ ID NO: 5050767 - DNA, 25 bp, Homo sapien
acggagcgtgtgcagcgcacgtagg

SEQ ID NO: 5050768 - DNA, 25 bp, Homo sapien
tggcgctgggatggacacggagcgt

SEQ ID NO: 5050769 - DNA, 25 bp, Homo sapien
gcagcgcacgtaggtgtgacacagc

SEQ ID NO: 5050770 - DNA, 25 bp, Homo sapien
tgatagtgcgaaggcctgcttgtcc

SEQ ID NO: 5050771 - DNA, 25 bp, Homo sapien
gagaaacgattgtcgtcccagagga

SEQ ID NO: 5050772 - DNA, 25 bp, Homo sapien
ccagaggacgtgatagtgcgaaggc

SEQ ID NO: 5050773 - DNA, 25 bp, Homo sapien
catcagaggagaaacgattgtcgtc

SEQ ID NO: 5050774 - DNA, 25 bp, Homo sapien
gattagacagttggactcgcataaa

SEQ ID NO: 5050775 - DNA, 25 bp, Homo sapien
cagaagattagacagttggactcgc

SEQ ID NO: 5050776 - DNA, 25 bp, Homo sapien
cagttggactcgcataaaatcttta

SEQ ID NO: 5050777 - DNA, 25 bp, Homo sapien
gatcagaagattagacagttggact

SEQ ID NO: 5050778 - DNA, 25 bp, Homo sapien
aaaattagctagacaattgtggcat

SEQ ID NO: 5050779 - DNA, 25 bp, Homo sapien
ttagctagacaattgtggcatgcgc

SEQ ID NO: 5050780 - DNA, 25 bp, Homo sapien
agcatcataactacatatagtaaat

SEQ ID NO: 5050781 - DNA, 25 bp, Homo sapien
aaaagcatcataactacatatagta

SEQ ID NO: 5050782 - DNA, 25 bp, Homo sapien
ccaagactctgtccgaaggggactc

SEQ ID NO: 5050783 - DNA, 25 bp, Homo sapien
caagactctgtccgaaggggactcc

SEQ ID NO: 5050784 - DNA, 25 bp, Homo sapien
agactctgtccgaaggggactcccg

SEQ ID NO: 5050785 - DNA, 25 bp, Homo sapien
gccaagactctgtccgaaggggact

SEQ ID NO: 5050786 - DNA, 25 bp, Homo sapien
gtggggtgggtgattttcgtgtcca

SEQ ID NO: 5050787 - DNA, 25 bp, Homo sapien
ggtgggtgattttcgtgtccacagt

SEQ ID NO: 5050788 - DNA, 25 bp, Homo sapien
cacaggtagaagtcgaactcggtgg

SEQ ID NO: 5050789 - DNA, 25 bp, Homo sapien
tacacaggtagaagtcgaactcggt

SEQ ID NO: 5050790 - DNA, 25 bp, Homo sapien
tgctggaatgtttccacttttccca

SEQ ID NO: 5050791 - DNA, 25 bp, Homo sapien
ctgctggaatgtttccacttttccc

SEQ ID NO: 5050792 - DNA, 25 bp, Homo sapien
gctggaatgtttccacttttcccaa

SEQ ID NO: 5050793 - DNA, 25 bp, Homo sapien
ggcaacacaggcatctcgttagaca

SEQ ID NO: 5050794 - DNA, 25 bp, Homo sapien
catctcgttagacacggccagggac

SEQ ID NO: 5050795 - DNA, 25 bp, Homo sapien
cttcggcaacacaggcatctcgtta

SEQ ID NO: 5050796 - DNA, 25 bp, Homo sapien
cacaggcatctcgttagacacggcc

SEQ ID NO: 5050797 - DNA, 25 bp, Homo sapien
tttgccggtagcttgcgcccagcac

SEQ ID NO: 5050798 - DNA, 25 bp, Homo sapien
gagtgcctgtgctttgccggtagct

SEQ ID NO: 5050799 - DNA, 25 bp, Homo sapien
tgtgctttgccggtagcttgcgccc

SEQ ID NO: 5050800 - DNA, 25 bp, Homo sapien
cgctgggaggctctgaacgctgtca

SEQ ID NO: 5050801 - DNA, 25 bp, Homo sapien
ggcaggtctctttccttaggcagct

SEQ ID NO: 5050802 - DNA, 25 bp, Homo sapien
gagatgtaccatggcgcttcaacgc

SEQ ID NO: 5050803 - DNA, 25 bp, Homo sapien
catgctgtggtttctaactgggact

SEQ ID NO: 5050804 - DNA, 25 bp, Homo sapien
tatgcaggtaggacaacgtggacag

SEQ ID NO: 5050805 - DNA, 25 bp, Homo sapien
tcttgtcagtgcagaagagccgggt

SEQ ID NO: 5050806 - DNA, 25 bp, Homo sapien
tgcaccacgatgaaggtgatcccgg

SEQ ID NO: 5050807 - DNA, 25 bp, Homo sapien
tagcttgatacaggcctcacggatg

SEQ ID NO: 5050808 - DNA, 25 bp, Homo sapien
tcacggatggccagcaactcgtggt

SEQ ID NO: 5050809 - DNA, 25 bp, Homo sapien
agcgcgtggacttgtagaactggat

SEQ ID NO: 5050810 - DNA, 25 bp, Homo sapien
gatgcgggtgggcttgaagcgcgtg

SEQ ID NO: 5050811 - DNA, 25 bp, Homo sapien
ggaactggccttcagagacaccgtc

SEQ ID NO: 5050812 - DNA, 25 bp, Homo sapien
cagagacaccgtcgcggtagaagat

SEQ ID NO: 5050813 - DNA, 25 bp, Homo sapien
ggtgctgctgcacgcgcacggtggc

SEQ ID NO: 5050814 - DNA, 25 bp, Homo sapien
catggcggccaggtcttgtatgatc

SEQ ID NO: 5050815 - DNA, 25 bp, Homo sapien
tgtatgatctcctgccggtgctgct

SEQ ID NO: 5050816 - DNA, 25 bp, Homo sapien
gcacggtggcgcagtagcgattggg

SEQ ID NO: 5050817 - DNA, 25 bp, Homo sapien
ggcatgtgcctggactctcgggaag

SEQ ID NO: 5050818 - DNA, 25 bp, Homo sapien
cctttcctgggcatgtgcctggact

SEQ ID NO: 5050819 - DNA, 25 bp, Homo sapien
ctgcaggaacaggcagtgagtgtgg

SEQ ID NO: 5050820 - DNA, 25 bp, Homo sapien
tgagtgtggtcaggggttcccaaaa

SEQ ID NO: 5050821 - DNA, 25 bp, Homo sapien
gggcttaacgacatcatttcctaat

SEQ ID NO: 5050822 - DNA, 25 bp, Homo sapien
tctgaaacattaagctcattgtgca

SEQ ID NO: 5050823 - DNA, 25 bp, Homo sapien
tgtccaaggccggagttctcatgct

SEQ ID NO: 5050824 - DNA, 25 bp, Homo sapien
tcccatgaggtcaacatttgtttcc

SEQ ID NO: 5050825 - DNA, 25 bp, Homo sapien
gcgggggggtgagtgacgtctgctc

SEQ ID NO: 5050826 - DNA, 25 bp, Homo sapien
tgagtgacgtctgctcccagaaaga

SEQ ID NO: 5050827 - DNA, 25 bp, Homo sapien
gggtgagtgacgtctgctcccagaa

SEQ ID NO: 5050828 - DNA, 25 bp, Homo sapien
ggggggtgagtgacgtctgctccca

SEQ ID NO: 5050829 - DNA, 25 bp, Homo sapien
cagcaggatgttgttcacgcctccc

SEQ ID NO: 5050830 - DNA, 25 bp, Homo sapien
tgtggcgtggtcctctgcacgttct

SEQ ID NO: 5050831 - DNA, 25 bp, Homo sapien
cttgacgttgatcttcaggcagagg

SEQ ID NO: 5050832 - DNA, 25 bp, Homo sapien
ttcatctgcacgcactgcgtggcca

SEQ ID NO: 5050833 - DNA, 25 bp, Homo sapien
cttcctcagctggccccgagagcag

SEQ ID NO: 5050834 - DNA, 25 bp, Homo sapien
ccttcctcagctggccccgagagca

SEQ ID NO: 5050835 - DNA, 25 bp, Homo sapien
tacgtgttcttcaggtgccggaaca

SEQ ID NO: 5050836 - DNA, 25 bp, Homo sapien
gtacacgggcgtcttgccgggcagg

SEQ ID NO: 5050837 - DNA, 25 bp, Homo sapien
gctgcaggcccgcatacgtgttctt

SEQ ID NO: 5050838 - DNA, 25 bp, Homo sapien
cgcgtatttgcagaagcacggctgg

SEQ ID NO: 5050839 - DNA, 25 bp, Homo sapien
cggcgtctctcgagatctttctgag

SEQ ID NO: 5050840 - DNA, 25 bp, Homo sapien
cgtctctcgagatctttctgagctg

SEQ ID NO: 5050841 - DNA, 25 bp, Homo sapien
gccggcgtctctcgagatctttctg

SEQ ID NO: 5050842 - DNA, 25 bp, Homo sapien
gcgtctctcgagatctttctgagct

SEQ ID NO: 5050843 - DNA, 25 bp, Homo sapien
ttgccaccgtaacacagcagccttt

SEQ ID NO: 5050844 - DNA, 25 bp, Homo sapien
ccgtaacacagcagcctttaaaccg

SEQ ID NO: 5050845 - DNA, 25 bp, Homo sapien
aacacagcagcctttaaaccgcgct

SEQ ID NO: 5050846 - DNA, 25 bp, Homo sapien
gccaccgtaacacagcagcctttaa

SEQ ID NO: 5050847 - DNA, 25 bp, Homo sapien
gatgctgtccccgtaaagctgctga

SEQ ID NO: 5050848 - DNA, 25 bp, Homo sapien
gatgcgatgctgtccccgtaaagct

SEQ ID NO: 5050849 - DNA, 25 bp, Homo sapien
agtgatgcgatgctgtccccgtaaa

SEQ ID NO: 5050850 - DNA, 25 bp, Homo sapien
gctgtccccgtaaagctgctgagca

SEQ ID NO: 5050851 - DNA, 25 bp, Homo sapien
caacggctagccttgtgaagctggg

SEQ ID NO: 5050852 - DNA, 25 bp, Homo sapien
tctgatgggcataacttggactgta

SEQ ID NO: 5050853 - DNA, 25 bp, Homo sapien
gacatcatcacgagagaaaacagca

SEQ ID NO: 5050854 - DNA, 25 bp, Homo sapien
cttctacaataagggcgaggacacg

SEQ ID NO: 5050855 - DNA, 25 bp, Homo sapien
ccccctctctaggcttccacctcct

SEQ ID NO: 5050856 - DNA, 25 bp, Homo sapien
ggctgtgctggccgaggcgagcatc

SEQ ID NO: 5050857 - DNA, 25 bp, Homo sapien
agatggacttccgtgcactggcgct

SEQ ID NO: 5050858 - DNA, 25 bp, Homo sapien
atggacttccgtgcactggcgctgg

SEQ ID NO: 5050859 - DNA, 25 bp, Homo sapien
gggcgaagcacgcaatggcccacac

SEQ ID NO: 5050860 - DNA, 25 bp, Homo sapien
ttcagatggacttccgtgcactggc

SEQ ID NO: 5050861 - DNA, 25 bp, Homo sapien
tgcttgttccgcatgtcccagacgc

SEQ ID NO: 5050862 - DNA, 25 bp, Homo sapien
gatgcccgtgtggaactgcttgttc

SEQ ID NO: 5050863 - DNA, 25 bp, Homo sapien
cttgatctcgatgcccgtgtggaac

SEQ ID NO: 5050864 - DNA, 25 bp, Homo sapien
ggacaggggtcgcaatagctttatt

SEQ ID NO: 5050865 - DNA, 25 bp, Homo sapien
gacacagacccccccacgtgatggg

SEQ ID NO: 5050866 - DNA, 25 bp, Homo sapien
agggacacagacccccccacgtgat

SEQ ID NO: 5050867 - DNA, 25 bp, Homo sapien
ggacacagacccccccacgtgatgg

SEQ ID NO: 5050868 - DNA, 25 bp, Homo sapien
acagacccccccacgtgatggggtg

SEQ ID NO: 5050869 - DNA, 25 bp, Homo sapien
tcacgtcttttacaggctcagccgg

SEQ ID NO: 5050870 - DNA, 25 bp, Homo sapien
cgcgggcgatagctcagaacctgag

SEQ ID NO: 5050871 - DNA, 25 bp, Homo sapien
gaaataattcgaccctcggtgagtg

SEQ ID NO: 5050872 - DNA, 25 bp, Homo sapien
ctcagccgggagtagaaaggattct

SEQ ID NO: 5050873 - DNA, 25 bp, Homo sapien
gaccatgattccaaattcacggacg

SEQ ID NO: 5050874 - DNA, 25 bp, Homo sapien
tctgtgttgaaacttgcacttcgca

SEQ ID NO: 5050875 - DNA, 25 bp, Homo sapien
tgtcatctcatctttgaccatgatt

SEQ ID NO: 5050876 - DNA, 25 bp, Homo sapien
cacggacgtatggatctgtgttgaa

SEQ ID NO: 5050877 - DNA, 25 bp, Homo sapien
gatcatggttgaggtctgattgtcc

SEQ ID NO: 5050878 - DNA, 25 bp, Homo sapien
atcgggcgccgacctagcagtcgct

SEQ ID NO: 5050879 - DNA, 25 bp, Homo sapien
tagcagtcgctctgatcatggttga

SEQ ID NO: 5050880 - DNA, 25 bp, Homo sapien
taatctcttcttgccgatcgggcgc

SEQ ID NO: 5050881 - DNA, 25 bp, Homo sapien
ggtttctcgaagctgcatgccccag

SEQ ID NO: 5050882 - DNA, 25 bp, Homo sapien
gcctcggcggtttctcgaagctgca

SEQ ID NO: 5050883 - DNA, 25 bp, Homo sapien
atgccccagcctgggacgccgccct

SEQ ID NO: 5050884 - DNA, 25 bp, Homo sapien
tctgactggggcctcggcggtttct

SEQ ID NO: 5050885 - DNA, 25 bp, Homo sapien
ccaacttgtgcctgtccttgaaata

SEQ ID NO: 5050886 - DNA, 25 bp, Homo sapien
gtgtttctgctcctgtccgacttgt

SEQ ID NO: 5050887 - DNA, 25 bp, Homo sapien
gggtagcgcagaaccaacttgtgcc

SEQ ID NO: 5050888 - DNA, 25 bp, Homo sapien
tccgacttgtaaacatgggaggtgg

SEQ ID NO: 5050889 - DNA, 25 bp, Homo sapien
aatgatgggacacgcggactggccc

SEQ ID NO: 5050890 - DNA, 25 bp, Homo sapien
tgctcttgccgtaatgatgggacac

SEQ ID NO: 5050891 - DNA, 25 bp, Homo sapien
tgccgtaatgatgggacacgcggac

SEQ ID NO: 5050892 - DNA, 25 bp, Homo sapien
caaaccgtgctcttgccgtaatgat

SEQ ID NO: 5050893 - DNA, 25 bp, Homo sapien
cgggtcacattgcagacgcggtact

SEQ ID NO: 5050894 - DNA, 25 bp, Homo sapien
cgccgggtcacattgcagacgcggt

SEQ ID NO: 5050895 - DNA, 25 bp, Homo sapien
tcacattgcagacgcggtacttcct

SEQ ID NO: 5050896 - DNA, 25 bp, Homo sapien
ggccgccgggtcacattgcagacgc

SEQ ID NO: 5050897 - DNA, 25 bp, Homo sapien
tactggctgtgccttgtaaaacgct

SEQ ID NO: 5050898 - DNA, 25 bp, Homo sapien
tgccttgtaaaacgctgttgctgac

SEQ ID NO: 5050899 - DNA, 25 bp, Homo sapien
gggaatctgtcagaggtttttgttg

SEQ ID NO: 5050900 - DNA, 25 bp, Homo sapien
ttcacaaacaaactcgattactggc

SEQ ID NO: 5050901 - DNA, 25 bp, Homo sapien
gcctctgagggtgcgaccatctcgt

SEQ ID NO: 5050902 - DNA, 25 bp, Homo sapien
gacagatccttttcgctggccttca

SEQ ID NO: 5050903 - DNA, 25 bp, Homo sapien
gcagcggatgtcctgcacagagcag

SEQ ID NO: 5050904 - DNA, 25 bp, Homo sapien
tcgtctttttcacagagagggcagc

SEQ ID NO: 5050905 - DNA, 25 bp, Homo sapien
gcagtgaagaccccagggcgctgct

SEQ ID NO: 5050906 - DNA, 25 bp, Homo sapien
gtgaagaccccagggcgctgcttac

SEQ ID NO: 5050907 - DNA, 25 bp, Homo sapien
cctgccctgcagtgaagaccccagg

SEQ ID NO: 5050908 - DNA, 25 bp, Homo sapien
ctgccctgcagtgaagaccccaggg

SEQ ID NO: 5050909 - DNA, 25 bp, Homo sapien
caatattcagcatcattttccagag

SEQ ID NO: 5050910 - DNA, 25 bp, Homo sapien
caagagggttagagcagccttcgga

SEQ ID NO: 5050911 - DNA, 25 bp, Homo sapien
ggacggactgatggaagccaaacca

SEQ ID NO: 5050912 - DNA, 25 bp, Homo sapien
agcagccttcggacgcggtgaagaa

SEQ ID NO: 5050913 - DNA, 25 bp, Homo sapien
gctgcacgggcaccgtggggtctgg

SEQ ID NO: 5050914 - DNA, 25 bp, Homo sapien
gcccgggaggcgccgtcactaatga

SEQ ID NO: 5050915 - DNA, 25 bp, Homo sapien
ccgggaggcgccgtcactaatgatt

SEQ ID NO: 5050916 - DNA, 25 bp, Homo sapien
ctgctgcacgggcaccgtggggtct

SEQ ID NO: 5050917 - DNA, 25 bp, Homo sapien
cctggatcgtctcaaaagggacgct

SEQ ID NO: 5050918 - DNA, 25 bp, Homo sapien
gacaccttgaagatgcgatccttgc

SEQ ID NO: 5050919 - DNA, 25 bp, Homo sapien
tcacgcaggacacccacttgatgga

SEQ ID NO: 5050920 - DNA, 25 bp, Homo sapien
cctgaaagtgcatcgtgtaacgcct

SEQ ID NO: 5050921 - DNA, 25 bp, Homo sapien
tacgaccagactctgcgggcgtcac

SEQ ID NO: 5050922 - DNA, 25 bp, Homo sapien
ctacgaccagactctgcgggcgtca

SEQ ID NO: 5050923 - DNA, 25 bp, Homo sapien
agctacgaccagactctgcgggcgt

SEQ ID NO: 5050924 - DNA, 25 bp, Homo sapien
ggagctacgaccagactctgcgggc

SEQ ID NO: 5050925 - DNA, 25 bp, Homo sapien
ctgcacacctgggtcccaggtacac

SEQ ID NO: 5050926 - DNA, 25 bp, Homo sapien
tgcacacctgggtcccaggtacaca

SEQ ID NO: 5050927 - DNA, 25 bp, Homo sapien
gcacacctgggtcccaggtacacac

SEQ ID NO: 5050928 - DNA, 25 bp, Homo sapien
agcactgttgtgcccgatggcccca

SEQ ID NO: 5050929 - DNA, 25 bp, Homo sapien
gttgtgcccgatggccccaaactgg

SEQ ID NO: 5050930 - DNA, 25 bp, Homo sapien
aaactggccgcgccccgaggaccat

SEQ ID NO: 5050931 - DNA, 25 bp, Homo sapien
tggcagacgcccacgagccctcaga

SEQ ID NO: 5050932 - DNA, 25 bp, Homo sapien
tggagattttacgacggccatcacg

SEQ ID NO: 5050933 - DNA, 25 bp, Homo sapien
gacagagtctctatgggcccaggac

SEQ ID NO: 5050934 - DNA, 25 bp, Homo sapien
tactttaggcccgagtacatctgcg

SEQ ID NO: 5050935 - DNA, 25 bp, Homo sapien
ttgtccagaaacagcacgtccaggt

SEQ ID NO: 5050936 - DNA, 25 bp, Homo sapien
ggtggctccgttggcttcctgcaca

SEQ ID NO: 5050937 - DNA, 25 bp, Homo sapien
tcgggcaggtggctccgttggcttc

SEQ ID NO: 5050938 - DNA, 25 bp, Homo sapien
gcaggtggctccgttggcttcctgc

SEQ ID NO: 5050939 - DNA, 25 bp, Homo sapien
ctcgggcaggtggctccgttggctt

SEQ ID NO: 5050940 - DNA, 25 bp, Homo sapien
gggcactggtgccaattgtgttgca

SEQ ID NO: 5050941 - DNA, 25 bp, Homo sapien
tgccaattgtgttgcagcgctacaa

SEQ ID NO: 5050942 - DNA, 25 bp, Homo sapien
tgtgttgcagcgctacaatctggga

SEQ ID NO: 5050943 - DNA, 25 bp, Homo sapien
gctacaatctgggagtggcccaact

SEQ ID NO: 5050944 - DNA, 25 bp, Homo sapien
gataatagaaaatgtcagcccagga

SEQ ID NO: 5050945 - DNA, 25 bp, Homo sapien
ccaggtgctgaggtctaaaggcatc

SEQ ID NO: 5050946 - DNA, 25 bp, Homo sapien
gggtcgtcacacaactcagcaacaa

SEQ ID NO: 5050947 - DNA, 25 bp, Homo sapien
ggcttgggtcaaagcacctggctca

SEQ ID NO: 5050948 - DNA, 25 bp, Homo sapien
tttattgccatctctccgttttaca

SEQ ID NO: 5050949 - DNA, 25 bp, Homo sapien
tgcacctagccttaaacaaagaatt

SEQ ID NO: 5050950 - DNA, 25 bp, Homo sapien
agcagcacaggcaccggctagggct

SEQ ID NO: 5050951 - DNA, 25 bp, Homo sapien
ttaaactctcgctactcaacatgtg

SEQ ID NO: 5050952 - DNA, 25 bp, Homo sapien
tccctccgggttgactaatcaccat

SEQ ID NO: 5050953 - DNA, 25 bp, Homo sapien
gccacgataaggctaaaggtaataa

SEQ ID NO: 5050954 - DNA, 25 bp, Homo sapien
caggatggaattcgtggcgcactga

SEQ ID NO: 5050955 - DNA, 25 bp, Homo sapien
ggcgcactgagatagctcacttcag

SEQ ID NO: 5050956 - DNA, 25 bp, Homo sapien
tggtttgtggcttgtgtttagcatg

SEQ ID NO: 5050957 - DNA, 25 bp, Homo sapien
tctaagctcttgtctggcggtggtt

SEQ ID NO: 5050958 - DNA, 25 bp, Homo sapien
tcagcaagttctcgatatccgtgtc

SEQ ID NO: 5050959 - DNA, 25 bp, Homo sapien
tagcatgtgtactttgtacttaaag

SEQ ID NO: 5050960 - DNA, 25 bp, Homo sapien
aaagccacaacacagagaaggtagt

SEQ ID NO: 5050961 - DNA, 25 bp, Homo sapien
ctgaaagccacaacacagagaaggt

SEQ ID NO: 5050962 - DNA, 25 bp, Homo sapien
gaaagccacaacacagagaaggtag

SEQ ID NO: 5050963 - DNA, 25 bp, Homo sapien
agacaagttaaacccccatcactga

SEQ ID NO: 5050964 - DNA, 25 bp, Homo sapien
ctcaggacgaagcatgtggcagtga

SEQ ID NO: 5050965 - DNA, 25 bp, Homo sapien
caggacgaagcatgtggcagtgaac

SEQ ID NO: 5050966 - DNA, 25 bp, Homo sapien
gacgaagcatgtggcagtgaactgc

SEQ ID NO: 5050967 - DNA, 25 bp, Homo sapien
aggacgaagcatgtggcagtgaact

SEQ ID NO: 5050968 - DNA, 25 bp, Homo sapien
tcgtgtatgagaacaggcatgacag

SEQ ID NO: 5050969 - DNA, 25 bp, Homo sapien
gacagactttacaacatgtgtgagc

SEQ ID NO: 5050970 - DNA, 25 bp, Homo sapien
tgagctttacttcaccgtatgttac

SEQ ID NO: 5050971 - DNA, 25 bp, Homo sapien
tatgttactccaccaagggcatccc

SEQ ID NO: 5050972 - DNA, 25 bp, Homo sapien
gtccctcccaatcggaaggggcatg

SEQ ID NO: 5050973 - DNA, 25 bp, Homo sapien
ttgtccctcccaatcggaaggggca

SEQ ID NO: 5050974 - DNA, 25 bp, Homo sapien
tcccaatcggaaggggcatggctgt

SEQ ID NO: 5050975 - DNA, 25 bp, Homo sapien
ccctcccaatcggaaggggcatggc

SEQ ID NO: 5050976 - DNA, 25 bp, Homo sapien
tatagattcttcctgccgtcaaaca

SEQ ID NO: 5050977 - DNA, 25 bp, Homo sapien
tagattcttcctgccgtcaaacacg

SEQ ID NO: 5050978 - DNA, 25 bp, Homo sapien
tgccgtcaaacacgggcttccgatc

SEQ ID NO: 5050979 - DNA, 25 bp, Homo sapien
cgggcttccgatccccaaagatctg

SEQ ID NO: 5050980 - DNA, 25 bp, Homo sapien
tgcccgtggcagatgcccagagcct

SEQ ID NO: 5050981 - DNA, 25 bp, Homo sapien
tgacatctttgagggctccaccaag

SEQ ID NO: 5050982 - DNA, 25 bp, Homo sapien
gggagtgcccgtggcagatgcccag

SEQ ID NO: 5050983 - DNA, 25 bp, Homo sapien
caccaagctgcacccgcctctgaca

SEQ ID NO: 5050984 - DNA, 25 bp, Homo sapien
gaacagccccgaaggccgtcagcat

SEQ ID NO: 5050985 - DNA, 25 bp, Homo sapien
aacagccccgaaggccgtcagcatg

SEQ ID NO: 5050986 - DNA, 25 bp, Homo sapien
ggaacagccccgaaggccgtcagca

SEQ ID NO: 5050987 - DNA, 25 bp, Homo sapien
acagccccgaaggccgtcagcatgg

SEQ ID NO: 5050988 - DNA, 25 bp, Homo sapien
aattaataactttcacccatctctt

SEQ ID NO: 5050989 - DNA, 25 bp, Homo sapien
agagagagaggcaccattataaaaa

SEQ ID NO: 5050990 - DNA, 25 bp, Homo sapien
tcatgtcaaagttcagtcgatacca

SEQ ID NO: 5050991 - DNA, 25 bp, Homo sapien
cataaactaggctccattaaaatta

SEQ ID NO: 5050992 - DNA, 25 bp, Homo sapien
gatgaacattcactgttccgagccc

SEQ ID NO: 5050993 - DNA, 25 bp, Homo sapien
gcactcggcatgatcactccgctca

SEQ ID NO: 5050994 - DNA, 25 bp, Homo sapien
gaacattcactgttccgagccccat

SEQ ID NO: 5050995 - DNA, 25 bp, Homo sapien
tccagcactcggcatgatcactccg

SEQ ID NO: 5050996 - DNA, 25 bp, Homo sapien
cggatctctcaagagaaggaggctg

SEQ ID NO: 5050997 - DNA, 25 bp, Homo sapien
acacccagcacggcgtgcggcttgg

SEQ ID NO: 5050998 - DNA, 25 bp, Homo sapien
tgcggcttgggctgggcggatctct

SEQ ID NO: 5050999 - DNA, 25 bp, Homo sapien
gctgttcggtcatgccagtgaggca

SEQ ID NO: 5051000 - DNA, 25 bp, Homo sapien
ccgtggagtcggctggcagacaatc

SEQ ID NO: 5051001 - DNA, 25 bp, Homo sapien
ggagtcggctggcagacaatcctgg

SEQ ID NO: 5051002 - DNA, 25 bp, Homo sapien
gtggagtcggctggcagacaatcct

SEQ ID NO: 5051003 - DNA, 25 bp, Homo sapien
cgtggagtcggctggcagacaatcc

SEQ ID NO: 5051004 - DNA, 25 bp, Homo sapien
tcacagagctctaggcgcaaggctg

SEQ ID NO: 5051005 - DNA, 25 bp, Homo sapien
tgacggagctcaagacgaacaagga

SEQ ID NO: 5051006 - DNA, 25 bp, Homo sapien
tgggtcagagggtacacgatgtttc

SEQ ID NO: 5051007 - DNA, 25 bp, Homo sapien
cagactgtcttgtaaacaggcaggg

SEQ ID NO: 5051008 - DNA, 25 bp, Homo sapien
ctgtgttgtgcagccaccttggtgc

SEQ ID NO: 5051009 - DNA, 25 bp, Homo sapien
gctgtgttgtgcagccaccttggtg

SEQ ID NO: 5051010 - DNA, 25 bp, Homo sapien
ggtgcaagggcatttttctcatggc

SEQ ID NO: 5051011 - DNA, 25 bp, Homo sapien
tggactcattaaacatctacccggg

SEQ ID NO: 5051012 - DNA, 25 bp, Homo sapien
tttgggaactcacgactaagacgcc

SEQ ID NO: 5051013 - DNA, 25 bp, Homo sapien
tctcatggccttggataaagcctct

SEQ ID NO: 5051014 - DNA, 25 bp, Homo sapien
ctccagcggcgctgaccatgagcac

SEQ ID NO: 5051015 - DNA, 25 bp, Homo sapien
ccccagggcactgcaactgatgtgt

SEQ ID NO: 5051016 - DNA, 25 bp, Homo sapien
ccaccttcgtctccctttccactcg

SEQ ID NO: 5051017 - DNA, 25 bp, Homo sapien
tcggagctcccctccagcggcgctg

SEQ ID NO: 5051018 - DNA, 25 bp, Homo sapien
taccaactgcgtgacctgagcctgg

SEQ ID NO: 5051019 - DNA, 25 bp, Homo sapien
cgaaaccacaggagtgtagtagcac

SEQ ID NO: 5051020 - DNA, 25 bp, Homo sapien
ggcgaaaccacaggagtgtagtagc

SEQ ID NO: 5051021 - DNA, 25 bp, Homo sapien
ctgcatttgctgcttaccaactgcg

SEQ ID NO: 5051022 - DNA, 25 bp, Homo sapien
catcacgttctcatcaccctcagct

SEQ ID NO: 5051023 - DNA, 25 bp, Homo sapien
aaagacatcacgttctcatcaccct

SEQ ID NO: 5051024 - DNA, 25 bp, Homo sapien
ggaaagacatcacgttctcatcacc

SEQ ID NO: 5051025 - DNA, 25 bp, Homo sapien
ctggaaagacatcacgttctcatca

SEQ ID NO: 5051026 - DNA, 25 bp, Homo sapien
ggtcatgaaggatgaaacgtaatac

SEQ ID NO: 5051027 - DNA, 25 bp, Homo sapien
caggtcatgaaggatgaaacgtaat

SEQ ID NO: 5051028 - DNA, 25 bp, Homo sapien
aggtcatgaaggatgaaacgtaata

SEQ ID NO: 5051029 - DNA, 25 bp, Homo sapien
acaggtcatgaaggatgaaacgtaa

SEQ ID NO: 5051030 - DNA, 25 bp, Homo sapien
tgtccatttcgaagaaattggcctg

SEQ ID NO: 5051031 - DNA, 25 bp, Homo sapien
taatttgattgttctcccggaggtc

SEQ ID NO: 5051032 - DNA, 25 bp, Homo sapien
ctggcttgatatccaattcataatg

SEQ ID NO: 5051033 - DNA, 25 bp, Homo sapien
ccaaagtcgggtctaggtggaggct

SEQ ID NO: 5051034 - DNA, 25 bp, Homo sapien
ggcggcggcgcaggaggtgcaagtg

SEQ ID NO: 5051035 - DNA, 25 bp, Homo sapien
cttggatggggggcggcggcgcagg

SEQ ID NO: 5051036 - DNA, 25 bp, Homo sapien
gggggcggcggcgcaggaggtgcaa

SEQ ID NO: 5051037 - DNA, 25 bp, Homo sapien
ttggatggggggcggcggcgcagga

SEQ ID NO: 5051038 - DNA, 25 bp, Homo sapien
gagtcccacgtgtaagctgcagata

SEQ ID NO: 5051039 - DNA, 25 bp, Homo sapien
agggagtcccacgtgtaagctgcag

SEQ ID NO: 5051040 - DNA, 25 bp, Homo sapien
gtcccacgtgtaagctgcagataca

SEQ ID NO: 5051041 - DNA, 25 bp, Homo sapien
cccacgtgtaagctgcagatacaag

SEQ ID NO: 5051042 - DNA, 25 bp, Homo sapien
gtaatcgaggttccacctctccgtg

SEQ ID NO: 5051043 - DNA, 25 bp, Homo sapien
ccaggccacaggtggcacgccctgc

SEQ ID NO: 5051044 - DNA, 25 bp, Homo sapien
tctccgtggacgctctctccagaca

SEQ ID NO: 5051045 - DNA, 25 bp, Homo sapien
tccaaggatgctccaaggagtaatc

SEQ ID NO: 5051046 - DNA, 25 bp, Homo sapien
ctcacagtagatgccagtgccagtg

SEQ ID NO: 5051047 - DNA, 25 bp, Homo sapien
caggggcctcacagtagatgccagt

SEQ ID NO: 5051048 - DNA, 25 bp, Homo sapien
gtgccagtgccagcagatgcttggc

SEQ ID NO: 5051049 - DNA, 25 bp, Homo sapien
cagcagatgcttggcggggccccat

SEQ ID NO: 5051050 - DNA, 25 bp, Homo sapien
tcaccggctcgtttcatacatgaga

SEQ ID NO: 5051051 - DNA, 25 bp, Homo sapien
tgttggattccaagggttcaacgtc

SEQ ID NO: 5051052 - DNA, 25 bp, Homo sapien
gaaaaacgcgtgctggaatctgaaa

SEQ ID NO: 5051053 - DNA, 25 bp, Homo sapien
tttgtgatgatgaagacgaagcctg

SEQ ID NO: 5051054 - DNA, 25 bp, Homo sapien
ccttcctgaagagagacgagctcac

SEQ ID NO: 5051055 - DNA, 25 bp, Homo sapien
agaaaagttaacgacgatgcctgca

SEQ ID NO: 5051056 - DNA, 25 bp, Homo sapien
cacgtgcagtgttctggccgcatct

SEQ ID NO: 5051057 - DNA, 25 bp, Homo sapien
cattttggatcacaggccgtgccac

SEQ ID NO: 5051058 - DNA, 25 bp, Homo sapien
caggtgagaatgggactgtaacagc

SEQ ID NO: 5051059 - DNA, 25 bp, Homo sapien
gtgagaatgggactgtaacagctgc

SEQ ID NO: 5051060 - DNA, 25 bp, Homo sapien
aggtgagaatgggactgtaacagct

SEQ ID NO: 5051061 - DNA, 25 bp, Homo sapien
ggtgagaatgggactgtaacagctg

SEQ ID NO: 5051062 - DNA, 25 bp, Homo sapien
tgctgacatttgctccggtggctaa

SEQ ID NO: 5051063 - DNA, 25 bp, Homo sapien
cactctgggattaagtagacacgcg

SEQ ID NO: 5051064 - DNA, 25 bp, Homo sapien
gaacatctctccgaaacactctggg

SEQ ID NO: 5051065 - DNA, 25 bp, Homo sapien
tagacacgcgcgcatgcagatcatt

SEQ ID NO: 5051066 - DNA, 25 bp, Homo sapien
gtctaatattcacgggcaacaccag

SEQ ID NO: 5051067 - DNA, 25 bp, Homo sapien
caggctcgggagcaagtctaatatt

SEQ ID NO: 5051068 - DNA, 25 bp, Homo sapien
tacactagacgcaacgacacaagag

SEQ ID NO: 5051069 - DNA, 25 bp, Homo sapien
cactgtcgccaagtcgctagggatg

SEQ ID NO: 5051070 - DNA, 25 bp, Homo sapien
cagagcatcttgcaggttccaggag

SEQ ID NO: 5051071 - DNA, 25 bp, Homo sapien
cagaagctcagggatgaaacgggct

SEQ ID NO: 5051072 - DNA, 25 bp, Homo sapien
ggaagccaactataggagccctgca

SEQ ID NO: 5051073 - DNA, 25 bp, Homo sapien
taacctgccctacgatcagacgaga

SEQ ID NO: 5051074 - DNA, 25 bp, Homo sapien
cctcttgggggaataatgcacatgg

SEQ ID NO: 5051075 - DNA, 25 bp, Homo sapien
ctcttgggggaataatgcacatggg

SEQ ID NO: 5051076 - DNA, 25 bp, Homo sapien
tcctcttgggggaataatgcacatg

SEQ ID NO: 5051077 - DNA, 25 bp, Homo sapien
tcttgggggaataatgcacatgggg

SEQ ID NO: 5051078 - DNA, 25 bp, Homo sapien
tagttccaccggcttcagctgggtt

SEQ ID NO: 5051079 - DNA, 25 bp, Homo sapien
gaggcacgcgctttagcatctggca

SEQ ID NO: 5051080 - DNA, 25 bp, Homo sapien
cagtcaccaatagggccactcgagc

SEQ ID NO: 5051081 - DNA, 25 bp, Homo sapien
atacttcacgaagcagcagcacgca

SEQ ID NO: 5051082 - DNA, 25 bp, Homo sapien
caccatgaggacgaggttttcactc

SEQ ID NO: 5051083 - DNA, 25 bp, Homo sapien
aggtgagacacccatcacgtggcca

SEQ ID NO: 5051084 - DNA, 25 bp, Homo sapien
cactctgtacgaagaggagactgag

SEQ ID NO: 5051085 - DNA, 25 bp, Homo sapien
ctgagcctgcgctcagggtgctgtt

SEQ ID NO: 5051086 - DNA, 25 bp, Homo sapien
tccacacacagatttgttccaagtc

SEQ ID NO: 5051087 - DNA, 25 bp, Homo sapien
ccacacacagatttgttccaagtca

SEQ ID NO: 5051088 - DNA, 25 bp, Homo sapien
tctctgcattttttacccgtgttac

SEQ ID NO: 5051089 - DNA, 25 bp, Homo sapien
tgttactctattaattcctttgtcc

SEQ ID NO: 5051090 - DNA, 25 bp, Homo sapien
ccgtgttactctattaattcctttg

SEQ ID NO: 5051091 - DNA, 25 bp, Homo sapien
atcactcttggcatcttcctttgct

SEQ ID NO: 5051092 - DNA, 25 bp, Homo sapien
atgccccggcttgccagcctgaggg

SEQ ID NO: 5051093 - DNA, 25 bp, Homo sapien
aatgatgccccggcttgccagcctg

SEQ ID NO: 5051094 - DNA, 25 bp, Homo sapien
aaacaaatgatgccccggcttgcca

SEQ ID NO: 5051095 - DNA, 25 bp, Homo sapien
tgatgccccggcttgccagcctgag

SEQ ID NO: 5051096 - DNA, 25 bp, Homo sapien
ttgaaaagttggtcagactccgcct

SEQ ID NO: 5051097 - DNA, 25 bp, Homo sapien
cagagaaccagctcggaagtcggac

SEQ ID NO: 5051098 - DNA, 25 bp, Homo sapien
cgacattcgcaaggcacagagccaa

SEQ ID NO: 5051099 - DNA, 25 bp, Homo sapien
tagtgctgtcagtcccataagctgg

SEQ ID NO: 5051100 - DNA, 25 bp, Homo sapien
tggcgccgccgaggggctccggggc

SEQ ID NO: 5051101 - DNA, 25 bp, Homo sapien
gataatccgtttaaagcactgagaa

SEQ ID NO: 5051102 - DNA, 25 bp, Homo sapien
cagaacccagataatccgtttaaag

SEQ ID NO: 5051103 - DNA, 25 bp, Homo sapien
cccagataatccgtttaaagcactg

SEQ ID NO: 5051104 - DNA, 25 bp, Homo sapien
gaacccagataatccgtttaaagca

SEQ ID NO: 5051105 - DNA, 25 bp, Homo sapien
gagcgtttctgtccggtccctctgg

SEQ ID NO: 5051106 - DNA, 25 bp, Homo sapien
tcagggatcagatcagcggacacgc

SEQ ID NO: 5051107 - DNA, 25 bp, Homo sapien
tagtaaactgtagctggtatcaggg

SEQ ID NO: 5051108 - DNA, 25 bp, Homo sapien
ctggaaaagccagcctgtggctacc

SEQ ID NO: 5051109 - DNA, 25 bp, Homo sapien
tgttccgggcggagaataaacagga

SEQ ID NO: 5051110 - DNA, 25 bp, Homo sapien
acaatctaaagtgcctggtcgcctt

SEQ ID NO: 5051111 - DNA, 25 bp, Homo sapien
gaaggcagaggttgacccacaatct

SEQ ID NO: 5051112 - DNA, 25 bp, Homo sapien
ctgtctgcatatgggtgcaaggccc

SEQ ID NO: 5051113 - DNA, 25 bp, Homo sapien
ggcctggatgtggtgttcccttgac

SEQ ID NO: 5051114 - DNA, 25 bp, Homo sapien
tggatgtggtgttcccttgactggt

SEQ ID NO: 5051115 - DNA, 25 bp, Homo sapien
tgtggtgttcccttgactggtgagc

SEQ ID NO: 5051116 - DNA, 25 bp, Homo sapien
gttcccttgactggtgagcgtgtct

SEQ ID NO: 5051117 - DNA, 25 bp, Homo sapien
taaccatctctagacaagaggtact

SEQ ID NO: 5051118 - DNA, 25 bp, Homo sapien
gcttcttcaggtaaccatctctaga

SEQ ID NO: 5051119 - DNA, 25 bp, Homo sapien
caggtaaccatctctagacaagagg

SEQ ID NO: 5051120 - DNA, 25 bp, Homo sapien
catctctagacaagaggtacttcat

SEQ ID NO: 5051121 - DNA, 25 bp, Homo sapien
cctagagaaaccttcctccctgcat

SEQ ID NO: 5051122 - DNA, 25 bp, Homo sapien
atgcagttgccccgtctggttgcca

SEQ ID NO: 5051123 - DNA, 25 bp, Homo sapien
cagccaggtggcctagagaaacctt

SEQ ID NO: 5051124 - DNA, 25 bp, Homo sapien
tgcagttgccccgtctggttgccag

SEQ ID NO: 5051125 - DNA, 25 bp, Homo sapien
gttagccaggatggacctcgtgacc

SEQ ID NO: 5051126 - DNA, 25 bp, Homo sapien
tagccaggatggacctcgtgacccg

SEQ ID NO: 5051127 - DNA, 25 bp, Homo sapien
ttagccaggatggacctcgtgaccc

SEQ ID NO: 5051128 - DNA, 25 bp, Homo sapien
agccaggatggacctcgtgacccgc

SEQ ID NO: 5051129 - DNA, 25 bp, Homo sapien
gattctagcaagactagggtgggcc

SEQ ID NO: 5051130 - DNA, 25 bp, Homo sapien
ttagcggaatagtgagaccctgcgc

SEQ ID NO: 5051131 - DNA, 25 bp, Homo sapien
gagtccctagtgctggagatctcag

SEQ ID NO: 5051132 - DNA, 25 bp, Homo sapien
tgagctctgcatttaataggtgacg

SEQ ID NO: 5051133 - DNA, 25 bp, Homo sapien
tatccacacgaaagtaaaaggcagg

SEQ ID NO: 5051134 - DNA, 25 bp, Homo sapien
taagtgctggcgactgaggacacag

SEQ ID NO: 5051135 - DNA, 25 bp, Homo sapien
caaaagagggtagcaagacgtgctc

SEQ ID NO: 5051136 - DNA, 25 bp, Homo sapien
gaattaagatgtcaccccttggcca

SEQ ID NO: 5051137 - DNA, 25 bp, Homo sapien
tcaatagcttctgtgccatctcaat

SEQ ID NO: 5051138 - DNA, 25 bp, Homo sapien
caggtcagagttcaatagcttctgt

SEQ ID NO: 5051139 - DNA, 25 bp, Homo sapien
aagtttttggcatccacagccaggg

SEQ ID NO: 5051140 - DNA, 25 bp, Homo sapien
gtggtctcgtctgcccaagcatttt

SEQ ID NO: 5051141 - DNA, 25 bp, Homo sapien
gagataggtcaggagaactgttttc

SEQ ID NO: 5051142 - DNA, 25 bp, Homo sapien
agataggtcaggagaactgttttca

SEQ ID NO: 5051143 - DNA, 25 bp, Homo sapien
agagataggtcaggagaactgtttt

SEQ ID NO: 5051144 - DNA, 25 bp, Homo sapien
gataggtcaggagaactgttttcag

SEQ ID NO: 5051145 - DNA, 25 bp, Homo sapien
gtgcctgtttgtgcatgccgattca

SEQ ID NO: 5051146 - DNA, 25 bp, Homo sapien
actaacttcgtctccatttgcgctg

SEQ ID NO: 5051147 - DNA, 25 bp, Homo sapien
cattagagtggacaactgagataca

SEQ ID NO: 5051148 - DNA, 25 bp, Homo sapien
ttattaatctcagtgactggcaggg

SEQ ID NO: 5051149 - DNA, 25 bp, Homo sapien
acagtggccaataatgtcctcaggg

SEQ ID NO: 5051150 - DNA, 25 bp, Homo sapien
ggaatggtctcatccacagtggcca

SEQ ID NO: 5051151 - DNA, 25 bp, Homo sapien
ggaggggaatggtctcatccacagt

SEQ ID NO: 5051152 - DNA, 25 bp, Homo sapien
ggggaatggtctcatccacagtggc

SEQ ID NO: 5051153 - DNA, 25 bp, Homo sapien
tttggaccccgttctgaatctcagg

SEQ ID NO: 5051154 - DNA, 25 bp, Homo sapien
ggataaatagtagcacctttcccca

SEQ ID NO: 5051155 - DNA, 25 bp, Homo sapien
catgaggctggccagagatgacacc

SEQ ID NO: 5051156 - DNA, 25 bp, Homo sapien
gccacttccgagttgcagcaaaaag

SEQ ID NO: 5051157 - DNA, 25 bp, Homo sapien
cttatcattcgaccggtccaggttg

SEQ ID NO: 5051158 - DNA, 25 bp, Homo sapien
caccatagggacatactcctctggt

SEQ ID NO: 5051159 - DNA, 25 bp, Homo sapien
tactggacatctcgatgacagcttt

SEQ ID NO: 5051160 - DNA, 25 bp, Homo sapien
gggctggctggattttactggacat

SEQ ID NO: 5051161 - DNA, 25 bp, Homo sapien
ccacaatcaagctagagagggtctt

SEQ ID NO: 5051162 - DNA, 25 bp, Homo sapien
ttctgcagtgaaaacggtatggctc

SEQ ID NO: 5051163 - DNA, 25 bp, Homo sapien
caaagttacatgcagagagccgggt

SEQ ID NO: 5051164 - DNA, 25 bp, Homo sapien
cagcagtggtgtcgctaggagcctc

SEQ ID NO: 5051165 - DNA, 25 bp, Homo sapien
catgcaaagcccgaggaacaatcca

SEQ ID NO: 5051166 - DNA, 25 bp, Homo sapien
taataaaggcataagacaaatcccc

SEQ ID NO: 5051167 - DNA, 25 bp, Homo sapien
catactgcatagagaggtctgccat

SEQ ID NO: 5051168 - DNA, 25 bp, Homo sapien
ctcactgttgccagggtgtggctac

SEQ ID NO: 5051169 - DNA, 25 bp, Homo sapien
gataaaccctctatagatgtagcca

SEQ ID NO: 5051170 - DNA, 25 bp, Homo sapien
tgctacctaggaaaaattgagactg

SEQ ID NO: 5051171 - DNA, 25 bp, Homo sapien
tgtagccaattccaaccacttaggt

SEQ ID NO: 5051172 - DNA, 25 bp, Homo sapien
cacttaggttgatgcttaaagactc

SEQ ID NO: 5051173 - DNA, 25 bp, Homo sapien
cagttggtactttcactatggccac

SEQ ID NO: 5051174 - DNA, 25 bp, Homo sapien
ctaagctgcaggctatccctctggg

SEQ ID NO: 5051175 - DNA, 25 bp, Homo sapien
actatagtcatagaggtgcgccacc

SEQ ID NO: 5051176 - DNA, 25 bp, Homo sapien
ttaacagaactgtcaggaggcatcc

SEQ ID NO: 5051177 - DNA, 25 bp, Homo sapien
ttgagaaatagcgtctattttgaga

SEQ ID NO: 5051178 - DNA, 25 bp, Homo sapien
cacacctagctcaagatgcaccatt

SEQ ID NO: 5051179 - DNA, 25 bp, Homo sapien
gtgaataaaaggtatatgacaattg

SEQ ID NO: 5051180 - DNA, 25 bp, Homo sapien
caattgagaaatagcgtctattttg

SEQ ID NO: 5051181 - DNA, 25 bp, Homo sapien
aacactccccttggtttgaggatgg

SEQ ID NO: 5051182 - DNA, 25 bp, Homo sapien
tgaacacatcaactgagaactaggg

SEQ ID NO: 5051183 - DNA, 25 bp, Homo sapien
gggttcagaaccagaccaattgact

SEQ ID NO: 5051184 - DNA, 25 bp, Homo sapien
caagcagaaggtgctgcacaggctc

SEQ ID NO: 5051185 - DNA, 25 bp, Homo sapien
cagggcgaggcggtttctttggtgg

SEQ ID NO: 5051186 - DNA, 25 bp, Homo sapien
ggcgaggcggtttctttggtggagc

SEQ ID NO: 5051187 - DNA, 25 bp, Homo sapien
cttcccagatgaccgggagctccag

SEQ ID NO: 5051188 - DNA, 25 bp, Homo sapien
gcaaggcttcccagatgaccgggag

SEQ ID NO: 5051189 - DNA, 25 bp, Homo sapien
gagctgaatgtggtaaacatcgtac

SEQ ID NO: 5051190 - DNA, 25 bp, Homo sapien
tctttttcccaatactctagtaatg

SEQ ID NO: 5051191 - DNA, 25 bp, Homo sapien
tactctagtaatgagctgaatgtgg

SEQ ID NO: 5051192 - DNA, 25 bp, Homo sapien
atgtggtaaacatcgtacttgctgt

SEQ ID NO: 5051193 - DNA, 25 bp, Homo sapien
tttacccacaggctgatatatatgt

SEQ ID NO: 5051194 - DNA, 25 bp, Homo sapien
acccacaggctgatatatatgttgg

SEQ ID NO: 5051195 - DNA, 25 bp, Homo sapien
tacccacaggctgatatatatgttg

SEQ ID NO: 5051196 - DNA, 25 bp, Homo sapien
gtttacccacaggctgatatatatg

SEQ ID NO: 5051197 - DNA, 25 bp, Homo sapien
tgtgtgctcacgtacaacctgctcg

SEQ ID NO: 5051198 - DNA, 25 bp, Homo sapien
gagctaggcctcgtgcatggttctg

SEQ ID NO: 5051199 - DNA, 25 bp, Homo sapien
ccttttatgcacactgatgggatca

SEQ ID NO: 5051200 - DNA, 25 bp, Homo sapien
gaacatcctggagtaatctagccaa

SEQ ID NO: 5051201 - DNA, 25 bp, Homo sapien
gcaaccttcttgctcgtgaactaaa

SEQ ID NO: 5051202 - DNA, 25 bp, Homo sapien
gcccgactgggtgctattttatata

SEQ ID NO: 5051203 - DNA, 25 bp, Homo sapien
gaataggacttattttcacaccgat

SEQ ID NO: 5051204 - DNA, 25 bp, Homo sapien
gaactaaagaatgtcagccactgtg

SEQ ID NO: 5051205 - DNA, 25 bp, Homo sapien
tatggaccaataccagtctgcggcc

SEQ ID NO: 5051206 - DNA, 25 bp, Homo sapien
gggactcctgtgataaacaacttca

SEQ ID NO: 5051207 - DNA, 25 bp, Homo sapien
tcaggcattaatgcgggctagcccg

SEQ ID NO: 5051208 - DNA, 25 bp, Homo sapien
tagatctgataaacgagcagtcccc

SEQ ID NO: 5051209 - DNA, 25 bp, Homo sapien
ctcgagagagtctcacatcaggttt

SEQ ID NO: 5051210 - DNA, 25 bp, Homo sapien
caatactgcctcgagagagtctcac

SEQ ID NO: 5051211 - DNA, 25 bp, Homo sapien
ctccctgtcaatactgcctcgagag

SEQ ID NO: 5051212 - DNA, 25 bp, Homo sapien
tgcctcgagagagtctcacatcagg

SEQ ID NO: 5051213 - DNA, 25 bp, Homo sapien
ggagaacctgcactttacctctatt

SEQ ID NO: 5051214 - DNA, 25 bp, Homo sapien
gatttagctgtcttgccaaagtagc

SEQ ID NO: 5051215 - DNA, 25 bp, Homo sapien
ttacagactggtacctgcactggcc

SEQ ID NO: 5051216 - DNA, 25 bp, Homo sapien
aaaaatatcaggcattacttgcggc

SEQ ID NO: 5051217 - DNA, 25 bp, Homo sapien
gtattggtctgcaacggtttagaaa

SEQ ID NO: 5051218 - DNA, 25 bp, Homo sapien
tggtctgcaacggtttagaaagaaa

SEQ ID NO: 5051219 - DNA, 25 bp, Homo sapien
atttttgggctgtcaaaaaagtctg

SEQ ID NO: 5051220 - DNA, 25 bp, Homo sapien
gcctggtaagcatctttagacattt

SEQ ID NO: 5051221 - DNA, 25 bp, Homo sapien
caattctgctgctgcagcctcctga

SEQ ID NO: 5051222 - DNA, 25 bp, Homo sapien
agcaattctgctgctgcagcctcct

SEQ ID NO: 5051223 - DNA, 25 bp, Homo sapien
gatggggtttggccatgttggtctt

SEQ ID NO: 5051224 - DNA, 25 bp, Homo sapien
ttacaggagagtgccaccacgcctg

SEQ ID NO: 5051225 - DNA, 25 bp, Homo sapien
tcctagacttaagcgatctccctgc

SEQ ID NO: 5051226 - DNA, 25 bp, Homo sapien
ggaatatagccttttgactccatgt

SEQ ID NO: 5051227 - DNA, 25 bp, Homo sapien
cctcaacctgccgagaagctgagat

SEQ ID NO: 5051228 - DNA, 25 bp, Homo sapien
aagctgagattatagtcactgtgcc

SEQ ID NO: 5051229 - DNA, 25 bp, Homo sapien
cactcttcgctcttcctggaatgta

SEQ ID NO: 5051230 - DNA, 25 bp, Homo sapien
ccgcactcttcgctcttcctggaat

SEQ ID NO: 5051231 - DNA, 25 bp, Homo sapien
cgcactcttcgctcttcctggaatg

SEQ ID NO: 5051232 - DNA, 25 bp, Homo sapien
gcactcttcgctcttcctggaatgt

SEQ ID NO: 5051233 - DNA, 25 bp, Homo sapien
tctggtaaaagaggctatctagaca

SEQ ID NO: 5051234 - DNA, 25 bp, Homo sapien
agcctgtctgccctaaaaattccaa

SEQ ID NO: 5051235 - DNA, 25 bp, Homo sapien
cgtgggactgaaatacaagaactct

SEQ ID NO: 5051236 - DNA, 25 bp, Homo sapien
tgtcagagcaacatcacagcagtac

SEQ ID NO: 5051237 - DNA, 25 bp, Homo sapien
cgattgaggcaactacaggaagatt

SEQ ID NO: 5051238 - DNA, 25 bp, Homo sapien
tatacgtaagctgacatggaagcag

SEQ ID NO: 5051239 - DNA, 25 bp, Homo sapien
cacatcagtcataaatgccaggaag

SEQ ID NO: 5051240 - DNA, 25 bp, Homo sapien
cacatccgggaggaggttcacatca

SEQ ID NO: 5051241 - DNA, 25 bp, Homo sapien
tttaggcattaaccaccacatccag

SEQ ID NO: 5051242 - DNA, 25 bp, Homo sapien
tcctggactcagtcttagcctctca

SEQ ID NO: 5051243 - DNA, 25 bp, Homo sapien
gtaaaacctgaaccgatgaagcatc

SEQ ID NO: 5051244 - DNA, 25 bp, Homo sapien
tctggatctattagagggcagtggc

SEQ ID NO: 5051245 - DNA, 25 bp, Homo sapien
caataatttgcaatatagtagactc

SEQ ID NO: 5051246 - DNA, 25 bp, Homo sapien
caatatagtagactctaacagggct

SEQ ID NO: 5051247 - DNA, 25 bp, Homo sapien
tagtagactctaacagggcttaaaa

SEQ ID NO: 5051248 - DNA, 25 bp, Homo sapien
tttgcaatatagtagactctaacag

SEQ ID NO: 5051249 - DNA, 25 bp, Homo sapien
ctcgcaggtccaatactgtagagtc

SEQ ID NO: 5051250 - DNA, 25 bp, Homo sapien
cagccagcgctgatcttcttccatt

SEQ ID NO: 5051251 - DNA, 25 bp, Homo sapien
gacgctcttccatcagatgggttgg

SEQ ID NO: 5051252 - DNA, 25 bp, Homo sapien
ccatttcctgttgctgtcggattag

SEQ ID NO: 5051253 - DNA, 25 bp, Homo sapien
tatctcctgaggtctatgattccat

SEQ ID NO: 5051254 - DNA, 25 bp, Homo sapien
gatgcctgacctggatagatgctgc

SEQ ID NO: 5051255 - DNA, 25 bp, Homo sapien
tccacattgggctgccacattgcta

SEQ ID NO: 5051256 - DNA, 25 bp, Homo sapien
caaaagagatgcctgacctggatag

SEQ ID NO: 5051257 - DNA, 25 bp, Homo sapien
ctgatggtagggtaagtcgtacctt

SEQ ID NO: 5051258 - DNA, 25 bp, Homo sapien
tcgtacctttaagttctaacaatga

SEQ ID NO: 5051259 - DNA, 25 bp, Homo sapien
tacctttaagttctaacaatgatga

SEQ ID NO: 5051260 - DNA, 25 bp, Homo sapien
gctgatggtagggtaagtcgtacct

SEQ ID NO: 5051261 - DNA, 25 bp, Homo sapien
cgctctaccccaaaagcgctaaata

SEQ ID NO: 5051262 - DNA, 25 bp, Homo sapien
tctaccccaaaagcgctaaataata

SEQ ID NO: 5051263 - DNA, 25 bp, Homo sapien
aatgtaccgctctaccccaaaagcg

SEQ ID NO: 5051264 - DNA, 25 bp, Homo sapien
aatatgcacaatgtaccgctctacc

SEQ ID NO: 5051265 - DNA, 25 bp, Homo sapien
ctggtaatgattggtttgtaccatg

SEQ ID NO: 5051266 - DNA, 25 bp, Homo sapien
aaatccttcgctggacctcggactg

SEQ ID NO: 5051267 - DNA, 25 bp, Homo sapien
cctcggactgggataacccggtctg

SEQ ID NO: 5051268 - DNA, 25 bp, Homo sapien
tgggataaaatccttcgctggacct

SEQ ID NO: 5051269 - DNA, 25 bp, Homo sapien
cgaggtggatcacacggtgagaccc

SEQ ID NO: 5051270 - DNA, 25 bp, Homo sapien
gaggtggatcacacggtgagacccc

SEQ ID NO: 5051271 - DNA, 25 bp, Homo sapien
ccgaggtggatcacacggtgagacc

SEQ ID NO: 5051272 - DNA, 25 bp, Homo sapien
ttactgagctatagagatcctccca

SEQ ID NO: 5051273 - DNA, 25 bp, Homo sapien
tagaaagctgtcaagatcacggtaa

SEQ ID NO: 5051274 - DNA, 25 bp, Homo sapien
catcgtgtctaggtgtgcagcagca

SEQ ID NO: 5051275 - DNA, 25 bp, Homo sapien
aactctgaacagtatgtctgccagc

SEQ ID NO: 5051276 - DNA, 25 bp, Homo sapien
gactccatcctcatgcgctcttctt

SEQ ID NO: 5051277 - DNA, 25 bp, Homo sapien
ggtgcttcatcagaccctccggagt

SEQ ID NO: 5051278 - DNA, 25 bp, Homo sapien
cttgggcggtgcttcatcagaccct

SEQ ID NO: 5051279 - DNA, 25 bp, Homo sapien
gggcggtgcttcatcagaccctccg

SEQ ID NO: 5051280 - DNA, 25 bp, Homo sapien
acaataaaggatcctatacacaggg

SEQ ID NO: 5051281 - DNA, 25 bp, Homo sapien
agttatctaaggaacaccagttggc

SEQ ID NO: 5051282 - DNA, 25 bp, Homo sapien
gacaacccagagttagcacacacta

SEQ ID NO: 5051283 - DNA, 25 bp, Homo sapien
tagaatagccttggtccaaatgggc

SEQ ID NO: 5051284 - DNA, 25 bp, Homo sapien
cacacctaatgtgatcacgccagca

SEQ ID NO: 5051285 - DNA, 25 bp, Homo sapien
tcctatcgttcagcttaaccagtgc

SEQ ID NO: 5051286 - DNA, 25 bp, Homo sapien
tagcaatctggccaataatctccct

SEQ ID NO: 5051287 - DNA, 25 bp, Homo sapien
caagcatatacatgtctgaggacag

SEQ ID NO: 5051288 - DNA, 25 bp, Homo sapien
tcagaatgcagccaaagcgagactt

SEQ ID NO: 5051289 - DNA, 25 bp, Homo sapien
gaaaccctcgtcctaactgtggcaa

SEQ ID NO: 5051290 - DNA, 25 bp, Homo sapien
gctagtttcccattccacgcagatg

SEQ ID NO: 5051291 - DNA, 25 bp, Homo sapien
tatctgaagtcccacataacgctgc

SEQ ID NO: 5051292 - DNA, 25 bp, Homo sapien
caggtgagtcctggtgagtggtgca

SEQ ID NO: 5051293 - DNA, 25 bp, Homo sapien
gtgccagcactgttgggaacctggt

SEQ ID NO: 5051294 - DNA, 25 bp, Homo sapien
tgggtgccagcactgttgggaacct

SEQ ID NO: 5051295 - DNA, 25 bp, Homo sapien
tgggaacctggtcccatgtgccagg

SEQ ID NO: 5051296 - DNA, 25 bp, Homo sapien
aatatagcttcacccagtcctgaga

SEQ ID NO: 5051297 - DNA, 25 bp, Homo sapien
gcaatacaactactaagactggcta

SEQ ID NO: 5051298 - DNA, 25 bp, Homo sapien
taaatccatacctcaaaaggctgct

SEQ ID NO: 5051299 - DNA, 25 bp, Homo sapien
tgagatacaaaggagcaaccatgtc

SEQ ID NO: 5051300 - DNA, 25 bp, Homo sapien
agtgtcaaatagtagttcctccaga

SEQ ID NO: 5051301 - DNA, 25 bp, Homo sapien
cacacatggcgggaactaccattgc

SEQ ID NO: 5051302 - DNA, 25 bp, Homo sapien
ttatgtcctggcaagttctccgaag

SEQ ID NO: 5051303 - DNA, 25 bp, Homo sapien
aaagaaactagtgcctaacttgctc

SEQ ID NO: 5051304 - DNA, 25 bp, Homo sapien
tcaactggccaaacaggaaaggacc

SEQ ID NO: 5051305 - DNA, 25 bp, Homo sapien
gacctgcgaatggtcactgggagca

SEQ ID NO: 5051306 - DNA, 25 bp, Homo sapien
tcttcaaggcaacgggaactcagtt

SEQ ID NO: 5051307 - DNA, 25 bp, Homo sapien
ggttagtggttttacagtgccctgc

SEQ ID NO: 5051308 - DNA, 25 bp, Homo sapien
caaatcataagatggcaggcacact

SEQ ID NO: 5051309 - DNA, 25 bp, Homo sapien
gatggagacttgctatcaatgcaca

SEQ ID NO: 5051310 - DNA, 25 bp, Homo sapien
aagctctggactcaggtggacctag

SEQ ID NO: 5051311 - DNA, 25 bp, Homo sapien
tatacgtagtatgccccaggactgt

SEQ ID NO: 5051312 - DNA, 25 bp, Homo sapien
caacagggtagagtatgcacatgct

SEQ ID NO: 5051313 - DNA, 25 bp, Homo sapien
tgcccgtcaagagctctgagtgtag

SEQ ID NO: 5051314 - DNA, 25 bp, Homo sapien
tgcacaagcgaacaagaacctctcc

SEQ ID NO: 5051315 - DNA, 25 bp, Homo sapien
ttcctgaagcaggtaacatctgagc

SEQ ID NO: 5051316 - DNA, 25 bp, Homo sapien
aggtcaggaaagggatttctgggag

SEQ ID NO: 5051317 - DNA, 25 bp, Homo sapien
tcaggaaagggatttctgggagtga

SEQ ID NO: 5051318 - DNA, 25 bp, Homo sapien
gtcaggaaagggatttctgggagtg

SEQ ID NO: 5051319 - DNA, 25 bp, Homo sapien
caggaaagggatttctgggagtgaa

SEQ ID NO: 5051320 - DNA, 25 bp, Homo sapien
ccttagacatactgatataatgacc

SEQ ID NO: 5051321 - DNA, 25 bp, Homo sapien
gctattactgcaaggaggagaagca

SEQ ID NO: 5051322 - DNA, 25 bp, Homo sapien
taaaatgctattactgcaaggagga

SEQ ID NO: 5051323 - DNA, 25 bp, Homo sapien
gcatttgaacgaaaaatagttcggc

SEQ ID NO: 5051324 - DNA, 25 bp, Homo sapien
tgagctttaagttcagtaaacctgg

SEQ ID NO: 5051325 - DNA, 25 bp, Homo sapien
gggtcataggcccagcatttcgtca

SEQ ID NO: 5051326 - DNA, 25 bp, Homo sapien
catttcgtcataaggctgtagaggg

SEQ ID NO: 5051327 - DNA, 25 bp, Homo sapien
tggaggcattggtaatctttcccca

SEQ ID NO: 5051328 - DNA, 25 bp, Homo sapien
catacgtcactagctgaggtaaaac

SEQ ID NO: 5051329 - DNA, 25 bp, Homo sapien
aacgtcgaaaattgattgactctgg

SEQ ID NO: 5051330 - DNA, 25 bp, Homo sapien
caaacatccatacgtcactagctga

SEQ ID NO: 5051331 - DNA, 25 bp, Homo sapien
cactagctgaggtaaaacgtcgaaa

SEQ ID NO: 5051332 - DNA, 25 bp, Homo sapien
tccttggtgtttcgaggtcacttag

SEQ ID NO: 5051333 - DNA, 25 bp, Homo sapien
aaattttccttgttatctgcttaag

SEQ ID NO: 5051334 - DNA, 25 bp, Homo sapien
taagaatctaacagagctagctgag

SEQ ID NO: 5051335 - DNA, 25 bp, Homo sapien
agctttaactatttgaacccttgag

SEQ ID NO: 5051336 - DNA, 25 bp, Homo sapien
tatatcgggataatccaaagtctcc

SEQ ID NO: 5051337 - DNA, 25 bp, Homo sapien
taagtactatcttccatatatcggg

SEQ ID NO: 5051338 - DNA, 25 bp, Homo sapien
accagaacattccgagcagcaatgt

SEQ ID NO: 5051339 - DNA, 25 bp, Homo sapien
tacacaatcatttgaggacaccaga

SEQ ID NO: 5051340 - DNA, 25 bp, Homo sapien
tttgtgtagggaataagtgacctga

SEQ ID NO: 5051341 - DNA, 25 bp, Homo sapien
tccacagaatgccaacagatgtcac

SEQ ID NO: 5051342 - DNA, 25 bp, Homo sapien
tctgctgccaagtacaggttctcta

SEQ ID NO: 5051343 - DNA, 25 bp, Homo sapien
ttaatgccggataacaaaaacacca

SEQ ID NO: 5051344 - DNA, 25 bp, Homo sapien
taagctgataggcatacaggatcaa

SEQ ID NO: 5051345 - DNA, 25 bp, Homo sapien
gatcaaagatgctagatccaaactg

SEQ ID NO: 5051346 - DNA, 25 bp, Homo sapien
caaagatgctagatccaaactgtat

SEQ ID NO: 5051347 - DNA, 25 bp, Homo sapien
gatatgcaagagctgtactaagctg

SEQ ID NO: 5051348 - DNA, 25 bp, Homo sapien
gaagttttggatgcagaagcacaga

SEQ ID NO: 5051349 - DNA, 25 bp, Homo sapien
gatctagttactatccaaacaaggc

SEQ ID NO: 5051350 - DNA, 25 bp, Homo sapien
cacttcaaaccttactgtggctctg

SEQ ID NO: 5051351 - DNA, 25 bp, Homo sapien
gaggataatgtaatgcggagaaagc

SEQ ID NO: 5051352 - DNA, 25 bp, Homo sapien
ttgttcatgctaccactgacaccat

SEQ ID NO: 5051353 - DNA, 25 bp, Homo sapien
cactgacaccattaatagaggtaaa

SEQ ID NO: 5051354 - DNA, 25 bp, Homo sapien
catgctaccactgacaccattaata

SEQ ID NO: 5051355 - DNA, 25 bp, Homo sapien
taccactgacaccattaatagaggt

SEQ ID NO: 5051356 - DNA, 25 bp, Homo sapien
aatcctgataaagtacttggctggg

SEQ ID NO: 5051357 - DNA, 25 bp, Homo sapien
tatttatacccatattctctgaacc

SEQ ID NO: 5051358 - DNA, 25 bp, Homo sapien
caaacatttggccatctgcggctac

SEQ ID NO: 5051359 - DNA, 25 bp, Homo sapien
ccataatgacatacatcctaaatca

SEQ ID NO: 5051360 - DNA, 25 bp, Homo sapien
tctccaagtgtgcacagctccatga

SEQ ID NO: 5051361 - DNA, 25 bp, Homo sapien
gtgcacagctccatgattatccaga

SEQ ID NO: 5051362 - DNA, 25 bp, Homo sapien
caatcagcttcacaatatgaggatg

SEQ ID NO: 5051363 - DNA, 25 bp, Homo sapien
tatgaggatggtcaaactgacgcat

SEQ ID NO: 5051364 - DNA, 25 bp, Homo sapien
gatgaattcaattaagacataaggc

SEQ ID NO: 5051365 - DNA, 25 bp, Homo sapien
ttaagacataaggctggcaataggg

SEQ ID NO: 5051366 - DNA, 25 bp, Homo sapien
gaactataggatctcaaaactggaa

SEQ ID NO: 5051367 - DNA, 25 bp, Homo sapien
gaatagctggtatcgcccattgtga

SEQ ID NO: 5051368 - DNA, 25 bp, Homo sapien
ctcatattccaagaacaggacctgg

SEQ ID NO: 5051369 - DNA, 25 bp, Homo sapien
tattagtgggtgttctgtctagctc

SEQ ID NO: 5051370 - DNA, 25 bp, Homo sapien
cagaaagctaaggcccaggggctgc

SEQ ID NO: 5051371 - DNA, 25 bp, Homo sapien
tagtctgcagaacctaaaatatgta

SEQ ID NO: 5051372 - DNA, 25 bp, Homo sapien
aaagtttaacaattcctgatcgagg

SEQ ID NO: 5051373 - DNA, 25 bp, Homo sapien
cctgatcgaggccatattttttctc

SEQ ID NO: 5051374 - DNA, 25 bp, Homo sapien
gaacatcaccgcttgagggcaggta

SEQ ID NO: 5051375 - DNA, 25 bp, Homo sapien
tggtgagcgaaacaaacatggtcct

SEQ ID NO: 5051376 - DNA, 25 bp, Homo sapien
gaaagaagacctattcatgcagagc

SEQ ID NO: 5051377 - DNA, 25 bp, Homo sapien
gcaggcagagcctagaactttagaa

SEQ ID NO: 5051378 - DNA, 25 bp, Homo sapien
gttctgattttgtagcaggacaagg

SEQ ID NO: 5051379 - DNA, 25 bp, Homo sapien
attccttcactagtctatgagctcc

SEQ ID NO: 5051380 - DNA, 25 bp, Homo sapien
ctagtctatgagctccatcagggca

SEQ ID NO: 5051381 - DNA, 25 bp, Homo sapien
gggaatggtcatagagccctattcc

SEQ ID NO: 5051382 - DNA, 25 bp, Homo sapien
tcacttatatatctgcaccaattcc

SEQ ID NO: 5051383 - DNA, 25 bp, Homo sapien
cagcatcaacattaggatcacttat

SEQ ID NO: 5051384 - DNA, 25 bp, Homo sapien
agcatcaacattaggatcacttata

SEQ ID NO: 5051385 - DNA, 25 bp, Homo sapien
atcacttatatatctgcaccaattc

SEQ ID NO: 5051386 - DNA, 25 bp, Homo sapien
tacatgttttaattgcaaccgccaa

SEQ ID NO: 5051387 - DNA, 25 bp, Homo sapien
tgtccgaagtacagtttttacatgt

SEQ ID NO: 5051388 - DNA, 25 bp, Homo sapien
ttgcaaccgccaaagctggattctc

SEQ ID NO: 5051389 - DNA, 25 bp, Homo sapien
ctctcacgctgtccgaagtacagtt

SEQ ID NO: 5051390 - DNA, 25 bp, Homo sapien
catgcacattactgcctctgaggac

SEQ ID NO: 5051391 - DNA, 25 bp, Homo sapien
ggtgtgaacaagacttattgcagcc

SEQ ID NO: 5051392 - DNA, 25 bp, Homo sapien
attgttgccctaggagatgacatct

SEQ ID NO: 5051393 - DNA, 25 bp, Homo sapien
tcgcaggtatccagaaggaggcatt

SEQ ID NO: 5051394 - DNA, 25 bp, Homo sapien
catcgtccaagttctattctttctc

SEQ ID NO: 5051395 - DNA, 25 bp, Homo sapien
tctctttgaatctcataatccctgg

SEQ ID NO: 5051396 - DNA, 25 bp, Homo sapien
tctccaatacatcgtccaagttcta

SEQ ID NO: 5051397 - DNA, 25 bp, Homo sapien
aaattggccttctccaatacatcgt

SEQ ID NO: 5051398 - DNA, 25 bp, Homo sapien
ttaggcttctgaccttagagtgggc

SEQ ID NO: 5051399 - DNA, 25 bp, Homo sapien
cctgaggtgtacaaactgacgatgg

SEQ ID NO: 5051400 - DNA, 25 bp, Homo sapien
ggcatctgtcaagtctgagcaagaa

SEQ ID NO: 5051401 - DNA, 25 bp, Homo sapien
tatacactccaacatgagacctggg

SEQ ID NO: 5051402 - DNA, 25 bp, Homo sapien
ctataatctcagcataatcatctgt

SEQ ID NO: 5051403 - DNA, 25 bp, Homo sapien
gcatggtgtaagtatcttcttcatc

SEQ ID NO: 5051404 - DNA, 25 bp, Homo sapien
gaaaagaaacagatatgttgaaaga

SEQ ID NO: 5051405 - DNA, 25 bp, Homo sapien
aaaagaaacagatatgttgaaagag

SEQ ID NO: 5051406 - DNA, 25 bp, Homo sapien
aaagaaacagatatgttgaaagagg

SEQ ID NO: 5051407 - DNA, 25 bp, Homo sapien
aagaaacagatatgttgaaagaggt

SEQ ID NO: 5051408 - DNA, 25 bp, Homo sapien
ggcaaagcgatctgcttaaatcctc

SEQ ID NO: 5051409 - DNA, 25 bp, Homo sapien
ctgcttaaatcctctactacgctga

SEQ ID NO: 5051410 - DNA, 25 bp, Homo sapien
cctctactacgctgaaatattctta

SEQ ID NO: 5051411 - DNA, 25 bp, Homo sapien
aaagtaggcaaagcgatctgcttaa

SEQ ID NO: 5051412 - DNA, 25 bp, Homo sapien
aagtctctacaaccctgcacgtagc

SEQ ID NO: 5051413 - DNA, 25 bp, Homo sapien
gctgaaaagtctctacaaccctgca

SEQ ID NO: 5051414 - DNA, 25 bp, Homo sapien
aaactgctgaaaagtctctacaacc

SEQ ID NO: 5051415 - DNA, 25 bp, Homo sapien
gaaaagtctctacaaccctgcacgt

SEQ ID NO: 5051416 - DNA, 25 bp, Homo sapien
gggatgtatcaaagctgtctaggaa

SEQ ID NO: 5051417 - DNA, 25 bp, Homo sapien
tgtgtgtactatgatgcaatgtgaa

SEQ ID NO: 5051418 - DNA, 25 bp, Homo sapien
gaattacttatatttgggttgcagg

SEQ ID NO: 5051419 - DNA, 25 bp, Homo sapien
tggagtaaaatcaacaatgttgcag

SEQ ID NO: 5051420 - DNA, 25 bp, Homo sapien
ttcccagatgaagacccaagagatg

SEQ ID NO: 5051421 - DNA, 25 bp, Homo sapien
gaccacttgcctctagcagccttag

SEQ ID NO: 5051422 - DNA, 25 bp, Homo sapien
caaggctggagcctaagacctgacc

SEQ ID NO: 5051423 - DNA, 25 bp, Homo sapien
caaaacagtgaggacaatacccagt

SEQ ID NO: 5051424 - DNA, 25 bp, Homo sapien
ggaggatcatgggaacagaagacca

SEQ ID NO: 5051425 - DNA, 25 bp, Homo sapien
aaagggagaaagcgcctagctttct

SEQ ID NO: 5051426 - DNA, 25 bp, Homo sapien
tcttaactttatgttggcagtgact

SEQ ID NO: 5051427 - DNA, 25 bp, Homo sapien
gaggatcatgggaacagaagaccaa

SEQ ID NO: 5051428 - DNA, 25 bp, Homo sapien
tctcagttaagaagatgggcctgcc

SEQ ID NO: 5051429 - DNA, 25 bp, Homo sapien
gactttgtatatgatggccctagag

SEQ ID NO: 5051430 - DNA, 25 bp, Homo sapien
ggaagcaacagcgatacggaacatt

SEQ ID NO: 5051431 - DNA, 25 bp, Homo sapien
caagatgggcctgacaactggatgc

SEQ ID NO: 5051432 - DNA, 25 bp, Homo sapien
ccagccagaaggaaagtagtgccat

SEQ ID NO: 5051433 - DNA, 25 bp, Homo sapien
tagtggccacgggtctggagttcaa

SEQ ID NO: 5051434 - DNA, 25 bp, Homo sapien
gacatcagattccacatggcgagaa

SEQ ID NO: 5051435 - DNA, 25 bp, Homo sapien
caatgagatccccaagggtgtgact

SEQ ID NO: 5051436 - DNA, 25 bp, Homo sapien
caggtaacaagtgatagagggtaga

SEQ ID NO: 5051437 - DNA, 25 bp, Homo sapien
caatgattggcttgctgcacgttgg

SEQ ID NO: 5051438 - DNA, 25 bp, Homo sapien
aattagacttaattgggctgggcct

SEQ ID NO: 5051439 - DNA, 25 bp, Homo sapien
aactaacagtagtagagcagggaaa

SEQ ID NO: 5051440 - DNA, 25 bp, Homo sapien
tgccttgcttttcgctgttggccaa

SEQ ID NO: 5051441 - DNA, 25 bp, Homo sapien
gtgtgtccgcatgccttgcttttcg

SEQ ID NO: 5051442 - DNA, 25 bp, Homo sapien
ctgacacagagacggcgtgtgtccg

SEQ ID NO: 5051443 - DNA, 25 bp, Homo sapien
agacggcgtgtgtccgcatgccttg

SEQ ID NO: 5051444 - DNA, 25 bp, Homo sapien
tattgatggcaaagcccgttcacct

SEQ ID NO: 5051445 - DNA, 25 bp, Homo sapien
attgatggcaaagcccgttcacctt

SEQ ID NO: 5051446 - DNA, 25 bp, Homo sapien
tttggtattgatggcaaagcccgtt

SEQ ID NO: 5051447 - DNA, 25 bp, Homo sapien
ggtattgatggcaaagcccgttcac

SEQ ID NO: 5051448 - DNA, 25 bp, Homo sapien
gtcatctttgtatcgtgtctgtggg

SEQ ID NO: 5051449 - DNA, 25 bp, Homo sapien
tgtcttctaatccatctgagctaaa

SEQ ID NO: 5051450 - DNA, 25 bp, Homo sapien
tgagatttaaacaccccagcttaat

SEQ ID NO: 5051451 - DNA, 25 bp, Homo sapien
tgaggaggcacccatctaccactca

SEQ ID NO: 5051452 - DNA, 25 bp, Homo sapien
tttcaaatgacacattagtgtgatt

SEQ ID NO: 5051453 - DNA, 25 bp, Homo sapien
tctgtttgtattctgttgaaatttc

SEQ ID NO: 5051454 - DNA, 25 bp, Homo sapien
caccttactcacacccaaattgtta

SEQ ID NO: 5051455 - DNA, 25 bp, Homo sapien
agcaccaccaccttactcacaccca

SEQ ID NO: 5051456 - DNA, 25 bp, Homo sapien
aactatggtagatcaaagaactaac

SEQ ID NO: 5051457 - DNA, 25 bp, Homo sapien
caggaaaacggtacattagagttgc

SEQ ID NO: 5051458 - DNA, 25 bp, Homo sapien
gccactatgacaaggtaacatccct

SEQ ID NO: 5051459 - DNA, 25 bp, Homo sapien
tgggcacacccaattcacatgtaga

SEQ ID NO: 5051460 - DNA, 25 bp, Homo sapien
ccatattctccgcaatggttaggga

SEQ ID NO: 5051461 - DNA, 25 bp, Homo sapien
cagccggcagtacccatctattagg

SEQ ID NO: 5051462 - DNA, 25 bp, Homo sapien
gatgataaatgactgcgaggttcca

SEQ ID NO: 5051463 - DNA, 25 bp, Homo sapien
caatggttagggatggtgccgtcac

SEQ ID NO: 5051464 - DNA, 25 bp, Homo sapien
tctgtccttgtcttcactgtttgaa

SEQ ID NO: 5051465 - DNA, 25 bp, Homo sapien
ttctgtccttgtcttcactgtttga

SEQ ID NO: 5051466 - DNA, 25 bp, Homo sapien
aatggtttgcacttgagtgaagtca

SEQ ID NO: 5051467 - DNA, 25 bp, Homo sapien
tactgaatggtttgcacttgagtga

SEQ ID NO: 5051468 - DNA, 25 bp, Homo sapien
cattgcatggcgaacagatgatgcc

SEQ ID NO: 5051469 - DNA, 25 bp, Homo sapien
gatgatgccactagaacggagttgg

SEQ ID NO: 5051470 - DNA, 25 bp, Homo sapien
tcctgcgccgtttgtagagacatgt

SEQ ID NO: 5051471 - DNA, 25 bp, Homo sapien
ttcagaaagaggttcacactgggct

SEQ ID NO: 5051472 - DNA, 25 bp, Homo sapien
tgaagaaatttgttaccatgagacc

SEQ ID NO: 5051473 - DNA, 25 bp, Homo sapien
ggtcacctgcaaaggaaggcccatc

SEQ ID NO: 5051474 - DNA, 25 bp, Homo sapien
gatatgatctatgaaaagttcccca

SEQ ID NO: 5051475 - DNA, 25 bp, Homo sapien
aagttccccaacctagctagagaag

SEQ ID NO: 5051476 - DNA, 25 bp, Homo sapien
tgggccgattgccagttccactgaa

SEQ ID NO: 5051477 - DNA, 25 bp, Homo sapien
attgcagcccttgtccgttaggtaa

SEQ ID NO: 5051478 - DNA, 25 bp, Homo sapien
tgtccgttaggtaactgattccttc

SEQ ID NO: 5051479 - DNA, 25 bp, Homo sapien
cagcccttgtccgttaggtaactga

SEQ ID NO: 5051480 - DNA, 25 bp, Homo sapien
gcaaattgtctaaatgtttgttgga

SEQ ID NO: 5051481 - DNA, 25 bp, Homo sapien
gtttgttggatcagttttcttagtg

SEQ ID NO: 5051482 - DNA, 25 bp, Homo sapien
cttgaagcattccttatcaaatctg

SEQ ID NO: 5051483 - DNA, 25 bp, Homo sapien
ttccttatcaaatctgtagactgga

SEQ ID NO: 5051484 - DNA, 25 bp, Homo sapien
gctaatctcagtgggtcagggacat

SEQ ID NO: 5051485 - DNA, 25 bp, Homo sapien
tatggtcagagagaaggatacacac

SEQ ID NO: 5051486 - DNA, 25 bp, Homo sapien
cagtctctaagaagcaggcccgcta

SEQ ID NO: 5051487 - DNA, 25 bp, Homo sapien
gatttgagtactgcttgtagccacc

SEQ ID NO: 5051488 - DNA, 25 bp, Homo sapien
tccaggccttgatcattgcacatct

SEQ ID NO: 5051489 - DNA, 25 bp, Homo sapien
catccaggccttgatcattgcacat

SEQ ID NO: 5051490 - DNA, 25 bp, Homo sapien
tccatccaggccttgatcattgcac

SEQ ID NO: 5051491 - DNA, 25 bp, Homo sapien
ccatccaggccttgatcattgcaca

SEQ ID NO: 5051492 - DNA, 25 bp, Homo sapien
gacagaatccagtaaactcttagga

SEQ ID NO: 5051493 - DNA, 25 bp, Homo sapien
tgacagaatccagtaaactcttagg

SEQ ID NO: 5051494 - DNA, 25 bp, Homo sapien
acagaatccagtaaactcttaggaa

SEQ ID NO: 5051495 - DNA, 25 bp, Homo sapien
ttgacagaatccagtaaactcttag

SEQ ID NO: 5051496 - DNA, 25 bp, Homo sapien
tcactacagtggagcaaaagcacag

SEQ ID NO: 5051497 - DNA, 25 bp, Homo sapien
ggagatagggtgctgaattcacaca

SEQ ID NO: 5051498 - DNA, 25 bp, Homo sapien
tctcatatataggtaggtatcacca

SEQ ID NO: 5051499 - DNA, 25 bp, Homo sapien
caaggtgcgataaggacttgaaccc

SEQ ID NO: 5051500 - DNA, 25 bp, Homo sapien
attgccccgcatctcccagtatgat

SEQ ID NO: 5051501 - DNA, 25 bp, Homo sapien
catagttagacttcttttctagtgc

SEQ ID NO: 5051502 - DNA, 25 bp, Homo sapien
tagacttcttttctagtgcattgcc

SEQ ID NO: 5051503 - DNA, 25 bp, Homo sapien
tttctagtgcattgccccgcatctc

SEQ ID NO: 5051504 - DNA, 25 bp, Homo sapien
aataaaggccgcaatgtatagttat

SEQ ID NO: 5051505 - DNA, 25 bp, Homo sapien
ataaaggccgcaatgtatagttatc

SEQ ID NO: 5051506 - DNA, 25 bp, Homo sapien
tcagctatctctaacatataatcgc

SEQ ID NO: 5051507 - DNA, 25 bp, Homo sapien
tctctaacatataatcgctcttcac

SEQ ID NO: 5051508 - DNA, 25 bp, Homo sapien
tggtccacttgatcagctatctcta

SEQ ID NO: 5051509 - DNA, 25 bp, Homo sapien
cacttgatcagctatctctaacata

SEQ ID NO: 5051510 - DNA, 25 bp, Homo sapien
cattcaataaatgtttcctgagtac

SEQ ID NO: 5051511 - DNA, 25 bp, Homo sapien
gaaaaatattagatatatgcattca

SEQ ID NO: 5051512 - DNA, 25 bp, Homo sapien
aagaaaaatattagatatatgcatt

SEQ ID NO: 5051513 - DNA, 25 bp, Homo sapien
aaaatattagatatatgcattcaat

SEQ ID NO: 5051514 - DNA, 25 bp, Homo sapien
ctgagtacctttcatatagtttaca

SEQ ID NO: 5051515 - DNA, 25 bp, Homo sapien
gtttacattgtgtcggtaattatgc

SEQ ID NO: 5051516 - DNA, 25 bp, Homo sapien
catatagtttacattgtgtcggtaa

SEQ ID NO: 5051517 - DNA, 25 bp, Homo sapien
tatagtttacattgtgtcggtaatt

SEQ ID NO: 5051518 - DNA, 25 bp, Homo sapien
taaagatataaacgtgagttatacc

SEQ ID NO: 5051519 - DNA, 25 bp, Homo sapien
tgttaaagatataaacgtgagttat

SEQ ID NO: 5051520 - DNA, 25 bp, Homo sapien
aagatataaacgtgagttataccaa

SEQ ID NO: 5051521 - DNA, 25 bp, Homo sapien
gatataaacgtgagttataccaaaa

SEQ ID NO: 5051522 - DNA, 25 bp, Homo sapien
gtcacccaacaaactggaggacgtg

SEQ ID NO: 5051523 - DNA, 25 bp, Homo sapien
ggcttttggtatactggccaattca

SEQ ID NO: 5051524 - DNA, 25 bp, Homo sapien
ggaggacgtgaacatactcaaggct

SEQ ID NO: 5051525 - DNA, 25 bp, Homo sapien
taaagatggcagtcaacagggtcac

SEQ ID NO: 5051526 - DNA, 25 bp, Homo sapien
aatgattgtagacctactgtctcca

SEQ ID NO: 5051527 - DNA, 25 bp, Homo sapien
tatgggtatagttggctctgcaaca

SEQ ID NO: 5051528 - DNA, 25 bp, Homo sapien
gcaaagcagatcaattttatatggg

SEQ ID NO: 5051529 - DNA, 25 bp, Homo sapien
tattgtctatctaatgccttacggg

SEQ ID NO: 5051530 - DNA, 25 bp, Homo sapien
aaagttggcttatcttcagtaaact

SEQ ID NO: 5051531 - DNA, 25 bp, Homo sapien
ggcaaataacgaattctcaattcat

SEQ ID NO: 5051532 - DNA, 25 bp, Homo sapien
gcttatcttcagtaaactggtttag

SEQ ID NO: 5051533 - DNA, 25 bp, Homo sapien
tccttttggcaaataacgaattctc

SEQ ID NO: 5051534 - DNA, 25 bp, Homo sapien
caacttaggatttaccaggcacgta

SEQ ID NO: 5051535 - DNA, 25 bp, Homo sapien
tttggtacacatacgcaagttctgc

SEQ ID NO: 5051536 - DNA, 25 bp, Homo sapien
tgccaaacaattcggtttcatttca

SEQ ID NO: 5051537 - DNA, 25 bp, Homo sapien
gacagagttcaataacttactgtag

SEQ ID NO: 5051538 - DNA, 25 bp, Homo sapien
gatcacctatgcctgaatttgggcc

SEQ ID NO: 5051539 - DNA, 25 bp, Homo sapien
catgggctctagataaagatcacct

SEQ ID NO: 5051540 - DNA, 25 bp, Homo sapien
ggttcaacatgaaacaatgggcagc

SEQ ID NO: 5051541 - DNA, 25 bp, Homo sapien
gggccatgccacttattcactgtca

SEQ ID NO: 5051542 - DNA, 25 bp, Homo sapien
tggaacagactatgaaaaggccctg

SEQ ID NO: 5051543 - DNA, 25 bp, Homo sapien
gatagtcgggttctttctcaatgag

SEQ ID NO: 5051544 - DNA, 25 bp, Homo sapien
tatttagaggtaggcatgggattcc

SEQ ID NO: 5051545 - DNA, 25 bp, Homo sapien
taacaggcaaagtgctaactcccaa

SEQ ID NO: 5051546 - DNA, 25 bp, Homo sapien
tcctatcatttagtgggtagaagcc

SEQ ID NO: 5051547 - DNA, 25 bp, Homo sapien
tgtaggacaagcaacacagcttcct

SEQ ID NO: 5051548 - DNA, 25 bp, Homo sapien
caaagggcacacctaatttggatcc

SEQ ID NO: 5051549 - DNA, 25 bp, Homo sapien
tgtcacggacaaaatccagatgagg

SEQ ID NO: 5051550 - DNA, 25 bp, Homo sapien
tgtcacaaactatgtaactacaagt

SEQ ID NO: 5051551 - DNA, 25 bp, Homo sapien
ggtgtaagcagcatacagatggcag

SEQ ID NO: 5051552 - DNA, 25 bp, Homo sapien
cattattcccatattgagataggca

SEQ ID NO: 5051553 - DNA, 25 bp, Homo sapien
taagttcgaatcaaagctgtgtcac

SEQ ID NO: 5051554 - DNA, 25 bp, Homo sapien
aataaaagtaccttgacacaggagg

SEQ ID NO: 5051555 - DNA, 25 bp, Homo sapien
tctttgatgaactctgtaactggcg

SEQ ID NO: 5051556 - DNA, 25 bp, Homo sapien
ggtaccagctacctgacaaatttga

SEQ ID NO: 5051557 - DNA, 25 bp, Homo sapien
tggaatgctcacttgcttaattgac

SEQ ID NO: 5051558 - DNA, 25 bp, Homo sapien
attcaccttaacatgtttgtctttt

SEQ ID NO: 5051559 - DNA, 25 bp, Homo sapien
tattcaccttaacatgtttgtcttt

SEQ ID NO: 5051560 - DNA, 25 bp, Homo sapien
aaatgtctaccctaatcaatctaga

SEQ ID NO: 5051561 - DNA, 25 bp, Homo sapien
tgtctaccctaatcaatctagatcc

SEQ ID NO: 5051562 - DNA, 25 bp, Homo sapien
cagatggctcaaagtataattaata

SEQ ID NO: 5051563 - DNA, 25 bp, Homo sapien
gagcaaaggttgaaacaaagtagca

SEQ ID NO: 5051564 - DNA, 25 bp, Homo sapien
gaccatcacagaaaacggaaatcag

SEQ ID NO: 5051565 - DNA, 25 bp, Homo sapien
cccaaaagctagactagaggtctag

SEQ ID NO: 5051566 - DNA, 25 bp, Homo sapien
gtgtgcatcacaccaaagcaggttt

SEQ ID NO: 5051567 - DNA, 25 bp, Homo sapien
gtgcatcacaccaaagcaggtttgt

SEQ ID NO: 5051568 - DNA, 25 bp, Homo sapien
ttatttataccagagttgtaatgac

SEQ ID NO: 5051569 - DNA, 25 bp, Homo sapien
ttttatttataccagagttgtaatg

SEQ ID NO: 5051570 - DNA, 25 bp, Homo sapien
tgactgaggcggaatccatagcagg

SEQ ID NO: 5051571 - DNA, 25 bp, Homo sapien
tggagacgcccatatccacgtgaag

SEQ ID NO: 5051572 - DNA, 25 bp, Homo sapien
ggtgggtgagcaagctcatacttct

SEQ ID NO: 5051573 - DNA, 25 bp, Homo sapien
ggccacatgctttactttgtgactg

SEQ ID NO: 5051574 - DNA, 25 bp, Homo sapien
cataacctgatgttgaatataaggc

SEQ ID NO: 5051575 - DNA, 25 bp, Homo sapien
cttccataacctgatgttgaatata

SEQ ID NO: 5051576 - DNA, 25 bp, Homo sapien
gatgttgaatataaggcagtaagga

SEQ ID NO: 5051577 - DNA, 25 bp, Homo sapien
cctgatgttgaatataaggcagtaa

SEQ ID NO: 5051578 - DNA, 25 bp, Homo sapien
cacttggctgtttgcctgctagaca

SEQ ID NO: 5051579 - DNA, 25 bp, Homo sapien
tgagactctcaaaggacgtgcatgt

SEQ ID NO: 5051580 - DNA, 25 bp, Homo sapien
aagcaaggagccacatcccgtaggt

SEQ ID NO: 5051581 - DNA, 25 bp, Homo sapien
taccatgaagtacaaagatccctga

SEQ ID NO: 5051582 - DNA, 25 bp, Homo sapien
gctggctacgtagatggagagtgct

SEQ ID NO: 5051583 - DNA, 25 bp, Homo sapien
cagcttgtcagtgcgattttgtaat

SEQ ID NO: 5051584 - DNA, 25 bp, Homo sapien
aataactggactgacaaggtgtacc

SEQ ID NO: 5051585 - DNA, 25 bp, Homo sapien
gtacctgattttggcagtacctggg

SEQ ID NO: 5051586 - DNA, 25 bp, Homo sapien
tagaacgctggtcagtcacatatta

SEQ ID NO: 5051587 - DNA, 25 bp, Homo sapien
gatgtctcatggaaaaacgtactta

SEQ ID NO: 5051588 - DNA, 25 bp, Homo sapien
tacaacaattagaacgctggtcagt

SEQ ID NO: 5051589 - DNA, 25 bp, Homo sapien
ttaaagatgtctcatggaaaaacgt

SEQ ID NO: 5051590 - DNA, 25 bp, Homo sapien
tccatgcctgataatactggcccag

SEQ ID NO: 5051591 - DNA, 25 bp, Homo sapien
ggcccaggtggttggctcactattg

SEQ ID NO: 5051592 - DNA, 25 bp, Homo sapien
ttaatactcgctccattgcaccagg

SEQ ID NO: 5051593 - DNA, 25 bp, Homo sapien
gttccataccagtacccaggtgagt

SEQ ID NO: 5051594 - DNA, 25 bp, Homo sapien
tctgaggagaatagagacctaatcc

SEQ ID NO: 5051595 - DNA, 25 bp, Homo sapien
atgttatatgcggaaggagtctgag

SEQ ID NO: 5051596 - DNA, 25 bp, Homo sapien
tgtctctccccatacccagagtagg

SEQ ID NO: 5051597 - DNA, 25 bp, Homo sapien
gagacctaatccactaaaataatag

SEQ ID NO: 5051598 - DNA, 25 bp, Homo sapien
tcctgaagacagttacggaatcctg

SEQ ID NO: 5051599 - DNA, 25 bp, Homo sapien
gagaaggagcctctcaaaacagtga

SEQ ID NO: 5051600 - DNA, 25 bp, Homo sapien
caaagatattctgaggcaaccaaga

SEQ ID NO: 5051601 - DNA, 25 bp, Homo sapien
gagctttcggcagcaagggatcaaa

SEQ ID NO: 5051602 - DNA, 25 bp, Homo sapien
attagatgccatttgtcaatttggc

SEQ ID NO: 5051603 - DNA, 25 bp, Homo sapien
ttagatgccatttgtcaatttggct

SEQ ID NO: 5051604 - DNA, 25 bp, Homo sapien
tagatgccatttgtcaatttggctt

SEQ ID NO: 5051605 - DNA, 25 bp, Homo sapien
gccattgcttctgttgttttagtca

SEQ ID NO: 5051606 - DNA, 25 bp, Homo sapien
gcatctattgataatcatggttttt

SEQ ID NO: 5051607 - DNA, 25 bp, Homo sapien
gagcttcatggggacagcatcgaat

SEQ ID NO: 5051608 - DNA, 25 bp, Homo sapien
aagtcaatgggagcttcatggggac

SEQ ID NO: 5051609 - DNA, 25 bp, Homo sapien
catggggacagcatcgaatctataa

SEQ ID NO: 5051610 - DNA, 25 bp, Homo sapien
ttgggagacccatgtcatgtgcaaa

SEQ ID NO: 5051611 - DNA, 25 bp, Homo sapien
tgtaagtgtgctaaatatcccaatt

SEQ ID NO: 5051612 - DNA, 25 bp, Homo sapien
atgtaagtgtgctaaatatcccaat

SEQ ID NO: 5051613 - DNA, 25 bp, Homo sapien
cggagtgctgtatttgggagaccca

SEQ ID NO: 5051614 - DNA, 25 bp, Homo sapien
tcatatcggcgctcaaaaaagctga

SEQ ID NO: 5051615 - DNA, 25 bp, Homo sapien
gcatatgcccactttaccaaatgtg

SEQ ID NO: 5051616 - DNA, 25 bp, Homo sapien
tctgcaatgctccaacaagtttccg

SEQ ID NO: 5051617 - DNA, 25 bp, Homo sapien
gcatcgagcgagtctatgggcatca

SEQ ID NO: 5051618 - DNA, 25 bp, Homo sapien
tctccatatagatggcacctgctgg

SEQ ID NO: 5051619 - DNA, 25 bp, Homo sapien
gaagaatgcctctcagttacagaat

SEQ ID NO: 5051620 - DNA, 25 bp, Homo sapien
tataaagatcaagccaggagtctgc

SEQ ID NO: 5051621 - DNA, 25 bp, Homo sapien
caagcaagactaaggttcccctgtg

SEQ ID NO: 5051622 - DNA, 25 bp, Homo sapien
tcaagctactgaacagaatgaaacc

SEQ ID NO: 5051623 - DNA, 25 bp, Homo sapien
gcttagtaatgtgaccccatggctc

SEQ ID NO: 5051624 - DNA, 25 bp, Homo sapien
gaacagaatgaaaccagcttagtaa

SEQ ID NO: 5051625 - DNA, 25 bp, Homo sapien
ggctagatcaagctactgaacagaa

SEQ ID NO: 5051626 - DNA, 25 bp, Homo sapien
gcaaagtttcttaaccattactata

SEQ ID NO: 5051627 - DNA, 25 bp, Homo sapien
tgcaaagtttcttaaccattactat

SEQ ID NO: 5051628 - DNA, 25 bp, Homo sapien
ccttccgttattcttgaggagctct

SEQ ID NO: 5051629 - DNA, 25 bp, Homo sapien
ctcccttccgttattcttgaggagc

SEQ ID NO: 5051630 - DNA, 25 bp, Homo sapien
aactggaagatgcaagggagcccca

SEQ ID NO: 5051631 - DNA, 25 bp, Homo sapien
taactggaagatgcaagggagcccc

SEQ ID NO: 5051632 - DNA, 25 bp, Homo sapien
agatgctacaaaggtttccagagaa

SEQ ID NO: 5051633 - DNA, 25 bp, Homo sapien
ctccagatgctacaaaggtttccag

SEQ ID NO: 5051634 - DNA, 25 bp, Homo sapien
tccagatgctacaaaggtttccaga

SEQ ID NO: 5051635 - DNA, 25 bp, Homo sapien
cagatgctacaaaggtttccagaga

SEQ ID NO: 5051636 - DNA, 25 bp, Homo sapien
gtcaagctattgtgtctttccaagt

SEQ ID NO: 5051637 - DNA, 25 bp, Homo sapien
tagcaacagtgtcaagctattgtgt

SEQ ID NO: 5051638 - DNA, 25 bp, Homo sapien
cagtgtcaagctattgtgtctttcc

SEQ ID NO: 5051639 - DNA, 25 bp, Homo sapien
tattgtgtctttccaagttaggtta

SEQ ID NO: 5051640 - DNA, 25 bp, Homo sapien
caagcaaacaaatctgagtacccag

SEQ ID NO: 5051641 - DNA, 25 bp, Homo sapien
taaattaagcagtagggatcccaaa

SEQ ID NO: 5051642 - DNA, 25 bp, Homo sapien
aaaggctccatgtcactgtaagtgc

SEQ ID NO: 5051643 - DNA, 25 bp, Homo sapien
tttgagagcgcccataacaaaggct

SEQ ID NO: 5051644 - DNA, 25 bp, Homo sapien
ctctctctagcaagatgttttcttt

SEQ ID NO: 5051645 - DNA, 25 bp, Homo sapien
gcacccgaccaatgctgttgttatg

SEQ ID NO: 5051646 - DNA, 25 bp, Homo sapien
tgcacccgaccaatgctgttgttat

SEQ ID NO: 5051647 - DNA, 25 bp, Homo sapien
acccgaccaatgctgttgttatgtt

SEQ ID NO: 5051648 - DNA, 25 bp, Homo sapien
cacccgaccaatgctgttgttatgt

SEQ ID NO: 5051649 - DNA, 25 bp, Homo sapien
tagtatgtatctcccaagtttaagg

SEQ ID NO: 5051650 - DNA, 25 bp, Homo sapien
taaagcctggacataattacacgtg

SEQ ID NO: 5051651 - DNA, 25 bp, Homo sapien
taaagtatactctaattggcaccct

SEQ ID NO: 5051652 - DNA, 25 bp, Homo sapien
ttggcacccttgaattacccaggaa

SEQ ID NO: 5051653 - DNA, 25 bp, Homo sapien
gtgtctacactgaaatctacttcac

SEQ ID NO: 5051654 - DNA, 25 bp, Homo sapien
tatacaatctcattatacaaagaca

SEQ ID NO: 5051655 - DNA, 25 bp, Homo sapien
caactttggtggtacctaatccaga

SEQ ID NO: 5051656 - DNA, 25 bp, Homo sapien
aatataaagcctttaggccacaaat

SEQ ID NO: 5051657 - DNA, 25 bp, Homo sapien
gactgctttgaagatctgcccattt

SEQ ID NO: 5051658 - DNA, 25 bp, Homo sapien
cattcttgtcatgtggcactgtcac

SEQ ID NO: 5051659 - DNA, 25 bp, Homo sapien
tgtctccagtgattacgaataaagc

SEQ ID NO: 5051660 - DNA, 25 bp, Homo sapien
caacactatgatatgcaaagacgga

SEQ ID NO: 5051661 - DNA, 25 bp, Homo sapien
ctaacgactactaatgtggaacatc

SEQ ID NO: 5051662 - DNA, 25 bp, Homo sapien
gccaaacacggagcagcttcttaaa

SEQ ID NO: 5051663 - DNA, 25 bp, Homo sapien
tccaatttggccaaacacggagcag

SEQ ID NO: 5051664 - DNA, 25 bp, Homo sapien
tttggccaaacacggagcagcttct

SEQ ID NO: 5051665 - DNA, 25 bp, Homo sapien
tctctccaatttggccaaacacgga

SEQ ID NO: 5051666 - DNA, 25 bp, Homo sapien
actgaagtggtactacagcactcat

SEQ ID NO: 5051667 - DNA, 25 bp, Homo sapien
tgtgtccggccgtaacttagtatcc

SEQ ID NO: 5051668 - DNA, 25 bp, Homo sapien
tgggattacaacagctggatgcaac

SEQ ID NO: 5051669 - DNA, 25 bp, Homo sapien
ggaagaacagtaaaccttgcttata

SEQ ID NO: 5051670 - DNA, 25 bp, Homo sapien
cctcctcctgtggaggttcaaggaa

SEQ ID NO: 5051671 - DNA, 25 bp, Homo sapien
tcagaagcccacaataactctgaag

SEQ ID NO: 5051672 - DNA, 25 bp, Homo sapien
agaagcccacaataactctgaagaa

SEQ ID NO: 5051673 - DNA, 25 bp, Homo sapien
agttcagaagcccacaataactctg

SEQ ID NO: 5051674 - DNA, 25 bp, Homo sapien
gttcagaagcccacaataactctga

SEQ ID NO: 5051675 - DNA, 25 bp, Homo sapien
tactcacgcgttttagtgaagctgg

SEQ ID NO: 5051676 - DNA, 25 bp, Homo sapien
aacagacctactgtgctgccagtcg

SEQ ID NO: 5051677 - DNA, 25 bp, Homo sapien
tatcattgtagagtacacgccttct

SEQ ID NO: 5051678 - DNA, 25 bp, Homo sapien
taacctaggcgataacagctccatg

SEQ ID NO: 5051679 - DNA, 25 bp, Homo sapien
aagtagtgtaagagtgatccgttcc

SEQ ID NO: 5051680 - DNA, 25 bp, Homo sapien
tatgagtatcaccaagggataaaga

SEQ ID NO: 5051681 - DNA, 25 bp, Homo sapien
ttacctgtggcccacgtatagcagc

SEQ ID NO: 5051682 - DNA, 25 bp, Homo sapien
cctcagaaatggtggacttttatat

SEQ ID NO: 5051683 - DNA, 25 bp, Homo sapien
caagtagctggcatgcgctacatga

SEQ ID NO: 5051684 - DNA, 25 bp, Homo sapien
gcatgcgctacatgattacaggcat

SEQ ID NO: 5051685 - DNA, 25 bp, Homo sapien
tggcatgcgctacatgattacaggc

SEQ ID NO: 5051686 - DNA, 25 bp, Homo sapien
agctggcatgcgctacatgattaca

SEQ ID NO: 5051687 - DNA, 25 bp, Homo sapien
gcttgccctttaagtgctctcctgg

SEQ ID NO: 5051688 - DNA, 25 bp, Homo sapien
ttcccagcattagtgacactcctca

SEQ ID NO: 5051689 - DNA, 25 bp, Homo sapien
cattagtgacactcctcactcatgg

SEQ ID NO: 5051690 - DNA, 25 bp, Homo sapien
tcatggcaatcctacaaacttcctg

SEQ ID NO: 5051691 - DNA, 25 bp, Homo sapien
gcatgtgccactgagaccatttctc

SEQ ID NO: 5051692 - DNA, 25 bp, Homo sapien
tcagaccttgcttgcccttaatgag

SEQ ID NO: 5051693 - DNA, 25 bp, Homo sapien
tcattccaggaacaaaaattcaaag

SEQ ID NO: 5051694 - DNA, 25 bp, Homo sapien
gagatctgctatacattcctggcat

SEQ ID NO: 5051695 - DNA, 25 bp, Homo sapien
tgctaaataaggctcaaacccagta

SEQ ID NO: 5051696 - DNA, 25 bp, Homo sapien
caatagcagcttcatgtgtgtggag

SEQ ID NO: 5051697 - DNA, 25 bp, Homo sapien
tttcaatgcacaatccaacttggcc

SEQ ID NO: 5051698 - DNA, 25 bp, Homo sapien
gaattaaacaagtaggatgagcccc

SEQ ID NO: 5051699 - DNA, 25 bp, Homo sapien
gcacttaacacaagctgcaacctat

SEQ ID NO: 5051700 - DNA, 25 bp, Homo sapien
gctgcaacctatattctgaaagaac

SEQ ID NO: 5051701 - DNA, 25 bp, Homo sapien
aactcagtctatcaatagttcctgc

SEQ ID NO: 5051702 - DNA, 25 bp, Homo sapien
aactcatctatgaagctccccaatg

SEQ ID NO: 5051703 - DNA, 25 bp, Homo sapien
tgtacttatgaacatcgagttgatc

SEQ ID NO: 5051704 - DNA, 25 bp, Homo sapien
cagtagaaataactacactgttagg

SEQ ID NO: 5051705 - DNA, 25 bp, Homo sapien
gaaataactacactgttaggaactg

SEQ ID NO: 5051706 - DNA, 25 bp, Homo sapien
gttaggaactgtacttatgaacatc

SEQ ID NO: 5051707 - DNA, 25 bp, Homo sapien
tgggttcaaactacattccagtagc

SEQ ID NO: 5051708 - DNA, 25 bp, Homo sapien
tcaaactccgatgcaagtacaaaga

SEQ ID NO: 5051709 - DNA, 25 bp, Homo sapien
cagtatttcgatgtatcctgtcagg

SEQ ID NO: 5051710 - DNA, 25 bp, Homo sapien
caatgcaataacatgctagaaggca

SEQ ID NO: 5051711 - DNA, 25 bp, Homo sapien
tagccccagcgtgaaattctgagag

SEQ ID NO: 5051712 - DNA, 25 bp, Homo sapien
tctgagagtgatatcttaaccagtc

SEQ ID NO: 5051713 - DNA, 25 bp, Homo sapien
cttggaattacaattagccccagcg

SEQ ID NO: 5051714 - DNA, 25 bp, Homo sapien
ttcacttttgacttctatgccactg

SEQ ID NO: 5051715 - DNA, 25 bp, Homo sapien
gcatgccagggaactataacagtct

SEQ ID NO: 5051716 - DNA, 25 bp, Homo sapien
tcagggcttaataccgtaccaggca

SEQ ID NO: 5051717 - DNA, 25 bp, Homo sapien
cagattgcctgagcacgctaagaga

SEQ ID NO: 5051718 - DNA, 25 bp, Homo sapien
aggttgggcatcacaagggacttgc

SEQ ID NO: 5051719 - DNA, 25 bp, Homo sapien
tagccatatgtagaaagctgaatct

SEQ ID NO: 5051720 - DNA, 25 bp, Homo sapien
gctagccatatgtagaaagctgaat

SEQ ID NO: 5051721 - DNA, 25 bp, Homo sapien
ccatatgtagaaagctgaatctgga

SEQ ID NO: 5051722 - DNA, 25 bp, Homo sapien
gccatatgtagaaagctgaatctgg

SEQ ID NO: 5051723 - DNA, 25 bp, Homo sapien
cacatagaaagaacagctacaagtc

SEQ ID NO: 5051724 - DNA, 25 bp, Homo sapien
ggatgtggaacaacaggagtgatac

SEQ ID NO: 5051725 - DNA, 25 bp, Homo sapien
gaaacttaataggtccttcacagaa

SEQ ID NO: 5051726 - DNA, 25 bp, Homo sapien
tcattactaataagggaagttcaaa

SEQ ID NO: 5051727 - DNA, 25 bp, Homo sapien
tcataaagcgtttaataagaccaag

SEQ ID NO: 5051728 - DNA, 25 bp, Homo sapien
agcgtttaataagaccaagcactgc

SEQ ID NO: 5051729 - DNA, 25 bp, Homo sapien
taataagaccaagcactgccgggca

SEQ ID NO: 5051730 - DNA, 25 bp, Homo sapien
tttaataagaccaagcactgccggg

SEQ ID NO: 5051731 - DNA, 25 bp, Homo sapien
tccactccagcctggcagcctgggt

SEQ ID NO: 5051732 - DNA, 25 bp, Homo sapien
tccagcctggcagcctgggtgacac

SEQ ID NO: 5051733 - DNA, 25 bp, Homo sapien
actccagcctggcagcctgggtgac

SEQ ID NO: 5051734 - DNA, 25 bp, Homo sapien
actccactccagcctggcagcctgg

SEQ ID NO: 5051735 - DNA, 25 bp, Homo sapien
ggtttcagctacctctcttgatact

SEQ ID NO: 5051736 - DNA, 25 bp, Homo sapien
tggtttcagctacctctcttgatac

SEQ ID NO: 5051737 - DNA, 25 bp, Homo sapien
catcaacatccaggcttttgcccat

SEQ ID NO: 5051738 - DNA, 25 bp, Homo sapien
caatctccacacggttctcatcaac

SEQ ID NO: 5051739 - DNA, 25 bp, Homo sapien
ttctcatcaacatccaggcttttgc

SEQ ID NO: 5051740 - DNA, 25 bp, Homo sapien
tcatcaacatccaggcttttgccca

SEQ ID NO: 5051741 - DNA, 25 bp, Homo sapien
taccagtgcaagtccctgatgaggt

SEQ ID NO: 5051742 - DNA, 25 bp, Homo sapien
tcaaatgcagatccacgtaccagtg

SEQ ID NO: 5051743 - DNA, 25 bp, Homo sapien
acagcaaggatacccatattagtgg

SEQ ID NO: 5051744 - DNA, 25 bp, Homo sapien
gaaaatgttctataccagcgctgcc

SEQ ID NO: 5051745 - DNA, 25 bp, Homo sapien
taaaccagtaatgaaccaactatcc

SEQ ID NO: 5051746 - DNA, 25 bp, Homo sapien
caggaataaaagactgggtcctcca

SEQ ID NO: 5051747 - DNA, 25 bp, Homo sapien
agtaatgaaccaactatccagcaga

SEQ ID NO: 5051748 - DNA, 25 bp, Homo sapien
cagagagtaaaccagtaatgaacca

SEQ ID NO: 5051749 - DNA, 25 bp, Homo sapien
tgttccaggtcgattttcccaccat

SEQ ID NO: 5051750 - DNA, 25 bp, Homo sapien
ggccaacaaattgtctcaagaagaa

SEQ ID NO: 5051751 - DNA, 25 bp, Homo sapien
gctttcattgagctgcacagttgag

SEQ ID NO: 5051752 - DNA, 25 bp, Homo sapien
cagtaggaaattcatgtggaaacat

SEQ ID NO: 5051753 - DNA, 25 bp, Homo sapien
tcctgtggcctgctattccctgaga

SEQ ID NO: 5051754 - DNA, 25 bp, Homo sapien
taaacatgtgcattcccactattcc

SEQ ID NO: 5051755 - DNA, 25 bp, Homo sapien
cactattccacttactgggcccctg

SEQ ID NO: 5051756 - DNA, 25 bp, Homo sapien
taattctataatgggccgaagtggg

SEQ ID NO: 5051757 - DNA, 25 bp, Homo sapien
gcgaggcctcctgtgccaaacagcc

SEQ ID NO: 5051758 - DNA, 25 bp, Homo sapien
agcgaggcctcctgtgccaaacagc

SEQ ID NO: 5051759 - DNA, 25 bp, Homo sapien
aagataggccaaaagcgaggcctcc

SEQ ID NO: 5051760 - DNA, 25 bp, Homo sapien
ataaaaaagataggccaaaagcgag

SEQ ID NO: 5051761 - DNA, 25 bp, Homo sapien
tctcggcctccgcgagggcccccaa

SEQ ID NO: 5051762 - DNA, 25 bp, Homo sapien
ctctcggcctccgcgagggccccca

SEQ ID NO: 5051763 - DNA, 25 bp, Homo sapien
ggcgctgggcgacagcagccgcgct

SEQ ID NO: 5051764 - DNA, 25 bp, Homo sapien
tgggcgacagcagccgcgcttcctc

SEQ ID NO: 5051765 - DNA, 25 bp, Homo sapien
cggctcggcgccgtgaagcgaaggc

SEQ ID NO: 5051766 - DNA, 25 bp, Homo sapien
ccgtgaagcgaaggcagacgacgac

SEQ ID NO: 5051767 - DNA, 25 bp, Homo sapien
cgccgcgggctcacagtggtccggg

SEQ ID NO: 5051768 - DNA, 25 bp, Homo sapien
acgccgcgggctcacagtggtccgg

SEQ ID NO: 5051769 - DNA, 25 bp, Homo sapien
gccgcgggctcacagtggtccggga

SEQ ID NO: 5051770 - DNA, 25 bp, Homo sapien
tcacgccgcgggctcacagtggtcc

SEQ ID NO: 5051771 - DNA, 25 bp, Homo sapien
cagaaagaaactgcccgtgcaaagg

SEQ ID NO: 5051772 - DNA, 25 bp, Homo sapien
tctgtaggccaagaagggagctcag

SEQ ID NO: 5051773 - DNA, 25 bp, Homo sapien
ttcttgggaaacaggcaaacctctg

SEQ ID NO: 5051774 - DNA, 25 bp, Homo sapien
tcatttattccagggttaagggcac

SEQ ID NO: 5051775 - DNA, 25 bp, Homo sapien
cagaagtggatttggaaaaaccttg

SEQ ID NO: 5051776 - DNA, 25 bp, Homo sapien
agcggctcccgtgatctggcgcctg

SEQ ID NO: 5051777 - DNA, 25 bp, Homo sapien
ttggccggccactagcctctcggag

SEQ ID NO: 5051778 - DNA, 25 bp, Homo sapien
gtgatctggcgcctgcaggcctcac

SEQ ID NO: 5051779 - DNA, 25 bp, Homo sapien
actagcctctcggagctttgctggg

SEQ ID NO: 5051780 - DNA, 25 bp, Homo sapien
atgaatgaatgagccaacacaggaa

SEQ ID NO: 5051781 - DNA, 25 bp, Homo sapien
gaatgaatgagccaacacaggaatg

SEQ ID NO: 5051782 - DNA, 25 bp, Homo sapien
acgctgaaggtgggcggtgcgtgct

SEQ ID NO: 5051783 - DNA, 25 bp, Homo sapien
acacaggaatgcccgtggacaccac

SEQ ID NO: 5051784 - DNA, 25 bp, Homo sapien
gaaagtgcggtgacaccaggggtcc

SEQ ID NO: 5051785 - DNA, 25 bp, Homo sapien
aagtgcggtgacaccaggggtcctc

SEQ ID NO: 5051786 - DNA, 25 bp, Homo sapien
gcgaaagtgcggtgacaccaggggt

SEQ ID NO: 5051787 - DNA, 25 bp, Homo sapien
ctgcgaaagtgcggtgacaccaggg

SEQ ID NO: 5051788 - DNA, 25 bp, Homo sapien
catctcaagagcctcaacccgctca

SEQ ID NO: 5051789 - DNA, 25 bp, Homo sapien
ctcaagagcctcaacccgctcacag

SEQ ID NO: 5051790 - DNA, 25 bp, Homo sapien
ggttcacatctcaagagcctcaacc

SEQ ID NO: 5051791 - DNA, 25 bp, Homo sapien
tggttcacatctcaagagcctcaac

SEQ ID NO: 5051792 - DNA, 25 bp, Homo sapien
gtgaggtagacccacagacgcaggc

SEQ ID NO: 5051793 - DNA, 25 bp, Homo sapien
tgctctgccgagagactaagctgcc

SEQ ID NO: 5051794 - DNA, 25 bp, Homo sapien
tctgccgagagactaagctgccttc

SEQ ID NO: 5051795 - DNA, 25 bp, Homo sapien
cagacgcaggcagtggttggacaat

SEQ ID NO: 5051796 - DNA, 25 bp, Homo sapien
cttggaggtggcagccggtttctca

SEQ ID NO: 5051797 - DNA, 25 bp, Homo sapien
gaggtggcagccggtttctcatgta

SEQ ID NO: 5051798 - DNA, 25 bp, Homo sapien
tggcagccggtttctcatgtagatc

SEQ ID NO: 5051799 - DNA, 25 bp, Homo sapien
ggcagccggtttctcatgtagatct

SEQ ID NO: 5051800 - DNA, 25 bp, Homo sapien
agctaccaggccgtcactgctgagc

SEQ ID NO: 5051801 - DNA, 25 bp, Homo sapien
tgtctgcacagctaccaggccgtca

SEQ ID NO: 5051802 - DNA, 25 bp, Homo sapien
gccgtcactgctgagcggcagagtt

SEQ ID NO: 5051803 - DNA, 25 bp, Homo sapien
tgtgtctgcacagctaccaggccgt

SEQ ID NO: 5051804 - DNA, 25 bp, Homo sapien
accattgagttgagcttgtgttcgc

SEQ ID NO: 5051805 - DNA, 25 bp, Homo sapien
cactgagcgactcggagcttgttca

SEQ ID NO: 5051806 - DNA, 25 bp, Homo sapien
caaatgctttcaagtacacagggtg

SEQ ID NO: 5051807 - DNA, 25 bp, Homo sapien
tgtgttcgctgtgccgaggatcatc

SEQ ID NO: 5051808 - DNA, 25 bp, Homo sapien
ttccagggaccccagtcagacacca

SEQ ID NO: 5051809 - DNA, 25 bp, Homo sapien
agtcagacaccaccgctggtccaat

SEQ ID NO: 5051810 - DNA, 25 bp, Homo sapien
accccagtcagacaccaccgctggt

SEQ ID NO: 5051811 - DNA, 25 bp, Homo sapien
gggaccccagtcagacaccaccgct

SEQ ID NO: 5051812 - DNA, 25 bp, Homo sapien
gccatagttgggaaattctgttggg

SEQ ID NO: 5051813 - DNA, 25 bp, Homo sapien
attctggggccatagttgggaaatt

SEQ ID NO: 5051814 - DNA, 25 bp, Homo sapien
agcatggctccaacgcccttgtgtt

SEQ ID NO: 5051815 - DNA, 25 bp, Homo sapien
gggccatagttgggaaattctgttg

SEQ ID NO: 5051816 - DNA, 25 bp, Homo sapien
tgccaaacccttgacgtcgtatgta

SEQ ID NO: 5051817 - DNA, 25 bp, Homo sapien
cagaactagagtaatccagagccct

SEQ ID NO: 5051818 - DNA, 25 bp, Homo sapien
tgtgcccagaggctattccatcagg

SEQ ID NO: 5051819 - DNA, 25 bp, Homo sapien
tcccgtgttggcagcacagaactag

SEQ ID NO: 5051820 - DNA, 25 bp, Homo sapien
agcagctgctgaatgaacacatggc

SEQ ID NO: 5051821 - DNA, 25 bp, Homo sapien
ctttctggagcctggtgcaggtact

SEQ ID NO: 5051822 - DNA, 25 bp, Homo sapien
caggtactggccaaggggtcccagc

SEQ ID NO: 5051823 - DNA, 25 bp, Homo sapien
tggccccggggacttgctgcttttc

SEQ ID NO: 5051824 - DNA, 25 bp, Homo sapien
ggttcatgtagcaacaacacaatag

SEQ ID NO: 5051825 - DNA, 25 bp, Homo sapien
aggttcatgtagcaacaacacaata

SEQ ID NO: 5051826 - DNA, 25 bp, Homo sapien
ttcatgtagcaacaacacaatagca

SEQ ID NO: 5051827 - DNA, 25 bp, Homo sapien
gttcatgtagcaacaacacaatagc

SEQ ID NO: 5051828 - DNA, 25 bp, Homo sapien
ccccgggacgaccagtctgtccagt

SEQ ID NO: 5051829 - DNA, 25 bp, Homo sapien
ctgagaccccgggacgaccagtctg

SEQ ID NO: 5051830 - DNA, 25 bp, Homo sapien
gagaccccgggacgaccagtctgtc

SEQ ID NO: 5051831 - DNA, 25 bp, Homo sapien
gaccccgggacgaccagtctgtcca

SEQ ID NO: 5051832 - DNA, 25 bp, Homo sapien
tgatggctgtcggtggctccgccca

SEQ ID NO: 5051833 - DNA, 25 bp, Homo sapien
gagttggggtaatgctccggcctga

SEQ ID NO: 5051834 - DNA, 25 bp, Homo sapien
caacctcaccacctgctagctgggc

SEQ ID NO: 5051835 - DNA, 25 bp, Homo sapien
gaggtgcctgtggtcaaggcctgcg

SEQ ID NO: 5051836 - DNA, 25 bp, Homo sapien
acggtgatgtccacagcacctgtgc

SEQ ID NO: 5051837 - DNA, 25 bp, Homo sapien
tggttaacggtgatgtccacagcac

SEQ ID NO: 5051838 - DNA, 25 bp, Homo sapien
tggcatggttaacggtgatgtccac

SEQ ID NO: 5051839 - DNA, 25 bp, Homo sapien
ctgtggcatggttaacggtgatgtc

SEQ ID NO: 5051840 - DNA, 25 bp, Homo sapien
agctgtgtgaaacggagtggcctcc

SEQ ID NO: 5051841 - DNA, 25 bp, Homo sapien
acatgggttacaagtgtctgttcca

SEQ ID NO: 5051842 - DNA, 25 bp, Homo sapien
cagtatatgtcagaggcaggatcgc

SEQ ID NO: 5051843 - DNA, 25 bp, Homo sapien
cacctaatgagtgtgacgtggtatc

SEQ ID NO: 5051844 - DNA, 25 bp, Homo sapien
tgagagttagagcagtaaacccgtt

SEQ ID NO: 5051845 - DNA, 25 bp, Homo sapien
cacatgcagtaagcactgaccgtgt

SEQ ID NO: 5051846 - DNA, 25 bp, Homo sapien
tcaaggatgggacaaagctttccgt

SEQ ID NO: 5051847 - DNA, 25 bp, Homo sapien
taaacccgtttcacaggaacatgca

SEQ ID NO: 5051848 - DNA, 25 bp, Homo sapien
tgagagacgggagcgtattaaaaag

SEQ ID NO: 5051849 - DNA, 25 bp, Homo sapien
catgagagacgggagcgtattaaaa

SEQ ID NO: 5051850 - DNA, 25 bp, Homo sapien
gagacgggagcgtattaaaaagtgc

SEQ ID NO: 5051851 - DNA, 25 bp, Homo sapien
gacgggagcgtattaaaaagtgcag

SEQ ID NO: 5051852 - DNA, 25 bp, Homo sapien
gacaggcaattgttcatgaaatcgg

SEQ ID NO: 5051853 - DNA, 25 bp, Homo sapien
tcagagactataacaactgtggcct

SEQ ID NO: 5051854 - DNA, 25 bp, Homo sapien
aaaccgaggccaccgtcgagagaga

SEQ ID NO: 5051855 - DNA, 25 bp, Homo sapien
gagagccaccgatggtaggcagcct

SEQ ID NO: 5051856 - DNA, 25 bp, Homo sapien
cagagttattaaccaggagtggctc

SEQ ID NO: 5051857 - DNA, 25 bp, Homo sapien
ccgtacttgagtatggccggcccta

SEQ ID NO: 5051858 - DNA, 25 bp, Homo sapien
caggctctgcagcaatgaccaggca

SEQ ID NO: 5051859 - DNA, 25 bp, Homo sapien
tgtgagtcaggctgcagtcacggcc

SEQ ID NO: 5051860 - DNA, 25 bp, Homo sapien
atgacgtcgccgggcacctgaggac

SEQ ID NO: 5051861 - DNA, 25 bp, Homo sapien
gcagcgggcggcgcgtccggccttt

SEQ ID NO: 5051862 - DNA, 25 bp, Homo sapien
ccccacgctctccagggtaggtcca

SEQ ID NO: 5051863 - DNA, 25 bp, Homo sapien
cagatcaggggaccctttgcgtcct

SEQ ID NO: 5051864 - DNA, 25 bp, Homo sapien
gcaatcttagagttagccgccggcc

SEQ ID NO: 5051865 - DNA, 25 bp, Homo sapien
catgaacccctttgcgatgaagcct

SEQ ID NO: 5051866 - DNA, 25 bp, Homo sapien
tgagagctgcgaacttggtccgccg

SEQ ID NO: 5051867 - DNA, 25 bp, Homo sapien
tagtgggttttgcaccaggcacaga

SEQ ID NO: 5051868 - DNA, 25 bp, Homo sapien
gatgttcctgcaagtaaccagatga

SEQ ID NO: 5051869 - DNA, 25 bp, Homo sapien
taccaagccagtttcgacttcagtg

SEQ ID NO: 5051870 - DNA, 25 bp, Homo sapien
ttaaatgacgctgggctatccaggg

SEQ ID NO: 5051871 - DNA, 25 bp, Homo sapien
cagccgtctgcacaggtccgttcat

SEQ ID NO: 5051872 - DNA, 25 bp, Homo sapien
ggctgaggacgtaaagaacttttga

SEQ ID NO: 5051873 - DNA, 25 bp, Homo sapien
tcagacatggtcagtcccagtgggc

SEQ ID NO: 5051874 - DNA, 25 bp, Homo sapien
gaaagacatcgtatagaacccagtg

SEQ ID NO: 5051875 - DNA, 25 bp, Homo sapien
gggctgtagcccaagttcagacatg

SEQ ID NO: 5051876 - DNA, 25 bp, Homo sapien
actgaggctgcggtgcagtgccgct

SEQ ID NO: 5051877 - DNA, 25 bp, Homo sapien
ctgcggtgcagtgccgctatcatag

SEQ ID NO: 5051878 - DNA, 25 bp, Homo sapien
ctcgtcatttacattgggtatttta

SEQ ID NO: 5051879 - DNA, 25 bp, Homo sapien
gacaaggtctcactgccactgaggc

SEQ ID NO: 5051880 - DNA, 25 bp, Homo sapien
taccgaggtaaaacacacgtacaga

SEQ ID NO: 5051881 - DNA, 25 bp, Homo sapien
gtgccacctgtcaggcactaccgca

SEQ ID NO: 5051882 - DNA, 25 bp, Homo sapien
tgtcaggcactaccgcagacctggg

SEQ ID NO: 5051883 - DNA, 25 bp, Homo sapien
cgtacagacaaacgcacaaattcca

SEQ ID NO: 5051884 - DNA, 25 bp, Homo sapien
ggtctcctggcccgatgactctcgg

SEQ ID NO: 5051885 - DNA, 25 bp, Homo sapien
aggtgactgagggttgccgctggcc

SEQ ID NO: 5051886 - DNA, 25 bp, Homo sapien
taaggaatgcgtgcgtagcactccc

SEQ ID NO: 5051887 - DNA, 25 bp, Homo sapien
gctgcactcggcctttgaacataag

SEQ ID NO: 5051888 - DNA, 25 bp, Homo sapien
tgactcagtctgtatcgggcttgac

SEQ ID NO: 5051889 - DNA, 25 bp, Homo sapien
caagtctaattagctactggctcta

SEQ ID NO: 5051890 - DNA, 25 bp, Homo sapien
tcagtgtaggccaaggttctcatct

SEQ ID NO: 5051891 - DNA, 25 bp, Homo sapien
tgatctgttttagggaatgtcatac

SEQ ID NO: 5051892 - DNA, 25 bp, Homo sapien
gaatgacgggtgagaagccactgaa

SEQ ID NO: 5051893 - DNA, 25 bp, Homo sapien
gaagacgtccggtgacactgtcagt

SEQ ID NO: 5051894 - DNA, 25 bp, Homo sapien
gggcaacgctcactctagctgaaga

SEQ ID NO: 5051895 - DNA, 25 bp, Homo sapien
tgagggtagaagaccaaagagcgcc

SEQ ID NO: 5051896 - DNA, 25 bp, Homo sapien
ggctcatatccagaacaccggaaca

SEQ ID NO: 5051897 - DNA, 25 bp, Homo sapien
cagaagacacttttgagagggtgaa

SEQ ID NO: 5051898 - DNA, 25 bp, Homo sapien
tgaaaatgtaagctgcagactggga

SEQ ID NO: 5051899 - DNA, 25 bp, Homo sapien
tatgaatacagcaccatggagtcag

SEQ ID NO: 5051900 - DNA, 25 bp, Homo sapien
tgctctgagcgaaggcaaggtgacc

SEQ ID NO: 5051901 - DNA, 25 bp, Homo sapien
caccagcactcctttaaagtgggca

SEQ ID NO: 5051902 - DNA, 25 bp, Homo sapien
ccaagttatggtgtgctctgagcga

SEQ ID NO: 5051903 - DNA, 25 bp, Homo sapien
ggtgaccgtgttcaatgcttcttca

SEQ ID NO: 5051904 - DNA, 25 bp, Homo sapien
tgtggtcgcagcaacctttactcca

SEQ ID NO: 5051905 - DNA, 25 bp, Homo sapien
aggcctctgtgtgcgtcacgtctcc

SEQ ID NO: 5051906 - DNA, 25 bp, Homo sapien
tgcctttctacccagcggctgacgg

SEQ ID NO: 5051907 - DNA, 25 bp, Homo sapien
tgggactctccgtggacccagactg

SEQ ID NO: 5051908 - DNA, 25 bp, Homo sapien
catgatccgggtgaagaagcaggta

SEQ ID NO: 5051909 - DNA, 25 bp, Homo sapien
caggacgcagcgaggtttacatctg

SEQ ID NO: 5051910 - DNA, 25 bp, Homo sapien
gactgctctgagatcaactgcatga

SEQ ID NO: 5051911 - DNA, 25 bp, Homo sapien
gggtgcccctcgaggactgctctga

SEQ ID NO: 5051912 - DNA, 25 bp, Homo sapien
taacctcaggtatcttcagcttgtg

SEQ ID NO: 5051913 - DNA, 25 bp, Homo sapien
ttacgaatcaccgaggaacactggg

SEQ ID NO: 5051914 - DNA, 25 bp, Homo sapien
gaataaacgtggctgagtctgccaa

SEQ ID NO: 5051915 - DNA, 25 bp, Homo sapien
gcattttggagagtccacaccacgg

SEQ ID NO: 5051916 - DNA, 25 bp, Homo sapien
caccggtcacgttaccttaatgcag

SEQ ID NO: 5051917 - DNA, 25 bp, Homo sapien
cctggccagtggagtttattgaaat

SEQ ID NO: 5051918 - DNA, 25 bp, Homo sapien
tcttgaaaatgacccgggaccattc

SEQ ID NO: 5051919 - DNA, 25 bp, Homo sapien
tgaacagaggtgctaaccagggagt

SEQ ID NO: 5051920 - DNA, 25 bp, Homo sapien
tgcagaggttgtgaagacaatcgcc

SEQ ID NO: 5051921 - DNA, 25 bp, Homo sapien
cctgcctcggctttagaaacctgaa

SEQ ID NO: 5051922 - DNA, 25 bp, Homo sapien
tggaagatgtgtctacctcagctgt

SEQ ID NO: 5051923 - DNA, 25 bp, Homo sapien
catgtcttggagcaatactgtgcca

SEQ ID NO: 5051924 - DNA, 25 bp, Homo sapien
tactttggccccagtactaagagca

SEQ ID NO: 5051925 - DNA, 25 bp, Homo sapien
cttggagacgccctcagaagctgct

SEQ ID NO: 5051926 - DNA, 25 bp, Homo sapien
cgtggcatggaaaggatcatcccca

SEQ ID NO: 5051927 - DNA, 25 bp, Homo sapien
gaaaataaatgtcgggtgcatgacc

SEQ ID NO: 5051928 - DNA, 25 bp, Homo sapien
tctaatggtggtcatccagggctag

SEQ ID NO: 5051929 - DNA, 25 bp, Homo sapien
gagggtcaagggagcatattctgca

SEQ ID NO: 5051930 - DNA, 25 bp, Homo sapien
cactgctgccgttctgctgggtcta

SEQ ID NO: 5051931 - DNA, 25 bp, Homo sapien
tagtggagtccaagcatcactgaca

SEQ ID NO: 5051932 - DNA, 25 bp, Homo sapien
gacatagaacactacagccaacaac

SEQ ID NO: 5051933 - DNA, 25 bp, Homo sapien
atagaacactacagccaacaacagc

SEQ ID NO: 5051934 - DNA, 25 bp, Homo sapien
catagaacactacagccaacaacag

SEQ ID NO: 5051935 - DNA, 25 bp, Homo sapien
ctgacatagaacactacagccaaca

SEQ ID NO: 5051936 - DNA, 25 bp, Homo sapien
tgataaaaagctgtcccgtggccag

SEQ ID NO: 5051937 - DNA, 25 bp, Homo sapien
tcagcaagcgcgattacagtgctcc

SEQ ID NO: 5051938 - DNA, 25 bp, Homo sapien
gaaaagtttattgagtcagccacag

SEQ ID NO: 5051939 - DNA, 25 bp, Homo sapien
gagtcatgagcgacacgacacttcc

SEQ ID NO: 5051940 - DNA, 25 bp, Homo sapien
tgtgcacgggccttgttcaactcgg

SEQ ID NO: 5051941 - DNA, 25 bp, Homo sapien
gtgtctctcagaagcggcgcgtgct

SEQ ID NO: 5051942 - DNA, 25 bp, Homo sapien
aatagtttcgttccgagatgcctgg

SEQ ID NO: 5051943 - DNA, 25 bp, Homo sapien
gaaacagcgtgggaaaaggtgtcca

SEQ ID NO: 5051944 - DNA, 25 bp, Homo sapien
caccagggaacgtcatgatgccagt

SEQ ID NO: 5051945 - DNA, 25 bp, Homo sapien
ctaaaaatcaagtcgcagccaggcc

SEQ ID NO: 5051946 - DNA, 25 bp, Homo sapien
taaagccgctagaggatcaagttgc

SEQ ID NO: 5051947 - DNA, 25 bp, Homo sapien
gaagccactaaccatctgaggaggg

SEQ ID NO: 5051948 - DNA, 25 bp, Homo sapien
atatatatttgctctagaatgatca

SEQ ID NO: 5051949 - DNA, 25 bp, Homo sapien
tatttgctctagaatgatcatattg

SEQ ID NO: 5051950 - DNA, 25 bp, Homo sapien
tatatttgctctagaatgatcatat

SEQ ID NO: 5051951 - DNA, 25 bp, Homo sapien
tttgctctagaatgatcatattgca

SEQ ID NO: 5051952 - DNA, 25 bp, Homo sapien
caaatagctgcagtacttgcccgag

SEQ ID NO: 5051953 - DNA, 25 bp, Homo sapien
gcacaatgtgtccaactcgctgagg

SEQ ID NO: 5051954 - DNA, 25 bp, Homo sapien
gaaaaatactctccaacagctgcgg

SEQ ID NO: 5051955 - DNA, 25 bp, Homo sapien
gacagacgtcaatacctgcaggcgt

SEQ ID NO: 5051956 - DNA, 25 bp, Homo sapien
gcatctgcagggttccgcggtgtct

SEQ ID NO: 5051957 - DNA, 25 bp, Homo sapien
gaagcattcagataagacttagcag

SEQ ID NO: 5051958 - DNA, 25 bp, Homo sapien
tacacctgcagaataaaagagctga

SEQ ID NO: 5051959 - DNA, 25 bp, Homo sapien
taccctacgactactgaattgtggc

SEQ ID NO: 5051960 - DNA, 25 bp, Homo sapien
ctctgacacgttgggatagatcacc

SEQ ID NO: 5051961 - DNA, 25 bp, Homo sapien
gaggccaccaggatctgcgagatgt

SEQ ID NO: 5051962 - DNA, 25 bp, Homo sapien
gcgagatgtacacttggcaggacag

SEQ ID NO: 5051963 - DNA, 25 bp, Homo sapien
cacggtgggcttttcgctgttccca

SEQ ID NO: 5051964 - DNA, 25 bp, Homo sapien
gctctgtatggagggaaggcactca

SEQ ID NO: 5051965 - DNA, 25 bp, Homo sapien
cactttctaaacgtggccgccagga

SEQ ID NO: 5051966 - DNA, 25 bp, Homo sapien
aaggagggccatctgtgtcgtgaac

SEQ ID NO: 5051967 - DNA, 25 bp, Homo sapien
gggacagtgcttttgcctccagaag

SEQ ID NO: 5051968 - DNA, 25 bp, Homo sapien
catggcgacgtagacgttgggaaac

SEQ ID NO: 5051969 - DNA, 25 bp, Homo sapien
gacgctcaggtcgtagttgtccaag

SEQ ID NO: 5051970 - DNA, 25 bp, Homo sapien
gggaaacatggccatcacggctgtg

SEQ ID NO: 5051971 - DNA, 25 bp, Homo sapien
tgatgtcatggtactggcccagcag

SEQ ID NO: 5051972 - DNA, 25 bp, Homo sapien
gaatttcgatgcttctccccaaggg

SEQ ID NO: 5051973 - DNA, 25 bp, Homo sapien
ggacagcgtgtctggaggcaccatt

SEQ ID NO: 5051974 - DNA, 25 bp, Homo sapien
ctaaaacgaggacatgggaatttcg

SEQ ID NO: 5051975 - DNA, 25 bp, Homo sapien
tgacgtgggacagcatcatgggacc

SEQ ID NO: 5051976 - DNA, 25 bp, Homo sapien
ctgaacaaatagcaccagtggcggc

SEQ ID NO: 5051977 - DNA, 25 bp, Homo sapien
tgaccccggcgttgtaggcttgcca

SEQ ID NO: 5051978 - DNA, 25 bp, Homo sapien
cagtggcggcataaatgaccaggcc

SEQ ID NO: 5051979 - DNA, 25 bp, Homo sapien
gcttgccaggcggtcgagttcgagg

SEQ ID NO: 5051980 - DNA, 25 bp, Homo sapien
gcacgggaggcactgtgtggcctcc

SEQ ID NO: 5051981 - DNA, 25 bp, Homo sapien
ccttcgaagatgacctggcccatga

SEQ ID NO: 5051982 - DNA, 25 bp, Homo sapien
gggacccaagcttgccgtagtagga

SEQ ID NO: 5051983 - DNA, 25 bp, Homo sapien
caagtgattatccagcaaggtctcg

SEQ ID NO: 5051984 - DNA, 25 bp, Homo sapien
catgaagtcggtgtagaacacggcc

SEQ ID NO: 5051985 - DNA, 25 bp, Homo sapien
ccggtgagccggtggcaccaggcca

SEQ ID NO: 5051986 - DNA, 25 bp, Homo sapien
cggtgagccggtggcaccaggccac

SEQ ID NO: 5051987 - DNA, 25 bp, Homo sapien
caccaggccacagggggggaagctc

SEQ ID NO: 5051988 - DNA, 25 bp, Homo sapien
agccggtgagccggtggcaccaggc

SEQ ID NO: 5051989 - DNA, 25 bp, Homo sapien
ccctcggtggcatcggcgctgaagt

SEQ ID NO: 5051990 - DNA, 25 bp, Homo sapien
gcgtggatgttgagggccatgtcct

SEQ ID NO: 5051991 - DNA, 25 bp, Homo sapien
gcacgatgccaatgggctgccggtt

SEQ ID NO: 5051992 - DNA, 25 bp, Homo sapien
agcagataggcacggatgggcccct

SEQ ID NO: 5051993 - DNA, 25 bp, Homo sapien
gggtctccacttcccaccagggaga

SEQ ID NO: 5051994 - DNA, 25 bp, Homo sapien
acttcccaccagggagacaagcagt

SEQ ID NO: 5051995 - DNA, 25 bp, Homo sapien
tgggtctccacttcccaccagggag

SEQ ID NO: 5051996 - DNA, 25 bp, Homo sapien
caccagggagacaagcagtgccctc

SEQ ID NO: 5051997 - DNA, 25 bp, Homo sapien
tggcagagccgttaaggaaaagtgc

SEQ ID NO: 5051998 - DNA, 25 bp, Homo sapien
ggtcactcgcagacccaatgagagg

SEQ ID NO: 5051999 - DNA, 25 bp, Homo sapien
agctcagggtgcaccggtcactcgc

SEQ ID NO: 5052000 - DNA, 25 bp, Homo sapien
aggctgtagtactgctccggaaggc

SEQ ID NO: 5052001 - DNA, 25 bp, Homo sapien
acacgcaggcactggccgggctctg

SEQ ID NO: 5052002 - DNA, 25 bp, Homo sapien
caggcaggtgcctctgtgtacacgc

SEQ ID NO: 5052003 - DNA, 25 bp, Homo sapien
gggctctgccacagttttcctggga

SEQ ID NO: 5052004 - DNA, 25 bp, Homo sapien
caagggacacgagggccgtcgcaca

SEQ ID NO: 5052005 - DNA, 25 bp, Homo sapien
acagggccactgtcccttgacacca

SEQ ID NO: 5052006 - DNA, 25 bp, Homo sapien
gaaggccactttgagggtggcaggc

SEQ ID NO: 5052007 - DNA, 25 bp, Homo sapien
cagggccactgtcccttgacaccag

SEQ ID NO: 5052008 - DNA, 25 bp, Homo sapien
aggccactttgagggtggcaggcac

SEQ ID NO: 5052009 - DNA, 25 bp, Homo sapien
tctcaatgctggtgcgcaaggtgcc

SEQ ID NO: 5052010 - DNA, 25 bp, Homo sapien
cacctaatctagaggaggcgctgcg

SEQ ID NO: 5052011 - DNA, 25 bp, Homo sapien
ttgcgtcaacgaaggccaacagtcg

SEQ ID NO: 5052012 - DNA, 25 bp, Homo sapien
tgacaatgacaagcctagacaggga

SEQ ID NO: 5052013 - DNA, 25 bp, Homo sapien
ctgaagactccattgatttgacctc

SEQ ID NO: 5052014 - DNA, 25 bp, Homo sapien
gaagactccattgatttgacctcag

SEQ ID NO: 5052015 - DNA, 25 bp, Homo sapien
tgaagactccattgatttgacctca

SEQ ID NO: 5052016 - DNA, 25 bp, Homo sapien
tttctgaagactccattgatttgac

SEQ ID NO: 5052017 - DNA, 25 bp, Homo sapien
tctcctcttcaacaaggaggggcgc

SEQ ID NO: 5052018 - DNA, 25 bp, Homo sapien
aggaggggcgcctcaacagcctggc

SEQ ID NO: 5052019 - DNA, 25 bp, Homo sapien
cagcaactcccagggggccactgtt

SEQ ID NO: 5052020 - DNA, 25 bp, Homo sapien
tcttcaacaaggaggggcgcctcaa

SEQ ID NO: 5052021 - DNA, 25 bp, Homo sapien
tgtctcagggccgaccctgtgtcca

SEQ ID NO: 5052022 - DNA, 25 bp, Homo sapien
aggacgctggcgctccagaaagcca

SEQ ID NO: 5052023 - DNA, 25 bp, Homo sapien
gaaagccagcgggaacattccgcag

SEQ ID NO: 5052024 - DNA, 25 bp, Homo sapien
ccagcgggaacattccgcagctgct

SEQ ID NO: 5052025 - DNA, 25 bp, Homo sapien
tcctcgggcaggcactccccgcagc

SEQ ID NO: 5052026 - DNA, 25 bp, Homo sapien
ccgcagctggagcatgggctcctct

SEQ ID NO: 5052027 - DNA, 25 bp, Homo sapien
tccccgcagctggagcatgggctcc

SEQ ID NO: 5052028 - DNA, 25 bp, Homo sapien
cgggcaggcactccccgcagctgga

SEQ ID NO: 5052029 - DNA, 25 bp, Homo sapien
tttggcctgagattccggaagcttc

SEQ ID NO: 5052030 - DNA, 25 bp, Homo sapien
gttatcgtagctgtataaacaaccg

SEQ ID NO: 5052031 - DNA, 25 bp, Homo sapien
aaacaaccgtatggcctttggcctg

SEQ ID NO: 5052032 - DNA, 25 bp, Homo sapien
gacacagtgatgttatcgtagctgt

SEQ ID NO: 5052033 - DNA, 25 bp, Homo sapien
caagcagaaatgctcggctctgagc

SEQ ID NO: 5052034 - DNA, 25 bp, Homo sapien
ggctttgaacgtgctgccctgcatg

SEQ ID NO: 5052035 - DNA, 25 bp, Homo sapien
accccactctggctgcgggactttg

SEQ ID NO: 5052036 - DNA, 25 bp, Homo sapien
cctccaagcagaaatgctcggctct

SEQ ID NO: 5052037 - DNA, 25 bp, Homo sapien
gactattttccacaacacagccggc

SEQ ID NO: 5052038 - DNA, 25 bp, Homo sapien
atctcaacaagggagggccgctcct

SEQ ID NO: 5052039 - DNA, 25 bp, Homo sapien
tcagaggccgcattagactattttc

SEQ ID NO: 5052040 - DNA, 25 bp, Homo sapien
gaagctgaagaagcacaggcctctg

SEQ ID NO: 5052041 - DNA, 25 bp, Homo sapien
gtcctgagacagcagctccggtggc

SEQ ID NO: 5052042 - DNA, 25 bp, Homo sapien
gacagtccttgtattggagacaaac

SEQ ID NO: 5052043 - DNA, 25 bp, Homo sapien
gagacaaacagctgtgccggagagg

SEQ ID NO: 5052044 - DNA, 25 bp, Homo sapien
cttgctgcccgagcgcacgctgtgt

SEQ ID NO: 5052045 - DNA, 25 bp, Homo sapien
tgtggaattagccacctgaaaagtc

SEQ ID NO: 5052046 - DNA, 25 bp, Homo sapien
tggaattagccacctgaaaagtctc

SEQ ID NO: 5052047 - DNA, 25 bp, Homo sapien
gaattagccacctgaaaagtctcct

SEQ ID NO: 5052048 - DNA, 25 bp, Homo sapien
attagccacctgaaaagtctcctgc

SEQ ID NO: 5052049 - DNA, 25 bp, Homo sapien
tcggatgccacgtgggggagcaccc

SEQ ID NO: 5052050 - DNA, 25 bp, Homo sapien
ggagtcggatgccacgtgggggagc

SEQ ID NO: 5052051 - DNA, 25 bp, Homo sapien
gcaacagcaggtgggcggacggctg

SEQ ID NO: 5052052 - DNA, 25 bp, Homo sapien
cagcaacagcaggtgggcggacggc

SEQ ID NO: 5052053 - DNA, 25 bp, Homo sapien
tccaggtcacgtagcactgcccagg

SEQ ID NO: 5052054 - DNA, 25 bp, Homo sapien
caagtgcccgactcaggctctgcat

SEQ ID NO: 5052055 - DNA, 25 bp, Homo sapien
ccaaggctccaggtcacgtagcact

SEQ ID NO: 5052056 - DNA, 25 bp, Homo sapien
cactggaaggtagtgcctgggtaac

SEQ ID NO: 5052057 - DNA, 25 bp, Homo sapien
gcataaaccattagcgaatcgtcgc

SEQ ID NO: 5052058 - DNA, 25 bp, Homo sapien
tgttggcataaaccattagcgaatc

SEQ ID NO: 5052059 - DNA, 25 bp, Homo sapien
ttagcgaatcgtcgccaacatcggg

SEQ ID NO: 5052060 - DNA, 25 bp, Homo sapien
taaaccattagcgaatcgtcgccaa

SEQ ID NO: 5052061 - DNA, 25 bp, Homo sapien
gattggatcctagctctgagacacc

SEQ ID NO: 5052062 - DNA, 25 bp, Homo sapien
ccagcatagaatggtcagggcccca

SEQ ID NO: 5052063 - DNA, 25 bp, Homo sapien
agtaaaatgagaaaccggctgcccg

SEQ ID NO: 5052064 - DNA, 25 bp, Homo sapien
tggagaaaattaaccacccggctgc

SEQ ID NO: 5052065 - DNA, 25 bp, Homo sapien
cctatggtgcgactgtgtagaagct

SEQ ID NO: 5052066 - DNA, 25 bp, Homo sapien
acagtggcgaggtccaaggacgctt

SEQ ID NO: 5052067 - DNA, 25 bp, Homo sapien
cggcaacgtggtggacacagaacca

SEQ ID NO: 5052068 - DNA, 25 bp, Homo sapien
gctttatctgcactgttgttctcca

SEQ ID NO: 5052069 - DNA, 25 bp, Homo sapien
tctgaacttggtgaaggcgctgtcc

SEQ ID NO: 5052070 - DNA, 25 bp, Homo sapien
gagtggacggaaacctcgctgtctg

SEQ ID NO: 5052071 - DNA, 25 bp, Homo sapien
tctagagcgccttcagaaaaggacg

SEQ ID NO: 5052072 - DNA, 25 bp, Homo sapien
gcacatttagccgagatcacaggga

SEQ ID NO: 5052073 - DNA, 25 bp, Homo sapien
ccaaaaggtaggcatatttcctaat

SEQ ID NO: 5052074 - DNA, 25 bp, Homo sapien
aactacagaaatcaatcaatcgttg

SEQ ID NO: 5052075 - DNA, 25 bp, Homo sapien
tcaatcgttgtatcaggaacagaca

SEQ ID NO: 5052076 - DNA, 25 bp, Homo sapien
tcctaatttcgagatgccccataaa

SEQ ID NO: 5052077 - DNA, 25 bp, Homo sapien
cacaactcgttgtccagaaactgaa

SEQ ID NO: 5052078 - DNA, 25 bp, Homo sapien
caattggtaattccaagcgcctcag

SEQ ID NO: 5052079 - DNA, 25 bp, Homo sapien
gcgcctcagctttgttatgacagtg

SEQ ID NO: 5052080 - DNA, 25 bp, Homo sapien
tcatgattagctcggtgccaagtcc

SEQ ID NO: 5052081 - DNA, 25 bp, Homo sapien
ggaagagacaccacatcttgcccat

SEQ ID NO: 5052082 - DNA, 25 bp, Homo sapien
tgtgcgtctctgttaatttccgtgt

SEQ ID NO: 5052083 - DNA, 25 bp, Homo sapien
tggtcatgccaacctgtgcgtctct

SEQ ID NO: 5052084 - DNA, 25 bp, Homo sapien
acatcttgcccatgcgagcctggtc

SEQ ID NO: 5052085 - DNA, 25 bp, Homo sapien
cacctgtgcgtctgtgaatttccgt

SEQ ID NO: 5052086 - DNA, 25 bp, Homo sapien
ccacctgtgcgtctgtgaatttccg

SEQ ID NO: 5052087 - DNA, 25 bp, Homo sapien
acctgtgcgtctgtgaatttccgtg

SEQ ID NO: 5052088 - DNA, 25 bp, Homo sapien
tcacgcccacctgcgtgtctgtgaa

SEQ ID NO: 5052089 - DNA, 25 bp, Homo sapien
tgtgaatttccgtgttttcatgccc

SEQ ID NO: 5052090 - DNA, 25 bp, Homo sapien
ctgtgaatttccgtgttttcatgcc

SEQ ID NO: 5052091 - DNA, 25 bp, Homo sapien
tgtgaatttccgtgttttcatgccc

SEQ ID NO: 5052092 - DNA, 25 bp, Homo sapien
ctgtgaatttccgtgttttcatgcc

SEQ ID NO: 5052093 - DNA, 25 bp, Homo sapien
ctgtgaatttccgtgttttcacgcc

SEQ ID NO: 5052094 - DNA, 25 bp, Homo sapien
tgaatttccgtgttttcacgcccac

SEQ ID NO: 5052095 - DNA, 25 bp, Homo sapien
ctgtgcgtctgtgaatttccgtgtt

SEQ ID NO: 5052096 - DNA, 25 bp, Homo sapien
gcgtctgtgaatttccgtgttttca

SEQ ID NO: 5052097 - DNA, 25 bp, Homo sapien
ctgtgaatttccgttttcacgccca

SEQ ID NO: 5052098 - DNA, 25 bp, Homo sapien
cgtctgtgaatttccgttttcacgc

SEQ ID NO: 5052099 - DNA, 25 bp, Homo sapien
tgtgaatttccgttttcacgcccac

SEQ ID NO: 5052100 - DNA, 25 bp, Homo sapien
ctgcgtctgtgaatttccgttttca

SEQ ID NO: 5052101 - DNA, 25 bp, Homo sapien
ctgtgcgtgtccgcgaatttccgtg

SEQ ID NO: 5052102 - DNA, 25 bp, Homo sapien
cctgtgcgtgtccgcgaatttccgt

SEQ ID NO: 5052103 - DNA, 25 bp, Homo sapien
acctgtgcgtgtccgcgaatttccg

SEQ ID NO: 5052104 - DNA, 25 bp, Homo sapien
gtgaatttccgtgttttcacgccca

SEQ ID NO: 5052105 - DNA, 25 bp, Homo sapien
ctgtgaatttccgtgttttcacgcc

SEQ ID NO: 5052106 - DNA, 25 bp, Homo sapien
tgtgaatttccgtgttttcacgccc

SEQ ID NO: 5052107 - DNA, 25 bp, Homo sapien
tgaatttccgtgttttcacgcccac

SEQ ID NO: 5052108 - DNA, 25 bp, Homo sapien
gtgaatttccgtgttttcacgccca

SEQ ID NO: 5052109 - DNA, 25 bp, Homo sapien
ctgtgaatttccgtgttttcacgcc

SEQ ID NO: 5052110 - DNA, 25 bp, Homo sapien
tgtgaatttccgtgttttcacgccc

SEQ ID NO: 5052111 - DNA, 25 bp, Homo sapien
tgaatttccgtgttttcacgcccac

SEQ ID NO: 5052112 - DNA, 25 bp, Homo sapien
tttcatgcccacctgcgtgtctgtg

SEQ ID NO: 5052113 - DNA, 25 bp, Homo sapien
tgtgaatttccgtgttttcatgccc

SEQ ID NO: 5052114 - DNA, 25 bp, Homo sapien
tgtgtctgtgaatttccgtgttttc

SEQ ID NO: 5052115 - DNA, 25 bp, Homo sapien
ctgtgaatttccgtgttttcatgcc

SEQ ID NO: 5052116 - DNA, 25 bp, Homo sapien
gcccacctgtgcgtctgtgattttc

SEQ ID NO: 5052117 - DNA, 25 bp, Homo sapien
tgtgattttccgtgttttcatgccc

SEQ ID NO: 5052118 - DNA, 25 bp, Homo sapien
tcatgcccacctgtgcgtctgtgat

SEQ ID NO: 5052119 - DNA, 25 bp, Homo sapien
cctgtgcgtctgtgattttccgtgt

SEQ ID NO: 5052120 - DNA, 25 bp, Homo sapien
gcaacaatgataagatgacagcatc

SEQ ID NO: 5052121 - DNA, 25 bp, Homo sapien
tgagccatctactgtccacaataac

SEQ ID NO: 5052122 - DNA, 25 bp, Homo sapien
ggattcaagtcaacagcaacaatga

SEQ ID NO: 5052123 - DNA, 25 bp, Homo sapien
cttagggttggtttgcgaatgcaat

SEQ ID NO: 5052124 - DNA, 25 bp, Homo sapien
gaacttgcatagattccgggtcggc

SEQ ID NO: 5052125 - DNA, 25 bp, Homo sapien
tcgctgatggtctcgcagttctcgg

SEQ ID NO: 5052126 - DNA, 25 bp, Homo sapien
gattcggtctatggacccctcgctg

SEQ ID NO: 5052127 - DNA, 25 bp, Homo sapien
gaccagagcggtttccatggcgtaa

SEQ ID NO: 5052128 - DNA, 25 bp, Homo sapien
tcgggcaggtaacacttacattcct

SEQ ID NO: 5052129 - DNA, 25 bp, Homo sapien
aacatatggcttgctggtttactgt

SEQ ID NO: 5052130 - DNA, 25 bp, Homo sapien
tcacaacggtatgagacatgcagca

SEQ ID NO: 5052131 - DNA, 25 bp, Homo sapien
tgcacaagtggctatctcacaactt

SEQ ID NO: 5052132 - DNA, 25 bp, Homo sapien
gaaggtgatacaaacaggtggtccg

SEQ ID NO: 5052133 - DNA, 25 bp, Homo sapien
tactgaagaggtgctgaagtgattt

SEQ ID NO: 5052134 - DNA, 25 bp, Homo sapien
taatccccatcgagtgactggatga

SEQ ID NO: 5052135 - DNA, 25 bp, Homo sapien
gtggtccgctggtaatccccatcga

SEQ ID NO: 5052136 - DNA, 25 bp, Homo sapien
gacagccctcgagaattctttcaag

SEQ ID NO: 5052137 - DNA, 25 bp, Homo sapien
catcttctttcacgctgcagcggaa

SEQ ID NO: 5052138 - DNA, 25 bp, Homo sapien
tgaacgtcgctacgattccacacga

SEQ ID NO: 5052139 - DNA, 25 bp, Homo sapien
gagaagactccgctgtacaggaggt

SEQ ID NO: 5052140 - DNA, 25 bp, Homo sapien
ggtttaataaggaccaacattctgc

SEQ ID NO: 5052141 - DNA, 25 bp, Homo sapien
tttgtgagaagaagtaacacccaga

SEQ ID NO: 5052142 - DNA, 25 bp, Homo sapien
tataaacatcagacccttcatgcct

SEQ ID NO: 5052143 - DNA, 25 bp, Homo sapien
gaatagggtcaatgattttaactgc

SEQ ID NO: 5052144 - DNA, 25 bp, Homo sapien
caaaaggtctcagggatcagctaaa

SEQ ID NO: 5052145 - DNA, 25 bp, Homo sapien
cagtcctgacttaaacgacccgagg

SEQ ID NO: 5052146 - DNA, 25 bp, Homo sapien
catcggcctctcacatggagcatgg

SEQ ID NO: 5052147 - DNA, 25 bp, Homo sapien
tacaggccattcctttcccaagcag

SEQ ID NO: 5052148 - DNA, 25 bp, Homo sapien
gctgagattcctcggcctgcgccat

SEQ ID NO: 5052149 - DNA, 25 bp, Homo sapien
tgccgtggctgagattcctcggcct

SEQ ID NO: 5052150 - DNA, 25 bp, Homo sapien
ccgtggctgagattcctcggcctgc

SEQ ID NO: 5052151 - DNA, 25 bp, Homo sapien
gtggctgagattcctcggcctgcgc

SEQ ID NO: 5052152 - DNA, 25 bp, Homo sapien
gatttgtacaaatgggtatgactgg

SEQ ID NO: 5052153 - DNA, 25 bp, Homo sapien
ggattctaatctttcagggctccag

SEQ ID NO: 5052154 - DNA, 25 bp, Homo sapien
gacgccatgctggaaagggtcagct

SEQ ID NO: 5052155 - DNA, 25 bp, Homo sapien
aagagtgcagagaggcgatttgtac

SEQ ID NO: 5052156 - DNA, 25 bp, Homo sapien
atgaacaagccgcatcgggagggac

SEQ ID NO: 5052157 - DNA, 25 bp, Homo sapien
ggtctcagtcaacgcctgctgtgaa

SEQ ID NO: 5052158 - DNA, 25 bp, Homo sapien
tggacagaagcaggtctcagtcaac

SEQ ID NO: 5052159 - DNA, 25 bp, Homo sapien
ctgagaaaacccacagcgactggtc

SEQ ID NO: 5052160 - DNA, 25 bp, Homo sapien
tgccccacggcagcactgactgagg

SEQ ID NO: 5052161 - DNA, 25 bp, Homo sapien
gactgaggcccctcgattgaccact

SEQ ID NO: 5052162 - DNA, 25 bp, Homo sapien
gggtaaacggctccacaagcaactc

SEQ ID NO: 5052163 - DNA, 25 bp, Homo sapien
tgaccactcggaacccaacatcagt

SEQ ID NO: 5052164 - DNA, 25 bp, Homo sapien
cctggttgagtgaacgtgatgagaa

SEQ ID NO: 5052165 - DNA, 25 bp, Homo sapien
caccgcccaggatggtgcggagctc

SEQ ID NO: 5052166 - DNA, 25 bp, Homo sapien
catctcgtaaggtcagaggctccct

SEQ ID NO: 5052167 - DNA, 25 bp, Homo sapien
tgaacgtgatgagaaaaaacaactt

SEQ ID NO: 5052168 - DNA, 25 bp, Homo sapien
gcccggactataaactctccctgca

SEQ ID NO: 5052169 - DNA, 25 bp, Homo sapien
gtggcttctggaaggtcacaaagcc

SEQ ID NO: 5052170 - DNA, 25 bp, Homo sapien
gaagcagaagctccgagcactgggt

SEQ ID NO: 5052171 - DNA, 25 bp, Homo sapien
caacgaggacgccaggcttcatgat

SEQ ID NO: 5052172 - DNA, 25 bp, Homo sapien
aattgtgcaataagggtcatatata

SEQ ID NO: 5052173 - DNA, 25 bp, Homo sapien
cagcctgagtgatttcctaaaattg

SEQ ID NO: 5052174 - DNA, 25 bp, Homo sapien
gcccagcctgagtgatttcctaaaa

SEQ ID NO: 5052175 - DNA, 25 bp, Homo sapien
tcctaaaattgtgcaataagggtca

SEQ ID NO: 5052176 - DNA, 25 bp, Homo sapien
ttctacaaggctgctcttcggctgg

SEQ ID NO: 5052177 - DNA, 25 bp, Homo sapien
tcacccatcattagcaggaacgcgg

SEQ ID NO: 5052178 - DNA, 25 bp, Homo sapien
ggttgtctgccacctacagtgcttg

SEQ ID NO: 5052179 - DNA, 25 bp, Homo sapien
taagtgcgccttcgtcagcataatc

SEQ ID NO: 5052180 - DNA, 25 bp, Homo sapien
gtggatccgcctccgctggaaaagc

SEQ ID NO: 5052181 - DNA, 25 bp, Homo sapien
ggatccgcctccgctggaaaagccg

SEQ ID NO: 5052182 - DNA, 25 bp, Homo sapien
tggatccgcctccgctggaaaagcc

SEQ ID NO: 5052183 - DNA, 25 bp, Homo sapien
tgtggatccgcctccgctggaaaag

SEQ ID NO: 5052184 - DNA, 25 bp, Homo sapien
gggcggtcagtcagcgacgcgggcg

SEQ ID NO: 5052185 - DNA, 25 bp, Homo sapien
cggtcagtcagcgacgcgggcgcgg

SEQ ID NO: 5052186 - DNA, 25 bp, Homo sapien
gtcagtcagcgacgcgggcgcggag

SEQ ID NO: 5052187 - DNA, 25 bp, Homo sapien
ggcggtcagtcagcgacgcgggcgc

SEQ ID NO: 5052188 - DNA, 25 bp, Homo sapien
caacgccccgcgctctgcgggtccc

SEQ ID NO: 5052189 - DNA, 25 bp, Homo sapien
ccccaacgccccgcgctctgcgggt

SEQ ID NO: 5052190 - DNA, 25 bp, Homo sapien
acgccccgcgctctgcgggtcccct

SEQ ID NO: 5052191 - DNA, 25 bp, Homo sapien
caactcccccaacgccccgcgctct

SEQ ID NO: 5052192 - DNA, 25 bp, Homo sapien
ggcttagtgggtaaaatgagagcca

SEQ ID NO: 5052193 - DNA, 25 bp, Homo sapien
agggcttagtgggtaaaatgagagc

SEQ ID NO: 5052194 - DNA, 25 bp, Homo sapien
cttagtgggtaaaatgagagccagt

SEQ ID NO: 5052195 - DNA, 25 bp, Homo sapien
tcagggcttagtgggtaaaatgaga

SEQ ID NO: 5052196 - DNA, 25 bp, Homo sapien
tcagggctcagaatgtgaccagggt

SEQ ID NO: 5052197 - DNA, 25 bp, Homo sapien
cagggctcagaatgtgaccagggtc

SEQ ID NO: 5052198 - DNA, 25 bp, Homo sapien
gaccaggatcaggactcagtgtgct

SEQ ID NO: 5052199 - DNA, 25 bp, Homo sapien
agtgtgctacgaggatcagggctca

SEQ ID NO: 5052200 - DNA, 25 bp, Homo sapien
ccagggtcagggctcaatgtgaacc

SEQ ID NO: 5052201 - DNA, 25 bp, Homo sapien
ctcaatgtgaaccacaggatcagcg

SEQ ID NO: 5052202 - DNA, 25 bp, Homo sapien
gaccagggtcagggctccatctgtg

SEQ ID NO: 5052203 - DNA, 25 bp, Homo sapien
cagtgtgtgaccagggttaaagtgc

SEQ ID NO: 5052204 - DNA, 25 bp, Homo sapien
gggctccatctgtgaccaggatcag

SEQ ID NO: 5052205 - DNA, 25 bp, Homo sapien
tcagggctcagagtgtgaccatggt

SEQ ID NO: 5052206 - DNA, 25 bp, Homo sapien
ggttcctgacacaggtatgacccca

SEQ ID NO: 5052207 - DNA, 25 bp, Homo sapien
catgatgccatttgagcctcgatga

SEQ ID NO: 5052208 - DNA, 25 bp, Homo sapien
cattgctctcacaaccatgatgcca

SEQ ID NO: 5052209 - DNA, 25 bp, Homo sapien
cctcgatgaccaatgacagctgaca

SEQ ID NO: 5052210 - DNA, 25 bp, Homo sapien
ggaatgcagcccgacgggaccacag

SEQ ID NO: 5052211 - DNA, 25 bp, Homo sapien
agggaatgcagcccgacgggaccac

SEQ ID NO: 5052212 - DNA, 25 bp, Homo sapien
cccgacgggaccacaggccttgcag

SEQ ID NO: 5052213 - DNA, 25 bp, Homo sapien
aatgcagcccgacgggaccacaggc

SEQ ID NO: 5052214 - DNA, 25 bp, Homo sapien
tgtgagctagaggtgcagaagcctg

SEQ ID NO: 5052215 - DNA, 25 bp, Homo sapien
agctagaggtgcagaagcctgcggg

SEQ ID NO: 5052216 - DNA, 25 bp, Homo sapien
tggtgtgagctagaggtgcagaagc

SEQ ID NO: 5052217 - DNA, 25 bp, Homo sapien
tgtggtgtgagctagaggtgcagaa

SEQ ID NO: 5052218 - DNA, 25 bp, Homo sapien
ccggaacaagcagcgtctcagtgga

SEQ ID NO: 5052219 - DNA, 25 bp, Homo sapien
ggagactgagcaggtcaggatggct

SEQ ID NO: 5052220 - DNA, 25 bp, Homo sapien
gaacggcccctgcaaaggatcatca

SEQ ID NO: 5052221 - DNA, 25 bp, Homo sapien
tgcaaaggatcatcagggagactga

SEQ ID NO: 5052222 - DNA, 25 bp, Homo sapien
tgtgatcctcctacgaatacttctt

SEQ ID NO: 5052223 - DNA, 25 bp, Homo sapien
gggtcttctgtgatcctcctacgaa

SEQ ID NO: 5052224 - DNA, 25 bp, Homo sapien
ctgggtctatgggtgggcaccacta

SEQ ID NO: 5052225 - DNA, 25 bp, Homo sapien
tgggtctatgggtgggcaccactat

SEQ ID NO: 5052226 - DNA, 25 bp, Homo sapien
gggccctgacgcctctgtgccttgg

SEQ ID NO: 5052227 - DNA, 25 bp, Homo sapien
agctgtccctccagtccccgtaggg

SEQ ID NO: 5052228 - DNA, 25 bp, Homo sapien
ttcctgctgaacacagctgggccct

SEQ ID NO: 5052229 - DNA, 25 bp, Homo sapien
ttggccacaaggcaccttctgctca

SEQ ID NO: 5052230 - DNA, 25 bp, Homo sapien
tgtccttagccaagacgagggtccg

SEQ ID NO: 5052231 - DNA, 25 bp, Homo sapien
gagaccctcagaccatgtgttcaag

SEQ ID NO: 5052232 - DNA, 25 bp, Homo sapien
tggtcgggccacagctaggtttcat

SEQ ID NO: 5052233 - DNA, 25 bp, Homo sapien
gataacaaggtatgtccgtctcccg

SEQ ID NO: 5052234 - DNA, 25 bp, Homo sapien
gaggagtgtttactgctgtctctga

SEQ ID NO: 5052235 - DNA, 25 bp, Homo sapien
cattgatgtggtgacgtctagcagg

SEQ ID NO: 5052236 - DNA, 25 bp, Homo sapien
gcacagttgctgagagtcggctctt

SEQ ID NO: 5052237 - DNA, 25 bp, Homo sapien
gcacatggttgatgggccaggccac

SEQ ID NO: 5052238 - DNA, 25 bp, Homo sapien
tgtgcccaacacgtgactgttctcc

SEQ ID NO: 5052239 - DNA, 25 bp, Homo sapien
tgagccacgagagcacaggactccc

SEQ ID NO: 5052240 - DNA, 25 bp, Homo sapien
ctgggtgaccccgtcctgtgcccaa

SEQ ID NO: 5052241 - DNA, 25 bp, Homo sapien
ctgcagctgagccacgagagcacag

SEQ ID NO: 5052242 - DNA, 25 bp, Homo sapien
ccagaactagccgagggatggtgaa

SEQ ID NO: 5052243 - DNA, 25 bp, Homo sapien
ggtcatccgtgctgagtccttgagg

SEQ ID NO: 5052244 - DNA, 25 bp, Homo sapien
aggggtcatccgtgctgagtccttg

SEQ ID NO: 5052245 - DNA, 25 bp, Homo sapien
ctggaggcccagaactagccgaggg

SEQ ID NO: 5052246 - DNA, 25 bp, Homo sapien
cacaccatttcacgtcacttgggcg

SEQ ID NO: 5052247 - DNA, 25 bp, Homo sapien
cacttgggcgttttgaaaatctgga

SEQ ID NO: 5052248 - DNA, 25 bp, Homo sapien
tgaaggagattgtttacgtcggata

SEQ ID NO: 5052249 - DNA, 25 bp, Homo sapien
gctttaattccagacgaggacatct

SEQ ID NO: 5052250 - DNA, 25 bp, Homo sapien
gcccctgtgggaccaaggacagtct

SEQ ID NO: 5052251 - DNA, 25 bp, Homo sapien
tgcccctgtgggaccaaggacagtc

SEQ ID NO: 5052252 - DNA, 25 bp, Homo sapien
cagctctaggcatgtgaccacgtgg

SEQ ID NO: 5052253 - DNA, 25 bp, Homo sapien
tcccaggtaagcaaggccattcagg

SEQ ID NO: 5052254 - DNA, 25 bp, Homo sapien
tgtcatactctaggccacgtgcaga

SEQ ID NO: 5052255 - DNA, 25 bp, Homo sapien
tgcttgcctgaaagtcgccgtgaat

SEQ ID NO: 5052256 - DNA, 25 bp, Homo sapien
gacaatactggccttggatgactca

SEQ ID NO: 5052257 - DNA, 25 bp, Homo sapien
gcctggtgcctggtaagtatcaaga

SEQ ID NO: 5052258 - DNA, 25 bp, Homo sapien
tatcaagaatgctggcggccatggt

SEQ ID NO: 5052259 - DNA, 25 bp, Homo sapien
gatgactcaggcactcactctatga

SEQ ID NO: 5052260 - DNA, 25 bp, Homo sapien
tgcaattcacggaggcctcaggtgg

SEQ ID NO: 5052261 - DNA, 25 bp, Homo sapien
taatgcaacacgaatgctccctggc

SEQ ID NO: 5052262 - DNA, 25 bp, Homo sapien
tatcacagtgcttgctcacagcaga

SEQ ID NO: 5052263 - DNA, 25 bp, Homo sapien
ggatgatcgtgcactctctgtggaa

SEQ ID NO: 5052264 - DNA, 25 bp, Homo sapien
tagctctctcgggaattcaggttgt

SEQ ID NO: 5052265 - DNA, 25 bp, Homo sapien
agctctctcgggaattcaggttgtt

SEQ ID NO: 5052266 - DNA, 25 bp, Homo sapien
gttagctctctcgggaattcaggtt

SEQ ID NO: 5052267 - DNA, 25 bp, Homo sapien
cccagcacctaaataatctttgtcc

SEQ ID NO: 5052268 - DNA, 25 bp, Homo sapien
aatgcggtgctctgggtagccatca

SEQ ID NO: 5052269 - DNA, 25 bp, Homo sapien
cagtggccttagacgctcaatgcgg

SEQ ID NO: 5052270 - DNA, 25 bp, Homo sapien
gaacagcaaatcaccggcattcagg

SEQ ID NO: 5052271 - DNA, 25 bp, Homo sapien
tttcagtggacgtgctataccccag

SEQ ID NO: 5052272 - DNA, 25 bp, Homo sapien
tagtacacagcgaagcgcgtgggca

SEQ ID NO: 5052273 - DNA, 25 bp, Homo sapien
gcagacgagaaagatgatgagcacc

SEQ ID NO: 5052274 - DNA, 25 bp, Homo sapien
tgcacacatgatgcggccggtaaac

SEQ ID NO: 5052275 - DNA, 25 bp, Homo sapien
tgtgatgacggcctgagcccttgga

SEQ ID NO: 5052276 - DNA, 25 bp, Homo sapien
gcggtggcattggggactgccccgg

SEQ ID NO: 5052277 - DNA, 25 bp, Homo sapien
tgcggtggcattggggactgccccg

SEQ ID NO: 5052278 - DNA, 25 bp, Homo sapien
cggtggcattggggactgccccggc

SEQ ID NO: 5052279 - DNA, 25 bp, Homo sapien
ggtggcattggggactgccccggcc

SEQ ID NO: 5052280 - DNA, 25 bp, Homo sapien
caacacgtgtgctcagtgcaggact

SEQ ID NO: 5052281 - DNA, 25 bp, Homo sapien
gcaaatcatttcatcactgggagcc

SEQ ID NO: 5052282 - DNA, 25 bp, Homo sapien
gatataagagcacgggaggctcctg

SEQ ID NO: 5052283 - DNA, 25 bp, Homo sapien
ccccaacatgggaggcgtgcgatat

SEQ ID NO: 5052284 - DNA, 25 bp, Homo sapien
acttaccgcgcttcacccgggcagg

SEQ ID NO: 5052285 - DNA, 25 bp, Homo sapien
caggccagcgcttggggctcctttt

SEQ ID NO: 5052286 - DNA, 25 bp, Homo sapien
ccacaggggaacttaccgcgcttca

SEQ ID NO: 5052287 - DNA, 25 bp, Homo sapien
acctcgccttcctacggcctgacgt

SEQ ID NO: 5052288 - DNA, 25 bp, Homo sapien
ctgtgactagaaccaaggatcagtg

SEQ ID NO: 5052289 - DNA, 25 bp, Homo sapien
agagcattggactctgtcctgacca

SEQ ID NO: 5052290 - DNA, 25 bp, Homo sapien
gaaccaaggatcagtgtgtgaccag

SEQ ID NO: 5052291 - DNA, 25 bp, Homo sapien
ctcagtgcataagcgggatcagggc

SEQ ID NO: 5052292 - DNA, 25 bp, Homo sapien
aagtggcccagagagcatcgttccg

SEQ ID NO: 5052293 - DNA, 25 bp, Homo sapien
tgaaaatgtcaccatcacagtagcg

SEQ ID NO: 5052294 - DNA, 25 bp, Homo sapien
gagggtccaagctcgctcagaatgg

SEQ ID NO: 5052295 - DNA, 25 bp, Homo sapien
tacgctggttccctcgatagcagag

SEQ ID NO: 5052296 - DNA, 25 bp, Homo sapien
gatagtctgcggtgaacttccaggc

SEQ ID NO: 5052297 - DNA, 25 bp, Homo sapien
ttttacaggtgctgaacttcccggc

SEQ ID NO: 5052298 - DNA, 25 bp, Homo sapien
gcagctaaacgtgggaattgcacca

SEQ ID NO: 5052299 - DNA, 25 bp, Homo sapien
caatcttcgggagttgctgaccttc

SEQ ID NO: 5052300 - DNA, 25 bp, Homo sapien
gctctgcccccattcacggctcatt

SEQ ID NO: 5052301 - DNA, 25 bp, Homo sapien
tgagttcatcctgcgcagggtcccg

SEQ ID NO: 5052302 - DNA, 25 bp, Homo sapien
gctgcacagtttggggggctggaac

SEQ ID NO: 5052303 - DNA, 25 bp, Homo sapien
cctccagggcgggtcgtagatgtca

SEQ ID NO: 5052304 - DNA, 25 bp, Homo sapien
agccaggtacatgtggtcaaggacc

SEQ ID NO: 5052305 - DNA, 25 bp, Homo sapien
tacatgtggtcaaggaccaggtggc

SEQ ID NO: 5052306 - DNA, 25 bp, Homo sapien
gtacatgtggtcaaggaccaggtgg

SEQ ID NO: 5052307 - DNA, 25 bp, Homo sapien
acatgtggtcaaggaccaggtggcg

SEQ ID NO: 5052308 - DNA, 25 bp, Homo sapien
gcgggagcagggtgagtgtacagcc

SEQ ID NO: 5052309 - DNA, 25 bp, Homo sapien
caggtttctgctgtaaggacccggt

SEQ ID NO: 5052310 - DNA, 25 bp, Homo sapien
gggacagggtaagcgcacagcccac

SEQ ID NO: 5052311 - DNA, 25 bp, Homo sapien
ggtgagtgtacagcccaggtttctg

SEQ ID NO: 5052312 - DNA, 25 bp, Homo sapien
gtccccgctgtaaggaccaggtggc

SEQ ID NO: 5052313 - DNA, 25 bp, Homo sapien
tccccgctgtaaggaccaggtggcg

SEQ ID NO: 5052314 - DNA, 25 bp, Homo sapien
tccccgctgtaaggaccaggtggcg

SEQ ID NO: 5052315 - DNA, 25 bp, Homo sapien
acagggtgagcgcatagcccaggtc

SEQ ID NO: 5052316 - DNA, 25 bp, Homo sapien
cgtccccgctgtaaggaccaggtgg

SEQ ID NO: 5052317 - DNA, 25 bp, Homo sapien
cacgtccccgctgtaaggaccaggt

SEQ ID NO: 5052318 - DNA, 25 bp, Homo sapien
cgcggagccatcaacagcaagcagc

SEQ ID NO: 5052319 - DNA, 25 bp, Homo sapien
ccttggatgatctctgttcctgttc

SEQ ID NO: 5052320 - DNA, 25 bp, Homo sapien
tgagatggccgagccaggtccttgg

SEQ ID NO: 5052321 - DNA, 25 bp, Homo sapien
aagcgccgcggagccatcaacagca

SEQ ID NO: 5052322 - DNA, 25 bp, Homo sapien
tggagaaataccggcccaaacagag

SEQ ID NO: 5052323 - DNA, 25 bp, Homo sapien
ctggagaaataccggcccaaacaga

SEQ ID NO: 5052324 - DNA, 25 bp, Homo sapien
gcctgtgtccggctggttggtccct

SEQ ID NO: 5052325 - DNA, 25 bp, Homo sapien
atttccggctccgaggcgcagagaa

SEQ ID NO: 5052326 - DNA, 25 bp, Homo sapien
tccggctggttggtccctgtgctgc

SEQ ID NO: 5052327 - DNA, 25 bp, Homo sapien
cacatttccggctccgaggcgcaga

SEQ ID NO: 5052328 - DNA, 25 bp, Homo sapien
ggcagggggacaggggcatggaggc

SEQ ID NO: 5052329 - DNA, 25 bp, Homo sapien
tagggggcagggggacaggggcatg

SEQ ID NO: 5052330 - DNA, 25 bp, Homo sapien
agggggacaggggcatggaggcggg

SEQ ID NO: 5052331 - DNA, 25 bp, Homo sapien
gggcagggggacaggggcatggagg

SEQ ID NO: 5052332 - DNA, 25 bp, Homo sapien
gcagggagctgacacgcataacgct

SEQ ID NO: 5052333 - DNA, 25 bp, Homo sapien
cacgcataacgcttcttttgttgaa

SEQ ID NO: 5052334 - DNA, 25 bp, Homo sapien
tcaaatggaaaaacgttatgcaacc

SEQ ID NO: 5052335 - DNA, 25 bp, Homo sapien
tggaaaaacgttatgcaaccaagct

SEQ ID NO: 5052336 - DNA, 25 bp, Homo sapien
gctgaccaggtggacacgggagggg

SEQ ID NO: 5052337 - DNA, 25 bp, Homo sapien
ggctgaccaggtggacacgggaggg

SEQ ID NO: 5052338 - DNA, 25 bp, Homo sapien
actgcttgggtctggccgacacctt

SEQ ID NO: 5052339 - DNA, 25 bp, Homo sapien
ctgcttgggtctggccgacaccttc

SEQ ID NO: 5052340 - DNA, 25 bp, Homo sapien
tgcttgggtctggccgacaccttct

SEQ ID NO: 5052341 - DNA, 25 bp, Homo sapien
cattcagcatctggaacacggcctg

SEQ ID NO: 5052342 - DNA, 25 bp, Homo sapien
tgcggaacagcaggttggtgtccac

SEQ ID NO: 5052343 - DNA, 25 bp, Homo sapien
agcaggttggtgtccacagcattca

SEQ ID NO: 5052344 - DNA, 25 bp, Homo sapien
acggcctgggggtggtagcagatgg

SEQ ID NO: 5052345 - DNA, 25 bp, Homo sapien
tgagggcctgtgacaagtggatgct

SEQ ID NO: 5052346 - DNA, 25 bp, Homo sapien
gtcacccaggtcttgatgtggcagg

SEQ ID NO: 5052347 - DNA, 25 bp, Homo sapien
tcacccaggtcttgatgtggcagga

SEQ ID NO: 5052348 - DNA, 25 bp, Homo sapien
gcctgtgacaagtggatgctgaatt

SEQ ID NO: 5052349 - DNA, 25 bp, Homo sapien
cagcacagcggtagaaggtgaactt

SEQ ID NO: 5052350 - DNA, 25 bp, Homo sapien
gtccagaggaagtggcgggcgctga

SEQ ID NO: 5052351 - DNA, 25 bp, Homo sapien
caggccagcgtgcagaagagggtgt

SEQ ID NO: 5052352 - DNA, 25 bp, Homo sapien
aagagggtgtgcagtagccgccagc

SEQ ID NO: 5052353 - DNA, 25 bp, Homo sapien
tctggtgcacctgggtccgcaggcc

SEQ ID NO: 5052354 - DNA, 25 bp, Homo sapien
accaggtccccgaacagtgccatgg

SEQ ID NO: 5052355 - DNA, 25 bp, Homo sapien
acagtgccatggctgccgcccgaat

SEQ ID NO: 5052356 - DNA, 25 bp, Homo sapien
cattggtccttcaggtgtaggagca

SEQ ID NO: 5052357 - DNA, 25 bp, Homo sapien
gatgcacacgatcacctggtcgctg

SEQ ID NO: 5052358 - DNA, 25 bp, Homo sapien
tgctctggaagaagccgtcgagcaa

SEQ ID NO: 5052359 - DNA, 25 bp, Homo sapien
tgctgatggcaacgccgaggctctg

SEQ ID NO: 5052360 - DNA, 25 bp, Homo sapien
tgacacggtgcccatgatgcacacg

SEQ ID NO: 5052361 - DNA, 25 bp, Homo sapien
gcagtgtgcccaccaatggatgttt

SEQ ID NO: 5052362 - DNA, 25 bp, Homo sapien
cagtgacttgggtgcaaaccagggt

SEQ ID NO: 5052363 - DNA, 25 bp, Homo sapien
ttgcagccagtgttcgaagaccagg

SEQ ID NO: 5052364 - DNA, 25 bp, Homo sapien
cattgggccccttagcagtgacttg

SEQ ID NO: 5052365 - DNA, 25 bp, Homo sapien
ttgcttaggccctgcagactcaaca

SEQ ID NO: 5052366 - DNA, 25 bp, Homo sapien
cacggtcaaggcagcttgtttggga

SEQ ID NO: 5052367 - DNA, 25 bp, Homo sapien
tcaacacgcggacctcagggctggg

SEQ ID NO: 5052368 - DNA, 25 bp, Homo sapien
tggaagaggatgttgcttaggccct

SEQ ID NO: 5052369 - DNA, 25 bp, Homo sapien
gcagcagctgacgcagcaccgctgg

SEQ ID NO: 5052370 - DNA, 25 bp, Homo sapien
ggcagcagctgacgcagcaccgctg

SEQ ID NO: 5052371 - DNA, 25 bp, Homo sapien
gatctgcctgcagtggttctgcacc

SEQ ID NO: 5052372 - DNA, 25 bp, Homo sapien
tggcaaggaggcccacgcccttcgg

SEQ ID NO: 5052373 - DNA, 25 bp, Homo sapien
tgccagtgccccgtggtggacagca

SEQ ID NO: 5052374 - DNA, 25 bp, Homo sapien
gccagtgccccgtggtggacagcag

SEQ ID NO: 5052375 - DNA, 25 bp, Homo sapien
cacgcccttcgggtaggtgtggatg

SEQ ID NO: 5052376 - DNA, 25 bp, Homo sapien
tggcgtagcggagcccagagaagtg

SEQ ID NO: 5052377 - DNA, 25 bp, Homo sapien
gagactcagggcgtgtggcgtagcg

SEQ ID NO: 5052378 - DNA, 25 bp, Homo sapien
gagaagtgtccattctccactcctg

SEQ ID NO: 5052379 - DNA, 25 bp, Homo sapien
cagcatttaaatatgggccaagagt

SEQ ID NO: 5052380 - DNA, 25 bp, Homo sapien
actggtctcagccataatgcgacaa

SEQ ID NO: 5052381 - DNA, 25 bp, Homo sapien
gccataatgcgacaatggttttcag

SEQ ID NO: 5052382 - DNA, 25 bp, Homo sapien
tctcagccataatgcgacaatggtt

SEQ ID NO: 5052383 - DNA, 25 bp, Homo sapien
gcgacaatggttttcagaagaaggg

SEQ ID NO: 5052384 - DNA, 25 bp, Homo sapien
tgggcactgtattggcttgttcttc

SEQ ID NO: 5052385 - DNA, 25 bp, Homo sapien
agcttctggtcctgtgacttcttgg

SEQ ID NO: 5052386 - DNA, 25 bp, Homo sapien
tcttgggcactgtattggcttgttc

SEQ ID NO: 5052387 - DNA, 25 bp, Homo sapien
ggcactgtattggcttgttcttcaa

SEQ ID NO: 5052388 - DNA, 25 bp, Homo sapien
tgcttgggctagggctcgctgggca

SEQ ID NO: 5052389 - DNA, 25 bp, Homo sapien
tcagctccaagacatagtgcatctg

SEQ ID NO: 5052390 - DNA, 25 bp, Homo sapien
ccaggaagagcttggggtagccctc

SEQ ID NO: 5052391 - DNA, 25 bp, Homo sapien
aagacatagtgcatctgggtgagga

SEQ ID NO: 5052392 - DNA, 25 bp, Homo sapien
gcagctcgtgcagcatgttcatggc

SEQ ID NO: 5052393 - DNA, 25 bp, Homo sapien
agtgcccgaggtgctgccagtattt

SEQ ID NO: 5052394 - DNA, 25 bp, Homo sapien
tgcccgaggtgctgccagtatttga

SEQ ID NO: 5052395 - DNA, 25 bp, Homo sapien
ccgaggtgctgccagtatttgatgg

SEQ ID NO: 5052396 - DNA, 25 bp, Homo sapien
gagtgcccgaggtgctgccagtatt

SEQ ID NO: 5052397 - DNA, 25 bp, Homo sapien
agccagcaaacgcaggtaggtcttc

SEQ ID NO: 5052398 - DNA, 25 bp, Homo sapien
caccaggtggctcgtgggctgccca

SEQ ID NO: 5052399 - DNA, 25 bp, Homo sapien
caaacgcaggtaggtcttctccttg

SEQ ID NO: 5052400 - DNA, 25 bp, Homo sapien
ctgtcgctggcaccggtgggcaggg

SEQ ID NO: 5052401 - DNA, 25 bp, Homo sapien
tcagggtgatgccaggttctatgtg

SEQ ID NO: 5052402 - DNA, 25 bp, Homo sapien
tgtgttgtgtaaagttagtctactc

SEQ ID NO: 5052403 - DNA, 25 bp, Homo sapien
ttagtctactctgaagccatcttgg

SEQ ID NO: 5052404 - DNA, 25 bp, Homo sapien
tttaatgtgttgtgtaaagttagtc

SEQ ID NO: 5052405 - DNA, 25 bp, Homo sapien
gaaaacctcgacaacacaatcaagg

SEQ ID NO: 5052406 - DNA, 25 bp, Homo sapien
tcaagaggacagaaattaagtacgt

SEQ ID NO: 5052407 - DNA, 25 bp, Homo sapien
cttatacatatagaggcacacctcg

SEQ ID NO: 5052408 - DNA, 25 bp, Homo sapien
tagtgagactttaacacacactcag

SEQ ID NO: 5052409 - DNA, 25 bp, Homo sapien
gcttgcgggatgtggacagagcaca

SEQ ID NO: 5052410 - DNA, 25 bp, Homo sapien
tgatggcgtgcagggtcttttcctt

SEQ ID NO: 5052411 - DNA, 25 bp, Homo sapien
ctccgggccagcagggtgatggcgt

SEQ ID NO: 5052412 - DNA, 25 bp, Homo sapien
gatggagatgttcaggaaggtggcc

SEQ ID NO: 5052413 - DNA, 25 bp, Homo sapien
tcggaggctgcctgcacgcggaagg

SEQ ID NO: 5052414 - DNA, 25 bp, Homo sapien
ccgtgctcctggacggctgtgagca

SEQ ID NO: 5052415 - DNA, 25 bp, Homo sapien
ccaggccgtcgatggccgtccagat

SEQ ID NO: 5052416 - DNA, 25 bp, Homo sapien
gccgtccagatgaggtcgctcaact

SEQ ID NO: 5052417 - DNA, 25 bp, Homo sapien
ccagtgtgagctgctgcatgatatc

SEQ ID NO: 5052418 - DNA, 25 bp, Homo sapien
tgccagtgtgagctgctgcatgata

SEQ ID NO: 5052419 - DNA, 25 bp, Homo sapien
ctgccagtgtgagctgctgcatgat

SEQ ID NO: 5052420 - DNA, 25 bp, Homo sapien
gccagtgtgagctgctgcatgatat

SEQ ID NO: 5052421 - DNA, 25 bp, Homo sapien
ctccgtccgaatgggcctgggagag

SEQ ID NO: 5052422 - DNA, 25 bp, Homo sapien
ctgttccagagtggggctccgtccg

SEQ ID NO: 5052423 - DNA, 25 bp, Homo sapien
ggctccgtccgaatgggcctgggag

SEQ ID NO: 5052424 - DNA, 25 bp, Homo sapien
tccagagtggggctccgtccgaatg

SEQ ID NO: 5052425 - DNA, 25 bp, Homo sapien
ccagtatgcccaccaattgcccaat

SEQ ID NO: 5052426 - DNA, 25 bp, Homo sapien
cagtatgcccaccaattgcccaatc

SEQ ID NO: 5052427 - DNA, 25 bp, Homo sapien
ttttgtggcacatcaagagctggta

SEQ ID NO: 5052428 - DNA, 25 bp, Homo sapien
tatgcccaccaattgcccaatcctt

SEQ ID NO: 5052429 - DNA, 25 bp, Homo sapien
ccaagtagccattgtggttcaggaa

SEQ ID NO: 5052430 - DNA, 25 bp, Homo sapien
gcccgctgccgctcatgcgccttct

SEQ ID NO: 5052431 - DNA, 25 bp, Homo sapien
ccgacgccagccagatgtacaggtg

SEQ ID NO: 5052432 - DNA, 25 bp, Homo sapien
ttctccgacgccagccagatgtaca

SEQ ID NO: 5052433 - DNA, 25 bp, Homo sapien
ggaaatgcagctcgtcggcggtggg

SEQ ID NO: 5052434 - DNA, 25 bp, Homo sapien
gcaggaaatgcagctcgtcggcggt

SEQ ID NO: 5052435 - DNA, 25 bp, Homo sapien
gatgaggctttgcagcatgaagtcc

SEQ ID NO: 5052436 - DNA, 25 bp, Homo sapien
tgcatgatgaggctttgcagcatga

SEQ ID NO: 5052437 - DNA, 25 bp, Homo sapien
cagagcagtgaagaactgccctggg

SEQ ID NO: 5052438 - DNA, 25 bp, Homo sapien
agccctggtgcgtccagcctgcccg

SEQ ID NO: 5052439 - DNA, 25 bp, Homo sapien
cagtgaagaactgccctgggtcccc

SEQ ID NO: 5052440 - DNA, 25 bp, Homo sapien
ggtccccagccctggtgcgtccagc

SEQ ID NO: 5052441 - DNA, 25 bp, Homo sapien
cacagctggatgttgggaggctcca

SEQ ID NO: 5052442 - DNA, 25 bp, Homo sapien
ttcctttccaagtctatgggaggcc

SEQ ID NO: 5052443 - DNA, 25 bp, Homo sapien
ctttccaagtctatgggaggcctca

SEQ ID NO: 5052444 - DNA, 25 bp, Homo sapien
tcctttccaagtctatgggaggcct

SEQ ID NO: 5052445 - DNA, 25 bp, Homo sapien
cctttccaagtctatgggaggcctc

SEQ ID NO: 5052446 - DNA, 25 bp, Homo sapien
ctgctggcgactccgcgtgcacaga

SEQ ID NO: 5052447 - DNA, 25 bp, Homo sapien
gatgtgcatggcctgctggcgactc

SEQ ID NO: 5052448 - DNA, 25 bp, Homo sapien
cgactccgcgtgcacagagtgtcct

SEQ ID NO: 5052449 - DNA, 25 bp, Homo sapien
gaggctggacgcgatgtgcatggcc

SEQ ID NO: 5052450 - DNA, 25 bp, Homo sapien
agaggtctggaagaactcgtagctg

SEQ ID NO: 5052451 - DNA, 25 bp, Homo sapien
gcacccatcagcatcagggtggctg

SEQ ID NO: 5052452 - DNA, 25 bp, Homo sapien
tctggaagaactcgtagctgtgggc

SEQ ID NO: 5052453 - DNA, 25 bp, Homo sapien
ggcgccctcactccggctcaccgca

SEQ ID NO: 5052454 - DNA, 25 bp, Homo sapien
ccacctggccgtatgccaggaggat

SEQ ID NO: 5052455 - DNA, 25 bp, Homo sapien
tagtggaagtagaagaccatcctgg

SEQ ID NO: 5052456 - DNA, 25 bp, Homo sapien
gtccacccacgggaggatgtgggcc

SEQ ID NO: 5052457 - DNA, 25 bp, Homo sapien
tggcccatttccagcgcaggtcctc

SEQ ID NO: 5052458 - DNA, 25 bp, Homo sapien
acgtcatccaggtggcgtgtggccg

SEQ ID NO: 5052459 - DNA, 25 bp, Homo sapien
ctcctgccaaactggtccaggacgg

SEQ ID NO: 5052460 - DNA, 25 bp, Homo sapien
tcatccaggtggcgtgtggccgcca

SEQ ID NO: 5052461 - DNA, 25 bp, Homo sapien
caaactggtccaggacggcccagac

SEQ ID NO: 5052462 - DNA, 25 bp, Homo sapien
tagcccatagtaggtaaacaggaag

SEQ ID NO: 5052463 - DNA, 25 bp, Homo sapien
tttcagcttgaaggattagcccata

SEQ ID NO: 5052464 - DNA, 25 bp, Homo sapien
tgcaggtgtctcctgaccgtggcac

SEQ ID NO: 5052465 - DNA, 25 bp, Homo sapien
tgggatgtttccaggagggcttgca

SEQ ID NO: 5052466 - DNA, 25 bp, Homo sapien
cttggaccacacatccgtgctcagg

SEQ ID NO: 5052467 - DNA, 25 bp, Homo sapien
accacacatccgtgctcaggaacgg

SEQ ID NO: 5052468 - DNA, 25 bp, Homo sapien
tctcaggggactgctcctgttgggt

SEQ ID NO: 5052469 - DNA, 25 bp, Homo sapien
gctcaggaacgggactgacttgatg

SEQ ID NO: 5052470 - DNA, 25 bp, Homo sapien
gcagttctctgcctcagcttctcga

SEQ ID NO: 5052471 - DNA, 25 bp, Homo sapien
cctcaggagatccaccggcctcagt

SEQ ID NO: 5052472 - DNA, 25 bp, Homo sapien
gttctctgcctcagcttctcgagta

SEQ ID NO: 5052473 - DNA, 25 bp, Homo sapien
tcaggagatccaccggcctcagtct

SEQ ID NO: 5052474 - DNA, 25 bp, Homo sapien
catacccaccatttgagtgaagtgc

SEQ ID NO: 5052475 - DNA, 25 bp, Homo sapien
ggtgcccgatgctttccacggatta

SEQ ID NO: 5052476 - DNA, 25 bp, Homo sapien
gtttcctgcgtcactggcacggtgc

SEQ ID NO: 5052477 - DNA, 25 bp, Homo sapien
aatgacattagcgagggtttcctgc

SEQ ID NO: 5052478 - DNA, 25 bp, Homo sapien
gcaggccttgtcttcctggctgaag

SEQ ID NO: 5052479 - DNA, 25 bp, Homo sapien
tggatcagttgctcttcccagcagg

SEQ ID NO: 5052480 - DNA, 25 bp, Homo sapien
ctggatcagttgctcttcccagcag

SEQ ID NO: 5052481 - DNA, 25 bp, Homo sapien
ccagcaggccttgtcttcctggctg

SEQ ID NO: 5052482 - DNA, 25 bp, Homo sapien
tctgtgtgggaagacgcccgtcagg

SEQ ID NO: 5052483 - DNA, 25 bp, Homo sapien
gcccatcacgtagaggaggcttctg

SEQ ID NO: 5052484 - DNA, 25 bp, Homo sapien
ctggaggacaggacgcccatcacgt

SEQ ID NO: 5052485 - DNA, 25 bp, Homo sapien
agctccgtctccagatgctgcgcca

SEQ ID NO: 5052486 - DNA, 25 bp, Homo sapien
aggtctcctccaggacgtcactggc

SEQ ID NO: 5052487 - DNA, 25 bp, Homo sapien
tccaggacgtcactggccccgatga

SEQ ID NO: 5052488 - DNA, 25 bp, Homo sapien
cagagcgagccgtgtgaaagttttc

SEQ ID NO: 5052489 - DNA, 25 bp, Homo sapien
ggtcatgttctccagagcgagccgt

SEQ ID NO: 5052490 - DNA, 25 bp, Homo sapien
ctggaacagccggaacttgtgcctg

SEQ ID NO: 5052491 - DNA, 25 bp, Homo sapien
tggaacagccggaacttgtgcctgc

SEQ ID NO: 5052492 - DNA, 25 bp, Homo sapien
ggaaggggtcagcactgttcatgtc

SEQ ID NO: 5052493 - DNA, 25 bp, Homo sapien
atcttcttgatgatgtacttcaagt

SEQ ID NO: 5052494 - DNA, 25 bp, Homo sapien
ctctgggttgtctatgaagtagtcg

SEQ ID NO: 5052495 - DNA, 25 bp, Homo sapien
catcaccagcttgggggagccatga

SEQ ID NO: 5052496 - DNA, 25 bp, Homo sapien
tgctcctgtagcatcagtgtggcct

SEQ ID NO: 5052497 - DNA, 25 bp, Homo sapien
tggctgctctgcgacttgtgaagca

SEQ ID NO: 5052498 - DNA, 25 bp, Homo sapien
gtgaccatctgtccctgcgggcaga

SEQ ID NO: 5052499 - DNA, 25 bp, Homo sapien
tgcgggcagagtcctggtgtacctt

SEQ ID NO: 5052500 - DNA, 25 bp, Homo sapien
ctcttgatttgagagagccaatctc

SEQ ID NO: 5052501 - DNA, 25 bp, Homo sapien
ggtatggtatccctagctcaggctc

SEQ ID NO: 5052502 - DNA, 25 bp, Homo sapien
tgtaggcctggtgcggcctggcctc

SEQ ID NO: 5052503 - DNA, 25 bp, Homo sapien
aggttgggtttgagacagacatggc

SEQ ID NO: 5052504 - DNA, 25 bp, Homo sapien
tcaacatttctcacgagggaaacca

SEQ ID NO: 5052505 - DNA, 25 bp, Homo sapien
gcaggttgtctctatattgctcagg

SEQ ID NO: 5052506 - DNA, 25 bp, Homo sapien
tatttagattaagggatatgcatta

SEQ ID NO: 5052507 - DNA, 25 bp, Homo sapien
aaagcaaagcgcaagcggcctaagg

SEQ ID NO: 5052508 - DNA, 25 bp, Homo sapien
tggtaacagcatgggccgcaggcac

SEQ ID NO: 5052509 - DNA, 25 bp, Homo sapien
aggcaccagcgaggcctgtaccttg

SEQ ID NO: 5052510 - DNA, 25 bp, Homo sapien
aggatcccgttggagctagagcccg

SEQ ID NO: 5052511 - DNA, 25 bp, Homo sapien
gcagtggtaacagcatgggccgcag

SEQ ID NO: 5052512 - DNA, 25 bp, Homo sapien
accaagacattcctggaacagccac

SEQ ID NO: 5052513 - DNA, 25 bp, Homo sapien
accgtaggcagcgtggattgcaaca

SEQ ID NO: 5052514 - DNA, 25 bp, Homo sapien
gattgcaacagggaatcctgctctg

SEQ ID NO: 5052515 - DNA, 25 bp, Homo sapien
gttcacaggcaggtaccaagacatt

SEQ ID NO: 5052516 - DNA, 25 bp, Homo sapien
gggacacggctgacgacactctacc

SEQ ID NO: 5052517 - DNA, 25 bp, Homo sapien
ctacccgtcggggtgcagctgtatg

SEQ ID NO: 5052518 - DNA, 25 bp, Homo sapien
ggctgacgacactctacccgtcggg

SEQ ID NO: 5052519 - DNA, 25 bp, Homo sapien
tttgggacacggctgacgacactct

SEQ ID NO: 5052520 - DNA, 25 bp, Homo sapien
ggtgcagtgcagacccacaggagct

SEQ ID NO: 5052521 - DNA, 25 bp, Homo sapien
ctctggcctcacgcctgtgggccgg

SEQ ID NO: 5052522 - DNA, 25 bp, Homo sapien
tctggcctcacgcctgtgggccggc

SEQ ID NO: 5052523 - DNA, 25 bp, Homo sapien
tgcgatgtgaggtccagcgatcctg

SEQ ID NO: 5052524 - DNA, 25 bp, Homo sapien
tgaggtccagcgatcctggggacag

SEQ ID NO: 5052525 - DNA, 25 bp, Homo sapien
cctgagagcagttgtggaggccacc

SEQ ID NO: 5052526 - DNA, 25 bp, Homo sapien
agaattcctgagagcagttgtggag

SEQ ID NO: 5052527 - DNA, 25 bp, Homo sapien
cctgcacggggcctgagagcaatgc

SEQ ID NO: 5052528 - DNA, 25 bp, Homo sapien
tgtctgccgatgcaccgccctcttg

SEQ ID NO: 5052529 - DNA, 25 bp, Homo sapien
gccctcttggctgtacttttatgac

SEQ ID NO: 5052530 - DNA, 25 bp, Homo sapien
cacttcggtgatgagtggcctgcac

SEQ ID NO: 5052531 - DNA, 25 bp, Homo sapien
gctggaggtgaggatcccatagatg

SEQ ID NO: 5052532 - DNA, 25 bp, Homo sapien
agatggggctggagctgaaaatccc

SEQ ID NO: 5052533 - DNA, 25 bp, Homo sapien
tggaggtgaggatcccacagatggg

SEQ ID NO: 5052534 - DNA, 25 bp, Homo sapien
tggagctgaaaatcccacagatggt

SEQ ID NO: 5052535 - DNA, 25 bp, Homo sapien
gcagagaccggaagctgcagcttca

SEQ ID NO: 5052536 - DNA, 25 bp, Homo sapien
tgtggttgcagagaccggaagctgc

SEQ ID NO: 5052537 - DNA, 25 bp, Homo sapien
gggtccatccgtgggctcccgcaga

SEQ ID NO: 5052538 - DNA, 25 bp, Homo sapien
ctctgggttgggtccatccgtgggc

SEQ ID NO: 5052539 - DNA, 25 bp, Homo sapien
tcagaggcatttgttctaatggctg

SEQ ID NO: 5052540 - DNA, 25 bp, Homo sapien
ttggctgtatggtgtcctgttccga

SEQ ID NO: 5052541 - DNA, 25 bp, Homo sapien
tcctgttccgatgccggcaactctg

SEQ ID NO: 5052542 - DNA, 25 bp, Homo sapien
aagagggccgaaaacacccggcatg

SEQ ID NO: 5052543 - DNA, 25 bp, Homo sapien
ccagtggagcccaagtgcgagatga

SEQ ID NO: 5052544 - DNA, 25 bp, Homo sapien
tgagcagggaatgccgttatgttat

SEQ ID NO: 5052545 - DNA, 25 bp, Homo sapien
gagaaatctcaagctgagctggagg

SEQ ID NO: 5052546 - DNA, 25 bp, Homo sapien
aatgccgttatgttattattctggg

SEQ ID NO: 5052547 - DNA, 25 bp, Homo sapien
tcagctcctgaaagaatcggtccat

SEQ ID NO: 5052548 - DNA, 25 bp, Homo sapien
ggcttactggaaggcagctgtctcc

SEQ ID NO: 5052549 - DNA, 25 bp, Homo sapien
tgtctcctcagggtgaccgtcagct

SEQ ID NO: 5052550 - DNA, 25 bp, Homo sapien
gaatcggtccatggcatagcttctc

SEQ ID NO: 5052551 - DNA, 25 bp, Homo sapien
tgggcagaggcaactgcacaactga

SEQ ID NO: 5052552 - DNA, 25 bp, Homo sapien
caactgcacaactgatagttttctg

SEQ ID NO: 5052553 - DNA, 25 bp, Homo sapien
gaggcaactgcacaactgatagttt

SEQ ID NO: 5052554 - DNA, 25 bp, Homo sapien
ttaatttcaatgtttgtccacttcc

SEQ ID NO: 5052555 - DNA, 25 bp, Homo sapien
gtggtgcggcccaggtgcgcgtcgt

SEQ ID NO: 5052556 - DNA, 25 bp, Homo sapien
ccaggtgcgcgtcgtaggagaggag

SEQ ID NO: 5052557 - DNA, 25 bp, Homo sapien
gctgcttggctattccatggctgtt

SEQ ID NO: 5052558 - DNA, 25 bp, Homo sapien
ttgctgtcagctgcttggctattcc

SEQ ID NO: 5052559 - DNA, 25 bp, Homo sapien
catgctgtaatgaccgggatccctg

SEQ ID NO: 5052560 - DNA, 25 bp, Homo sapien
aaggtggtttcaagacatgctgtaa

SEQ ID NO: 5052561 - DNA, 25 bp, Homo sapien
ccttttcttctagccgagggccagg

SEQ ID NO: 5052562 - DNA, 25 bp, Homo sapien
tccctggtggctcccgatgggcagc

SEQ ID NO: 5052563 - DNA, 25 bp, Homo sapien
agggtcccacatccgccttggtgct

SEQ ID NO: 5052564 - DNA, 25 bp, Homo sapien
ctgagggtcccacatccgccttggt

SEQ ID NO: 5052565 - DNA, 25 bp, Homo sapien
tgagggtcccacatccgccttggtg

SEQ ID NO: 5052566 - DNA, 25 bp, Homo sapien
cctgagggtcccacatccgccttgg

SEQ ID NO: 5052567 - DNA, 25 bp, Homo sapien
tgagaggccgagatgactcaacatc

SEQ ID NO: 5052568 - DNA, 25 bp, Homo sapien
gggccccaaagtctgatcaagaact

SEQ ID NO: 5052569 - DNA, 25 bp, Homo sapien
tcctcttataagcaccgtggtgatg

SEQ ID NO: 5052570 - DNA, 25 bp, Homo sapien
gctttgttgagccagaaatctcagg

SEQ ID NO: 5052571 - DNA, 25 bp, Homo sapien
ttgggcaaagacgtcaacaccaggg

SEQ ID NO: 5052572 - DNA, 25 bp, Homo sapien
gtgggcgccccggagcgctggtggg

SEQ ID NO: 5052573 - DNA, 25 bp, Homo sapien
gggattgggcaaagacgtcaacacc

SEQ ID NO: 5052574 - DNA, 25 bp, Homo sapien
caggtgccgagggtggtgggcgccc

SEQ ID NO: 5052575 - DNA, 25 bp, Homo sapien
ggaaggaggcgagggccttcaggtg

SEQ ID NO: 5052576 - DNA, 25 bp, Homo sapien
gattgggcaaagacgtcaacaccag

SEQ ID NO: 5052577 - DNA, 25 bp, Homo sapien
aaagacgtcaacaccagggctgtgg

SEQ ID NO: 5052578 - DNA, 25 bp, Homo sapien
gggcaaagacgtcaacaccagggct

SEQ ID NO: 5052579 - DNA, 25 bp, Homo sapien
agcaaatcctggaatggacaaggtg

SEQ ID NO: 5052580 - DNA, 25 bp, Homo sapien
gagcaaatcctggaatggacaaggt

SEQ ID NO: 5052581 - DNA, 25 bp, Homo sapien
tccttggtgacggtgcccaggtcat

SEQ ID NO: 5052582 - DNA, 25 bp, Homo sapien
cagagcaaatcctggaatggacaag

SEQ ID NO: 5052583 - DNA, 25 bp, Homo sapien
gcctcctcctccagggcttctctcc

SEQ ID NO: 5052584 - DNA, 25 bp, Homo sapien
ctgcctcctcctccagggcttctct

SEQ ID NO: 5052585 - DNA, 25 bp, Homo sapien
tgcctcctcctccagggcttctctc

SEQ ID NO: 5052586 - DNA, 25 bp, Homo sapien
tcaggttgtcatttaagggctgcgg

SEQ ID NO: 5052587 - DNA, 25 bp, Homo sapien
tcctggccagatttgggcaggtgcc

SEQ ID NO: 5052588 - DNA, 25 bp, Homo sapien
cctctgtggtctcagacagctgcca

SEQ ID NO: 5052589 - DNA, 25 bp, Homo sapien
tctggagaagggactgccaatgcca

SEQ ID NO: 5052590 - DNA, 25 bp, Homo sapien
acagcacagtgactgccatggttgt

SEQ ID NO: 5052591 - DNA, 25 bp, Homo sapien
ggttgtcagtgatgaggcccttgtc

SEQ ID NO: 5052592 - DNA, 25 bp, Homo sapien
agccctgccggctggatccacagat

SEQ ID NO: 5052593 - DNA, 25 bp, Homo sapien
tgactgccatggttgtcagtgatga

SEQ ID NO: 5052594 - DNA, 25 bp, Homo sapien
gtgtagggctcaggacatgcagtga

SEQ ID NO: 5052595 - DNA, 25 bp, Homo sapien
gggctcaggacatgcagtgatggcc

SEQ ID NO: 5052596 - DNA, 25 bp, Homo sapien
tagggctcaggacatgcagtgatgg

SEQ ID NO: 5052597 - DNA, 25 bp, Homo sapien
tgtagggctcaggacatgcagtgat

SEQ ID NO: 5052598 - DNA, 25 bp, Homo sapien
gcctcgctgcagacagttgggactg

SEQ ID NO: 5052599 - DNA, 25 bp, Homo sapien
ggactggacgcgctggtattccccg

SEQ ID NO: 5052600 - DNA, 25 bp, Homo sapien
agctgttcgggtgtggttgaaagca

SEQ ID NO: 5052601 - DNA, 25 bp, Homo sapien
tattccccggaggttgttgagcggc

SEQ ID NO: 5052602 - DNA, 25 bp, Homo sapien
aggagtgggcaaaggctcgggagcc

SEQ ID NO: 5052603 - DNA, 25 bp, Homo sapien
gcaaaggctcgggagcctgtgctgc

SEQ ID NO: 5052604 - DNA, 25 bp, Homo sapien
tgggcaaaggctcgggagcctgtgc

SEQ ID NO: 5052605 - DNA, 25 bp, Homo sapien
ctgtgagctcggaggagtgggcaaa

SEQ ID NO: 5052606 - DNA, 25 bp, Homo sapien
ctgaaacagtgtgggaaaggtcctg

SEQ ID NO: 5052607 - DNA, 25 bp, Homo sapien
cctgaaacagtgtgggaaaggtcct

SEQ ID NO: 5052608 - DNA, 25 bp, Homo sapien
gaacagcgtgagaaacgtcctggaa

SEQ ID NO: 5052609 - DNA, 25 bp, Homo sapien
tggaacagcgtgagaaacgtcctgg

SEQ ID NO: 5052610 - DNA, 25 bp, Homo sapien
ttctggaacagcgtgagaaacgtcc

SEQ ID NO: 5052611 - DNA, 25 bp, Homo sapien
cagcgtgagaaacgtcctggaacag

SEQ ID NO: 5052612 - DNA, 25 bp, Homo sapien
gagttgatttgaactttcgaggagt

SEQ ID NO: 5052613 - DNA, 25 bp, Homo sapien
tgaactttcgaggagttcctggatg

SEQ ID NO: 5052614 - DNA, 25 bp, Homo sapien
aactttcgaggagttcctggatgtt

SEQ ID NO: 5052615 - DNA, 25 bp, Homo sapien
gatttgaactttcgaggagttcctg

SEQ ID NO: 5052616 - DNA, 25 bp, Homo sapien
tgtgataagggctcgcggagcctgt

SEQ ID NO: 5052617 - DNA, 25 bp, Homo sapien
cggaatgagtaggtgtgataagggc

SEQ ID NO: 5052618 - DNA, 25 bp, Homo sapien
ctgccgcatgggcaaggcggaatga

SEQ ID NO: 5052619 - DNA, 25 bp, Homo sapien
ctcgtgtatggagcagcggtcagca

SEQ ID NO: 5052620 - DNA, 25 bp, Homo sapien
gtggctgtgacaggcctggccctag

SEQ ID NO: 5052621 - DNA, 25 bp, Homo sapien
cggggtaggagtgggccctggagag

SEQ ID NO: 5052622 - DNA, 25 bp, Homo sapien
ggctgtgacaggcctggccctagcc

SEQ ID NO: 5052623 - DNA, 25 bp, Homo sapien
tcacagcagtgcccccgtggagtct

SEQ ID NO: 5052624 - DNA, 25 bp, Homo sapien
cctcagaggacctgcgaggcccagg

SEQ ID NO: 5052625 - DNA, 25 bp, Homo sapien
tttcctgttcggaggcgccatttcc

SEQ ID NO: 5052626 - DNA, 25 bp, Homo sapien
cagcctgggccacacctcagaggac

SEQ ID NO: 5052627 - DNA, 25 bp, Homo sapien
cagccctggaaccacccacttctca

SEQ ID NO: 5052628 - DNA, 25 bp, Homo sapien
cagggggatgatacagctgagaatc

SEQ ID NO: 5052629 - DNA, 25 bp, Homo sapien
tgcccagtttcgagtcccattccag

SEQ ID NO: 5052630 - DNA, 25 bp, Homo sapien
tagtcagtgccagctgaatgcacac

SEQ ID NO: 5052631 - DNA, 25 bp, Homo sapien
tgaatgcacacagggggatgataca

SEQ ID NO: 5052632 - DNA, 25 bp, Homo sapien
cctcggccctgatggtgtgaactca

SEQ ID NO: 5052633 - DNA, 25 bp, Homo sapien
tgtcccactctcactgtcgttgttg

SEQ ID NO: 5052634 - DNA, 25 bp, Homo sapien
ttgtggctggcttcggatgagctct

SEQ ID NO: 5052635 - DNA, 25 bp, Homo sapien
cggatgagctctctggtggtgtccc

SEQ ID NO: 5052636 - DNA, 25 bp, Homo sapien
aggatgtcactgaatccacaaccat

SEQ ID NO: 5052637 - DNA, 25 bp, Homo sapien
caagcacctgtaaccagaggccata

SEQ ID NO: 5052638 - DNA, 25 bp, Homo sapien
ccagaggccataggatgtcactgaa

SEQ ID NO: 5052639 - DNA, 25 bp, Homo sapien
agcacctgtaaccagaggccatagg

SEQ ID NO: 5052640 - DNA, 25 bp, Homo sapien
gctcccatagcacaggttgggcacc

SEQ ID NO: 5052641 - DNA, 25 bp, Homo sapien
acatgggcaatgtgtacttgctccc

SEQ ID NO: 5052642 - DNA, 25 bp, Homo sapien
gcttgcaggaactggtagcaccatg

SEQ ID NO: 5052643 - DNA, 25 bp, Homo sapien
cagggtggaaggtggcaggtcacat

SEQ ID NO: 5052644 - DNA, 25 bp, Homo sapien
taagtgctgctgtgacgttgacctc

SEQ ID NO: 5052645 - DNA, 25 bp, Homo sapien
cattgatctgccagtgctgccgagt

SEQ ID NO: 5052646 - DNA, 25 bp, Homo sapien
cgtttcagctggaagcacccattga

SEQ ID NO: 5052647 - DNA, 25 bp, Homo sapien
gaaccacacctatggacagcgctct

SEQ ID NO: 5052648 - DNA, 25 bp, Homo sapien
gcaaagggggatgagaatgctagcc

SEQ ID NO: 5052649 - DNA, 25 bp, Homo sapien
aagggggatgagaatgctagccatc

SEQ ID NO: 5052650 - DNA, 25 bp, Homo sapien
gggatgagaatgctagccatccccg

SEQ ID NO: 5052651 - DNA, 25 bp, Homo sapien
gatgagaatgctagccatccccggg

SEQ ID NO: 5052652 - DNA, 25 bp, Homo sapien
cagatgacctctccgggtgagcctg

SEQ ID NO: 5052653 - DNA, 25 bp, Homo sapien
tctgggccagaatgcgatgggcctc

SEQ ID NO: 5052654 - DNA, 25 bp, Homo sapien
aggtttgggctcttgactgagactc

SEQ ID NO: 5052655 - DNA, 25 bp, Homo sapien
tgtggcacaaattgcctctaagctc

SEQ ID NO: 5052656 - DNA, 25 bp, Homo sapien
gatgctgcaattacatcccctgtcc

SEQ ID NO: 5052657 - DNA, 25 bp, Homo sapien
ccagctcgagggaagtgaacgtcac

SEQ ID NO: 5052658 - DNA, 25 bp, Homo sapien
tgaacgtcactccaatatctgaaaa

SEQ ID NO: 5052659 - DNA, 25 bp, Homo sapien
tgaaaatgcagctgatgctgcaatt

SEQ ID NO: 5052660 - DNA, 25 bp, Homo sapien
gggtaccagctgtatgccccttttg

SEQ ID NO: 5052661 - DNA, 25 bp, Homo sapien
tgccccttttgcaaagcgtgagtcc

SEQ ID NO: 5052662 - DNA, 25 bp, Homo sapien
tgtatgccccttttgcaaagcgtga

SEQ ID NO: 5052663 - DNA, 25 bp, Homo sapien
taccagctgtatgccccttttgcaa

SEQ ID NO: 5052664 - DNA, 25 bp, Homo sapien
tttgagatgacggtgtgaaaacaca

SEQ ID NO: 5052665 - DNA, 25 bp, Homo sapien
catgctcaggatccgcaaatctaga

SEQ ID NO: 5052666 - DNA, 25 bp, Homo sapien
taagctgaaagcgtacaattggtct

SEQ ID NO: 5052667 - DNA, 25 bp, Homo sapien
tgacctcctccacggtaagctgaaa

SEQ ID NO: 5052668 - DNA, 25 bp, Homo sapien
ctttgtgaccgatgcccctttcctg

SEQ ID NO: 5052669 - DNA, 25 bp, Homo sapien
tgatggactttgtgaccgatgcccc

SEQ ID NO: 5052670 - DNA, 25 bp, Homo sapien
gtgctcctctaaggggccctttgca

SEQ ID NO: 5052671 - DNA, 25 bp, Homo sapien
agtgatggctgatggactttgtgac

SEQ ID NO: 5052672 - DNA, 25 bp, Homo sapien
agcatcctcagggccctgctgtttc

SEQ ID NO: 5052673 - DNA, 25 bp, Homo sapien
ctgcctcacgaggtaagaatgagag

SEQ ID NO: 5052674 - DNA, 25 bp, Homo sapien
cacaggaggcttgggcagcatcctc

SEQ ID NO: 5052675 - DNA, 25 bp, Homo sapien
gcttcagggcctgcacaggaggctt

SEQ ID NO: 5052676 - DNA, 25 bp, Homo sapien
ctgctgtaggtcaccacgccccggg

SEQ ID NO: 5052677 - DNA, 25 bp, Homo sapien
accacgccccgggcagtgatggaca

SEQ ID NO: 5052678 - DNA, 25 bp, Homo sapien
tgctgtaggtcaccacgccccgggc

SEQ ID NO: 5052679 - DNA, 25 bp, Homo sapien
gccccgggcagtgatggacaggatg

SEQ ID NO: 5052680 - DNA, 25 bp, Homo sapien
tgcaggagagatcggagagagacgt

SEQ ID NO: 5052681 - DNA, 25 bp, Homo sapien
tttatctgtcagtacctcatctccc

SEQ ID NO: 5052682 - DNA, 25 bp, Homo sapien
agttagccacatcttacctgctggg

SEQ ID NO: 5052683 - DNA, 25 bp, Homo sapien
catggccaggcctgagaatcagaga

SEQ ID NO: 5052684 - DNA, 25 bp, Homo sapien
gtggttcagcagtcgccaccatgga

SEQ ID NO: 5052685 - DNA, 25 bp, Homo sapien
aaagtggttcagcagtcgccaccat

SEQ ID NO: 5052686 - DNA, 25 bp, Homo sapien
ttcagcagtcgccaccatggaattc

SEQ ID NO: 5052687 - DNA, 25 bp, Homo sapien
gttcagcagtcgccaccatggaatt

SEQ ID NO: 5052688 - DNA, 25 bp, Homo sapien
cacctggacaacgtgaaggcggcaa

SEQ ID NO: 5052689 - DNA, 25 bp, Homo sapien
gccttgccgggaatgcagaactgaa

SEQ ID NO: 5052690 - DNA, 25 bp, Homo sapien
agagacgatcttcctatttcacctg

SEQ ID NO: 5052691 - DNA, 25 bp, Homo sapien
taacgtaatggcaaggaagatcaga

SEQ ID NO: 5052692 - DNA, 25 bp, Homo sapien
gattgtgccttagtgcttggctcag

SEQ ID NO: 5052693 - DNA, 25 bp, Homo sapien
ttcccagaaactgcgggatacgtgg

SEQ ID NO: 5052694 - DNA, 25 bp, Homo sapien
ccagggtctgtgtgccgattgtgcc

SEQ ID NO: 5052695 - DNA, 25 bp, Homo sapien
aatccagggtgaccatagagcccca

SEQ ID NO: 5052696 - DNA, 25 bp, Homo sapien
tgaacaccgactctgagccaccttt

SEQ ID NO: 5052697 - DNA, 25 bp, Homo sapien
gcccaggcacggaggtgaaagggca

SEQ ID NO: 5052698 - DNA, 25 bp, Homo sapien
gcttcgtccctgcttgtgtgcttct

SEQ ID NO: 5052699 - DNA, 25 bp, Homo sapien
cccactggtgaacaccgactctgag

SEQ ID NO: 5052700 - DNA, 25 bp, Homo sapien
ggcaggcgtgactgccattggcaca

SEQ ID NO: 5052701 - DNA, 25 bp, Homo sapien
ggagctgaaggcatcatgtggctgt

SEQ ID NO: 5052702 - DNA, 25 bp, Homo sapien
agcactgggcgtggatcctctgggg

SEQ ID NO: 5052703 - DNA, 25 bp, Homo sapien
ctggggagctgaaggcatcatgtgg

SEQ ID NO: 5052704 - DNA, 25 bp, Homo sapien
tagcggcaggcaagacaattgtccc

SEQ ID NO: 5052705 - DNA, 25 bp, Homo sapien
ctttttagcataatccagatggaga

SEQ ID NO: 5052706 - DNA, 25 bp, Homo sapien
gaccccatcgggaagcagaggatga

SEQ ID NO: 5052707 - DNA, 25 bp, Homo sapien
cagaggatgaagatcaggaaggaac

SEQ ID NO: 5052708 - DNA, 25 bp, Homo sapien
tccaggagtcgtggttgctcacacg

SEQ ID NO: 5052709 - DNA, 25 bp, Homo sapien
acgtggcccagtcctccgaggtttg

SEQ ID NO: 5052710 - DNA, 25 bp, Homo sapien
cccctggcttttaatagcgtgagca

SEQ ID NO: 5052711 - DNA, 25 bp, Homo sapien
ggcagcccagcatgtcccttgccag

SEQ ID NO: 5052712 - DNA, 25 bp, Homo sapien
gtaatgccttaacccacagggagga

SEQ ID NO: 5052713 - DNA, 25 bp, Homo sapien
gttccatccagtgttgccagtgcca

SEQ ID NO: 5052714 - DNA, 25 bp, Homo sapien
gagcgggtaacgatggcgttccatc

SEQ ID NO: 5052715 - DNA, 25 bp, Homo sapien
agagggcagtcctcagcccagaagg

SEQ ID NO: 5052716 - DNA, 25 bp, Homo sapien
tgaagatgatatgggcagttgcgaa

SEQ ID NO: 5052717 - DNA, 25 bp, Homo sapien
aaagtttcatcagtaagcgtggggc

SEQ ID NO: 5052718 - DNA, 25 bp, Homo sapien
gatatgggcagttgcgaacattctc

SEQ ID NO: 5052719 - DNA, 25 bp, Homo sapien
ggcagttgcgaacattctcctttta

SEQ ID NO: 5052720 - DNA, 25 bp, Homo sapien
acaatgcccccgctgatgggagctg

SEQ ID NO: 5052721 - DNA, 25 bp, Homo sapien
agacgggcggcgtctgagcacagct

SEQ ID NO: 5052722 - DNA, 25 bp, Homo sapien
taggcgctgaatggcgacaatgccc

SEQ ID NO: 5052723 - DNA, 25 bp, Homo sapien
ggcccgagtggccaagcatggctta

SEQ ID NO: 5052724 - DNA, 25 bp, Homo sapien
caggccgtggttctcactcttcact

SEQ ID NO: 5052725 - DNA, 25 bp, Homo sapien
gggcaggccgtggttctcactcttc

SEQ ID NO: 5052726 - DNA, 25 bp, Homo sapien
atcccggagcatgacaagggccctg

SEQ ID NO: 5052727 - DNA, 25 bp, Homo sapien
tgagccaagatcccggagcatgaca

SEQ ID NO: 5052728 - DNA, 25 bp, Homo sapien
tgtttgccacacaccagattgagga

SEQ ID NO: 5052729 - DNA, 25 bp, Homo sapien
tgggaatccacttattcaagccctt

SEQ ID NO: 5052730 - DNA, 25 bp, Homo sapien
ggacaccttgcccagacttgtttgc

SEQ ID NO: 5052731 - DNA, 25 bp, Homo sapien
aatccacttattcaagcccttgagg

SEQ ID NO: 5052732 - DNA, 25 bp, Homo sapien
agactcgggtgtgacctggcagaat

SEQ ID NO: 5052733 - DNA, 25 bp, Homo sapien
gaagagactcgggtgtgacctggca

SEQ ID NO: 5052734 - DNA, 25 bp, Homo sapien
tcgggtgtgacctggcagaattctg

SEQ ID NO: 5052735 - DNA, 25 bp, Homo sapien
ctgaatgtaggaaggacaaccagga

SEQ ID NO: 5052736 - DNA, 25 bp, Homo sapien
ccttgacgcaggtgtttctcacggg

SEQ ID NO: 5052737 - DNA, 25 bp, Homo sapien
ttctcacgggtgctcccatgagcca

SEQ ID NO: 5052738 - DNA, 25 bp, Homo sapien
tgcacaacagttgccttagttccat

SEQ ID NO: 5052739 - DNA, 25 bp, Homo sapien
catcggcttcctaaccttgtcaata

SEQ ID NO: 5052740 - DNA, 25 bp, Homo sapien
ttagaggaatatagaatcatagaaa

SEQ ID NO: 5052741 - DNA, 25 bp, Homo sapien
tagaggaatatagaatcatagaaat

SEQ ID NO: 5052742 - DNA, 25 bp, Homo sapien
cttggtactgcccagatctggctgc

SEQ ID NO: 5052743 - DNA, 25 bp, Homo sapien
gcttcttggtactgcccagatctgg

SEQ ID NO: 5052744 - DNA, 25 bp, Homo sapien
ttctcttgcttcttggtactgccca

SEQ ID NO: 5052745 - DNA, 25 bp, Homo sapien
cctgaaactcaggcttctcttgctt

SEQ ID NO: 5052746 - DNA, 25 bp, Homo sapien
ctggcatcctgggcaggtctggaca

SEQ ID NO: 5052747 - DNA, 25 bp, Homo sapien
aagagctaaagcacatcgccagggc

SEQ ID NO: 5052748 - DNA, 25 bp, Homo sapien
tgaattgaacttggttccctgccag

SEQ ID NO: 5052749 - DNA, 25 bp, Homo sapien
agcagcagctagtgatcgggccagc

SEQ ID NO: 5052750 - DNA, 25 bp, Homo sapien
gcccatgcgtttccacaggcgttgg

SEQ ID NO: 5052751 - DNA, 25 bp, Homo sapien
cctggggggatgtcagtgccatcct

SEQ ID NO: 5052752 - DNA, 25 bp, Homo sapien
gggatgaacccggtgcatactgaag

SEQ ID NO: 5052753 - DNA, 25 bp, Homo sapien
gcatactgaagctcgcactgcatcc

SEQ ID NO: 5052754 - DNA, 25 bp, Homo sapien
cagttaatgtgtcacacttattcaa

SEQ ID NO: 5052755 - DNA, 25 bp, Homo sapien
agttaatgtgtcacacttattcaat

SEQ ID NO: 5052756 - DNA, 25 bp, Homo sapien
agggttgttgtaagtcgacagggcg

SEQ ID NO: 5052757 - DNA, 25 bp, Homo sapien
tgtaagtcgacagggcgatggccac

SEQ ID NO: 5052758 - DNA, 25 bp, Homo sapien
tgttgtaagtcgacagggcgatggc

SEQ ID NO: 5052759 - DNA, 25 bp, Homo sapien
ggttgttgtaagtcgacagggcgat

SEQ ID NO: 5052760 - DNA, 25 bp, Homo sapien
gatgcatgaagcagccaaatgtccc

SEQ ID NO: 5052761 - DNA, 25 bp, Homo sapien
gatgagcacagctcggtgcaggggc

SEQ ID NO: 5052762 - DNA, 25 bp, Homo sapien
agagatgcatgaagcagccaaatgt

SEQ ID NO: 5052763 - DNA, 25 bp, Homo sapien
atgcatgaagcagccaaatgtccct

SEQ ID NO: 5052764 - DNA, 25 bp, Homo sapien
acacacccagagagatgcacatagc

SEQ ID NO: 5052765 - DNA, 25 bp, Homo sapien
cacacccagagagatgcacatagca

SEQ ID NO: 5052766 - DNA, 25 bp, Homo sapien
cacccagagagatgcacatagcagc

SEQ ID NO: 5052767 - DNA, 25 bp, Homo sapien
acccagagagatgcacatagcagcc

SEQ ID NO: 5052768 - DNA, 25 bp, Homo sapien
gctgtgatttcaacgaaggctgcag

SEQ ID NO: 5052769 - DNA, 25 bp, Homo sapien
gaacagacctgtgatgctccgaggc

SEQ ID NO: 5052770 - DNA, 25 bp, Homo sapien
ggccgtcttctcatagctgttacag

SEQ ID NO: 5052771 - DNA, 25 bp, Homo sapien
cagagttactgatcgaaaggccgtc

SEQ ID NO: 5052772 - DNA, 25 bp, Homo sapien
gcatgacagcctcggagggccagca

SEQ ID NO: 5052773 - DNA, 25 bp, Homo sapien
agcagcctacgtggaggcagctgac

SEQ ID NO: 5052774 - DNA, 25 bp, Homo sapien
tgcattgagatttccggggagccct

SEQ ID NO: 5052775 - DNA, 25 bp, Homo sapien
cctgaggcacaagggccctgaagag

SEQ ID NO: 5052776 - DNA, 25 bp, Homo sapien
gactgtggccgtgatgggcatcaga

SEQ ID NO: 5052777 - DNA, 25 bp, Homo sapien
cttcccctgtcacggccatgtgagt

SEQ ID NO: 5052778 - DNA, 25 bp, Homo sapien
aaaacgggcagcaacttgggtctgg

SEQ ID NO: 5052779 - DNA, 25 bp, Homo sapien
aagcccttcccctgtcacggccatg

SEQ ID NO: 5052780 - DNA, 25 bp, Homo sapien
tggtcatccagacctgaagttggtc

SEQ ID NO: 5052781 - DNA, 25 bp, Homo sapien
actcttggaatgacgccccctgaga

SEQ ID NO: 5052782 - DNA, 25 bp, Homo sapien
atgacgccccctgagagatgctgct

SEQ ID NO: 5052783 - DNA, 25 bp, Homo sapien
gatgctgctgattcaagggtagctc

SEQ ID NO: 5052784 - DNA, 25 bp, Homo sapien
ccctcgtggtagcaggtagggccac

SEQ ID NO: 5052785 - DNA, 25 bp, Homo sapien
tccaagcgatgaatggagtctgccc

SEQ ID NO: 5052786 - DNA, 25 bp, Homo sapien
ctgggactttgactccaagcgatga

SEQ ID NO: 5052787 - DNA, 25 bp, Homo sapien
cgatgaatggagtctgccctcgtgg

SEQ ID NO: 5052788 - DNA, 25 bp, Homo sapien
taaccactttcaggcaggaaggctt

SEQ ID NO: 5052789 - DNA, 25 bp, Homo sapien
accttctccagggggtctttgatga

SEQ ID NO: 5052790 - DNA, 25 bp, Homo sapien
cttctccagggggtctttgatgaaa

SEQ ID NO: 5052791 - DNA, 25 bp, Homo sapien
ctccagggggtctttgatgaaagca

SEQ ID NO: 5052792 - DNA, 25 bp, Homo sapien
tgtgccctcagacagagccagcacc

SEQ ID NO: 5052793 - DNA, 25 bp, Homo sapien
catggctacttcctgccctgtcctc

SEQ ID NO: 5052794 - DNA, 25 bp, Homo sapien
agcaccgccccctccatggctactt

SEQ ID NO: 5052795 - DNA, 25 bp, Homo sapien
ctgtgccctcagacagagccagcac

SEQ ID NO: 5052796 - DNA, 25 bp, Homo sapien
gcgatcgcatatgtaatagccctgt

SEQ ID NO: 5052797 - DNA, 25 bp, Homo sapien
tagacgccctttttacaagtgcagc

SEQ ID NO: 5052798 - DNA, 25 bp, Homo sapien
gggccccttttgctgctgatatgta

SEQ ID NO: 5052799 - DNA, 25 bp, Homo sapien
tgtaaataaatgcaggcgatcgcat

SEQ ID NO: 5052800 - DNA, 25 bp, Homo sapien
agccgacgctccatggccgctgcct

SEQ ID NO: 5052801 - DNA, 25 bp, Homo sapien
cacagccgacgctccatggccgctg

SEQ ID NO: 5052802 - DNA, 25 bp, Homo sapien
gtgggatccacagccgacgctccat

SEQ ID NO: 5052803 - DNA, 25 bp, Homo sapien
ggtgggatccacagccgacgctcca

SEQ ID NO: 5052804 - DNA, 25 bp, Homo sapien
caggcctgcccatagacaagataga

SEQ ID NO: 5052805 - DNA, 25 bp, Homo sapien
tctccatgggatctagattttgcag

SEQ ID NO: 5052806 - DNA, 25 bp, Homo sapien
agaatcttaccccacaactgggaag

SEQ ID NO: 5052807 - DNA, 25 bp, Homo sapien
gaaactaagaatgctctaagccaga

SEQ ID NO: 5052808 - DNA, 25 bp, Homo sapien
gagcctgaagcctggcattctgcct

SEQ ID NO: 5052809 - DNA, 25 bp, Homo sapien
ccccttcccactgagcctgaagcct

SEQ ID NO: 5052810 - DNA, 25 bp, Homo sapien
ctgaagcctggcattctgcctttcc

SEQ ID NO: 5052811 - DNA, 25 bp, Homo sapien
ctaaacatcccccttcccactgagc

SEQ ID NO: 5052812 - DNA, 25 bp, Homo sapien
acctcccgttttcaatcacccacat

SEQ ID NO: 5052813 - DNA, 25 bp, Homo sapien
aatcacccacatcccatgggtttcc

SEQ ID NO: 5052814 - DNA, 25 bp, Homo sapien
tcacccacatcccatgggtttcctc

SEQ ID NO: 5052815 - DNA, 25 bp, Homo sapien
cccacatcccatgggtttcctctgg

SEQ ID NO: 5052816 - DNA, 25 bp, Homo sapien
tgcaggcccgtctgggaagagattg

SEQ ID NO: 5052817 - DNA, 25 bp, Homo sapien
gatatttgctgttattaggaccagg

SEQ ID NO: 5052818 - DNA, 25 bp, Homo sapien
cttcattgcaattcccgggtgggat

SEQ ID NO: 5052819 - DNA, 25 bp, Homo sapien
ccagggacccaagaatgcccgaatc

SEQ ID NO: 5052820 - DNA, 25 bp, Homo sapien
cctttgtcgtttcctttcatgcatc

SEQ ID NO: 5052821 - DNA, 25 bp, Homo sapien
tttcttgagcttcagtgtcttcttc

SEQ ID NO: 5052822 - DNA, 25 bp, Homo sapien
cctgctcagcaaagcgtttcattgt

SEQ ID NO: 5052823 - DNA, 25 bp, Homo sapien
ttttaatttcctgctcagcaaagcg

SEQ ID NO: 5052824 - DNA, 25 bp, Homo sapien
ctgcgttccacgtattcctttcctg

SEQ ID NO: 5052825 - DNA, 25 bp, Homo sapien
actgcgttccacgtattcctttcct

SEQ ID NO: 5052826 - DNA, 25 bp, Homo sapien
agcttcaaaagctgtttgtgctgtt

SEQ ID NO: 5052827 - DNA, 25 bp, Homo sapien
aaagctgtttgtgctgttagcatca

SEQ ID NO: 5052828 - DNA, 25 bp, Homo sapien
cctgatccagtagcaacttgcaagc

SEQ ID NO: 5052829 - DNA, 25 bp, Homo sapien
tgtccacagcttcaaaagctgtttg

SEQ ID NO: 5052830 - DNA, 25 bp, Homo sapien
gcccagcatcgagggctgccgctgt

SEQ ID NO: 5052831 - DNA, 25 bp, Homo sapien
tatcccagagttgtcaagggtgaca

SEQ ID NO: 5052832 - DNA, 25 bp, Homo sapien
cacggttagagaatccagaagggct

SEQ ID NO: 5052833 - DNA, 25 bp, Homo sapien
gccgctgtccgcatcattgttgtgg

SEQ ID NO: 5052834 - DNA, 25 bp, Homo sapien
tggtcagagtccagtagagcaagcg

SEQ ID NO: 5052835 - DNA, 25 bp, Homo sapien
gagcaagcggaaggtggcatctgag

SEQ ID NO: 5052836 - DNA, 25 bp, Homo sapien
cggaaggtggcatctgagggagcag

SEQ ID NO: 5052837 - DNA, 25 bp, Homo sapien
caagcggaaggtggcatctgaggga

SEQ ID NO: 5052838 - DNA, 25 bp, Homo sapien
catagtccacactgatcatccatag

SEQ ID NO: 5052839 - DNA, 25 bp, Homo sapien
catccatagtccacactgatcatcc

SEQ ID NO: 5052840 - DNA, 25 bp, Homo sapien
tccatagtccacactgatcatccat

SEQ ID NO: 5052841 - DNA, 25 bp, Homo sapien
atagtccacactgatcatccatagt

SEQ ID NO: 5052842 - DNA, 25 bp, Homo sapien
gatcacactggccatccatagtcca

SEQ ID NO: 5052843 - DNA, 25 bp, Homo sapien
actggccatccatagtccacactga

SEQ ID NO: 5052844 - DNA, 25 bp, Homo sapien
cacactggccatccatagtccacac

SEQ ID NO: 5052845 - DNA, 25 bp, Homo sapien
ttagatcacactggccatccatagt

SEQ ID NO: 5052846 - DNA, 25 bp, Homo sapien
atagaccacactggccatccataga

SEQ ID NO: 5052847 - DNA, 25 bp, Homo sapien
atagtccacactggccatccataga

SEQ ID NO: 5052848 - DNA, 25 bp, Homo sapien
catagtccacactggccatccatag

SEQ ID NO: 5052849 - DNA, 25 bp, Homo sapien
actgaccatccatagaccacattga

SEQ ID NO: 5052850 - DNA, 25 bp, Homo sapien
ccatccatagaccacattgaccatc

SEQ ID NO: 5052851 - DNA, 25 bp, Homo sapien
actgaccatccatagaccacattga

SEQ ID NO: 5052852 - DNA, 25 bp, Homo sapien
atccatagaccacattgaccatcca

SEQ ID NO: 5052853 - DNA, 25 bp, Homo sapien
tccatagaccacattgaccatccat

SEQ ID NO: 5052854 - DNA, 25 bp, Homo sapien
atagaccacactggccatccataga

SEQ ID NO: 5052855 - DNA, 25 bp, Homo sapien
catagtccacactggccatccatag

SEQ ID NO: 5052856 - DNA, 25 bp, Homo sapien
catagtccacactgatcatccgtag

SEQ ID NO: 5052857 - DNA, 25 bp, Homo sapien
gaccatccatagaccacattgacca

SEQ ID NO: 5052858 - DNA, 25 bp, Homo sapien
catccataggccatattgaaggtcc

SEQ ID NO: 5052859 - DNA, 25 bp, Homo sapien
gatgacattgaccaaccatagacca

SEQ ID NO: 5052860 - DNA, 25 bp, Homo sapien
gcataggccacactgactgtccata

SEQ ID NO: 5052861 - DNA, 25 bp, Homo sapien
ttgaaggtccatagtccacacagac

SEQ ID NO: 5052862 - DNA, 25 bp, Homo sapien
cgttcactcatgaaggcgccttctg

SEQ ID NO: 5052863 - DNA, 25 bp, Homo sapien
ccgtggggacagacgcaactggcat

SEQ ID NO: 5052864 - DNA, 25 bp, Homo sapien
aaagacttgaggctcttgggcgagg

SEQ ID NO: 5052865 - DNA, 25 bp, Homo sapien
tgccttcgggttcagacttccatgg

SEQ ID NO: 5052866 - DNA, 25 bp, Homo sapien
aatgcacacttcacagaatgcacac

SEQ ID NO: 5052867 - DNA, 25 bp, Homo sapien
tcacagaatgcacacttcacagaat

SEQ ID NO: 5052868 - DNA, 25 bp, Homo sapien
cagaatgcacacttcacagaatgca

SEQ ID NO: 5052869 - DNA, 25 bp, Homo sapien
cacagaatgcacacttcacagaatg

SEQ ID NO: 5052870 - DNA, 25 bp, Homo sapien
acggtggcagtctccaggctgcact

SEQ ID NO: 5052871 - DNA, 25 bp, Homo sapien
gctccatcgccctccggggggcacg

SEQ ID NO: 5052872 - DNA, 25 bp, Homo sapien
ggcacggtggcagtctccaggctgc

SEQ ID NO: 5052873 - DNA, 25 bp, Homo sapien
ggcagtgccgtgggagtcaggctgc

SEQ ID NO: 5052874 - DNA, 25 bp, Homo sapien
gggcagtggccaccagactttagcc

SEQ ID NO: 5052875 - DNA, 25 bp, Homo sapien
gaacacatcgccacagtccctagaa

SEQ ID NO: 5052876 - DNA, 25 bp, Homo sapien
gacgtccttctaccatccacgaaca

SEQ ID NO: 5052877 - DNA, 25 bp, Homo sapien
gtggccaccagactttagccactgg

SEQ ID NO: 5052878 - DNA, 25 bp, Homo sapien
gctgccgctgacaggagtgatggaa

SEQ ID NO: 5052879 - DNA, 25 bp, Homo sapien
tattccctcgccacccttggaggtg

SEQ ID NO: 5052880 - DNA, 25 bp, Homo sapien
agcaaggccttctgcgtgcagctcc

SEQ ID NO: 5052881 - DNA, 25 bp, Homo sapien
ggcctggggcttgacatgacaatta

SEQ ID NO: 5052882 - DNA, 25 bp, Homo sapien
ctttgggggcaggaagtgtctgcct

SEQ ID NO: 5052883 - DNA, 25 bp, Homo sapien
tgggcggtgctcagcaagggagagg

SEQ ID NO: 5052884 - DNA, 25 bp, Homo sapien
gtgcccagcgtagagctgtcccttt

SEQ ID NO: 5052885 - DNA, 25 bp, Homo sapien
cttgggcggtgctcagcaagggaga

SEQ ID NO: 5052886 - DNA, 25 bp, Homo sapien
acgggcggcgagagccctggagacc

SEQ ID NO: 5052887 - DNA, 25 bp, Homo sapien
catctttgccatggccacggggtgg

SEQ ID NO: 5052888 - DNA, 25 bp, Homo sapien
tcagtccgtagctgtccacactcat

SEQ ID NO: 5052889 - DNA, 25 bp, Homo sapien
gaccacaagtgcagctcagtccgta

SEQ ID NO: 5052890 - DNA, 25 bp, Homo sapien
tcatgggcatgaggtccagtgatgc

SEQ ID NO: 5052891 - DNA, 25 bp, Homo sapien
gccaaaccacatcatgcccagagaa

SEQ ID NO: 5052892 - DNA, 25 bp, Homo sapien
gctccggcacaggagtgcaccttct

SEQ ID NO: 5052893 - DNA, 25 bp, Homo sapien
actgagagctgggtcactgtcggca

SEQ ID NO: 5052894 - DNA, 25 bp, Homo sapien
ttgaaataaccagaaggaaacaggc

SEQ ID NO: 5052895 - DNA, 25 bp, Homo sapien
gcggaaaaggacttcctgcgcatcc

SEQ ID NO: 5052896 - DNA, 25 bp, Homo sapien
gacaaacacaaggaccgcatctgat

SEQ ID NO: 5052897 - DNA, 25 bp, Homo sapien
ttgatcgggcccctgcgcggaaaag

SEQ ID NO: 5052898 - DNA, 25 bp, Homo sapien
ggagtgactttcgacagccagcgtg

SEQ ID NO: 5052899 - DNA, 25 bp, Homo sapien
tggagacgctctcaaatgcaaacaa

SEQ ID NO: 5052900 - DNA, 25 bp, Homo sapien
ccagcgtgcaggagtgagagcctca

SEQ ID NO: 5052901 - DNA, 25 bp, Homo sapien
ggcaactccctctaaggctctgtgg

SEQ ID NO: 5052902 - DNA, 25 bp, Homo sapien
gcagcattaacaactgattccagaa

SEQ ID NO: 5052903 - DNA, 25 bp, Homo sapien
cagcattaacaactgattccagaat

SEQ ID NO: 5052904 - DNA, 25 bp, Homo sapien
cttggtgaatgttttcaccctgtcc

SEQ ID NO: 5052905 - DNA, 25 bp, Homo sapien
ggaactacgatgcacacagctttgc

SEQ ID NO: 5052906 - DNA, 25 bp, Homo sapien
tttgtgtagccggaagaccagacgc

SEQ ID NO: 5052907 - DNA, 25 bp, Homo sapien
gagtgaaaggcggaactacgatgca

SEQ ID NO: 5052908 - DNA, 25 bp, Homo sapien
caggagcaaacacccgggtgcagga

SEQ ID NO: 5052909 - DNA, 25 bp, Homo sapien
ggacaggcgtgctcgcaggggctcc

SEQ ID NO: 5052910 - DNA, 25 bp, Homo sapien
ggactactttcaccagccatgggca

SEQ ID NO: 5052911 - DNA, 25 bp, Homo sapien
attgccggactactttcaccagcca

SEQ ID NO: 5052912 - DNA, 25 bp, Homo sapien
ctcctccccattgccggactacttt

SEQ ID NO: 5052913 - DNA, 25 bp, Homo sapien
tcacttgtatgggattaagccgcac

SEQ ID NO: 5052914 - DNA, 25 bp, Homo sapien
gggtaattccatctgtgacctatga

SEQ ID NO: 5052915 - DNA, 25 bp, Homo sapien
tggtcaccgggcctaaggagtcctc

SEQ ID NO: 5052916 - DNA, 25 bp, Homo sapien
gtcctcgagagaagctccctgcgtg

SEQ ID NO: 5052917 - DNA, 25 bp, Homo sapien
tccatcaccacgaagaccccacaga

SEQ ID NO: 5052918 - DNA, 25 bp, Homo sapien
catccacatcaccatgaagacccca

SEQ ID NO: 5052919 - DNA, 25 bp, Homo sapien
atccacatcaccatgaagaccccac

SEQ ID NO: 5052920 - DNA, 25 bp, Homo sapien
tcaccacgaagaccccacagaacat

SEQ ID NO: 5052921 - DNA, 25 bp, Homo sapien
tctgaggcctcagcaccacatcctg

SEQ ID NO: 5052922 - DNA, 25 bp, Homo sapien
ctcagcaccacatcctgcagaaatg

SEQ ID NO: 5052923 - DNA, 25 bp, Homo sapien
tgaggcctcagcaccacatcctgca

SEQ ID NO: 5052924 - DNA, 25 bp, Homo sapien
agcaccacatcctgcagaaatggtc

SEQ ID NO: 5052925 - DNA, 25 bp, Homo sapien
aggccgggaccggtgctgccaagga

SEQ ID NO: 5052926 - DNA, 25 bp, Homo sapien
ccgagagggtggagtggcggtcagg

SEQ ID NO: 5052927 - DNA, 25 bp, Homo sapien
agggcccatgccgagagggtggagt

SEQ ID NO: 5052928 - DNA, 25 bp, Homo sapien
cttcagcttgccgtccccttgctgg

SEQ ID NO: 5052929 - DNA, 25 bp, Homo sapien
tggcaccccggtatccattctctgc

SEQ ID NO: 5052930 - DNA, 25 bp, Homo sapien
cctcaggatggaaccaaggtgacca

SEQ ID NO: 5052931 - DNA, 25 bp, Homo sapien
tgcccttgaaagagagggtgcctgc

SEQ ID NO: 5052932 - DNA, 25 bp, Homo sapien
gagattggcgccctggcatcctttc

SEQ ID NO: 5052933 - DNA, 25 bp, Homo sapien
gcaaacctgctccaacactcagtag

SEQ ID NO: 5052934 - DNA, 25 bp, Homo sapien
gaggctccgtgcaccttcaggttct

SEQ ID NO: 5052935 - DNA, 25 bp, Homo sapien
ctgctgactgcattctttctcctga

SEQ ID NO: 5052936 - DNA, 25 bp, Homo sapien
caatgtccccagcttggcttgactt

SEQ ID NO: 5052937 - DNA, 25 bp, Homo sapien
acgagtgacagagtagacacctggg

SEQ ID NO: 5052938 - DNA, 25 bp, Homo sapien
accacccaggcatttgatgcgcagt

SEQ ID NO: 5052939 - DNA, 25 bp, Homo sapien
ggatgccaagtcaccacccaggcat

SEQ ID NO: 5052940 - DNA, 25 bp, Homo sapien
cagttgctcagcacgagtgacagag

SEQ ID NO: 5052941 - DNA, 25 bp, Homo sapien
cacagactgagcaagccggagcacc

SEQ ID NO: 5052942 - DNA, 25 bp, Homo sapien
ggacagaggcaccacgacaggcccg

SEQ ID NO: 5052943 - DNA, 25 bp, Homo sapien
cacgacaggcccgccacagactgag

SEQ ID NO: 5052944 - DNA, 25 bp, Homo sapien
cgacaggcccgccacagactgagca

SEQ ID NO: 5052945 - DNA, 25 bp, Homo sapien
tgttactctgcaggcagcccagtgg

SEQ ID NO: 5052946 - DNA, 25 bp, Homo sapien
taatcgcgacgctggtgagtgttca

SEQ ID NO: 5052947 - DNA, 25 bp, Homo sapien
caaataactcggagacaagggatcg

SEQ ID NO: 5052948 - DNA, 25 bp, Homo sapien
caggtcttctgcagcggtgattaac

SEQ ID NO: 5052949 - DNA, 25 bp, Homo sapien
gagcgtttatggagcaccgactgaa

SEQ ID NO: 5052950 - DNA, 25 bp, Homo sapien
aaaaatgcatccgaaaaccctggcg

SEQ ID NO: 5052951 - DNA, 25 bp, Homo sapien
gagcattcagcactccaggagcgtt

SEQ ID NO: 5052952 - DNA, 25 bp, Homo sapien
aaccctggcgctgcaatctggaact

SEQ ID NO: 5052953 - DNA, 25 bp, Homo sapien
gaatcaaaccctgttagggacaatg

SEQ ID NO: 5052954 - DNA, 25 bp, Homo sapien
caatgtgacattgtcatgtctgcaa

SEQ ID NO: 5052955 - DNA, 25 bp, Homo sapien
catttgcagtcaggatacaggcact

SEQ ID NO: 5052956 - DNA, 25 bp, Homo sapien
gaccctgactgccatgacacgaggg

SEQ ID NO: 5052957 - DNA, 25 bp, Homo sapien
ctccaagacaaatctgttctccggc

SEQ ID NO: 5052958 - DNA, 25 bp, Homo sapien
ccaagacaaatctgttctccggctc

SEQ ID NO: 5052959 - DNA, 25 bp, Homo sapien
gctcccagaaccttcagactgcaca

SEQ ID NO: 5052960 - DNA, 25 bp, Homo sapien
agaaccttcagactgcacatcttag

SEQ ID NO: 5052961 - DNA, 25 bp, Homo sapien
caaggatgaaggtgtcggagagctg

SEQ ID NO: 5052962 - DNA, 25 bp, Homo sapien
aggatgaaggtgtcggagagctggc

SEQ ID NO: 5052963 - DNA, 25 bp, Homo sapien
ggtccaaagccaaacccaaggatga

SEQ ID NO: 5052964 - DNA, 25 bp, Homo sapien
ccaaggatgaaggtgtcggagagct

SEQ ID NO: 5052965 - DNA, 25 bp, Homo sapien
agcccctgagtagcagcctcgagca

SEQ ID NO: 5052966 - DNA, 25 bp, Homo sapien
ctgccgggctcatggaacaggccca

SEQ ID NO: 5052967 - DNA, 25 bp, Homo sapien
tcagcccgtagcaggcagggcaagg

SEQ ID NO: 5052968 - DNA, 25 bp, Homo sapien
agtagcagcctcgagcagctgagcc

SEQ ID NO: 5052969 - DNA, 25 bp, Homo sapien
aaggactggtcagcgccgagcaggg

SEQ ID NO: 5052970 - DNA, 25 bp, Homo sapien
ctggtaaggactggtcagcgccgag

SEQ ID NO: 5052971 - DNA, 25 bp, Homo sapien
tcagcgccgagcagggtggcccgga

SEQ ID NO: 5052972 - DNA, 25 bp, Homo sapien
ctggtcagcgccgagcagggtggcc

SEQ ID NO: 5052973 - DNA, 25 bp, Homo sapien
tcagtccacggtccagacttcctgg

SEQ ID NO: 5052974 - DNA, 25 bp, Homo sapien
catgactgaacgacattgaggaggg

SEQ ID NO: 5052975 - DNA, 25 bp, Homo sapien
tgtgagatgcgtttgctcaccggcc

SEQ ID NO: 5052976 - DNA, 25 bp, Homo sapien
cagccttcgtttgccgaattgtgag

SEQ ID NO: 5052977 - DNA, 25 bp, Homo sapien
ccggcgaggcctccgtggctgcatt

SEQ ID NO: 5052978 - DNA, 25 bp, Homo sapien
ggtgttttatgctgaacgttgaaga

SEQ ID NO: 5052979 - DNA, 25 bp, Homo sapien
cattgccggcaatgactaggtgttt

SEQ ID NO: 5052980 - DNA, 25 bp, Homo sapien
accgggcccacatctcccggcgagg

SEQ ID NO: 5052981 - DNA, 25 bp, Homo sapien
ctctggcggattcagagaggccagg

SEQ ID NO: 5052982 - DNA, 25 bp, Homo sapien
cttggcacctggaccttctagaagc

SEQ ID NO: 5052983 - DNA, 25 bp, Homo sapien
gcccttggcagccaaacctttctgg

SEQ ID NO: 5052984 - DNA, 25 bp, Homo sapien
tgactccggcaccagacacagctgg

SEQ ID NO: 5052985 - DNA, 25 bp, Homo sapien
aactgcagcaattcattatccttcc

SEQ ID NO: 5052986 - DNA, 25 bp, Homo sapien
cccagctcccctacctatcactgag

SEQ ID NO: 5052987 - DNA, 25 bp, Homo sapien
aggaggtgccaaatccaatttgctc

SEQ ID NO: 5052988 - DNA, 25 bp, Homo sapien
caaatctgagaaggtggcagcagct

SEQ ID NO: 5052989 - DNA, 25 bp, Homo sapien
cctcagtggtgtgtttctcaggccc

SEQ ID NO: 5052990 - DNA, 25 bp, Homo sapien
tccattgcaggccaagtgacggcat

SEQ ID NO: 5052991 - DNA, 25 bp, Homo sapien
gctgtgaagctctcgggtccattgc

SEQ ID NO: 5052992 - DNA, 25 bp, Homo sapien
taagccacagcggtttattcgggtg

SEQ ID NO: 5052993 - DNA, 25 bp, Homo sapien
ccagctgacggttcagcggccgatg

SEQ ID NO: 5052994 - DNA, 25 bp, Homo sapien
tgtgaccaggatcagagcttagttt

SEQ ID NO: 5052995 - DNA, 25 bp, Homo sapien
cagagcttagtttgtgaccaggatc

SEQ ID NO: 5052996 - DNA, 25 bp, Homo sapien
taactagaattagggtcagtgtgtg

SEQ ID NO: 5052997 - DNA, 25 bp, Homo sapien
gatcagagcttagtttgtgaccagg

SEQ ID NO: 5052998 - DNA, 25 bp, Homo sapien
ggggctgcaccagtgtgggcgagag

SEQ ID NO: 5052999 - DNA, 25 bp, Homo sapien
acgcatgggcttgcgcatacatgca

SEQ ID NO: 5053000 - DNA, 25 bp, Homo sapien
actgctcagagtgtggccgggcaca

SEQ ID NO: 5053001 - DNA, 25 bp, Homo sapien
cagggctggtttccggctggcttgg

SEQ ID NO: 5053002 - DNA, 25 bp, Homo sapien
tgctagccccagagaaattgccagt

SEQ ID NO: 5053003 - DNA, 25 bp, Homo sapien
cccagagaaattgccagtcataaac

SEQ ID NO: 5053004 - DNA, 25 bp, Homo sapien
gaaattgccagtcataaacttctgg

SEQ ID NO: 5053005 - DNA, 25 bp, Homo sapien
tctgtgcactgactgctagccccag

SEQ ID NO: 5053006 - DNA, 25 bp, Homo sapien
agctgataggaagcagcacttgatc

SEQ ID NO: 5053007 - DNA, 25 bp, Homo sapien
ccagctgataggaagcagcacttga

SEQ ID NO: 5053008 - DNA, 25 bp, Homo sapien
cagctgataggaagcagcacttgat

SEQ ID NO: 5053009 - DNA, 25 bp, Homo sapien
atgctggatgtctaacgcgggcccc

SEQ ID NO: 5053010 - DNA, 25 bp, Homo sapien
ctggatgtctaacgcgggccccagc

SEQ ID NO: 5053011 - DNA, 25 bp, Homo sapien
tgctggatgtctaacgcgggcccca

SEQ ID NO: 5053012 - DNA, 25 bp, Homo sapien
ggatgtctaacgcgggccccagcgc

SEQ ID NO: 5053013 - DNA, 25 bp, Homo sapien
ggaggtgttgctagcacggcttcca

SEQ ID NO: 5053014 - DNA, 25 bp, Homo sapien
tgacacttggtaaacaaatgtgcag

SEQ ID NO: 5053015 - DNA, 25 bp, Homo sapien
ctccatgacacttggtaaacaaatg

SEQ ID NO: 5053016 - DNA, 25 bp, Homo sapien
tgctagcacggcttccacagaatcc

SEQ ID NO: 5053017 - DNA, 25 bp, Homo sapien
acctgccactcgcaggggagcagag

SEQ ID NO: 5053018 - DNA, 25 bp, Homo sapien
gagcagggcagaccggcaaggggcc

SEQ ID NO: 5053019 - DNA, 25 bp, Homo sapien
gctggcacagaacctgccactcgca

SEQ ID NO: 5053020 - DNA, 25 bp, Homo sapien
agaacctgccactcgcaggggagca

SEQ ID NO: 5053021 - DNA, 25 bp, Homo sapien
aggagatcaccatatagatccgaac

SEQ ID NO: 5053022 - DNA, 25 bp, Homo sapien
ggagatcaccatatagatccgaact

SEQ ID NO: 5053023 - DNA, 25 bp, Homo sapien
tgtgctcctctcggatttttacagc

SEQ ID NO: 5053024 - DNA, 25 bp, Homo sapien
gctcctctcggatttttacagccat

SEQ ID NO: 5053025 - DNA, 25 bp, Homo sapien
tgctcctctcggatttttacagcca

SEQ ID NO: 5053026 - DNA, 25 bp, Homo sapien
ctcctctcggatttttacagccatt

SEQ ID NO: 5053027 - DNA, 25 bp, Homo sapien
tctgtcttgttgatggcagcgttaa

SEQ ID NO: 5053028 - DNA, 25 bp, Homo sapien
gttccaggcccgatcgcagtagcct

SEQ ID NO: 5053029 - DNA, 25 bp, Homo sapien
tgctgccgcttgttttccttcggag

SEQ ID NO: 5053030 - DNA, 25 bp, Homo sapien
cttcggagcgttctcatctgtcttg

SEQ ID NO: 5053031 - DNA, 25 bp, Homo sapien
agctaggcaacaggcgctggggagc

SEQ ID NO: 5053032 - DNA, 25 bp, Homo sapien
agcagcagctaggcaacaggcgctg

SEQ ID NO: 5053033 - DNA, 25 bp, Homo sapien
gaagcagcagctaggcaacaggcgc

SEQ ID NO: 5053034 - DNA, 25 bp, Homo sapien
cagcagctaggcaacaggcgctggg

SEQ ID NO: 5053035 - DNA, 25 bp, Homo sapien
gatggacgtagtccacgtgcagact

SEQ ID NO: 5053036 - DNA, 25 bp, Homo sapien
ctgccgtggtgatggacgtagtcca

SEQ ID NO: 5053037 - DNA, 25 bp, Homo sapien
tgctccaaggagctgccgtggtgat

SEQ ID NO: 5053038 - DNA, 25 bp, Homo sapien
tggtgatggacgtagtccacgtgca

SEQ ID NO: 5053039 - DNA, 25 bp, Homo sapien
gaacgcgtagccagccttttcccag

SEQ ID NO: 5053040 - DNA, 25 bp, Homo sapien
gtggcaatggtgacccctcccgcag

SEQ ID NO: 5053041 - DNA, 25 bp, Homo sapien
tcacttcatccccaagtggcaatgg

SEQ ID NO: 5053042 - DNA, 25 bp, Homo sapien
accctgcggctggtcagtgggaacg

SEQ ID NO: 5053043 - DNA, 25 bp, Homo sapien
tacacctcaggttctttcatagaca

SEQ ID NO: 5053044 - DNA, 25 bp, Homo sapien
cagccgtgctgggtatctttattta

SEQ ID NO: 5053045 - DNA, 25 bp, Homo sapien
gccagctttcccagggtggaaccat

SEQ ID NO: 5053046 - DNA, 25 bp, Homo sapien
cagctggacatgtggctacacctca

SEQ ID NO: 5053047 - DNA, 25 bp, Homo sapien
ggtacaaaatgtcatcccagcccca

SEQ ID NO: 5053048 - DNA, 25 bp, Homo sapien
agaagcaggctccaactcacgtgct

SEQ ID NO: 5053049 - DNA, 25 bp, Homo sapien
gtgctcgtcagcagccgcactgctg

SEQ ID NO: 5053050 - DNA, 25 bp, Homo sapien
atctgaagacgcagggaagtgccca

SEQ ID NO: 5053051 - DNA, 25 bp, Homo sapien
ctgggccagaaccacgtagggcaga

SEQ ID NO: 5053052 - DNA, 25 bp, Homo sapien
tatgggatgtggttcccctgggcca

SEQ ID NO: 5053053 - DNA, 25 bp, Homo sapien
caggagtcacaccagatcacgcttg

SEQ ID NO: 5053054 - DNA, 25 bp, Homo sapien
tgtgcatgcccaccaaagggacagg

SEQ ID NO: 5053055 - DNA, 25 bp, Homo sapien
tcatccctgagtagacctggtccac

SEQ ID NO: 5053056 - DNA, 25 bp, Homo sapien
actgagtcccacaggtcggctctct

SEQ ID NO: 5053057 - DNA, 25 bp, Homo sapien
tgcagacttcgcagctgctgccaca

SEQ ID NO: 5053058 - DNA, 25 bp, Homo sapien
catggggttggagcctccaacagca

SEQ ID NO: 5053059 - DNA, 25 bp, Homo sapien
tggactggagttgtcccggtgccct

SEQ ID NO: 5053060 - DNA, 25 bp, Homo sapien
atcacaggtagacagcccacatcct

SEQ ID NO: 5053061 - DNA, 25 bp, Homo sapien
ctcatccttccggtctcctggactg

SEQ ID NO: 5053062 - DNA, 25 bp, Homo sapien
ggcaatggcaaggacgcgacatcac

SEQ ID NO: 5053063 - DNA, 25 bp, Homo sapien
ctcgagccccgagtgggtgcccttg

SEQ ID NO: 5053064 - DNA, 25 bp, Homo sapien
tgagaagacctcgagccccgagtgg

SEQ ID NO: 5053065 - DNA, 25 bp, Homo sapien
tccactggcaggactaccgtcctgg

SEQ ID NO: 5053066 - DNA, 25 bp, Homo sapien
gcttcccgggtagggcgtgcttcca

SEQ ID NO: 5053067 - DNA, 25 bp, Homo sapien
acgccatcggccagacgctggctct

SEQ ID NO: 5053068 - DNA, 25 bp, Homo sapien
gttttgctgggccatgagtgtgctc

SEQ ID NO: 5053069 - DNA, 25 bp, Homo sapien
agcctctcgagggtccggttgaggg

SEQ ID NO: 5053070 - DNA, 25 bp, Homo sapien
aaatgcggacgtttcagatgctgcc

SEQ ID NO: 5053071 - DNA, 25 bp, Homo sapien
gcgtggaagactcctcgtaagtcca

SEQ ID NO: 5053072 - DNA, 25 bp, Homo sapien
tccagggggtcagtttcaggcaggc

SEQ ID NO: 5053073 - DNA, 25 bp, Homo sapien
ggtgcgtggaagactcctcgtaagt

SEQ ID NO: 5053074 - DNA, 25 bp, Homo sapien
ggtgggtgcgtggaagactcctcgt

SEQ ID NO: 5053075 - DNA, 25 bp, Homo sapien
ccggatccatgggagagggcggcgt

SEQ ID NO: 5053076 - DNA, 25 bp, Homo sapien
agacggtgccgaccgctgtgggcac

SEQ ID NO: 5053077 - DNA, 25 bp, Homo sapien
tggtgcatacaagagaggagacggt

SEQ ID NO: 5053078 - DNA, 25 bp, Homo sapien
gtgggcaccacgcagaccactgctg

SEQ ID NO: 5053079 - DNA, 25 bp, Homo sapien
atgcgaggacgcagcctcaaggctg

SEQ ID NO: 5053080 - DNA, 25 bp, Homo sapien
tccgcatgcgaggacgcagcctcaa

SEQ ID NO: 5053081 - DNA, 25 bp, Homo sapien
ggctgcctccgcatgcgaggacgca

SEQ ID NO: 5053082 - DNA, 25 bp, Homo sapien
gagctggcgggctgcctccgcatgc

SEQ ID NO: 5053083 - DNA, 25 bp, Homo sapien
caatgacattagaacggaggcctgg

SEQ ID NO: 5053084 - DNA, 25 bp, Homo sapien
tcttcccggagggaggttccttgca

SEQ ID NO: 5053085 - DNA, 25 bp, Homo sapien
tctgtcatgaccttgcctgggccag

SEQ ID NO: 5053086 - DNA, 25 bp, Homo sapien
aaagcccctgccttaacgtctgtgg

SEQ ID NO: 5053087 - DNA, 25 bp, Homo sapien
agtggagccgcaggcactcgcagac

SEQ ID NO: 5053088 - DNA, 25 bp, Homo sapien
agcgcagggccctagtggagccgca

SEQ ID NO: 5053089 - DNA, 25 bp, Homo sapien
gggatccttgaacccttggtcacca

SEQ ID NO: 5053090 - DNA, 25 bp, Homo sapien
acacaccctgatcgccgcatctggg

SEQ ID NO: 5053091 - DNA, 25 bp, Homo sapien
caagggatacccaagcactaggcca

SEQ ID NO: 5053092 - DNA, 25 bp, Homo sapien
ctgtggtactgagcgacactccaat

SEQ ID NO: 5053093 - DNA, 25 bp, Homo sapien
gagcgacactccaatacctcatcag

SEQ ID NO: 5053094 - DNA, 25 bp, Homo sapien
cttggaggcccccagtctgtgaggt

SEQ ID NO: 5053095 - DNA, 25 bp, Homo sapien
cacagcgtgcctgacaggctgagag

SEQ ID NO: 5053096 - DNA, 25 bp, Homo sapien
gacagaaacgcctggcttccggtgg

SEQ ID NO: 5053097 - DNA, 25 bp, Homo sapien
agacgaggcctgaccagacagaaac

SEQ ID NO: 5053098 - DNA, 25 bp, Homo sapien
agtcaccggacagcaccacgtgtgg

SEQ ID NO: 5053099 - DNA, 25 bp, Homo sapien
aacagcagcgggtagtggcgccgca

SEQ ID NO: 5053100 - DNA, 25 bp, Homo sapien
ttcttgcgcacagcacctcgcaggt

SEQ ID NO: 5053101 - DNA, 25 bp, Homo sapien
caccatgcgctccacaggtgtgagg

SEQ ID NO: 5053102 - DNA, 25 bp, Homo sapien
ctccacacgcggtgctttcgggcag

SEQ ID NO: 5053103 - DNA, 25 bp, Homo sapien
ccagtgtctattaatgagcggagca

SEQ ID NO: 5053104 - DNA, 25 bp, Homo sapien
gggccagtgtctatcaatgagcaaa

SEQ ID NO: 5053105 - DNA, 25 bp, Homo sapien
gcagggaccagcgtctgtcaatgat

SEQ ID NO: 5053106 - DNA, 25 bp, Homo sapien
tatctgtcaacgagcggagcaggga

SEQ ID NO: 5053107 - DNA, 25 bp, Homo sapien
agcaggtggcccgaggctggggcgg

SEQ ID NO: 5053108 - DNA, 25 bp, Homo sapien
ggctggcaggcaggccctcggggca

SEQ ID NO: 5053109 - DNA, 25 bp, Homo sapien
ccttaggtgaaggggtgagggctgg

SEQ ID NO: 5053110 - DNA, 25 bp, Homo sapien
ccctcggggcagcaggtggcccgag

SEQ ID NO: 5053111 - DNA, 25 bp, Homo sapien
gcttctccttgctctgacaccatgg

SEQ ID NO: 5053112 - DNA, 25 bp, Homo sapien
cttgctctgacaccatggaggccaa

SEQ ID NO: 5053113 - DNA, 25 bp, Homo sapien
ggccaagtccttgatgatctgattc

SEQ ID NO: 5053114 - DNA, 25 bp, Homo sapien
tctgattcacatccagcaagttgct

SEQ ID NO: 5053115 - DNA, 25 bp, Homo sapien
cagatctcagggacagtggaaccca

SEQ ID NO: 5053116 - DNA, 25 bp, Homo sapien
tcaacgcggggtggcacccaaggcc

SEQ ID NO: 5053117 - DNA, 25 bp, Homo sapien
accccggccagatctcggggatggt

SEQ ID NO: 5053118 - DNA, 25 bp, Homo sapien
accatcaacgcggggtggcacccaa

SEQ ID NO: 5053119 - DNA, 25 bp, Homo sapien
gtcgtggaacccaggacctcggcca

SEQ ID NO: 5053120 - DNA, 25 bp, Homo sapien
ggaacccaggacctcggccagatct

SEQ ID NO: 5053121 - DNA, 25 bp, Homo sapien
ctccaggtcgtggaacccaggacct

SEQ ID NO: 5053122 - DNA, 25 bp, Homo sapien
tccaggtcgtggaacccaggacctc

SEQ ID NO: 5053123 - DNA, 25 bp, Homo sapien
tgagatgggcttggcgagggaagcc

SEQ ID NO: 5053124 - DNA, 25 bp, Homo sapien
gtgccccggtgagcctgctgcacgc

SEQ ID NO: 5053125 - DNA, 25 bp, Homo sapien
tcaggtgatgcccactcaggagctc

SEQ ID NO: 5053126 - DNA, 25 bp, Homo sapien
ctgggtcaggtgatgcccactcagg

SEQ ID NO: 5053127 - DNA, 25 bp, Homo sapien
aggcaccgggcatggttctggcctg

SEQ ID NO: 5053128 - DNA, 25 bp, Homo sapien
agggtccatacagggccggcacagc

SEQ ID NO: 5053129 - DNA, 25 bp, Homo sapien
gcaccgggcatggttctggcctggg

SEQ ID NO: 5053130 - DNA, 25 bp, Homo sapien
tcagcagggtccatacagggccggc

SEQ ID NO: 5053131 - DNA, 25 bp, Homo sapien
gcggcacctggatacccaacacccg

SEQ ID NO: 5053132 - DNA, 25 bp, Homo sapien
tggatacccaacacccggagtcctg

SEQ ID NO: 5053133 - DNA, 25 bp, Homo sapien
ctccgcggcacctggatacccaaca

SEQ ID NO: 5053134 - DNA, 25 bp, Homo sapien
cacctggatacccaacacccggagt

SEQ ID NO: 5053135 - DNA, 25 bp, Homo sapien
gttgctggcatgaagatccacatcc

SEQ ID NO: 5053136 - DNA, 25 bp, Homo sapien
cctccgtcccgcgcctgctgttgct

SEQ ID NO: 5053137 - DNA, 25 bp, Homo sapien
cctgctgttgctggcatgaagatcc

SEQ ID NO: 5053138 - DNA, 25 bp, Homo sapien
atccacatcctctgcgtcaccccca

SEQ ID NO: 5053139 - DNA, 25 bp, Homo sapien
aagccttcagggcagtgctcctgga

SEQ ID NO: 5053140 - DNA, 25 bp, Homo sapien
cttcccaggaggatctcaattccag

SEQ ID NO: 5053141 - DNA, 25 bp, Homo sapien
ggtccgtctgcctctctagctgtga

SEQ ID NO: 5053142 - DNA, 25 bp, Homo sapien
aaggggaagcggtccgtctgcctct

SEQ ID NO: 5053143 - DNA, 25 bp, Homo sapien
gtcttgagaaatgggcgctcctcca

SEQ ID NO: 5053144 - DNA, 25 bp, Homo sapien
tcctctgggaacagtgggcctcgtg

SEQ ID NO: 5053145 - DNA, 25 bp, Homo sapien
catctctgtgcttcgggtggttctc

SEQ ID NO: 5053146 - DNA, 25 bp, Homo sapien
aaagggctcgttcagccccagagag

SEQ ID NO: 5053147 - DNA, 25 bp, Homo sapien
tcccttattggaccagatggccaga

SEQ ID NO: 5053148 - DNA, 25 bp, Homo sapien
tgtggagagtgagcacgcttgccca

SEQ ID NO: 5053149 - DNA, 25 bp, Homo sapien
atggtgactgagaggctaccccagc

SEQ ID NO: 5053150 - DNA, 25 bp, Homo sapien
cagcaaatgaaatggccatggtgac

SEQ ID NO: 5053151 - DNA, 25 bp, Homo sapien
cacatgttgtcactcccgttaaaga

SEQ ID NO: 5053152 - DNA, 25 bp, Homo sapien
cgttaaagaccttctcatcatcagc

SEQ ID NO: 5053153 - DNA, 25 bp, Homo sapien
catcagccagctcggcaaacggggc

SEQ ID NO: 5053154 - DNA, 25 bp, Homo sapien
gtcactcccgttaaagaccttctca

SEQ ID NO: 5053155 - DNA, 25 bp, Homo sapien
ctctggtaaaagtctataccattta

SEQ ID NO: 5053156 - DNA, 25 bp, Homo sapien
tgttaataacacagattgaatatcc

SEQ ID NO: 5053157 - DNA, 25 bp, Homo sapien
tttaattatattgttcaataccaga

SEQ ID NO: 5053158 - DNA, 25 bp, Homo sapien
tactatttcctttcacatgttaata

SEQ ID NO: 5053159 - DNA, 25 bp, Homo sapien
gaatatggatcagcaaaagcctgcc

SEQ ID NO: 5053160 - DNA, 25 bp, Homo sapien
tctttggagagacaacatagacatg

SEQ ID NO: 5053161 - DNA, 25 bp, Homo sapien
tactctgagggtactccaatttctg

SEQ ID NO: 5053162 - DNA, 25 bp, Homo sapien
cagggctggtctacttctggtttac

SEQ ID NO: 5053163 - DNA, 25 bp, Homo sapien
tggcagcggattctgggctgtcccc

SEQ ID NO: 5053164 - DNA, 25 bp, Homo sapien
gtcaaaatgcccacgttttcaaggc

SEQ ID NO: 5053165 - DNA, 25 bp, Homo sapien
gcaccgtccgcagtcattctttggg

SEQ ID NO: 5053166 - DNA, 25 bp, Homo sapien
tgccagggcccaaaggtcaaaatgc

SEQ ID NO: 5053167 - DNA, 25 bp, Homo sapien
ctctgcgccatgggaagcagcgctc

SEQ ID NO: 5053168 - DNA, 25 bp, Homo sapien
cctctgcgccatgggaagcagcgct

SEQ ID NO: 5053169 - DNA, 25 bp, Homo sapien
ttctgcaccactccatagcactgaa

SEQ ID NO: 5053170 - DNA, 25 bp, Homo sapien
gctgggttttcagccggtccagctg

SEQ ID NO: 5053171 - DNA, 25 bp, Homo sapien
tgcaccactccatagcactgaatgg

SEQ ID NO: 5053172 - DNA, 25 bp, Homo sapien
tctgagagctgggttttcagccggt

SEQ ID NO: 5053173 - DNA, 25 bp, Homo sapien
cactgcacgcgtgaagcgggtacga

SEQ ID NO: 5053174 - DNA, 25 bp, Homo sapien
cacgcgtgaagcgggtacgaccagc

SEQ ID NO: 5053175 - DNA, 25 bp, Homo sapien
tgcacgcgtgaagcgggtacgacca

SEQ ID NO: 5053176 - DNA, 25 bp, Homo sapien
actgcacgcgtgaagcgggtacgac

SEQ ID NO: 5053177 - DNA, 25 bp, Homo sapien
tccaatcttcagcaactgggcactg

SEQ ID NO: 5053178 - DNA, 25 bp, Homo sapien
ccaatcttcagcaactgggcactga

SEQ ID NO: 5053179 - DNA, 25 bp, Homo sapien
cctccaatcttcagcaactgggcac

SEQ ID NO: 5053180 - DNA, 25 bp, Homo sapien
caatcttcagcaactgggcactgac

SEQ ID NO: 5053181 - DNA, 25 bp, Homo sapien
gctcggccatctgcttcacggagct

SEQ ID NO: 5053182 - DNA, 25 bp, Homo sapien
tggctgcaatggtcttgttggtctc

SEQ ID NO: 5053183 - DNA, 25 bp, Homo sapien
ctggcgctggctgcaatggtcttgt

SEQ ID NO: 5053184 - DNA, 25 bp, Homo sapien
aatggtcttgttggtctcctgctgt

SEQ ID NO: 5053185 - DNA, 25 bp, Homo sapien
acaggcggagagagggccgagagac

SEQ ID NO: 5053186 - DNA, 25 bp, Homo sapien
aagggcccagaaggacggagcaagc

SEQ ID NO: 5053187 - DNA, 25 bp, Homo sapien
agagcagcgatgattcccacagaga

SEQ ID NO: 5053188 - DNA, 25 bp, Homo sapien
gagacggcgcaggtaagctctggct

SEQ ID NO: 5053189 - DNA, 25 bp, Homo sapien
tattgttatgaaaggccggccttac

SEQ ID NO: 5053190 - DNA, 25 bp, Homo sapien
tattgttatgaaaggccagcctgga

SEQ ID NO: 5053191 - DNA, 25 bp, Homo sapien
gggttggacaacgatactattacga

SEQ ID NO: 5053192 - DNA, 25 bp, Homo sapien
tattgttatgaaaggccggcctgga

SEQ ID NO: 5053193 - DNA, 25 bp, Homo sapien
gagcacgagacggatgacgaaccag

SEQ ID NO: 5053194 - DNA, 25 bp, Homo sapien
ccccggagagcacgagacggatgac

SEQ ID NO: 5053195 - DNA, 25 bp, Homo sapien
ggatgacgaaccagcaccagcgaag

SEQ ID NO: 5053196 - DNA, 25 bp, Homo sapien
cagcaccagtgaaggccccggagag

SEQ ID NO: 5053197 - DNA, 25 bp, Homo sapien
attttgaacggagccgccgtgagga

SEQ ID NO: 5053198 - DNA, 25 bp, Homo sapien
aggacaacgtcccagtgcagtggcc

SEQ ID NO: 5053199 - DNA, 25 bp, Homo sapien
tctggccctttcagggtgcaaggct

SEQ ID NO: 5053200 - DNA, 25 bp, Homo sapien
tggcaggcgcctgcggattttgaac

SEQ ID NO: 5053201 - DNA, 25 bp, Homo sapien
gcgtgtcactcggtgtccctaagga

SEQ ID NO: 5053202 - DNA, 25 bp, Homo sapien
agctcctgcgtgtcactcggtgtcc

SEQ ID NO: 5053203 - DNA, 25 bp, Homo sapien
aggctgtcccgaagctcctgcgtgt

SEQ ID NO: 5053204 - DNA, 25 bp, Homo sapien
gtcactcggtgtccctaaggactga

SEQ ID NO: 5053205 - DNA, 25 bp, Homo sapien
aggttgcacggatcgacctgggtgg

SEQ ID NO: 5053206 - DNA, 25 bp, Homo sapien
ttcggaagacgttggccgacatctc

SEQ ID NO: 5053207 - DNA, 25 bp, Homo sapien
agttgattcggaagacgttggccga

SEQ ID NO: 5053208 - DNA, 25 bp, Homo sapien
cgttggccgacatctcctggaacag

SEQ ID NO: 5053209 - DNA, 25 bp, Homo sapien
agctggcgtgtgtgcccggaagcta

SEQ ID NO: 5053210 - DNA, 25 bp, Homo sapien
tccatacaccgcagcagctggcgtg

SEQ ID NO: 5053211 - DNA, 25 bp, Homo sapien
gtgtgtgcccggaagctacgagcac

SEQ ID NO: 5053212 - DNA, 25 bp, Homo sapien
gcaccctgagtttccatacaccgca

SEQ ID NO: 5053213 - DNA, 25 bp, Homo sapien
cccatgccgaaggagcgaagaatcg

SEQ ID NO: 5053214 - DNA, 25 bp, Homo sapien
cagctacgtgatgtgtgacggctct

SEQ ID NO: 5053215 - DNA, 25 bp, Homo sapien
gaagaatcggatgcggctcaaagcg

SEQ ID NO: 5053216 - DNA, 25 bp, Homo sapien
ttgacgttgactaagctgggcagct

SEQ ID NO: 5053217 - DNA, 25 bp, Homo sapien
ctagaggcacttcccaacaggggct

SEQ ID NO: 5053218 - DNA, 25 bp, Homo sapien
gggggtgtctccaacacacatggca

SEQ ID NO: 5053219 - DNA, 25 bp, Homo sapien
aggcaactccgcagaggactgagag

SEQ ID NO: 5053220 - DNA, 25 bp, Homo sapien
agtctgggccctcgccagcggagag

SEQ ID NO: 5053221 - DNA, 25 bp, Homo sapien
tgtgcttcaggtccacaacgtcgcg

SEQ ID NO: 5053222 - DNA, 25 bp, Homo sapien
tcctgcgggcagaagttgggcttcc

SEQ ID NO: 5053223 - DNA, 25 bp, Homo sapien
gtacctgcgagtgggctcggccttc

SEQ ID NO: 5053224 - DNA, 25 bp, Homo sapien
ccttcctcgggccaatggtgggtga

SEQ ID NO: 5053225 - DNA, 25 bp, Homo sapien
caataggcgtgcctgctggccccag

SEQ ID NO: 5053226 - DNA, 25 bp, Homo sapien
cgcttcctggcccttgggacaatag

SEQ ID NO: 5053227 - DNA, 25 bp, Homo sapien
ggacaataggcgtgcctgctggccc

SEQ ID NO: 5053228 - DNA, 25 bp, Homo sapien
ttcctggcccttgggacaataggcg

SEQ ID NO: 5053229 - DNA, 25 bp, Homo sapien
agcttgctctctggcgacgggcagg

SEQ ID NO: 5053230 - DNA, 25 bp, Homo sapien
catactcggtccaacatctagcgca

SEQ ID NO: 5053231 - DNA, 25 bp, Homo sapien
gggaaatggcggattccatactcgg

SEQ ID NO: 5053232 - DNA, 25 bp, Homo sapien
cttccccacacagcggttctgcagc

SEQ ID NO: 5053233 - DNA, 25 bp, Homo sapien
gctgacagccttgtctcgaaggtcc

SEQ ID NO: 5053234 - DNA, 25 bp, Homo sapien
acctccacgggcgatggatccgtat

SEQ ID NO: 5053235 - DNA, 25 bp, Homo sapien
tgacagccttgtctcgaaggtcccc

SEQ ID NO: 5053236 - DNA, 25 bp, Homo sapien
cacgggcgatggatccgtatgacat

SEQ ID NO: 5053237 - DNA, 25 bp, Homo sapien
cttcttacagatggcagggccagca

SEQ ID NO: 5053238 - DNA, 25 bp, Homo sapien
atggcagggccagcagcctccacac

SEQ ID NO: 5053239 - DNA, 25 bp, Homo sapien
cagggccagcagcctccacactgag

SEQ ID NO: 5053240 - DNA, 25 bp, Homo sapien
tggcagggccagcagcctccacact

SEQ ID NO: 5053241 - DNA, 25 bp, Homo sapien
agccccttcaaggtggcctcttggt

SEQ ID NO: 5053242 - DNA, 25 bp, Homo sapien
ttcaaggtggcctcttggtccactg

SEQ ID NO: 5053243 - DNA, 25 bp, Homo sapien
caaggtggcctcttggtccactggt

SEQ ID NO: 5053244 - DNA, 25 bp, Homo sapien
acagagccccttcaaggtggcctct

SEQ ID NO: 5053245 - DNA, 25 bp, Homo sapien
cggccatcactgcaaagggcggcag

SEQ ID NO: 5053246 - DNA, 25 bp, Homo sapien
gcggccatcactgcaaagggcggca

SEQ ID NO: 5053247 - DNA, 25 bp, Homo sapien
acagacgggaaagcggcatcgtgct

SEQ ID NO: 5053248 - DNA, 25 bp, Homo sapien
ggcaccagaggccccgacaacttgg

SEQ ID NO: 5053249 - DNA, 25 bp, Homo sapien
cttcgggcacgcgttctctgtacct

SEQ ID NO: 5053250 - DNA, 25 bp, Homo sapien
cagctgattggatgtgccgggtcag

SEQ ID NO: 5053251 - DNA, 25 bp, Homo sapien
ctcagggttcctcggcgctctccct

SEQ ID NO: 5053252 - DNA, 25 bp, Homo sapien
acactcagggttcctcggcgctctc

SEQ ID NO: 5053253 - DNA, 25 bp, Homo sapien
tccctgcactggcactaaggcctga

SEQ ID NO: 5053254 - DNA, 25 bp, Homo sapien
ttcctcggcgctctccctgcactgg

SEQ ID NO: 5053255 - DNA, 25 bp, Homo sapien
cgccagtcccttctgctcgggatgg

SEQ ID NO: 5053256 - DNA, 25 bp, Homo sapien
tgccagcgcctgagtcatgcgggca

SEQ ID NO: 5053257 - DNA, 25 bp, Homo sapien
ggatggcagcaacaaacagcaagat

SEQ ID NO: 5053258 - DNA, 25 bp, Homo sapien
acagcaagatgccagcgcctgagtc

SEQ ID NO: 5053259 - DNA, 25 bp, Homo sapien
tggctacgtgctggtgtggcatccc

SEQ ID NO: 5053260 - DNA, 25 bp, Homo sapien
aaagatcctgagatgccaaacgcca

SEQ ID NO: 5053261 - DNA, 25 bp, Homo sapien
tcgttctgcacaaagctaccacggg

SEQ ID NO: 5053262 - DNA, 25 bp, Homo sapien
gccaatgaactgtgaatccccaatg

SEQ ID NO: 5053263 - DNA, 25 bp, Homo sapien
atctcatagcctggataaggccagg

SEQ ID NO: 5053264 - DNA, 25 bp, Homo sapien
agagaatctcatagcctggataagg

SEQ ID NO: 5053265 - DNA, 25 bp, Homo sapien
gccgcaagttgacgagagaatctca

SEQ ID NO: 5053266 - DNA, 25 bp, Homo sapien
tcagcaagccgcaagttgacgagag

SEQ ID NO: 5053267 - DNA, 25 bp, Homo sapien
gccaaacccaggacctcgctctgca

SEQ ID NO: 5053268 - DNA, 25 bp, Homo sapien
ggacataaagcagggactgaagatg

SEQ ID NO: 5053269 - DNA, 25 bp, Homo sapien
gggacataaagcagggactgaagat

SEQ ID NO: 5053270 - DNA, 25 bp, Homo sapien
gagccaaacccaggacctcgctctg

SEQ ID NO: 5053271 - DNA, 25 bp, Homo sapien
tgaaagtccctggtggggatgtcgc

SEQ ID NO: 5053272 - DNA, 25 bp, Homo sapien
tgtcgcaggccccagtacccaggaa

SEQ ID NO: 5053273 - DNA, 25 bp, Homo sapien
aaagtccctggtggggatgtcgcag

SEQ ID NO: 5053274 - DNA, 25 bp, Homo sapien
tggggatgtcgcaggccccagtacc

SEQ ID NO: 5053275 - DNA, 25 bp, Homo sapien
tccgggcgctcacggcgggcgaggc

SEQ ID NO: 5053276 - DNA, 25 bp, Homo sapien
gggcctcggtggctcgcggaccgct

SEQ ID NO: 5053277 - DNA, 25 bp, Homo sapien
catcacgtgacggcccctcccgccg

SEQ ID NO: 5053278 - DNA, 25 bp, Homo sapien
ggcggggcgggcacccaaacatcac

SEQ ID NO: 5053279 - DNA, 25 bp, Homo sapien
aggccgagcccggacctcacacggg

SEQ ID NO: 5053280 - DNA, 25 bp, Homo sapien
cacacgggccaaagctggagcttct

SEQ ID NO: 5053281 - DNA, 25 bp, Homo sapien
ccccgttttgcatatggggatgacg

SEQ ID NO: 5053282 - DNA, 25 bp, Homo sapien
gctgaggcgcttcgggagcgggctc

SEQ ID NO: 5053283 - DNA, 25 bp, Homo sapien
tgctgcttggtgggccctggcctgg

SEQ ID NO: 5053284 - DNA, 25 bp, Homo sapien
tggagcagggagaagctcggggccg

SEQ ID NO: 5053285 - DNA, 25 bp, Homo sapien
ccgagctcccgggaaaggcagccaa

SEQ ID NO: 5053286 - DNA, 25 bp, Homo sapien
ccgggaaaggcagccaagacagtgc

SEQ ID NO: 5053287 - DNA, 25 bp, Homo sapien
agggggcgaccctggacgcaggaga

SEQ ID NO: 5053288 - DNA, 25 bp, Homo sapien
cgcgagcccgcattgggcaggctga

SEQ ID NO: 5053289 - DNA, 25 bp, Homo sapien
aatgtggcaggtccccgcgagcccg

SEQ ID NO: 5053290 - DNA, 25 bp, Homo sapien
cttctccagcggtggcgatggaatg

SEQ ID NO: 5053291 - DNA, 25 bp, Homo sapien
ccggtgtggcccacgcagtgcctgg

SEQ ID NO: 5053292 - DNA, 25 bp, Homo sapien
caagttgcctcttgggtccttgacc

SEQ ID NO: 5053293 - DNA, 25 bp, Homo sapien
ctgggtgcgctgagtgctaaggtct

SEQ ID NO: 5053294 - DNA, 25 bp, Homo sapien
gacaggaggcaggtgccggtgtggc

SEQ ID NO: 5053295 - DNA, 25 bp, Homo sapien
tgacctgaagtggagaccacgggca

SEQ ID NO: 5053296 - DNA, 25 bp, Homo sapien
gaccgggtccaagctggtgtgggcc

SEQ ID NO: 5053297 - DNA, 25 bp, Homo sapien
tggtgtgggcctgtgtcggtgtgca

SEQ ID NO: 5053298 - DNA, 25 bp, Homo sapien
ggagctgagtttcccagttgacctg

SEQ ID NO: 5053299 - DNA, 25 bp, Homo sapien
tgggcgcagggtccttgcccatgca

SEQ ID NO: 5053300 - DNA, 25 bp, Homo sapien
tgtgggcctgttctttctgggcgca

SEQ ID NO: 5053301 - DNA, 25 bp, Homo sapien
tctgaatgtcctcttggttggtcct

SEQ ID NO: 5053302 - DNA, 25 bp, Homo sapien
cagaggcctgtgtgggcctgttctt

SEQ ID NO: 5053303 - DNA, 25 bp, Homo sapien
gcaggcagccgctcaaaagagcgcc

SEQ ID NO: 5053304 - DNA, 25 bp, Homo sapien
tcaaaagagcgccacccttgggggc

SEQ ID NO: 5053305 - DNA, 25 bp, Homo sapien
ggtacggccacccgcgtgctgggat

SEQ ID NO: 5053306 - DNA, 25 bp, Homo sapien
tccaagtccaggacggcttctgaga

SEQ ID NO: 5053307 - DNA, 25 bp, Homo sapien
tggaacaatctggaggtcaccagag

SEQ ID NO: 5053308 - DNA, 25 bp, Homo sapien
tggtggaacaatctggaggtcacca

SEQ ID NO: 5053309 - DNA, 25 bp, Homo sapien
gaacaatctggaggtcaccagagat

SEQ ID NO: 5053310 - DNA, 25 bp, Homo sapien
aatctggaggtcaccagagatgact

SEQ ID NO: 5053311 - DNA, 25 bp, Homo sapien
tctgcttgcactgcgccttggacat

SEQ ID NO: 5053312 - DNA, 25 bp, Homo sapien
gatggcgtggatgccctgttgctgg

SEQ ID NO: 5053313 - DNA, 25 bp, Homo sapien
ggatgccctgttgctggtgatggtg

SEQ ID NO: 5053314 - DNA, 25 bp, Homo sapien
ggttctgcttgcactgcgccttgga

SEQ ID NO: 5053315 - DNA, 25 bp, Homo sapien
ctgagggtcaggagcaatgcccagg

SEQ ID NO: 5053316 - DNA, 25 bp, Homo sapien
gagctcatggaagggcaggggggaa

SEQ ID NO: 5053317 - DNA, 25 bp, Homo sapien
ctctgggatggtcgcggggggctct

SEQ ID NO: 5053318 - DNA, 25 bp, Homo sapien
gggaagtctggttatccaggtagac

SEQ ID NO: 5053319 - DNA, 25 bp, Homo sapien
cccggactcagtggaggtgcctgtg

SEQ ID NO: 5053320 - DNA, 25 bp, Homo sapien
tgccccggactcagtggaggtgcct

SEQ ID NO: 5053321 - DNA, 25 bp, Homo sapien
ctgccccggactcagtggaggtgcc

SEQ ID NO: 5053322 - DNA, 25 bp, Homo sapien
cggacgcgctgcctctgtgaccggc

SEQ ID NO: 5053323 - DNA, 25 bp, Homo sapien
gcacggtgcccctcgacgccctccg

SEQ ID NO: 5053324 - DNA, 25 bp, Homo sapien
cggctctccaccttcgccatcttag

SEQ ID NO: 5053325 - DNA, 25 bp, Homo sapien
gtcgtggcgcggctgccgcacggtg

SEQ ID NO: 5053326 - DNA, 25 bp, Homo sapien
tgctggtcatcatctacgtgtccgt

SEQ ID NO: 5053327 - DNA, 25 bp, Homo sapien
ctcatcgtgggctgtggcgtgtcct

SEQ ID NO: 5053328 - DNA, 25 bp, Homo sapien
tctgccgtcggtgacgctcatcgtg

SEQ ID NO: 5053329 - DNA, 25 bp, Homo sapien
catggagaaggcgactctgccgtcg

SEQ ID NO: 5053330 - DNA, 25 bp, Homo sapien
ttcgctcagagcgttctgtcatcct

SEQ ID NO: 5053331 - DNA, 25 bp, Homo sapien
gtacattcgctcagagcgttctgtc

SEQ ID NO: 5053332 - DNA, 25 bp, Homo sapien
tcagagcgttctgtcatcctcatca

SEQ ID NO: 5053333 - DNA, 25 bp, Homo sapien
cctcatcctcatcgggcagacccag

SEQ ID NO: 5053334 - DNA, 25 bp, Homo sapien
ctggcagtcctacatggcggtgacg

SEQ ID NO: 5053335 - DNA, 25 bp, Homo sapien
tccggaaccgcctcatccgcaagcg

SEQ ID NO: 5053336 - DNA, 25 bp, Homo sapien
gcctcatccgcaagcgcttcctctg

SEQ ID NO: 5053337 - DNA, 25 bp, Homo sapien
ctgctgggtgctcaccgaggcctgg

SEQ ID NO: 5053338 - DNA, 25 bp, Homo sapien
ggattcaccaaggccaaagggtaca

SEQ ID NO: 5053339 - DNA, 25 bp, Homo sapien
tgggattcaccaaggccaaagggta

SEQ ID NO: 5053340 - DNA, 25 bp, Homo sapien
ttcaccaaggccaaagggtacagca

SEQ ID NO: 5053341 - DNA, 25 bp, Homo sapien
attcaccaaggccaaagggtacagc

SEQ ID NO: 5053342 - DNA, 25 bp, Homo sapien
aggggggactgctctatgccttcgt

SEQ ID NO: 5053343 - DNA, 25 bp, Homo sapien
gctctatgccttcgtgggacctgcc

SEQ ID NO: 5053344 - DNA, 25 bp, Homo sapien
gggactgctctatgccttcgtggga

SEQ ID NO: 5053345 - DNA, 25 bp, Homo sapien
atgccttcgtgggacctgccgctgc

SEQ ID NO: 5053346 - DNA, 25 bp, Homo sapien
caaagacggcatcacggacaagaag

SEQ ID NO: 5053347 - DNA, 25 bp, Homo sapien
gcatcacggacaagaagctgaagga

SEQ ID NO: 5053348 - DNA, 25 bp, Homo sapien
gctcgtgtccaaagacggcatcacg

SEQ ID NO: 5053349 - DNA, 25 bp, Homo sapien
cgtgtccaaagacggcatcacggac

SEQ ID NO: 5053350 - DNA, 25 bp, Homo sapien
tgtggagctcctgcgtggtgctgcc

SEQ ID NO: 5053351 - DNA, 25 bp, Homo sapien
tcttcgctgtcttcgactcgctgga

SEQ ID NO: 5053352 - DNA, 25 bp, Homo sapien
gtcggctgtgctcgccgtcaccgac

SEQ ID NO: 5053353 - DNA, 25 bp, Homo sapien
gcttcgtcatcgtcatggtgcactg

SEQ ID NO: 5053354 - DNA, 25 bp, Homo sapien
acgctgtgaaatgccgtgtggttga

SEQ ID NO: 5053355 - DNA, 25 bp, Homo sapien
gtccaggacgctgtgaaatgccgtg

SEQ ID NO: 5053356 - DNA, 25 bp, Homo sapien
tgaaatgccgtgtggttgaccggca

SEQ ID NO: 5053357 - DNA, 25 bp, Homo sapien
ccagaacggccacgcccagctcatg

SEQ ID NO: 5053358 - DNA, 25 bp, Homo sapien
aaggacgtggatctggcctgtagat

SEQ ID NO: 5053359 - DNA, 25 bp, Homo sapien
ttcgagaaggacgtggatctggcct

SEQ ID NO: 5053360 - DNA, 25 bp, Homo sapien
accgacttcgagaaggacgtggatc

SEQ ID NO: 5053361 - DNA, 25 bp, Homo sapien
ggacgtggatctggcctgtagatca

SEQ ID NO: 5053362 - DNA, 25 bp, Homo sapien
caagtcctccttcgtcggtgacggg

SEQ ID NO: 5053363 - DNA, 25 bp, Homo sapien
tccacattgaccagatgccgcagac

SEQ ID NO: 5053364 - DNA, 25 bp, Homo sapien
gaacgagaatgtcgccaccttgtct

SEQ ID NO: 5053365 - DNA, 25 bp, Homo sapien
cttcaagaagctggactcggagctg

SEQ ID NO: 5053366 - DNA, 25 bp, Homo sapien
gtcgcggtatgcagaactggacttt

SEQ ID NO: 5053367 - DNA, 25 bp, Homo sapien
gcggaagtcgcggtatgcagaactg

SEQ ID NO: 5053368 - DNA, 25 bp, Homo sapien
gaagtcgcggtatgcagaactggac

SEQ ID NO: 5053369 - DNA, 25 bp, Homo sapien
gcggtatgcagaactggactttgag

SEQ ID NO: 5053370 - DNA, 25 bp, Homo sapien
ctgcagcacgcagcggagaaggaca

SEQ ID NO: 5053371 - DNA, 25 bp, Homo sapien
ccggaagcggcaccaagacatgttc

SEQ ID NO: 5053372 - DNA, 25 bp, Homo sapien
acctgaaccggaagctgcagcacgc

SEQ ID NO: 5053373 - DNA, 25 bp, Homo sapien
aagatcatgcacacccggaagcggc

SEQ ID NO: 5053374 - DNA, 25 bp, Homo sapien
caccagaggccgaaggtgcctcaga

SEQ ID NO: 5053375 - DNA, 25 bp, Homo sapien
aggcccctcctagacccaggtggag

SEQ ID NO: 5053376 - DNA, 25 bp, Homo sapien
tcatcgacctccagaccgaggtctg

SEQ ID NO: 5053377 - DNA, 25 bp, Homo sapien
tggtgggccaggacatcatcgacct

SEQ ID NO: 5053378 - DNA, 25 bp, Homo sapien
catgactgactgcattgagtgggtg

SEQ ID NO: 5053379 - DNA, 25 bp, Homo sapien
cgttgagcagatgaccgggaacggg

SEQ ID NO: 5053380 - DNA, 25 bp, Homo sapien
cattgagtgggtggacgttgagcag

SEQ ID NO: 5053381 - DNA, 25 bp, Homo sapien
ggccatgactgactgcattgagtgg

SEQ ID NO: 5053382 - DNA, 25 bp, Homo sapien
agcctcttctgaccggcgccgtctc

SEQ ID NO: 5053383 - DNA, 25 bp, Homo sapien
gaccggcgccgtctccccagccctg

SEQ ID NO: 5053384 - DNA, 25 bp, Homo sapien
gcagcctcttctgaccggcgccgtc

SEQ ID NO: 5053385 - DNA, 25 bp, Homo sapien
ctgaccggcgccgtctccccagccc

SEQ ID NO: 5053386 - DNA, 25 bp, Homo sapien
ttcccccaagtcgcagaggacattg

SEQ ID NO: 5053387 - DNA, 25 bp, Homo sapien
tcccccaagtcgcagaggacattgg

SEQ ID NO: 5053388 - DNA, 25 bp, Homo sapien
cttcccccaagtcgcagaggacatt

SEQ ID NO: 5053389 - DNA, 25 bp, Homo sapien
cccccaagtcgcagaggacattggc

SEQ ID NO: 5053390 - DNA, 25 bp, Homo sapien
cagaggaggtgtcgctgggctcagt

SEQ ID NO: 5053391 - DNA, 25 bp, Homo sapien
aggtgtcgctgggctcagtatggct

SEQ ID NO: 5053392 - DNA, 25 bp, Homo sapien
gaggaggtgtcgctgggctcagtat

SEQ ID NO: 5053393 - DNA, 25 bp, Homo sapien
ggaggtgtcgctgggctcagtatgg

SEQ ID NO: 5053394 - DNA, 25 bp, Homo sapien
cagtttcctgcagtacaggggttcc

SEQ ID NO: 5053395 - DNA, 25 bp, Homo sapien
ctccaaagccacgtgccttatagca

SEQ ID NO: 5053396 - DNA, 25 bp, Homo sapien
gcctctgagtctctccaaagccacg

SEQ ID NO: 5053397 - DNA, 25 bp, Homo sapien
gccacgtgccttatagcaggctttg

SEQ ID NO: 5053398 - DNA, 25 bp, Homo sapien
gaggctcttatcagcatctgacagc

SEQ ID NO: 5053399 - DNA, 25 bp, Homo sapien
cagaggaggctcttatcagcatctg

SEQ ID NO: 5053400 - DNA, 25 bp, Homo sapien
aggaggctcttatcagcatctgaca

SEQ ID NO: 5053401 - DNA, 25 bp, Homo sapien
gaggaggctcttatcagcatctgac

SEQ ID NO: 5053402 - DNA, 25 bp, Homo sapien
gaggtgggcagattaagccgagcag

SEQ ID NO: 5053403 - DNA, 25 bp, Homo sapien
aaatgtggttctcggcgcccagcct

SEQ ID NO: 5053404 - DNA, 25 bp, Homo sapien
ataaaaatgtggttctcggcgccca

SEQ ID NO: 5053405 - DNA, 25 bp, Homo sapien
agcctgtggccccatgccaacttgc

SEQ ID NO: 5053406 - DNA, 25 bp, Homo sapien
ctgtggccccatgccaacttgctaa

SEQ ID NO: 5053407 - DNA, 25 bp, Homo sapien
tcagcgtaggaaggtgagcgtggtc

SEQ ID NO: 5053408 - DNA, 25 bp, Homo sapien
agcgtaggaaggtgagcgtggtctt

SEQ ID NO: 5053409 - DNA, 25 bp, Homo sapien
cagcgtaggaaggtgagcgtggtct

SEQ ID NO: 5053410 - DNA, 25 bp, Homo sapien
tctgtatccgacagcccccagacac

SEQ ID NO: 5053411 - DNA, 25 bp, Homo sapien
agtctgtatccgacagcccccagac

SEQ ID NO: 5053412 - DNA, 25 bp, Homo sapien
tgtatccgacagcccccagacacct

SEQ ID NO: 5053413 - DNA, 25 bp, Homo sapien
tcagtctgtatccgacagcccccag

SEQ ID NO: 5053414 - DNA, 25 bp, Homo sapien
accacccctgcccatggcaggcctg

SEQ ID NO: 5053415 - DNA, 25 bp, Homo sapien
caccacccctgcccatggcaggcct

SEQ ID NO: 5053416 - DNA, 25 bp, Homo sapien
cacccctgcccatggcaggcctgct

SEQ ID NO: 5053417 - DNA, 25 bp, Homo sapien
ccctgcccatggcaggcctgctcac

SEQ ID NO: 5053418 - DNA, 25 bp, Homo sapien
ccaggcggtgaagaatgtcacccag

SEQ ID NO: 5053419 - DNA, 25 bp, Homo sapien
cctgggtgcccaggcggtgaagaat

SEQ ID NO: 5053420 - DNA, 25 bp, Homo sapien
gctgggccatcatgacgctgatggc

SEQ ID NO: 5053421 - DNA, 25 bp, Homo sapien
ggtcctcgggctcagtcttcaggaa

SEQ ID NO: 5053422 - DNA, 25 bp, Homo sapien
tgctgaggcccctcaggctcctgac

SEQ ID NO: 5053423 - DNA, 25 bp, Homo sapien
gcattaaggcactgctgaggcccct

SEQ ID NO: 5053424 - DNA, 25 bp, Homo sapien
ggtgcattaaggcactgctgaggcc

SEQ ID NO: 5053425 - DNA, 25 bp, Homo sapien
cttcttggggtgcattaaggcactg

SEQ ID NO: 5053426 - DNA, 25 bp, Homo sapien
tgttcacggttttccgagacgccca

SEQ ID NO: 5053427 - DNA, 25 bp, Homo sapien
gctcaggaagttgttcacggttttc

SEQ ID NO: 5053428 - DNA, 25 bp, Homo sapien
cacggttttccgagacgcccactgg

SEQ ID NO: 5053429 - DNA, 25 bp, Homo sapien
ccatgctcaggaagttgttcacggt

SEQ ID NO: 5053430 - DNA, 25 bp, Homo sapien
ctcacagttgtaggggaccatggcc

SEQ ID NO: 5053431 - DNA, 25 bp, Homo sapien
cccaagaccgccttgacctcacagt

SEQ ID NO: 5053432 - DNA, 25 bp, Homo sapien
ctctgaagagcaatggctgcctgcc

SEQ ID NO: 5053433 - DNA, 25 bp, Homo sapien
tgaggatggccacgacgctgtcccg

SEQ ID NO: 5053434 - DNA, 25 bp, Homo sapien
cctgcataggtttccagcactggaa

SEQ ID NO: 5053435 - DNA, 25 bp, Homo sapien
gcataggtttccagcactggaagag

SEQ ID NO: 5053436 - DNA, 25 bp, Homo sapien
caccctgcataggtttccagcactg

SEQ ID NO: 5053437 - DNA, 25 bp, Homo sapien
ctgcataggtttccagcactggaag

SEQ ID NO: 5053438 - DNA, 25 bp, Homo sapien
cttgaggtaggcgaacacctcccag

SEQ ID NO: 5053439 - DNA, 25 bp, Homo sapien
tgaggtaggcgaacacctcccagca

SEQ ID NO: 5053440 - DNA, 25 bp, Homo sapien
cccttggtccagaagacgaccttca

SEQ ID NO: 5053441 - DNA, 25 bp, Homo sapien
cagcccttggtccagaagacgacct

SEQ ID NO: 5053442 - DNA, 25 bp, Homo sapien
ctcaaacaggtaatgcagctgtgtc

SEQ ID NO: 5053443 - DNA, 25 bp, Homo sapien
aggatgtcttcctggtactccgcca

SEQ ID NO: 5053444 - DNA, 25 bp, Homo sapien
catgcccagctcaaacaggtaatgc

SEQ ID NO: 5053445 - DNA, 25 bp, Homo sapien
gatgtcttcctggtactccgccacg

SEQ ID NO: 5053446 - DNA, 25 bp, Homo sapien
ccagaccacctgctcttgctggaga

SEQ ID NO: 5053447 - DNA, 25 bp, Homo sapien
gaccacctgctcttgctggagacca

SEQ ID NO: 5053448 - DNA, 25 bp, Homo sapien
cttcccagcgtctggggtgttctgc

SEQ ID NO: 5053449 - DNA, 25 bp, Homo sapien
gtgtccttcccagcgtctggggtgt

SEQ ID NO: 5053450 - DNA, 25 bp, Homo sapien
cggtgagcagtgacatggtgcccac

SEQ ID NO: 5053451 - DNA, 25 bp, Homo sapien
gcaggagtcacggtgagcagtgaca

SEQ ID NO: 5053452 - DNA, 25 bp, Homo sapien
ggcacctggcacatccctggtgtgt

SEQ ID NO: 5053453 - DNA, 25 bp, Homo sapien
ctggcacatccctggtgtgtgcagg

SEQ ID NO: 5053454 - DNA, 25 bp, Homo sapien
tggcactggtaagggtcaccctggc

SEQ ID NO: 5053455 - DNA, 25 bp, Homo sapien
caggtgacaacaggcccctgcaggt

SEQ ID NO: 5053456 - DNA, 25 bp, Homo sapien
cacaggtgacaacaggcccctgcag

SEQ ID NO: 5053457 - DNA, 25 bp, Homo sapien
ccacaggtgacaacagccccccaca

SEQ ID NO: 5053458 - DNA, 25 bp, Homo sapien
cttcatgtagagcagggtgatcacc

SEQ ID NO: 5053459 - DNA, 25 bp, Homo sapien
cagtttcagcttcatgtagagcagg

SEQ ID NO: 5053460 - DNA, 25 bp, Homo sapien
gggccgcagtttcagcttcatgtag

SEQ ID NO: 5053461 - DNA, 25 bp, Homo sapien
tgtagagcagggtgatcaccttgcg

SEQ ID NO: 5053462 - DNA, 25 bp, Homo sapien
gtagtacaccatcctggaggcaacg

SEQ ID NO: 5053463 - DNA, 25 bp, Homo sapien
tcctggaggcaacgttgtccaccca

SEQ ID NO: 5053464 - DNA, 25 bp, Homo sapien
gcaacgttgtccacccagggcagga

SEQ ID NO: 5053465 - DNA, 25 bp, Homo sapien
aagtagtacaccatcctggaggcaa

SEQ ID NO: 5053466 - DNA, 25 bp, Homo sapien
gacccatctcctgtgcagatcaagg

SEQ ID NO: 5053467 - DNA, 25 bp, Homo sapien
ctgacccatctcctgtgcagatcaa

SEQ ID NO: 5053468 - DNA, 25 bp, Homo sapien
atctcctgtgcagatcaaggcctgg

SEQ ID NO: 5053469 - DNA, 25 bp, Homo sapien
ccatctcctgtgcagatcaaggcct

SEQ ID NO: 5053470 - DNA, 25 bp, Homo sapien
gtcaggacaaatgccagccgtgtcc

SEQ ID NO: 5053471 - DNA, 25 bp, Homo sapien
gggtcaggacaaatgccagccgtgt

SEQ ID NO: 5053472 - DNA, 25 bp, Homo sapien
gtgtccacaccctgcgtcggaccat

SEQ ID NO: 5053473 - DNA, 25 bp, Homo sapien
ggacaaatgccagccgtgtccacac

SEQ ID NO: 5053474 - DNA, 25 bp, Homo sapien
tcctccagatgcgaggtggacgtcc

SEQ ID NO: 5053475 - DNA, 25 bp, Homo sapien
agatgcgaggtggacgtccatccca

SEQ ID NO: 5053476 - DNA, 25 bp, Homo sapien
gtggacgtccatcccacagcaatcg

SEQ ID NO: 5053477 - DNA, 25 bp, Homo sapien
gaggtggacgtccatcccacagcaa

SEQ ID NO: 5053478 - DNA, 25 bp, Homo sapien
gtgcctcgaggatcacacaggatcg

SEQ ID NO: 5053479 - DNA, 25 bp, Homo sapien
aggtctcggttcctgcccatcagca

SEQ ID NO: 5053480 - DNA, 25 bp, Homo sapien
cagcacctgacaagacactccagtg

SEQ ID NO: 5053481 - DNA, 25 bp, Homo sapien
gacaagacactccagtgcctcgagg

SEQ ID NO: 5053482 - DNA, 25 bp, Homo sapien
gttggaggactggtggggcatctcc

SEQ ID NO: 5053483 - DNA, 25 bp, Homo sapien
aggaggcagcccatgtgcttccgca

SEQ ID NO: 5053484 - DNA, 25 bp, Homo sapien
tttggttggaggactggtggggcat

SEQ ID NO: 5053485 - DNA, 25 bp, Homo sapien
gcatctccaggaggcagcccatgtg

SEQ ID NO: 5053486 - DNA, 25 bp, Homo sapien
cagtctcgaaggaccagcctgtaca

SEQ ID NO: 5053487 - DNA, 25 bp, Homo sapien
acgccagcgcagtctcgaaggacca

SEQ ID NO: 5053488 - DNA, 25 bp, Homo sapien
cagcgcagtctcgaaggaccagcct

SEQ ID NO: 5053489 - DNA, 25 bp, Homo sapien
tccacgccagcgcagtctcgaagga

SEQ ID NO: 5053490 - DNA, 25 bp, Homo sapien
tgcagaagctcctggatgccactgt

SEQ ID NO: 5053491 - DNA, 25 bp, Homo sapien
cactgtcctcggtgtctgaggcctg

SEQ ID NO: 5053492 - DNA, 25 bp, Homo sapien
agcctgctgggagtctaggctcaag

SEQ ID NO: 5053493 - DNA, 25 bp, Homo sapien
ctgctgggagtctaggctcaagagc

SEQ ID NO: 5053494 - DNA, 25 bp, Homo sapien
caccagctggtttaggatggtctcc

SEQ ID NO: 5053495 - DNA, 25 bp, Homo sapien
gttccaccagctggtttaggatggt

SEQ ID NO: 5053496 - DNA, 25 bp, Homo sapien
accagctggtttaggatggtctcca

SEQ ID NO: 5053497 - DNA, 25 bp, Homo sapien
tccaccagctggtttaggatggtct

SEQ ID NO: 5053498 - DNA, 25 bp, Homo sapien
tgatcctgctggtgagctcttcctc

SEQ ID NO: 5053499 - DNA, 25 bp, Homo sapien
tccctggggaggcactcacccaagg

SEQ ID NO: 5053500 - DNA, 25 bp, Homo sapien
gggaggcactcacccaaggacactc

SEQ ID NO: 5053501 - DNA, 25 bp, Homo sapien
cctgatcctgctggtgagctcttcc

SEQ ID NO: 5053502 - DNA, 25 bp, Homo sapien
tttacagggccattcttagagaagc

SEQ ID NO: 5053503 - DNA, 25 bp, Homo sapien
ggtttacagggccattcttagagaa

SEQ ID NO: 5053504 - DNA, 25 bp, Homo sapien
acagggccattcttagagaagcaga

SEQ ID NO: 5053505 - DNA, 25 bp, Homo sapien
cagggtttacagggccattcttaga

SEQ ID NO: 5053506 - DNA, 25 bp, Homo sapien
ctgctctgcggagcccgtgcaggac

SEQ ID NO: 5053507 - DNA, 25 bp, Homo sapien
ttcacaaaggggacaccgagcctgg

SEQ ID NO: 5053508 - DNA, 25 bp, Homo sapien
catgccgcctgaagtccacagaggg

SEQ ID NO: 5053509 - DNA, 25 bp, Homo sapien
acaaaggggacaccgagcctggaga

SEQ ID NO: 5053510 - DNA, 25 bp, Homo sapien
caagccttgcgtgtgactgtgaacc

SEQ ID NO: 5053511 - DNA, 25 bp, Homo sapien
ccggagctgcgtgggataggagcct

SEQ ID NO: 5053512 - DNA, 25 bp, Homo sapien
tggccaagccttgcgtgtgactgtg

SEQ ID NO: 5053513 - DNA, 25 bp, Homo sapien
cccgaggtggccaagccttgcgtgt

SEQ ID NO: 5053514 - DNA, 25 bp, Homo sapien
tagcctcggaggaaccggaggagca

SEQ ID NO: 5053515 - DNA, 25 bp, Homo sapien
gtagcctcggaggaaccggaggagc

SEQ ID NO: 5053516 - DNA, 25 bp, Homo sapien
cgtagcctcggaggaaccggaggag

SEQ ID NO: 5053517 - DNA, 25 bp, Homo sapien
ttgtcagatagcagagtcggccacg

SEQ ID NO: 5053518 - DNA, 25 bp, Homo sapien
ggccacttgtcagatagcagagtcg

SEQ ID NO: 5053519 - DNA, 25 bp, Homo sapien
tcggccacggggctcaaggctgact

SEQ ID NO: 5053520 - DNA, 25 bp, Homo sapien
ttccctctggctgctcgtaggacgc

SEQ ID NO: 5053521 - DNA, 25 bp, Homo sapien
cagctctcactagggcaggactact

SEQ ID NO: 5053522 - DNA, 25 bp, Homo sapien
tggagacgactgagtgaggtgtcct

SEQ ID NO: 5053523 - DNA, 25 bp, Homo sapien
ggggcacctgtgtggctacacacag

SEQ ID NO: 5053524 - DNA, 25 bp, Homo sapien
caaggaggagcagcgtgtagaaggc

SEQ ID NO: 5053525 - DNA, 25 bp, Homo sapien
ctggtccggccccattctttggagg

SEQ ID NO: 5053526 - DNA, 25 bp, Homo sapien
agagagaagagggagcttgggtgga

SEQ ID NO: 5053527 - DNA, 25 bp, Homo sapien
ctgctggtccggccccattctttgg

SEQ ID NO: 5053528 - DNA, 25 bp, Homo sapien
gtggaaagccatgagcaggcacagg

SEQ ID NO: 5053529 - DNA, 25 bp, Homo sapien
gggtgccaggctcgtgctcgggcca

SEQ ID NO: 5053530 - DNA, 25 bp, Homo sapien
gcctggccagccctcggttctctgc

SEQ ID NO: 5053531 - DNA, 25 bp, Homo sapien
tgccaggctcgtgctcgggccatgg

SEQ ID NO: 5053532 - DNA, 25 bp, Homo sapien
tggccagccctcggttctctgcaga

SEQ ID NO: 5053533 - DNA, 25 bp, Homo sapien
ttccccacgcaggaagcattccagc

SEQ ID NO: 5053534 - DNA, 25 bp, Homo sapien
gagggaagcacgtctctggagcccg

SEQ ID NO: 5053535 - DNA, 25 bp, Homo sapien
acgcaggaagcattccagcctctgg

SEQ ID NO: 5053536 - DNA, 25 bp, Homo sapien
agggaagcacgtctctggagcccgc

SEQ ID NO: 5053537 - DNA, 25 bp, Homo sapien
ttggtgacttgacaatggcccaagt

SEQ ID NO: 5053538 - DNA, 25 bp, Homo sapien
tgacttgacaatggcccaagtgctg

SEQ ID NO: 5053539 - DNA, 25 bp, Homo sapien
ggtgacttgacaatggcccaagtgc

SEQ ID NO: 5053540 - DNA, 25 bp, Homo sapien
tggtgacttgacaatggcccaagtg

SEQ ID NO: 5053541 - DNA, 25 bp, Homo sapien
agaggaggcgaagccgagggccctg

SEQ ID NO: 5053542 - DNA, 25 bp, Homo sapien
aagaggaggcgaagccgagggccct

SEQ ID NO: 5053543 - DNA, 25 bp, Homo sapien
taagaggaggcgaagccgagggccc

SEQ ID NO: 5053544 - DNA, 25 bp, Homo sapien
gtccccggtgtcaccgtgtgaatct

SEQ ID NO: 5053545 - DNA, 25 bp, Homo sapien
cgtgtgaatctgaccacgtcatggg

SEQ ID NO: 5053546 - DNA, 25 bp, Homo sapien
tgtcaccgtgtgaatctgaccacgt

SEQ ID NO: 5053547 - DNA, 25 bp, Homo sapien
tctgaccacgtcatgggcagtagct

SEQ ID NO: 5053548 - DNA, 25 bp, Homo sapien
tgaaacccgtagatcaaggttgctg

SEQ ID NO: 5053549 - DNA, 25 bp, Homo sapien
gcccaggcctgaaacccgtagatca

SEQ ID NO: 5053550 - DNA, 25 bp, Homo sapien
cgtagatcaaggttgctgcaaggac

SEQ ID NO: 5053551 - DNA, 25 bp, Homo sapien
caaggttgctgcaaggacctcagcc

SEQ ID NO: 5053552 - DNA, 25 bp, Homo sapien
cacagggcagataagggagcttcgc

SEQ ID NO: 5053553 - DNA, 25 bp, Homo sapien
tgaggagtagctcgagttccccgtg

SEQ ID NO: 5053554 - DNA, 25 bp, Homo sapien
cacatgtcaaggtccgctgaggagt

SEQ ID NO: 5053555 - DNA, 25 bp, Homo sapien
gatgatccaggacaacctccacatg

SEQ ID NO: 5053556 - DNA, 25 bp, Homo sapien
gatgggagcaagcatcagtggggct

SEQ ID NO: 5053557 - DNA, 25 bp, Homo sapien
tggccagggtcagtactgggtcatc

SEQ ID NO: 5053558 - DNA, 25 bp, Homo sapien
gccagggtcagtactgggtcatctg

SEQ ID NO: 5053559 - DNA, 25 bp, Homo sapien
cagggtcagtactgggtcatctgtg

SEQ ID NO: 5053560 - DNA, 25 bp, Homo sapien
gtggccagggtcagtactgggtcat

SEQ ID NO: 5053561 - DNA, 25 bp, Homo sapien
ggacacaggagggttcgacaatacc

SEQ ID NO: 5053562 - DNA, 25 bp, Homo sapien
cacaggagggttcgacaatacccat

SEQ ID NO: 5053563 - DNA, 25 bp, Homo sapien
gagggttcgacaatacccattcaaa

SEQ ID NO: 5053564 - DNA, 25 bp, Homo sapien
tcggacacaggagggttcgacaata

SEQ ID NO: 5053565 - DNA, 25 bp, Homo sapien
ggtcccttgcaccattcaagcctgt

SEQ ID NO: 5053566 - DNA, 25 bp, Homo sapien
catggcaattgtgggcaggtccctt

SEQ ID NO: 5053567 - DNA, 25 bp, Homo sapien
ggcaggtcccttgcaccattcaagc

SEQ ID NO: 5053568 - DNA, 25 bp, Homo sapien
agtctggctggttccatggcaattg

SEQ ID NO: 5053569 - DNA, 25 bp, Homo sapien
actcgccgaagagcgggagatcgct

SEQ ID NO: 5053570 - DNA, 25 bp, Homo sapien
atcgctggacactcgccgttggcat

SEQ ID NO: 5053571 - DNA, 25 bp, Homo sapien
aggagatcgctggacactcgccgaa

SEQ ID NO: 5053572 - DNA, 25 bp, Homo sapien
gggagatcgctggacactcgccgtt

SEQ ID NO: 5053573 - DNA, 25 bp, Homo sapien
gcagtggaggctgacctcccgcagc

SEQ ID NO: 5053574 - DNA, 25 bp, Homo sapien
cagggcatcaagttacccttgtttc

SEQ ID NO: 5053575 - DNA, 25 bp, Homo sapien
cagtgtccccacaaaggcgggggag

SEQ ID NO: 5053576 - DNA, 25 bp, Homo sapien
gggaggctgatgtcccgcagggcat

SEQ ID NO: 5053577 - DNA, 25 bp, Homo sapien
ttaggctgcagacgctagtggccca

SEQ ID NO: 5053578 - DNA, 25 bp, Homo sapien
ggcagaacgatgaaccctgagccag

SEQ ID NO: 5053579 - DNA, 25 bp, Homo sapien
cacagcctcatgaggtttccagggt

SEQ ID NO: 5053580 - DNA, 25 bp, Homo sapien
acagggcctggaccgacatttaagg

SEQ ID NO: 5053581 - DNA, 25 bp, Homo sapien
ggcagaatgcctggaagcgccccag

SEQ ID NO: 5053582 - DNA, 25 bp, Homo sapien
gcagaatgcctggaagcgccccagg

SEQ ID NO: 5053583 - DNA, 25 bp, Homo sapien
gggcagaatgcctggaagcgcccca

SEQ ID NO: 5053584 - DNA, 25 bp, Homo sapien
acttcgcctcccacgcaggcagcct

SEQ ID NO: 5053585 - DNA, 25 bp, Homo sapien
cagcggggcgggcttagtggcaggc

SEQ ID NO: 5053586 - DNA, 25 bp, Homo sapien
tcgcgctggcgctcagggctaagct

SEQ ID NO: 5053587 - DNA, 25 bp, Homo sapien
ctgcagccgactcctctctgtagcc

SEQ ID NO: 5053588 - DNA, 25 bp, Homo sapien
gcctcccagcgagcccgaacactgg

SEQ ID NO: 5053589 - DNA, 25 bp, Homo sapien
aagaacaggagagtgggcagtgaag

SEQ ID NO: 5053590 - DNA, 25 bp, Homo sapien
gggccggtggatggcgctggtcttc

SEQ ID NO: 5053591 - DNA, 25 bp, Homo sapien
agtgaaggaccacgcaggacagtag

SEQ ID NO: 5053592 - DNA, 25 bp, Homo sapien
ctccaggcgggcgtgaatcactgga

SEQ ID NO: 5053593 - DNA, 25 bp, Homo sapien
ttctccaggcgggcgtgaatcactg

SEQ ID NO: 5053594 - DNA, 25 bp, Homo sapien
ctgctgcctcagccggatttgagga

SEQ ID NO: 5053595 - DNA, 25 bp, Homo sapien
tgcctcagccggatttgaggactca

SEQ ID NO: 5053596 - DNA, 25 bp, Homo sapien
aggaagcaccgggacatcaggtctg

SEQ ID NO: 5053597 - DNA, 25 bp, Homo sapien
gcgacttctactctcccctgggagg

SEQ ID NO: 5053598 - DNA, 25 bp, Homo sapien
gctctgctgcgtgtgcgacttctac

SEQ ID NO: 5053599 - DNA, 25 bp, Homo sapien
ccgggacatcaggtctgctctgctg

SEQ ID NO: 5053600 - DNA, 25 bp, Homo sapien
ggtgctcacatctggatgacacgag

SEQ ID NO: 5053601 - DNA, 25 bp, Homo sapien
tttgccgctgggtgcggtgctcaca

SEQ ID NO: 5053602 - DNA, 25 bp, Homo sapien
tgacacgagtgtgtgcgagtccgcc

SEQ ID NO: 5053603 - DNA, 25 bp, Homo sapien
tgccatccggacacttggttttctg

SEQ ID NO: 5053604 - DNA, 25 bp, Homo sapien
tgggcaaagccacaggctggatgta

SEQ ID NO: 5053605 - DNA, 25 bp, Homo sapien
aggctggatgtagtgggcaggctgg

SEQ ID NO: 5053606 - DNA, 25 bp, Homo sapien
agccacaggctggatgtagtgggca

SEQ ID NO: 5053607 - DNA, 25 bp, Homo sapien
ggcaaagccacaggctggatgtagt

SEQ ID NO: 5053608 - DNA, 25 bp, Homo sapien
gggcgggcgtgagggtctccgcctc

SEQ ID NO: 5053609 - DNA, 25 bp, Homo sapien
gcctcatcctccaccgggaggtggg

SEQ ID NO: 5053610 - DNA, 25 bp, Homo sapien
tggccacggactcgctgttgggggc

SEQ ID NO: 5053611 - DNA, 25 bp, Homo sapien
tcgggctgggtccggtcactggcca

SEQ ID NO: 5053612 - DNA, 25 bp, Homo sapien
ccctctggatgagctgctccagggt

SEQ ID NO: 5053613 - DNA, 25 bp, Homo sapien
cccctctggatgagctgctccaggg

SEQ ID NO: 5053614 - DNA, 25 bp, Homo sapien
gcccctctggatgagctgctccagg

SEQ ID NO: 5053615 - DNA, 25 bp, Homo sapien
ggggtggcgcaggaaacgcttgagc

SEQ ID NO: 5053616 - DNA, 25 bp, Homo sapien
agggggtggcgcaggaaacgcttga

SEQ ID NO: 5053617 - DNA, 25 bp, Homo sapien
gggggtggcgcaggaaacgcttgag

SEQ ID NO: 5053618 - DNA, 25 bp, Homo sapien
ctgggtcttcaaccacgttgaccat

SEQ ID NO: 5053619 - DNA, 25 bp, Homo sapien
cctgggtcttcaaccacgttgacca

SEQ ID NO: 5053620 - DNA, 25 bp, Homo sapien
tcctttcgggagaggcatattgaac

SEQ ID NO: 5053621 - DNA, 25 bp, Homo sapien
tagataacgtctgggaagcttagtg

SEQ ID NO: 5053622 - DNA, 25 bp, Homo sapien
aacacagagggtagaagagtcatgg

SEQ ID NO: 5053623 - DNA, 25 bp, Homo sapien
ccaaagaatggaagttggtgctccc

SEQ ID NO: 5053624 - DNA, 25 bp, Homo sapien
gtgtgtcctcttatacataaaaaga

SEQ ID NO: 5053625 - DNA, 25 bp, Homo sapien
gttaaatgctgttaatcactcaaaa

SEQ ID NO: 5053626 - DNA, 25 bp, Homo sapien
aatgctgttaatcactcaaaagaaa

SEQ ID NO: 5053627 - DNA, 25 bp, Homo sapien
ccaagtgtgtcctcttatacataaa

SEQ ID NO: 5053628 - DNA, 25 bp, Homo sapien
gaagatggagatttagttcctgtca

SEQ ID NO: 5053629 - DNA, 25 bp, Homo sapien
cacaagtactttaaatgcgcacaca

SEQ ID NO: 5053630 - DNA, 25 bp, Homo sapien
taaaatttagcaggacttcgtgttc

SEQ ID NO: 5053631 - DNA, 25 bp, Homo sapien
acttgatatcacaggttattgtaca

SEQ ID NO: 5053632 - DNA, 25 bp, Homo sapien
tgaagtgagttaagactctgggaga

SEQ ID NO: 5053633 - DNA, 25 bp, Homo sapien
gaatcataaagtcagtctttcctgt

SEQ ID NO: 5053634 - DNA, 25 bp, Homo sapien
aattgaatcataaagtcagtctttc

SEQ ID NO: 5053635 - DNA, 25 bp, Homo sapien
aagtgagttaagactctgggagact

SEQ ID NO: 5053636 - DNA, 25 bp, Homo sapien
gctctaacagtaagcagaaattaag

SEQ ID NO: 5053637 - DNA, 25 bp, Homo sapien
cagggaggggctcattccataggcc

SEQ ID NO: 5053638 - DNA, 25 bp, Homo sapien
acagggaggggctcattccataggc

SEQ ID NO: 5053639 - DNA, 25 bp, Homo sapien
gggaggggctcattccataggcccc

SEQ ID NO: 5053640 - DNA, 25 bp, Homo sapien
gaggggctcattccataggcccctc

SEQ ID NO: 5053641 - DNA, 25 bp, Homo sapien
ggcagaccatggtgaagagacctct

SEQ ID NO: 5053642 - DNA, 25 bp, Homo sapien
gctcaacgtcatttctagggttcca

SEQ ID NO: 5053643 - DNA, 25 bp, Homo sapien
taccccacggtgcagagggatatgc

SEQ ID NO: 5053644 - DNA, 25 bp, Homo sapien
catgctgcacggttatgccacacag

SEQ ID NO: 5053645 - DNA, 25 bp, Homo sapien
gctggctctatgtatattcaactct

SEQ ID NO: 5053646 - DNA, 25 bp, Homo sapien
ctgacaccagatggctctaccggga

SEQ ID NO: 5053647 - DNA, 25 bp, Homo sapien
tggactcagtgcacaaggacctttt

SEQ ID NO: 5053648 - DNA, 25 bp, Homo sapien
tcccctgtcttggtaaactggctct

SEQ ID NO: 5053649 - DNA, 25 bp, Homo sapien
aaatggctccggactccaaactctg

SEQ ID NO: 5053650 - DNA, 25 bp, Homo sapien
ggcactagtgaccagccaggtgtca

SEQ ID NO: 5053651 - DNA, 25 bp, Homo sapien
tcccgggctgtggagtaaaatggct

SEQ ID NO: 5053652 - DNA, 25 bp, Homo sapien
gtctccagaggccaagaaaagcggg

SEQ ID NO: 5053653 - DNA, 25 bp, Homo sapien
ttgtgtacacaactccagggtccct

SEQ ID NO: 5053654 - DNA, 25 bp, Homo sapien
ggcagcagcatcacatagcaagaga

SEQ ID NO: 5053655 - DNA, 25 bp, Homo sapien
caactagtatgtgtgcaagcactga

SEQ ID NO: 5053656 - DNA, 25 bp, Homo sapien
tgaaggatccatcccgataacagga

SEQ ID NO: 5053657 - DNA, 25 bp, Homo sapien
gaactgcctggacctgaagcaggct

SEQ ID NO: 5053658 - DNA, 25 bp, Homo sapien
tctccttactgcctgtctcagtcag

SEQ ID NO: 5053659 - DNA, 25 bp, Homo sapien
tcagtcagtttggattgcgataaca

SEQ ID NO: 5053660 - DNA, 25 bp, Homo sapien
catgttttactcattccaagtcccc

SEQ ID NO: 5053661 - DNA, 25 bp, Homo sapien
ccataacctcaagggcactggtggg

SEQ ID NO: 5053662 - DNA, 25 bp, Homo sapien
caataaggtcttatcatgcctaggc

SEQ ID NO: 5053663 - DNA, 25 bp, Homo sapien
taaggactcgatctcatcggcgagc

SEQ ID NO: 5053664 - DNA, 25 bp, Homo sapien
gcagtccttaacaccatcgtcatgg

SEQ ID NO: 5053665 - DNA, 25 bp, Homo sapien
ccagcactgccatgtggcagaagtt

SEQ ID NO: 5053666 - DNA, 25 bp, Homo sapien
gccatgtggcagaagttctccaaca

SEQ ID NO: 5053667 - DNA, 25 bp, Homo sapien
cagcactgccatgtggcagaagttc

SEQ ID NO: 5053668 - DNA, 25 bp, Homo sapien
actgccatgtggcagaagttctcca

SEQ ID NO: 5053669 - DNA, 25 bp, Homo sapien
ggtcactaccacatcctcaaggccc

SEQ ID NO: 5053670 - DNA, 25 bp, Homo sapien
ccacatcctcaaggcccacagtctc

SEQ ID NO: 5053671 - DNA, 25 bp, Homo sapien
cacttaggaattgccaactcctctg

SEQ ID NO: 5053672 - DNA, 25 bp, Homo sapien
ttatgtctctgtagaggcctccagg

SEQ ID NO: 5053673 - DNA, 25 bp, Homo sapien
ttaggaccagggcaagacgcctgac

SEQ ID NO: 5053674 - DNA, 25 bp, Homo sapien
catggaggagcgtcagtatgtccac

SEQ ID NO: 5053675 - DNA, 25 bp, Homo sapien
tcagaactgacagcccatcaaggta

SEQ ID NO: 5053676 - DNA, 25 bp, Homo sapien
tagggaacccaagacctcgagagag

SEQ ID NO: 5053677 - DNA, 25 bp, Homo sapien
tgctgacaggctctctgcgataggg

SEQ ID NO: 5053678 - DNA, 25 bp, Homo sapien
catacccagattcagaggctcagga

SEQ ID NO: 5053679 - DNA, 25 bp, Homo sapien
gctggtcattaggagcaggtagccc

SEQ ID NO: 5053680 - DNA, 25 bp, Homo sapien
catcgtgctgcctaagagaccagga

SEQ ID NO: 5053681 - DNA, 25 bp, Homo sapien
cagggaagaggacaaacaaggtctc

SEQ ID NO: 5053682 - DNA, 25 bp, Homo sapien
ccagagctgacaccacatgggcaaa

SEQ ID NO: 5053683 - DNA, 25 bp, Homo sapien
tccatgtgtggaagcggaggccaga

SEQ ID NO: 5053684 - DNA, 25 bp, Homo sapien
gggaaacaacagatgtgcaaggtct

SEQ ID NO: 5053685 - DNA, 25 bp, Homo sapien
gtaggcagctgagtccaacgcagtg

SEQ ID NO: 5053686 - DNA, 25 bp, Homo sapien
gagagctcagcccttgtcaaggaga

SEQ ID NO: 5053687 - DNA, 25 bp, Homo sapien
caaggagagtcctcgaacccagagg

SEQ ID NO: 5053688 - DNA, 25 bp, Homo sapien
ctgagtccaacgcagtgcccgagag

SEQ ID NO: 5053689 - DNA, 25 bp, Homo sapien
agaagtgcagaagccctgcccaggc

SEQ ID NO: 5053690 - DNA, 25 bp, Homo sapien
ctgtccacatcctgacccctaccta

SEQ ID NO: 5053691 - DNA, 25 bp, Homo sapien
actgtccacatcctgacccctacct

SEQ ID NO: 5053692 - DNA, 25 bp, Homo sapien
tgtccacatcctgacccctacctac

SEQ ID NO: 5053693 - DNA, 25 bp, Homo sapien
gactgtccacatcctgacccctacc

SEQ ID NO: 5053694 - DNA, 25 bp, Homo sapien
gaagcaaacagtgcgggtgacacca

SEQ ID NO: 5053695 - DNA, 25 bp, Homo sapien
gagccctcgggacatgttctaacct

SEQ ID NO: 5053696 - DNA, 25 bp, Homo sapien
gaagcatatggaagtcacgcacaga

SEQ ID NO: 5053697 - DNA, 25 bp, Homo sapien
tacatggatgtgcagaagttcccca

SEQ ID NO: 5053698 - DNA, 25 bp, Homo sapien
gacacagggcgttctggaatctcag

SEQ ID NO: 5053699 - DNA, 25 bp, Homo sapien
tgttgcccgtgaaatggagatgccg

SEQ ID NO: 5053700 - DNA, 25 bp, Homo sapien
tattgacaggaacctcgggcacaga

SEQ ID NO: 5053701 - DNA, 25 bp, Homo sapien
cacttccaggacatagatagggctc

SEQ ID NO: 5053702 - DNA, 25 bp, Homo sapien
atgagcagggcaagggagactgagc

SEQ ID NO: 5053703 - DNA, 25 bp, Homo sapien
gcttcaaccttgaccacagccccga

SEQ ID NO: 5053704 - DNA, 25 bp, Homo sapien
gcaagggagactgagctgtggcccc

SEQ ID NO: 5053705 - DNA, 25 bp, Homo sapien
cagccccgagggcaccacgccgcct

SEQ ID NO: 5053706 - DNA, 25 bp, Homo sapien
ctgctgctggctccggaacacggca

SEQ ID NO: 5053707 - DNA, 25 bp, Homo sapien
tgccgctccgcaaagcgcaggactg

SEQ ID NO: 5053708 - DNA, 25 bp, Homo sapien
gcaggactgcgtcaaaggccacggc

SEQ ID NO: 5053709 - DNA, 25 bp, Homo sapien
cacttcctgcgcactgaagcatggc

SEQ ID NO: 5053710 - DNA, 25 bp, Homo sapien
tcccaggccacctcctcgccctcac

SEQ ID NO: 5053711 - DNA, 25 bp, Homo sapien
ctcccaggccacctcctcgccctca

SEQ ID NO: 5053712 - DNA, 25 bp, Homo sapien
ctgctcccaggccacctcctcgccc

SEQ ID NO: 5053713 - DNA, 25 bp, Homo sapien
tgctcccaggccacctcctcgccct

SEQ ID NO: 5053714 - DNA, 25 bp, Homo sapien
ctccgccgtcctggtcagcttttgg

SEQ ID NO: 5053715 - DNA, 25 bp, Homo sapien
atctcctccgccgtcctggtcagct

SEQ ID NO: 5053716 - DNA, 25 bp, Homo sapien
caggatctcctccgccgtcctggtc

SEQ ID NO: 5053717 - DNA, 25 bp, Homo sapien
tcctccgccgtcctggtcagctttt

SEQ ID NO: 5053718 - DNA, 25 bp, Homo sapien
cttttctgaactccacacacaacct

SEQ ID NO: 5053719 - DNA, 25 bp, Homo sapien
cagcagggggccgtcccccttctgc

SEQ ID NO: 5053720 - DNA, 25 bp, Homo sapien
gcagcagggggccgtcccccttctg

SEQ ID NO: 5053721 - DNA, 25 bp, Homo sapien
tggcagcagggggccgtcccccttc

SEQ ID NO: 5053722 - DNA, 25 bp, Homo sapien
ggcgctggcgaagctggcccgggca

SEQ ID NO: 5053723 - DNA, 25 bp, Homo sapien
gctggcgaagctggcccgggcagga

SEQ ID NO: 5053724 - DNA, 25 bp, Homo sapien
ggcctggcgctggcgaagctggccc

SEQ ID NO: 5053725 - DNA, 25 bp, Homo sapien
cggcctggcgctggcgaagctggcc

SEQ ID NO: 5053726 - DNA, 25 bp, Homo sapien
aagacgtggctagggactgcgttcc

SEQ ID NO: 5053727 - DNA, 25 bp, Homo sapien
aggaggagccttcggcaaacgcaac

SEQ ID NO: 5053728 - DNA, 25 bp, Homo sapien
ttcactgggaagcactctgcctcca

SEQ ID NO: 5053729 - DNA, 25 bp, Homo sapien
ggcatcgttcatgttgtagcgggca

SEQ ID NO: 5053730 - DNA, 25 bp, Homo sapien
gagctgtccagcaagagaacggctt

SEQ ID NO: 5053731 - DNA, 25 bp, Homo sapien
ggttctgaagtgctctctcaccgag

SEQ ID NO: 5053732 - DNA, 25 bp, Homo sapien
tccatgggctgcaccaatgaggcca

SEQ ID NO: 5053733 - DNA, 25 bp, Homo sapien
caccgagggcacaaagatatgatgg

SEQ ID NO: 5053734 - DNA, 25 bp, Homo sapien
tcagcgttgtaaacctgctcggcgg

SEQ ID NO: 5053735 - DNA, 25 bp, Homo sapien
tagctttttaatgccgtgtctggcc

SEQ ID NO: 5053736 - DNA, 25 bp, Homo sapien
tgtctggccttaaagcgccaaagcc

SEQ ID NO: 5053737 - DNA, 25 bp, Homo sapien
cagaaaaggccggtctcatcagcgt

SEQ ID NO: 5053738 - DNA, 25 bp, Homo sapien
ttggagtccgagctggcgaagaacc

SEQ ID NO: 5053739 - DNA, 25 bp, Homo sapien
catctgctcgtagaagtccttggcc

SEQ ID NO: 5053740 - DNA, 25 bp, Homo sapien
gtacaggacgcggtccaggtgctcc

SEQ ID NO: 5053741 - DNA, 25 bp, Homo sapien
ttccccaggaaccactcgtacagga

SEQ ID NO: 5053742 - DNA, 25 bp, Homo sapien
ttgtgggccctgatgtcgtagaggg

SEQ ID NO: 5053743 - DNA, 25 bp, Homo sapien
cttgtgggccctgatgtcgtagagg

SEQ ID NO: 5053744 - DNA, 25 bp, Homo sapien
tgggccctgatgtcgtagagggtgg

SEQ ID NO: 5053745 - DNA, 25 bp, Homo sapien
tgtgggccctgatgtcgtagagggt

SEQ ID NO: 5053746 - DNA, 25 bp, Homo sapien
ttctccttcagtgtcagcaccaccc

SEQ ID NO: 5053747 - DNA, 25 bp, Homo sapien
gcgtgcagatgtcaatcttctcctt

SEQ ID NO: 5053748 - DNA, 25 bp, Homo sapien
ctccaggcgcgtgcagatgtcaatc

SEQ ID NO: 5053749 - DNA, 25 bp, Homo sapien
cgcccttctccaggcgcgtgcagat

SEQ ID NO: 5053750 - DNA, 25 bp, Homo sapien
gctggtcctagcacttgcaggacac

SEQ ID NO: 5053751 - DNA, 25 bp, Homo sapien
ttctcactccacacgctgcacctcc

SEQ ID NO: 5053752 - DNA, 25 bp, Homo sapien
ggtcctagcacttgcaggacacacg

SEQ ID NO: 5053753 - DNA, 25 bp, Homo sapien
gtggctggtcctagcacttgcagga

SEQ ID NO: 5053754 - DNA, 25 bp, Homo sapien
tgtaggaggtgaccctgtcagactc

SEQ ID NO: 5053755 - DNA, 25 bp, Homo sapien
atggcagcggctcccctcaaactga

SEQ ID NO: 5053756 - DNA, 25 bp, Homo sapien
cttctctgtggatactatggcagcg

SEQ ID NO: 5053757 - DNA, 25 bp, Homo sapien
ggaggtgaccctgtcagactcccct

SEQ ID NO: 5053758 - DNA, 25 bp, Homo sapien
tctccagggtccacaatggtatctc

SEQ ID NO: 5053759 - DNA, 25 bp, Homo sapien
cagggtccacaatggtatctccagg

SEQ ID NO: 5053760 - DNA, 25 bp, Homo sapien
tccagggtccacaatggtatctcca

SEQ ID NO: 5053761 - DNA, 25 bp, Homo sapien
ccagggtccacaatggtatctccag

SEQ ID NO: 5053762 - DNA, 25 bp, Homo sapien
tgctgtaactgctcgctgggctgcc

SEQ ID NO: 5053763 - DNA, 25 bp, Homo sapien
ttgctgtaactgctcgctgggctgc

SEQ ID NO: 5053764 - DNA, 25 bp, Homo sapien
ctccatgcagagcgtgtggccaaag

SEQ ID NO: 5053765 - DNA, 25 bp, Homo sapien
ccaactccatgcagagcgtgtggcc

SEQ ID NO: 5053766 - DNA, 25 bp, Homo sapien
tgccaactccatgcagagcgtgtgg

SEQ ID NO: 5053767 - DNA, 25 bp, Homo sapien
ccatgcagagcgtgtggccaaaggc

SEQ ID NO: 5053768 - DNA, 25 bp, Homo sapien
ttttaatatgaacccgctgtagaaa

SEQ ID NO: 5053769 - DNA, 25 bp, Homo sapien
tttaatatgaacccgctgtagaaaa

SEQ ID NO: 5053770 - DNA, 25 bp, Homo sapien
ttaatatgaacccgctgtagaaaaa

SEQ ID NO: 5053771 - DNA, 25 bp, Homo sapien
gcccgtgtctggtgctgagtctcct

SEQ ID NO: 5053772 - DNA, 25 bp, Homo sapien
gccttgcgactggagaggaagcact

SEQ ID NO: 5053773 - DNA, 25 bp, Homo sapien
catggagacgtgtccacaaggagcc

SEQ ID NO: 5053774 - DNA, 25 bp, Homo sapien
cacaagctactgtgggattccctgt

SEQ ID NO: 5053775 - DNA, 25 bp, Homo sapien
ggaagcgcaggaagggtccgggctg

SEQ ID NO: 5053776 - DNA, 25 bp, Homo sapien
aagcacagggcttcgggttccgagc

SEQ ID NO: 5053777 - DNA, 25 bp, Homo sapien
gggtcgcgcgggaagcacagggctt

SEQ ID NO: 5053778 - DNA, 25 bp, Homo sapien
agcctctctgagagtggaagcgcag

SEQ ID NO: 5053779 - DNA, 25 bp, Homo sapien
cgggagggggcgctgccgcccgcgg

SEQ ID NO: 5053780 - DNA, 25 bp, Homo sapien
ccgggagggggcgctgccgcccgcg

SEQ ID NO: 5053781 - DNA, 25 bp, Homo sapien
ggttctcctccagtccgcgcctcgt

SEQ ID NO: 5053782 - DNA, 25 bp, Homo sapien
gaagtgccggccactcggttctcct

SEQ ID NO: 5053783 - DNA, 25 bp, Homo sapien
tccagtccgcgcctcgtcgccttcc

SEQ ID NO: 5053784 - DNA, 25 bp, Homo sapien
gccggaagtgccggccactcggttc

SEQ ID NO: 5053785 - DNA, 25 bp, Homo sapien
ttccgggacgctctagacaggctgg

SEQ ID NO: 5053786 - DNA, 25 bp, Homo sapien
ctacttccgggacgctctagacagg

SEQ ID NO: 5053787 - DNA, 25 bp, Homo sapien
gctggaggactcagcactcggtggt

SEQ ID NO: 5053788 - DNA, 25 bp, Homo sapien
acaggctggaggactcagcactcgg

SEQ ID NO: 5053789 - DNA, 25 bp, Homo sapien
cttgggcctcttctcgaggaccaag

SEQ ID NO: 5053790 - DNA, 25 bp, Homo sapien
accttgggcctcttctcgaggacca

SEQ ID NO: 5053791 - DNA, 25 bp, Homo sapien
tgggcctcttctcgaggaccaagtc

SEQ ID NO: 5053792 - DNA, 25 bp, Homo sapien
ggcctcttctcgaggaccaagtcca

SEQ ID NO: 5053793 - DNA, 25 bp, Homo sapien
gaagacaggatctccagggaacccg

SEQ ID NO: 5053794 - DNA, 25 bp, Homo sapien
aaaaattacacacagggatgtgtgt

SEQ ID NO: 5053795 - DNA, 25 bp, Homo sapien
ttccagcatgggaccgtgtggggcc

SEQ ID NO: 5053796 - DNA, 25 bp, Homo sapien
tcatgccctgcactaggtggaagac

SEQ ID NO: 5053797 - DNA, 25 bp, Homo sapien
ggactagaacccagggccgctggat

SEQ ID NO: 5053798 - DNA, 25 bp, Homo sapien
cctcagggacgggatcacttggtct

SEQ ID NO: 5053799 - DNA, 25 bp, Homo sapien
agggacgggatcacttggtctccca

SEQ ID NO: 5053800 - DNA, 25 bp, Homo sapien
taccacctcagggacgggatcactt

SEQ ID NO: 5053801 - DNA, 25 bp, Homo sapien
cttggatctcttctcaaagaccaag

SEQ ID NO: 5053802 - DNA, 25 bp, Homo sapien
attactcagggaaccttggatctct

SEQ ID NO: 5053803 - DNA, 25 bp, Homo sapien
cagggaaccttggatctcttctcaa

SEQ ID NO: 5053804 - DNA, 25 bp, Homo sapien
gaaccttggatctcttctcaaagac

SEQ ID NO: 5053805 - DNA, 25 bp, Homo sapien
ttgatggtacccattttagggagac

SEQ ID NO: 5053806 - DNA, 25 bp, Homo sapien
gatgttaacgctggctgttccagag

SEQ ID NO: 5053807 - DNA, 25 bp, Homo sapien
gaccaaggctttatcatcagatgaa

SEQ ID NO: 5053808 - DNA, 25 bp, Homo sapien
catcttctggttggcaatcgcttgc

SEQ ID NO: 5053809 - DNA, 25 bp, Homo sapien
taacttcggaaagcccttgccaaga

SEQ ID NO: 5053810 - DNA, 25 bp, Homo sapien
gaggcataatctgggtcttgaggac

SEQ ID NO: 5053811 - DNA, 25 bp, Homo sapien
gccaagaggagggttccactcagat

SEQ ID NO: 5053812 - DNA, 25 bp, Homo sapien
gaggccatataaagtcacctgaggc

SEQ ID NO: 5053813 - DNA, 25 bp, Homo sapien
gctaagaagtggtttttggggcaca

SEQ ID NO: 5053814 - DNA, 25 bp, Homo sapien
acacggtcacaaaagcagccaccga

SEQ ID NO: 5053815 - DNA, 25 bp, Homo sapien
tcttctgaaacacacggtcacaaaa

SEQ ID NO: 5053816 - DNA, 25 bp, Homo sapien
ggagacatgggacaggaagcctcag

SEQ ID NO: 5053817 - DNA, 25 bp, Homo sapien
aggtgagcaacgaggactgcctgca

SEQ ID NO: 5053818 - DNA, 25 bp, Homo sapien
tctggccatctgtccgcatctgtgt

SEQ ID NO: 5053819 - DNA, 25 bp, Homo sapien
taaacagggcaacatttcggaggca

SEQ ID NO: 5053820 - DNA, 25 bp, Homo sapien
tgctgtgctactcctgcaaagccca

SEQ ID NO: 5053821 - DNA, 25 bp, Homo sapien
gcctcctgaccgtcatcagcaaagg

SEQ ID NO: 5053822 - DNA, 25 bp, Homo sapien
cgcactgcttgcaatcctgaggcca

SEQ ID NO: 5053823 - DNA, 25 bp, Homo sapien
tcggacatctggatagggctgagac

SEQ ID NO: 5053824 - DNA, 25 bp, Homo sapien
catttctgacgctcagcgggtggtc

SEQ ID NO: 5053825 - DNA, 25 bp, Homo sapien
ctgtcaacacctgtgaccatgggct

SEQ ID NO: 5053826 - DNA, 25 bp, Homo sapien
tggctttaaaatggcgtcactctgg

SEQ ID NO: 5053827 - DNA, 25 bp, Homo sapien
caatgtacaaattcaatgggatccc

SEQ ID NO: 5053828 - DNA, 25 bp, Homo sapien
gatctggctggacacgtttgcttac

SEQ ID NO: 5053829 - DNA, 25 bp, Homo sapien
tcctggtaaggaagtcgtaagttgc

SEQ ID NO: 5053830 - DNA, 25 bp, Homo sapien
catcaagacatgagaggcatttctg

SEQ ID NO: 5053831 - DNA, 25 bp, Homo sapien
catttctggtttgaaggctatctga

SEQ ID NO: 5053832 - DNA, 25 bp, Homo sapien
taagttgctattgtcttccagaggc

SEQ ID NO: 5053833 - DNA, 25 bp, Homo sapien
tttacaatatgaggtatagctgaag

SEQ ID NO: 5053834 - DNA, 25 bp, Homo sapien
cagtctttacaatatgaggtatagc

SEQ ID NO: 5053835 - DNA, 25 bp, Homo sapien
ttacaatatgaggtatagctgaaga

SEQ ID NO: 5053836 - DNA, 25 bp, Homo sapien
tgcgagacaacgagatccagaggac

SEQ ID NO: 5053837 - DNA, 25 bp, Homo sapien
taagcacgttttgggaagtcctcag

SEQ ID NO: 5053838 - DNA, 25 bp, Homo sapien
tgagcccgtgctcttcagcggagaa

SEQ ID NO: 5053839 - DNA, 25 bp, Homo sapien
tgcgctggagtgtgtcattagcatc

SEQ ID NO: 5053840 - DNA, 25 bp, Homo sapien
agggtgacaatagagtgtggtgtca

SEQ ID NO: 5053841 - DNA, 25 bp, Homo sapien
cgagggtgacaatagagtgtggtgt

SEQ ID NO: 5053842 - DNA, 25 bp, Homo sapien
gtgacaatagagtgtggtgtcatgt

SEQ ID NO: 5053843 - DNA, 25 bp, Homo sapien
gacgagggtgacaatagagtgtggt

SEQ ID NO: 5053844 - DNA, 25 bp, Homo sapien
tctgtgattcccctgaaaacctctg

SEQ ID NO: 5053845 - DNA, 25 bp, Homo sapien
cagggctcgtgaattctgattccgc

SEQ ID NO: 5053846 - DNA, 25 bp, Homo sapien
gggtgcatgccttaaaaattgtgga

SEQ ID NO: 5053847 - DNA, 25 bp, Homo sapien
aatagtgttaaatgcgccacagaga

SEQ ID NO: 5053848 - DNA, 25 bp, Homo sapien
gagatgcttccgacctttcaggtga

SEQ ID NO: 5053849 - DNA, 25 bp, Homo sapien
tttcaggtgacgcaggaacactggg

SEQ ID NO: 5053850 - DNA, 25 bp, Homo sapien
gaggcctaagtaccactcatggaga

SEQ ID NO: 5053851 - DNA, 25 bp, Homo sapien
gattcataaattcccacacgtgtgt

SEQ ID NO: 5053852 - DNA, 25 bp, Homo sapien
ccactctgggtacaagttctcagga

SEQ ID NO: 5053853 - DNA, 25 bp, Homo sapien
tgcctatgacctagaagtccctctg

SEQ ID NO: 5053854 - DNA, 25 bp, Homo sapien
cacagtcacttagatttggctcaga

SEQ ID NO: 5053855 - DNA, 25 bp, Homo sapien
taaaacccagttgcaggctgaccac

SEQ ID NO: 5053856 - DNA, 25 bp, Homo sapien
aatctgtagaaactgtgcttatcac

SEQ ID NO: 5053857 - DNA, 25 bp, Homo sapien
taatctgtagaaactgtgcttatca

SEQ ID NO: 5053858 - DNA, 25 bp, Homo sapien
atctgtagaaactgtgcttatcact

SEQ ID NO: 5053859 - DNA, 25 bp, Homo sapien
tactctctcgatggctaaggtctgt

SEQ ID NO: 5053860 - DNA, 25 bp, Homo sapien
tagatgtagaagcaaccggtgtgag

SEQ ID NO: 5053861 - DNA, 25 bp, Homo sapien
cataccacagaagcgactgagggca

SEQ ID NO: 5053862 - DNA, 25 bp, Homo sapien
tataacctgatgtgtaacaatcgct

SEQ ID NO: 5053863 - DNA, 25 bp, Homo sapien
tttctgggcctacagcaccacaggc

SEQ ID NO: 5053864 - DNA, 25 bp, Homo sapien
cctaatgcctcaccttacagctggg

SEQ ID NO: 5053865 - DNA, 25 bp, Homo sapien
ggagacaccaggctactaggacact

SEQ ID NO: 5053866 - DNA, 25 bp, Homo sapien
cctgctgggcgttcccttgttggag

SEQ ID NO: 5053867 - DNA, 25 bp, Homo sapien
gaggtgtctgcacagtgtccaggtg

SEQ ID NO: 5053868 - DNA, 25 bp, Homo sapien
ctgccactcggagaagttagagggc

SEQ ID NO: 5053869 - DNA, 25 bp, Homo sapien
tggaagtgaaccagtgccttgtcct

SEQ ID NO: 5053870 - DNA, 25 bp, Homo sapien
cttgtcctggcggagccactggagc

SEQ ID NO: 5053871 - DNA, 25 bp, Homo sapien
gaccccatgagtgagctgtgccaca

SEQ ID NO: 5053872 - DNA, 25 bp, Homo sapien
gaggtgcctgaggagcaccttccgc

SEQ ID NO: 5053873 - DNA, 25 bp, Homo sapien
cagagggcgcccctggtgtgcttct

SEQ ID NO: 5053874 - DNA, 25 bp, Homo sapien
tctctcccctcagaccccatgagtg

SEQ ID NO: 5053875 - DNA, 25 bp, Homo sapien
ccgagttgcagaggtctcggaagca

SEQ ID NO: 5053876 - DNA, 25 bp, Homo sapien
tcagagttccgagttgcagaggtct

SEQ ID NO: 5053877 - DNA, 25 bp, Homo sapien
gagcgggtcaccacggggctctggt

SEQ ID NO: 5053878 - DNA, 25 bp, Homo sapien
cagcagaagatcaggtgggcggccc

SEQ ID NO: 5053879 - DNA, 25 bp, Homo sapien
caggtgtagcacttgagggcctcac

SEQ ID NO: 5053880 - DNA, 25 bp, Homo sapien
gcttgcagcgggtaatggtcctgca

SEQ ID NO: 5053881 - DNA, 25 bp, Homo sapien
tgtgtcctctggcttgcagcgggta

SEQ ID NO: 5053882 - DNA, 25 bp, Homo sapien
cgtcaccagcgtggtcatgcaggct

SEQ ID NO: 5053883 - DNA, 25 bp, Homo sapien
acagcccatgctccaggctgccacg

SEQ ID NO: 5053884 - DNA, 25 bp, Homo sapien
gctgcacagcccagcgagaggccat

SEQ ID NO: 5053885 - DNA, 25 bp, Homo sapien
agctgcacagcccagcgagaggcca

SEQ ID NO: 5053886 - DNA, 25 bp, Homo sapien
gctccaggctgccacgagcagcagc

SEQ ID NO: 5053887 - DNA, 25 bp, Homo sapien
tgctccgtgctcagaagtgatgaga

SEQ ID NO: 5053888 - DNA, 25 bp, Homo sapien
gctccgtgctcagaagtgatgagag

SEQ ID NO: 5053889 - DNA, 25 bp, Homo sapien
tcttcaaggcattcggggctgggcc

SEQ ID NO: 5053890 - DNA, 25 bp, Homo sapien
cttcaaggcattcggggctgggccg

SEQ ID NO: 5053891 - DNA, 25 bp, Homo sapien
ttcaaggcattcggggctgggccgc

SEQ ID NO: 5053892 - DNA, 25 bp, Homo sapien
ttcttcaaggcattcggggctgggc

SEQ ID NO: 5053893 - DNA, 25 bp, Homo sapien
agtgggaggagcgtgagggccccgc

SEQ ID NO: 5053894 - DNA, 25 bp, Homo sapien
gaggctgttcagagcgggcgccccg

SEQ ID NO: 5053895 - DNA, 25 bp, Homo sapien
tacagtcggaggctcaagagtggga

SEQ ID NO: 5053896 - DNA, 25 bp, Homo sapien
tgagggccccgcagtggaggctgtt

SEQ ID NO: 5053897 - DNA, 25 bp, Homo sapien
gcacaggacttggtcaccgtggagt

SEQ ID NO: 5053898 - DNA, 25 bp, Homo sapien
gagggcttacacttgctggcacagg

SEQ ID NO: 5053899 - DNA, 25 bp, Homo sapien
agctcagtattgcagcaggacacgg

SEQ ID NO: 5053900 - DNA, 25 bp, Homo sapien
agggtctggccgatgccatccacat

SEQ ID NO: 5053901 - DNA, 25 bp, Homo sapien
cttgcacatggtttcgttggtggtg

SEQ ID NO: 5053902 - DNA, 25 bp, Homo sapien
tgacacagtccgacactcctgtggg

SEQ ID NO: 5053903 - DNA, 25 bp, Homo sapien
gctccggacagacgtagcagcgcag

SEQ ID NO: 5053904 - DNA, 25 bp, Homo sapien
tatctcccgggagtagagtgtggtc

SEQ ID NO: 5053905 - DNA, 25 bp, Homo sapien
ccagcgccaggagcgccagccgcgt

SEQ ID NO: 5053906 - DNA, 25 bp, Homo sapien
gcaccagcgccaggagcgccagccg

SEQ ID NO: 5053907 - DNA, 25 bp, Homo sapien
cgccaggagcgccagccgcgtcccc

SEQ ID NO: 5053908 - DNA, 25 bp, Homo sapien
ccagctctccgcaggcagccagcac

SEQ ID NO: 5053909 - DNA, 25 bp, Homo sapien
ctggcggggacagcagacaccaagt

SEQ ID NO: 5053910 - DNA, 25 bp, Homo sapien
gacagcagacaccaagtgaggtggc

SEQ ID NO: 5053911 - DNA, 25 bp, Homo sapien
tcaccccaggcttgcctggcgggga

SEQ ID NO: 5053912 - DNA, 25 bp, Homo sapien
ggtcccggcccactcctctgtgctc

SEQ ID NO: 5053913 - DNA, 25 bp, Homo sapien
gcacatcaccaggatcagagtcaat

SEQ ID NO: 5053914 - DNA, 25 bp, Homo sapien
cagcttgtgacttgtattgggatca

SEQ ID NO: 5053915 - DNA, 25 bp, Homo sapien
ctcagcatgtaacaaatggcagggc

SEQ ID NO: 5053916 - DNA, 25 bp, Homo sapien
aaggctcaccttgtgaccaggatca

SEQ ID NO: 5053917 - DNA, 25 bp, Homo sapien
agattgaggcaagactccacgcagg

SEQ ID NO: 5053918 - DNA, 25 bp, Homo sapien
tccacgcaggacttccctaggacaa

SEQ ID NO: 5053919 - DNA, 25 bp, Homo sapien
tccctaggacaagcggtgctggacg

SEQ ID NO: 5053920 - DNA, 25 bp, Homo sapien
tgtaccacacgatccaatcacattt

SEQ ID NO: 5053921 - DNA, 25 bp, Homo sapien
agcctatgtggcacatcttggtgac

SEQ ID NO: 5053922 - DNA, 25 bp, Homo sapien
gtctggcagcaagcgatggatacgt

SEQ ID NO: 5053923 - DNA, 25 bp, Homo sapien
gaggcaaatcctcggtgttgctgag

SEQ ID NO: 5053924 - DNA, 25 bp, Homo sapien
gggcagcctatgtggcacatcttgg

SEQ ID NO: 5053925 - DNA, 25 bp, Homo sapien
ccgtgcactggtgacaccatatggc

SEQ ID NO: 5053926 - DNA, 25 bp, Homo sapien
ctccgaagcccgtgcactggtgaca

SEQ ID NO: 5053927 - DNA, 25 bp, Homo sapien
actggtgacaccatatggcttcggc

SEQ ID NO: 5053928 - DNA, 25 bp, Homo sapien
tgggagcaccctccgaagcccgtgc

SEQ ID NO: 5053929 - DNA, 25 bp, Homo sapien
gcagccctggctcgcagtgtgatgt

SEQ ID NO: 5053930 - DNA, 25 bp, Homo sapien
agccagctggttgcatccttgccca

SEQ ID NO: 5053931 - DNA, 25 bp, Homo sapien
gctcgcagtgtgatgtcccagggca

SEQ ID NO: 5053932 - DNA, 25 bp, Homo sapien
cagctggagccagctggttgcatcc

SEQ ID NO: 5053933 - DNA, 25 bp, Homo sapien
caggactgggtaagcagagtcccta

SEQ ID NO: 5053934 - DNA, 25 bp, Homo sapien
ggactgggtaagcagagtccctaac

SEQ ID NO: 5053935 - DNA, 25 bp, Homo sapien
ccaggactgggtaagcagagtccct

SEQ ID NO: 5053936 - DNA, 25 bp, Homo sapien
actgggtaagcagagtccctaacac

SEQ ID NO: 5053937 - DNA, 25 bp, Homo sapien
caatggtgtggccataaggatgtga

SEQ ID NO: 5053938 - DNA, 25 bp, Homo sapien
gtggccataaggatgtgagggctgc

SEQ ID NO: 5053939 - DNA, 25 bp, Homo sapien
gtcacaggcaccaggcgcaggccct

SEQ ID NO: 5053940 - DNA, 25 bp, Homo sapien
gacaaggccaatggtgtggccataa

SEQ ID NO: 5053941 - DNA, 25 bp, Homo sapien
caggcccctgccacgggccagagtc

SEQ ID NO: 5053942 - DNA, 25 bp, Homo sapien
atcctccatcgaggcaccacggaga

SEQ ID NO: 5053943 - DNA, 25 bp, Homo sapien
gaggcaccacggagaaggtgacaca

SEQ ID NO: 5053944 - DNA, 25 bp, Homo sapien
tcctgtgggcggaatcctccatcga

SEQ ID NO: 5053945 - DNA, 25 bp, Homo sapien
tccaacctagtgacagccaataagt

SEQ ID NO: 5053946 - DNA, 25 bp, Homo sapien
aataagtcggacacgcctctactca

SEQ ID NO: 5053947 - DNA, 25 bp, Homo sapien
tgtcacatccaacctagtgacagcc

SEQ ID NO: 5053948 - DNA, 25 bp, Homo sapien
gctccccttggctgtcacatccaac

SEQ ID NO: 5053949 - DNA, 25 bp, Homo sapien
gggtagcagggaagatgggcaggag

SEQ ID NO: 5053950 - DNA, 25 bp, Homo sapien
gtggggggtagcagggaagatgggc

SEQ ID NO: 5053951 - DNA, 25 bp, Homo sapien
ggtagcagggaagatgggcaggagg

SEQ ID NO: 5053952 - DNA, 25 bp, Homo sapien
gggggtagcagggaagatgggcagg

SEQ ID NO: 5053953 - DNA, 25 bp, Homo sapien
gggccagccgtagcagacgtgggca

SEQ ID NO: 5053954 - DNA, 25 bp, Homo sapien
tgccctgccaagagaagacgttcag

SEQ ID NO: 5053955 - DNA, 25 bp, Homo sapien
tcaaggggccagctggttttgttga

SEQ ID NO: 5053956 - DNA, 25 bp, Homo sapien
gggacagggccagccgtagcagacg

SEQ ID NO: 5053957 - DNA, 25 bp, Homo sapien
agctgcaggctcaggacggcggcca

SEQ ID NO: 5053958 - DNA, 25 bp, Homo sapien
gctgcaggctcaggacggcggccag

SEQ ID NO: 5053959 - DNA, 25 bp, Homo sapien
ggctcaggacggcggccagcaggag

SEQ ID NO: 5053960 - DNA, 25 bp, Homo sapien
tgcaggctcaggacggcggccagca

SEQ ID NO: 5053961 - DNA, 25 bp, Homo sapien
ctcctggtgaggtcgggctgtcggc

SEQ ID NO: 5053962 - DNA, 25 bp, Homo sapien
gttctcctggtgaggtcgggctgtc

SEQ ID NO: 5053963 - DNA, 25 bp, Homo sapien
tctcctggtgaggtcgggctgtcgg

SEQ ID NO: 5053964 - DNA, 25 bp, Homo sapien
ttctcctggtgaggtcgggctgtcg

SEQ ID NO: 5053965 - DNA, 25 bp, Homo sapien
ttatttacggctcggtgagacgacg

SEQ ID NO: 5053966 - DNA, 25 bp, Homo sapien
tttacggctcggtgagacgacgctg

SEQ ID NO: 5053967 - DNA, 25 bp, Homo sapien
ttgatttatttacggctcggtgaga

SEQ ID NO: 5053968 - DNA, 25 bp, Homo sapien
ctgttgatttatttacggctcggtg

SEQ ID NO: 5053969 - DNA, 25 bp, Homo sapien
gaaaagctggcatatccaccgaggg

SEQ ID NO: 5053970 - DNA, 25 bp, Homo sapien
ggaggccttactctaccactcaggg

SEQ ID NO: 5053971 - DNA, 25 bp, Homo sapien
ggtttgaagaggagagcagaccacc

SEQ ID NO: 5053972 - DNA, 25 bp, Homo sapien
gagagatgccatccattcagcgggc

SEQ ID NO: 5053973 - DNA, 25 bp, Homo sapien
caaggtccctttgcagaagactggc

SEQ ID NO: 5053974 - DNA, 25 bp, Homo sapien
gcatatagactcactgcaaggagac

SEQ ID NO: 5053975 - DNA, 25 bp, Homo sapien
tgggtgtgccctcagcaagactctg

SEQ ID NO: 5053976 - DNA, 25 bp, Homo sapien
gggtcctgcatcaaagctctggaga

SEQ ID NO: 5053977 - DNA, 25 bp, Homo sapien
tgctggacccgaaaaagcttctgtg

SEQ ID NO: 5053978 - DNA, 25 bp, Homo sapien
ggctgatcagcccatcaaagccgga

SEQ ID NO: 5053979 - DNA, 25 bp, Homo sapien
tcagtaggaagcgtgactaggcctg

SEQ ID NO: 5053980 - DNA, 25 bp, Homo sapien
cccacacagcatcgaaaggtcaagg

SEQ ID NO: 5053981 - DNA, 25 bp, Homo sapien
atcatacacagtctcgaagcagcgg

SEQ ID NO: 5053982 - DNA, 25 bp, Homo sapien
cgttgcagaggtcgtactggcagca

SEQ ID NO: 5053983 - DNA, 25 bp, Homo sapien
tggacgcgtgcttggagtagccatc

SEQ ID NO: 5053984 - DNA, 25 bp, Homo sapien
agcggggcacgcaggacttactgac

SEQ ID NO: 5053985 - DNA, 25 bp, Homo sapien
ggcagggcagaacctccccttcgtg

SEQ ID NO: 5053986 - DNA, 25 bp, Homo sapien
tggagctcccagacaggatccggga

SEQ ID NO: 5053987 - DNA, 25 bp, Homo sapien
cggtgagccagctccgctaagaggg

SEQ ID NO: 5053988 - DNA, 25 bp, Homo sapien
cccagacaggatccgggaacaggag

SEQ ID NO: 5053989 - DNA, 25 bp, Homo sapien
gttgaagcagttgtctccgttgtag

SEQ ID NO: 5053990 - DNA, 25 bp, Homo sapien
agtaggcaaccatagccgggcagcg

SEQ ID NO: 5053991 - DNA, 25 bp, Homo sapien
tgtctccgttgtaggcacacacgtg

SEQ ID NO: 5053992 - DNA, 25 bp, Homo sapien
gcgcgtggtcatgcagtaggcaacc

SEQ ID NO: 5053993 - DNA, 25 bp, Homo sapien
ggttgtcgctgggaattctagcctc

SEQ ID NO: 5053994 - DNA, 25 bp, Homo sapien
tcagcccatctgccctcaaagtggg

SEQ ID NO: 5053995 - DNA, 25 bp, Homo sapien
gggttggcagatgggcgggaaggga

SEQ ID NO: 5053996 - DNA, 25 bp, Homo sapien
ccttccctactgtcagcccatctgc

SEQ ID NO: 5053997 - DNA, 25 bp, Homo sapien
aggaccaccaggatcagggtgagca

SEQ ID NO: 5053998 - DNA, 25 bp, Homo sapien
gtaagcccatgaggaccaccaggat

SEQ ID NO: 5053999 - DNA, 25 bp, Homo sapien
ggaccaccaggatcagggtgagcag

SEQ ID NO: 5054000 - DNA, 25 bp, Homo sapien
cagaggtaagcccatgaggaccacc

SEQ ID NO: 5054001 - DNA, 25 bp, Homo sapien
ctggtctactgggagtgctgcaacc

SEQ ID NO: 5054002 - DNA, 25 bp, Homo sapien
ggtcaacagcagctagccctggatc

SEQ ID NO: 5054003 - DNA, 25 bp, Homo sapien
atccaactcagggtggtgcgcagag

SEQ ID NO: 5054004 - DNA, 25 bp, Homo sapien
tggatccaactcaggtggcgcacag

SEQ ID NO: 5054005 - DNA, 25 bp, Homo sapien
aagctgggtctcttctcgctgttcc

SEQ ID NO: 5054006 - DNA, 25 bp, Homo sapien
tggttggtgcagaggtcccatggga

SEQ ID NO: 5054007 - DNA, 25 bp, Homo sapien
tccagagccctggttagggttgtct

SEQ ID NO: 5054008 - DNA, 25 bp, Homo sapien
caggactgggcccaaaagctgggtc

SEQ ID NO: 5054009 - DNA, 25 bp, Homo sapien
tctggtgtttggaacgggaatgccc

SEQ ID NO: 5054010 - DNA, 25 bp, Homo sapien
ttggattacggctctcctacccctg

SEQ ID NO: 5054011 - DNA, 25 bp, Homo sapien
ggccctcggtctccgtcctggagga

SEQ ID NO: 5054012 - DNA, 25 bp, Homo sapien
tgccgggatactcggccctcggtct

SEQ ID NO: 5054013 - DNA, 25 bp, Homo sapien
agcgggactatcagggtgacctcac

SEQ ID NO: 5054014 - DNA, 25 bp, Homo sapien
cttcccgagaacaacaaatccgtct

SEQ ID NO: 5054015 - DNA, 25 bp, Homo sapien
aaacactgcggtcccaggtcgaggg

SEQ ID NO: 5054016 - DNA, 25 bp, Homo sapien
agagtcaggcctgcggcttcgagct

SEQ ID NO: 5054017 - DNA, 25 bp, Homo sapien
aggtaccgccgcgcctgggagtcac

SEQ ID NO: 5054018 - DNA, 25 bp, Homo sapien
cgctcgccggtaggtgcctgcctga

SEQ ID NO: 5054019 - DNA, 25 bp, Homo sapien
tgaccttcaccaccgtgaggtaccg

SEQ ID NO: 5054020 - DNA, 25 bp, Homo sapien
gcctgggagtcacccgcggccgctc

SEQ ID NO: 5054021 - DNA, 25 bp, Homo sapien
gtgtcccgcagcacccgtgccgcat

SEQ ID NO: 5054022 - DNA, 25 bp, Homo sapien
aacagcccgcccagcgcgagctcac

SEQ ID NO: 5054023 - DNA, 25 bp, Homo sapien
cagcgcgagctcaccgcaggccccg

SEQ ID NO: 5054024 - DNA, 25 bp, Homo sapien
gcctgatgctcaccgcaggcccagc

SEQ ID NO: 5054025 - DNA, 25 bp, Homo sapien
aggctatcttcaccgcgtcccgcgg

SEQ ID NO: 5054026 - DNA, 25 bp, Homo sapien
cgcgtcgtttgtcggccggcaccag

SEQ ID NO: 5054027 - DNA, 25 bp, Homo sapien
agctccggaactggcgccctttggc

SEQ ID NO: 5054028 - DNA, 25 bp, Homo sapien
gtgttcagcccggacactccgcagg

SEQ ID NO: 5054029 - DNA, 25 bp, Homo sapien
cttctggtccctgtagcaaagctgg

SEQ ID NO: 5054030 - DNA, 25 bp, Homo sapien
cgtggtccctctcaccatcataatg

SEQ ID NO: 5054031 - DNA, 25 bp, Homo sapien
tggtccctctcaccatcataatgtt

SEQ ID NO: 5054032 - DNA, 25 bp, Homo sapien
ggtccctgtagcaaagctggaaggc

SEQ ID NO: 5054033 - DNA, 25 bp, Homo sapien
gctgcatcctctgtggggtggcttc

SEQ ID NO: 5054034 - DNA, 25 bp, Homo sapien
cagactttcggggaagccctcagcc

SEQ ID NO: 5054035 - DNA, 25 bp, Homo sapien
tgagtacaaaaataaacggcaacaa

SEQ ID NO: 5054036 - DNA, 25 bp, Homo sapien
tgtggggcctgctccaagtcatcag

SEQ ID NO: 5054037 - DNA, 25 bp, Homo sapien
agggcggtgcgggtgggtgcagcgt

SEQ ID NO: 5054038 - DNA, 25 bp, Homo sapien
tgggggctaagatgacggccaggag

SEQ ID NO: 5054039 - DNA, 25 bp, Homo sapien
ctgtgggcgagggcggtgcgggtgg

SEQ ID NO: 5054040 - DNA, 25 bp, Homo sapien
cggtgcgggtgggtgcagcgttgtg

SEQ ID NO: 5054041 - DNA, 25 bp, Homo sapien
gtgtgcacgactccgcacagtcctt

SEQ ID NO: 5054042 - DNA, 25 bp, Homo sapien
ctgggtgtgcacgactccgcacagt

SEQ ID NO: 5054043 - DNA, 25 bp, Homo sapien
agctgggtgtgcacgactccgcaca

SEQ ID NO: 5054044 - DNA, 25 bp, Homo sapien
tgggtgtgcacgactccgcacagtc

SEQ ID NO: 5054045 - DNA, 25 bp, Homo sapien
cacaaccttccagccaacacccaca

SEQ ID NO: 5054046 - DNA, 25 bp, Homo sapien
ggacacctggacagatgctacccac

SEQ ID NO: 5054047 - DNA, 25 bp, Homo sapien
gtgtggtcaggccaggcagccacct

SEQ ID NO: 5054048 - DNA, 25 bp, Homo sapien
accttccagccaacacccacaacag

SEQ ID NO: 5054049 - DNA, 25 bp, Homo sapien
tggagctggtgcacacgtggcagcg

SEQ ID NO: 5054050 - DNA, 25 bp, Homo sapien
tggtcttgcagaagcgagagctggc

SEQ ID NO: 5054051 - DNA, 25 bp, Homo sapien
agaagcgagagctggccgggcagac

SEQ ID NO: 5054052 - DNA, 25 bp, Homo sapien
cagaatgcttgcagttgctggagct

SEQ ID NO: 5054053 - DNA, 25 bp, Homo sapien
gagggagtccggctcagcgggccca

SEQ ID NO: 5054054 - DNA, 25 bp, Homo sapien
gagtccggctcagcgggcccaacag

SEQ ID NO: 5054055 - DNA, 25 bp, Homo sapien
cggggagggagtccggctcagcggg

SEQ ID NO: 5054056 - DNA, 25 bp, Homo sapien
gcgggcccaacagaggcctcctggt

SEQ ID NO: 5054057 - DNA, 25 bp, Homo sapien
ccctgtctagggtgtgttgcaagcc

SEQ ID NO: 5054058 - DNA, 25 bp, Homo sapien
caaggtctcagggagctctgcgact

SEQ ID NO: 5054059 - DNA, 25 bp, Homo sapien
tggcagggactagatggccgctctc

SEQ ID NO: 5054060 - DNA, 25 bp, Homo sapien
ctctgcgactgccaagaggacactg

SEQ ID NO: 5054061 - DNA, 25 bp, Homo sapien
tggccctgtagccacagccagggct

SEQ ID NO: 5054062 - DNA, 25 bp, Homo sapien
cagggctgcaaggagcagcaatgct

SEQ ID NO: 5054063 - DNA, 25 bp, Homo sapien
ctggccctgtagccacagccagggc

SEQ ID NO: 5054064 - DNA, 25 bp, Homo sapien
ggctgcaaggagcagcaatgctgtc

SEQ ID NO: 5054065 - DNA, 25 bp, Homo sapien
ctctgatgtcgtctgggagcagtgc

SEQ ID NO: 5054066 - DNA, 25 bp, Homo sapien
ccaaggccttataggcacgggctgg

SEQ ID NO: 5054067 - DNA, 25 bp, Homo sapien
cctgcattgccaaggccttataggc

SEQ ID NO: 5054068 - DNA, 25 bp, Homo sapien
gagcagtgcgggcccctgcattgcc

SEQ ID NO: 5054069 - DNA, 25 bp, Homo sapien
tgcccacgaggatgagctgcccatc

SEQ ID NO: 5054070 - DNA, 25 bp, Homo sapien
gagaaagcgggtgcttctgatgcca

SEQ ID NO: 5054071 - DNA, 25 bp, Homo sapien
cccatcccaggtggtcctagcaaaa

SEQ ID NO: 5054072 - DNA, 25 bp, Homo sapien
tggtcctagcaaaagcatgaacagc

SEQ ID NO: 5054073 - DNA, 25 bp, Homo sapien
catcagggtattggcagcagaaatg

SEQ ID NO: 5054074 - DNA, 25 bp, Homo sapien
ggttggtaccatcagggtattggca

SEQ ID NO: 5054075 - DNA, 25 bp, Homo sapien
ggtaccatcagggtattggcagcag

SEQ ID NO: 5054076 - DNA, 25 bp, Homo sapien
ctggttggtaccatcagggtattgg

SEQ ID NO: 5054077 - DNA, 25 bp, Homo sapien
ttgttggagctgtctaagcagggaa

SEQ ID NO: 5054078 - DNA, 25 bp, Homo sapien
tgccaggccgcttttctgtctcttt

SEQ ID NO: 5054079 - DNA, 25 bp, Homo sapien
tttctagaggctgccctgatcctct

SEQ ID NO: 5054080 - DNA, 25 bp, Homo sapien
gtctttctagaggctgccctgatcc

SEQ ID NO: 5054081 - DNA, 25 bp, Homo sapien
cccaggtgccaggccgcttttctgt

SEQ ID NO: 5054082 - DNA, 25 bp, Homo sapien
ccctgggagaggcaccatttcagca

SEQ ID NO: 5054083 - DNA, 25 bp, Homo sapien
acaggcggggctggcaccttccctg

SEQ ID NO: 5054084 - DNA, 25 bp, Homo sapien
ccatttcagcacctaggaccggcat

SEQ ID NO: 5054085 - DNA, 25 bp, Homo sapien
ctggctggtggtgcccacaggcggg

SEQ ID NO: 5054086 - DNA, 25 bp, Homo sapien
agtgccaaagtctgggcgatgaggg

SEQ ID NO: 5054087 - DNA, 25 bp, Homo sapien
agggagaatccctcagggtgtgaac

SEQ ID NO: 5054088 - DNA, 25 bp, Homo sapien
tctgggcgatgagggagaatccctc

SEQ ID NO: 5054089 - DNA, 25 bp, Homo sapien
ggagaatccctcagggtgtgaactg

SEQ ID NO: 5054090 - DNA, 25 bp, Homo sapien
agtcctcactgggtaccgggccagg

SEQ ID NO: 5054091 - DNA, 25 bp, Homo sapien
cacagggccatgtgagttgtcacca

SEQ ID NO: 5054092 - DNA, 25 bp, Homo sapien
tttgaggctggagcgtcccagcatg

SEQ ID NO: 5054093 - DNA, 25 bp, Homo sapien
cacatgacttgggtggaggaggctt

SEQ ID NO: 5054094 - DNA, 25 bp, Homo sapien
gcccactcgagggcagggacagtct

SEQ ID NO: 5054095 - DNA, 25 bp, Homo sapien
tgcccactcgagggcagggacagtc

SEQ ID NO: 5054096 - DNA, 25 bp, Homo sapien
tcccaggtaataaggcacgagcatt

SEQ ID NO: 5054097 - DNA, 25 bp, Homo sapien
ttggacccggcatctctgagaatga

SEQ ID NO: 5054098 - DNA, 25 bp, Homo sapien
gctcagtgtggactcaagattccca

SEQ ID NO: 5054099 - DNA, 25 bp, Homo sapien
gacaggcagagctcgccgctttatt

SEQ ID NO: 5054100 - DNA, 25 bp, Homo sapien
ggcccaaagggtctgacggctacac

SEQ ID NO: 5054101 - DNA, 25 bp, Homo sapien
cacgtcctttctttcagggccgctg

SEQ ID NO: 5054102 - DNA, 25 bp, Homo sapien
gtcctttctttcagggccgctgtgg

SEQ ID NO: 5054103 - DNA, 25 bp, Homo sapien
cacgcacgggagttctgttaggctg

SEQ ID NO: 5054104 - DNA, 25 bp, Homo sapien
cgtggcagctgagactaggaccctg

SEQ ID NO: 5054105 - DNA, 25 bp, Homo sapien
agggtcctgcaggtattgatcttga

SEQ ID NO: 5054106 - DNA, 25 bp, Homo sapien
cacgctgagcgctccaggcgcaggg

SEQ ID NO: 5054107 - DNA, 25 bp, Homo sapien
gtattgatcttgaagcaggcgtccc

SEQ ID NO: 5054108 - DNA, 25 bp, Homo sapien
aggacacagagagggcgcggctgtc

SEQ ID NO: 5054109 - DNA, 25 bp, Homo sapien
actgcggttgcactggctaccctgg

SEQ ID NO: 5054110 - DNA, 25 bp, Homo sapien
tggctgcgatgctggcccacagggt

SEQ ID NO: 5054111 - DNA, 25 bp, Homo sapien
aggacttcatgaccaggatgccacc

SEQ ID NO: 5054112 - DNA, 25 bp, Homo sapien
acacagtatttgtcagtgggggcac

SEQ ID NO: 5054113 - DNA, 25 bp, Homo sapien
gtatttgtcagtgggggcacactcc

SEQ ID NO: 5054114 - DNA, 25 bp, Homo sapien
tgctcatggccgcagcacacgtggc

SEQ ID NO: 5054115 - DNA, 25 bp, Homo sapien
accagggactcgcagtgctcatggc

SEQ ID NO: 5054116 - DNA, 25 bp, Homo sapien
cgggctccatggacaaggctgagat

SEQ ID NO: 5054117 - DNA, 25 bp, Homo sapien
ccccagcttccaacgacattgagga

SEQ ID NO: 5054118 - DNA, 25 bp, Homo sapien
cacgggctccatggacaaggctgag

SEQ ID NO: 5054119 - DNA, 25 bp, Homo sapien
acattgaggactgggtccacgggct

SEQ ID NO: 5054120 - DNA, 25 bp, Homo sapien
gaggtagtgagaaaggtgccctata

SEQ ID NO: 5054121 - DNA, 25 bp, Homo sapien
ctgtagaggtttcctgtaggagtgt

SEQ ID NO: 5054122 - DNA, 25 bp, Homo sapien
gagcgtcctgcagagtgtcctgtag

SEQ ID NO: 5054123 - DNA, 25 bp, Homo sapien
tacaggtgtcctatagggatcgtcc

SEQ ID NO: 5054124 - DNA, 25 bp, Homo sapien
cctgtaaggcaggtcctgtaggggt

SEQ ID NO: 5054125 - DNA, 25 bp, Homo sapien
cagtgtcctataggggtgtccagta

SEQ ID NO: 5054126 - DNA, 25 bp, Homo sapien
cctgtacagtgtcctataggggtgt

SEQ ID NO: 5054127 - DNA, 25 bp, Homo sapien
tgtggaggtttcctgtaggagcgcc

SEQ ID NO: 5054128 - DNA, 25 bp, Homo sapien
tatcctgtaggggggtcctatagga

SEQ ID NO: 5054129 - DNA, 25 bp, Homo sapien
gagtatcctgtaggggggtcctata

SEQ ID NO: 5054130 - DNA, 25 bp, Homo sapien
tagggagtgtcttcaagcagtgccc

SEQ ID NO: 5054131 - DNA, 25 bp, Homo sapien
atcctgtaggggggtcctataggag

SEQ ID NO: 5054132 - DNA, 25 bp, Homo sapien
cctgtaggcttcctgtagggtggtc

SEQ ID NO: 5054133 - DNA, 25 bp, Homo sapien
cggtgctctgtagggaatgtcctgt

SEQ ID NO: 5054134 - DNA, 25 bp, Homo sapien
tcctgtagggagtgtcccgtagcag

SEQ ID NO: 5054135 - DNA, 25 bp, Homo sapien
ttctataacgggtgccctgtaggct

SEQ ID NO: 5054136 - DNA, 25 bp, Homo sapien
attaccgccacttctccgtagggat

SEQ ID NO: 5054137 - DNA, 25 bp, Homo sapien
taagccctcgggctgtgatgggaat

SEQ ID NO: 5054138 - DNA, 25 bp, Homo sapien
gatcctggtaatccctaagccctcg

SEQ ID NO: 5054139 - DNA, 25 bp, Homo sapien
cacttctccgtagggatcctggtaa

SEQ ID NO: 5054140 - DNA, 25 bp, Homo sapien
gtgctgtctgaccgtcagcatcata

SEQ ID NO: 5054141 - DNA, 25 bp, Homo sapien
gctgtctgaccgtcagcatcatatg

SEQ ID NO: 5054142 - DNA, 25 bp, Homo sapien
tgctgtctgaccgtcagcatcatat

SEQ ID NO: 5054143 - DNA, 25 bp, Homo sapien
ggtgctgtctgaccgtcagcatcat

SEQ ID NO: 5054144 - DNA, 25 bp, Homo sapien
aagcagcagcaccaggagaagcctc

SEQ ID NO: 5054145 - DNA, 25 bp, Homo sapien
cagcacacacagcagccagaagcag

SEQ ID NO: 5054146 - DNA, 25 bp, Homo sapien
gcacacacagcagccagaagcagca

SEQ ID NO: 5054147 - DNA, 25 bp, Homo sapien
gcagcagcaccaggagaagcctcat

SEQ ID NO: 5054148 - DNA, 25 bp, Homo sapien
cgaatcaacactgccacttctgggt

SEQ ID NO: 5054149 - DNA, 25 bp, Homo sapien
tgatatcgggtacagaaactgcact

SEQ ID NO: 5054150 - DNA, 25 bp, Homo sapien
gcacttggagtcaccatctggctaa

SEQ ID NO: 5054151 - DNA, 25 bp, Homo sapien
tgaaatcatagcaaccaggtaccag

SEQ ID NO: 5054152 - DNA, 25 bp, Homo sapien
gatcccaggtaggtgaagctaccgg

SEQ ID NO: 5054153 - DNA, 25 bp, Homo sapien
cctgagggaaacaatccctgcacca

SEQ ID NO: 5054154 - DNA, 25 bp, Homo sapien
accggtgagtcattccagtctggga

SEQ ID NO: 5054155 - DNA, 25 bp, Homo sapien
gcaccactatgttcagaagatggaa

SEQ ID NO: 5054156 - DNA, 25 bp, Homo sapien
taaattgtaccttgagtcttaccca

SEQ ID NO: 5054157 - DNA, 25 bp, Homo sapien
gagttgcttgaaacttgttactcct

SEQ ID NO: 5054158 - DNA, 25 bp, Homo sapien
ggttcgcagcaagaacagttggact

SEQ ID NO: 5054159 - DNA, 25 bp, Homo sapien
cagttggactcaggataaattgtac

SEQ ID NO: 5054160 - DNA, 25 bp, Homo sapien
tgtttgtcagcaacccagtctatgg

SEQ ID NO: 5054161 - DNA, 25 bp, Homo sapien
ccaaggtgacgataatagcagggcc

SEQ ID NO: 5054162 - DNA, 25 bp, Homo sapien
taactctagctaggtgtgctcccaa

SEQ ID NO: 5054163 - DNA, 25 bp, Homo sapien
ggctgaaatctagtcaccaaggtga

SEQ ID NO: 5054164 - DNA, 25 bp, Homo sapien
gaatgatgccatagggatttcccct

SEQ ID NO: 5054165 - DNA, 25 bp, Homo sapien
tacactctcaaactgggtgcttcct

SEQ ID NO: 5054166 - DNA, 25 bp, Homo sapien
agacagtctggctgggtacactctc

SEQ ID NO: 5054167 - DNA, 25 bp, Homo sapien
cctttcatgggggaacaaatgctct

SEQ ID NO: 5054168 - DNA, 25 bp, Homo sapien
ggccagttcaggaggggtcaactct

SEQ ID NO: 5054169 - DNA, 25 bp, Homo sapien
aggaggggtcaactctctctgctgg

SEQ ID NO: 5054170 - DNA, 25 bp, Homo sapien
gccagttcaggaggggtcaactctc

SEQ ID NO: 5054171 - DNA, 25 bp, Homo sapien
cctggcaaaccctggtcctagaggc

SEQ ID NO: 5054172 - DNA, 25 bp, Homo sapien
ccttgtatggccacacgaggagcct

SEQ ID NO: 5054173 - DNA, 25 bp, Homo sapien
tcagggcatgctcgagctgcctagg

SEQ ID NO: 5054174 - DNA, 25 bp, Homo sapien
ggatcccgcttaatgactctgacag

SEQ ID NO: 5054175 - DNA, 25 bp, Homo sapien
caatatgaagctgtagaccatcttt

SEQ ID NO: 5054176 - DNA, 25 bp, Homo sapien
tatgaagctgtagaccatctttatg

SEQ ID NO: 5054177 - DNA, 25 bp, Homo sapien
ggcctcaatatgaagctgtagacca

SEQ ID NO: 5054178 - DNA, 25 bp, Homo sapien
gaagctgtagaccatctttatgtcc

SEQ ID NO: 5054179 - DNA, 25 bp, Homo sapien
ctaggacagaagccgggtttccatc

SEQ ID NO: 5054180 - DNA, 25 bp, Homo sapien
acagaagccgggtttccatctggct

SEQ ID NO: 5054181 - DNA, 25 bp, Homo sapien
ccgcagcccatgcacgtggtgcagc

SEQ ID NO: 5054182 - DNA, 25 bp, Homo sapien
catctggcttggtccgcagcccatg

SEQ ID NO: 5054183 - DNA, 25 bp, Homo sapien
gccaaagggcacgtggtagaagttc

SEQ ID NO: 5054184 - DNA, 25 bp, Homo sapien
agtagaggaacacgcgcaccaatgt

SEQ ID NO: 5054185 - DNA, 25 bp, Homo sapien
gctcaggcctcgggaacaaggcggg

SEQ ID NO: 5054186 - DNA, 25 bp, Homo sapien
gccaaagccaaagggcacgtggtag

SEQ ID NO: 5054187 - DNA, 25 bp, Homo sapien
ccagctgggatgtggtagttctgaa

SEQ ID NO: 5054188 - DNA, 25 bp, Homo sapien
tgggggcatccatagaaagggtcct

SEQ ID NO: 5054189 - DNA, 25 bp, Homo sapien
ggggcatccatagaaagggtcctca

SEQ ID NO: 5054190 - DNA, 25 bp, Homo sapien
gggcatccatagaaagggtcctcag

SEQ ID NO: 5054191 - DNA, 25 bp, Homo sapien
gtgggggcatccatagaaagggtcc

SEQ ID NO: 5054192 - DNA, 25 bp, Homo sapien
aggtctccttgagggccgcacgcag

SEQ ID NO: 5054193 - DNA, 25 bp, Homo sapien
gtgcagacatgcataccctgagaac

SEQ ID NO: 5054194 - DNA, 25 bp, Homo sapien
agacatgcataccctgagaacgaca

SEQ ID NO: 5054195 - DNA, 25 bp, Homo sapien
gcagacatgcataccctgagaacga

SEQ ID NO: 5054196 - DNA, 25 bp, Homo sapien
acaacctccctgtgaggggtgcaga

SEQ ID NO: 5054197 - DNA, 25 bp, Homo sapien
ccgtgtgacattggcaggcagtgcc

SEQ ID NO: 5054198 - DNA, 25 bp, Homo sapien
caggcttggcatcaccctctctggg

SEQ ID NO: 5054199 - DNA, 25 bp, Homo sapien
ccatggcaacctgcaaacgtgttta

SEQ ID NO: 5054200 - DNA, 25 bp, Homo sapien
acgtgtttatcacatcacaatccca

SEQ ID NO: 5054201 - DNA, 25 bp, Homo sapien
tcaacaggagctccgccacgatgct

SEQ ID NO: 5054202 - DNA, 25 bp, Homo sapien
tggcatctggcgacagttccgcatt

SEQ ID NO: 5054203 - DNA, 25 bp, Homo sapien
ccacgatgctggtgtactgttgagg

SEQ ID NO: 5054204 - DNA, 25 bp, Homo sapien
ttgatggcatctggcgacagttccg

SEQ ID NO: 5054205 - DNA, 25 bp, Homo sapien
tgagctggacggtggatttgaacat

SEQ ID NO: 5054206 - DNA, 25 bp, Homo sapien
tggacggtggatttgaacatgacct

SEQ ID NO: 5054207 - DNA, 25 bp, Homo sapien
gctggacggtggatttgaacatgac

SEQ ID NO: 5054208 - DNA, 25 bp, Homo sapien
agctggacggtggatttgaacatga

SEQ ID NO: 5054209 - DNA, 25 bp, Homo sapien
gcgttgggcgacagcacttctggat

SEQ ID NO: 5054210 - DNA, 25 bp, Homo sapien
cacagcgttgggcgacagcacttct

SEQ ID NO: 5054211 - DNA, 25 bp, Homo sapien
ctgcacagcgttgggcgacagcact

SEQ ID NO: 5054212 - DNA, 25 bp, Homo sapien
agcgttgggcgacagcacttctgga

SEQ ID NO: 5054213 - DNA, 25 bp, Homo sapien
caagaacacgccacatttgtgccca

SEQ ID NO: 5054214 - DNA, 25 bp, Homo sapien
tttgtgcccacgatgttgtctgtag

SEQ ID NO: 5054215 - DNA, 25 bp, Homo sapien
tgtgcccacgatgttgtctgtaggc

SEQ ID NO: 5054216 - DNA, 25 bp, Homo sapien
tgcccacgatgttgtctgtaggcca

SEQ ID NO: 5054217 - DNA, 25 bp, Homo sapien
ggcagcatcacacacaccatgcctg

SEQ ID NO: 5054218 - DNA, 25 bp, Homo sapien
cggcagcatcacacacaccatgcct

SEQ ID NO: 5054219 - DNA, 25 bp, Homo sapien
ccggcagcatcacacacaccatgcc

SEQ ID NO: 5054220 - DNA, 25 bp, Homo sapien
tcttccaaaggatgcagagtgccgg

SEQ ID NO: 5054221 - DNA, 25 bp, Homo sapien
tccaaaggatgcagagtgccgggac

SEQ ID NO: 5054222 - DNA, 25 bp, Homo sapien
cttccaaaggatgcagagtgccggg

SEQ ID NO: 5054223 - DNA, 25 bp, Homo sapien
ttccaaaggatgcagagtgccggga

SEQ ID NO: 5054224 - DNA, 25 bp, Homo sapien
ctggaaggtctggtgtacttccagg

SEQ ID NO: 5054225 - DNA, 25 bp, Homo sapien
ggcggctctcgtgcccagtgcctgt

SEQ ID NO: 5054226 - DNA, 25 bp, Homo sapien
ggacccgggcggctctcgtgcccag

SEQ ID NO: 5054227 - DNA, 25 bp, Homo sapien
cgggcggctctcgtgcccagtgcct

SEQ ID NO: 5054228 - DNA, 25 bp, Homo sapien
acccgggcggctctcgtgcccagtg

SEQ ID NO: 5054229 - DNA, 25 bp, Homo sapien
tttgcagggacagccagggcactgc

SEQ ID NO: 5054230 - DNA, 25 bp, Homo sapien
ctttgcagggacagccagggcactg

SEQ ID NO: 5054231 - DNA, 25 bp, Homo sapien
gcagggacagccagggcactgccat

SEQ ID NO: 5054232 - DNA, 25 bp, Homo sapien
tgcagggacagccagggcactgcca

SEQ ID NO: 5054233 - DNA, 25 bp, Homo sapien
ctggtgccttgccttcgagagggat

SEQ ID NO: 5054234 - DNA, 25 bp, Homo sapien
caccctgttcagctgcaatcctttt

SEQ ID NO: 5054235 - DNA, 25 bp, Homo sapien
caatccttttatcttgcctggtgcc

SEQ ID NO: 5054236 - DNA, 25 bp, Homo sapien
cacgtcatgggagaactggccctgg

SEQ ID NO: 5054237 - DNA, 25 bp, Homo sapien
ggtatctgtgagagccccataaaca

SEQ ID NO: 5054238 - DNA, 25 bp, Homo sapien
gtcacagggtgactggcctgagtcc

SEQ ID NO: 5054239 - DNA, 25 bp, Homo sapien
ggaaagcaacctgcggtcacagggt

SEQ ID NO: 5054240 - DNA, 25 bp, Homo sapien
taggatcccatgatctagtgctgac

SEQ ID NO: 5054241 - DNA, 25 bp, Homo sapien
tttcatgggggaacaaacgctctga

SEQ ID NO: 5054242 - DNA, 25 bp, Homo sapien
gctctgatcctcatcagctaccagg

SEQ ID NO: 5054243 - DNA, 25 bp, Homo sapien
cctttcatgggggaacaaacgctct

SEQ ID NO: 5054244 - DNA, 25 bp, Homo sapien
ctctgatcctcatcagctaccagga

SEQ ID NO: 5054245 - DNA, 25 bp, Homo sapien
ctttttagtctaccctgcaggatcg

SEQ ID NO: 5054246 - DNA, 25 bp, Homo sapien
gaggacccaacactcgctgcttgaa

SEQ ID NO: 5054247 - DNA, 25 bp, Homo sapien
ctgacagcatcctcgggaccttctc

SEQ ID NO: 5054248 - DNA, 25 bp, Homo sapien
acttcctatccctgcacaggagcac

SEQ ID NO: 5054249 - DNA, 25 bp, Homo sapien
tcagggcatgctcgagctgcctggg

SEQ ID NO: 5054250 - DNA, 25 bp, Homo sapien
ccgcttaatgactctgacactgtct

SEQ ID NO: 5054251 - DNA, 25 bp, Homo sapien
ggatcccgcttaatgactctgacac

SEQ ID NO: 5054252 - DNA, 25 bp, Homo sapien
aatgactctgacactgtctgcacag

SEQ ID NO: 5054253 - DNA, 25 bp, Homo sapien
tgactcaggaagctgtgcacgtggg

SEQ ID NO: 5054254 - DNA, 25 bp, Homo sapien
tatttgacaagcctggcaagcccca

SEQ ID NO: 5054255 - DNA, 25 bp, Homo sapien
gcacccttgcatggcctcatgagga

SEQ ID NO: 5054256 - DNA, 25 bp, Homo sapien
tagagtcaagctgtccagagggcac

SEQ ID NO: 5054257 - DNA, 25 bp, Homo sapien
caatatgaagctgtagaccatcttt

SEQ ID NO: 5054258 - DNA, 25 bp, Homo sapien
tatgaagctgtagaccatctttatg

SEQ ID NO: 5054259 - DNA, 25 bp, Homo sapien
ggcctcaatatgaagctgtagacca

SEQ ID NO: 5054260 - DNA, 25 bp, Homo sapien
gaagctgtagaccatctttatgtcc

SEQ ID NO: 5054261 - DNA, 25 bp, Homo sapien
gccaaagggcacgtggtggaagttc

SEQ ID NO: 5054262 - DNA, 25 bp, Homo sapien
ccagcgagtagaggaaaacctgtac

SEQ ID NO: 5054263 - DNA, 25 bp, Homo sapien
ctgatgtctagccagcgctggggat

SEQ ID NO: 5054264 - DNA, 25 bp, Homo sapien
gaacaaggcggcattgcgacccagc

SEQ ID NO: 5054265 - DNA, 25 bp, Homo sapien
ccagctgggatgtggtagttctgaa

SEQ ID NO: 5054266 - DNA, 25 bp, Homo sapien
tgggggcatccatagaaagggtcct

SEQ ID NO: 5054267 - DNA, 25 bp, Homo sapien
ggggcatccatagaaagggtcctca

SEQ ID NO: 5054268 - DNA, 25 bp, Homo sapien
gtgggggcatccatagaaagggtcc

SEQ ID NO: 5054269 - DNA, 25 bp, Homo sapien
gggcatccatagaaagggtcctcag

SEQ ID NO: 5054270 - DNA, 25 bp, Homo sapien
agggcagctcggtggttgccttctg

SEQ ID NO: 5054271 - DNA, 25 bp, Homo sapien
agccagctcaaagagcgtcatcagc

SEQ ID NO: 5054272 - DNA, 25 bp, Homo sapien
tcaccctctctgggtggggctggtt

SEQ ID NO: 5054273 - DNA, 25 bp, Homo sapien
ctgggtggggctggttgctggcctg

SEQ ID NO: 5054274 - DNA, 25 bp, Homo sapien
gggtggggctggttgctggcctgac

SEQ ID NO: 5054275 - DNA, 25 bp, Homo sapien
accctctctgggtggggctggttgc

SEQ ID NO: 5054276 - DNA, 25 bp, Homo sapien
gagctccgccacgatgcctgtgtag

SEQ ID NO: 5054277 - DNA, 25 bp, Homo sapien
ccacgatgcctgtgtagtgttgagg

SEQ ID NO: 5054278 - DNA, 25 bp, Homo sapien
ggccttgatggcttctagtgacagt

SEQ ID NO: 5054279 - DNA, 25 bp, Homo sapien
ctagtgacagttccgccttcaacag

SEQ ID NO: 5054280 - DNA, 25 bp, Homo sapien
ctggtagattttctggatacagttg

SEQ ID NO: 5054281 - DNA, 25 bp, Homo sapien
gtagattttctggatacagttgtca

SEQ ID NO: 5054282 - DNA, 25 bp, Homo sapien
tagattttctggatacagttgtcac

SEQ ID NO: 5054283 - DNA, 25 bp, Homo sapien
ggtagattttctggatacagttgtc

SEQ ID NO: 5054284 - DNA, 25 bp, Homo sapien
agctggacggtggatttgaacatga

SEQ ID NO: 5054285 - DNA, 25 bp, Homo sapien
tggacggtggatttgaacatgacct

SEQ ID NO: 5054286 - DNA, 25 bp, Homo sapien
tgagctggacggtggatttgaacat

SEQ ID NO: 5054287 - DNA, 25 bp, Homo sapien
gctggacggtggatttgaacatgac

SEQ ID NO: 5054288 - DNA, 25 bp, Homo sapien
cacggccttgggcgacagcacatct

SEQ ID NO: 5054289 - DNA, 25 bp, Homo sapien
gcacggccttgggcgacagcacatc

SEQ ID NO: 5054290 - DNA, 25 bp, Homo sapien
cttgggcgacagcacatctgggttc

SEQ ID NO: 5054291 - DNA, 25 bp, Homo sapien
acggccttgggcgacagcacatctg

SEQ ID NO: 5054292 - DNA, 25 bp, Homo sapien
caagaacacgccacatttgtgccca

SEQ ID NO: 5054293 - DNA, 25 bp, Homo sapien
tttgtgcccacgatgttgtctgtag

SEQ ID NO: 5054294 - DNA, 25 bp, Homo sapien
tgtgcccacgatgttgtctgtaggc

SEQ ID NO: 5054295 - DNA, 25 bp, Homo sapien
tgcccacgatgttgtctgtaggcca

SEQ ID NO: 5054296 - DNA, 25 bp, Homo sapien
catgcgtggtcctcccaagttgtac

SEQ ID NO: 5054297 - DNA, 25 bp, Homo sapien
cacacacaccatgcgtggtcctccc

SEQ ID NO: 5054298 - DNA, 25 bp, Homo sapien
acaccatgcgtggtcctcccaagtt

SEQ ID NO: 5054299 - DNA, 25 bp, Homo sapien
accatgcgtggtcctcccaagttgt

SEQ ID NO: 5054300 - DNA, 25 bp, Homo sapien
ctggaaggtctggtgcatctccagg

SEQ ID NO: 5054301 - DNA, 25 bp, Homo sapien
tggaaggtctggtgcatctccaggt

SEQ ID NO: 5054302 - DNA, 25 bp, Homo sapien
ggcttcaaacggcagcaccgtccta

SEQ ID NO: 5054303 - DNA, 25 bp, Homo sapien
cgtcctaggggcccgagcggctcta

SEQ ID NO: 5054304 - DNA, 25 bp, Homo sapien
ttcaaacggcagcaccgtcctaggg

SEQ ID NO: 5054305 - DNA, 25 bp, Homo sapien
ccgtcctaggggcccgagcggctct

SEQ ID NO: 5054306 - DNA, 25 bp, Homo sapien
ggttctgtaggttatcagatgaatg

SEQ ID NO: 5054307 - DNA, 25 bp, Homo sapien
tattggttctgtaggttatcagatg

SEQ ID NO: 5054308 - DNA, 25 bp, Homo sapien
gttctgtaggttatcagatgaatga

SEQ ID NO: 5054309 - DNA, 25 bp, Homo sapien
ttggttctgtaggttatcagatgaa

SEQ ID NO: 5054310 - DNA, 25 bp, Homo sapien
tgtcgagctgatcctgtaaatctga

SEQ ID NO: 5054311 - DNA, 25 bp, Homo sapien
gttaaatgccaacaatgaccacctg

SEQ ID NO: 5054312 - DNA, 25 bp, Homo sapien
tctacggcgggctttggaaatactc

SEQ ID NO: 5054313 - DNA, 25 bp, Homo sapien
taggagaccgtgaaaccctctactc

SEQ ID NO: 5054314 - DNA, 25 bp, Homo sapien
ttccagcagatgtgagcgtctccag

SEQ ID NO: 5054315 - DNA, 25 bp, Homo sapien
tacgaacgaaaagcctgcattccag

SEQ ID NO: 5054316 - DNA, 25 bp, Homo sapien
tgagttgccccagaaacacctagag

SEQ ID NO: 5054317 - DNA, 25 bp, Homo sapien
catggccgcttgctgtttctacgaa

SEQ ID NO: 5054318 - DNA, 25 bp, Homo sapien
caaaagtacatccttccggtcaaag

SEQ ID NO: 5054319 - DNA, 25 bp, Homo sapien
caaggaactctgtacagtgactgtg

SEQ ID NO: 5054320 - DNA, 25 bp, Homo sapien
tttacatactacaggcaaggaactc

SEQ ID NO: 5054321 - DNA, 25 bp, Homo sapien
tgaggccaacttcataagtcagctt

SEQ ID NO: 5054322 - DNA, 25 bp, Homo sapien
gctaccatgcctggccctggctcag

SEQ ID NO: 5054323 - DNA, 25 bp, Homo sapien
atatgtccaggaatttacccatttt

SEQ ID NO: 5054324 - DNA, 25 bp, Homo sapien
gccctggctcagtcttgagagggtg

SEQ ID NO: 5054325 - DNA, 25 bp, Homo sapien
taccatgcctggccctggctcagtc

SEQ ID NO: 5054326 - DNA, 25 bp, Homo sapien
cagcacagggtgcacgttcatcggc

SEQ ID NO: 5054327 - DNA, 25 bp, Homo sapien
tggctcccggaggttaggaatcaac

SEQ ID NO: 5054328 - DNA, 25 bp, Homo sapien
tccagaggcccgtaatgacagtggg

SEQ ID NO: 5054329 - DNA, 25 bp, Homo sapien
gatcaaggtgctcctcactaccggt

SEQ ID NO: 5054330 - DNA, 25 bp, Homo sapien
gggtccagctgtcacggaatccaaa

SEQ ID NO: 5054331 - DNA, 25 bp, Homo sapien
tgtcacggaatccaaaaccaagcgg

SEQ ID NO: 5054332 - DNA, 25 bp, Homo sapien
cgcagaagccgggtccagctgtcac

SEQ ID NO: 5054333 - DNA, 25 bp, Homo sapien
aagccgggtccagctgtcacggaat

SEQ ID NO: 5054334 - DNA, 25 bp, Homo sapien
catgtttcattaaaccagaggcctg

SEQ ID NO: 5054335 - DNA, 25 bp, Homo sapien
gggagatgccccatatggccacaaa

SEQ ID NO: 5054336 - DNA, 25 bp, Homo sapien
gacgctatctgcaggtaccggaatg

SEQ ID NO: 5054337 - DNA, 25 bp, Homo sapien
tcgggccagtcggtaagaagttcca

SEQ ID NO: 5054338 - DNA, 25 bp, Homo sapien
atctatcccaaggagccggggtagg

SEQ ID NO: 5054339 - DNA, 25 bp, Homo sapien
cgaacacaacgaggactgtccaggt

SEQ ID NO: 5054340 - DNA, 25 bp, Homo sapien
gtggctcaggcgccacctcactggg

SEQ ID NO: 5054341 - DNA, 25 bp, Homo sapien
tcagtgacggtcaccccgacctggt

SEQ ID NO: 5054342 - DNA, 25 bp, Homo sapien
cgcaggcctccccgaatgtttccaa

SEQ ID NO: 5054343 - DNA, 25 bp, Homo sapien
cccggctcagccacgcgcggcggaa

SEQ ID NO: 5054344 - DNA, 25 bp, Homo sapien
gtttccaaagatctggggcgggagc

SEQ ID NO: 5054345 - DNA, 25 bp, Homo sapien
gggagcgggcggagactgccgccag

SEQ ID NO: 5054346 - DNA, 25 bp, Homo sapien
gctgcccttctgggtgtggagcgag

SEQ ID NO: 5054347 - DNA, 25 bp, Homo sapien
tggctgcccttctgggtgtggagcg

SEQ ID NO: 5054348 - DNA, 25 bp, Homo sapien
ctggctgcccttctgggtgtggagc

SEQ ID NO: 5054349 - DNA, 25 bp, Homo sapien
ggctgcccttctgggtgtggagcga

SEQ ID NO: 5054350 - DNA, 25 bp, Homo sapien
ggagtcttacggtccaacatcagga

SEQ ID NO: 5054351 - DNA, 25 bp, Homo sapien
tgtgcaatttcagtgcggccgatgg

SEQ ID NO: 5054352 - DNA, 25 bp, Homo sapien
cacagtgtatgggagcccctgactc

SEQ ID NO: 5054353 - DNA, 25 bp, Homo sapien
tccccagggagaccgtgtcagtagg

SEQ ID NO: 5054354 - DNA, 25 bp, Homo sapien
tacggaggctattttcacagcaggt

SEQ ID NO: 5054355 - DNA, 25 bp, Homo sapien
tgaggttcataatctgggcacagag

SEQ ID NO: 5054356 - DNA, 25 bp, Homo sapien
actgtggccgccttgttacggaggc

SEQ ID NO: 5054357 - DNA, 25 bp, Homo sapien
gcaggtcatgtccagcttctcaatc

SEQ ID NO: 5054358 - DNA, 25 bp, Homo sapien
ccgtagcactggaagcactcaaggc

SEQ ID NO: 5054359 - DNA, 25 bp, Homo sapien
ccaggactcaccatcgatagtgcca

SEQ ID NO: 5054360 - DNA, 25 bp, Homo sapien
gggtccaggacaccgtagcactgga

SEQ ID NO: 5054361 - DNA, 25 bp, Homo sapien
gactcaccatcgatagtgccagtga

SEQ ID NO: 5054362 - DNA, 25 bp, Homo sapien
tatgggtgcattgagggcacgtgtg

SEQ ID NO: 5054363 - DNA, 25 bp, Homo sapien
gggctagtgaccttcatggtcttgg

SEQ ID NO: 5054364 - DNA, 25 bp, Homo sapien
cttcatggtcttgggtatgggtgca

SEQ ID NO: 5054365 - DNA, 25 bp, Homo sapien
tgagggcacgtgtggcacagaggct

SEQ ID NO: 5054366 - DNA, 25 bp, Homo sapien
ttctccccgctaggctgggctccgg

SEQ ID NO: 5054367 - DNA, 25 bp, Homo sapien
ccacaggccatcagcgtccggggtt

SEQ ID NO: 5054368 - DNA, 25 bp, Homo sapien
ggtgggcggagagtggccgccacag

SEQ ID NO: 5054369 - DNA, 25 bp, Homo sapien
aagcagagggacattcgaacgggcc

SEQ ID NO: 5054370 - DNA, 25 bp, Homo sapien
cctgggagcactgcgggagactggg

SEQ ID NO: 5054371 - DNA, 25 bp, Homo sapien
agcctgggagcactgcgggagactg

SEQ ID NO: 5054372 - DNA, 25 bp, Homo sapien
aagatatcacaaggcaaacggaggc

SEQ ID NO: 5054373 - DNA, 25 bp, Homo sapien
ggagcactgcgggagactggggctt

SEQ ID NO: 5054374 - DNA, 25 bp, Homo sapien
aaaccaagcagctggtgacgcacag

SEQ ID NO: 5054375 - DNA, 25 bp, Homo sapien
tttgttgaccttgagagggaggccc

SEQ ID NO: 5054376 - DNA, 25 bp, Homo sapien
cctcatcctgtgtgggaggccagca

SEQ ID NO: 5054377 - DNA, 25 bp, Homo sapien
ggctcctcggcaagttagtggcaag

SEQ ID NO: 5054378 - DNA, 25 bp, Homo sapien
caggaccaccgcattgcagaggtct

SEQ ID NO: 5054379 - DNA, 25 bp, Homo sapien
ctgggagtccacaacggcacttgta

SEQ ID NO: 5054380 - DNA, 25 bp, Homo sapien
agcaggagctgtacgcacagggccc

SEQ ID NO: 5054381 - DNA, 25 bp, Homo sapien
cccttgcagcaagagatctgggagt

SEQ ID NO: 5054382 - DNA, 25 bp, Homo sapien
ggagggagagcttgttctcccctct

SEQ ID NO: 5054383 - DNA, 25 bp, Homo sapien
gagagcttgttctcccctctcactt

SEQ ID NO: 5054384 - DNA, 25 bp, Homo sapien
agaggagggagagcttgttctcccc

SEQ ID NO: 5054385 - DNA, 25 bp, Homo sapien
ggagagcttgttctcccctctcact

SEQ ID NO: 5054386 - DNA, 25 bp, Homo sapien
cccatccaggaaggggcacgagacc

SEQ ID NO: 5054387 - DNA, 25 bp, Homo sapien
acgagaccacgctgcaggaggcccc

SEQ ID NO: 5054388 - DNA, 25 bp, Homo sapien
ttccaagaccgccaagcatctgtag

SEQ ID NO: 5054389 - DNA, 25 bp, Homo sapien
agaccgccaagcatctgtagcagcg

SEQ ID NO: 5054390 - DNA, 25 bp, Homo sapien
accagcaggaccagggacaaggtct

SEQ ID NO: 5054391 - DNA, 25 bp, Homo sapien
tctctccatgctcagcagggccacc

SEQ ID NO: 5054392 - DNA, 25 bp, Homo sapien
ctctctccatgctcagcagggccac

SEQ ID NO: 5054393 - DNA, 25 bp, Homo sapien
gcaggaccagggacaaggtcttcat

SEQ ID NO: 5054394 - DNA, 25 bp, Homo sapien
tagaaagcacatacgattaacattc

SEQ ID NO: 5054395 - DNA, 25 bp, Homo sapien
tagtgagaatccataagtttggcag

SEQ ID NO: 5054396 - DNA, 25 bp, Homo sapien
aatgtatgcctgataacctagtgag

SEQ ID NO: 5054397 - DNA, 25 bp, Homo sapien
agtttggcagttcacaacattttta

SEQ ID NO: 5054398 - DNA, 25 bp, Homo sapien
tgctaacaggtatcgagttctctga

SEQ ID NO: 5054399 - DNA, 25 bp, Homo sapien
taataacagcttgtacgagcgcttg

SEQ ID NO: 5054400 - DNA, 25 bp, Homo sapien
taaatacgccgtgaaagacgccatc

SEQ ID NO: 5054401 - DNA, 25 bp, Homo sapien
tatttacacagtgccgcgggtttcc

SEQ ID NO: 5054402 - DNA, 25 bp, Homo sapien
tgaatgagagggtccccagtcaggt

SEQ ID NO: 5054403 - DNA, 25 bp, Homo sapien
gagggtccccagtcaggtcatcaat

SEQ ID NO: 5054404 - DNA, 25 bp, Homo sapien
ggtccccagtcaggtcatcaatgcc

SEQ ID NO: 5054405 - DNA, 25 bp, Homo sapien
agagggtccccagtcaggtcatcaa

SEQ ID NO: 5054406 - DNA, 25 bp, Homo sapien
taaggcgttgtttaatgacctcaaa

SEQ ID NO: 5054407 - DNA, 25 bp, Homo sapien
gtaaggcgttgtttaatgacctcaa

SEQ ID NO: 5054408 - DNA, 25 bp, Homo sapien
agcagtaaggcgttgtttaatgacc

SEQ ID NO: 5054409 - DNA, 25 bp, Homo sapien
cagtaaggcgttgtttaatgacctc

SEQ ID NO: 5054410 - DNA, 25 bp, Homo sapien
catcaacagctagactgggtgagac

SEQ ID NO: 5054411 - DNA, 25 bp, Homo sapien
gaaaaaccatcaacagctagactgg

SEQ ID NO: 5054412 - DNA, 25 bp, Homo sapien
caacagctagactgggtgagacttt

SEQ ID NO: 5054413 - DNA, 25 bp, Homo sapien
aaaccatcaacagctagactgggtg

SEQ ID NO: 5054414 - DNA, 25 bp, Homo sapien
gaacatacatggaatgctgtaccaa

SEQ ID NO: 5054415 - DNA, 25 bp, Homo sapien
acatacatggaatgctgtaccaaac

SEQ ID NO: 5054416 - DNA, 25 bp, Homo sapien
tactgaacatacatggaatgctgta

SEQ ID NO: 5054417 - DNA, 25 bp, Homo sapien
acatactgaacatacatggaatgct

SEQ ID NO: 5054418 - DNA, 25 bp, Homo sapien
ggccaaagccctaaatccatttcag

SEQ ID NO: 5054419 - DNA, 25 bp, Homo sapien
tgcggtctccatgctgaatgcagct

SEQ ID NO: 5054420 - DNA, 25 bp, Homo sapien
ttttcctttccatcagtccagagga

SEQ ID NO: 5054421 - DNA, 25 bp, Homo sapien
gagtttcctgacaccgtttggcaag

SEQ ID NO: 5054422 - DNA, 25 bp, Homo sapien
acctacacaagaaagtagcttcaca

SEQ ID NO: 5054423 - DNA, 25 bp, Homo sapien
cctacacaagaaagtagcttcacat

SEQ ID NO: 5054424 - DNA, 25 bp, Homo sapien
tgcattgcacaacctacacaagaaa

SEQ ID NO: 5054425 - DNA, 25 bp, Homo sapien
gtgcattgcacaacctacacaagaa

SEQ ID NO: 5054426 - DNA, 25 bp, Homo sapien
taaagggtggaatatagactcagga

SEQ ID NO: 5054427 - DNA, 25 bp, Homo sapien
ggtctcaaacgttctcctggcagct

SEQ ID NO: 5054428 - DNA, 25 bp, Homo sapien
gacatgtcagcttaaagcacccaag

SEQ ID NO: 5054429 - DNA, 25 bp, Homo sapien
cggaagacccggcagcatggatgtt

SEQ ID NO: 5054430 - DNA, 25 bp, Homo sapien
gcttctggcttccgaagttcctgtt

SEQ ID NO: 5054431 - DNA, 25 bp, Homo sapien
ggcttccgaagttcctgtttgagaa

SEQ ID NO: 5054432 - DNA, 25 bp, Homo sapien
ctggcttccgaagttcctgtttgag

SEQ ID NO: 5054433 - DNA, 25 bp, Homo sapien
cttccgaagttcctgtttgagaaga

SEQ ID NO: 5054434 - DNA, 25 bp, Homo sapien
tcctgtttgaggagacagccgtcgt

SEQ ID NO: 5054435 - DNA, 25 bp, Homo sapien
tgtttgaggagacagccgtcatccc

SEQ ID NO: 5054436 - DNA, 25 bp, Homo sapien
cctgtttgaggagacagccgtcgtc

SEQ ID NO: 5054437 - DNA, 25 bp, Homo sapien
tgtttgaggagacagccgtcgtccc

SEQ ID NO: 5054438 - DNA, 25 bp, Homo sapien
gtccctgtttgaggagacagccgtc

SEQ ID NO: 5054439 - DNA, 25 bp, Homo sapien
tccctgtttgaggagacagccgtcg

SEQ ID NO: 5054440 - DNA, 25 bp, Homo sapien
tgtttgaggagacagccgtcgtccc

SEQ ID NO: 5054441 - DNA, 25 bp, Homo sapien
tttgaggagacagccgtcgtccccg

SEQ ID NO: 5054442 - DNA, 25 bp, Homo sapien
taggtctgagtcagcatgttctgca

SEQ ID NO: 5054443 - DNA, 25 bp, Homo sapien
ggtctgagtcagcatgttctgcatc

SEQ ID NO: 5054444 - DNA, 25 bp, Homo sapien
gtctgagtcagcatgttctgcatcc

SEQ ID NO: 5054445 - DNA, 25 bp, Homo sapien
ttaggtctgagtcagcatgttctgc

SEQ ID NO: 5054446 - DNA, 25 bp, Homo sapien
tcaggggagcaagctcagaagcccc

SEQ ID NO: 5054447 - DNA, 25 bp, Homo sapien
gcaagctcagaagccccgtgggaag

SEQ ID NO: 5054448 - DNA, 25 bp, Homo sapien
aagtgactttatttctccgcagaag

SEQ ID NO: 5054449 - DNA, 25 bp, Homo sapien
caggactcaaaagtgactttatttc

SEQ ID NO: 5054450 - DNA, 25 bp, Homo sapien
cacgtcgacctttaagatcccagag

SEQ ID NO: 5054451 - DNA, 25 bp, Homo sapien
aaatccttctcgcagcagtccacgt

SEQ ID NO: 5054452 - DNA, 25 bp, Homo sapien
ggcacacatcttgttcaccgagtga

SEQ ID NO: 5054453 - DNA, 25 bp, Homo sapien
ttaacgaagtcacaggaggaggcac

SEQ ID NO: 5054454 - DNA, 25 bp, Homo sapien
ctgctgggatcggtgattcggacac

SEQ ID NO: 5054455 - DNA, 25 bp, Homo sapien
cgtgtcggacggctggcactgcttt

SEQ ID NO: 5054456 - DNA, 25 bp, Homo sapien
tgattcggacactggcacacaccgt

SEQ ID NO: 5054457 - DNA, 25 bp, Homo sapien
cacacaccgtgtcggacggctggca

SEQ ID NO: 5054458 - DNA, 25 bp, Homo sapien
aacacacacacgggctatacagacc

SEQ ID NO: 5054459 - DNA, 25 bp, Homo sapien
ctggcagtttgaggggagcccctat

SEQ ID NO: 5054460 - DNA, 25 bp, Homo sapien
gcaggcactcctgggagagcccgac

SEQ ID NO: 5054461 - DNA, 25 bp, Homo sapien
ccccatgacccctggagggggagca

SEQ ID NO: 5054462 - DNA, 25 bp, Homo sapien
aggtgacggatgaccaagggcttcc

SEQ ID NO: 5054463 - DNA, 25 bp, Homo sapien
acggatgaccaagggcttccgtgcg

SEQ ID NO: 5054464 - DNA, 25 bp, Homo sapien
ggaggcccgggaggctctcagaggt

SEQ ID NO: 5054465 - DNA, 25 bp, Homo sapien
ccgtgggttccaagctgtgaaggac

SEQ ID NO: 5054466 - DNA, 25 bp, Homo sapien
gtgcggtgggaaccgtcagagggtg

SEQ ID NO: 5054467 - DNA, 25 bp, Homo sapien
acacccggctctcccgcggcgcctc

SEQ ID NO: 5054468 - DNA, 25 bp, Homo sapien
gcgtgggctctatgcgaagtgcggt

SEQ ID NO: 5054469 - DNA, 25 bp, Homo sapien
ctctatgcgaagtgcggtgggaacc

SEQ ID NO: 5054470 - DNA, 25 bp, Homo sapien
cagcgccaggccgaggcccttcatg

SEQ ID NO: 5054471 - DNA, 25 bp, Homo sapien
cgggcgccgagcacagcaggacggc

SEQ ID NO: 5054472 - DNA, 25 bp, Homo sapien
aggccgaggcccttcatggctgcag

SEQ ID NO: 5054473 - DNA, 25 bp, Homo sapien
gccaggccgaggcccttcatggctg

SEQ ID NO: 5054474 - DNA, 25 bp, Homo sapien
gcttggggcgcgggtcctctggggc

SEQ ID NO: 5054475 - DNA, 25 bp, Homo sapien
ggcgcgggtcctctggggcgcaagc

SEQ ID NO: 5054476 - DNA, 25 bp, Homo sapien
cttggggcgcgggtcctctggggcg

SEQ ID NO: 5054477 - DNA, 25 bp, Homo sapien
ggggcgcgggtcctctggggcgcaa

SEQ ID NO: 5054478 - DNA, 25 bp, Homo sapien
gaccggaatccgggcgcagcctcgt

SEQ ID NO: 5054479 - DNA, 25 bp, Homo sapien
gggtgtccgcactccgggctcgggc

SEQ ID NO: 5054480 - DNA, 25 bp, Homo sapien
tcgtctttcggggaacgcagccgca

SEQ ID NO: 5054481 - DNA, 25 bp, Homo sapien
ttcggtctccctgcggaccggaatc

SEQ ID NO: 5054482 - DNA, 25 bp, Homo sapien
cacctgagttacagagaagaaggca

SEQ ID NO: 5054483 - DNA, 25 bp, Homo sapien
gggtaggacagagacactctcatgc

SEQ ID NO: 5054484 - DNA, 25 bp, Homo sapien
gagacactctcatgcacacaataag

SEQ ID NO: 5054485 - DNA, 25 bp, Homo sapien
gagctgtggtgctcagataaggaga

SEQ ID NO: 5054486 - DNA, 25 bp, Homo sapien
accagagggtggtatatgaatccct

SEQ ID NO: 5054487 - DNA, 25 bp, Homo sapien
gaatccctgtggctggtaatttact

SEQ ID NO: 5054488 - DNA, 25 bp, Homo sapien
tattaataacattaaggctggtggg

SEQ ID NO: 5054489 - DNA, 25 bp, Homo sapien
atttcttgtagccagcgacaccaga

SEQ ID NO: 5054490 - DNA, 25 bp, Homo sapien
agatgtcccataggcgaccccaaat

SEQ ID NO: 5054491 - DNA, 25 bp, Homo sapien
caaagactgcattcaggggcgctct

SEQ ID NO: 5054492 - DNA, 25 bp, Homo sapien
gtttgggaagatggtggtagataca

SEQ ID NO: 5054493 - DNA, 25 bp, Homo sapien
ggtagatacacccacaaatagtctc

SEQ ID NO: 5054494 - DNA, 25 bp, Homo sapien
ctgaaaatccgcagcccctttgctc

SEQ ID NO: 5054495 - DNA, 25 bp, Homo sapien
ccctttgctctgaggcagttgctga

SEQ ID NO: 5054496 - DNA, 25 bp, Homo sapien
gaatgtggctctgcacaaggcagag

SEQ ID NO: 5054497 - DNA, 25 bp, Homo sapien
cagttgctgacttgaggctggctga

SEQ ID NO: 5054498 - DNA, 25 bp, Homo sapien
caggacgtaaccactagtgaggcca

SEQ ID NO: 5054499 - DNA, 25 bp, Homo sapien
acgtgagaggcacagggcccattcc

SEQ ID NO: 5054500 - DNA, 25 bp, Homo sapien
ccacctggctggtgaatggtaagcg

SEQ ID NO: 5054501 - DNA, 25 bp, Homo sapien
cagcaccacgaccagggacgtgaga

SEQ ID NO: 5054502 - DNA, 25 bp, Homo sapien
tggacagcccaccacgaacaggtgt

SEQ ID NO: 5054503 - DNA, 25 bp, Homo sapien
agtcttgcagtaaaggtggccacca

SEQ ID NO: 5054504 - DNA, 25 bp, Homo sapien
cagcccagatggtgagcatgtgcct

SEQ ID NO: 5054505 - DNA, 25 bp, Homo sapien
gaacagactaatacgtggccactgg

SEQ ID NO: 5054506 - DNA, 25 bp, Homo sapien
tgcgtccccatagtcactagagcca

SEQ ID NO: 5054507 - DNA, 25 bp, Homo sapien
gtcactagagccacctcgacacttg

SEQ ID NO: 5054508 - DNA, 25 bp, Homo sapien
tccaaaggaccaactgtgagaaagc

SEQ ID NO: 5054509 - DNA, 25 bp, Homo sapien
tgagaaagccattgcggtggcccgg

SEQ ID NO: 5054510 - DNA, 25 bp, Homo sapien
acctaacctcctatcctctcccctg

SEQ ID NO: 5054511 - DNA, 25 bp, Homo sapien
cacctaacctcctatcctctcccct

SEQ ID NO: 5054512 - DNA, 25 bp, Homo sapien
ccagggagggtacctgagtgaacca

SEQ ID NO: 5054513 - DNA, 25 bp, Homo sapien
ttaatgaacgagcttctggaaccag

SEQ ID NO: 5054514 - DNA, 25 bp, Homo sapien
gaaaaagggcttgtacctcagtgca

SEQ ID NO: 5054515 - DNA, 25 bp, Homo sapien
ccacacgtgaacgagttaatgaacg

SEQ ID NO: 5054516 - DNA, 25 bp, Homo sapien
gacagcagagcccatggccccacct

SEQ ID NO: 5054517 - DNA, 25 bp, Homo sapien
agggccacacagccccccaggacag

SEQ ID NO: 5054518 - DNA, 25 bp, Homo sapien
caggacagcagagcccatggcccca

SEQ ID NO: 5054519 - DNA, 25 bp, Homo sapien
agtaggacgcgcaggcccaggacag

SEQ ID NO: 5054520 - DNA, 25 bp, Homo sapien
tgtctcctgcgtttttgctgggatc

SEQ ID NO: 5054521 - DNA, 25 bp, Homo sapien
tgtttcattctggacaaactccgcg

SEQ ID NO: 5054522 - DNA, 25 bp, Homo sapien
tgctgggatcaggtcatggccatct

SEQ ID NO: 5054523 - DNA, 25 bp, Homo sapien
gccatctggagcagcgtgcatttca

SEQ ID NO: 5054524 - DNA, 25 bp, Homo sapien
gcttccgaggaggcttccccgaggc

SEQ ID NO: 5054525 - DNA, 25 bp, Homo sapien
gatgtggcaagacccggctttgagc

SEQ ID NO: 5054526 - DNA, 25 bp, Homo sapien
tccgcgctctgcagcgggaggtcct

SEQ ID NO: 5054527 - DNA, 25 bp, Homo sapien
gggtcccgcatctagggctctcctt

SEQ ID NO: 5054528 - DNA, 25 bp, Homo sapien
tcgtctccagccaggtactcactgg

SEQ ID NO: 5054529 - DNA, 25 bp, Homo sapien
gcctctgtgccccaactgtgcttgg

SEQ ID NO: 5054530 - DNA, 25 bp, Homo sapien
cctcctgctggagtgccagtccctg

SEQ ID NO: 5054531 - DNA, 25 bp, Homo sapien
cctggatggacttgggacaaaggtt

SEQ ID NO: 5054532 - DNA, 25 bp, Homo sapien
gagaggcggcctgacttacctggat

SEQ ID NO: 5054533 - DNA, 25 bp, Homo sapien
tccagcctctcttggccacccggac

SEQ ID NO: 5054534 - DNA, 25 bp, Homo sapien
gccgatcagcgacttaggcctgttg

SEQ ID NO: 5054535 - DNA, 25 bp, Homo sapien
gggagcctcacgcttacagagcctg

SEQ ID NO: 5054536 - DNA, 25 bp, Homo sapien
aaacctagccacgtggtcagggagc

SEQ ID NO: 5054537 - DNA, 25 bp, Homo sapien
gcctcagagtgcagagaacctcaaa

SEQ ID NO: 5054538 - DNA, 25 bp, Homo sapien
caggtgtggtctaggaagtgctctc

SEQ ID NO: 5054539 - DNA, 25 bp, Homo sapien
catggacggtagcttgggtgactca

SEQ ID NO: 5054540 - DNA, 25 bp, Homo sapien
acagcttctcatgggtcagccgaca

SEQ ID NO: 5054541 - DNA, 25 bp, Homo sapien
tcttgaggacaacacccagagtggc

SEQ ID NO: 5054542 - DNA, 25 bp, Homo sapien
ctgggagtcaacttcggtcggagcc

SEQ ID NO: 5054543 - DNA, 25 bp, Homo sapien
tgacgctcgtgcagcaagcagcggc

SEQ ID NO: 5054544 - DNA, 25 bp, Homo sapien
cctggcgcgtgacgctcgtgcagca

SEQ ID NO: 5054545 - DNA, 25 bp, Homo sapien
cttcgggcctgaatccagcgcggag

SEQ ID NO: 5054546 - DNA, 25 bp, Homo sapien
accagcggctgcacacgggtgagaa

SEQ ID NO: 5054547 - DNA, 25 bp, Homo sapien
gagctccaacctggtgcgccaccag

SEQ ID NO: 5054548 - DNA, 25 bp, Homo sapien
gcaaggccttcatctggagctccgt

SEQ ID NO: 5054549 - DNA, 25 bp, Homo sapien
tacgcctgcagccagtgcggcaagg

SEQ ID NO: 5054550 - DNA, 25 bp, Homo sapien
cactgcccagcaccgcatgccacgt

SEQ ID NO: 5054551 - DNA, 25 bp, Homo sapien
agcgggtgcactaccgcgagtagcc

SEQ ID NO: 5054552 - DNA, 25 bp, Homo sapien
accagcgggtgcactaccgcgagta

SEQ ID NO: 5054553 - DNA, 25 bp, Homo sapien
agcaccagcgggtgcactaccgcga

SEQ ID NO: 5054554 - DNA, 25 bp, Homo sapien
gcagaagagctgattgaaagccagt

SEQ ID NO: 5054555 - DNA, 25 bp, Homo sapien
tattggctaagaaaatcgaccttgg

SEQ ID NO: 5054556 - DNA, 25 bp, Homo sapien
agccagtagacttgagacccacaaa

SEQ ID NO: 5054557 - DNA, 25 bp, Homo sapien
caggaatgcactcacagggttatgg

SEQ ID NO: 5054558 - DNA, 25 bp, Homo sapien
gcttcactcagttcacaaattcaaa

SEQ ID NO: 5054559 - DNA, 25 bp, Homo sapien
aggtggttcctatgcgggccttgaa

SEQ ID NO: 5054560 - DNA, 25 bp, Homo sapien
taggtcccggttcagtcaggcagga

SEQ ID NO: 5054561 - DNA, 25 bp, Homo sapien
cattatgaagggcactctgcttcac

SEQ ID NO: 5054562 - DNA, 25 bp, Homo sapien
ttactttaatggcaaacaaggctct

SEQ ID NO: 5054563 - DNA, 25 bp, Homo sapien
aatggcaaacaaggctctgctgtcc

SEQ ID NO: 5054564 - DNA, 25 bp, Homo sapien
tttaatggcaaacaaggctctgctg

SEQ ID NO: 5054565 - DNA, 25 bp, Homo sapien
tactttaatggcaaacaaggctctg

SEQ ID NO: 5054566 - DNA, 25 bp, Homo sapien
ttgccacatggcacagtatctgtgt

SEQ ID NO: 5054567 - DNA, 25 bp, Homo sapien
agtatctgtgtcacagacgcactct

SEQ ID NO: 5054568 - DNA, 25 bp, Homo sapien
gtcacagacgcactcttcccaagga

SEQ ID NO: 5054569 - DNA, 25 bp, Homo sapien
atctgtgtcacagacgcactcttcc

SEQ ID NO: 5054570 - DNA, 25 bp, Homo sapien
ccagatgagtagaacaattcacatt

SEQ ID NO: 5054571 - DNA, 25 bp, Homo sapien
aattaacgacttgttcctgcctcag

SEQ ID NO: 5054572 - DNA, 25 bp, Homo sapien
cgcacatgcaattaacgacttgttc

SEQ ID NO: 5054573 - DNA, 25 bp, Homo sapien
ctgtggacaaacgcacatgcaatta

SEQ ID NO: 5054574 - DNA, 25 bp, Homo sapien
tccagtcagaagacagaggcctcgt

SEQ ID NO: 5054575 - DNA, 25 bp, Homo sapien
ggcaatgcctggagcaacaaagatt

SEQ ID NO: 5054576 - DNA, 25 bp, Homo sapien
tatgtacgaagtgactaccgaagga

SEQ ID NO: 5054577 - DNA, 25 bp, Homo sapien
tttcaacagagaggatttcgcatca

SEQ ID NO: 5054578 - DNA, 25 bp, Homo sapien
gcaaaaactgcagggagcacctgct

SEQ ID NO: 5054579 - DNA, 25 bp, Homo sapien
tgcagggagcacctgctacgctagg

SEQ ID NO: 5054580 - DNA, 25 bp, Homo sapien
ctctatctcagaagcaaaaactgca

SEQ ID NO: 5054581 - DNA, 25 bp, Homo sapien
ctgaaaagagaactctatctcagaa

SEQ ID NO: 5054582 - DNA, 25 bp, Homo sapien
caaagggaagcgtttggaattactg

SEQ ID NO: 5054583 - DNA, 25 bp, Homo sapien
gaacccgcgcaccagttttagcagc

SEQ ID NO: 5054584 - DNA, 25 bp, Homo sapien
tagcagccgcggaaggaagtgctct

SEQ ID NO: 5054585 - DNA, 25 bp, Homo sapien
cgatggctgcggtctgaggtctcta

SEQ ID NO: 5054586 - DNA, 25 bp, Homo sapien
tcttctgcgaagttgggaacccgcg

SEQ ID NO: 5054587 - DNA, 25 bp, Homo sapien
tccaggcacgagatgtggaggccca

SEQ ID NO: 5054588 - DNA, 25 bp, Homo sapien
gcccagaggcagatgccgggtggcg

SEQ ID NO: 5054589 - DNA, 25 bp, Homo sapien
gcgggactgtcggaggcgcgggcag

SEQ ID NO: 5054590 - DNA, 25 bp, Homo sapien
tgcagtgcgcaatgaacgcggttcc

SEQ ID NO: 5054591 - DNA, 25 bp, Homo sapien
gctgtacactttgcacccatgatga

SEQ ID NO: 5054592 - DNA, 25 bp, Homo sapien
tgcagctgtacactttgcacccatg

SEQ ID NO: 5054593 - DNA, 25 bp, Homo sapien
actttgcacccatgatgaaaagcgt

SEQ ID NO: 5054594 - DNA, 25 bp, Homo sapien
cacccatgatgaaaagcgtcacttt

SEQ ID NO: 5054595 - DNA, 25 bp, Homo sapien
tcagttggctcgagccggatcccgg

SEQ ID NO: 5054596 - DNA, 25 bp, Homo sapien
tgaacgaatgagagctcggtccctg

SEQ ID NO: 5054597 - DNA, 25 bp, Homo sapien
ggtgcccggtcctcagttggctcga

SEQ ID NO: 5054598 - DNA, 25 bp, Homo sapien
gcctgcgggcaaccgatgagctgaa

SEQ ID NO: 5054599 - DNA, 25 bp, Homo sapien
cacaggtgctaaagagagcagtacc

SEQ ID NO: 5054600 - DNA, 25 bp, Homo sapien
gagcagtaccctgatggagtccctt

SEQ ID NO: 5054601 - DNA, 25 bp, Homo sapien
tgtacctagccctggctgtgattta

SEQ ID NO: 5054602 - DNA, 25 bp, Homo sapien
cagaacagaacacccgcttctggga

SEQ ID NO: 5054603 - DNA, 25 bp, Homo sapien
cagtggccggtgattgaatcggtca

SEQ ID NO: 5054604 - DNA, 25 bp, Homo sapien
aatcggtcattcctccgcaaccagg

SEQ ID NO: 5054605 - DNA, 25 bp, Homo sapien
tccgccttggcttgggagcaatcag

SEQ ID NO: 5054606 - DNA, 25 bp, Homo sapien
ggttctcgggttgcgaaagcctcgc

SEQ ID NO: 5054607 - DNA, 25 bp, Homo sapien
ccaccgtctgcacttggcatctgaa

SEQ ID NO: 5054608 - DNA, 25 bp, Homo sapien
tctgcactagctccgggcaattggt

SEQ ID NO: 5054609 - DNA, 25 bp, Homo sapien
taaattgtaggacatcgcgttggtg

SEQ ID NO: 5054610 - DNA, 25 bp, Homo sapien
ggcaattggtgacagaatcgagtta

SEQ ID NO: 5054611 - DNA, 25 bp, Homo sapien
tcatcatgaattaagcgaggtgggc

SEQ ID NO: 5054612 - DNA, 25 bp, Homo sapien
ccaagacagtcgctttgagggctct

SEQ ID NO: 5054613 - DNA, 25 bp, Homo sapien
cagggaaatgtgagccgcctactgg

SEQ ID NO: 5054614 - DNA, 25 bp, Homo sapien
ggtgcggttgcaggattcgcccatc

SEQ ID NO: 5054615 - DNA, 25 bp, Homo sapien
caagatcctcaggtaccagtagcgg

SEQ ID NO: 5054616 - DNA, 25 bp, Homo sapien
tgctccctgaaggaagcttacctgg

SEQ ID NO: 5054617 - DNA, 25 bp, Homo sapien
tgtcagccacaaagaaacgcagatc

SEQ ID NO: 5054618 - DNA, 25 bp, Homo sapien
tgttcaaagaagtcgcgcagtcagt

SEQ ID NO: 5054619 - DNA, 25 bp, Homo sapien
caaactgggcaaattaagatggtgg

SEQ ID NO: 5054620 - DNA, 25 bp, Homo sapien
caaacacacataaagattaggagga

SEQ ID NO: 5054621 - DNA, 25 bp, Homo sapien
cagtaagctgtatagaattgccggt

SEQ ID NO: 5054622 - DNA, 25 bp, Homo sapien
aaactaaatatgtccctaacgacag

SEQ ID NO: 5054623 - DNA, 25 bp, Homo sapien
cagaggccgtcagctcatgattctc

SEQ ID NO: 5054624 - DNA, 25 bp, Homo sapien
caacagcatgttgccaagggacctc

SEQ ID NO: 5054625 - DNA, 25 bp, Homo sapien
gattctcctctggtccggatgtgtg

SEQ ID NO: 5054626 - DNA, 25 bp, Homo sapien
tactgcctgtagaaggagggaaccc

SEQ ID NO: 5054627 - DNA, 25 bp, Homo sapien
ttttctggggccttaacaatggata

SEQ ID NO: 5054628 - DNA, 25 bp, Homo sapien
gggccttaacaatggatatggccac

SEQ ID NO: 5054629 - DNA, 25 bp, Homo sapien
ttaacaatggatatggccacaacct

SEQ ID NO: 5054630 - DNA, 25 bp, Homo sapien
aatggatatggccacaaccttgatt

SEQ ID NO: 5054631 - DNA, 25 bp, Homo sapien
tgcctccccaaggagagcccttgtg

SEQ ID NO: 5054632 - DNA, 25 bp, Homo sapien
ggaagcccgtccgatgcagacggat

SEQ ID NO: 5054633 - DNA, 25 bp, Homo sapien
cgtccgatgcagacggatgttccag

SEQ ID NO: 5054634 - DNA, 25 bp, Homo sapien
gatgcagacggatgttccagccagg

SEQ ID NO: 5054635 - DNA, 25 bp, Homo sapien
cagtgaatgaagttgctctaagtcc

SEQ ID NO: 5054636 - DNA, 25 bp, Homo sapien
tccatcatggaaacgcatctcgcac

SEQ ID NO: 5054637 - DNA, 25 bp, Homo sapien
tcagggctcccggttgctgtcagtc

SEQ ID NO: 5054638 - DNA, 25 bp, Homo sapien
tacttttgcccgtcgatggcaccac

SEQ ID NO: 5054639 - DNA, 25 bp, Homo sapien
ggtatctgtccacctggggtttcta

SEQ ID NO: 5054640 - DNA, 25 bp, Homo sapien
cacctggggtttctactctgcatgt

SEQ ID NO: 5054641 - DNA, 25 bp, Homo sapien
tgtccacctggggtttctactctgc

SEQ ID NO: 5054642 - DNA, 25 bp, Homo sapien
cctggggtttctactctgcatgttt

SEQ ID NO: 5054643 - DNA, 25 bp, Homo sapien
aggatacagggttgggaagctcagg

SEQ ID NO: 5054644 - DNA, 25 bp, Homo sapien
cccgaaagcaaagcgcggagcagat

SEQ ID NO: 5054645 - DNA, 25 bp, Homo sapien
agagggccctgcgtagcagaggaaa

SEQ ID NO: 5054646 - DNA, 25 bp, Homo sapien
cagagggcagccgacaggcagctct

SEQ ID NO: 5054647 - DNA, 25 bp, Homo sapien
cagcagactccatgctcggggtgga

SEQ ID NO: 5054648 - DNA, 25 bp, Homo sapien
gattggatgtgacagcccagcagac

SEQ ID NO: 5054649 - DNA, 25 bp, Homo sapien
tttctcctcccctgtcgagcgggaa

SEQ ID NO: 5054650 - DNA, 25 bp, Homo sapien
gagcacacgaaggtgtttctcctcc

SEQ ID NO: 5054651 - DNA, 25 bp, Homo sapien
tccccagtactgctttaatagtgaa

SEQ ID NO: 5054652 - DNA, 25 bp, Homo sapien
aaagaagtttcaacacggctcgtcg

SEQ ID NO: 5054653 - DNA, 25 bp, Homo sapien
ttccccagtactgctttaatagtga

SEQ ID NO: 5054654 - DNA, 25 bp, Homo sapien
aattccccagtactgctttaatagt

SEQ ID NO: 5054655 - DNA, 25 bp, Homo sapien
tgccatggcgagagcccaggcgaac

SEQ ID NO: 5054656 - DNA, 25 bp, Homo sapien
tcctgccatggcgagagcccaggcg

SEQ ID NO: 5054657 - DNA, 25 bp, Homo sapien
cctgccatggcgagagcccaggcga

SEQ ID NO: 5054658 - DNA, 25 bp, Homo sapien
ctgccatggcgagagcccaggcgaa

SEQ ID NO: 5054659 - DNA, 25 bp, Homo sapien
tttgctgtagatcttctccactggc

SEQ ID NO: 5054660 - DNA, 25 bp, Homo sapien
ccctggagcatcagcgaggtgtcaa

SEQ ID NO: 5054661 - DNA, 25 bp, Homo sapien
cgaggtgtcaaagacaacctgctgt

SEQ ID NO: 5054662 - DNA, 25 bp, Homo sapien
tgctgtggcctaggtgtccaccgag

SEQ ID NO: 5054663 - DNA, 25 bp, Homo sapien
aagggcgagcgtcctccatgcagca

SEQ ID NO: 5054664 - DNA, 25 bp, Homo sapien
gtagttgagcttggacgtgcccagg

SEQ ID NO: 5054665 - DNA, 25 bp, Homo sapien
ctgcacactcagctgcgccagctgc

SEQ ID NO: 5054666 - DNA, 25 bp, Homo sapien
gcctgcacactcagctgcgccagct

SEQ ID NO: 5054667 - DNA, 25 bp, Homo sapien
agttgagcttggacgtgcccagggc

SEQ ID NO: 5054668 - DNA, 25 bp, Homo sapien
atcacagcaaaagaccagccgggat

SEQ ID NO: 5054669 - DNA, 25 bp, Homo sapien
cccagctgccaagtcagatacagag

SEQ ID NO: 5054670 - DNA, 25 bp, Homo sapien
atcaaaggtggaagctcagccccac

SEQ ID NO: 5054671 - DNA, 25 bp, Homo sapien
acctgaggagacctgcacttctctg

SEQ ID NO: 5054672 - DNA, 25 bp, Homo sapien
ttctggaaatgcttaagaaatttct

SEQ ID NO: 5054673 - DNA, 25 bp, Homo sapien
tctggaaatgcttaagaaatttctc

SEQ ID NO: 5054674 - DNA, 25 bp, Homo sapien
ggctttgtgctcagccctcgccctc

SEQ ID NO: 5054675 - DNA, 25 bp, Homo sapien
cttgccatccccttgggctttgtgc

SEQ ID NO: 5054676 - DNA, 25 bp, Homo sapien
ctggacttgccatccccttgggctt

SEQ ID NO: 5054677 - DNA, 25 bp, Homo sapien
ggacttgccatccccttgggctttg

SEQ ID NO: 5054678 - DNA, 25 bp, Homo sapien
tgctcgctgatggttgcagagaatg

SEQ ID NO: 5054679 - DNA, 25 bp, Homo sapien
cttcgtctggagattctgcatcgac

SEQ ID NO: 5054680 - DNA, 25 bp, Homo sapien
aatggccacgactcggttggctcgg

SEQ ID NO: 5054681 - DNA, 25 bp, Homo sapien
gttggctcggttgtaggataagatc

SEQ ID NO: 5054682 - DNA, 25 bp, Homo sapien
gaaacacatgccgagcgtcagcgcc

SEQ ID NO: 5054683 - DNA, 25 bp, Homo sapien
cagctagctcctccgcatcccacag

SEQ ID NO: 5054684 - DNA, 25 bp, Homo sapien
acgggtgcacgcgaaacacatgccg

SEQ ID NO: 5054685 - DNA, 25 bp, Homo sapien
tgcacgcgaaacacatgccgagcgt

SEQ ID NO: 5054686 - DNA, 25 bp, Homo sapien
agtgatggaggcgttgtaggtccgg

SEQ ID NO: 5054687 - DNA, 25 bp, Homo sapien
gatggaggcgttgtaggtccggaac

SEQ ID NO: 5054688 - DNA, 25 bp, Homo sapien
tggaggcgttgtaggtccggaacac

SEQ ID NO: 5054689 - DNA, 25 bp, Homo sapien
gcagagtgatggaggcgttgtaggt

SEQ ID NO: 5054690 - DNA, 25 bp, Homo sapien
ggtcagcctgtcgaagaggtcgtcc

SEQ ID NO: 5054691 - DNA, 25 bp, Homo sapien
gtcagcctgtcgaagaggtcgtccc

SEQ ID NO: 5054692 - DNA, 25 bp, Homo sapien
tcagcctgtcgaagaggtcgtcccg

SEQ ID NO: 5054693 - DNA, 25 bp, Homo sapien
ttctccaccggcactctgttgtagt

SEQ ID NO: 5054694 - DNA, 25 bp, Homo sapien
cactctgttgtagtagcggatgcag

SEQ ID NO: 5054695 - DNA, 25 bp, Homo sapien
cccaggaagtcaaattccaccacgt

SEQ ID NO: 5054696 - DNA, 25 bp, Homo sapien
ttgtagtagcggatgcagtccttcc

SEQ ID NO: 5054697 - DNA, 25 bp, Homo sapien
cacgcggagggaacagcagcccacg

SEQ ID NO: 5054698 - DNA, 25 bp, Homo sapien
gcagcccacggtgtcggccgcctca

SEQ ID NO: 5054699 - DNA, 25 bp, Homo sapien
tccacgcggagggaacagcagccca

SEQ ID NO: 5054700 - DNA, 25 bp, Homo sapien
ggtgtcggccgcctcaccgtcctcc

SEQ ID NO: 5054701 - DNA, 25 bp, Homo sapien
tatcgatgaaatacagggccaccgc

SEQ ID NO: 5054702 - DNA, 25 bp, Homo sapien
tcagcccggtactgggagcggatct

SEQ ID NO: 5054703 - DNA, 25 bp, Homo sapien
cgcaggcgtcgagctgtttcaaact

SEQ ID NO: 5054704 - DNA, 25 bp, Homo sapien
cttcatttcccgagacttccagtca

SEQ ID NO: 5054705 - DNA, 25 bp, Homo sapien
gctgccagccacgtgacggtgttat

SEQ ID NO: 5054706 - DNA, 25 bp, Homo sapien
gagttctgaacgctctcggtccaag

SEQ ID NO: 5054707 - DNA, 25 bp, Homo sapien
ggtgttatcggagcgcacctccttc

SEQ ID NO: 5054708 - DNA, 25 bp, Homo sapien
cagcttcgagcaagggttcagcatg

SEQ ID NO: 5054709 - DNA, 25 bp, Homo sapien
cctctggcgtgatccttctcttcag

SEQ ID NO: 5054710 - DNA, 25 bp, Homo sapien
ccaggcggctcaatcttgaagttgc

SEQ ID NO: 5054711 - DNA, 25 bp, Homo sapien
ttgataaccacatcctctggcgtga

SEQ ID NO: 5054712 - DNA, 25 bp, Homo sapien
ccatcttgggatggtcgccacggcc

SEQ ID NO: 5054713 - DNA, 25 bp, Homo sapien
aatacagtagccgaactcttgctga

SEQ ID NO: 5054714 - DNA, 25 bp, Homo sapien
agtagccgaactcttgctgaagttt

SEQ ID NO: 5054715 - DNA, 25 bp, Homo sapien
cagtagccgaactcttgctgaagtt

SEQ ID NO: 5054716 - DNA, 25 bp, Homo sapien
ctaaaatacagtagccgaactcttg

SEQ ID NO: 5054717 - DNA, 25 bp, Homo sapien
tccacaaagtatctgtggatctccg

SEQ ID NO: 5054718 - DNA, 25 bp, Homo sapien
tccctgctcaggactttccgggctg

SEQ ID NO: 5054719 - DNA, 25 bp, Homo sapien
ggactttccgggctgcggccttgtc

SEQ ID NO: 5054720 - DNA, 25 bp, Homo sapien
gaagtcacacttgtccaggctcttg

SEQ ID NO: 5054721 - DNA, 25 bp, Homo sapien
tcaggtacgacaccatctgtgccag

SEQ ID NO: 5054722 - DNA, 25 bp, Homo sapien
tcaaacgtgtctcgctgtgggatgg

SEQ ID NO: 5054723 - DNA, 25 bp, Homo sapien
ggatgatccgcctcttccgaggagc

SEQ ID NO: 5054724 - DNA, 25 bp, Homo sapien
gccacttaggcctgtgagacctcag

SEQ ID NO: 5054725 - DNA, 25 bp, Homo sapien
ttcatgatctaacatcctcccataa

SEQ ID NO: 5054726 - DNA, 25 bp, Homo sapien
tgccacgctcaatctcacaggcctt

SEQ ID NO: 5054727 - DNA, 25 bp, Homo sapien
ataaaaagtggcgacctcctccgct

SEQ ID NO: 5054728 - DNA, 25 bp, Homo sapien
tcctcccataaaaagtggcgacctc

SEQ ID NO: 5054729 - DNA, 25 bp, Homo sapien
cttcatagaagaaacgcactccgtc

SEQ ID NO: 5054730 - DNA, 25 bp, Homo sapien
gtgcgaagtacgggcccttgtgctc

SEQ ID NO: 5054731 - DNA, 25 bp, Homo sapien
cactccgtcgggaaggggctcgtat

SEQ ID NO: 5054732 - DNA, 25 bp, Homo sapien
gtctccacttcaccccgtcttcgtg

SEQ ID NO: 5054733 - DNA, 25 bp, Homo sapien
tgctgagtcacggatcccaccaagc

SEQ ID NO: 5054734 - DNA, 25 bp, Homo sapien
ggcccgtgtgctgctgagtcacgga

SEQ ID NO: 5054735 - DNA, 25 bp, Homo sapien
catgcccgtgtacccgcccatgccc

SEQ ID NO: 5054736 - DNA, 25 bp, Homo sapien
gacctcagaccccatgcccgtgtac

SEQ ID NO: 5054737 - DNA, 25 bp, Homo sapien
ctggctgcttatgagagagccctgc

SEQ ID NO: 5054738 - DNA, 25 bp, Homo sapien
tggctgcttatgagagagccctgcc

SEQ ID NO: 5054739 - DNA, 25 bp, Homo sapien
ggcctggtcggctgggatgagtgtc

SEQ ID NO: 5054740 - DNA, 25 bp, Homo sapien
gccaggagacctgcacgtgacccca

SEQ ID NO: 5054741 - DNA, 25 bp, Homo sapien
aggagacctgcacgtgaccccagcc

SEQ ID NO: 5054742 - DNA, 25 bp, Homo sapien
ccagccaggtagtgctgttgggggc

SEQ ID NO: 5054743 - DNA, 25 bp, Homo sapien
agcatgtgcaacagacatttctgaa

SEQ ID NO: 5054744 - DNA, 25 bp, Homo sapien
ggaaagcatgtgcaacagacatttc

SEQ ID NO: 5054745 - DNA, 25 bp, Homo sapien
acatttctgaaagggcctttctggc

SEQ ID NO: 5054746 - DNA, 25 bp, Homo sapien
aaagcatgtgcaacagacatttctg

SEQ ID NO: 5054747 - DNA, 25 bp, Homo sapien
agctccaagcgcaggccagaactcc

SEQ ID NO: 5054748 - DNA, 25 bp, Homo sapien
tgcctgtgcaccctcggagagatgt

SEQ ID NO: 5054749 - DNA, 25 bp, Homo sapien
caccctcggagagatgtgcctcaat

SEQ ID NO: 5054750 - DNA, 25 bp, Homo sapien
tggggctctctttgggtcccaagct

SEQ ID NO: 5054751 - DNA, 25 bp, Homo sapien
tccagctcttcggaaactccagcat

SEQ ID NO: 5054752 - DNA, 25 bp, Homo sapien
actctccagctcttcggaaactcca

SEQ ID NO: 5054753 - DNA, 25 bp, Homo sapien
cagctcttcggaaactccagcattt

SEQ ID NO: 5054754 - DNA, 25 bp, Homo sapien
gctcttcggaaactccagcatttca

SEQ ID NO: 5054755 - DNA, 25 bp, Homo sapien
tatgcgccggcagggcttctcacat

SEQ ID NO: 5054756 - DNA, 25 bp, Homo sapien
caggaaagcgcctgggaccaccaac

SEQ ID NO: 5054757 - DNA, 25 bp, Homo sapien
gccactggatccatgcggcttgtgc

SEQ ID NO: 5054758 - DNA, 25 bp, Homo sapien
ccaggcccagtatgcgccggcaggg

SEQ ID NO: 5054759 - DNA, 25 bp, Homo sapien
tagatatgacagtgagcgcccgccg

SEQ ID NO: 5054760 - DNA, 25 bp, Homo sapien
cgcccgccgccatgcagaatcggtc

SEQ ID NO: 5054761 - DNA, 25 bp, Homo sapien
ctggtgatgtagatatgacagtgag

SEQ ID NO: 5054762 - DNA, 25 bp, Homo sapien
gatgtagatatgacagtgagcgccc

SEQ ID NO: 5054763 - DNA, 25 bp, Homo sapien
cccgagcagcgtcagagccgcccgg

SEQ ID NO: 5054764 - DNA, 25 bp, Homo sapien
gagcagcgtcagagccgcccggagc

SEQ ID NO: 5054765 - DNA, 25 bp, Homo sapien
tgcgtcctgcgcgagcccgggacac

SEQ ID NO: 5054766 - DNA, 25 bp, Homo sapien
cactgcccttctgcgtcctgcgcga

SEQ ID NO: 5054767 - DNA, 25 bp, Homo sapien
acagtgatgcatattttttcaggta

SEQ ID NO: 5054768 - DNA, 25 bp, Homo sapien
gggctgcggaacagtgatgcatatt

SEQ ID NO: 5054769 - DNA, 25 bp, Homo sapien
gctgcggaacagtgatgcatatttt

SEQ ID NO: 5054770 - DNA, 25 bp, Homo sapien
gcggaacagtgatgcatattttttc

SEQ ID NO: 5054771 - DNA, 25 bp, Homo sapien
gctgccgatgcaagagggcactctg

SEQ ID NO: 5054772 - DNA, 25 bp, Homo sapien
cagctcaaagctgccgatgcaagag

SEQ ID NO: 5054773 - DNA, 25 bp, Homo sapien
cacagctcaaagctgccgatgcaag

SEQ ID NO: 5054774 - DNA, 25 bp, Homo sapien
tcaaagctgccgatgcaagagggca

SEQ ID NO: 5054775 - DNA, 25 bp, Homo sapien
tgtgcttgtctcctggcccgtaact

SEQ ID NO: 5054776 - DNA, 25 bp, Homo sapien
tggcccgtaactctcctttctgctc

SEQ ID NO: 5054777 - DNA, 25 bp, Homo sapien
tcctcgttctgtgcttgtctcctgg

SEQ ID NO: 5054778 - DNA, 25 bp, Homo sapien
acacttcttttacatcctcgtcctc

SEQ ID NO: 5054779 - DNA, 25 bp, Homo sapien
ggtgcaggccgcaacaggccatact

SEQ ID NO: 5054780 - DNA, 25 bp, Homo sapien
cctccatgggcctaacagatgcttt

SEQ ID NO: 5054781 - DNA, 25 bp, Homo sapien
cagatgcttttaactcagctttgga

SEQ ID NO: 5054782 - DNA, 25 bp, Homo sapien
ttgatctcagcccttgtggcctctg

SEQ ID NO: 5054783 - DNA, 25 bp, Homo sapien
agtgaaacacgcgtcttgcaaggaa

SEQ ID NO: 5054784 - DNA, 25 bp, Homo sapien
ggtcacaggcacgaattcatcacag

SEQ ID NO: 5054785 - DNA, 25 bp, Homo sapien
cgcttcaccgaaacgagaggactag

SEQ ID NO: 5054786 - DNA, 25 bp, Homo sapien
tcatgtggaatctaggccctcaagg

SEQ ID NO: 5054787 - DNA, 25 bp, Homo sapien
cccactggcagccgaggtcaccccc

SEQ ID NO: 5054788 - DNA, 25 bp, Homo sapien
aagcccactggcagccgaggtcacc

SEQ ID NO: 5054789 - DNA, 25 bp, Homo sapien
agcccactggcagccgaggtcaccc

SEQ ID NO: 5054790 - DNA, 25 bp, Homo sapien
cactggcagccgaggtcacccccat

SEQ ID NO: 5054791 - DNA, 25 bp, Homo sapien
cttagattctactcgccgcgaatgg

SEQ ID NO: 5054792 - DNA, 25 bp, Homo sapien
gatgcatgcagcctgccatcaagcc

SEQ ID NO: 5054793 - DNA, 25 bp, Homo sapien
tcaagccacggaggtaccacatttc

SEQ ID NO: 5054794 - DNA, 25 bp, Homo sapien
cacggaggtaccacatttctcaaaa

SEQ ID NO: 5054795 - DNA, 25 bp, Homo sapien
aagattgtcccgccctggattttct

SEQ ID NO: 5054796 - DNA, 25 bp, Homo sapien
aacagtaagattgtcccgccctgga

SEQ ID NO: 5054797 - DNA, 25 bp, Homo sapien
cagtaagattgtcccgccctggatt

SEQ ID NO: 5054798 - DNA, 25 bp, Homo sapien
ccaacagtaagattgtcccgccctg

SEQ ID NO: 5054799 - DNA, 25 bp, Homo sapien
atccactggcaactgcttcaaattg

SEQ ID NO: 5054800 - DNA, 25 bp, Homo sapien
gcttcaaattgggccccgactgtct

SEQ ID NO: 5054801 - DNA, 25 bp, Homo sapien
actgcttcaaattgggccccgactg

SEQ ID NO: 5054802 - DNA, 25 bp, Homo sapien
ttcaaattgggccccgactgtctcc

SEQ ID NO: 5054803 - DNA, 25 bp, Homo sapien
aggtcaccacgccaggagaagagaa

SEQ ID NO: 5054804 - DNA, 25 bp, Homo sapien
aaggccctggggcaaagcgcatcca

SEQ ID NO: 5054805 - DNA, 25 bp, Homo sapien
agcaaagcgatccaggagaagggag

SEQ ID NO: 5054806 - DNA, 25 bp, Homo sapien
gcaaagcgcatccaaagccgtcact

SEQ ID NO: 5054807 - DNA, 25 bp, Homo sapien
cacgcggtcccaccgcaccacggct

SEQ ID NO: 5054808 - DNA, 25 bp, Homo sapien
ttccccgaggcctgcgcggagacgc

SEQ ID NO: 5054809 - DNA, 25 bp, Homo sapien
ggacccacgcggtcccaccgcacca

SEQ ID NO: 5054810 - DNA, 25 bp, Homo sapien
gcctgcgcggagacgccgggaaggc

SEQ ID NO: 5054811 - DNA, 25 bp, Homo sapien
aggcagccccgagctgaccctgtga

SEQ ID NO: 5054812 - DNA, 25 bp, Homo sapien
ggtttaggcagccccgagctgaccc

SEQ ID NO: 5054813 - DNA, 25 bp, Homo sapien
gggagggattgatggccccgtctca

SEQ ID NO: 5054814 - DNA, 25 bp, Homo sapien
ggagggattgatggccccgtctcac

SEQ ID NO: 5054815 - DNA, 25 bp, Homo sapien
cgggaagccaggtgcatcttttact

SEQ ID NO: 5054816 - DNA, 25 bp, Homo sapien
gaagtaagtaccagcgatcagcatc

SEQ ID NO: 5054817 - DNA, 25 bp, Homo sapien
taccaccattgatgaaggcgtcctg

SEQ ID NO: 5054818 - DNA, 25 bp, Homo sapien
taccgatgcgcataaacagtgtcag

SEQ ID NO: 5054819 - DNA, 25 bp, Homo sapien
caagtggacgacaagctgaagggct

SEQ ID NO: 5054820 - DNA, 25 bp, Homo sapien
tgaactttggaagcatcggcccatg

SEQ ID NO: 5054821 - DNA, 25 bp, Homo sapien
tgaggaaacttgaaccacagagctg

SEQ ID NO: 5054822 - DNA, 25 bp, Homo sapien
cacctagggaagtatggaaggcccg

SEQ ID NO: 5054823 - DNA, 25 bp, Homo sapien
aagcaggacgacaccgacagaggcg

SEQ ID NO: 5054824 - DNA, 25 bp, Homo sapien
gatgtgggttctgtacggaggttct

SEQ ID NO: 5054825 - DNA, 25 bp, Homo sapien
ttttggaagcaggacgacaccgaca

SEQ ID NO: 5054826 - DNA, 25 bp, Homo sapien
gacaccgacagaggcgcctcggact

SEQ ID NO: 5054827 - DNA, 25 bp, Homo sapien
gtcggaggactcacacaagcacttg

SEQ ID NO: 5054828 - DNA, 25 bp, Homo sapien
tccccgcaaagggagccgaggagct

SEQ ID NO: 5054829 - DNA, 25 bp, Homo sapien
tttggaacaagcctcttagagggtc

SEQ ID NO: 5054830 - DNA, 25 bp, Homo sapien
ggcagactcctggagtccccgcaaa

SEQ ID NO: 5054831 - DNA, 25 bp, Homo sapien
tcgaagcggcattgccgcctattgg

SEQ ID NO: 5054832 - DNA, 25 bp, Homo sapien
tgatatagctgtccgtcgaagcggc

SEQ ID NO: 5054833 - DNA, 25 bp, Homo sapien
gcctattgggcaatggccagcttcg

SEQ ID NO: 5054834 - DNA, 25 bp, Homo sapien
cgatgatcctggaggagaggccgga

SEQ ID NO: 5054835 - DNA, 25 bp, Homo sapien
tcgccccgggtgagcctttgatagc

SEQ ID NO: 5054836 - DNA, 25 bp, Homo sapien
tgatgctgaccgtagccctcaagga

SEQ ID NO: 5054837 - DNA, 25 bp, Homo sapien
tctgggacgtcagactgtgttgtcc

SEQ ID NO: 5054838 - DNA, 25 bp, Homo sapien
tgggctggttctactcggctttggt

SEQ ID NO: 5054839 - DNA, 25 bp, Homo sapien
cattgtgtcagtgaatgggcagcca

SEQ ID NO: 5054840 - DNA, 25 bp, Homo sapien
acgcggaggtggtgacggagctgaa

SEQ ID NO: 5054841 - DNA, 25 bp, Homo sapien
ctacattgtgtcagtgaatgggcag

SEQ ID NO: 5054842 - DNA, 25 bp, Homo sapien
catgcaggtggtggagacacgcgga

SEQ ID NO: 5054843 - DNA, 25 bp, Homo sapien
tcaggttcccgtggacctgtggctg

SEQ ID NO: 5054844 - DNA, 25 bp, Homo sapien
atgccatgttcaggttcccgtggac

SEQ ID NO: 5054845 - DNA, 25 bp, Homo sapien
gggtcacagatggcgccaggacact

SEQ ID NO: 5054846 - DNA, 25 bp, Homo sapien
acagatggcgccaggacactgtggt

SEQ ID NO: 5054847 - DNA, 25 bp, Homo sapien
ccaaaatgaccgaagaggaagaggg

SEQ ID NO: 5054848 - DNA, 25 bp, Homo sapien
actagacgtggcctctggagcacag

SEQ ID NO: 5054849 - DNA, 25 bp, Homo sapien
gagcttgtggccctttaaatcctgg

SEQ ID NO: 5054850 - DNA, 25 bp, Homo sapien
caggctccactagacgtggcctctg

SEQ ID NO: 5054851 - DNA, 25 bp, Homo sapien
agtcctaggcccaagtatagagtcc

SEQ ID NO: 5054852 - DNA, 25 bp, Homo sapien
gcagaatgagagtcctaggcccaag

SEQ ID NO: 5054853 - DNA, 25 bp, Homo sapien
cccaggcgggacttgcagaatgaga

SEQ ID NO: 5054854 - DNA, 25 bp, Homo sapien
tggatgccatggaggccgcaagggc

SEQ ID NO: 5054855 - DNA, 25 bp, Homo sapien
tccaaaggtgaatgagggcacagct

SEQ ID NO: 5054856 - DNA, 25 bp, Homo sapien
tattattgcgtctcaaggtgcctca

SEQ ID NO: 5054857 - DNA, 25 bp, Homo sapien
tgagactcacggtggagaagcctcc

SEQ ID NO: 5054858 - DNA, 25 bp, Homo sapien
cgcggagtcttgcagttaaggtatt

SEQ ID NO: 5054859 - DNA, 25 bp, Homo sapien
tgctgctctccacagccaggttggg

SEQ ID NO: 5054860 - DNA, 25 bp, Homo sapien
ctgctctccacagccaggttggggt

SEQ ID NO: 5054861 - DNA, 25 bp, Homo sapien
gctctccacagccaggttggggtgc

SEQ ID NO: 5054862 - DNA, 25 bp, Homo sapien
cttgctgctctccacagccaggttg

SEQ ID NO: 5054863 - DNA, 25 bp, Homo sapien
tcagagccggctctataggaggctg

SEQ ID NO: 5054864 - DNA, 25 bp, Homo sapien
gggcagaggacacttccgctttgtc

SEQ ID NO: 5054865 - DNA, 25 bp, Homo sapien
tttgtcctggccctcatctcagagc

SEQ ID NO: 5054866 - DNA, 25 bp, Homo sapien
caccactgtgacgtactggggggca

SEQ ID NO: 5054867 - DNA, 25 bp, Homo sapien
gctgtcgggcacagacgtgtgtgtg

SEQ ID NO: 5054868 - DNA, 25 bp, Homo sapien
ggtccaggtgggctgtcgggcacag

SEQ ID NO: 5054869 - DNA, 25 bp, Homo sapien
ctgtcgggcccaggcgagcgtgtgt

SEQ ID NO: 5054870 - DNA, 25 bp, Homo sapien
tgggctgtcgggcacgggcgagtgt

SEQ ID NO: 5054871 - DNA, 25 bp, Homo sapien
cgcaggccccgtgcaccaggaagcc

SEQ ID NO: 5054872 - DNA, 25 bp, Homo sapien
ccgcagtggggttcctctgagtccc

SEQ ID NO: 5054873 - DNA, 25 bp, Homo sapien
tggcagccccggcacgtgccgcagt

SEQ ID NO: 5054874 - DNA, 25 bp, Homo sapien
gaaagctggatccggtggcagcccc

SEQ ID NO: 5054875 - DNA, 25 bp, Homo sapien
agggactgacggaggactcgccttc

SEQ ID NO: 5054876 - DNA, 25 bp, Homo sapien
gctgggattctgcttgaactcccgc

SEQ ID NO: 5054877 - DNA, 25 bp, Homo sapien
ctccacagagatgccttcacggcca

SEQ ID NO: 5054878 - DNA, 25 bp, Homo sapien
ctcccgcagagacccaaaagcaaag

SEQ ID NO: 5054879 - DNA, 25 bp, Homo sapien
tcccggctagtccaaagagcgacga

SEQ ID NO: 5054880 - DNA, 25 bp, Homo sapien
ccccggttgagcatagtaggacagc

SEQ ID NO: 5054881 - DNA, 25 bp, Homo sapien
catgctgtgactcgcgactgagggc

SEQ ID NO: 5054882 - DNA, 25 bp, Homo sapien
caaaactttcaacgagtcggcgcgc

SEQ ID NO: 5054883 - DNA, 25 bp, Homo sapien
aggaagaagtcggccgtgcccttgg

SEQ ID NO: 5054884 - DNA, 25 bp, Homo sapien
ggaagaagtcggccgtgcccttggc

SEQ ID NO: 5054885 - DNA, 25 bp, Homo sapien
gaagaagtcggccgtgcccttggcc

SEQ ID NO: 5054886 - DNA, 25 bp, Homo sapien
tgcggcggcgaaggctcccgcggga

SEQ ID NO: 5054887 - DNA, 25 bp, Homo sapien
ttgtacaggtcccgctctttggcca

SEQ ID NO: 5054888 - DNA, 25 bp, Homo sapien
cttgtacaggtcccgctctttggcc

SEQ ID NO: 5054889 - DNA, 25 bp, Homo sapien
gcggcggcgaaggctcccgcgggaa

SEQ ID NO: 5054890 - DNA, 25 bp, Homo sapien
gctctccagaatgtgccgctgctgc

SEQ ID NO: 5054891 - DNA, 25 bp, Homo sapien
gcttctgcttgagccggatgacctc

SEQ ID NO: 5054892 - DNA, 25 bp, Homo sapien
ctgaagccgcggagctgccggttca

SEQ ID NO: 5054893 - DNA, 25 bp, Homo sapien
tctggagttggcacttctcgctctc

SEQ ID NO: 5054894 - DNA, 25 bp, Homo sapien
agcagggcgtgctgagcggcgtcga

SEQ ID NO: 5054895 - DNA, 25 bp, Homo sapien
tggtgcgcgccgtggtggtggccgg

SEQ ID NO: 5054896 - DNA, 25 bp, Homo sapien
ggtagccgctcatccagtacagatc

SEQ ID NO: 5054897 - DNA, 25 bp, Homo sapien
gggccgcggaaagcctcgtaggctg

SEQ ID NO: 5054898 - DNA, 25 bp, Homo sapien
ttgacgtactcgatggccagcgggc

SEQ ID NO: 5054899 - DNA, 25 bp, Homo sapien
ctgctgggcagctcggcgcccatcg

SEQ ID NO: 5054900 - DNA, 25 bp, Homo sapien
cagctcggcgcccatcgccagctcc

SEQ ID NO: 5054901 - DNA, 25 bp, Homo sapien
tcgaacttcatcaggtcgaagtcgt

SEQ ID NO: 5054902 - DNA, 25 bp, Homo sapien
tggccaggtgtctcgggcgaccccg

SEQ ID NO: 5054903 - DNA, 25 bp, Homo sapien
acggatagaacctttattgctgaac

SEQ ID NO: 5054904 - DNA, 25 bp, Homo sapien
gaacctttattgctgaacataaaac

SEQ ID NO: 5054905 - DNA, 25 bp, Homo sapien
acctttattgctgaacataaaacac

SEQ ID NO: 5054906 - DNA, 25 bp, Homo sapien
gatagaacctttattgctgaacata

SEQ ID NO: 5054907 - DNA, 25 bp, Homo sapien
gccctgcgcacacgctggtcatgga

SEQ ID NO: 5054908 - DNA, 25 bp, Homo sapien
agagtggtggacagagcctctttcc

SEQ ID NO: 5054909 - DNA, 25 bp, Homo sapien
tgcagggccactgttgccaatggca

SEQ ID NO: 5054910 - DNA, 25 bp, Homo sapien
cttcactgggccgaaaacctgggtg

SEQ ID NO: 5054911 - DNA, 25 bp, Homo sapien
acagacgtggtttgatgtgcagagg

SEQ ID NO: 5054912 - DNA, 25 bp, Homo sapien
cacagacgtggtttgatgtgcagag

SEQ ID NO: 5054913 - DNA, 25 bp, Homo sapien
tcacagacgtggtttgatgtgcaga

SEQ ID NO: 5054914 - DNA, 25 bp, Homo sapien
cctgcaaagctcctgatcgggctca

SEQ ID NO: 5054915 - DNA, 25 bp, Homo sapien
gagcctctgtggctgtctagccatg

SEQ ID NO: 5054916 - DNA, 25 bp, Homo sapien
gcagagataccctcctgagttcgag

SEQ ID NO: 5054917 - DNA, 25 bp, Homo sapien
tgcaggctcagtctatgaggtcaac

SEQ ID NO: 5054918 - DNA, 25 bp, Homo sapien
agactgccctgcacgttcagtgagg

SEQ ID NO: 5054919 - DNA, 25 bp, Homo sapien
ggcagtcccggccacaaggtctgca

SEQ ID NO: 5054920 - DNA, 25 bp, Homo sapien
acagcaccagactgccctgcacgtt

SEQ ID NO: 5054921 - DNA, 25 bp, Homo sapien
acacgaggcggccacgatgcagctt

SEQ ID NO: 5054922 - DNA, 25 bp, Homo sapien
agttccccacagcggggaagcccag

SEQ ID NO: 5054923 - DNA, 25 bp, Homo sapien
gagtgcgtggtgatcttccagaaca

SEQ ID NO: 5054924 - DNA, 25 bp, Homo sapien
cctggagattctgacgtggtggtct

SEQ ID NO: 5054925 - DNA, 25 bp, Homo sapien
tgagtggagccatttaccaagcccc

SEQ ID NO: 5054926 - DNA, 25 bp, Homo sapien
caaattaacagaaatgggtgctttc

SEQ ID NO: 5054927 - DNA, 25 bp, Homo sapien
gcagagcctgttggagcacgctgct

SEQ ID NO: 5054928 - DNA, 25 bp, Homo sapien
gaggaagccttcgaggatgagggag

SEQ ID NO: 5054929 - DNA, 25 bp, Homo sapien
agcttgcagagcctgttggagcacg

SEQ ID NO: 5054930 - DNA, 25 bp, Homo sapien
tggtgcctcgtggtccaaggaagcg

SEQ ID NO: 5054931 - DNA, 25 bp, Homo sapien
gcagccgcagtgagggcagccgagc

SEQ ID NO: 5054932 - DNA, 25 bp, Homo sapien
agtgagggcagccgagctgggcgtc

SEQ ID NO: 5054933 - DNA, 25 bp, Homo sapien
cgtttctgggtacggtggagcagct

SEQ ID NO: 5054934 - DNA, 25 bp, Homo sapien
tggctgcccgccgactgtggcgttt

SEQ ID NO: 5054935 - DNA, 25 bp, Homo sapien
acagcagcgtgtgtttcttcttgca

SEQ ID NO: 5054936 - DNA, 25 bp, Homo sapien
tggcggttgcgtcgctgggccctgg

SEQ ID NO: 5054937 - DNA, 25 bp, Homo sapien
aatctgtcacggcactagagtggcc

SEQ ID NO: 5054938 - DNA, 25 bp, Homo sapien
tcattcctgcgacacggagtctgag

SEQ ID NO: 5054939 - DNA, 25 bp, Homo sapien
tcttcatgggactaagcgacaggcg

SEQ ID NO: 5054940 - DNA, 25 bp, Homo sapien
gaactgtgacaagctccaagagtgg

SEQ ID NO: 5054941 - DNA, 25 bp, Homo sapien
gaggccagtagtaccccgataacaa

SEQ ID NO: 5054942 - DNA, 25 bp, Homo sapien
aggattacacatcaagggccaggtg

SEQ ID NO: 5054943 - DNA, 25 bp, Homo sapien
ggattacacatcaagggccaggtgc

SEQ ID NO: 5054944 - DNA, 25 bp, Homo sapien
actctgtgaggccagtagtaccccg

SEQ ID NO: 5054945 - DNA, 25 bp, Homo sapien
aacacacccataaggagccaggagc

SEQ ID NO: 5054946 - DNA, 25 bp, Homo sapien
tcaggcacatcataagggcaggagc

SEQ ID NO: 5054947 - DNA, 25 bp, Homo sapien
acacccgtggacaaacaggcgagcg

SEQ ID NO: 5054948 - DNA, 25 bp, Homo sapien
gcaagcaagggtgcagaaactgtca

SEQ ID NO: 5054949 - DNA, 25 bp, Homo sapien
tgaggaagtcgctgcagacctcggc

SEQ ID NO: 5054950 - DNA, 25 bp, Homo sapien
agacctcggccttgcgggacacgta

SEQ ID NO: 5054951 - DNA, 25 bp, Homo sapien
acgtacacgtggctatagggacagt

SEQ ID NO: 5054952 - DNA, 25 bp, Homo sapien
ttcaggaagtaggagcacaccggca

SEQ ID NO: 5054953 - DNA, 25 bp, Homo sapien
agcagccctgtagccctgtggctca

SEQ ID NO: 5054954 - DNA, 25 bp, Homo sapien
accgtccagggcaagatggcagcca

SEQ ID NO: 5054955 - DNA, 25 bp, Homo sapien
cacagtcagtgcttgttatcaccac

SEQ ID NO: 5054956 - DNA, 25 bp, Homo sapien
ccctgccgtgctctgtccagaggag

SEQ ID NO: 5054957 - DNA, 25 bp, Homo sapien
cgtccacattagacagcttggaatg

SEQ ID NO: 5054958 - DNA, 25 bp, Homo sapien
ttggagctgggagctaatgaacccg

SEQ ID NO: 5054959 - DNA, 25 bp, Homo sapien
aattgctcacaacagagttccgaag

SEQ ID NO: 5054960 - DNA, 25 bp, Homo sapien
gccacgtccacacaaataacaataa

SEQ ID NO: 5054961 - DNA, 25 bp, Homo sapien
gtcccatccgttttcttgcaggtgc

SEQ ID NO: 5054962 - DNA, 25 bp, Homo sapien
gggtatgaggaagggccggcaggga

SEQ ID NO: 5054963 - DNA, 25 bp, Homo sapien
aacgggtatgaggaagggccggcag

SEQ ID NO: 5054964 - DNA, 25 bp, Homo sapien
aagggccggcagggaccaagggcag

SEQ ID NO: 5054965 - DNA, 25 bp, Homo sapien
accaggagaaacgggtatgaggaag

SEQ ID NO: 5054966 - DNA, 25 bp, Homo sapien
tgtagtacatgcagtactccttcct

SEQ ID NO: 5054967 - DNA, 25 bp, Homo sapien
tgccgaagcggttgtagtacatgca

SEQ ID NO: 5054968 - DNA, 25 bp, Homo sapien
gccacggttgcacctgccgaagcgg

SEQ ID NO: 5054969 - DNA, 25 bp, Homo sapien
cgcgcctgccggatgatggccaggc

SEQ ID NO: 5054970 - DNA, 25 bp, Homo sapien
ctacagctgcctgcaggatccagcc

SEQ ID NO: 5054971 - DNA, 25 bp, Homo sapien
ggctacagctgcctgcaggatccag

SEQ ID NO: 5054972 - DNA, 25 bp, Homo sapien
acggctacagctgcctgcaggatcc

SEQ ID NO: 5054973 - DNA, 25 bp, Homo sapien
aacggctacagctgcctgcaggatc

SEQ ID NO: 5054974 - DNA, 25 bp, Homo sapien
tctgggcaccgctggatgtcaggct

SEQ ID NO: 5054975 - DNA, 25 bp, Homo sapien
tgtttgccgtacctggcatcatcct

SEQ ID NO: 5054976 - DNA, 25 bp, Homo sapien
tcgccaatgcgattacgggcgccgc

SEQ ID NO: 5054977 - DNA, 25 bp, Homo sapien
tccagacacagttgtcgaggcgtcg

SEQ ID NO: 5054978 - DNA, 25 bp, Homo sapien
gctcgcccgggcgtgtttgccgtac

SEQ ID NO: 5054979 - DNA, 25 bp, Homo sapien
tactttgtagaggacccctccgatg

SEQ ID NO: 5054980 - DNA, 25 bp, Homo sapien
cttggagagcttgttggcagatact

SEQ ID NO: 5054981 - DNA, 25 bp, Homo sapien
ctggcaactggacgcaggcggttca

SEQ ID NO: 5054982 - DNA, 25 bp, Homo sapien
gatgcagcggtagcctttgctccgc

SEQ ID NO: 5054983 - DNA, 25 bp, Homo sapien
tagcttttcacggccgtgggtgtca

SEQ ID NO: 5054984 - DNA, 25 bp, Homo sapien
ggggcgagggccttgtagcttttca

SEQ ID NO: 5054985 - DNA, 25 bp, Homo sapien
cttgtagcttttcacggccgtgggt

SEQ ID NO: 5054986 - DNA, 25 bp, Homo sapien
tgtagcttttcacggccgtgggtgt

SEQ ID NO: 5054987 - DNA, 25 bp, Homo sapien
atccgtccggcaggcccacgctgcc

SEQ ID NO: 5054988 - DNA, 25 bp, Homo sapien
attccttttccgcaacgggagctgc

SEQ ID NO: 5054989 - DNA, 25 bp, Homo sapien
tttccgcaacgggagctgcagatct

SEQ ID NO: 5054990 - DNA, 25 bp, Homo sapien
aggcctctcccatccgtccggcagg

SEQ ID NO: 5054991 - DNA, 25 bp, Homo sapien
tattaagcgtggataatgaaggcca

SEQ ID NO: 5054992 - DNA, 25 bp, Homo sapien
taaccttgactacaccagggcgagg

SEQ ID NO: 5054993 - DNA, 25 bp, Homo sapien
aaagcagccagccaatttactccga

SEQ ID NO: 5054994 - DNA, 25 bp, Homo sapien
cagaagtgacaatgccccaggattt

SEQ ID NO: 5054995 - DNA, 25 bp, Homo sapien
ctgcagagaccgtccagccgcttgg

SEQ ID NO: 5054996 - DNA, 25 bp, Homo sapien
gggcctgcagagaccgtccagccgc

SEQ ID NO: 5054997 - DNA, 25 bp, Homo sapien
tgagagccctgcaccagcggccagg

SEQ ID NO: 5054998 - DNA, 25 bp, Homo sapien
agagaccgtccagccgcttggcttt

SEQ ID NO: 5054999 - DNA, 25 bp, Homo sapien
taaagagactcacagcagacatccc

SEQ ID NO: 5055000 - DNA, 25 bp, Homo sapien
tcatgcggcccttgcaaggacagtg

SEQ ID NO: 5055001 - DNA, 25 bp, Homo sapien
tattagtgggacttcatggccccgg

SEQ ID NO: 5055002 - DNA, 25 bp, Homo sapien
cctggaaaggcgtggtgacctcagc

SEQ ID NO: 5055003 - DNA, 25 bp, Homo sapien
taggcctgagcaaatgagcagacag

SEQ ID NO: 5055004 - DNA, 25 bp, Homo sapien
ggagcagacactcaacgcccttgtt

SEQ ID NO: 5055005 - DNA, 25 bp, Homo sapien
catgtggacctctagttagtggccc

SEQ ID NO: 5055006 - DNA, 25 bp, Homo sapien
tcttgaactcgcaggctcagctatc

SEQ ID NO: 5055007 - DNA, 25 bp, Homo sapien
ccggccatgtctgttagatgtcaac

SEQ ID NO: 5055008 - DNA, 25 bp, Homo sapien
catgtctgttagatgtcaacataag

SEQ ID NO: 5055009 - DNA, 25 bp, Homo sapien
gccatgtctgttagatgtcaacata

SEQ ID NO: 5055010 - DNA, 25 bp, Homo sapien
ctgttagatgtcaacataagttttg

SEQ ID NO: 5055011 - DNA, 25 bp, Homo sapien
tgtgtccctcgaaacccgatgctga

SEQ ID NO: 5055012 - DNA, 25 bp, Homo sapien
tgtatttggcagatgcgacgggcac

SEQ ID NO: 5055013 - DNA, 25 bp, Homo sapien
tgctcattaaggagacacgcgtggg

SEQ ID NO: 5055014 - DNA, 25 bp, Homo sapien
gacagctgtctgtaaacccggaaga

SEQ ID NO: 5055015 - DNA, 25 bp, Homo sapien
gggtgcagtccgcacggcatgcagg

SEQ ID NO: 5055016 - DNA, 25 bp, Homo sapien
cggtagcgggtcttgatcaccttgc

SEQ ID NO: 5055017 - DNA, 25 bp, Homo sapien
tggatagtgagagccgccgggcccg

SEQ ID NO: 5055018 - DNA, 25 bp, Homo sapien
gaggccggcgtcttcttgacaatgc

SEQ ID NO: 5055019 - DNA, 25 bp, Homo sapien
gctaatttcacaattggttaatgaa

SEQ ID NO: 5055020 - DNA, 25 bp, Homo sapien
cacagatggctggtctgatcagatg

SEQ ID NO: 5055021 - DNA, 25 bp, Homo sapien
gcagccttgctctgttttatgtgga

SEQ ID NO: 5055022 - DNA, 25 bp, Homo sapien
gaaactagaattactactctgtgca

SEQ ID NO: 5055023 - DNA, 25 bp, Homo sapien
tctgactaacggcagcttgcacgcc

SEQ ID NO: 5055024 - DNA, 25 bp, Homo sapien
tgcagtttctgaggcggtgccaact

SEQ ID NO: 5055025 - DNA, 25 bp, Homo sapien
tgcctatgtccttctctgactaacg

SEQ ID NO: 5055026 - DNA, 25 bp, Homo sapien
ttgcacgcctgcaaacctacttttc

SEQ ID NO: 5055027 - DNA, 25 bp, Homo sapien
ccccgaccagtgtagctcgccaggg

SEQ ID NO: 5055028 - DNA, 25 bp, Homo sapien
tgaagggctatggagcagctgaaat

SEQ ID NO: 5055029 - DNA, 25 bp, Homo sapien
aagtcggcccagtctgagttgtccc

SEQ ID NO: 5055030 - DNA, 25 bp, Homo sapien
ctcgccagggctgcacaacaagggc

SEQ ID NO: 5055031 - DNA, 25 bp, Homo sapien
gaaagactctttggagagagtcctg

SEQ ID NO: 5055032 - DNA, 25 bp, Homo sapien
ggagacccagctccgccatgtggca

SEQ ID NO: 5055033 - DNA, 25 bp, Homo sapien
gtcctggcaacaccctccacagaaa

SEQ ID NO: 5055034 - DNA, 25 bp, Homo sapien
gctccgccatgtggcacggccttct

SEQ ID NO: 5055035 - DNA, 25 bp, Homo sapien
gggtagcagcgagtgtgctgacggc

SEQ ID NO: 5055036 - DNA, 25 bp, Homo sapien
gaggagaggggtagcagcgagtgtg

SEQ ID NO: 5055037 - DNA, 25 bp, Homo sapien
tagcagcgagtgtgctgacggctga

SEQ ID NO: 5055038 - DNA, 25 bp, Homo sapien
aggagaggggtagcagcgagtgtgc

SEQ ID NO: 5055039 - DNA, 25 bp, Homo sapien
ctttcacagccgcaggccccacgtt

SEQ ID NO: 5055040 - DNA, 25 bp, Homo sapien
cagccgcaggccccacgttcaggcc

SEQ ID NO: 5055041 - DNA, 25 bp, Homo sapien
gccgcaggccccacgttcaggccac

SEQ ID NO: 5055042 - DNA, 25 bp, Homo sapien
ttcacagccgcaggccccacgttca

SEQ ID NO: 5055043 - DNA, 25 bp, Homo sapien
aggtggtgcaggcacgggcgtgggc

SEQ ID NO: 5055044 - DNA, 25 bp, Homo sapien
ggcgtgggcgcggtctcctcttcag

SEQ ID NO: 5055045 - DNA, 25 bp, Homo sapien
acgggcgtgggcgcggtctcctctt

SEQ ID NO: 5055046 - DNA, 25 bp, Homo sapien
gtgggcgcggtctcctcttcaggat

SEQ ID NO: 5055047 - DNA, 25 bp, Homo sapien
aagtctgccaagacacgtgactggg

SEQ ID NO: 5055048 - DNA, 25 bp, Homo sapien
cggacaggtgtcctgcacttgattc

SEQ ID NO: 5055049 - DNA, 25 bp, Homo sapien
aaagtctgccaagacacgtgactgg

SEQ ID NO: 5055050 - DNA, 25 bp, Homo sapien
aggctctcggacaggtgtcctgcac

SEQ ID NO: 5055051 - DNA, 25 bp, Homo sapien
cgccactcatctctgcgcagggcag

SEQ ID NO: 5055052 - DNA, 25 bp, Homo sapien
ctggcaaccaccctgcggtgcacct

SEQ ID NO: 5055053 - DNA, 25 bp, Homo sapien
tcgggggccgccactcatctctgcg

SEQ ID NO: 5055054 - DNA, 25 bp, Homo sapien
gccctgcgtgctcctgcctcctcgg

SEQ ID NO: 5055055 - DNA, 25 bp, Homo sapien
ccacagcaccttcttaacaggcagg

SEQ ID NO: 5055056 - DNA, 25 bp, Homo sapien
agcctgaggctcacgtgcacgcagg

SEQ ID NO: 5055057 - DNA, 25 bp, Homo sapien
ttaacaggcaggacggacaataagc

SEQ ID NO: 5055058 - DNA, 25 bp, Homo sapien
caggacggacaataagccggcaatt

SEQ ID NO: 5055059 - DNA, 25 bp, Homo sapien
gaagaaacggaaggcaaggggcaca

SEQ ID NO: 5055060 - DNA, 25 bp, Homo sapien
cggccagtgtctcacatcctcatcc

SEQ ID NO: 5055061 - DNA, 25 bp, Homo sapien
tcggcacccggccagtgtctcacat

SEQ ID NO: 5055062 - DNA, 25 bp, Homo sapien
gagcctcggcacccggccagtgtct

SEQ ID NO: 5055063 - DNA, 25 bp, Homo sapien
tgtggcactttacacctccaggctc

SEQ ID NO: 5055064 - DNA, 25 bp, Homo sapien
ggctgacctctttcgcacgggtaaa

SEQ ID NO: 5055065 - DNA, 25 bp, Homo sapien
tgagcaatatagtggcagggctgac

SEQ ID NO: 5055066 - DNA, 25 bp, Homo sapien
ccttttcctgaactggcgatggcca

SEQ ID NO: 5055067 - DNA, 25 bp, Homo sapien
tgtgacggaatttctaatgccaggg

SEQ ID NO: 5055068 - DNA, 25 bp, Homo sapien
gattgaacgcggcaattacgctgca

SEQ ID NO: 5055069 - DNA, 25 bp, Homo sapien
gatgggatcgctttctcctggccgt

SEQ ID NO: 5055070 - DNA, 25 bp, Homo sapien
aatgccagggaaattgattgaacgc

SEQ ID NO: 5055071 - DNA, 25 bp, Homo sapien
ggggagtttcgatactggcccagca

SEQ ID NO: 5055072 - DNA, 25 bp, Homo sapien
tgctgcaaattacttggtatctgct

SEQ ID NO: 5055073 - DNA, 25 bp, Homo sapien
cagcattagcaggttattgctgcaa

SEQ ID NO: 5055074 - DNA, 25 bp, Homo sapien
tgaacaggggagtttcgatactggc

SEQ ID NO: 5055075 - DNA, 25 bp, Homo sapien
tgcttgagagcctgcggactccgct

SEQ ID NO: 5055076 - DNA, 25 bp, Homo sapien
ttggcctggcgtcagtggcctcacg

SEQ ID NO: 5055077 - DNA, 25 bp, Homo sapien
ggtcagccgcctgagtgaccaggcc

SEQ ID NO: 5055078 - DNA, 25 bp, Homo sapien
tgcggccagcttggagtctcacggt

SEQ ID NO: 5055079 - DNA, 25 bp, Homo sapien
tgagggcctgtctccgccggaggct

SEQ ID NO: 5055080 - DNA, 25 bp, Homo sapien
ggtgcgtggtgacctgtaccaggcc

SEQ ID NO: 5055081 - DNA, 25 bp, Homo sapien
ggtgccgcttttcttgtctccagga

SEQ ID NO: 5055082 - DNA, 25 bp, Homo sapien
ccggctcggtggcaggcgacatagt

SEQ ID NO: 5055083 - DNA, 25 bp, Homo sapien
tccgactgccaacggaaggaggaag

SEQ ID NO: 5055084 - DNA, 25 bp, Homo sapien
cttggtgcggctcttcactttgtaa

SEQ ID NO: 5055085 - DNA, 25 bp, Homo sapien
ggaggcatggtccttgctgctggcc

SEQ ID NO: 5055086 - DNA, 25 bp, Homo sapien
gctgcgtctccggatgatcttggtg

SEQ ID NO: 5055087 - DNA, 25 bp, Homo sapien
ggtcagctatgagctgcggcttctc

SEQ ID NO: 5055088 - DNA, 25 bp, Homo sapien
ttgcacacattctctgcagccactc

SEQ ID NO: 5055089 - DNA, 25 bp, Homo sapien
caccttgtttgccatgccagcagag

SEQ ID NO: 5055090 - DNA, 25 bp, Homo sapien
tccaccttgtttgccatgccagcag

SEQ ID NO: 5055091 - DNA, 25 bp, Homo sapien
gaggcagccacccatttgtagttgt

SEQ ID NO: 5055092 - DNA, 25 bp, Homo sapien
cggaacttgttagttcgacaggtca

SEQ ID NO: 5055093 - DNA, 25 bp, Homo sapien
gagcaacccggggactcttcgagga

SEQ ID NO: 5055094 - DNA, 25 bp, Homo sapien
gttcgacaggtcacaaccagcgagg

SEQ ID NO: 5055095 - DNA, 25 bp, Homo sapien
tgggaagctcgccttgacggcaatc

SEQ ID NO: 5055096 - DNA, 25 bp, Homo sapien
agcacagctggccacggaatgagaa

SEQ ID NO: 5055097 - DNA, 25 bp, Homo sapien
cccactgagccagacggaactggct

SEQ ID NO: 5055098 - DNA, 25 bp, Homo sapien
gacggaactggctgatctgtgtggc

SEQ ID NO: 5055099 - DNA, 25 bp, Homo sapien
acgttctgaccctgactgagctgga

SEQ ID NO: 5055100 - DNA, 25 bp, Homo sapien
tctcaaggacatgctgctgcgggac

SEQ ID NO: 5055101 - DNA, 25 bp, Homo sapien
ggagtatttcttgcgccacgaaggc

SEQ ID NO: 5055102 - DNA, 25 bp, Homo sapien
cccatggtgggaagagtagcccctc

SEQ ID NO: 5055103 - DNA, 25 bp, Homo sapien
ggatctgccgccgtaatatctcctt

SEQ ID NO: 5055104 - DNA, 25 bp, Homo sapien
tctgccgccgtaatatctccttttc

SEQ ID NO: 5055105 - DNA, 25 bp, Homo sapien
gtaggcggatctgccgccgtaatat

SEQ ID NO: 5055106 - DNA, 25 bp, Homo sapien
ctgcagtaggcggatctgccgccgt

SEQ ID NO: 5055107 - DNA, 25 bp, Homo sapien
aggacccgccgtcgcgctgacaacg

SEQ ID NO: 5055108 - DNA, 25 bp, Homo sapien
gacgtcatcgctacgcgaccttttt

SEQ ID NO: 5055109 - DNA, 25 bp, Homo sapien
acgtcactagtgagcgccgggaagt

SEQ ID NO: 5055110 - DNA, 25 bp, Homo sapien
cggatgtctgccgaccgccgaggac

SEQ ID NO: 5055111 - DNA, 25 bp, Homo sapien
ataccgcagttccttcccacagtcc

SEQ ID NO: 5055112 - DNA, 25 bp, Homo sapien
tccgggatcgcgtccccttgggaga

SEQ ID NO: 5055113 - DNA, 25 bp, Homo sapien
acccagcccataccgcagttccttc

SEQ ID NO: 5055114 - DNA, 25 bp, Homo sapien
gcccagcttgtgcagtccgggatcg

SEQ ID NO: 5055115 - DNA, 25 bp, Homo sapien
tagaactaccggatatgagggcgat

SEQ ID NO: 5055116 - DNA, 25 bp, Homo sapien
gagaacgaccatacccaatagaaga

SEQ ID NO: 5055117 - DNA, 25 bp, Homo sapien
cgcagcaccgcagaaaactatggag

SEQ ID NO: 5055118 - DNA, 25 bp, Homo sapien
tacaagtgtaaacctctgtgcgctg

SEQ ID NO: 5055119 - DNA, 25 bp, Homo sapien
gaagaggatacaatatggagactca

SEQ ID NO: 5055120 - DNA, 25 bp, Homo sapien
aagaagaaagagtataggaaatgag

SEQ ID NO: 5055121 - DNA, 25 bp, Homo sapien
gctgaagaggatacaatatggagac

SEQ ID NO: 5055122 - DNA, 25 bp, Homo sapien
aggctgaagaggatacaatatggag

SEQ ID NO: 5055123 - DNA, 25 bp, Homo sapien
agagtcacctaaaccgcctgctgtg

SEQ ID NO: 5055124 - DNA, 25 bp, Homo sapien
gagtcacctaaaccgcctgctgtgc

SEQ ID NO: 5055125 - DNA, 25 bp, Homo sapien
ttcggaagggcagcgcactgcacat

SEQ ID NO: 5055126 - DNA, 25 bp, Homo sapien
tgctgtgcacaccggtgttcggaag

SEQ ID NO: 5055127 - DNA, 25 bp, Homo sapien
aggtcaggcattgccatcaggctct

SEQ ID NO: 5055128 - DNA, 25 bp, Homo sapien
gctctccgggaccatggtgggtgaa

SEQ ID NO: 5055129 - DNA, 25 bp, Homo sapien
ccacgggcattaaacactggccaaa

SEQ ID NO: 5055130 - DNA, 25 bp, Homo sapien
gtgccaggcttccacgggcattaaa

SEQ ID NO: 5055131 - DNA, 25 bp, Homo sapien
agcggctggcccctaaccccatcgc

SEQ ID NO: 5055132 - DNA, 25 bp, Homo sapien
tctgccccaggagcgggtgtaagcc

SEQ ID NO: 5055133 - DNA, 25 bp, Homo sapien
ccctggccttagcagggctcttctg

SEQ ID NO: 5055134 - DNA, 25 bp, Homo sapien
agggagcaacactccttccagagct

SEQ ID NO: 5055135 - DNA, 25 bp, Homo sapien
tcgggacacatcacgtgagcaggat

SEQ ID NO: 5055136 - DNA, 25 bp, Homo sapien
tctggacgtgcccattcgggacaca

SEQ ID NO: 5055137 - DNA, 25 bp, Homo sapien
ggtttccaccttgccgctatggcga

SEQ ID NO: 5055138 - DNA, 25 bp, Homo sapien
tgtttagtctatgcacgcctcagtg

SEQ ID NO: 5055139 - DNA, 25 bp, Homo sapien
tgccgctatggtgaaggatgctgcc

SEQ ID NO: 5055140 - DNA, 25 bp, Homo sapien
aggatgctgccgctttggcgaagga

SEQ ID NO: 5055141 - DNA, 25 bp, Homo sapien
tgctgccgctttggcgaaggatgct

SEQ ID NO: 5055142 - DNA, 25 bp, Homo sapien
atgctgccgctatggtgaaggatgc

SEQ ID NO: 5055143 - DNA, 25 bp, Homo sapien
cacggtaactcttggaggagctgcc

SEQ ID NO: 5055144 - DNA, 25 bp, Homo sapien
aggcttattccagagggccgcacgg

SEQ ID NO: 5055145 - DNA, 25 bp, Homo sapien
tcggcacaggcccaaagttgtttgt

SEQ ID NO: 5055146 - DNA, 25 bp, Homo sapien
cccgggcacaggctcagagttttaa

SEQ ID NO: 5055147 - DNA, 25 bp, Homo sapien
gggagacaggtcagtaggaccccac

SEQ ID NO: 5055148 - DNA, 25 bp, Homo sapien
aaggaggccacgaatgcaaggacat

SEQ ID NO: 5055149 - DNA, 25 bp, Homo sapien
cctgtgcactcgcagaggcttctct

SEQ ID NO: 5055150 - DNA, 25 bp, Homo sapien
tcttcctcatgtgtccagtggcgcg

SEQ ID NO: 5055151 - DNA, 25 bp, Homo sapien
ctcggtctgattgggcgtgcacaca

SEQ ID NO: 5055152 - DNA, 25 bp, Homo sapien
cacaagtgctcggtctgattgggcg

SEQ ID NO: 5055153 - DNA, 25 bp, Homo sapien
gtgcacacaggacccctacatctgg

SEQ ID NO: 5055154 - DNA, 25 bp, Homo sapien
gggtagtgtcacaagtgctcggtct

SEQ ID NO: 5055155 - DNA, 25 bp, Homo sapien
ctcccatgaggcctgacataatgaa

SEQ ID NO: 5055156 - DNA, 25 bp, Homo sapien
ccagcttgggaggacgccggggcca

SEQ ID NO: 5055157 - DNA, 25 bp, Homo sapien
catgaggcctgacataatgaacagg

SEQ ID NO: 5055158 - DNA, 25 bp, Homo sapien
cccatgaggcctgacataatgaaca

SEQ ID NO: 5055159 - DNA, 25 bp, Homo sapien
aggtcaataattttgagcagagagg

SEQ ID NO: 5055160 - DNA, 25 bp, Homo sapien
tggccgggagacaggtcaataattt

SEQ ID NO: 5055161 - DNA, 25 bp, Homo sapien
gtcaataattttgagcagagaggat

SEQ ID NO: 5055162 - DNA, 25 bp, Homo sapien
ggtgtggccgggagacaggtcaata

SEQ ID NO: 5055163 - DNA, 25 bp, Homo sapien
tgtccaggcatgaggtggagaccca

SEQ ID NO: 5055164 - DNA, 25 bp, Homo sapien
ggcaggctatgggaccaccaacttt

SEQ ID NO: 5055165 - DNA, 25 bp, Homo sapien
cccggacaggccacagcgtcctgtc

SEQ ID NO: 5055166 - DNA, 25 bp, Homo sapien
ccagggggctgtgagaacaagagcc

SEQ ID NO: 5055167 - DNA, 25 bp, Homo sapien
tcaggctcggcggggtccggagcag

SEQ ID NO: 5055168 - DNA, 25 bp, Homo sapien
cccagggagcccctccgtcagggcg

SEQ ID NO: 5055169 - DNA, 25 bp, Homo sapien
ggggagggcattggcgtccagcacc

SEQ ID NO: 5055170 - DNA, 25 bp, Homo sapien
tgctatgcgcgtggggtgcccgagt

SEQ ID NO: 5055171 - DNA, 25 bp, Homo sapien
ccgcgacgctccggcgctggaaggg

SEQ ID NO: 5055172 - DNA, 25 bp, Homo sapien
cggcccgcgacgctccggcgctgga

SEQ ID NO: 5055173 - DNA, 25 bp, Homo sapien
ccagcggcccgcgacgctccggcgc

SEQ ID NO: 5055174 - DNA, 25 bp, Homo sapien
gcccgcgacgctccggcgctggaag

SEQ ID NO: 5055175 - DNA, 25 bp, Homo sapien
cgcggggcgatgcggagaaggcggg

SEQ ID NO: 5055176 - DNA, 25 bp, Homo sapien
ctgtcggcgaagactggtgggggcc

SEQ ID NO: 5055177 - DNA, 25 bp, Homo sapien
ggcgcggggcgatgcggagaaggcg

SEQ ID NO: 5055178 - DNA, 25 bp, Homo sapien
ggggcgcggggcgatgcggagaagg

SEQ ID NO: 5055179 - DNA, 25 bp, Homo sapien
gagcggacacgtgcgctgccgcggc

SEQ ID NO: 5055180 - DNA, 25 bp, Homo sapien
ctgctgagcggacacgtgcgctgcc

SEQ ID NO: 5055181 - DNA, 25 bp, Homo sapien
gctgagcggacacgtgcgctgccgc

SEQ ID NO: 5055182 - DNA, 25 bp, Homo sapien
cgcggccacagccggcttggggtcg

SEQ ID NO: 5055183 - DNA, 25 bp, Homo sapien
agcaggtcctggttgacacagccgg

SEQ ID NO: 5055184 - DNA, 25 bp, Homo sapien
gcaggtcctggttgacacagccggg

SEQ ID NO: 5055185 - DNA, 25 bp, Homo sapien
caggtcctggttgacacagccgggg

SEQ ID NO: 5055186 - DNA, 25 bp, Homo sapien
ggtcctggttgacacagccggggct

SEQ ID NO: 5055187 - DNA, 25 bp, Homo sapien
ggcagtgtgaccccgggcggcctca

SEQ ID NO: 5055188 - DNA, 25 bp, Homo sapien
gcagatgcatgagtgcaggccccac

SEQ ID NO: 5055189 - DNA, 25 bp, Homo sapien
gatgcatgagtgcaggccccacagc

SEQ ID NO: 5055190 - DNA, 25 bp, Homo sapien
cacagcagatgcatgagtgcaggcc

SEQ ID NO: 5055191 - DNA, 25 bp, Homo sapien
ctataagcacggcggctgcccggcg

SEQ ID NO: 5055192 - DNA, 25 bp, Homo sapien
gggtcctgtggactccgcaggtagc

SEQ ID NO: 5055193 - DNA, 25 bp, Homo sapien
gtcctgtggactccgcaggtagccc

SEQ ID NO: 5055194 - DNA, 25 bp, Homo sapien
caggaagttgggcacgtggcctggg

SEQ ID NO: 5055195 - DNA, 25 bp, Homo sapien
caaaagggctagtggcaggacagga

SEQ ID NO: 5055196 - DNA, 25 bp, Homo sapien
ccagtagcctatctggtttggctgc

SEQ ID NO: 5055197 - DNA, 25 bp, Homo sapien
catggtcggagaccttggacttgcc

SEQ ID NO: 5055198 - DNA, 25 bp, Homo sapien
gctgctgatcatacccccttgcggt

SEQ ID NO: 5055199 - DNA, 25 bp, Homo sapien
tgggccacggtgaccaactcctcca

SEQ ID NO: 5055200 - DNA, 25 bp, Homo sapien
cctcggggctgtcatagtgggccac

SEQ ID NO: 5055201 - DNA, 25 bp, Homo sapien
caaaaggcgtggtcacagcgggcca

SEQ ID NO: 5055202 - DNA, 25 bp, Homo sapien
agcaaaaggcgtggtcacagcgggc

SEQ ID NO: 5055203 - DNA, 25 bp, Homo sapien
ctggattgattctgctcaagggaag

SEQ ID NO: 5055204 - DNA, 25 bp, Homo sapien
cagggcaggagactggattgattct

SEQ ID NO: 5055205 - DNA, 25 bp, Homo sapien
ggaagagcagtagtaacctggccgc

SEQ ID NO: 5055206 - DNA, 25 bp, Homo sapien
tgaggtccttgggatgggtgagtcc

SEQ ID NO: 5055207 - DNA, 25 bp, Homo sapien
gtgttggatggcataggggtgggat

SEQ ID NO: 5055208 - DNA, 25 bp, Homo sapien
ctgtaattgtcggaggggaggcacg

SEQ ID NO: 5055209 - DNA, 25 bp, Homo sapien
tgttggatggcataggggtgggatg

SEQ ID NO: 5055210 - DNA, 25 bp, Homo sapien
agtgttggatggcataggggtggga

SEQ ID NO: 5055211 - DNA, 25 bp, Homo sapien
tgctggggtcatgcaggcgcagcag

SEQ ID NO: 5055212 - DNA, 25 bp, Homo sapien
ctggggtcatgcaggcgcagcagca

SEQ ID NO: 5055213 - DNA, 25 bp, Homo sapien
cagcttccgcagggggccgcggagc

SEQ ID NO: 5055214 - DNA, 25 bp, Homo sapien
cagcaccagcttccgcagggggccg

SEQ ID NO: 5055215 - DNA, 25 bp, Homo sapien
tgcagcaccagcttccgcagggggc

SEQ ID NO: 5055216 - DNA, 25 bp, Homo sapien
accagcttccgcagggggccgcgga

SEQ ID NO: 5055217 - DNA, 25 bp, Homo sapien
gagtcccaaggagcccgacggccga

SEQ ID NO: 5055218 - DNA, 25 bp, Homo sapien
ggccgaggcgcggattgagtcccgt

SEQ ID NO: 5055219 - DNA, 25 bp, Homo sapien
ccgaggcgcggattgagtcccgtgt

SEQ ID NO: 5055220 - DNA, 25 bp, Homo sapien
acggccgaggcgcggattgagtccc

SEQ ID NO: 5055221 - DNA, 25 bp, Homo sapien
ggggcggccagcgcggagcgaggaa

SEQ ID NO: 5055222 - DNA, 25 bp, Homo sapien
gcagtcagggcaggcggagacagag

SEQ ID NO: 5055223 - DNA, 25 bp, Homo sapien
cgaggaagcggcgggtctagggaag

SEQ ID NO: 5055224 - DNA, 25 bp, Homo sapien
gggagggcgcagtcagggcaggcgg

SEQ ID NO: 5055225 - DNA, 25 bp, Homo sapien
aggaaaagtcgagcggggaggagct

SEQ ID NO: 5055226 - DNA, 25 bp, Homo sapien
tcgagcggggaggagcttggcggga

SEQ ID NO: 5055227 - DNA, 25 bp, Homo sapien
cttggcgggacacggccctggaggg

SEQ ID NO: 5055228 - DNA, 25 bp, Homo sapien
gggaggagcttggcgggacacggcc

SEQ ID NO: 5055229 - DNA, 25 bp, Homo sapien
ccttcgcccagtgcgcccaggagcg

SEQ ID NO: 5055230 - DNA, 25 bp, Homo sapien
ggcagcagcgtgctcacgtgccgca

SEQ ID NO: 5055231 - DNA, 25 bp, Homo sapien
agcgctgcacccacgagccgcgcgt

SEQ ID NO: 5055232 - DNA, 25 bp, Homo sapien
agctccgcgctcaggagccgcacag

SEQ ID NO: 5055233 - DNA, 25 bp, Homo sapien
agacctcgccgcgaccgggccaagc

SEQ ID NO: 5055234 - DNA, 25 bp, Homo sapien
ctgggactcggggtcagcctcttgc

SEQ ID NO: 5055235 - DNA, 25 bp, Homo sapien
ggactcggggtcagcctcttgcaga

SEQ ID NO: 5055236 - DNA, 25 bp, Homo sapien
agcctcttgcagacctcgccgcgac

SEQ ID NO: 5055237 - DNA, 25 bp, Homo sapien
gagccgtgcggtgggccggctctgc

SEQ ID NO: 5055238 - DNA, 25 bp, Homo sapien
gtgaggagtcgctccaggatgacct

SEQ ID NO: 5055239 - DNA, 25 bp, Homo sapien
tcctgcgattcagcgcgaggtggcc

SEQ ID NO: 5055240 - DNA, 25 bp, Homo sapien
ccaaccagcgcacagtgggttcggg

SEQ ID NO: 5055241 - DNA, 25 bp, Homo sapien
tgaagaaggccatagccgtgagacg

SEQ ID NO: 5055242 - DNA, 25 bp, Homo sapien
ccatagccgtgagacgctgcgggtc

SEQ ID NO: 5055243 - DNA, 25 bp, Homo sapien
cctgtgaagaaggccatagccgtga

SEQ ID NO: 5055244 - DNA, 25 bp, Homo sapien
aaggccatagccgtgagacgctgcg

SEQ ID NO: 5055245 - DNA, 25 bp, Homo sapien
ctgcgaagccgagggagcaagtctg

SEQ ID NO: 5055246 - DNA, 25 bp, Homo sapien
gaggcctcgcaggtggtggtcggca

SEQ ID NO: 5055247 - DNA, 25 bp, Homo sapien
aagaggcctcgcaggtggtggtcgg

SEQ ID NO: 5055248 - DNA, 25 bp, Homo sapien
cgagggagcaagtctgcgaagaggc

SEQ ID NO: 5055249 - DNA, 25 bp, Homo sapien
acgtgaccaccatgcggcctccatc

SEQ ID NO: 5055250 - DNA, 25 bp, Homo sapien
ggtgagcagcgccttcaaggcctcc

SEQ ID NO: 5055251 - DNA, 25 bp, Homo sapien
tgctccatgcacgtgaccaccatgc

SEQ ID NO: 5055252 - DNA, 25 bp, Homo sapien
tccccggtgagcagcgccttcaagg

SEQ ID NO: 5055253 - DNA, 25 bp, Homo sapien
ccagcgcaagcagcagatgtgggta

SEQ ID NO: 5055254 - DNA, 25 bp, Homo sapien
gaacccaaatcttgggcatgtcggg

SEQ ID NO: 5055255 - DNA, 25 bp, Homo sapien
gggtagaagcccctcgtggctccca

SEQ ID NO: 5055256 - DNA, 25 bp, Homo sapien
tgtggtggccctcggtgggacagaa

SEQ ID NO: 5055257 - DNA, 25 bp, Homo sapien
agcacctgcccatttacacgctggt

SEQ ID NO: 5055258 - DNA, 25 bp, Homo sapien
cttaggctgcgccagagctcggctg

SEQ ID NO: 5055259 - DNA, 25 bp, Homo sapien
tacacgctggttacggcttaggctg

SEQ ID NO: 5055260 - DNA, 25 bp, Homo sapien
tggttacggcttaggctgcgccaga

SEQ ID NO: 5055261 - DNA, 25 bp, Homo sapien
ggggtagcagcgcacacaccacgtc

SEQ ID NO: 5055262 - DNA, 25 bp, Homo sapien
cgatcggcgggcagagagcggggta

SEQ ID NO: 5055263 - DNA, 25 bp, Homo sapien
agggccagtgcgctcagcactcgca

SEQ ID NO: 5055264 - DNA, 25 bp, Homo sapien
agtgcgctcagcactcgcagggccg

SEQ ID NO: 5055265 - DNA, 25 bp, Homo sapien
tgaggacagggtgagcactgtcgcc

SEQ ID NO: 5055266 - DNA, 25 bp, Homo sapien
aggcaggcagccgtgtacaacgcga

SEQ ID NO: 5055267 - DNA, 25 bp, Homo sapien
gcgaggtcggcaagaactccctcct

SEQ ID NO: 5055268 - DNA, 25 bp, Homo sapien
agggtgagcactgtcgcctgggtcc

SEQ ID NO: 5055269 - DNA, 25 bp, Homo sapien
gacccccaggccggttcgcacaaca

SEQ ID NO: 5055270 - DNA, 25 bp, Homo sapien
cccccaggccggttcgcacaacatc

SEQ ID NO: 5055271 - DNA, 25 bp, Homo sapien
ttcgcacaacatcccttccctcccc

SEQ ID NO: 5055272 - DNA, 25 bp, Homo sapien
gttcgcacaacatcccttccctccc

SEQ ID NO: 5055273 - DNA, 25 bp, Homo sapien
ttgtgcccaggactgacctagaagc

SEQ ID NO: 5055274 - DNA, 25 bp, Homo sapien
tgctcctcctgcgaagttgtgccca

SEQ ID NO: 5055275 - DNA, 25 bp, Homo sapien
gacgtgcctacaatgggcctttgag

SEQ ID NO: 5055276 - DNA, 25 bp, Homo sapien
tcagtgctgtcagggttagagcccc

SEQ ID NO: 5055277 - DNA, 25 bp, Homo sapien
agtgagtgattcgtgttgtttccag

SEQ ID NO: 5055278 - DNA, 25 bp, Homo sapien
gagtgattcgtgttgtttccagtca

SEQ ID NO: 5055279 - DNA, 25 bp, Homo sapien
ggaaaagtgagtgattcgtgttgtt

SEQ ID NO: 5055280 - DNA, 25 bp, Homo sapien
aaagtgagtgattcgtgttgtttcc

SEQ ID NO: 5055281 - DNA, 25 bp, Homo sapien
agggggactgccccgcacacagact

SEQ ID NO: 5055282 - DNA, 25 bp, Homo sapien
gggactgccccgcacacagactgtt

SEQ ID NO: 5055283 - DNA, 25 bp, Homo sapien
gactgccccgcacacagactgttca

SEQ ID NO: 5055284 - DNA, 25 bp, Homo sapien
actgccccgcacacagactgttcac

SEQ ID NO: 5055285 - DNA, 25 bp, Homo sapien
gcctgcagcctctcggacagcacca

SEQ ID NO: 5055286 - DNA, 25 bp, Homo sapien
gggcctgcagcctctcggacagcac

SEQ ID NO: 5055287 - DNA, 25 bp, Homo sapien
cagggcctgcagcctctcggacagc

SEQ ID NO: 5055288 - DNA, 25 bp, Homo sapien
cctgcagcctctcggacagcaccac

SEQ ID NO: 5055289 - DNA, 25 bp, Homo sapien
gcagaatgacagggtgggcctcccc

SEQ ID NO: 5055290 - DNA, 25 bp, Homo sapien
aggacaggagcggtgggcagggtga

SEQ ID NO: 5055291 - DNA, 25 bp, Homo sapien
cgcacagggcagaatgacagggtgg

SEQ ID NO: 5055292 - DNA, 25 bp, Homo sapien
gcgggggcgcacagggcagaatgac

SEQ ID NO: 5055293 - DNA, 25 bp, Homo sapien
gggctgagtcggctcagggacagct

SEQ ID NO: 5055294 - DNA, 25 bp, Homo sapien
aaggctctagactctgccagggatg

SEQ ID NO: 5055295 - DNA, 25 bp, Homo sapien
ctggtactgtgcagggctccgcagc

SEQ ID NO: 5055296 - DNA, 25 bp, Homo sapien
ccagggatgggagcggctcacacag

SEQ ID NO: 5055297 - DNA, 25 bp, Homo sapien
ttggggctagctcccagtcagggct

SEQ ID NO: 5055298 - DNA, 25 bp, Homo sapien
agcttggggctagctcccagtcagg

SEQ ID NO: 5055299 - DNA, 25 bp, Homo sapien
gaagcttggggctagctcccagtca

SEQ ID NO: 5055300 - DNA, 25 bp, Homo sapien
cttggggctagctcccagtcagggc

SEQ ID NO: 5055301 - DNA, 25 bp, Homo sapien
aggatgagggcggtggggcagccac

SEQ ID NO: 5055302 - DNA, 25 bp, Homo sapien
caggatgagggcggtggggcagcca

SEQ ID NO: 5055303 - DNA, 25 bp, Homo sapien
tcaggatgagggcggtggggcagcc

SEQ ID NO: 5055304 - DNA, 25 bp, Homo sapien
ggcagagccgcagtagtggctccac

SEQ ID NO: 5055305 - DNA, 25 bp, Homo sapien
aggcagagccgcagtagtggctcca

SEQ ID NO: 5055306 - DNA, 25 bp, Homo sapien
gaggcagagccgcagtagtggctcc

SEQ ID NO: 5055307 - DNA, 25 bp, Homo sapien
tggctcttctgctaactgcagcatg

SEQ ID NO: 5055308 - DNA, 25 bp, Homo sapien
tgctaactgcagcatgtccatgagt

SEQ ID NO: 5055309 - DNA, 25 bp, Homo sapien
tcttctgctaactgcagcatgtcca

SEQ ID NO: 5055310 - DNA, 25 bp, Homo sapien
taactgcagcatgtccatgagtgga

SEQ ID NO: 5055311 - DNA, 25 bp, Homo sapien
gtgtggacggggcaagaataagcgg

SEQ ID NO: 5055312 - DNA, 25 bp, Homo sapien
ctgtgtggacggggcaagaataagc

SEQ ID NO: 5055313 - DNA, 25 bp, Homo sapien
tgtgtggacggggcaagaataagcg

SEQ ID NO: 5055314 - DNA, 25 bp, Homo sapien
tgtggacggggcaagaataagcggg

SEQ ID NO: 5055315 - DNA, 25 bp, Homo sapien
caggagccggaaagcagccttgctc

SEQ ID NO: 5055316 - DNA, 25 bp, Homo sapien
gagccggaaagcagccttgctccca

SEQ ID NO: 5055317 - DNA, 25 bp, Homo sapien
gccttgctcccaggcaacgtctgct

SEQ ID NO: 5055318 - DNA, 25 bp, Homo sapien
tcccaggcaacgtctgcttctcggg

SEQ ID NO: 5055319 - DNA, 25 bp, Homo sapien
cgtggctggccccccacggccacca

SEQ ID NO: 5055320 - DNA, 25 bp, Homo sapien
gtggctggccccccacggccaccag

SEQ ID NO: 5055321 - DNA, 25 bp, Homo sapien
tcgtggctggccccccacggccacc

SEQ ID NO: 5055322 - DNA, 25 bp, Homo sapien
cttatagacgccacccagggaaggc

SEQ ID NO: 5055323 - DNA, 25 bp, Homo sapien
ggtgccaatgccaatgacattcacc

SEQ ID NO: 5055324 - DNA, 25 bp, Homo sapien
ttatagacgccacccagggaaggct

SEQ ID NO: 5055325 - DNA, 25 bp, Homo sapien
tgccaatgccaatgacattcacctc

SEQ ID NO: 5055326 - DNA, 25 bp, Homo sapien
ttgttgctgactacgatgaggactg

SEQ ID NO: 5055327 - DNA, 25 bp, Homo sapien
gttgctgactacgatgaggactgac

SEQ ID NO: 5055328 - DNA, 25 bp, Homo sapien
ccagcgcctcctcgtcaatgttgtt

SEQ ID NO: 5055329 - DNA, 25 bp, Homo sapien
gcctcctcgtcaatgttgttgctga

SEQ ID NO: 5055330 - DNA, 25 bp, Homo sapien
cacggcctgcagtatcaccgctgaa

SEQ ID NO: 5055331 - DNA, 25 bp, Homo sapien
gtatcaccgctgaaacttcagcaga

SEQ ID NO: 5055332 - DNA, 25 bp, Homo sapien
cagcagagtacctcactgtccttcc

SEQ ID NO: 5055333 - DNA, 25 bp, Homo sapien
gacacctgtgctcaccttctgcttg

SEQ ID NO: 5055334 - DNA, 25 bp, Homo sapien
cagggccagggcgactgctaggaag

SEQ ID NO: 5055335 - DNA, 25 bp, Homo sapien
ccagggcgactgctaggaagttggg

SEQ ID NO: 5055336 - DNA, 25 bp, Homo sapien
tcggaagaccttgcggatctcctga

SEQ ID NO: 5055337 - DNA, 25 bp, Homo sapien
cctgctgtagcaggtcaccactgtc

SEQ ID NO: 5055338 - DNA, 25 bp, Homo sapien
tccacacgctgtaggtgtccaggag

SEQ ID NO: 5055339 - DNA, 25 bp, Homo sapien
ggctttggccgccaggtccacccca

SEQ ID NO: 5055340 - DNA, 25 bp, Homo sapien
gaaaagccaaggcataggccacaaa

SEQ ID NO: 5055341 - DNA, 25 bp, Homo sapien
aaggcataggccacaaaggctgccc

SEQ ID NO: 5055342 - DNA, 25 bp, Homo sapien
gggggccaggaatgcaggatgaggc

SEQ ID NO: 5055343 - DNA, 25 bp, Homo sapien
ggggccaggaatgcaggatgaggcc

SEQ ID NO: 5055344 - DNA, 25 bp, Homo sapien
cagagtcggtgaagaatgggggcca

SEQ ID NO: 5055345 - DNA, 25 bp, Homo sapien
ctgtggaacagagtcggtgaagaat

SEQ ID NO: 5055346 - DNA, 25 bp, Homo sapien
tgggtggcacacctctcgccagggc

SEQ ID NO: 5055347 - DNA, 25 bp, Homo sapien
tggcttggggcctgtcgcctggaga

SEQ ID NO: 5055348 - DNA, 25 bp, Homo sapien
gtggcacacctctcgccagggcaag

SEQ ID NO: 5055349 - DNA, 25 bp, Homo sapien
gcttggggcctgtcgcctggagaca

SEQ ID NO: 5055350 - DNA, 25 bp, Homo sapien
ggccaccggcacacctcgcagctgg

SEQ ID NO: 5055351 - DNA, 25 bp, Homo sapien
gcagctggcccgctagcacgttgct

SEQ ID NO: 5055352 - DNA, 25 bp, Homo sapien
cagctggcccgctagcacgttgctg

SEQ ID NO: 5055353 - DNA, 25 bp, Homo sapien
gctggcccgctagcacgttgctgct

SEQ ID NO: 5055354 - DNA, 25 bp, Homo sapien
attgggggacctcgggccaagatgg

SEQ ID NO: 5055355 - DNA, 25 bp, Homo sapien
gattgggggacctcgggccaagatg

SEQ ID NO: 5055356 - DNA, 25 bp, Homo sapien
cccttgccttgccccgcaccagaca

SEQ ID NO: 5055357 - DNA, 25 bp, Homo sapien
ggcccttgccttgccccgcaccaga

SEQ ID NO: 5055358 - DNA, 25 bp, Homo sapien
ctgcgatcaagcgaagccgcgctgc

SEQ ID NO: 5055359 - DNA, 25 bp, Homo sapien
gcttctctggccctgcgatcaagcg

SEQ ID NO: 5055360 - DNA, 25 bp, Homo sapien
ccatctctagcagccgcttctctgg

SEQ ID NO: 5055361 - DNA, 25 bp, Homo sapien
agccgcgctgcgttggtggccacca

SEQ ID NO: 5055362 - DNA, 25 bp, Homo sapien
aggcagagcagcggtgtctccagca

SEQ ID NO: 5055363 - DNA, 25 bp, Homo sapien
gcagagcagcggtgtctccagcagc

SEQ ID NO: 5055364 - DNA, 25 bp, Homo sapien
ggcagagcagcggtgtctccagcag

SEQ ID NO: 5055365 - DNA, 25 bp, Homo sapien
ccgcgctcggcccagcaccccgtgg

SEQ ID NO: 5055366 - DNA, 25 bp, Homo sapien
gctcggcccagcaccccgtggccgc

SEQ ID NO: 5055367 - DNA, 25 bp, Homo sapien
gcgccgcccgcttacccctactcac

SEQ ID NO: 5055368 - DNA, 25 bp, Homo sapien
cgcgccgcccgcttacccctactca

SEQ ID NO: 5055369 - DNA, 25 bp, Homo sapien
agccctcgggcagggctcgcaccgt

SEQ ID NO: 5055370 - DNA, 25 bp, Homo sapien
gccctcgggcagggctcgcaccgtc

SEQ ID NO: 5055371 - DNA, 25 bp, Homo sapien
ccctcgggcagggctcgcaccgtca

SEQ ID NO: 5055372 - DNA, 25 bp, Homo sapien
cctcgggcagggctcgcaccgtcac

SEQ ID NO: 5055373 - DNA, 25 bp, Homo sapien
ggtgctcgaagaacgcaggatccgt

SEQ ID NO: 5055374 - DNA, 25 bp, Homo sapien
cgaagaacgcaggatccgtgtctgg

SEQ ID NO: 5055375 - DNA, 25 bp, Homo sapien
ggcccgaaggtgctcgaagaacgca

SEQ ID NO: 5055376 - DNA, 25 bp, Homo sapien
agcaccgaggccaggaactgcacgt

SEQ ID NO: 5055377 - DNA, 25 bp, Homo sapien
caaggacttccaccggccataggtg

SEQ ID NO: 5055378 - DNA, 25 bp, Homo sapien
gacaaggacttccaccggccatagg

SEQ ID NO: 5055379 - DNA, 25 bp, Homo sapien
cgtggggggctcgtcgcgcggacgg

SEQ ID NO: 5055380 - DNA, 25 bp, Homo sapien
gggacaaggacttccaccggccata

SEQ ID NO: 5055381 - DNA, 25 bp, Homo sapien
aggaagcgcacacagtcgcgcaagc

SEQ ID NO: 5055382 - DNA, 25 bp, Homo sapien
acagtcgcgcaagccggcggccaag

SEQ ID NO: 5055383 - DNA, 25 bp, Homo sapien
ccgcaggcggaaggcgcgcaggaag

SEQ ID NO: 5055384 - DNA, 25 bp, Homo sapien
ggccaaggcgaaggcgccgccgaac

SEQ ID NO: 5055385 - DNA, 25 bp, Homo sapien
cccgcgcgccaatagcccaacgcca

SEQ ID NO: 5055386 - DNA, 25 bp, Homo sapien
ggcccgcgcgccaatagcccaacgc

SEQ ID NO: 5055387 - DNA, 25 bp, Homo sapien
ccgcgcgccaatagcccaacgccat

SEQ ID NO: 5055388 - DNA, 25 bp, Homo sapien
ccggcccgcgcgccaatagcccaac

SEQ ID NO: 5055389 - DNA, 25 bp, Homo sapien
ccgcgcgcgcctcggggtcctgctc

SEQ ID NO: 5055390 - DNA, 25 bp, Homo sapien
aggtcagtgagcagcggccgcgccg

SEQ ID NO: 5055391 - DNA, 25 bp, Homo sapien
cgcgcctcggggtcctgctccgccg

SEQ ID NO: 5055392 - DNA, 25 bp, Homo sapien
ggtggcctggtagaggtcagtgagc

SEQ ID NO: 5055393 - DNA, 25 bp, Homo sapien
cttatcgtgccgtttgggagcggca

SEQ ID NO: 5055394 - DNA, 25 bp, Homo sapien
cggcctatggcgcactccctgtggg

SEQ ID NO: 5055395 - DNA, 25 bp, Homo sapien
aggcccaacggcctctttggagcgc

SEQ ID NO: 5055396 - DNA, 25 bp, Homo sapien
ggctaatagtatcggcgcgccgaga

SEQ ID NO: 5055397 - DNA, 25 bp, Homo sapien
ccagtcgctcgtgtctctgcccttt

SEQ ID NO: 5055398 - DNA, 25 bp, Homo sapien
ccccagtcgctcgtgtctctgccct

SEQ ID NO: 5055399 - DNA, 25 bp, Homo sapien
gaggtgcccccagtcgctcgtgtct

SEQ ID NO: 5055400 - DNA, 25 bp, Homo sapien
cagaggtgcccccagtcgctcgtgt

SEQ ID NO: 5055401 - DNA, 25 bp, Homo sapien
gatcttgttgaaagctgcgatatcg

SEQ ID NO: 5055402 - DNA, 25 bp, Homo sapien
cagatcttgttgaaagctgcgatat

SEQ ID NO: 5055403 - DNA, 25 bp, Homo sapien
ttgttgaaagctgcgatatcgacac

SEQ ID NO: 5055404 - DNA, 25 bp, Homo sapien
tcttgttgaaagctgcgatatcgac

SEQ ID NO: 5055405 - DNA, 25 bp, Homo sapien
agcccgtccagctggatagagcgca

SEQ ID NO: 5055406 - DNA, 25 bp, Homo sapien
cgtccagctggatagagcgcacaca

SEQ ID NO: 5055407 - DNA, 25 bp, Homo sapien
cccgtccagctggatagagcgcaca

SEQ ID NO: 5055408 - DNA, 25 bp, Homo sapien
gtccagctggatagagcgcacacag

SEQ ID NO: 5055409 - DNA, 25 bp, Homo sapien
ttggccaccagtgcaggcttcttgg

SEQ ID NO: 5055410 - DNA, 25 bp, Homo sapien
ggacttggccaccagtgcaggcttc

SEQ ID NO: 5055411 - DNA, 25 bp, Homo sapien
tggccttcttctccgcgtactgccg

SEQ ID NO: 5055412 - DNA, 25 bp, Homo sapien
cgcgtactgccgtagccgctcctcc

SEQ ID NO: 5055413 - DNA, 25 bp, Homo sapien
cgtcatcctctgctggtgtggctgg

SEQ ID NO: 5055414 - DNA, 25 bp, Homo sapien
atcctcgtcatcctctgctggtgtg

SEQ ID NO: 5055415 - DNA, 25 bp, Homo sapien
cctcgtcatcctctgctggtgtggc

SEQ ID NO: 5055416 - DNA, 25 bp, Homo sapien
tgccaaacaggtcaatgtcatcatc

SEQ ID NO: 5055417 - DNA, 25 bp, Homo sapien
acaggggaagggacaggaggcacgg

SEQ ID NO: 5055418 - DNA, 25 bp, Homo sapien
ctgccacaggggaagggacaggagg

SEQ ID NO: 5055419 - DNA, 25 bp, Homo sapien
cacaggggaagggacaggaggcacg

SEQ ID NO: 5055420 - DNA, 25 bp, Homo sapien
gccacaggggaagggacaggaggca

SEQ ID NO: 5055421 - DNA, 25 bp, Homo sapien
gggccagcccacagggcgacgtgga

SEQ ID NO: 5055422 - DNA, 25 bp, Homo sapien
agggccacgtggtcccctgcagtgt

SEQ ID NO: 5055423 - DNA, 25 bp, Homo sapien
cagtgtcaggcgtggggagagcatt

SEQ ID NO: 5055424 - DNA, 25 bp, Homo sapien
ccacagggcgacgtggaagccagca

SEQ ID NO: 5055425 - DNA, 25 bp, Homo sapien
ggccgtggcccggtggccaggcgag

SEQ ID NO: 5055426 - DNA, 25 bp, Homo sapien
gcccggtggccaggcgagctcttct

SEQ ID NO: 5055427 - DNA, 25 bp, Homo sapien
tctccagcacgttcagccgggcctc

SEQ ID NO: 5055428 - DNA, 25 bp, Homo sapien
ccagcacgttcagccgggcctccag

SEQ ID NO: 5055429 - DNA, 25 bp, Homo sapien
ggagcacggttagatggcaggggcc

SEQ ID NO: 5055430 - DNA, 25 bp, Homo sapien
agcacggttagatggcaggggccag

SEQ ID NO: 5055431 - DNA, 25 bp, Homo sapien
aaggggagcacggttagatggcagg

SEQ ID NO: 5055432 - DNA, 25 bp, Homo sapien
gggcaaggggagcacggttagatgg

SEQ ID NO: 5055433 - DNA, 25 bp, Homo sapien
cacttccagactggcaatccggacg

SEQ ID NO: 5055434 - DNA, 25 bp, Homo sapien
ctggcaatccggacgacgagctcac

SEQ ID NO: 5055435 - DNA, 25 bp, Homo sapien
cgccacgcagactctggttctccac

SEQ ID NO: 5055436 - DNA, 25 bp, Homo sapien
cagactggcaatccggacgacgagc

SEQ ID NO: 5055437 - DNA, 25 bp, Homo sapien
gccgctggaggccccggggcctgag

SEQ ID NO: 5055438 - DNA, 25 bp, Homo sapien
cgctggaggccccggggcctgagct

SEQ ID NO: 5055439 - DNA, 25 bp, Homo sapien
cgtggtctccgctggtgccgctgga

SEQ ID NO: 5055440 - DNA, 25 bp, Homo sapien
gtgccgctggaggccccggggcctg

SEQ ID NO: 5055441 - DNA, 25 bp, Homo sapien
gcaggtgcggacatactcaggcctt

SEQ ID NO: 5055442 - DNA, 25 bp, Homo sapien
ccaacaggatggctcgaaggacagg

SEQ ID NO: 5055443 - DNA, 25 bp, Homo sapien
aaggaaaactacagctcgggagagc

SEQ ID NO: 5055444 - DNA, 25 bp, Homo sapien
ttaagcatctacctgcacgcatggg

SEQ ID NO: 5055445 - DNA, 25 bp, Homo sapien
aagacatggagaagacggtctacat

SEQ ID NO: 5055446 - DNA, 25 bp, Homo sapien
tcagatggatgaccgtgtgaagaca

SEQ ID NO: 5055447 - DNA, 25 bp, Homo sapien
tgccacctcgatcatggacttccag

SEQ ID NO: 5055448 - DNA, 25 bp, Homo sapien
agacggtctacatgctgagagaggc

SEQ ID NO: 5055449 - DNA, 25 bp, Homo sapien
gctggaatgcctaacaatgtggaga

SEQ ID NO: 5055450 - DNA, 25 bp, Homo sapien
tgacttgggcgcaaaaatctgtgct

SEQ ID NO: 5055451 - DNA, 25 bp, Homo sapien
gaagtgtggcaacgttacagcaaca

SEQ ID NO: 5055452 - DNA, 25 bp, Homo sapien
catacgagtccgcagagcctgtaaa

SEQ ID NO: 5055453 - DNA, 25 bp, Homo sapien
gaattcagatgctaaggccctcggt

SEQ ID NO: 5055454 - DNA, 25 bp, Homo sapien
tagcctgtcttgagcaccctgttgg

SEQ ID NO: 5055455 - DNA, 25 bp, Homo sapien
gggcagagaaaacacgtcatcttct

SEQ ID NO: 5055456 - DNA, 25 bp, Homo sapien
ctaaactgccacgaacatgctgttg

SEQ ID NO: 5055457 - DNA, 25 bp, Homo sapien
tgaaacaagcaacgtgggcatccac

SEQ ID NO: 5055458 - DNA, 25 bp, Homo sapien
ttttgaggtgggaacatcctggacc

SEQ ID NO: 5055459 - DNA, 25 bp, Homo sapien
tggaaacccggcatgatacagatgt

SEQ ID NO: 5055460 - DNA, 25 bp, Homo sapien
tcaagacggtgccaactctaggctc

SEQ ID NO: 5055461 - DNA, 25 bp, Homo sapien
gctgcttggccgagcaggagcccgc

SEQ ID NO: 5055462 - DNA, 25 bp, Homo sapien
ctgcttggccgagcaggagcccgca

SEQ ID NO: 5055463 - DNA, 25 bp, Homo sapien
cggaggatcacgctggcgccgttct

SEQ ID NO: 5055464 - DNA, 25 bp, Homo sapien
atgtcacggaggatcacgctggcgc

SEQ ID NO: 5055465 - DNA, 25 bp, Homo sapien
tctcgcaatgtcacggaggatcacg

SEQ ID NO: 5055466 - DNA, 25 bp, Homo sapien
tctctctggctctcgcaatgtcacg

SEQ ID NO: 5055467 - DNA, 25 bp, Homo sapien
cgtcgtcatatttgaacttgtcgaa

SEQ ID NO: 5055468 - DNA, 25 bp, Homo sapien
ggcccgttcatctgctcgtagaatc

SEQ ID NO: 5055469 - DNA, 25 bp, Homo sapien
gaatctcctttctgcgtcgtcatat

SEQ ID NO: 5055470 - DNA, 25 bp, Homo sapien
ctcatgtgctaggaagtttgtagcc

SEQ ID NO: 5055471 - DNA, 25 bp, Homo sapien
ggcctgtcttccagacgaggagttc

SEQ ID NO: 5055472 - DNA, 25 bp, Homo sapien
tcaaacagctgaagtgcggaggcag

SEQ ID NO: 5055473 - DNA, 25 bp, Homo sapien
ccagacacccgagagatttgcaaaa

SEQ ID NO: 5055474 - DNA, 25 bp, Homo sapien
cacgaagctgggtttatgtcaaaca

SEQ ID NO: 5055475 - DNA, 25 bp, Homo sapien
aatcaatagatacaatgaaagctct

SEQ ID NO: 5055476 - DNA, 25 bp, Homo sapien
caagaaggttgagaattgctgccct

SEQ ID NO: 5055477 - DNA, 25 bp, Homo sapien
atagatacaatgaaagctctttggg

SEQ ID NO: 5055478 - DNA, 25 bp, Homo sapien
gtgcccggcccatttctcagtttta

SEQ ID NO: 5055479 - DNA, 25 bp, Homo sapien
caagtgtcctctcggtaacaaaggg

SEQ ID NO: 5055480 - DNA, 25 bp, Homo sapien
tggactggccaagaccctcttactg

SEQ ID NO: 5055481 - DNA, 25 bp, Homo sapien
tgtccaaccaagcacaacagaactg

SEQ ID NO: 5055482 - DNA, 25 bp, Homo sapien
acactctctcggcaaggagggacca

SEQ ID NO: 5055483 - DNA, 25 bp, Homo sapien
tcttgttaaccagcaaatccagacc

SEQ ID NO: 5055484 - DNA, 25 bp, Homo sapien
tgtattcccctccaagtccaatcgt

SEQ ID NO: 5055485 - DNA, 25 bp, Homo sapien
gggccagaaaccagcttcaatgctt

SEQ ID NO: 5055486 - DNA, 25 bp, Homo sapien
ggcagcctggaactttgtaacctca

SEQ ID NO: 5055487 - DNA, 25 bp, Homo sapien
agtgacttgtccagccacacgcgtt

SEQ ID NO: 5055488 - DNA, 25 bp, Homo sapien
gatggccgtcaaacagggcctcgta

SEQ ID NO: 5055489 - DNA, 25 bp, Homo sapien
cgctcagcctggtcgaaggaggact

SEQ ID NO: 5055490 - DNA, 25 bp, Homo sapien
tgttccctaagatgttgcggccccg

SEQ ID NO: 5055491 - DNA, 25 bp, Homo sapien
ctgtgtggcctcgtgttcgtagaag

SEQ ID NO: 5055492 - DNA, 25 bp, Homo sapien
gctcggcctcctcatacttgtgctt

SEQ ID NO: 5055493 - DNA, 25 bp, Homo sapien
gtgttcgtagaagcgccgctcggcc

SEQ ID NO: 5055494 - DNA, 25 bp, Homo sapien
gcctcgtgttcgtagaagcgccgct

SEQ ID NO: 5055495 - DNA, 25 bp, Homo sapien
gacttcgaagtcaagcccatgtggg

SEQ ID NO: 5055496 - DNA, 25 bp, Homo sapien
tccggacacagcgataaaaagcaag

SEQ ID NO: 5055497 - DNA, 25 bp, Homo sapien
catgagatgacattcgaggacttcg

SEQ ID NO: 5055498 - DNA, 25 bp, Homo sapien
ggccaagtgcctcccaatacatgaa

SEQ ID NO: 5055499 - DNA, 25 bp, Homo sapien
cggatcacagggtctggagactgag

SEQ ID NO: 5055500 - DNA, 25 bp, Homo sapien
aaagaaggagcctcggccaggcacg

SEQ ID NO: 5055501 - DNA, 25 bp, Homo sapien
cgggcggatcacagggtctggagac

SEQ ID NO: 5055502 - DNA, 25 bp, Homo sapien
aaaagaaggagcctcggccaggcac

SEQ ID NO: 5055503 - DNA, 25 bp, Homo sapien
gcgcctggagcactgagacggctct

SEQ ID NO: 5055504 - DNA, 25 bp, Homo sapien
ggccaagcgcctggagcactgagac

SEQ ID NO: 5055505 - DNA, 25 bp, Homo sapien
tggagtgcccactcatgaaggagac

SEQ ID NO: 5055506 - DNA, 25 bp, Homo sapien
gtggagtgcccactcatgaaggaga

SEQ ID NO: 5055507 - DNA, 25 bp, Homo sapien
tctaatggcaccaacgaggaaccgg

SEQ ID NO: 5055508 - DNA, 25 bp, Homo sapien
tttgcgggcatgtggcccgaatccc

SEQ ID NO: 5055509 - DNA, 25 bp, Homo sapien
gcagtcccagcaacaagttctaatg

SEQ ID NO: 5055510 - DNA, 25 bp, Homo sapien
tggaacatggagttctttgcgggca

SEQ ID NO: 5055511 - DNA, 25 bp, Homo sapien
caaggccaggctgatgggcagaggc

SEQ ID NO: 5055512 - DNA, 25 bp, Homo sapien
aggccaggctgatgggcagaggcag

SEQ ID NO: 5055513 - DNA, 25 bp, Homo sapien
aaggccaggctgatgggcagaggca

SEQ ID NO: 5055514 - DNA, 25 bp, Homo sapien
ttccctcaggtgcagcgagggctgg

SEQ ID NO: 5055515 - DNA, 25 bp, Homo sapien
ggcagactgggccatgcgcaggtgg

SEQ ID NO: 5055516 - DNA, 25 bp, Homo sapien
agactgggccatgcgcaggtggtgc

SEQ ID NO: 5055517 - DNA, 25 bp, Homo sapien
ctgggttccctcaggtgcagcgagg

SEQ ID NO: 5055518 - DNA, 25 bp, Homo sapien
ctgcttggcgaggtggtgtggaggt

SEQ ID NO: 5055519 - DNA, 25 bp, Homo sapien
ccagaagctgcttggcgaggtggtg

SEQ ID NO: 5055520 - DNA, 25 bp, Homo sapien
ccagaaagactaaccgggtcagaca

SEQ ID NO: 5055521 - DNA, 25 bp, Homo sapien
taaccgggtcagacacagcagcagg

SEQ ID NO: 5055522 - DNA, 25 bp, Homo sapien
agacccgccgccaccacaatcccag

SEQ ID NO: 5055523 - DNA, 25 bp, Homo sapien
cagacagacccgccgccaccacaat

SEQ ID NO: 5055524 - DNA, 25 bp, Homo sapien
acaggtgacgtcactccgtcatccc

SEQ ID NO: 5055525 - DNA, 25 bp, Homo sapien
gccgccaccacaatcccaggtggca

SEQ ID NO: 5055526 - DNA, 25 bp, Homo sapien
tgtcgtcacctgagcaaggtagcct

SEQ ID NO: 5055527 - DNA, 25 bp, Homo sapien
tactgtcagttggagcctaggcagg

SEQ ID NO: 5055528 - DNA, 25 bp, Homo sapien
caagcagggaccactatctgagcca

SEQ ID NO: 5055529 - DNA, 25 bp, Homo sapien
tagcctgagacaagataagccagcg

SEQ ID NO: 5055530 - DNA, 25 bp, Homo sapien
cccgcttcccgcattcccaagcatg

SEQ ID NO: 5055531 - DNA, 25 bp, Homo sapien
tggccactaacagcgggcagagagc

SEQ ID NO: 5055532 - DNA, 25 bp, Homo sapien
gggagctggccactaacagcgggca

SEQ ID NO: 5055533 - DNA, 25 bp, Homo sapien
gagctggccactaacagcgggcaga

SEQ ID NO: 5055534 - DNA, 25 bp, Homo sapien
ggacacagcgactctttcaactgcg

SEQ ID NO: 5055535 - DNA, 25 bp, Homo sapien
gtttatccaagctcaggaggagctt

SEQ ID NO: 5055536 - DNA, 25 bp, Homo sapien
ccttcgctcctgcagtttatccaag

SEQ ID NO: 5055537 - DNA, 25 bp, Homo sapien
tgagcttcaaagcttgcgcagacga

SEQ ID NO: 5055538 - DNA, 25 bp, Homo sapien
cagtcttggaaacgccagagccagg

SEQ ID NO: 5055539 - DNA, 25 bp, Homo sapien
gctaacagggcctgtgacacaggtg

SEQ ID NO: 5055540 - DNA, 25 bp, Homo sapien
caaagtgtccctactctgctcctgg

SEQ ID NO: 5055541 - DNA, 25 bp, Homo sapien
ccagagaagcagtcttggaaacgcc

SEQ ID NO: 5055542 - DNA, 25 bp, Homo sapien
tggccaccaaggtgctgcacggcct

SEQ ID NO: 5055543 - DNA, 25 bp, Homo sapien
ccctgaggaaggtgaggacatcctg

SEQ ID NO: 5055544 - DNA, 25 bp, Homo sapien
gagctgtggccaccaaggtgctgca

SEQ ID NO: 5055545 - DNA, 25 bp, Homo sapien
gcacggcctggaggtctccacacat

SEQ ID NO: 5055546 - DNA, 25 bp, Homo sapien
actcagccactttcctgtctgaccc

SEQ ID NO: 5055547 - DNA, 25 bp, Homo sapien
tgaggccttcggtctttttttgaga

SEQ ID NO: 5055548 - DNA, 25 bp, Homo sapien
ctcagccactttcctgtctgacccc

SEQ ID NO: 5055549 - DNA, 25 bp, Homo sapien
ccagaaggctgacgccagtgcacgg

SEQ ID NO: 5055550 - DNA, 25 bp, Homo sapien
ggctcctacaccagcacttagcata

SEQ ID NO: 5055551 - DNA, 25 bp, Homo sapien
gcttccaacacgctgatgtcacctt

SEQ ID NO: 5055552 - DNA, 25 bp, Homo sapien
ggcacaggatgatgacccacaaatc

SEQ ID NO: 5055553 - DNA, 25 bp, Homo sapien
acaggattggcactgcgcccagaaa

SEQ ID NO: 5055554 - DNA, 25 bp, Homo sapien
cagagggcctagtcctccagaggag

SEQ ID NO: 5055555 - DNA, 25 bp, Homo sapien
agcaacccgggagcaaagcccagag

SEQ ID NO: 5055556 - DNA, 25 bp, Homo sapien
gcactgactgcgtgtgaaccctgca

SEQ ID NO: 5055557 - DNA, 25 bp, Homo sapien
tgagccgcaggcagtgtcaacttaa

SEQ ID NO: 5055558 - DNA, 25 bp, Homo sapien
aactgcctgcgagccagctgcttaa

SEQ ID NO: 5055559 - DNA, 25 bp, Homo sapien
ggctccggaagtaaccaactgcctg

SEQ ID NO: 5055560 - DNA, 25 bp, Homo sapien
gacaaccccaagtttagctacacag

SEQ ID NO: 5055561 - DNA, 25 bp, Homo sapien
tccttccacttaaagcctctgaaag

SEQ ID NO: 5055562 - DNA, 25 bp, Homo sapien
ccaccctatccaaatcaagagacag

SEQ ID NO: 5055563 - DNA, 25 bp, Homo sapien
cattctggaaaccaatcctgacgtc

SEQ ID NO: 5055564 - DNA, 25 bp, Homo sapien
gcctctgaaagtactacttcttagc

SEQ ID NO: 5055565 - DNA, 25 bp, Homo sapien
ctaagttccaaaagtgttgcgtccg

SEQ ID NO: 5055566 - DNA, 25 bp, Homo sapien
cgtctaagttccaaaagtgttgcgt

SEQ ID NO: 5055567 - DNA, 25 bp, Homo sapien
agcgtctaagttccaaaagtgttgc

SEQ ID NO: 5055568 - DNA, 25 bp, Homo sapien
agttccaaaagtgttgcgtccgtgc

SEQ ID NO: 5055569 - DNA, 25 bp, Homo sapien
gacaaagacgtggtgtacgaaggtc

SEQ ID NO: 5055570 - DNA, 25 bp, Homo sapien
tcagctgatgcgtgcagtaactggt

SEQ ID NO: 5055571 - DNA, 25 bp, Homo sapien
tctgcaggccagagaaacagctggg

SEQ ID NO: 5055572 - DNA, 25 bp, Homo sapien
ttgtgcctcagtccctaacggcgcg

SEQ ID NO: 5055573 - DNA, 25 bp, Homo sapien
cacgggaaatgaagcactgggctct

SEQ ID NO: 5055574 - DNA, 25 bp, Homo sapien
cagaattccgttggagatgaccgcg

SEQ ID NO: 5055575 - DNA, 25 bp, Homo sapien
gtgccccgacacttcaaaggcagaa

SEQ ID NO: 5055576 - DNA, 25 bp, Homo sapien
tgggctctaccaagagccacgggcc

SEQ ID NO: 5055577 - DNA, 25 bp, Homo sapien
gagcagatttacagcgccagcgtca

SEQ ID NO: 5055578 - DNA, 25 bp, Homo sapien
ctggccaacgaggaggagatcgacc

SEQ ID NO: 5055579 - DNA, 25 bp, Homo sapien
tggctcaaggacgagcccaagctgc

SEQ ID NO: 5055580 - DNA, 25 bp, Homo sapien
gcaaggcctactccatcaaggacaa

SEQ ID NO: 5055581 - DNA, 25 bp, Homo sapien
agttgcgctcactcatcagcatggc

SEQ ID NO: 5055582 - DNA, 25 bp, Homo sapien
ccaccgactatggagggacctcagt

SEQ ID NO: 5055583 - DNA, 25 bp, Homo sapien
cctatgacggtgtgtgaccaggcca

SEQ ID NO: 5055584 - DNA, 25 bp, Homo sapien
caaatccagcatggcttggaggagc

SEQ ID NO: 5055585 - DNA, 25 bp, Homo sapien
cttggttttatccacctctggtgaa

SEQ ID NO: 5055586 - DNA, 25 bp, Homo sapien
aacttggttttatccacctctggtg

SEQ ID NO: 5055587 - DNA, 25 bp, Homo sapien
agaacttggttttatccacctctgg

SEQ ID NO: 5055588 - DNA, 25 bp, Homo sapien
ccagaacttggttttatccacctct

SEQ ID NO: 5055589 - DNA, 25 bp, Homo sapien
taggctgaccctgacaagtgccagg

SEQ ID NO: 5055590 - DNA, 25 bp, Homo sapien
gcttggaccaagcagtcaactgagt

SEQ ID NO: 5055591 - DNA, 25 bp, Homo sapien
ctgtcctgcaggtgccgttagccct

SEQ ID NO: 5055592 - DNA, 25 bp, Homo sapien
ttacggacgggctaggctcaggaga

SEQ ID NO: 5055593 - DNA, 25 bp, Homo sapien
cagccgtgcctgttaccgtaagttc

SEQ ID NO: 5055594 - DNA, 25 bp, Homo sapien
gaaagagggagcctgtatccagact

SEQ ID NO: 5055595 - DNA, 25 bp, Homo sapien
gggcccctcagaaccaatgttgcag

SEQ ID NO: 5055596 - DNA, 25 bp, Homo sapien
caaccatgcgggcaaatgaccaaga

SEQ ID NO: 5055597 - DNA, 25 bp, Homo sapien
tgctccagggcgtggagtccataga

SEQ ID NO: 5055598 - DNA, 25 bp, Homo sapien
gcacacgtctgagcgcagctgggct

SEQ ID NO: 5055599 - DNA, 25 bp, Homo sapien
acggcgctcatggtggctgctcgca

SEQ ID NO: 5055600 - DNA, 25 bp, Homo sapien
tgccacccggggtgcacacgtctga

SEQ ID NO: 5055601 - DNA, 25 bp, Homo sapien
atgcccatcttgacggctccttcag

SEQ ID NO: 5055602 - DNA, 25 bp, Homo sapien
tgggcatgcccatcttgacggctcc

SEQ ID NO: 5055603 - DNA, 25 bp, Homo sapien
aggctgctgggcatgcccatcttga

SEQ ID NO: 5055604 - DNA, 25 bp, Homo sapien
tctgggcagcgatgcggtgggccag

SEQ ID NO: 5055605 - DNA, 25 bp, Homo sapien
tgtcgacgtaggcttcaggcacctc

SEQ ID NO: 5055606 - DNA, 25 bp, Homo sapien
caagacccgcagcacccgtgtgttt

SEQ ID NO: 5055607 - DNA, 25 bp, Homo sapien
ccagtgtggatgtcgacgtaggctt

SEQ ID NO: 5055608 - DNA, 25 bp, Homo sapien
cttggtctcgctgctccccacgtgg

SEQ ID NO: 5055609 - DNA, 25 bp, Homo sapien
tatactgggaccaaggccttagccc

SEQ ID NO: 5055610 - DNA, 25 bp, Homo sapien
cagaatcagggagtctgtaggactg

SEQ ID NO: 5055611 - DNA, 25 bp, Homo sapien
taaatccagccacttgatccaggtg

SEQ ID NO: 5055612 - DNA, 25 bp, Homo sapien
aaaggtccacgtcagctcgcggtgg

SEQ ID NO: 5055613 - DNA, 25 bp, Homo sapien
caccaagatgtgttcagtggtgacc

SEQ ID NO: 5055614 - DNA, 25 bp, Homo sapien
ggcagcacatgaggcttggtggcaa

SEQ ID NO: 5055615 - DNA, 25 bp, Homo sapien
acctcctggttggagtgcgtggtcc

SEQ ID NO: 5055616 - DNA, 25 bp, Homo sapien
tggtggcaaagatgacgagcaggca

SEQ ID NO: 5055617 - DNA, 25 bp, Homo sapien
gcaaacgcacatgagcacatacata

SEQ ID NO: 5055618 - DNA, 25 bp, Homo sapien
gacatacatgcactcaccacacgtg

SEQ ID NO: 5055619 - DNA, 25 bp, Homo sapien
tcacgaccacacaggtgcacatgca

SEQ ID NO: 5055620 - DNA, 25 bp, Homo sapien
acacacaagcgcacgtgcaaacgca

SEQ ID NO: 5055621 - DNA, 25 bp, Homo sapien
tgtctgttggtgcactggccagtat

SEQ ID NO: 5055622 - DNA, 25 bp, Homo sapien
tgttggtgcactggccagtatgtgc

SEQ ID NO: 5055623 - DNA, 25 bp, Homo sapien
gccagtatgtgctgagcttccactt

SEQ ID NO: 5055624 - DNA, 25 bp, Homo sapien
gtgacataggttcctgtctgttggt

SEQ ID NO: 5055625 - DNA, 25 bp, Homo sapien
gcggagacggctccgcagctgccat

SEQ ID NO: 5055626 - DNA, 25 bp, Homo sapien
ctctgatgaggccctgcgcgatggc

SEQ ID NO: 5055627 - DNA, 25 bp, Homo sapien
tgatgaggccctgcgcgatggcccc

SEQ ID NO: 5055628 - DNA, 25 bp, Homo sapien
cacgcgccgcggagacggctccgca

SEQ ID NO: 5055629 - DNA, 25 bp, Homo sapien
gcgctcaccgcccatccacaggccg

SEQ ID NO: 5055630 - DNA, 25 bp, Homo sapien
cttgttgcctcggacgccgctgcgc

SEQ ID NO: 5055631 - DNA, 25 bp, Homo sapien
ttgttgcctcggacgccgctgcgct

SEQ ID NO: 5055632 - DNA, 25 bp, Homo sapien
ccgctgcgctcaccgcccatccaca

SEQ ID NO: 5055633 - DNA, 25 bp, Homo sapien
aaatgcactttattggctcccaggg

SEQ ID NO: 5055634 - DNA, 25 bp, Homo sapien
aaaatgcactttattggctcccagg

SEQ ID NO: 5055635 - DNA, 25 bp, Homo sapien
atgcactttattggctcccagggag

SEQ ID NO: 5055636 - DNA, 25 bp, Homo sapien
gcactttattggctcccagggagtg

SEQ ID NO: 5055637 - DNA, 25 bp, Homo sapien
ggtccgctggcacctgatcctgtct

SEQ ID NO: 5055638 - DNA, 25 bp, Homo sapien
gctctgccagccgatggtccgctgg

SEQ ID NO: 5055639 - DNA, 25 bp, Homo sapien
ttccctgaggaccaacgtgaatggg

SEQ ID NO: 5055640 - DNA, 25 bp, Homo sapien
gttgctgggtggtgccctcagctcc

SEQ ID NO: 5055641 - DNA, 25 bp, Homo sapien
ctcgtagttgtcagtgaaccaagca

SEQ ID NO: 5055642 - DNA, 25 bp, Homo sapien
tgctcgtagttgtcagtgaaccaag

SEQ ID NO: 5055643 - DNA, 25 bp, Homo sapien
ggcctgctcgtagttgtcagtgaac

SEQ ID NO: 5055644 - DNA, 25 bp, Homo sapien
ccgggcctgctcgtagttgtcagtg

SEQ ID NO: 5055645 - DNA, 25 bp, Homo sapien
ctctgccctggtagcgagcatgagg

SEQ ID NO: 5055646 - DNA, 25 bp, Homo sapien
agagctttggtgtcccacctccagg

SEQ ID NO: 5055647 - DNA, 25 bp, Homo sapien
acctctgccctggtagcgagcatga

SEQ ID NO: 5055648 - DNA, 25 bp, Homo sapien
acagggaagtcacccctcagagctt

SEQ ID NO: 5055649 - DNA, 25 bp, Homo sapien
cttgctgttactggctgtcttctta

SEQ ID NO: 5055650 - DNA, 25 bp, Homo sapien
ggcaggtaggtcctcagcttgctgt

SEQ ID NO: 5055651 - DNA, 25 bp, Homo sapien
ttaaactgcccatccgacttggttg

SEQ ID NO: 5055652 - DNA, 25 bp, Homo sapien
tgtgaaccggaagtcgggcaggtag

SEQ ID NO: 5055653 - DNA, 25 bp, Homo sapien
ctttgtcaaggccacagcgagaaga

SEQ ID NO: 5055654 - DNA, 25 bp, Homo sapien
ggccacagcgagaagagcacctcca

SEQ ID NO: 5055655 - DNA, 25 bp, Homo sapien
cagcccccgcagcttgcccttgaac

SEQ ID NO: 5055656 - DNA, 25 bp, Homo sapien
cgcagcttgcccttgaacctctgcc

SEQ ID NO: 5055657 - DNA, 25 bp, Homo sapien
cgggtggccactgagcccgcccaag

SEQ ID NO: 5055658 - DNA, 25 bp, Homo sapien
ggtggccactgagcccgcccaaggg

SEQ ID NO: 5055659 - DNA, 25 bp, Homo sapien
aacccccagcactggagccagagga

SEQ ID NO: 5055660 - DNA, 25 bp, Homo sapien
ccccagcactggagccagaggatac

SEQ ID NO: 5055661 - DNA, 25 bp, Homo sapien
gcctcggctgcctccttgatggaga

SEQ ID NO: 5055662 - DNA, 25 bp, Homo sapien
tccaccaccgcctcggctgcctcct

SEQ ID NO: 5055663 - DNA, 25 bp, Homo sapien
tgcctccttgatggagacctcatct

SEQ ID NO: 5055664 - DNA, 25 bp, Homo sapien
ttccccatggaagtccatggcctcc

SEQ ID NO: 5055665 - DNA, 25 bp, Homo sapien
ttggtgccacccgacggcccatgaa

SEQ ID NO: 5055666 - DNA, 25 bp, Homo sapien
acccgacggcccatgaatattcctg

SEQ ID NO: 5055667 - DNA, 25 bp, Homo sapien
tgtggggagccaccgggtcaggcct

SEQ ID NO: 5055668 - DNA, 25 bp, Homo sapien
tcccaggacaaccttggatcctgtc

SEQ ID NO: 5055669 - DNA, 25 bp, Homo sapien
cacttcattgtactcccgcaggacc

SEQ ID NO: 5055670 - DNA, 25 bp, Homo sapien
acttcattgtactcccgcaggaccc

SEQ ID NO: 5055671 - DNA, 25 bp, Homo sapien
ggatgatgggctccacttcattgta

SEQ ID NO: 5055672 - DNA, 25 bp, Homo sapien
ctgtaccccacaccgtcagggccga

SEQ ID NO: 5055673 - DNA, 25 bp, Homo sapien
tatatgaactgcctccgcggattcc

SEQ ID NO: 5055674 - DNA, 25 bp, Homo sapien
gagtatatgaactgcctccgcggat

SEQ ID NO: 5055675 - DNA, 25 bp, Homo sapien
cagcgagtatatgaactgcctccgc

SEQ ID NO: 5055676 - DNA, 25 bp, Homo sapien
gcccgaagacgttggtggggatgac

SEQ ID NO: 5055677 - DNA, 25 bp, Homo sapien
cacgtggccatcctcgatgttgaag

SEQ ID NO: 5055678 - DNA, 25 bp, Homo sapien
gtggggatgacagcggtgaaggtgc

SEQ ID NO: 5055679 - DNA, 25 bp, Homo sapien
gatgttgaagttgtcgtggggcccg

SEQ ID NO: 5055680 - DNA, 25 bp, Homo sapien
aggctggcacgaagacccgaccagc

SEQ ID NO: 5055681 - DNA, 25 bp, Homo sapien
ctgccctcgtcctgggcccgcgatc

SEQ ID NO: 5055682 - DNA, 25 bp, Homo sapien
gcctcagcaggatgggcgcgaggac

SEQ ID NO: 5055683 - DNA, 25 bp, Homo sapien
tggcctcttactgaggctggcacga

SEQ ID NO: 5055684 - DNA, 25 bp, Homo sapien
cgatcatcctcttggcatacgagta

SEQ ID NO: 5055685 - DNA, 25 bp, Homo sapien
tcctcttggcatacgagtacccaaa

SEQ ID NO: 5055686 - DNA, 25 bp, Homo sapien
ttggcatacgagtacccaaaattgc

SEQ ID NO: 5055687 - DNA, 25 bp, Homo sapien
catacgagtacccaaaattgctgtt

SEQ ID NO: 5055688 - DNA, 25 bp, Homo sapien
aagatacaggtggacaggcaggaca

SEQ ID NO: 5055689 - DNA, 25 bp, Homo sapien
caggacgttgtcgttcatgtgcacg

SEQ ID NO: 5055690 - DNA, 25 bp, Homo sapien
tcttgtcagggaagatacaggtgga

SEQ ID NO: 5055691 - DNA, 25 bp, Homo sapien
catggtctcatctatcgggtaggtc

SEQ ID NO: 5055692 - DNA, 25 bp, Homo sapien
ctaaccgtttccggacaaggcagtg

SEQ ID NO: 5055693 - DNA, 25 bp, Homo sapien
tgctcctccagacgcagaagtggag

SEQ ID NO: 5055694 - DNA, 25 bp, Homo sapien
caagcctgcccatcctaaccgtttc

SEQ ID NO: 5055695 - DNA, 25 bp, Homo sapien
agtggagacacaccctggcccttca

SEQ ID NO: 5055696 - DNA, 25 bp, Homo sapien
ttctcaaacagggcgcgggtctgtg

SEQ ID NO: 5055697 - DNA, 25 bp, Homo sapien
gtatttgatattccggaacaggccc

SEQ ID NO: 5055698 - DNA, 25 bp, Homo sapien
gcagcaagatggatgacgtgtgtgg

SEQ ID NO: 5055699 - DNA, 25 bp, Homo sapien
gacgtgtgtgggttggaccttctca

SEQ ID NO: 5055700 - DNA, 25 bp, Homo sapien
tggcaggagggacagtcaaaaggga

SEQ ID NO: 5055701 - DNA, 25 bp, Homo sapien
caccccagggttgggtgccaagtgc

SEQ ID NO: 5055702 - DNA, 25 bp, Homo sapien
ctgatatgagggtgcaggcttccag

SEQ ID NO: 5055703 - DNA, 25 bp, Homo sapien
ggttgggtgccaagtgcaggaactg

SEQ ID NO: 5055704 - DNA, 25 bp, Homo sapien
cccctgtcactagaatccgcatgga

SEQ ID NO: 5055705 - DNA, 25 bp, Homo sapien
actagaatccgcatggatccctggg

SEQ ID NO: 5055706 - DNA, 25 bp, Homo sapien
gagacaaacacccagtcctctccag

SEQ ID NO: 5055707 - DNA, 25 bp, Homo sapien
gatcggcgtctttagaggagacaaa

SEQ ID NO: 5055708 - DNA, 25 bp, Homo sapien
ggtcatcacgctctcatcctttgga

SEQ ID NO: 5055709 - DNA, 25 bp, Homo sapien
cccactaggccgagaaaaggtacat

SEQ ID NO: 5055710 - DNA, 25 bp, Homo sapien
tactcccctctgactgacaagaggg

SEQ ID NO: 5055711 - DNA, 25 bp, Homo sapien
agaaagacccagctggaccgaggca

SEQ ID NO: 5055712 - DNA, 25 bp, Homo sapien
accctcaaggatcccatcctgggag

SEQ ID NO: 5055713 - DNA, 25 bp, Homo sapien
gttaacacggttcgcagctaaagcc

SEQ ID NO: 5055714 - DNA, 25 bp, Homo sapien
taaagcccgcatgctagggacaggc

SEQ ID NO: 5055715 - DNA, 25 bp, Homo sapien
tcctggcacaggtcgttaacacggt

SEQ ID NO: 5055716 - DNA, 25 bp, Homo sapien
ggcgcggctgagtccggtgccacct

SEQ ID NO: 5055717 - DNA, 25 bp, Homo sapien
gcggctgagtccggtgccacctcac

SEQ ID NO: 5055718 - DNA, 25 bp, Homo sapien
agggcgcggctgagtccggtgccac

SEQ ID NO: 5055719 - DNA, 25 bp, Homo sapien
cagggcgcggctgagtccggtgcca

SEQ ID NO: 5055720 - DNA, 25 bp, Homo sapien
acagcggcttccggccgggtgcgct

SEQ ID NO: 5055721 - DNA, 25 bp, Homo sapien
accgccggctccccgacagcggctt

SEQ ID NO: 5055722 - DNA, 25 bp, Homo sapien
ccccaccgccggctccccgacagcg

SEQ ID NO: 5055723 - DNA, 25 bp, Homo sapien
ccaccgccggctccccgacagcggc

SEQ ID NO: 5055724 - DNA, 25 bp, Homo sapien
atcacgatgggtcacggcgagtcaa

SEQ ID NO: 5055725 - DNA, 25 bp, Homo sapien
caaacaacaccagagttacggcgaa

SEQ ID NO: 5055726 - DNA, 25 bp, Homo sapien
gcctcttggattccggccgcgatga

SEQ ID NO: 5055727 - DNA, 25 bp, Homo sapien
tcacggcgggttaagaaggatcaca

SEQ ID NO: 5055728 - DNA, 25 bp, Homo sapien
gactttgcaatgtgggctgtcccag

SEQ ID NO: 5055729 - DNA, 25 bp, Homo sapien
agggtgtgaccctggcgagttgcag

SEQ ID NO: 5055730 - DNA, 25 bp, Homo sapien
aggccgcttaccacaccctgaacaa

SEQ ID NO: 5055731 - DNA, 25 bp, Homo sapien
caggatgtccaggactttgcaatgt

SEQ ID NO: 5055732 - DNA, 25 bp, Homo sapien
tagaacggcgcaggaagtttcccag

SEQ ID NO: 5055733 - DNA, 25 bp, Homo sapien
cgccgcgagctccagacccgagttt

SEQ ID NO: 5055734 - DNA, 25 bp, Homo sapien
gcgacttccggtcgcggcgggctgg

SEQ ID NO: 5055735 - DNA, 25 bp, Homo sapien
gggagccgatccctggcgctcctag

SEQ ID NO: 5055736 - DNA, 25 bp, Homo sapien
agaaggtatcaactgagttccaaaa

SEQ ID NO: 5055737 - DNA, 25 bp, Homo sapien
gaaggtatcaactgagttccaaaac

SEQ ID NO: 5055738 - DNA, 25 bp, Homo sapien
aaacagcttgtttccaggtagtata

SEQ ID NO: 5055739 - DNA, 25 bp, Homo sapien
gtttccaggtagtataacagccatt

SEQ ID NO: 5055740 - DNA, 25 bp, Homo sapien
aataattactttcccgcccagtgag

SEQ ID NO: 5055741 - DNA, 25 bp, Homo sapien
tcaaagggttcaccaagagggactc

SEQ ID NO: 5055742 - DNA, 25 bp, Homo sapien
ggacaggcccttcgaatgtaaagac

SEQ ID NO: 5055743 - DNA, 25 bp, Homo sapien
gagttcaaagctcattcagcatcag

SEQ ID NO: 5055744 - DNA, 25 bp, Homo sapien
tgtctttccttctaacactcaggct

SEQ ID NO: 5055745 - DNA, 25 bp, Homo sapien
cctcctgggtcgctgaagaaggtca

SEQ ID NO: 5055746 - DNA, 25 bp, Homo sapien
cctgcctcctgggtcgctgaagaag

SEQ ID NO: 5055747 - DNA, 25 bp, Homo sapien
tcgctgaagaaggtcaggtccacag

SEQ ID NO: 5055748 - DNA, 25 bp, Homo sapien
tcttccttgctcgagtactgccctg

SEQ ID NO: 5055749 - DNA, 25 bp, Homo sapien
ttcccttggccaatacatcaggcaa

SEQ ID NO: 5055750 - DNA, 25 bp, Homo sapien
tctgattggtctgatgtgaagagag

SEQ ID NO: 5055751 - DNA, 25 bp, Homo sapien
tgtcctgtccatacacagccaaatc

SEQ ID NO: 5055752 - DNA, 25 bp, Homo sapien
tgtgcgccccgcatgtgcttcttca

SEQ ID NO: 5055753 - DNA, 25 bp, Homo sapien
tgtgcgctctttccagcaaccgcat

SEQ ID NO: 5055754 - DNA, 25 bp, Homo sapien
catcgtgtggagtcgtcctgtgcgc

SEQ ID NO: 5055755 - DNA, 25 bp, Homo sapien
tgcttcttcattccgtctgtgtgcg

SEQ ID NO: 5055756 - DNA, 25 bp, Homo sapien
cagcatggctgtcttcagacacgca

SEQ ID NO: 5055757 - DNA, 25 bp, Homo sapien
catcggcatttgtacttctttggtg

SEQ ID NO: 5055758 - DNA, 25 bp, Homo sapien
tgttcgagtcgtttcctgtgtcttc

SEQ ID NO: 5055759 - DNA, 25 bp, Homo sapien
tctttggtgttcgagttgtttgcct

SEQ ID NO: 5055760 - DNA, 25 bp, Homo sapien
ttgctctgagcctgccggctcgcgg

SEQ ID NO: 5055761 - DNA, 25 bp, Homo sapien
agctgccgcttcgtcgcacgtccgc

SEQ ID NO: 5055762 - DNA, 25 bp, Homo sapien
ttcgtcgcacgtccgcgcccgccag

SEQ ID NO: 5055763 - DNA, 25 bp, Homo sapien
tgagcctgccggctcgcggtagggc

SEQ ID NO: 5055764 - DNA, 25 bp, Homo sapien
aattggacgcacgaatgagtggccg

SEQ ID NO: 5055765 - DNA, 25 bp, Homo sapien
gagctctcttgcagcttggaaattg

SEQ ID NO: 5055766 - DNA, 25 bp, Homo sapien
gcttggaaattggacgcacgaatga

SEQ ID NO: 5055767 - DNA, 25 bp, Homo sapien
ctcttgcagcttggaaattggacgc

SEQ ID NO: 5055768 - DNA, 25 bp, Homo sapien
cgcagcttcagcgttcacgctgtcc

SEQ ID NO: 5055769 - DNA, 25 bp, Homo sapien
cagcttcagcgttcacgctgtcctc

SEQ ID NO: 5055770 - DNA, 25 bp, Homo sapien
gcagcttcagcgttcacgctgtcct

SEQ ID NO: 5055771 - DNA, 25 bp, Homo sapien
gccgcagcttcagcgttcacgctgt

SEQ ID NO: 5055772 - DNA, 25 bp, Homo sapien
tgaggacaccctcggtgaggacccc

SEQ ID NO: 5055773 - DNA, 25 bp, Homo sapien
tgaggaccccgaagagatcccagag

SEQ ID NO: 5055774 - DNA, 25 bp, Homo sapien
cttcgtggagcggagagtgtcctgt

SEQ ID NO: 5055775 - DNA, 25 bp, Homo sapien
agaagagccggatcccgatcccggg

SEQ ID NO: 5055776 - DNA, 25 bp, Homo sapien
cccgggagcctgcgcgcgaagcggt

SEQ ID NO: 5055777 - DNA, 25 bp, Homo sapien
tcagggatggcatccgggatcccac

SEQ ID NO: 5055778 - DNA, 25 bp, Homo sapien
gagcctgcgcgcgaagcggtcaggg

SEQ ID NO: 5055779 - DNA, 25 bp, Homo sapien
cgcgcgaagcggtcagggatggcat

SEQ ID NO: 5055780 - DNA, 25 bp, Homo sapien
cgcgacggtaccacagacggggtct

SEQ ID NO: 5055781 - DNA, 25 bp, Homo sapien
aagcctcgcgcgacgggaccacgga

SEQ ID NO: 5055782 - DNA, 25 bp, Homo sapien
tccatgctcgatagcaccaacgagg

SEQ ID NO: 5055783 - DNA, 25 bp, Homo sapien
ccagcgatgggaccctggagtccat

SEQ ID NO: 5055784 - DNA, 25 bp, Homo sapien
gcaggcgtccgttgtccgctttgat

SEQ ID NO: 5055785 - DNA, 25 bp, Homo sapien
cggtgcagttgctcgcgctgttcca

SEQ ID NO: 5055786 - DNA, 25 bp, Homo sapien
tgctccacgcgcatatgcagcagct

SEQ ID NO: 5055787 - DNA, 25 bp, Homo sapien
gctttgatggcctgcgtgtgcgcca

SEQ ID NO: 5055788 - DNA, 25 bp, Homo sapien
tgtgccgcgcgcgcctccatctcca

SEQ ID NO: 5055789 - DNA, 25 bp, Homo sapien
tgccgcgcgcgcctccatctccaac

SEQ ID NO: 5055790 - DNA, 25 bp, Homo sapien
gtgccgcgcgcgcctccatctccaa

SEQ ID NO: 5055791 - DNA, 25 bp, Homo sapien
tagagcgaggccagttccgcccgct

SEQ ID NO: 5055792 - DNA, 25 bp, Homo sapien
cggacgatggctttggcgcagcgct

SEQ ID NO: 5055793 - DNA, 25 bp, Homo sapien
tgccagtggatctgcgctaggtcca

SEQ ID NO: 5055794 - DNA, 25 bp, Homo sapien
ggttctgctcgtccagccggacgat

SEQ ID NO: 5055795 - DNA, 25 bp, Homo sapien
gctggcgtagagccggttctcctcg

SEQ ID NO: 5055796 - DNA, 25 bp, Homo sapien
tggtcaacgctctcctcgcaggtgt

SEQ ID NO: 5055797 - DNA, 25 bp, Homo sapien
cgcgtgttcgcgttgcaggtactgc

SEQ ID NO: 5055798 - DNA, 25 bp, Homo sapien
aggaaggcgttctctcgcagcacct

SEQ ID NO: 5055799 - DNA, 25 bp, Homo sapien
gcgctttttcttgggcgccatgggt

SEQ ID NO: 5055800 - DNA, 25 bp, Homo sapien
tccgatagcggctgctcggcacccg

SEQ ID NO: 5055801 - DNA, 25 bp, Homo sapien
gctcggcccgcgctttttcttgggc

SEQ ID NO: 5055802 - DNA, 25 bp, Homo sapien
tggctggctccctgcgctcggcccg

SEQ ID NO: 5055803 - DNA, 25 bp, Homo sapien
gactggtgagggcagcgaccccggc

SEQ ID NO: 5055804 - DNA, 25 bp, Homo sapien
ctaaatattctaggcgccaggccca

SEQ ID NO: 5055805 - DNA, 25 bp, Homo sapien
caatttagcccttcctcttacctgg

SEQ ID NO: 5055806 - DNA, 25 bp, Homo sapien
gcccagaggtgggacgcgcctcggg

SEQ ID NO: 5055807 - DNA, 25 bp, Homo sapien
tctctctgaaggtcctaagcgcgcg

SEQ ID NO: 5055808 - DNA, 25 bp, Homo sapien
tccactgggcgcctagagagcgttt

SEQ ID NO: 5055809 - DNA, 25 bp, Homo sapien
gacggactccggacgtgcttctgaa

SEQ ID NO: 5055810 - DNA, 25 bp, Homo sapien
tagggcctgagctgacaaaactggg

SEQ ID NO: 5055811 - DNA, 25 bp, Homo sapien
agctcgctcagcattcattgtgagg

SEQ ID NO: 5055812 - DNA, 25 bp, Homo sapien
cctatagactttattaatcagggaa

SEQ ID NO: 5055813 - DNA, 25 bp, Homo sapien
ttgaaaccattcctatagactttat

SEQ ID NO: 5055814 - DNA, 25 bp, Homo sapien
gcagctcgctcagcattcattgtga

SEQ ID NO: 5055815 - DNA, 25 bp, Homo sapien
gggtccagagcccctacacaggctt

SEQ ID NO: 5055816 - DNA, 25 bp, Homo sapien
ggtccagagcccctacacaggcttc

SEQ ID NO: 5055817 - DNA, 25 bp, Homo sapien
ctgaggacacgcctccttggggacc

SEQ ID NO: 5055818 - DNA, 25 bp, Homo sapien
cttggggaccctcattcctgagtcc

SEQ ID NO: 5055819 - DNA, 25 bp, Homo sapien
tggggaccctcattcctgagtccat

SEQ ID NO: 5055820 - DNA, 25 bp, Homo sapien
cccagctgaggacacgcctccttgg

SEQ ID NO: 5055821 - DNA, 25 bp, Homo sapien
ctgtacctgtacctcagctacagta

SEQ ID NO: 5055822 - DNA, 25 bp, Homo sapien
tacctgtacctcagctacagtatct

SEQ ID NO: 5055823 - DNA, 25 bp, Homo sapien
tgtacctgtacctcagctacagtat

SEQ ID NO: 5055824 - DNA, 25 bp, Homo sapien
cctgtacctgtacctcagctacagt

SEQ ID NO: 5055825 - DNA, 25 bp, Homo sapien
cagacactgacctgaacgcagtcat

SEQ ID NO: 5055826 - DNA, 25 bp, Homo sapien
gctggttcaaagtgggacagacctg

SEQ ID NO: 5055827 - DNA, 25 bp, Homo sapien
cctgaacgcagtcatccggaagggc

SEQ ID NO: 5055828 - DNA, 25 bp, Homo sapien
aggacgtccacgtgcgctccatctt

SEQ ID NO: 5055829 - DNA, 25 bp, Homo sapien
gttttattaacaccaaaatgtgcca

SEQ ID NO: 5055830 - DNA, 25 bp, Homo sapien
acatcatggtttagaagaggtggag

SEQ ID NO: 5055831 - DNA, 25 bp, Homo sapien
aggcaggaggctccgaaggcccagg

SEQ ID NO: 5055832 - DNA, 25 bp, Homo sapien
aaatgtgccacatcatggtttagaa

SEQ ID NO: 5055833 - DNA, 25 bp, Homo sapien
taacatgcccacaagaacatcatgg

SEQ ID NO: 5055834 - DNA, 25 bp, Homo sapien
agctggagagcctgtccgctcagca

SEQ ID NO: 5055835 - DNA, 25 bp, Homo sapien
tgctggagtcggaactgctgccttt

SEQ ID NO: 5055836 - DNA, 25 bp, Homo sapien
tgtcatcccgacttgcacggtggtt

SEQ ID NO: 5055837 - DNA, 25 bp, Homo sapien
attgaggcacagaggcgagaccctt

SEQ ID NO: 5055838 - DNA, 25 bp, Homo sapien
catgttttactgtgctgcaaaggcc

SEQ ID NO: 5055839 - DNA, 25 bp, Homo sapien
gagacgggcctccaaaaaagatgct

SEQ ID NO: 5055840 - DNA, 25 bp, Homo sapien
taaaagataagccaagaaccctgga

SEQ ID NO: 5055841 - DNA, 25 bp, Homo sapien
gaggtctggcgcactcagccaagcc

SEQ ID NO: 5055842 - DNA, 25 bp, Homo sapien
cacgcaaggctgacggtgcagagat

SEQ ID NO: 5055843 - DNA, 25 bp, Homo sapien
tgagcctccagtggagccgaggtct

SEQ ID NO: 5055844 - DNA, 25 bp, Homo sapien
ggagccagacgctgcgccacgcaag

SEQ ID NO: 5055845 - DNA, 25 bp, Homo sapien
agggctctctgttccgcggggcttc

SEQ ID NO: 5055846 - DNA, 25 bp, Homo sapien
ggatgaccggggcagcgatgcgggc

SEQ ID NO: 5055847 - DNA, 25 bp, Homo sapien
atgaccggggcagcgatgcgggcac

SEQ ID NO: 5055848 - DNA, 25 bp, Homo sapien
tgttccgcggggcttctggatgacc

SEQ ID NO: 5055849 - DNA, 25 bp, Homo sapien
tccgagcggaagatggctgaacact

SEQ ID NO: 5055850 - DNA, 25 bp, Homo sapien
tcttcgagtggaaaacccaggcgtg

SEQ ID NO: 5055851 - DNA, 25 bp, Homo sapien
tcttgcagaagacctcgaagcggct

SEQ ID NO: 5055852 - DNA, 25 bp, Homo sapien
tgcttttgaacgtgcccaggatctt

SEQ ID NO: 5055853 - DNA, 25 bp, Homo sapien
tatggagcacctggtgcgctccgga

SEQ ID NO: 5055854 - DNA, 25 bp, Homo sapien
cttccgctcagggtaagccgaggtg

SEQ ID NO: 5055855 - DNA, 25 bp, Homo sapien
ttttgactcattatggagcacctgg

SEQ ID NO: 5055856 - DNA, 25 bp, Homo sapien
cggacccttccagcggcagagggct

SEQ ID NO: 5055857 - DNA, 25 bp, Homo sapien
tgcgccgcggtgagcgacgcggctc

SEQ ID NO: 5055858 - DNA, 25 bp, Homo sapien
cagcaggcagctctcgaggctgcgg

SEQ ID NO: 5055859 - DNA, 25 bp, Homo sapien
agctgctgtgcaaaggagtcgcgca

SEQ ID NO: 5055860 - DNA, 25 bp, Homo sapien
cgctccggcccagtgtgtcgagcag

SEQ ID NO: 5055861 - DNA, 25 bp, Homo sapien
ctgggacacgacggccttgctgtgg

SEQ ID NO: 5055862 - DNA, 25 bp, Homo sapien
gccgccgggatcacgggctgggccc

SEQ ID NO: 5055863 - DNA, 25 bp, Homo sapien
ccgccgccgggatcacgggctgggc

SEQ ID NO: 5055864 - DNA, 25 bp, Homo sapien
cgccgccgggatcacgggctgggcc

SEQ ID NO: 5055865 - DNA, 25 bp, Homo sapien
gccgccgccgggatcacgggctggg

SEQ ID NO: 5055866 - DNA, 25 bp, Homo sapien
gtggaagccgcggagcgcacggcct

SEQ ID NO: 5055867 - DNA, 25 bp, Homo sapien
tgcaccttctcagtggccgccgcag

SEQ ID NO: 5055868 - DNA, 25 bp, Homo sapien
cgccgggccccagcgtctcgctgac

SEQ ID NO: 5055869 - DNA, 25 bp, Homo sapien
gtctcgctgaccgtctgctccttgt

SEQ ID NO: 5055870 - DNA, 25 bp, Homo sapien
ggagccagcacgtcgtcttcgtaag

SEQ ID NO: 5055871 - DNA, 25 bp, Homo sapien
gagcggaatgagtcctgcttggcca

SEQ ID NO: 5055872 - DNA, 25 bp, Homo sapien
gctcaagtaggaggccaaacgccag

SEQ ID NO: 5055873 - DNA, 25 bp, Homo sapien
cttcgtaagcctccgcttccatggg

SEQ ID NO: 5055874 - DNA, 25 bp, Homo sapien
tcggtcgcgaagctgtgccgcttga

SEQ ID NO: 5055875 - DNA, 25 bp, Homo sapien
acggagccagggcataggcgtccat

SEQ ID NO: 5055876 - DNA, 25 bp, Homo sapien
ccgcgaagcttctcgaacaggcctt

SEQ ID NO: 5055877 - DNA, 25 bp, Homo sapien
tcgtcgccgtggctgaggaacgtct

SEQ ID NO: 5055878 - DNA, 25 bp, Homo sapien
actgcgcgaagaggatgcggaactc

SEQ ID NO: 5055879 - DNA, 25 bp, Homo sapien
aagaggatgcggaactcctcgtcga

SEQ ID NO: 5055880 - DNA, 25 bp, Homo sapien
actcctcgtcgaagctggagaccag

SEQ ID NO: 5055881 - DNA, 25 bp, Homo sapien
ccgagggcacaagcggctcggactg

SEQ ID NO: 5055882 - DNA, 25 bp, Homo sapien
caccagcaggaacttctccttgacg

SEQ ID NO: 5055883 - DNA, 25 bp, Homo sapien
ccgccacagtccgtacgcgcaggaa

SEQ ID NO: 5055884 - DNA, 25 bp, Homo sapien
tccttgacgtggcccttgaaggact

SEQ ID NO: 5055885 - DNA, 25 bp, Homo sapien
ggacttcccagtgcggcagtagtag

SEQ ID NO: 5055886 - DNA, 25 bp, Homo sapien
cagcaggatgtagactgggacccga

SEQ ID NO: 5055887 - DNA, 25 bp, Homo sapien
acacggcacttgtcggccatgtcca

SEQ ID NO: 5055888 - DNA, 25 bp, Homo sapien
aagtgctgcgcgttcatctcatcca

SEQ ID NO: 5055889 - DNA, 25 bp, Homo sapien
tccacgtgctgcaggttgacacggc

SEQ ID NO: 5055890 - DNA, 25 bp, Homo sapien
tctcgggtaacatactgcggaggcc

SEQ ID NO: 5055891 - DNA, 25 bp, Homo sapien
tctttgtagtgaggcggcaggtacc

SEQ ID NO: 5055892 - DNA, 25 bp, Homo sapien
gaaggtgtcggctcacatgttccag

SEQ ID NO: 5055893 - DNA, 25 bp, Homo sapien
tccatgtccacgtcgagaaggctgc

SEQ ID NO: 5055894 - DNA, 25 bp, Homo sapien
gtgcttcgaagccctcactccggag

SEQ ID NO: 5055895 - DNA, 25 bp, Homo sapien
agtgcttcgaagccctcactccgga

SEQ ID NO: 5055896 - DNA, 25 bp, Homo sapien
cttgggtctgcagtgcttcgaagcc

SEQ ID NO: 5055897 - DNA, 25 bp, Homo sapien
ctcgacttcgtttcccagacatggc

SEQ ID NO: 5055898 - DNA, 25 bp, Homo sapien
cctcatggagcctcagcagttcggg

SEQ ID NO: 5055899 - DNA, 25 bp, Homo sapien
acagctggacctcatggagcctcag

SEQ ID NO: 5055900 - DNA, 25 bp, Homo sapien
tgctggctcgatgctggtcacgtgc

SEQ ID NO: 5055901 - DNA, 25 bp, Homo sapien
tgtccacttcatctaggtcactcaa

SEQ ID NO: 5055902 - DNA, 25 bp, Homo sapien
catctaggtcactcaatttgttggc

SEQ ID NO: 5055903 - DNA, 25 bp, Homo sapien
cagagtactctcttatgatattttt

SEQ ID NO: 5055904 - DNA, 25 bp, Homo sapien
catgatttagtcttgataagttttg

SEQ ID NO: 5055905 - DNA, 25 bp, Homo sapien
ccaatcggtgggatgaggccctggg

SEQ ID NO: 5055906 - DNA, 25 bp, Homo sapien
tccatagcaattcttcgcaatgggg

SEQ ID NO: 5055907 - DNA, 25 bp, Homo sapien
tcccaatcggtgggatgaggccctg

SEQ ID NO: 5055908 - DNA, 25 bp, Homo sapien
ttcgcaatggggtcccaatcggtgg

SEQ ID NO: 5055909 - DNA, 25 bp, Homo sapien
gatgctccaggagaagctcctggct

SEQ ID NO: 5055910 - DNA, 25 bp, Homo sapien
acgatgctccaggagaagctcctgg

SEQ ID NO: 5055911 - DNA, 25 bp, Homo sapien
cgatgctccaggagaagctcctggc

SEQ ID NO: 5055912 - DNA, 25 bp, Homo sapien
tcacactagggctgtggacgttaca

SEQ ID NO: 5055913 - DNA, 25 bp, Homo sapien
taacctgcactttgcacgggctggg

SEQ ID NO: 5055914 - DNA, 25 bp, Homo sapien
tctggcactgattccacgggtgact

SEQ ID NO: 5055915 - DNA, 25 bp, Homo sapien
tcatccacgatgaggagcttccctt

SEQ ID NO: 5055916 - DNA, 25 bp, Homo sapien
gcctcgcccagctagggagtcaggt

SEQ ID NO: 5055917 - DNA, 25 bp, Homo sapien
tccacaggcgttctccaaggatgcc

SEQ ID NO: 5055918 - DNA, 25 bp, Homo sapien
atgaggatatctgggcaagggcccc

SEQ ID NO: 5055919 - DNA, 25 bp, Homo sapien
agttggaatagccacctgctgagct

SEQ ID NO: 5055920 - DNA, 25 bp, Homo sapien
aaattgtagggcttgcacggtggct

SEQ ID NO: 5055921 - DNA, 25 bp, Homo sapien
atttaaaattgtagggcttgcacgg

SEQ ID NO: 5055922 - DNA, 25 bp, Homo sapien
gtatttaaaattgtagggcttgcac

SEQ ID NO: 5055923 - DNA, 25 bp, Homo sapien
ttaaaattgtagggcttgcacggtg

SEQ ID NO: 5055924 - DNA, 25 bp, Homo sapien
acagtctcgccgaggtctcggctgg

SEQ ID NO: 5055925 - DNA, 25 bp, Homo sapien
atgctaacacccaggttaaaagact

SEQ ID NO: 5055926 - DNA, 25 bp, Homo sapien
tagttacagtctcgccgaggtctcg

SEQ ID NO: 5055927 - DNA, 25 bp, Homo sapien
gggcagttagttagtcacaggccag

SEQ ID NO: 5055928 - DNA, 25 bp, Homo sapien
cccaggccacggcgcccaggcctta

SEQ ID NO: 5055929 - DNA, 25 bp, Homo sapien
caggccacggcgcccaggccttacg

SEQ ID NO: 5055930 - DNA, 25 bp, Homo sapien
aggccacggcgcccaggccttacgg

SEQ ID NO: 5055931 - DNA, 25 bp, Homo sapien
ggcccaggccacggcgcccaggcct

SEQ ID NO: 5055932 - DNA, 25 bp, Homo sapien
tcttcagggcccacagcgccgggtg

SEQ ID NO: 5055933 - DNA, 25 bp, Homo sapien
cggcggctgctgcacagtgccacat

SEQ ID NO: 5055934 - DNA, 25 bp, Homo sapien
ggcggctgctgcacagtgccacatc

SEQ ID NO: 5055935 - DNA, 25 bp, Homo sapien
cagtgccacatcttcagggcccaca

SEQ ID NO: 5055936 - DNA, 25 bp, Homo sapien
gcccagaagcaccagagccacttct

SEQ ID NO: 5055937 - DNA, 25 bp, Homo sapien
agaagcaccagagccacttctccat

SEQ ID NO: 5055938 - DNA, 25 bp, Homo sapien
ctgcccagaagcaccagagccactt

SEQ ID NO: 5055939 - DNA, 25 bp, Homo sapien
cagaagcaccagagccacttctcca

SEQ ID NO: 5055940 - DNA, 25 bp, Homo sapien
tcaactcctcagcaaagtccggtga

SEQ ID NO: 5055941 - DNA, 25 bp, Homo sapien
tggtcaggccggtgccagccctgcc

SEQ ID NO: 5055942 - DNA, 25 bp, Homo sapien
ttggtcaggccggtgccagccctgc

SEQ ID NO: 5055943 - DNA, 25 bp, Homo sapien
gttggtcaggccggtgccagccctg

SEQ ID NO: 5055944 - DNA, 25 bp, Homo sapien
gaggccctgcgggagcggatggggg

SEQ ID NO: 5055945 - DNA, 25 bp, Homo sapien
ggccctgcgggagcggatgggggcg

SEQ ID NO: 5055946 - DNA, 25 bp, Homo sapien
gatgggggcggtggcaggcacggac

SEQ ID NO: 5055947 - DNA, 25 bp, Homo sapien
cctgcgggagcggatgggggcggtg

SEQ ID NO: 5055948 - DNA, 25 bp, Homo sapien
tgtcatagacaggtctggaagaagg

SEQ ID NO: 5055949 - DNA, 25 bp, Homo sapien
tggatgtcatagacaggtctggaag

SEQ ID NO: 5055950 - DNA, 25 bp, Homo sapien
tcatagacaggtctggaagaaggca

SEQ ID NO: 5055951 - DNA, 25 bp, Homo sapien
gatgtcatagacaggtctggaagaa

SEQ ID NO: 5055952 - DNA, 25 bp, Homo sapien
aaggacagcgtgaggggagaggcag

SEQ ID NO: 5055953 - DNA, 25 bp, Homo sapien
ggacagcgtgaggggagaggcagag

SEQ ID NO: 5055954 - DNA, 25 bp, Homo sapien
cttgaaaggacagcgtgaggggaga

SEQ ID NO: 5055955 - DNA, 25 bp, Homo sapien
gaaaggacagcgtgaggggagaggc

SEQ ID NO: 5055956 - DNA, 25 bp, Homo sapien
caggcgtcccggggaggtgctggtc

SEQ ID NO: 5055957 - DNA, 25 bp, Homo sapien
ggggaggtgctggtctgggggccga

SEQ ID NO: 5055958 - DNA, 25 bp, Homo sapien
aggcgtcccggggaggtgctggtct

SEQ ID NO: 5055959 - DNA, 25 bp, Homo sapien
gaggtgctggtctgggggccgaggt

SEQ ID NO: 5055960 - DNA, 25 bp, Homo sapien
gaccatctgtgctcggagagcgtcc

SEQ ID NO: 5055961 - DNA, 25 bp, Homo sapien
cggagagcgtcctgttccaatgact

SEQ ID NO: 5055962 - DNA, 25 bp, Homo sapien
gagcgtcctgttccaatgacttcat

SEQ ID NO: 5055963 - DNA, 25 bp, Homo sapien
tgtgctcggagagcgtcctgttcca

SEQ ID NO: 5055964 - DNA, 25 bp, Homo sapien
acagggcacgctcgggtgccggtgg

SEQ ID NO: 5055965 - DNA, 25 bp, Homo sapien
ctccacagcgcacgcttctcggcct

SEQ ID NO: 5055966 - DNA, 25 bp, Homo sapien
gtggctccggactctgcacgcgcag

SEQ ID NO: 5055967 - DNA, 25 bp, Homo sapien
cctggtggcgccgttcagctttggc

SEQ ID NO: 5055968 - DNA, 25 bp, Homo sapien
ttcctcctcgcccagcgtctccccg

SEQ ID NO: 5055969 - DNA, 25 bp, Homo sapien
gggcgagcctcgcttcggccccagc

SEQ ID NO: 5055970 - DNA, 25 bp, Homo sapien
gcctcccgcagcatctgcgctctct

SEQ ID NO: 5055971 - DNA, 25 bp, Homo sapien
cccgcagcatctgcgctctcttctg

SEQ ID NO: 5055972 - DNA, 25 bp, Homo sapien
ggccagaccagccgagacccaaccc

SEQ ID NO: 5055973 - DNA, 25 bp, Homo sapien
gccagaccagccgagacccaacccc

SEQ ID NO: 5055974 - DNA, 25 bp, Homo sapien
gggtcaggccagaccagccgagacc

SEQ ID NO: 5055975 - DNA, 25 bp, Homo sapien
ggtgggtcaggccagaccagccgag

SEQ ID NO: 5055976 - DNA, 25 bp, Homo sapien
tgcatcttccgcaggtcgtcagcac

SEQ ID NO: 5055977 - DNA, 25 bp, Homo sapien
ccgcaggtcgtcagcacccaccagg

SEQ ID NO: 5055978 - DNA, 25 bp, Homo sapien
acccaccagggacacgcgcttaggg

SEQ ID NO: 5055979 - DNA, 25 bp, Homo sapien
tcctgcatcttccgcaggtcgtcag

SEQ ID NO: 5055980 - DNA, 25 bp, Homo sapien
tcggcctggggcacgcgcacctcca

SEQ ID NO: 5055981 - DNA, 25 bp, Homo sapien
agctcaaagtacttctgccgctccc

SEQ ID NO: 5055982 - DNA, 25 bp, Homo sapien
cggcctggggcacgcgcacctccag

SEQ ID NO: 5055983 - DNA, 25 bp, Homo sapien
gccgcgaaggccctgtaggcctgct

SEQ ID NO: 5055984 - DNA, 25 bp, Homo sapien
tcctcaggcgggtgagaagtgggca

SEQ ID NO: 5055985 - DNA, 25 bp, Homo sapien
taggcctgcttcacattggcgggca

SEQ ID NO: 5055986 - DNA, 25 bp, Homo sapien
tgagaagtgggcacggccgcgaagg

SEQ ID NO: 5055987 - DNA, 25 bp, Homo sapien
catccggagaaggcggggagggcgg

SEQ ID NO: 5055988 - DNA, 25 bp, Homo sapien
tcatccggagaaggcggggagggcg

SEQ ID NO: 5055989 - DNA, 25 bp, Homo sapien
ctcatccggagaaggcggggagggc

SEQ ID NO: 5055990 - DNA, 25 bp, Homo sapien
cacgggacagagcactcacggagtg

SEQ ID NO: 5055991 - DNA, 25 bp, Homo sapien
caatggctggatcacccctggtttt

SEQ ID NO: 5055992 - DNA, 25 bp, Homo sapien
gctgcagctgtgtgcaactcaccac

SEQ ID NO: 5055993 - DNA, 25 bp, Homo sapien
cactcacggagtggggacaacctct

SEQ ID NO: 5055994 - DNA, 25 bp, Homo sapien
cacaggaggccccatggtagcagag

SEQ ID NO: 5055995 - DNA, 25 bp, Homo sapien
gaaaaccggagtcaacagcacccca

SEQ ID NO: 5055996 - DNA, 25 bp, Homo sapien
cacacccgttaacttgggacactca

SEQ ID NO: 5055997 - DNA, 25 bp, Homo sapien
caccatggggcacacccgttaactt

SEQ ID NO: 5055998 - DNA, 25 bp, Homo sapien
ggagcagggagattcagccatcttc

SEQ ID NO: 5055999 - DNA, 25 bp, Homo sapien
gcagggagattcagccatcttccct

SEQ ID NO: 5056000 - DNA, 25 bp, Homo sapien
agcagggagattcagccatcttccc

SEQ ID NO: 5056001 - DNA, 25 bp, Homo sapien
gagcagggagattcagccatcttcc

SEQ ID NO: 5056002 - DNA, 25 bp, Homo sapien
ctggggcttgcctaaaagccacagc

SEQ ID NO: 5056003 - DNA, 25 bp, Homo sapien
ctgtggcccccgaccaggagggact

SEQ ID NO: 5056004 - DNA, 25 bp, Homo sapien
ccacagcagctcttcagttccccaa

SEQ ID NO: 5056005 - DNA, 25 bp, Homo sapien
gccctggggcttgcctaaaagccac

SEQ ID NO: 5056006 - DNA, 25 bp, Homo sapien
gctgctgtctccatggcagtgtgct

SEQ ID NO: 5056007 - DNA, 25 bp, Homo sapien
ggctcgtccccgttcccacaggatg

SEQ ID NO: 5056008 - DNA, 25 bp, Homo sapien
acactcggtcagcacggaggggctc

SEQ ID NO: 5056009 - DNA, 25 bp, Homo sapien
gggatgccccagacactcggtcagc

SEQ ID NO: 5056010 - DNA, 25 bp, Homo sapien
ctctcgcaccgccactagagggatg

SEQ ID NO: 5056011 - DNA, 25 bp, Homo sapien
agagggatgcctcggcctgtgtcac

SEQ ID NO: 5056012 - DNA, 25 bp, Homo sapien
ccaacatggcttgggttgagaatga

SEQ ID NO: 5056013 - DNA, 25 bp, Homo sapien
gaatgagggtgataagcatgtgcca

SEQ ID NO: 5056014 - DNA, 25 bp, Homo sapien
ggccagggcgcggtagtccagcttc

SEQ ID NO: 5056015 - DNA, 25 bp, Homo sapien
cggccagggcgcggtagtccagctt

SEQ ID NO: 5056016 - DNA, 25 bp, Homo sapien
gccagggcgcggtagtccagcttca

SEQ ID NO: 5056017 - DNA, 25 bp, Homo sapien
gcggccagggcgcggtagtccagct

SEQ ID NO: 5056018 - DNA, 25 bp, Homo sapien
tgcggcttctgtggcctcgggcccc

SEQ ID NO: 5056019 - DNA, 25 bp, Homo sapien
tcgggcccccagtgcagggtctgtc

SEQ ID NO: 5056020 - DNA, 25 bp, Homo sapien
cccagtgcagggtctgtccaggcag

SEQ ID NO: 5056021 - DNA, 25 bp, Homo sapien
gcctcgggcccccagtgcagggtct

SEQ ID NO: 5056022 - DNA, 25 bp, Homo sapien
ccggtggccgatgcctgccgcaaag

SEQ ID NO: 5056023 - DNA, 25 bp, Homo sapien
gctcccggtcgatggaagagatgct

SEQ ID NO: 5056024 - DNA, 25 bp, Homo sapien
cgcaaaggggttggcaatgacacct

SEQ ID NO: 5056025 - DNA, 25 bp, Homo sapien
tgctctccaggctgttccggtggcc

SEQ ID NO: 5056026 - DNA, 25 bp, Homo sapien
aacagggcttggagcctacaggaac

SEQ ID NO: 5056027 - DNA, 25 bp, Homo sapien
aaacagggcttggagcctacaggaa

SEQ ID NO: 5056028 - DNA, 25 bp, Homo sapien
cctgcacaccctggcgccagtgaag

SEQ ID NO: 5056029 - DNA, 25 bp, Homo sapien
ggcgccagtgaagaacccctggaaa

SEQ ID NO: 5056030 - DNA, 25 bp, Homo sapien
gcgccagtgaagaacccctggaaac

SEQ ID NO: 5056031 - DNA, 25 bp, Homo sapien
gctgcgtcggtgctggcctcaaagc

SEQ ID NO: 5056032 - DNA, 25 bp, Homo sapien
ggctctgctggttcacctccaacag

SEQ ID NO: 5056033 - DNA, 25 bp, Homo sapien
accagcacggtgagggtgtcgccca

SEQ ID NO: 5056034 - DNA, 25 bp, Homo sapien
ctcgccgtgcgtcaggcccagcagg

SEQ ID NO: 5056035 - DNA, 25 bp, Homo sapien
tctggatgcacagttcccgtaggcc

SEQ ID NO: 5056036 - DNA, 25 bp, Homo sapien
ttcttggtgcgtggcatcccgcacg

SEQ ID NO: 5056037 - DNA, 25 bp, Homo sapien
ccggagcagggcactgactgcttct

SEQ ID NO: 5056038 - DNA, 25 bp, Homo sapien
acgtcttgcccgttcactgccagga

SEQ ID NO: 5056039 - DNA, 25 bp, Homo sapien
cctggacaccaaacgggtggctgga

SEQ ID NO: 5056040 - DNA, 25 bp, Homo sapien
ccaggctcctggacaccaaacgggt

SEQ ID NO: 5056041 - DNA, 25 bp, Homo sapien
cgacaatactaagccccagagggcc

SEQ ID NO: 5056042 - DNA, 25 bp, Homo sapien
ctggaatggtcggagcctccgacaa

SEQ ID NO: 5056043 - DNA, 25 bp, Homo sapien
gatttctgcgccaccagtgttctgc

SEQ ID NO: 5056044 - DNA, 25 bp, Homo sapien
gcacgcagcgtgaggacaatatcct

SEQ ID NO: 5056045 - DNA, 25 bp, Homo sapien
acaaggacaggcctcggtcaggaca

SEQ ID NO: 5056046 - DNA, 25 bp, Homo sapien
acaatatcctcgctgactgtggcca

SEQ ID NO: 5056047 - DNA, 25 bp, Homo sapien
tgggccgcaaggccataagagagca

SEQ ID NO: 5056048 - DNA, 25 bp, Homo sapien
gcaaggccataagagagcaggtcct

SEQ ID NO: 5056049 - DNA, 25 bp, Homo sapien
gccgcaaggccataagagagcaggt

SEQ ID NO: 5056050 - DNA, 25 bp, Homo sapien
ggagtgggccgcaaggccataagag

SEQ ID NO: 5056051 - DNA, 25 bp, Homo sapien
gggtggcagtggttatgctggtggt

SEQ ID NO: 5056052 - DNA, 25 bp, Homo sapien
tcagcagggagacggcgtggtcatg

SEQ ID NO: 5056053 - DNA, 25 bp, Homo sapien
gcctcagtcacgtccactccattaa

SEQ ID NO: 5056054 - DNA, 25 bp, Homo sapien
ggccaggctcggcaacccaggcacc

SEQ ID NO: 5056055 - DNA, 25 bp, Homo sapien
tcggcaatgcgggagacgaagatgc

SEQ ID NO: 5056056 - DNA, 25 bp, Homo sapien
cgccctcggcaatgcgggagacgaa

SEQ ID NO: 5056057 - DNA, 25 bp, Homo sapien
gcaccgccctcggcaatgcgggaga

SEQ ID NO: 5056058 - DNA, 25 bp, Homo sapien
cctcggcaatgcgggagacgaagat

SEQ ID NO: 5056059 - DNA, 25 bp, Homo sapien
tgatggtgaccgcgttctcaggctc

SEQ ID NO: 5056060 - DNA, 25 bp, Homo sapien
ggcaggccacgtggcgctgacggag

SEQ ID NO: 5056061 - DNA, 25 bp, Homo sapien
gggctgtaatcatcctcgggccgca

SEQ ID NO: 5056062 - DNA, 25 bp, Homo sapien
actcgcatctgcacggcagtgccgg

SEQ ID NO: 5056063 - DNA, 25 bp, Homo sapien
ccactcggggcggagaggttgccga

SEQ ID NO: 5056064 - DNA, 25 bp, Homo sapien
acagctgccactcggggcggagagg

SEQ ID NO: 5056065 - DNA, 25 bp, Homo sapien
cggggcggagaggttgccgactcac

SEQ ID NO: 5056066 - DNA, 25 bp, Homo sapien
gcacagctgccactcggggcggaga

SEQ ID NO: 5056067 - DNA, 25 bp, Homo sapien
agcttgtcacccacacggactccag

SEQ ID NO: 5056068 - DNA, 25 bp, Homo sapien
ggccgcagggccttcctcggacacc

SEQ ID NO: 5056069 - DNA, 25 bp, Homo sapien
gagcttgtcacccacacggactcca

SEQ ID NO: 5056070 - DNA, 25 bp, Homo sapien
ggccttcctcggacacccgagagat

SEQ ID NO: 5056071 - DNA, 25 bp, Homo sapien
gtgtggagcccttgccgcccgcaat

SEQ ID NO: 5056072 - DNA, 25 bp, Homo sapien
cccagtctgccgcaggatagtgagg

SEQ ID NO: 5056073 - DNA, 25 bp, Homo sapien
ctcgtcgtcccccttatagggtgtg

SEQ ID NO: 5056074 - DNA, 25 bp, Homo sapien
ttgccgcccgcaatgctgatgccca

SEQ ID NO: 5056075 - DNA, 25 bp, Homo sapien
caggctctatcagcaggttattggc

SEQ ID NO: 5056076 - DNA, 25 bp, Homo sapien
ttcctcctcaatgcgagcaggctct

SEQ ID NO: 5056077 - DNA, 25 bp, Homo sapien
cagcaggttattggcctggtcaaac

SEQ ID NO: 5056078 - DNA, 25 bp, Homo sapien
tattggcctggtcaaacgacactcc

SEQ ID NO: 5056079 - DNA, 25 bp, Homo sapien
actgccctggcacgggcgcctccat

SEQ ID NO: 5056080 - DNA, 25 bp, Homo sapien
tggaggcgtgagtgacaccacacac

SEQ ID NO: 5056081 - DNA, 25 bp, Homo sapien
atcctggaggcgtgagtgacaccac

SEQ ID NO: 5056082 - DNA, 25 bp, Homo sapien
ctccatcctggaggcgtgagtgaca

SEQ ID NO: 5056083 - DNA, 25 bp, Homo sapien
cttgacagagggcgcagaaaccacg

SEQ ID NO: 5056084 - DNA, 25 bp, Homo sapien
tgacagagggcgcagaaaccacggc

SEQ ID NO: 5056085 - DNA, 25 bp, Homo sapien
ttgacagagggcgcagaaaccacgg

SEQ ID NO: 5056086 - DNA, 25 bp, Homo sapien
gacagagggcgcagaaaccacggcc

SEQ ID NO: 5056087 - DNA, 25 bp, Homo sapien
tcctcctgaggactaccctcttcct

SEQ ID NO: 5056088 - DNA, 25 bp, Homo sapien
cctcctgaggactaccctcttcctc

SEQ ID NO: 5056089 - DNA, 25 bp, Homo sapien
ctccccatcaggctgcatgccctgc

SEQ ID NO: 5056090 - DNA, 25 bp, Homo sapien
ggccattgtgccagcccccgggagc

SEQ ID NO: 5056091 - DNA, 25 bp, Homo sapien
tccccatcaggctgcatgccctgca

SEQ ID NO: 5056092 - DNA, 25 bp, Homo sapien
ccagggtgcgtgggggccattgtgc

SEQ ID NO: 5056093 - DNA, 25 bp, Homo sapien
tgcctcccgcctggcagggtccagg

SEQ ID NO: 5056094 - DNA, 25 bp, Homo sapien
ttttgtagtgaggtgtgtccttgcg

SEQ ID NO: 5056095 - DNA, 25 bp, Homo sapien
tgtcatccccgggcagcagtgcgtc

SEQ ID NO: 5056096 - DNA, 25 bp, Homo sapien
tagtgaggtgtgtccttgcggatga

SEQ ID NO: 5056097 - DNA, 25 bp, Homo sapien
ccctgtgcctcagccgacgggccct

SEQ ID NO: 5056098 - DNA, 25 bp, Homo sapien
tcctggtagtcctcttcggcgtctt

SEQ ID NO: 5056099 - DNA, 25 bp, Homo sapien
tccccgccagcagtcgtggcttcct

SEQ ID NO: 5056100 - DNA, 25 bp, Homo sapien
tggcagatgggcgagagtcttcact

SEQ ID NO: 5056101 - DNA, 25 bp, Homo sapien
tcccaggatggaccggaccaccaca

SEQ ID NO: 5056102 - DNA, 25 bp, Homo sapien
ccgccctgcacgacccacacgtcca

SEQ ID NO: 5056103 - DNA, 25 bp, Homo sapien
gtcagcggcccgccaggttgccgtg

SEQ ID NO: 5056104 - DNA, 25 bp, Homo sapien
tgcacgacccacacgtccaccctgg

SEQ ID NO: 5056105 - DNA, 25 bp, Homo sapien
ctctgcaggcaagggcgacccagag

SEQ ID NO: 5056106 - DNA, 25 bp, Homo sapien
gcaagggcgacccagagtctggctg

SEQ ID NO: 5056107 - DNA, 25 bp, Homo sapien
ctcgctccgccgcccctcgatgctc

SEQ ID NO: 5056108 - DNA, 25 bp, Homo sapien
tcctctgcaggcaagggcgacccag

SEQ ID NO: 5056109 - DNA, 25 bp, Homo sapien
ctccaggtctccgagaggctcccct

SEQ ID NO: 5056110 - DNA, 25 bp, Homo sapien
aactggatgacgctgacgcggctcg

SEQ ID NO: 5056111 - DNA, 25 bp, Homo sapien
ctcggcggggcatcgctccaggtct

SEQ ID NO: 5056112 - DNA, 25 bp, Homo sapien
tcagcgtcctcatcacctatggggg

SEQ ID NO: 5056113 - DNA, 25 bp, Homo sapien
gcatcatcctccgtctggaaccgga

SEQ ID NO: 5056114 - DNA, 25 bp, Homo sapien
agccacagggccttgagattgaggt

SEQ ID NO: 5056115 - DNA, 25 bp, Homo sapien
ggcagcaagtagcaggtgagcacct

SEQ ID NO: 5056116 - DNA, 25 bp, Homo sapien
gtgagcaccttctcgccggtccggg

SEQ ID NO: 5056117 - DNA, 25 bp, Homo sapien
ggtccacgttgaggttggtcagctt

SEQ ID NO: 5056118 - DNA, 25 bp, Homo sapien
ctcgaggtggttccggtccacgttg

SEQ ID NO: 5056119 - DNA, 25 bp, Homo sapien
ttgaggttggtcagcttagtcagct

SEQ ID NO: 5056120 - DNA, 25 bp, Homo sapien
gagaggacgctgagtgccacacagc

SEQ ID NO: 5056121 - DNA, 25 bp, Homo sapien
gtcacctcgcacagccgattctggt

SEQ ID NO: 5056122 - DNA, 25 bp, Homo sapien
ctttaggatggatagctgcttcagc

SEQ ID NO: 5056123 - DNA, 25 bp, Homo sapien
ggttctccgtgaggatcagctcaga

SEQ ID NO: 5056124 - DNA, 25 bp, Homo sapien
aggatcagctcagagaggttctcac

SEQ ID NO: 5056125 - DNA, 25 bp, Homo sapien
gtgagcagcaccagcccgccgagct

SEQ ID NO: 5056126 - DNA, 25 bp, Homo sapien
ccagccggttttccgacacgtccag

SEQ ID NO: 5056127 - DNA, 25 bp, Homo sapien
ggttttccgacacgtccaggcacac

SEQ ID NO: 5056128 - DNA, 25 bp, Homo sapien
agctcctccagccggttttccgaca

SEQ ID NO: 5056129 - DNA, 25 bp, Homo sapien
cagctcccgaagattgggcagagcc

SEQ ID NO: 5056130 - DNA, 25 bp, Homo sapien
gctcccgaagattgggcagagcccc

SEQ ID NO: 5056131 - DNA, 25 bp, Homo sapien
cacagctcccgaagattgggcagag

SEQ ID NO: 5056132 - DNA, 25 bp, Homo sapien
ccacagctcccgaagattgggcaga

SEQ ID NO: 5056133 - DNA, 25 bp, Homo sapien
cagcttgaccagaaatgacagggac

SEQ ID NO: 5056134 - DNA, 25 bp, Homo sapien
cagcacttccagatcgttgcctccc

SEQ ID NO: 5056135 - DNA, 25 bp, Homo sapien
ccagcttgaccagaaatgacaggga

SEQ ID NO: 5056136 - DNA, 25 bp, Homo sapien
acttccagatcgttgcctcccagat

SEQ ID NO: 5056137 - DNA, 25 bp, Homo sapien
ggacttgagcaggttctcccggagc

SEQ ID NO: 5056138 - DNA, 25 bp, Homo sapien
ccggagctccagggtcaccaggttg

SEQ ID NO: 5056139 - DNA, 25 bp, Homo sapien
tgagcaggttctcccggagctccag

SEQ ID NO: 5056140 - DNA, 25 bp, Homo sapien
agctccagggtcaccaggttggcga

SEQ ID NO: 5056141 - DNA, 25 bp, Homo sapien
gctgcgcagctgagtgaagccatca

SEQ ID NO: 5056142 - DNA, 25 bp, Homo sapien
tgcccacgtccccgggcagtgcctg

SEQ ID NO: 5056143 - DNA, 25 bp, Homo sapien
ttgcccacgtccccgggcagtgcct

SEQ ID NO: 5056144 - DNA, 25 bp, Homo sapien
tgcgcagctgagtgaagccatcagg

SEQ ID NO: 5056145 - DNA, 25 bp, Homo sapien
ccagagccttgcagaacttgatgct

SEQ ID NO: 5056146 - DNA, 25 bp, Homo sapien
gttcccgctgaagtccgcgatctcc

SEQ ID NO: 5056147 - DNA, 25 bp, Homo sapien
ccgcgatctccagagccttgcagaa

SEQ ID NO: 5056148 - DNA, 25 bp, Homo sapien
ccttgcagaacttgatgctctccgg

SEQ ID NO: 5056149 - DNA, 25 bp, Homo sapien
tcaggcccagcttgcgcaagttcag

SEQ ID NO: 5056150 - DNA, 25 bp, Homo sapien
atgaagttggccacctcgggaggca

SEQ ID NO: 5056151 - DNA, 25 bp, Homo sapien
tggatctcgttgtcgctcaggccca

SEQ ID NO: 5056152 - DNA, 25 bp, Homo sapien
gcgcaagttcagcagccggaaaaaa

SEQ ID NO: 5056153 - DNA, 25 bp, Homo sapien
ggagaggaggtctggacccacctcc

SEQ ID NO: 5056154 - DNA, 25 bp, Homo sapien
aaggagaggaggtctggacccacct

SEQ ID NO: 5056155 - DNA, 25 bp, Homo sapien
aggagaggaggtctggacccacctc

SEQ ID NO: 5056156 - DNA, 25 bp, Homo sapien
cacctgaatccaagttccaccctaa

SEQ ID NO: 5056157 - DNA, 25 bp, Homo sapien
cagccacctgaatccaagttccacc

SEQ ID NO: 5056158 - DNA, 25 bp, Homo sapien
cctaaccccatccacctccctgaat

SEQ ID NO: 5056159 - DNA, 25 bp, Homo sapien
taaccccatccacctccctgaatcc

SEQ ID NO: 5056160 - DNA, 25 bp, Homo sapien
gtccaccgactccacgtgccggttg

SEQ ID NO: 5056161 - DNA, 25 bp, Homo sapien
acggcctgcagcgaacagtgccgct

SEQ ID NO: 5056162 - DNA, 25 bp, Homo sapien
acgtgccggttgcagcgccacagcg

SEQ ID NO: 5056163 - DNA, 25 bp, Homo sapien
ggtagatctcctccggcacggcctg

SEQ ID NO: 5056164 - DNA, 25 bp, Homo sapien
tgcccgccggactgccccgccgaca

SEQ ID NO: 5056165 - DNA, 25 bp, Homo sapien
gccgcgcagcccgtcgggaagccga

SEQ ID NO: 5056166 - DNA, 25 bp, Homo sapien
gccctcgccgcctagcacgcccgga

SEQ ID NO: 5056167 - DNA, 25 bp, Homo sapien
cagcccgtcgggaagccgagtccgg

SEQ ID NO: 5056168 - DNA, 25 bp, Homo sapien
gacacacggacgttcagggccagca

SEQ ID NO: 5056169 - DNA, 25 bp, Homo sapien
acacacggacgttcagggccagcag

SEQ ID NO: 5056170 - DNA, 25 bp, Homo sapien
tttatccgcactgtaggctgggctg

SEQ ID NO: 5056171 - DNA, 25 bp, Homo sapien
atccgcacctttatccgcactgtag

SEQ ID NO: 5056172 - DNA, 25 bp, Homo sapien
ggtccaccatgttgcgcagaaccat

SEQ ID NO: 5056173 - DNA, 25 bp, Homo sapien
caaaccagcggccattgagggcctg

SEQ ID NO: 5056174 - DNA, 25 bp, Homo sapien
actgttatcaaaacgctcctggtcg

SEQ ID NO: 5056175 - DNA, 25 bp, Homo sapien
tggatggccttatgagtctcagagg

SEQ ID NO: 5056176 - DNA, 25 bp, Homo sapien
tctgactcgggaaacagctcctctt

SEQ ID NO: 5056177 - DNA, 25 bp, Homo sapien
tctggccgctctgactcgggaaaca

SEQ ID NO: 5056178 - DNA, 25 bp, Homo sapien
gcgctactgcccgagatgctcatgt

SEQ ID NO: 5056179 - DNA, 25 bp, Homo sapien
ttctgcatcaccatgtgtcgggcgc

SEQ ID NO: 5056180 - DNA, 25 bp, Homo sapien
tgtgcccagggtacccagcaccgct

SEQ ID NO: 5056181 - DNA, 25 bp, Homo sapien
ccatgacagcctggggcaaagtgcc

SEQ ID NO: 5056182 - DNA, 25 bp, Homo sapien
caggtgtgcccagggtacccagcac

SEQ ID NO: 5056183 - DNA, 25 bp, Homo sapien
gcccagggtacccagcaccgctgct

SEQ ID NO: 5056184 - DNA, 25 bp, Homo sapien
tgggcggtgtgacagccttgcccac

SEQ ID NO: 5056185 - DNA, 25 bp, Homo sapien
atgggcggtgtgacagccttgccca

SEQ ID NO: 5056186 - DNA, 25 bp, Homo sapien
aagtactggccacccaggtcaaaga

SEQ ID NO: 5056187 - DNA, 25 bp, Homo sapien
cttgggacgactgggccttctcgta

SEQ ID NO: 5056188 - DNA, 25 bp, Homo sapien
gcaagtactggccacccaggtcaaa

SEQ ID NO: 5056189 - DNA, 25 bp, Homo sapien
gaggttcatggaagacacagcatct

SEQ ID NO: 5056190 - DNA, 25 bp, Homo sapien
caactggtctatgatgggctgggcc

SEQ ID NO: 5056191 - DNA, 25 bp, Homo sapien
tgcacagaggccacgtagatgcggt

SEQ ID NO: 5056192 - DNA, 25 bp, Homo sapien
tagatgcggttgaaggcccgtgcct

SEQ ID NO: 5056193 - DNA, 25 bp, Homo sapien
ttgatgtcatcgtctgagaggtcct

SEQ ID NO: 5056194 - DNA, 25 bp, Homo sapien
ccggccacaaaaggcttccgtggag

SEQ ID NO: 5056195 - DNA, 25 bp, Homo sapien
cctgcgggatcgaggccttggctcc

SEQ ID NO: 5056196 - DNA, 25 bp, Homo sapien
gagatggaaagaccggtcaacccag

SEQ ID NO: 5056197 - DNA, 25 bp, Homo sapien
agccctgcacgcctgcgggatcgag

SEQ ID NO: 5056198 - DNA, 25 bp, Homo sapien
ccagctgtgcagcttcggggacctc

SEQ ID NO: 5056199 - DNA, 25 bp, Homo sapien
ccagcatcaccgagttcatctgctc

SEQ ID NO: 5056200 - DNA, 25 bp, Homo sapien
gcttcggggacctcatactccacga

SEQ ID NO: 5056201 - DNA, 25 bp, Homo sapien
gcatcaccgagttcatctgctccaa

SEQ ID NO: 5056202 - DNA, 25 bp, Homo sapien
tcatggtgacggagtcccaggacat

SEQ ID NO: 5056203 - DNA, 25 bp, Homo sapien
catagtagatagagcccacgtagac

SEQ ID NO: 5056204 - DNA, 25 bp, Homo sapien
caggacatgtcgatgctcttgatgg

SEQ ID NO: 5056205 - DNA, 25 bp, Homo sapien
acgtagacgcggcacatgatggcca

SEQ ID NO: 5056206 - DNA, 25 bp, Homo sapien
gcaggacagaggggagagaaccgct

SEQ ID NO: 5056207 - DNA, 25 bp, Homo sapien
tgcagcaggacagaggggagagaac

SEQ ID NO: 5056208 - DNA, 25 bp, Homo sapien
caggacagaggggagagaaccgctg

SEQ ID NO: 5056209 - DNA, 25 bp, Homo sapien
cagcaggacagaggggagagaaccg

SEQ ID NO: 5056210 - DNA, 25 bp, Homo sapien
catgacagggaggtgcgggctccat

SEQ ID NO: 5056211 - DNA, 25 bp, Homo sapien
acatgacagggaggtgcgggctcca

SEQ ID NO: 5056212 - DNA, 25 bp, Homo sapien
gagggctccccacatgacagggagg

SEQ ID NO: 5056213 - DNA, 25 bp, Homo sapien
gggagggctccccacatgacaggga

SEQ ID NO: 5056214 - DNA, 25 bp, Homo sapien
agagaggaggtcagaagacagggca

SEQ ID NO: 5056215 - DNA, 25 bp, Homo sapien
aagagaggaggtcagaagacagggc

SEQ ID NO: 5056216 - DNA, 25 bp, Homo sapien
tggcgctctgctgcgctcgtccaga

SEQ ID NO: 5056217 - DNA, 25 bp, Homo sapien
ccacgcctggcgctctgctgcgctc

SEQ ID NO: 5056218 - DNA, 25 bp, Homo sapien
gcctggcgctctgctgcgctcgtcc

SEQ ID NO: 5056219 - DNA, 25 bp, Homo sapien
acgcctggcgctctgctgcgctcgt

SEQ ID NO: 5056220 - DNA, 25 bp, Homo sapien
caaggtccccagcacgtgggctgca

SEQ ID NO: 5056221 - DNA, 25 bp, Homo sapien
tgcactgcccccctctagccctgac

SEQ ID NO: 5056222 - DNA, 25 bp, Homo sapien
agcaaggtccccagcacgtgggctg

SEQ ID NO: 5056223 - DNA, 25 bp, Homo sapien
ggtccccagcacgtgggctgcactg

SEQ ID NO: 5056224 - DNA, 25 bp, Homo sapien
taaggacatgagccccggaagaagt

SEQ ID NO: 5056225 - DNA, 25 bp, Homo sapien
catgagccccggaagaagtgagcat

SEQ ID NO: 5056226 - DNA, 25 bp, Homo sapien
gacatgagccccggaagaagtgagc

SEQ ID NO: 5056227 - DNA, 25 bp, Homo sapien
aggacatgagccccggaagaagtga

SEQ ID NO: 5056228 - DNA, 25 bp, Homo sapien
ttgcaaaggtgagagaggatctcca

SEQ ID NO: 5056229 - DNA, 25 bp, Homo sapien
caaaggtgagagaggatctccaaag

SEQ ID NO: 5056230 - DNA, 25 bp, Homo sapien
tgcaaaggtgagagaggatctccaa

SEQ ID NO: 5056231 - DNA, 25 bp, Homo sapien
aggtgagagaggatctccaaagccc

SEQ ID NO: 5056232 - DNA, 25 bp, Homo sapien
gcgatggtctgcttcaccagcacac

SEQ ID NO: 5056233 - DNA, 25 bp, Homo sapien
ggtgcgcgatggtctgcttcaccag

SEQ ID NO: 5056234 - DNA, 25 bp, Homo sapien
tgcgcgatggtctgcttcaccagca

SEQ ID NO: 5056235 - DNA, 25 bp, Homo sapien
gctggtgcgcgatggtctgcttcac

SEQ ID NO: 5056236 - DNA, 25 bp, Homo sapien
cagcttggcggctgtgctctgcccg

SEQ ID NO: 5056237 - DNA, 25 bp, Homo sapien
cggctgtgctctgcccgttctccat

SEQ ID NO: 5056238 - DNA, 25 bp, Homo sapien
aagggcctcctgctgctcgggcgtc

SEQ ID NO: 5056239 - DNA, 25 bp, Homo sapien
tggcggctgtgctctgcccgttctc

SEQ ID NO: 5056240 - DNA, 25 bp, Homo sapien
gattatgtttacgtccctcctgtca

SEQ ID NO: 5056241 - DNA, 25 bp, Homo sapien
cacagaagtgatgagcaaggacaga

SEQ ID NO: 5056242 - DNA, 25 bp, Homo sapien
tgggcaaacagcatgcctgcgcctg

SEQ ID NO: 5056243 - DNA, 25 bp, Homo sapien
tcagcaagcacaaagatcactggcc

SEQ ID NO: 5056244 - DNA, 25 bp, Homo sapien
ccatttgtctcccgctgccaccact

SEQ ID NO: 5056245 - DNA, 25 bp, Homo sapien
gctcggacccccctccttgctggcc

SEQ ID NO: 5056246 - DNA, 25 bp, Homo sapien
ggctcggacccccctccttgctggc

SEQ ID NO: 5056247 - DNA, 25 bp, Homo sapien
ccggctcggacccccctccttgctg

SEQ ID NO: 5056248 - DNA, 25 bp, Homo sapien
tccacaatggtcttgagggatggca

SEQ ID NO: 5056249 - DNA, 25 bp, Homo sapien
gaggttagccctctgcactcagtaa

SEQ ID NO: 5056250 - DNA, 25 bp, Homo sapien
agctgtctcgcaggaggacggccaa

SEQ ID NO: 5056251 - DNA, 25 bp, Homo sapien
tgaagacacttttaagcagcatggt

SEQ ID NO: 5056252 - DNA, 25 bp, Homo sapien
ggctccacagtgagcgctgcagagg

SEQ ID NO: 5056253 - DNA, 25 bp, Homo sapien
agctgccagcaaagaatgccaaaat

SEQ ID NO: 5056254 - DNA, 25 bp, Homo sapien
cgcagacacgagacaagagagaaag

SEQ ID NO: 5056255 - DNA, 25 bp, Homo sapien
agagagaaagacgtctctctcagga

SEQ ID NO: 5056256 - DNA, 25 bp, Homo sapien
gaggggaggcccttctgcatcttct

SEQ ID NO: 5056257 - DNA, 25 bp, Homo sapien
tgctccattcaacctcccatgagag

SEQ ID NO: 5056258 - DNA, 25 bp, Homo sapien
gaggcagccggcctcattctgcagc

SEQ ID NO: 5056259 - DNA, 25 bp, Homo sapien
cactgtcagccaagttcagctgctc

SEQ ID NO: 5056260 - DNA, 25 bp, Homo sapien
cggacaggaacgcaaccccgccagg

SEQ ID NO: 5056261 - DNA, 25 bp, Homo sapien
gctcgcccgcaagggccacacgccg

SEQ ID NO: 5056262 - DNA, 25 bp, Homo sapien
gcggacaggaacgcaaccccgccag

SEQ ID NO: 5056263 - DNA, 25 bp, Homo sapien
ccgccaggctcgcccgcaagggcca

SEQ ID NO: 5056264 - DNA, 25 bp, Homo sapien
gacgtcgtgagatgcgtcgtccccg

SEQ ID NO: 5056265 - DNA, 25 bp, Homo sapien
cgggaggccccgttcaattggcagc

SEQ ID NO: 5056266 - DNA, 25 bp, Homo sapien
gaaaggcccgcgtgtttcaggctga

SEQ ID NO: 5056267 - DNA, 25 bp, Homo sapien
tgcacggaactctcgcgaggaagga

SEQ ID NO: 5056268 - DNA, 25 bp, Homo sapien
tgcccgtaacactggaatgatgccg

SEQ ID NO: 5056269 - DNA, 25 bp, Homo sapien
gaaatgccatcctagaacaccgtgt

SEQ ID NO: 5056270 - DNA, 25 bp, Homo sapien
aatgatgccgccaggagactgaggc

SEQ ID NO: 5056271 - DNA, 25 bp, Homo sapien
tgtaataacacccatgcagctatga

SEQ ID NO: 5056272 - DNA, 25 bp, Homo sapien
aattcaacagagacatgattaagtg

SEQ ID NO: 5056273 - DNA, 25 bp, Homo sapien
aaattcaacagagacatgattaagt

SEQ ID NO: 5056274 - DNA, 25 bp, Homo sapien
attcaacagagacatgattaagtgc

SEQ ID NO: 5056275 - DNA, 25 bp, Homo sapien
aaaattcaacagagacatgattaag

SEQ ID NO: 5056276 - DNA, 25 bp, Homo sapien
tgtatttgccactgaaaccatttag

SEQ ID NO: 5056277 - DNA, 25 bp, Homo sapien
tttagaaccatgcataatcagacag

SEQ ID NO: 5056278 - DNA, 25 bp, Homo sapien
cagacagtttagcatgagggtttcc

SEQ ID NO: 5056279 - DNA, 25 bp, Homo sapien
aagttcagtttaatcagtagtacaa

SEQ ID NO: 5056280 - DNA, 25 bp, Homo sapien
cagagaaatggttcgtgacacagac

SEQ ID NO: 5056281 - DNA, 25 bp, Homo sapien
gactgaacctgctagctctgaagat

SEQ ID NO: 5056282 - DNA, 25 bp, Homo sapien
ttggccctgccaccgaaaggatgtg

SEQ ID NO: 5056283 - DNA, 25 bp, Homo sapien
gccagccttgattctagtccagtga

SEQ ID NO: 5056284 - DNA, 25 bp, Homo sapien
gcaagccaagaatcaagaggccagg

SEQ ID NO: 5056285 - DNA, 25 bp, Homo sapien
ggaatgcatgagagaaaaagcccat

SEQ ID NO: 5056286 - DNA, 25 bp, Homo sapien
tagaaatctctaagactgagccagg

SEQ ID NO: 5056287 - DNA, 25 bp, Homo sapien
tgatcctaaggacctgggaggccta

SEQ ID NO: 5056288 - DNA, 25 bp, Homo sapien
ctgggtcccacggtacttgaggaag

SEQ ID NO: 5056289 - DNA, 25 bp, Homo sapien
gcctgggtcccacggtacttgagga

SEQ ID NO: 5056290 - DNA, 25 bp, Homo sapien
caggcctgggtcccacggtacttga

SEQ ID NO: 5056291 - DNA, 25 bp, Homo sapien
aggcctgggtcccacggtacttgag

SEQ ID NO: 5056292 - DNA, 25 bp, Homo sapien
tgccccgtgcgccccctccgccagg

SEQ ID NO: 5056293 - DNA, 25 bp, Homo sapien
gccccgtgcgccccctccgccaggc

SEQ ID NO: 5056294 - DNA, 25 bp, Homo sapien
cctgccccgtgcgccccctccgcca

SEQ ID NO: 5056295 - DNA, 25 bp, Homo sapien
ctgccccgtgcgccccctccgccag

SEQ ID NO: 5056296 - DNA, 25 bp, Homo sapien
agccatagtgcacgagctccgaggc

SEQ ID NO: 5056297 - DNA, 25 bp, Homo sapien
ccatagtgcacgagctccgaggcga

SEQ ID NO: 5056298 - DNA, 25 bp, Homo sapien
gccatagtgcacgagctccgaggcg

SEQ ID NO: 5056299 - DNA, 25 bp, Homo sapien
cgcccaagtcccctgcccagcctac

SEQ ID NO: 5056300 - DNA, 25 bp, Homo sapien
atggcgtaaggcgaggcatgaggcc

SEQ ID NO: 5056301 - DNA, 25 bp, Homo sapien
gaggcaatggcgtaaggcgaggcat

SEQ ID NO: 5056302 - DNA, 25 bp, Homo sapien
cgtaaggcgaggcatgaggccgctg

SEQ ID NO: 5056303 - DNA, 25 bp, Homo sapien
ggagcaggtcgtaggtcagctgccg

SEQ ID NO: 5056304 - DNA, 25 bp, Homo sapien
tgccggtgcagccggtcttccagca

SEQ ID NO: 5056305 - DNA, 25 bp, Homo sapien
caggtcgtaggtcagctgccggtgc

SEQ ID NO: 5056306 - DNA, 25 bp, Homo sapien
ggtcgtaggtcagctgccggtgcag

SEQ ID NO: 5056307 - DNA, 25 bp, Homo sapien
gggggttcagggctccgccacgctc

SEQ ID NO: 5056308 - DNA, 25 bp, Homo sapien
ggttcagggctccgccacgctcccg

SEQ ID NO: 5056309 - DNA, 25 bp, Homo sapien
ctgggggttcagggctccgccacgc

SEQ ID NO: 5056310 - DNA, 25 bp, Homo sapien
gggttcagggctccgccacgctccc

SEQ ID NO: 5056311 - DNA, 25 bp, Homo sapien
tgtcctcgcttctctccaggttgca

SEQ ID NO: 5056312 - DNA, 25 bp, Homo sapien
ttctctccaggttgcactgcatctg

SEQ ID NO: 5056313 - DNA, 25 bp, Homo sapien
tcgcttctctccaggttgcactgca

SEQ ID NO: 5056314 - DNA, 25 bp, Homo sapien
gcttctctccaggttgcactgcatc

SEQ ID NO: 5056315 - DNA, 25 bp, Homo sapien
tgcaaagttcatcagtgggtagatt

SEQ ID NO: 5056316 - DNA, 25 bp, Homo sapien
gttcatcagtgggtagattccattc

SEQ ID NO: 5056317 - DNA, 25 bp, Homo sapien
tctcagagtcaaagggctctggcgt

SEQ ID NO: 5056318 - DNA, 25 bp, Homo sapien
gggtcgagtggctgcaaagttcatc

SEQ ID NO: 5056319 - DNA, 25 bp, Homo sapien
ctgacatcctccaggaatttgtcca

SEQ ID NO: 5056320 - DNA, 25 bp, Homo sapien
ctccatgaaggagacttccgagtac

SEQ ID NO: 5056321 - DNA, 25 bp, Homo sapien
tgacatcctccaggaatttgtccag

SEQ ID NO: 5056322 - DNA, 25 bp, Homo sapien
cagctccatgaaggagacttccgag

SEQ ID NO: 5056323 - DNA, 25 bp, Homo sapien
ccaagaccgcgtgcaggtccatggc

SEQ ID NO: 5056324 - DNA, 25 bp, Homo sapien
agctccgccaagaccgcgtgcaggt

SEQ ID NO: 5056325 - DNA, 25 bp, Homo sapien
tcctccaccacattctcaggcatga

SEQ ID NO: 5056326 - DNA, 25 bp, Homo sapien
gggaagctccgccaagaccgcgtgc

SEQ ID NO: 5056327 - DNA, 25 bp, Homo sapien
cagccaccccccgggccggcctgct

SEQ ID NO: 5056328 - DNA, 25 bp, Homo sapien
gccaccccccgggccggcctgctgc

SEQ ID NO: 5056329 - DNA, 25 bp, Homo sapien
ccccccgggccggcctgctgctcac

SEQ ID NO: 5056330 - DNA, 25 bp, Homo sapien
caccccccgggccggcctgctgctc

SEQ ID NO: 5056331 - DNA, 25 bp, Homo sapien
caggagcttcagcgagtgcacctcg

SEQ ID NO: 5056332 - DNA, 25 bp, Homo sapien
ggagcttcagcgagtgcacctcgaa

SEQ ID NO: 5056333 - DNA, 25 bp, Homo sapien
gagcttcagcgagtgcacctcgaag

SEQ ID NO: 5056334 - DNA, 25 bp, Homo sapien
agcttcagcgagtgcacctcgaaga

SEQ ID NO: 5056335 - DNA, 25 bp, Homo sapien
gatcctaaagtcacacctgcaagcc

SEQ ID NO: 5056336 - DNA, 25 bp, Homo sapien
gacctggtcctctgagcttgaggac

SEQ ID NO: 5056337 - DNA, 25 bp, Homo sapien
cagggatgcccatagggaggagtcc

SEQ ID NO: 5056338 - DNA, 25 bp, Homo sapien
ttctgggattggagcaccatgctct

SEQ ID NO: 5056339 - DNA, 25 bp, Homo sapien
tgcctggcgcgagcaatggcctcct

SEQ ID NO: 5056340 - DNA, 25 bp, Homo sapien
cattggtctggatttccagtacagc

SEQ ID NO: 5056341 - DNA, 25 bp, Homo sapien
tggtctggatttccagtacagccat

SEQ ID NO: 5056342 - DNA, 25 bp, Homo sapien
tgtgacccgggtgtccccattggtc

SEQ ID NO: 5056343 - DNA, 25 bp, Homo sapien
aagatgtccacagcggtcccatcgg

SEQ ID NO: 5056344 - DNA, 25 bp, Homo sapien
atggggcttcggagatcatctggaa

SEQ ID NO: 5056345 - DNA, 25 bp, Homo sapien
gaagtgcaggttccgaagttcctct

SEQ ID NO: 5056346 - DNA, 25 bp, Homo sapien
aggttccgaagttcctctcgctcag

SEQ ID NO: 5056347 - DNA, 25 bp, Homo sapien
ggaagaagtgcaggttccgaagttc

SEQ ID NO: 5056348 - DNA, 25 bp, Homo sapien
ttcccgtggatgattggggggctgc

SEQ ID NO: 5056349 - DNA, 25 bp, Homo sapien
tgtgctgaatgaagatggtgtcgct

SEQ ID NO: 5056350 - DNA, 25 bp, Homo sapien
tgtcgctggtcaggttcccgtggat

SEQ ID NO: 5056351 - DNA, 25 bp, Homo sapien
cggagccgatcttgatgaggccgtt

SEQ ID NO: 5056352 - DNA, 25 bp, Homo sapien
cagacaggatctgcgtgcaccagcg

SEQ ID NO: 5056353 - DNA, 25 bp, Homo sapien
gcagacaggatctgcgtgcaccagc

SEQ ID NO: 5056354 - DNA, 25 bp, Homo sapien
gactccgtcggtcgggtgggcgcag

SEQ ID NO: 5056355 - DNA, 25 bp, Homo sapien
cggacgcacgactccgtcggtcggg

SEQ ID NO: 5056356 - DNA, 25 bp, Homo sapien
tggcggcggacgcacgactccgtcg

SEQ ID NO: 5056357 - DNA, 25 bp, Homo sapien
cgcacgactccgtcggtcgggtggg

SEQ ID NO: 5056358 - DNA, 25 bp, Homo sapien
cgaggctgccccaaccccgtcctgt

SEQ ID NO: 5056359 - DNA, 25 bp, Homo sapien
gaggctgccccaaccccgtcctgtc

SEQ ID NO: 5056360 - DNA, 25 bp, Homo sapien
ccgaggctgccccaaccccgtcctg

SEQ ID NO: 5056361 - DNA, 25 bp, Homo sapien
ggctgcctgatgacacgtactctgt

SEQ ID NO: 5056362 - DNA, 25 bp, Homo sapien
gggcgttcatggccttgtggttctt

SEQ ID NO: 5056363 - DNA, 25 bp, Homo sapien
gcctgatgacacgtactctgtgatg

SEQ ID NO: 5056364 - DNA, 25 bp, Homo sapien
gacacgtactctgtgatgaagatga

SEQ ID NO: 5056365 - DNA, 25 bp, Homo sapien
gcacggtgcgagctcaggatttcca

SEQ ID NO: 5056366 - DNA, 25 bp, Homo sapien
tgcacggtgcgagctcaggatttcc

SEQ ID NO: 5056367 - DNA, 25 bp, Homo sapien
agctgcgggttcgtccccatgcccg

SEQ ID NO: 5056368 - DNA, 25 bp, Homo sapien
tccaccagctgcgggttcgtcccca

SEQ ID NO: 5056369 - DNA, 25 bp, Homo sapien
cttgtgcaacttcacgatgttcggg

SEQ ID NO: 5056370 - DNA, 25 bp, Homo sapien
cagctgctcgaacacggtctggatc

SEQ ID NO: 5056371 - DNA, 25 bp, Homo sapien
gctcgaacacggtctggatcttctc

SEQ ID NO: 5056372 - DNA, 25 bp, Homo sapien
cacgatgttcgggtggtccaccagc

SEQ ID NO: 5056373 - DNA, 25 bp, Homo sapien
tcctgtctccgaagtggagctcgtt

SEQ ID NO: 5056374 - DNA, 25 bp, Homo sapien
tcgtgcgccgcgaaggccttcctgt

SEQ ID NO: 5056375 - DNA, 25 bp, Homo sapien
cgaagtggagctcgttccacaccac

SEQ ID NO: 5056376 - DNA, 25 bp, Homo sapien
taggaaggtgctctgaagccctggc

SEQ ID NO: 5056377 - DNA, 25 bp, Homo sapien
gcttttgccagcgaccacacgggct

SEQ ID NO: 5056378 - DNA, 25 bp, Homo sapien
ttttgccagcgaccacacgggcttt

SEQ ID NO: 5056379 - DNA, 25 bp, Homo sapien
gtcgcttttgccagcgaccacacgg

SEQ ID NO: 5056380 - DNA, 25 bp, Homo sapien
ctgctcccgtcgcttttgccagcga

SEQ ID NO: 5056381 - DNA, 25 bp, Homo sapien
accgccctctgcgcgatccgccgcc

SEQ ID NO: 5056382 - DNA, 25 bp, Homo sapien
ccctctgcgcgatccgccgccggcg

SEQ ID NO: 5056383 - DNA, 25 bp, Homo sapien
ccaccgccctctgcgcgatccgccg

SEQ ID NO: 5056384 - DNA, 25 bp, Homo sapien
aggccaccgccctctgcgcgatccg

SEQ ID NO: 5056385 - DNA, 25 bp, Homo sapien
gctcactctccttatcctgcccctt

SEQ ID NO: 5056386 - DNA, 25 bp, Homo sapien
tatcattggagatggctcactctcc

SEQ ID NO: 5056387 - DNA, 25 bp, Homo sapien
agatggctcactctccttatcctgc

SEQ ID NO: 5056388 - DNA, 25 bp, Homo sapien
ggagatggctcactctccttatcct

SEQ ID NO: 5056389 - DNA, 25 bp, Homo sapien
ctttcccattggcaggtggacgatc

SEQ ID NO: 5056390 - DNA, 25 bp, Homo sapien
caggtggacgatccccgggcttgca

SEQ ID NO: 5056391 - DNA, 25 bp, Homo sapien
ccccgggcttgcagggctcaggact

SEQ ID NO: 5056392 - DNA, 25 bp, Homo sapien
ttcccattggcaggtggacgatccc

SEQ ID NO: 5056393 - DNA, 25 bp, Homo sapien
ccagaagcaccagctccctctctgt

SEQ ID NO: 5056394 - DNA, 25 bp, Homo sapien
ctttggtggatcctggttggtctga

SEQ ID NO: 5056395 - DNA, 25 bp, Homo sapien
gctccctctctgtctggattgtaga

SEQ ID NO: 5056396 - DNA, 25 bp, Homo sapien
tggatcctggttggtctgatgtccc

SEQ ID NO: 5056397 - DNA, 25 bp, Homo sapien
cggtttttccctatctcagtagatg

SEQ ID NO: 5056398 - DNA, 25 bp, Homo sapien
attccattgcccagggacgggcagg

SEQ ID NO: 5056399 - DNA, 25 bp, Homo sapien
ggcggtttttccctatctcagtaga

SEQ ID NO: 5056400 - DNA, 25 bp, Homo sapien
aagaggcattccttcctcttttact

SEQ ID NO: 5056401 - DNA, 25 bp, Homo sapien
gaattgagccaacacggatccactg

SEQ ID NO: 5056402 - DNA, 25 bp, Homo sapien
caactgtgccgtgggtgcaaagacc

SEQ ID NO: 5056403 - DNA, 25 bp, Homo sapien
taccctggttctaaacgtgaggcgc

SEQ ID NO: 5056404 - DNA, 25 bp, Homo sapien
tgagtgcccgccaaagtgaaaatgc

SEQ ID NO: 5056405 - DNA, 25 bp, Homo sapien
gtgtaaaattcctcaccagcagact

SEQ ID NO: 5056406 - DNA, 25 bp, Homo sapien
gacacagcttggagtgggcgctcat

SEQ ID NO: 5056407 - DNA, 25 bp, Homo sapien
aaagtttggccaactccagatggga

SEQ ID NO: 5056408 - DNA, 25 bp, Homo sapien
gagccaaggtggacactcactctgt

SEQ ID NO: 5056409 - DNA, 25 bp, Homo sapien
tatgtatctattactgctgaggctg

SEQ ID NO: 5056410 - DNA, 25 bp, Homo sapien
ctatgtatctattactgctgaggct

SEQ ID NO: 5056411 - DNA, 25 bp, Homo sapien
tctatgtatctattactgctgaggc

SEQ ID NO: 5056412 - DNA, 25 bp, Homo sapien
tattaagcggattgtgccgagtgcc

SEQ ID NO: 5056413 - DNA, 25 bp, Homo sapien
catcattggttgcacgtggtctgga

SEQ ID NO: 5056414 - DNA, 25 bp, Homo sapien
cagtctagcacagggagtgtcctcc

SEQ ID NO: 5056415 - DNA, 25 bp, Homo sapien
gagatacggctctaggaaccctgga

SEQ ID NO: 5056416 - DNA, 25 bp, Homo sapien
aaacttatgaaacacctcgatggac

SEQ ID NO: 5056417 - DNA, 25 bp, Homo sapien
catatgacacatagacgacccagaa

SEQ ID NO: 5056418 - DNA, 25 bp, Homo sapien
cagtcaacgctagtgaggtcacacc

SEQ ID NO: 5056419 - DNA, 25 bp, Homo sapien
gcaacaagagtacccgatggcatga

SEQ ID NO: 5056420 - DNA, 25 bp, Homo sapien
gaaaactgcacggaggaagcccagt

SEQ ID NO: 5056421 - DNA, 25 bp, Homo sapien
ccagacacacaagtatgcctccact

SEQ ID NO: 5056422 - DNA, 25 bp, Homo sapien
aaaactgcacggaggaagcccagtc

SEQ ID NO: 5056423 - DNA, 25 bp, Homo sapien
gacacacaagtatgcctccacttct

SEQ ID NO: 5056424 - DNA, 25 bp, Homo sapien
gaagcccttggtgtcgtcgctgggg

SEQ ID NO: 5056425 - DNA, 25 bp, Homo sapien
cgtgttggggtcgaagaagcccttg

SEQ ID NO: 5056426 - DNA, 25 bp, Homo sapien
gttcatctcctcgtcgaagtagccg

SEQ ID NO: 5056427 - DNA, 25 bp, Homo sapien
ctcgtcgaagtagccgcgccggtag

SEQ ID NO: 5056428 - DNA, 25 bp, Homo sapien
gcttgtcagcgccaacgtattcgga

SEQ ID NO: 5056429 - DNA, 25 bp, Homo sapien
tggtcaatgataccggcctccagga

SEQ ID NO: 5056430 - DNA, 25 bp, Homo sapien
tcagcatctgatcgaagtagccgcg

SEQ ID NO: 5056431 - DNA, 25 bp, Homo sapien
cgtattcggaattcagtagtgccca

SEQ ID NO: 5056432 - DNA, 25 bp, Homo sapien
tgctccatggcggcgtagacactct

SEQ ID NO: 5056433 - DNA, 25 bp, Homo sapien
tccatggcggcgtagacactctggg

SEQ ID NO: 5056434 - DNA, 25 bp, Homo sapien
ctccatggcggcgtagacactctgg

SEQ ID NO: 5056435 - DNA, 25 bp, Homo sapien
atggcggcgtagacactctgggcct

SEQ ID NO: 5056436 - DNA, 25 bp, Homo sapien
ctgccatggctctgggtacactggc

SEQ ID NO: 5056437 - DNA, 25 bp, Homo sapien
ggctcccagcgtggctgccatggct

SEQ ID NO: 5056438 - DNA, 25 bp, Homo sapien
catggctctgggtacactggcctgc

SEQ ID NO: 5056439 - DNA, 25 bp, Homo sapien
ggctctgggtacactggcctgctct

SEQ ID NO: 5056440 - DNA, 25 bp, Homo sapien
tggttatgcagagcctgctgaggtc

SEQ ID NO: 5056441 - DNA, 25 bp, Homo sapien
ctggttatgcagagcctgctgaggt

SEQ ID NO: 5056442 - DNA, 25 bp, Homo sapien
tggccactcatcacacacggctggt

SEQ ID NO: 5056443 - DNA, 25 bp, Homo sapien
catcacacacggctggttatgcaga

SEQ ID NO: 5056444 - DNA, 25 bp, Homo sapien
agagcctcagacacggagctgggac

SEQ ID NO: 5056445 - DNA, 25 bp, Homo sapien
gcagatactggtcccgggcctcctc

SEQ ID NO: 5056446 - DNA, 25 bp, Homo sapien
tctgcagatactggtcccgggcctc

SEQ ID NO: 5056447 - DNA, 25 bp, Homo sapien
tgctgctgacaggctgctcagagcc

SEQ ID NO: 5056448 - DNA, 25 bp, Homo sapien
agctcagctgtcccgagggaccgtg

SEQ ID NO: 5056449 - DNA, 25 bp, Homo sapien
ctcagctgtcccgagggaccgtgct

SEQ ID NO: 5056450 - DNA, 25 bp, Homo sapien
gctcagctgtcccgagggaccgtgc

SEQ ID NO: 5056451 - DNA, 25 bp, Homo sapien
cagctcagctgtcccgagggaccgt

SEQ ID NO: 5056452 - DNA, 25 bp, Homo sapien
ccctgcccccatgacgttgtaagag

SEQ ID NO: 5056453 - DNA, 25 bp, Homo sapien
gcttcacgtcgtgtgtctgctgggt

SEQ ID NO: 5056454 - DNA, 25 bp, Homo sapien
cgttgtaagagctgggatgtcctgc

SEQ ID NO: 5056455 - DNA, 25 bp, Homo sapien
gggacgctgcttcacgtcgtgtgtc

SEQ ID NO: 5056456 - DNA, 25 bp, Homo sapien
tgagtccttgacgttcagaggctgc

SEQ ID NO: 5056457 - DNA, 25 bp, Homo sapien
ggttcttgagtccttgacgttcaga

SEQ ID NO: 5056458 - DNA, 25 bp, Homo sapien
ccatccttggggcacaaagcagctc

SEQ ID NO: 5056459 - DNA, 25 bp, Homo sapien
ctgctcctggttcttgagtccttga

SEQ ID NO: 5056460 - DNA, 25 bp, Homo sapien
tgcaggcactgtacggcccctcctg

SEQ ID NO: 5056461 - DNA, 25 bp, Homo sapien
gtcctggccacttcgaagctgtggg

SEQ ID NO: 5056462 - DNA, 25 bp, Homo sapien
gagtgtcctggccacttcgaagctg

SEQ ID NO: 5056463 - DNA, 25 bp, Homo sapien
gtgtcctggccacttcgaagctgtg

SEQ ID NO: 5056464 - DNA, 25 bp, Homo sapien
tgcaccaggcaaccccgctgtgcac

SEQ ID NO: 5056465 - DNA, 25 bp, Homo sapien
aggcaaccccgctgtgcacacggct

SEQ ID NO: 5056466 - DNA, 25 bp, Homo sapien
tgctgcaccaggcaaccccgctgtg

SEQ ID NO: 5056467 - DNA, 25 bp, Homo sapien
cccgctgtgcacacggctccgaggg

SEQ ID NO: 5056468 - DNA, 25 bp, Homo sapien
accagaggccatgaaaggcctgagc

SEQ ID NO: 5056469 - DNA, 25 bp, Homo sapien
ggaccagaggccatgaaaggcctga

SEQ ID NO: 5056470 - DNA, 25 bp, Homo sapien
gcagctgccacagcatgagggacca

SEQ ID NO: 5056471 - DNA, 25 bp, Homo sapien
gccacagcatgagggaccagaggcc

SEQ ID NO: 5056472 - DNA, 25 bp, Homo sapien
ctgcgaagggcatccagggaccctg

SEQ ID NO: 5056473 - DNA, 25 bp, Homo sapien
gcgaagggcatccagggaccctggg

SEQ ID NO: 5056474 - DNA, 25 bp, Homo sapien
gggcatccagggaccctggggatgc

SEQ ID NO: 5056475 - DNA, 25 bp, Homo sapien
aagggcatccagggaccctggggat

SEQ ID NO: 5056476 - DNA, 25 bp, Homo sapien
gtctgtggccactgctgcagcaggc

SEQ ID NO: 5056477 - DNA, 25 bp, Homo sapien
tgtctgtggccactgctgcagcagg

SEQ ID NO: 5056478 - DNA, 25 bp, Homo sapien
gccccaggcccagcaggagccaccg

SEQ ID NO: 5056479 - DNA, 25 bp, Homo sapien
tgcccaccactgtgctgggccccag

SEQ ID NO: 5056480 - DNA, 25 bp, Homo sapien
ggccccaggcccagcaggagccacc

SEQ ID NO: 5056481 - DNA, 25 bp, Homo sapien
ctgtgcccaccactgtgctgggccc

SEQ ID NO: 5056482 - DNA, 25 bp, Homo sapien
agcagccgtggaccgcaggcacacg

SEQ ID NO: 5056483 - DNA, 25 bp, Homo sapien
agtggacacgctgtgcgtgtctgac

SEQ ID NO: 5056484 - DNA, 25 bp, Homo sapien
tgtctgacagcagccgtggaccgca

SEQ ID NO: 5056485 - DNA, 25 bp, Homo sapien
ctgtgcgtgtctgacagcagccgtg

SEQ ID NO: 5056486 - DNA, 25 bp, Homo sapien
ttctcctctcggggggctccaagcc

SEQ ID NO: 5056487 - DNA, 25 bp, Homo sapien
caggtgtctctgtgatagaaaagcc

SEQ ID NO: 5056488 - DNA, 25 bp, Homo sapien
gagaagtggtcacacggccggtcca

SEQ ID NO: 5056489 - DNA, 25 bp, Homo sapien
caccccatcccagtcgggcagagct

SEQ ID NO: 5056490 - DNA, 25 bp, Homo sapien
gaagtggtcacacggccggtccaag

SEQ ID NO: 5056491 - DNA, 25 bp, Homo sapien
cagagagtaagtatccaggcctgga

SEQ ID NO: 5056492 - DNA, 25 bp, Homo sapien
gctccaggggttaccgccagagagt

SEQ ID NO: 5056493 - DNA, 25 bp, Homo sapien
gtagctcgagcactcagtccagcag

SEQ ID NO: 5056494 - DNA, 25 bp, Homo sapien
cgtgatcccaggaggaatgagctga

SEQ ID NO: 5056495 - DNA, 25 bp, Homo sapien
cagccgtgaacgtgcagtgggggcg

SEQ ID NO: 5056496 - DNA, 25 bp, Homo sapien
tgtagcctgccagacagcggggcag

SEQ ID NO: 5056497 - DNA, 25 bp, Homo sapien
gcgtgggccgcatcaggcacagaca

SEQ ID NO: 5056498 - DNA, 25 bp, Homo sapien
ggggcagccgtgaacgtgcagtggg

SEQ ID NO: 5056499 - DNA, 25 bp, Homo sapien
aatgagacccggcaactggcgggct

SEQ ID NO: 5056500 - DNA, 25 bp, Homo sapien
agagcaaatgagacccggcaactgg

SEQ ID NO: 5056501 - DNA, 25 bp, Homo sapien
tgagaaagagcaaatgagacccggc

SEQ ID NO: 5056502 - DNA, 25 bp, Homo sapien
tcggaccccctgagaaagagcaaat

SEQ ID NO: 5056503 - DNA, 25 bp, Homo sapien
ccgccgccgtggaccttgtgctggt

SEQ ID NO: 5056504 - DNA, 25 bp, Homo sapien
gttgttgagatgacgctagcacccc

SEQ ID NO: 5056505 - DNA, 25 bp, Homo sapien
tttagtcagaaagcaggagtgagac

SEQ ID NO: 5056506 - DNA, 25 bp, Homo sapien
gctggtaggcgctttgctgccatct

SEQ ID NO: 5056507 - DNA, 25 bp, Homo sapien
gccactctgctcgtgctggcctggc

SEQ ID NO: 5056508 - DNA, 25 bp, Homo sapien
aagccactctgctcgtgctggcctg

SEQ ID NO: 5056509 - DNA, 25 bp, Homo sapien
ccactctgctcgtgctggcctggcc

SEQ ID NO: 5056510 - DNA, 25 bp, Homo sapien
tcctgttccgagacgggtagagcag

SEQ ID NO: 5056511 - DNA, 25 bp, Homo sapien
taaaaatgtaagcttgttgccggga

SEQ ID NO: 5056512 - DNA, 25 bp, Homo sapien
gttgccgggatctcctaaggacgat

SEQ ID NO: 5056513 - DNA, 25 bp, Homo sapien
tccgaacgcgtttctaggacggcaa

SEQ ID NO: 5056514 - DNA, 25 bp, Homo sapien
ccgcagcccagggttatggcgagac

SEQ ID NO: 5056515 - DNA, 25 bp, Homo sapien
gaggagcctgttgacagcgttgtcc

SEQ ID NO: 5056516 - DNA, 25 bp, Homo sapien
ggcgagactccagttcagggtggcg

SEQ ID NO: 5056517 - DNA, 25 bp, Homo sapien
tgggttggtcggctggaaccagctg

SEQ ID NO: 5056518 - DNA, 25 bp, Homo sapien
tcaaatgacaatagatgcatgggtc

SEQ ID NO: 5056519 - DNA, 25 bp, Homo sapien
gtgttaatatcaatacctcgctgtc

SEQ ID NO: 5056520 - DNA, 25 bp, Homo sapien
tctatttctggactcggttgatcta

SEQ ID NO: 5056521 - DNA, 25 bp, Homo sapien
gattacaatagacttgcaacagccc

SEQ ID NO: 5056522 - DNA, 25 bp, Homo sapien
ggagctgccaccgtgaaggcagctg

SEQ ID NO: 5056523 - DNA, 25 bp, Homo sapien
tcaagggtctctcggtccgtctgcg

SEQ ID NO: 5056524 - DNA, 25 bp, Homo sapien
tccgtctgcgctgctactgaggagc

SEQ ID NO: 5056525 - DNA, 25 bp, Homo sapien
gtctctcggtccgtctgcgctgcta

SEQ ID NO: 5056526 - DNA, 25 bp, Homo sapien
ttggctgacaagagctgctcattca

SEQ ID NO: 5056527 - DNA, 25 bp, Homo sapien
ggttcatggtagtcggaccactcca

SEQ ID NO: 5056528 - DNA, 25 bp, Homo sapien
cctgagaagggcaacgctggaagac

SEQ ID NO: 5056529 - DNA, 25 bp, Homo sapien
ctcatggtaaggacacacgtggaca

SEQ ID NO: 5056530 - DNA, 25 bp, Homo sapien
acaagccaatgacgcggccagtgac

SEQ ID NO: 5056531 - DNA, 25 bp, Homo sapien
ggcctctgactgcttccggcaaggg

SEQ ID NO: 5056532 - DNA, 25 bp, Homo sapien
gagacgggctcctgtgtaacggccc

SEQ ID NO: 5056533 - DNA, 25 bp, Homo sapien
aagagttggtgccaccgtcctgaca

SEQ ID NO: 5056534 - DNA, 25 bp, Homo sapien
agagcctagagcgtcggcgagcttc

SEQ ID NO: 5056535 - DNA, 25 bp, Homo sapien
gcaggccagtgctagaaacaccagg

SEQ ID NO: 5056536 - DNA, 25 bp, Homo sapien
gttagaggccgacatggaaggcact

SEQ ID NO: 5056537 - DNA, 25 bp, Homo sapien
tagtggaacatgcaaagctcagagg

SEQ ID NO: 5056538 - DNA, 25 bp, Homo sapien
gcaccacttgggaggaagacacctt

SEQ ID NO: 5056539 - DNA, 25 bp, Homo sapien
agccggagccggtggcgtcaaagct

SEQ ID NO: 5056540 - DNA, 25 bp, Homo sapien
agccggtgcgcgagccggtgcggga

SEQ ID NO: 5056541 - DNA, 25 bp, Homo sapien
gccgaggaccccgaggcgtagcggc

SEQ ID NO: 5056542 - DNA, 25 bp, Homo sapien
gccgtagcccgaggaggagtaggag

SEQ ID NO: 5056543 - DNA, 25 bp, Homo sapien
cagcgcgtccttataggagatcttg

SEQ ID NO: 5056544 - DNA, 25 bp, Homo sapien
gctgtagtagcccttggtggactgc

SEQ ID NO: 5056545 - DNA, 25 bp, Homo sapien
ccttggtggactgcgcggcagcctc

SEQ ID NO: 5056546 - DNA, 25 bp, Homo sapien
gcggtccagcgcgtccttataggag

SEQ ID NO: 5056547 - DNA, 25 bp, Homo sapien
ggcaggtgaggtacttggagtaggc

SEQ ID NO: 5056548 - DNA, 25 bp, Homo sapien
cttagggcaggtgaggtacttggag

SEQ ID NO: 5056549 - DNA, 25 bp, Homo sapien
tagggcaggtgaggtacttggagta

SEQ ID NO: 5056550 - DNA, 25 bp, Homo sapien
aggtgaggtacttggagtaggcgcc

SEQ ID NO: 5056551 - DNA, 25 bp, Homo sapien
tacgtctggtggtcaatcaggccct

SEQ ID NO: 5056552 - DNA, 25 bp, Homo sapien
gatgatcatggacttgaccacgccg

SEQ ID NO: 5056553 - DNA, 25 bp, Homo sapien
tcttcatggcctggtacaccgagag

SEQ ID NO: 5056554 - DNA, 25 bp, Homo sapien
catcttggtcttggtgcgtgggtcc

SEQ ID NO: 5056555 - DNA, 25 bp, Homo sapien
gtcggtggacgggtccacgtagctg

SEQ ID NO: 5056556 - DNA, 25 bp, Homo sapien
ctcgtcggtggacgggtccacgtag

SEQ ID NO: 5056557 - DNA, 25 bp, Homo sapien
ggtggacgggtccacgtagctgcgc

SEQ ID NO: 5056558 - DNA, 25 bp, Homo sapien
tggacgggtccacgtagctgcgcac

SEQ ID NO: 5056559 - DNA, 25 bp, Homo sapien
cagccttttctgagagcggcagcag

SEQ ID NO: 5056560 - DNA, 25 bp, Homo sapien
gatgaccttctccacggtgaccttg

SEQ ID NO: 5056561 - DNA, 25 bp, Homo sapien
catgtcggatggcagcaggtctttc

SEQ ID NO: 5056562 - DNA, 25 bp, Homo sapien
tcattggtggccttcagcaacagcc

SEQ ID NO: 5056563 - DNA, 25 bp, Homo sapien
ctgcgaggcagtgacctcctctgag

SEQ ID NO: 5056564 - DNA, 25 bp, Homo sapien
gtgacctcctctgagtgcgccagcg

SEQ ID NO: 5056565 - DNA, 25 bp, Homo sapien
gaggcagtgacctcctctgagtgcg

SEQ ID NO: 5056566 - DNA, 25 bp, Homo sapien
gcagtgacctcctctgagtgcgcca

SEQ ID NO: 5056567 - DNA, 25 bp, Homo sapien
ctctggttctcctcagccagcagct

SEQ ID NO: 5056568 - DNA, 25 bp, Homo sapien
cctctggttctcctcagccagcagc

SEQ ID NO: 5056569 - DNA, 25 bp, Homo sapien
ctcacgcagcctctggttctcctca

SEQ ID NO: 5056570 - DNA, 25 bp, Homo sapien
ctgctcacgcagcctctggttctcc

SEQ ID NO: 5056571 - DNA, 25 bp, Homo sapien
cctcctgcttgcgccgcacgccctc

SEQ ID NO: 5056572 - DNA, 25 bp, Homo sapien
gccttctcctgctcgatgaagcgct

SEQ ID NO: 5056573 - DNA, 25 bp, Homo sapien
agcgctcccgctgtagcaggctgtc

SEQ ID NO: 5056574 - DNA, 25 bp, Homo sapien
ggccttctcctgctcgatgaagcgc

SEQ ID NO: 5056575 - DNA, 25 bp, Homo sapien
aagcgctcccgctgtagcaggctgt

SEQ ID NO: 5056576 - DNA, 25 bp, Homo sapien
cgcccgtcgcacgtagagggggcgg

SEQ ID NO: 5056577 - DNA, 25 bp, Homo sapien
ccacccgcccgtcgcacgtagaggg

SEQ ID NO: 5056578 - DNA, 25 bp, Homo sapien
caaagcagatccccgggcccacccg

SEQ ID NO: 5056579 - DNA, 25 bp, Homo sapien
ggcccacccgcccgtcgcacgtaga

SEQ ID NO: 5056580 - DNA, 25 bp, Homo sapien
agctcagcgatggcctcccgcaggc

SEQ ID NO: 5056581 - DNA, 25 bp, Homo sapien
gcaggcgctcggcatcatggtcact

SEQ ID NO: 5056582 - DNA, 25 bp, Homo sapien
cgcaggcgctcggcatcatggtcac

SEQ ID NO: 5056583 - DNA, 25 bp, Homo sapien
gcatcatggtcactctgctgtcgct

SEQ ID NO: 5056584 - DNA, 25 bp, Homo sapien
acacgcagcttgaggcgctcagcct

SEQ ID NO: 5056585 - DNA, 25 bp, Homo sapien
tccgtgcggtgcagcttctcaccga

SEQ ID NO: 5056586 - DNA, 25 bp, Homo sapien
cttctcctgggtggcgagctccgtg

SEQ ID NO: 5056587 - DNA, 25 bp, Homo sapien
cggaagcgctgggcgtcctcctcag

SEQ ID NO: 5056588 - DNA, 25 bp, Homo sapien
gaagcgctgcgtattgtccttgtca

SEQ ID NO: 5056589 - DNA, 25 bp, Homo sapien
ttgggccgccacactcagccgcgcg

SEQ ID NO: 5056590 - DNA, 25 bp, Homo sapien
tcagccttgagtcgcgtggcctcct

SEQ ID NO: 5056591 - DNA, 25 bp, Homo sapien
agctgccgcagtcgcgcagcctctt

SEQ ID NO: 5056592 - DNA, 25 bp, Homo sapien
gatgagtgcgcggttctcagcctcg

SEQ ID NO: 5056593 - DNA, 25 bp, Homo sapien
cggttctcagcctcgatgcgtgcct

SEQ ID NO: 5056594 - DNA, 25 bp, Homo sapien
atctgcacgcgcaccgagaagagct

SEQ ID NO: 5056595 - DNA, 25 bp, Homo sapien
cgtctgctcggcgaatttcttatgc

SEQ ID NO: 5056596 - DNA, 25 bp, Homo sapien
ccgcctcttgctcggcctccttgcg

SEQ ID NO: 5056597 - DNA, 25 bp, Homo sapien
cgggactgcgccgcctcacgctccg

SEQ ID NO: 5056598 - DNA, 25 bp, Homo sapien
ggactgcgccgcctcacgctccgcc

SEQ ID NO: 5056599 - DNA, 25 bp, Homo sapien
gggactgcgccgcctcacgctccgc

SEQ ID NO: 5056600 - DNA, 25 bp, Homo sapien
ccgggactgcgccgcctcacgctcc

SEQ ID NO: 5056601 - DNA, 25 bp, Homo sapien
ctggtccagcacgctctgctcctgc

SEQ ID NO: 5056602 - DNA, 25 bp, Homo sapien
tcctgctgcagcgtctgctgtagct

SEQ ID NO: 5056603 - DNA, 25 bp, Homo sapien
ggtccagcacgctctgctcctgctg

SEQ ID NO: 5056604 - DNA, 25 bp, Homo sapien
gctgcagcgtctgctgtagctcctg

SEQ ID NO: 5056605 - DNA, 25 bp, Homo sapien
cgcctgcagccgcttctgggcggcc

SEQ ID NO: 5056606 - DNA, 25 bp, Homo sapien
gaaggcgtgtgccttctcttccgcc

SEQ ID NO: 5056607 - DNA, 25 bp, Homo sapien
tcttccgcctgcagccgcttctggg

SEQ ID NO: 5056608 - DNA, 25 bp, Homo sapien
cgcgccgactcctgctccgctcgct

SEQ ID NO: 5056609 - DNA, 25 bp, Homo sapien
gacttctcgctggtggagcgcgact

SEQ ID NO: 5056610 - DNA, 25 bp, Homo sapien
aagctcgccttcagcgccaggatct

SEQ ID NO: 5056611 - DNA, 25 bp, Homo sapien
gatgtcagccttgtgttgcgcggcc

SEQ ID NO: 5056612 - DNA, 25 bp, Homo sapien
tgtccgatgccttgcgcagctgggc

SEQ ID NO: 5056613 - DNA, 25 bp, Homo sapien
tcctgccgtttctgcgtggctgcag

SEQ ID NO: 5056614 - DNA, 25 bp, Homo sapien
gatcaactcctgctccgcggccagg

SEQ ID NO: 5056615 - DNA, 25 bp, Homo sapien
gctgcgcggtgccttccgccagctg

SEQ ID NO: 5056616 - DNA, 25 bp, Homo sapien
gtctcggcccgcagccggatcaact

SEQ ID NO: 5056617 - DNA, 25 bp, Homo sapien
tgcgccaggctcttctgctgcgcca

SEQ ID NO: 5056618 - DNA, 25 bp, Homo sapien
gcctgcgccaggctcttctgctgcg

SEQ ID NO: 5056619 - DNA, 25 bp, Homo sapien
tcggcctgcgccaggctcttctgct

SEQ ID NO: 5056620 - DNA, 25 bp, Homo sapien
gcgccaggctcttctgctgcgccac

SEQ ID NO: 5056621 - DNA, 25 bp, Homo sapien
ctgcgcctgtcgcttttgtgcctca

SEQ ID NO: 5056622 - DNA, 25 bp, Homo sapien
tcgttggccttgagctgccagcgct

SEQ ID NO: 5056623 - DNA, 25 bp, Homo sapien
aaggaggcgcgtttgctctgcagct

SEQ ID NO: 5056624 - DNA, 25 bp, Homo sapien
agccgcagccgtagcgcctcgttgg

SEQ ID NO: 5056625 - DNA, 25 bp, Homo sapien
ctcctctgcccgctgctgctcagcc

SEQ ID NO: 5056626 - DNA, 25 bp, Homo sapien
tctgcccgctgctgctcagccagcc

SEQ ID NO: 5056627 - DNA, 25 bp, Homo sapien
gcgctcctctgcccgctgctgctca

SEQ ID NO: 5056628 - DNA, 25 bp, Homo sapien
tcctctgcccgctgctgctcagcca

SEQ ID NO: 5056629 - DNA, 25 bp, Homo sapien
actggctcgtcagtgtggtcagctc

SEQ ID NO: 5056630 - DNA, 25 bp, Homo sapien
gctgtagtgcgtacgcaggtccacg

SEQ ID NO: 5056631 - DNA, 25 bp, Homo sapien
tccatgcgccgcagagtctcgctga

SEQ ID NO: 5056632 - DNA, 25 bp, Homo sapien
cagagtctcgctgatgaacttgatg

SEQ ID NO: 5056633 - DNA, 25 bp, Homo sapien
gccttgtacgtcaccagctggagtt

SEQ ID NO: 5056634 - DNA, 25 bp, Homo sapien
accggctcaagctgcgccttgtacg

SEQ ID NO: 5056635 - DNA, 25 bp, Homo sapien
cccgactggaccttgggcttcttgg

SEQ ID NO: 5056636 - DNA, 25 bp, Homo sapien
ctctctgatcccgactggaccttgg

SEQ ID NO: 5056637 - DNA, 25 bp, Homo sapien
cttgatggcgttgatgtactgtttc

SEQ ID NO: 5056638 - DNA, 25 bp, Homo sapien
tggcactcctcgaccttctcgccgt

SEQ ID NO: 5056639 - DNA, 25 bp, Homo sapien
gaccttctcgccgtggcgctcgatc

SEQ ID NO: 5056640 - DNA, 25 bp, Homo sapien
gtactgtttcgcaaacctctggcac

SEQ ID NO: 5056641 - DNA, 25 bp, Homo sapien
gggtctgcactctcgcggtagtaac

SEQ ID NO: 5056642 - DNA, 25 bp, Homo sapien
ctggcggcccagttgctcgagctcg

SEQ ID NO: 5056643 - DNA, 25 bp, Homo sapien
tgccgcacgtcggtctgggccagca

SEQ ID NO: 5056644 - DNA, 25 bp, Homo sapien
cagggcgtcgaacgtgggctgctgt

SEQ ID NO: 5056645 - DNA, 25 bp, Homo sapien
tggcctcgagctccgggagggtggc

SEQ ID NO: 5056646 - DNA, 25 bp, Homo sapien
tgcgtgccgcggatcaccaggctga

SEQ ID NO: 5056647 - DNA, 25 bp, Homo sapien
gccttggtggcctcgagctccggga

SEQ ID NO: 5056648 - DNA, 25 bp, Homo sapien
gcgtgccgcggatcaccaggctgat

SEQ ID NO: 5056649 - DNA, 25 bp, Homo sapien
agctccagctccgagcgcagcgtgg

SEQ ID NO: 5056650 - DNA, 25 bp, Homo sapien
cgatggctctggtagggccaagacc

SEQ ID NO: 5056651 - DNA, 25 bp, Homo sapien
tctccaggtagatggcagacaggct

SEQ ID NO: 5056652 - DNA, 25 bp, Homo sapien
ctcggcctcggcagagagccgggcg

SEQ ID NO: 5056653 - DNA, 25 bp, Homo sapien
tgcaaagacagggagtgggaacgca

SEQ ID NO: 5056654 - DNA, 25 bp, Homo sapien
ctgcaaagacagggagtgggaacgc

SEQ ID NO: 5056655 - DNA, 25 bp, Homo sapien
tcccgtgccggctctttgtccagcg

SEQ ID NO: 5056656 - DNA, 25 bp, Homo sapien
gctctttgtccagcggcagccgcag

SEQ ID NO: 5056657 - DNA, 25 bp, Homo sapien
tgccggctctttgtccagcggcagc

SEQ ID NO: 5056658 - DNA, 25 bp, Homo sapien
ggctctttgtccagcggcagccgca

SEQ ID NO: 5056659 - DNA, 25 bp, Homo sapien
agatgcagcgctggcagcgagactc

SEQ ID NO: 5056660 - DNA, 25 bp, Homo sapien
tctttgagctcggagatgcagcgct

SEQ ID NO: 5056661 - DNA, 25 bp, Homo sapien
tggcagcgagactcttcctgtgcac

SEQ ID NO: 5056662 - DNA, 25 bp, Homo sapien
tgtctttgagctcggagatgcagcg

SEQ ID NO: 5056663 - DNA, 25 bp, Homo sapien
ctgtcccgcaggaaggcctggtagt

SEQ ID NO: 5056664 - DNA, 25 bp, Homo sapien
atcagccggtcctcgggtccgaagc

SEQ ID NO: 5056665 - DNA, 25 bp, Homo sapien
cgcccgcgtcctggctgtcccgcag

SEQ ID NO: 5056666 - DNA, 25 bp, Homo sapien
gctgcaggagccgtactcgcgctca

SEQ ID NO: 5056667 - DNA, 25 bp, Homo sapien
ccagggaccaggagcggatgagctg

SEQ ID NO: 5056668 - DNA, 25 bp, Homo sapien
gcacgtcgcggcgaaggctctgcca

SEQ ID NO: 5056669 - DNA, 25 bp, Homo sapien
tgtccacgtgcaactggtgccacag

SEQ ID NO: 5056670 - DNA, 25 bp, Homo sapien
tgccacagcgtgaccagggcctggt

SEQ ID NO: 5056671 - DNA, 25 bp, Homo sapien
ggaagcacacggagggcacggcggc

SEQ ID NO: 5056672 - DNA, 25 bp, Homo sapien
acacggagggcacggcggcctcgct

SEQ ID NO: 5056673 - DNA, 25 bp, Homo sapien
accttccagtgggacggctgtgcag

SEQ ID NO: 5056674 - DNA, 25 bp, Homo sapien
ggcactcgtcacccttgtgcacagt

SEQ ID NO: 5056675 - DNA, 25 bp, Homo sapien
tgcttatagtcgcacacggccagca

SEQ ID NO: 5056676 - DNA, 25 bp, Homo sapien
gaggtggcccttgtactcgttcagc

SEQ ID NO: 5056677 - DNA, 25 bp, Homo sapien
cttcagctgcacgacggccttggcc

SEQ ID NO: 5056678 - DNA, 25 bp, Homo sapien
tccacctgcttatagtcgcacacgg

SEQ ID NO: 5056679 - DNA, 25 bp, Homo sapien
gatcacaactgtatttcctacgcag

SEQ ID NO: 5056680 - DNA, 25 bp, Homo sapien
tcctccagccgggtgacggtggcgg

SEQ ID NO: 5056681 - DNA, 25 bp, Homo sapien
tgacggtggcggagcgatcacaact

SEQ ID NO: 5056682 - DNA, 25 bp, Homo sapien
gtatttcctacgcagtgcctcctgc

SEQ ID NO: 5056683 - DNA, 25 bp, Homo sapien
gcaggcccaagacgggggcactgag

SEQ ID NO: 5056684 - DNA, 25 bp, Homo sapien
gtccaaggccccggtcaggctgcag

SEQ ID NO: 5056685 - DNA, 25 bp, Homo sapien
ctgtccaaggccccggtcaggctgc

SEQ ID NO: 5056686 - DNA, 25 bp, Homo sapien
agggcaggcccaagacgggggcact

SEQ ID NO: 5056687 - DNA, 25 bp, Homo sapien
acagctgtagcatccagctccactg

SEQ ID NO: 5056688 - DNA, 25 bp, Homo sapien
tccttcaggtgtgcctcgatacagc

SEQ ID NO: 5056689 - DNA, 25 bp, Homo sapien
tacagcagcacagctgtagcatcca

SEQ ID NO: 5056690 - DNA, 25 bp, Homo sapien
tcaggtgtgcctcgatacagcagca

SEQ ID NO: 5056691 - DNA, 25 bp, Homo sapien
cagcattttggagctccttgatctt

SEQ ID NO: 5056692 - DNA, 25 bp, Homo sapien
cccagcattttggagctccttgatc

SEQ ID NO: 5056693 - DNA, 25 bp, Homo sapien
ccagcattttggagctccttgatct

SEQ ID NO: 5056694 - DNA, 25 bp, Homo sapien
agcattttggagctccttgatcttc

SEQ ID NO: 5056695 - DNA, 25 bp, Homo sapien
ttgcggtcgctccagtcgaagccca

SEQ ID NO: 5056696 - DNA, 25 bp, Homo sapien
gtggcggctgccacaaagctgtgca

SEQ ID NO: 5056697 - DNA, 25 bp, Homo sapien
cagccacattagctccttagtggcg

SEQ ID NO: 5056698 - DNA, 25 bp, Homo sapien
gtcatgttggtgttgcggtcgctcc

SEQ ID NO: 5056699 - DNA, 25 bp, Homo sapien
agccgacccaggcagtcacggtagg

SEQ ID NO: 5056700 - DNA, 25 bp, Homo sapien
cagcagcttggcgtactgcaggtcc

SEQ ID NO: 5056701 - DNA, 25 bp, Homo sapien
gcagtcacggtaggcaccccgggtg

SEQ ID NO: 5056702 - DNA, 25 bp, Homo sapien
tgcaggtccagccgacccaggcagt

SEQ ID NO: 5056703 - DNA, 25 bp, Homo sapien
tgccttcagccgtaggttgtactcg

SEQ ID NO: 5056704 - DNA, 25 bp, Homo sapien
caggtagcgcagagtggagtcctcc

SEQ ID NO: 5056705 - DNA, 25 bp, Homo sapien
aattcttcgatggactggtgcaggc

SEQ ID NO: 5056706 - DNA, 25 bp, Homo sapien
tgcacactctgcagagtcacctggg

SEQ ID NO: 5056707 - DNA, 25 bp, Homo sapien
aagagcagccggatcatgctatccg

SEQ ID NO: 5056708 - DNA, 25 bp, Homo sapien
ctgcggtacatctgctcgccctgcg

SEQ ID NO: 5056709 - DNA, 25 bp, Homo sapien
agggtctgcacgtcgttgaagagca

SEQ ID NO: 5056710 - DNA, 25 bp, Homo sapien
ggatcatgctatccgccttgtccaa

SEQ ID NO: 5056711 - DNA, 25 bp, Homo sapien
gcttggtcacgatgcgctgaagaca

SEQ ID NO: 5056712 - DNA, 25 bp, Homo sapien
agcttggtcacgatgcgctgaagac

SEQ ID NO: 5056713 - DNA, 25 bp, Homo sapien
cttggtcacgatgcgctgaagacac

SEQ ID NO: 5056714 - DNA, 25 bp, Homo sapien
aaactcgctgcggagctgcttctcc

SEQ ID NO: 5056715 - DNA, 25 bp, Homo sapien
cttgagctggcctgcttgcaccgct

SEQ ID NO: 5056716 - DNA, 25 bp, Homo sapien
ttgagctggcctgcttgcaccgctc

SEQ ID NO: 5056717 - DNA, 25 bp, Homo sapien
ctctcaaactcgctgcggagctgct

SEQ ID NO: 5056718 - DNA, 25 bp, Homo sapien
tggtagctccatctccttaaacttc

SEQ ID NO: 5056719 - DNA, 25 bp, Homo sapien
tagctccatctccttaaacttcagg

SEQ ID NO: 5056720 - DNA, 25 bp, Homo sapien
ctccagggattggtagatgcccttg

SEQ ID NO: 5056721 - DNA, 25 bp, Homo sapien
acctgttcttgtcggcctccttggc

SEQ ID NO: 5056722 - DNA, 25 bp, Homo sapien
tggaggggaacctgcgttcctcaaa

SEQ ID NO: 5056723 - DNA, 25 bp, Homo sapien
cgttcctcaaaggcggccgtgtggt

SEQ ID NO: 5056724 - DNA, 25 bp, Homo sapien
caaaggcggccgtgtggtgtcgcat

SEQ ID NO: 5056725 - DNA, 25 bp, Homo sapien
gtgtggtgtcgcatccactgaagca

SEQ ID NO: 5056726 - DNA, 25 bp, Homo sapien
ggcatggcgtcatacagcgacgaga

SEQ ID NO: 5056727 - DNA, 25 bp, Homo sapien
tcgtcgggctgagggacatccacgt

SEQ ID NO: 5056728 - DNA, 25 bp, Homo sapien
tacagcgacgagacgtaggtgatga

SEQ ID NO: 5056729 - DNA, 25 bp, Homo sapien
ttctcgtcgggctgagggacatcca

SEQ ID NO: 5056730 - DNA, 25 bp, Homo sapien
tggtctgccggtacaccttgttcat

SEQ ID NO: 5056731 - DNA, 25 bp, Homo sapien
tcagggtccaggagccgcgtcactc

SEQ ID NO: 5056732 - DNA, 25 bp, Homo sapien
tccaggttggtctgccggtacacct

SEQ ID NO: 5056733 - DNA, 25 bp, Homo sapien
ctcagggtccaggagccgcgtcact

SEQ ID NO: 5056734 - DNA, 25 bp, Homo sapien
atggcattgaagaggcggccgtctc

SEQ ID NO: 5056735 - DNA, 25 bp, Homo sapien
tggtacccctccaccattcgctgcg

SEQ ID NO: 5056736 - DNA, 25 bp, Homo sapien
ttgtcgcatcgcaggccctggtacc

SEQ ID NO: 5056737 - DNA, 25 bp, Homo sapien
ctggaggtgaagttgtcgcatcgca

SEQ ID NO: 5056738 - DNA, 25 bp, Homo sapien
ctcctgcagggggtgggggtcctgg

SEQ ID NO: 5056739 - DNA, 25 bp, Homo sapien
actcctgcagggggtgggggtcctg

SEQ ID NO: 5056740 - DNA, 25 bp, Homo sapien
cctggaaactcctgcagggggtggg

SEQ ID NO: 5056741 - DNA, 25 bp, Homo sapien
ctggaaactcctgcagggggtgggg

SEQ ID NO: 5056742 - DNA, 25 bp, Homo sapien
cttggggttgccgtcagcgatgtca

SEQ ID NO: 5056743 - DNA, 25 bp, Homo sapien
ggtcagcttggggttgccgtcagcg

SEQ ID NO: 5056744 - DNA, 25 bp, Homo sapien
tgcagaatgattgtccagatgaggc

SEQ ID NO: 5056745 - DNA, 25 bp, Homo sapien
tggggttgccgtcagcgatgtcatc

SEQ ID NO: 5056746 - DNA, 25 bp, Homo sapien
tgcagcttgtggaaacgcatcctcc

SEQ ID NO: 5056747 - DNA, 25 bp, Homo sapien
ttgtggaaacgcatcctccccttct

SEQ ID NO: 5056748 - DNA, 25 bp, Homo sapien
cggtgccggaggtagtccagggcaa

SEQ ID NO: 5056749 - DNA, 25 bp, Homo sapien
tggcggtgccggaggtagtccaggg

SEQ ID NO: 5056750 - DNA, 25 bp, Homo sapien
tcctgcttacgtcccgctccctcgg

SEQ ID NO: 5056751 - DNA, 25 bp, Homo sapien
aggcgtgagctcctgcttacgtccc

SEQ ID NO: 5056752 - DNA, 25 bp, Homo sapien
acagccactcaccaggcgtgagctc

SEQ ID NO: 5056753 - DNA, 25 bp, Homo sapien
agccactcaccaggcgtgagctcct

SEQ ID NO: 5056754 - DNA, 25 bp, Homo sapien
catcgcggaggtcttcatacaggtc

SEQ ID NO: 5056755 - DNA, 25 bp, Homo sapien
aggctgtcccccgagaggacctcca

SEQ ID NO: 5056756 - DNA, 25 bp, Homo sapien
cgcggaggtcttcatacaggtcact

SEQ ID NO: 5056757 - DNA, 25 bp, Homo sapien
ggccatcgcggaggtcttcatacag

SEQ ID NO: 5056758 - DNA, 25 bp, Homo sapien
ttcttctgcacacgatcccgctcat

SEQ ID NO: 5056759 - DNA, 25 bp, Homo sapien
gatgaggtgcttgttgacccacttg

SEQ ID NO: 5056760 - DNA, 25 bp, Homo sapien
gaggtgcttgttgacccacttggtg

SEQ ID NO: 5056761 - DNA, 25 bp, Homo sapien
ggttttcttctgcacacgatcccgc

SEQ ID NO: 5056762 - DNA, 25 bp, Homo sapien
tgtcctccgagctggttctctttcg

SEQ ID NO: 5056763 - DNA, 25 bp, Homo sapien
tacaggttgtcctccgagctggttc

SEQ ID NO: 5056764 - DNA, 25 bp, Homo sapien
gagctggttctctttcggcccaggc

SEQ ID NO: 5056765 - DNA, 25 bp, Homo sapien
caggtacaggttgtcctccgagctg

SEQ ID NO: 5056766 - DNA, 25 bp, Homo sapien
gcacgcggagctggtgctgagacat

SEQ ID NO: 5056767 - DNA, 25 bp, Homo sapien
ggcacgcggagctggtgctgagaca

SEQ ID NO: 5056768 - DNA, 25 bp, Homo sapien
ctgcggcacgcggagctggtgctga

SEQ ID NO: 5056769 - DNA, 25 bp, Homo sapien
gcggcacgcggagctggtgctgaga

SEQ ID NO: 5056770 - DNA, 25 bp, Homo sapien
cggaccctcggcctcaggcacggtg

SEQ ID NO: 5056771 - DNA, 25 bp, Homo sapien
gcagctgaaggctggcggccccacg

SEQ ID NO: 5056772 - DNA, 25 bp, Homo sapien
acgagacgctcactcggcacaggct

SEQ ID NO: 5056773 - DNA, 25 bp, Homo sapien
tgctctgggcagccccgtgtggcac

SEQ ID NO: 5056774 - DNA, 25 bp, Homo sapien
agccagcacggccgctccagcaaga

SEQ ID NO: 5056775 - DNA, 25 bp, Homo sapien
gtccagccagcacggccgctccagc

SEQ ID NO: 5056776 - DNA, 25 bp, Homo sapien
cagcacggccgctccagcaagacct

SEQ ID NO: 5056777 - DNA, 25 bp, Homo sapien
ccgtccagccagcacggccgctcca

SEQ ID NO: 5056778 - DNA, 25 bp, Homo sapien
ctcggcgaggcaaaggcgccccccg

SEQ ID NO: 5056779 - DNA, 25 bp, Homo sapien
tcggcgaggcaaaggcgccccccgc

SEQ ID NO: 5056780 - DNA, 25 bp, Homo sapien
acacagcggccagggtgacaacgtg

SEQ ID NO: 5056781 - DNA, 25 bp, Homo sapien
cgtgacccacaaccaccagggaggg

SEQ ID NO: 5056782 - DNA, 25 bp, Homo sapien
gggtgacaacgtgacccacaaccac

SEQ ID NO: 5056783 - DNA, 25 bp, Homo sapien
tgcgccagtgccacacagcggccag

SEQ ID NO: 5056784 - DNA, 25 bp, Homo sapien
ctgcgctgggaaccggctgctccag

SEQ ID NO: 5056785 - DNA, 25 bp, Homo sapien
gaaccggctgctccaggctagacag

SEQ ID NO: 5056786 - DNA, 25 bp, Homo sapien
gctgggaaccggctgctccaggcta

SEQ ID NO: 5056787 - DNA, 25 bp, Homo sapien
ttcctgcgctgggaaccggctgctc

SEQ ID NO: 5056788 - DNA, 25 bp, Homo sapien
tggcaggagcccacggggcagacgg

SEQ ID NO: 5056789 - DNA, 25 bp, Homo sapien
cggggcagacggagcgggccagggg

SEQ ID NO: 5056790 - DNA, 25 bp, Homo sapien
ggcaggagcccacggggcagacgga

SEQ ID NO: 5056791 - DNA, 25 bp, Homo sapien
ccacggggcagacggagcgggccag

SEQ ID NO: 5056792 - DNA, 25 bp, Homo sapien
aagccactggcggcagcgtcgggtg

SEQ ID NO: 5056793 - DNA, 25 bp, Homo sapien
agccactggcggcagcgtcgggtgg

SEQ ID NO: 5056794 - DNA, 25 bp, Homo sapien
caagccactggcggcagcgtcgggt

SEQ ID NO: 5056795 - DNA, 25 bp, Homo sapien
gctcctccatgctgtacctgtccat

SEQ ID NO: 5056796 - DNA, 25 bp, Homo sapien
catggacagcgctcagctggcgtct

SEQ ID NO: 5056797 - DNA, 25 bp, Homo sapien
tggtgcatggacagcgctcagctgg

SEQ ID NO: 5056798 - DNA, 25 bp, Homo sapien
ctacctggcccctgcccgttgctgg

SEQ ID NO: 5056799 - DNA, 25 bp, Homo sapien
gtggtggcggctacctggcccctgc

SEQ ID NO: 5056800 - DNA, 25 bp, Homo sapien
accgggcactctgtgcggcaccaag

SEQ ID NO: 5056801 - DNA, 25 bp, Homo sapien
aagctggccaagcactcagttaccg

SEQ ID NO: 5056802 - DNA, 25 bp, Homo sapien
actcagttaccggtcacaccgggca

SEQ ID NO: 5056803 - DNA, 25 bp, Homo sapien
gccaagcactcagttaccggtcaca

SEQ ID NO: 5056804 - DNA, 25 bp, Homo sapien
catgacttggggtcagggtgcagct

SEQ ID NO: 5056805 - DNA, 25 bp, Homo sapien
gacttggggtcagggtgcagctgac

SEQ ID NO: 5056806 - DNA, 25 bp, Homo sapien
tgacttggggtcagggtgcagctga

SEQ ID NO: 5056807 - DNA, 25 bp, Homo sapien
tcatgacttggggtcagggtgcagc

SEQ ID NO: 5056808 - DNA, 25 bp, Homo sapien
ggtgaggtaccagtaaaagtggcac

SEQ ID NO: 5056809 - DNA, 25 bp, Homo sapien
tcctcaagctccttccgacggtaga

SEQ ID NO: 5056810 - DNA, 25 bp, Homo sapien
catggcacgcatgacctgcaggttg

SEQ ID NO: 5056811 - DNA, 25 bp, Homo sapien
accaggcaaaggtctcgcggaccag

SEQ ID NO: 5056812 - DNA, 25 bp, Homo sapien
gcccggggcgctgcgagaagctccc

SEQ ID NO: 5056813 - DNA, 25 bp, Homo sapien
taccacgagaaggcccggggcgctg

SEQ ID NO: 5056814 - DNA, 25 bp, Homo sapien
cagtcagtgcgggggcaaaggcagc

SEQ ID NO: 5056815 - DNA, 25 bp, Homo sapien
gccgggcagtcagtgcgggggcaaa

SEQ ID NO: 5056816 - DNA, 25 bp, Homo sapien
cagggtgtgacagcgggcagcggca

SEQ ID NO: 5056817 - DNA, 25 bp, Homo sapien
ggggtgctgagcgtgagggcgcggg

SEQ ID NO: 5056818 - DNA, 25 bp, Homo sapien
gctggggtgctgagcgtgagggcgc

SEQ ID NO: 5056819 - DNA, 25 bp, Homo sapien
ggtgctgagcgtgagggcgcgggct

SEQ ID NO: 5056820 - DNA, 25 bp, Homo sapien
ggagctgatctcgttctggatggct

SEQ ID NO: 5056821 - DNA, 25 bp, Homo sapien
agctgatctcgttctggatggctcg

SEQ ID NO: 5056822 - DNA, 25 bp, Homo sapien
ctgatctcgttctggatggctcgcg

SEQ ID NO: 5056823 - DNA, 25 bp, Homo sapien
gatctcgttctggatggctcgcgag

SEQ ID NO: 5056824 - DNA, 25 bp, Homo sapien
gggctgagggcggctgtgccaccac

SEQ ID NO: 5056825 - DNA, 25 bp, Homo sapien
ctgagggcggctgtgccaccaccag

SEQ ID NO: 5056826 - DNA, 25 bp, Homo sapien
cggggctgagggcggctgtgccacc

SEQ ID NO: 5056827 - DNA, 25 bp, Homo sapien
gaggtccggggcagggcttgccggc

SEQ ID NO: 5056828 - DNA, 25 bp, Homo sapien
taaaaaactatcctgacacggtggc

SEQ ID NO: 5056829 - DNA, 25 bp, Homo sapien
tcttgccgaagaagcacgcgggtct

SEQ ID NO: 5056830 - DNA, 25 bp, Homo sapien
cccacgagcaagagatttaggcagc

SEQ ID NO: 5056831 - DNA, 25 bp, Homo sapien
ttgccgtagaggaaacaagtccagg

SEQ ID NO: 5056832 - DNA, 25 bp, Homo sapien
tatctcaataccaggtgtctgctag

SEQ ID NO: 5056833 - DNA, 25 bp, Homo sapien
cctcaaagacagtggtagcctccct

SEQ ID NO: 5056834 - DNA, 25 bp, Homo sapien
gcagcccagtacaagagtatctcaa

SEQ ID NO: 5056835 - DNA, 25 bp, Homo sapien
tgtctgctagagaccaatttgcggg

SEQ ID NO: 5056836 - DNA, 25 bp, Homo sapien
gggacagcatttacccaagtcagca

SEQ ID NO: 5056837 - DNA, 25 bp, Homo sapien
caaacgcagttaaaagacccgagag

SEQ ID NO: 5056838 - DNA, 25 bp, Homo sapien
tcttggcacctgaaacaactcaact

SEQ ID NO: 5056839 - DNA, 25 bp, Homo sapien
gaataagataactgacgatcggtca

SEQ ID NO: 5056840 - DNA, 25 bp, Homo sapien
ggagtcggcccacttgggcactgct

SEQ ID NO: 5056841 - DNA, 25 bp, Homo sapien
tacctagccagcaacttagaaattg

SEQ ID NO: 5056842 - DNA, 25 bp, Homo sapien
catgtgacttgtctgaagctccaac

SEQ ID NO: 5056843 - DNA, 25 bp, Homo sapien
cactgctggagggacgacgactgca

SEQ ID NO: 5056844 - DNA, 25 bp, Homo sapien
gatcgggaccgccaccgtggacgac

SEQ ID NO: 5056845 - DNA, 25 bp, Homo sapien
gaccgccaccgtggacgacaaggtg

SEQ ID NO: 5056846 - DNA, 25 bp, Homo sapien
caccgtggacgacaaggtgctcggc

SEQ ID NO: 5056847 - DNA, 25 bp, Homo sapien
ggccggcggagtggccgcgctcggg

SEQ ID NO: 5056848 - DNA, 25 bp, Homo sapien
ttgtacttctcgcgcacctcctcgt

SEQ ID NO: 5056849 - DNA, 25 bp, Homo sapien
tgtacttctcgcgcacctcctcgta

SEQ ID NO: 5056850 - DNA, 25 bp, Homo sapien
tacttctcgcgcacctcctcgtagg

SEQ ID NO: 5056851 - DNA, 25 bp, Homo sapien
gtacttctcgcgcacctcctcgtag

SEQ ID NO: 5056852 - DNA, 25 bp, Homo sapien
ctgctcgtcgggcagcgggccggcc

SEQ ID NO: 5056853 - DNA, 25 bp, Homo sapien
tgctcgtcgggcagcgggccggcca

SEQ ID NO: 5056854 - DNA, 25 bp, Homo sapien
gctcgtcgggcagcgggccggccat

SEQ ID NO: 5056855 - DNA, 25 bp, Homo sapien
tgcccctggccgtgttttctccaag

SEQ ID NO: 5056856 - DNA, 25 bp, Homo sapien
tgtaactgcaagtcccgcttccagg

SEQ ID NO: 5056857 - DNA, 25 bp, Homo sapien
tgcttggtgataattaaaacaactc

SEQ ID NO: 5056858 - DNA, 25 bp, Homo sapien
gccttcaccaatgtcggccaccctg

SEQ ID NO: 5056859 - DNA, 25 bp, Homo sapien
cctcgcgtgccaaggaggtgcacag

SEQ ID NO: 5056860 - DNA, 25 bp, Homo sapien
tcagtcaacctcgcgtgccaaggag

SEQ ID NO: 5056861 - DNA, 25 bp, Homo sapien
tcaacctcgcgtgccaaggaggtgc

SEQ ID NO: 5056862 - DNA, 25 bp, Homo sapien
aacctcgcgtgccaaggaggtgcac

SEQ ID NO: 5056863 - DNA, 25 bp, Homo sapien
ctgggtccaggacactcccgttgct

SEQ ID NO: 5056864 - DNA, 25 bp, Homo sapien
tttcccaaggttccagggcagtgtg

SEQ ID NO: 5056865 - DNA, 25 bp, Homo sapien
ccactgcttccattggagacatctt

SEQ ID NO: 5056866 - DNA, 25 bp, Homo sapien
tgcgatgcgaatgaccgcccgctca

SEQ ID NO: 5056867 - DNA, 25 bp, Homo sapien
ctggtggctccgctcacttcagctc

SEQ ID NO: 5056868 - DNA, 25 bp, Homo sapien
ggtggctccgctcacttcagctctg

SEQ ID NO: 5056869 - DNA, 25 bp, Homo sapien
gctccgctcacttcagctctgccgc

SEQ ID NO: 5056870 - DNA, 25 bp, Homo sapien
tggctccgctcacttcagctctgcc

SEQ ID NO: 5056871 - DNA, 25 bp, Homo sapien
gttcacgttcacgtttattcaaaca

SEQ ID NO: 5056872 - DNA, 25 bp, Homo sapien
gacagctcaggcggccacagttggg

SEQ ID NO: 5056873 - DNA, 25 bp, Homo sapien
tattcaaacaacagagccgactcgg

SEQ ID NO: 5056874 - DNA, 25 bp, Homo sapien
gggcggtgtcgcctcctgggctctg

SEQ ID NO: 5056875 - DNA, 25 bp, Homo sapien
taagtgtctggggagcggcccggga

SEQ ID NO: 5056876 - DNA, 25 bp, Homo sapien
cagaggggtcgtcgggggaagcgcg

SEQ ID NO: 5056877 - DNA, 25 bp, Homo sapien
tctggggagcggcccgggagcccag

SEQ ID NO: 5056878 - DNA, 25 bp, Homo sapien
tggggagcggcccgggagcccagag

SEQ ID NO: 5056879 - DNA, 25 bp, Homo sapien
tcgcaggtgatgaggtgggtgggca

SEQ ID NO: 5056880 - DNA, 25 bp, Homo sapien
gaacaccgccttatggccatcggcg

SEQ ID NO: 5056881 - DNA, 25 bp, Homo sapien
tccacggcgctgtcgtagcgcagga

SEQ ID NO: 5056882 - DNA, 25 bp, Homo sapien
cgagtagcggtcctgcaccgacagg

SEQ ID NO: 5056883 - DNA, 25 bp, Homo sapien
tgctgggctggcagatgcagtccac

SEQ ID NO: 5056884 - DNA, 25 bp, Homo sapien
tgccgtcgtgccgtggtacagcacc

SEQ ID NO: 5056885 - DNA, 25 bp, Homo sapien
agcagcgggtgcgacacgcgctcca

SEQ ID NO: 5056886 - DNA, 25 bp, Homo sapien
tcccggtacagctcatactgctgct

SEQ ID NO: 5056887 - DNA, 25 bp, Homo sapien
atgtcaggcactgccggtgccgtcg

SEQ ID NO: 5056888 - DNA, 25 bp, Homo sapien
gccctatgctgcctacaggacttga

SEQ ID NO: 5056889 - DNA, 25 bp, Homo sapien
cagcagacagtaacacctccgtgaa

SEQ ID NO: 5056890 - DNA, 25 bp, Homo sapien
gaagcaagtgacttcagagggccgc

SEQ ID NO: 5056891 - DNA, 25 bp, Homo sapien
gaggagatgccacagacctctcagt

SEQ ID NO: 5056892 - DNA, 25 bp, Homo sapien
gctgctgcgggcagcgtccagggtg

SEQ ID NO: 5056893 - DNA, 25 bp, Homo sapien
agcgtccagggtgtcgtagaaggcc

SEQ ID NO: 5056894 - DNA, 25 bp, Homo sapien
acgaacgacgcggatgctgctgcgg

SEQ ID NO: 5056895 - DNA, 25 bp, Homo sapien
agggtgtcgtagaaggcccgcacca

SEQ ID NO: 5056896 - DNA, 25 bp, Homo sapien
ctgccagacgctccaggttgttcca

SEQ ID NO: 5056897 - DNA, 25 bp, Homo sapien
aaaagcggggggtcagagccatgcc

SEQ ID NO: 5056898 - DNA, 25 bp, Homo sapien
gaaaagcggggggtcagagccatgc

SEQ ID NO: 5056899 - DNA, 25 bp, Homo sapien
ggaaaagcggggggtcagagccatg

SEQ ID NO: 5056900 - DNA, 25 bp, Homo sapien
gtgggccccgaagccacggaggatg

SEQ ID NO: 5056901 - DNA, 25 bp, Homo sapien
gatggtgcagtcaccacgcagggca

SEQ ID NO: 5056902 - DNA, 25 bp, Homo sapien
aagtgccaccaagtggcgggcagca

SEQ ID NO: 5056903 - DNA, 25 bp, Homo sapien
ctgccaagggaaaggccaaactctg

SEQ ID NO: 5056904 - DNA, 25 bp, Homo sapien
accatggcaccgctccaggcgagca

SEQ ID NO: 5056905 - DNA, 25 bp, Homo sapien
cacgcagctctgcaggcagtgtgcg

SEQ ID NO: 5056906 - DNA, 25 bp, Homo sapien
ggcaccgctccaggcgagcacgcag

SEQ ID NO: 5056907 - DNA, 25 bp, Homo sapien
cgctccaggcgagcacgcagctctg

SEQ ID NO: 5056908 - DNA, 25 bp, Homo sapien
cttgccatcagtccccccatctggg

SEQ ID NO: 5056909 - DNA, 25 bp, Homo sapien
ctggacgtggacctccaaggcagcc

SEQ ID NO: 5056910 - DNA, 25 bp, Homo sapien
ggacgtggacctccaaggcagccct

SEQ ID NO: 5056911 - DNA, 25 bp, Homo sapien
caaaggccgagtgcaccaccagctg

SEQ ID NO: 5056912 - DNA, 25 bp, Homo sapien
cagggagagggttagggcttgccgc

SEQ ID NO: 5056913 - DNA, 25 bp, Homo sapien
gggttagggcttgccgcagggcagc

SEQ ID NO: 5056914 - DNA, 25 bp, Homo sapien
ttgaggctccagtgaccggtggagg

SEQ ID NO: 5056915 - DNA, 25 bp, Homo sapien
tccagtgaccggtggagggccagct

SEQ ID NO: 5056916 - DNA, 25 bp, Homo sapien
gggtggccagcagttctcggacctc

SEQ ID NO: 5056917 - DNA, 25 bp, Homo sapien
gtggccagcagttctcggacctcct

SEQ ID NO: 5056918 - DNA, 25 bp, Homo sapien
ccagtcctccccgtctaggtctagg

SEQ ID NO: 5056919 - DNA, 25 bp, Homo sapien
cgtctaggtctaggccctccagggt

SEQ ID NO: 5056920 - DNA, 25 bp, Homo sapien
gggtgaggtcaagtgagggccacag

SEQ ID NO: 5056921 - DNA, 25 bp, Homo sapien
tacagggtgggcctaagatgggtca

SEQ ID NO: 5056922 - DNA, 25 bp, Homo sapien
ccaggaggagttggaatggatgaaa

SEQ ID NO: 5056923 - DNA, 25 bp, Homo sapien
gcctaagatgggtcagtagacagat

SEQ ID NO: 5056924 - DNA, 25 bp, Homo sapien
ccaggctcacgtcctcctggtcacc

SEQ ID NO: 5056925 - DNA, 25 bp, Homo sapien
aggctcacgtcctcctggtcaccac

SEQ ID NO: 5056926 - DNA, 25 bp, Homo sapien
caggctcacgtcctcctggtcacca

SEQ ID NO: 5056927 - DNA, 25 bp, Homo sapien
tccacagggtgtgggcgttgccagg

SEQ ID NO: 5056928 - DNA, 25 bp, Homo sapien
ggagcactgggagggcctcggtagg

SEQ ID NO: 5056929 - DNA, 25 bp, Homo sapien
ggtgtgggcgttgccagggagcact

SEQ ID NO: 5056930 - DNA, 25 bp, Homo sapien
gggtccacagggtgtgggcgttgcc

SEQ ID NO: 5056931 - DNA, 25 bp, Homo sapien
aggatgtcaggaccactagcctctg

SEQ ID NO: 5056932 - DNA, 25 bp, Homo sapien
agaggatgtcaggaccactagcctc

SEQ ID NO: 5056933 - DNA, 25 bp, Homo sapien
gaggatgtcaggaccactagcctct

SEQ ID NO: 5056934 - DNA, 25 bp, Homo sapien
cacaacacatggcagctaatgctgc

SEQ ID NO: 5056935 - DNA, 25 bp, Homo sapien
cgcagaaactcctcagccgcctggc

SEQ ID NO: 5056936 - DNA, 25 bp, Homo sapien
caggctccgcagaaactcctcagcc

SEQ ID NO: 5056937 - DNA, 25 bp, Homo sapien
gacacactggaactgagcctccagc

SEQ ID NO: 5056938 - DNA, 25 bp, Homo sapien
ggagtttgcaggtttagagcacagg

SEQ ID NO: 5056939 - DNA, 25 bp, Homo sapien
tttgcaggtttagagcacaggaaag

SEQ ID NO: 5056940 - DNA, 25 bp, Homo sapien
agtttgcaggtttagagcacaggaa

SEQ ID NO: 5056941 - DNA, 25 bp, Homo sapien
gagtttgcaggtttagagcacagga

SEQ ID NO: 5056942 - DNA, 25 bp, Homo sapien
ggcccgcaagaaggtcctcatggta

SEQ ID NO: 5056943 - DNA, 25 bp, Homo sapien
agtcatatccggtccttcaagtggc

SEQ ID NO: 5056944 - DNA, 25 bp, Homo sapien
tgcaggaagcgcatcgcccctggct

SEQ ID NO: 5056945 - DNA, 25 bp, Homo sapien
aagtggcaagagagcgacgtctccc

SEQ ID NO: 5056946 - DNA, 25 bp, Homo sapien
agcttcacacatcctgggctcacag

SEQ ID NO: 5056947 - DNA, 25 bp, Homo sapien
ccctgccagcttcacacatcctggg

SEQ ID NO: 5056948 - DNA, 25 bp, Homo sapien
tgccagcttcacacatcctgggctc

SEQ ID NO: 5056949 - DNA, 25 bp, Homo sapien
acacatcctgggctcacaggccctg

SEQ ID NO: 5056950 - DNA, 25 bp, Homo sapien
ctccatgggacccaccagcccctct

SEQ ID NO: 5056951 - DNA, 25 bp, Homo sapien
ggtgatctccatgggacccaccagc

SEQ ID NO: 5056952 - DNA, 25 bp, Homo sapien
atgggacccaccagcccctcttgct

SEQ ID NO: 5056953 - DNA, 25 bp, Homo sapien
tccatgggacccaccagcccctctt

SEQ ID NO: 5056954 - DNA, 25 bp, Homo sapien
caaccccttagaggtctccactggg

SEQ ID NO: 5056955 - DNA, 25 bp, Homo sapien
ctgccccagcaaccccttagaggtc

SEQ ID NO: 5056956 - DNA, 25 bp, Homo sapien
ctggtgagtccatggcaatttccac

SEQ ID NO: 5056957 - DNA, 25 bp, Homo sapien
tggtgagtccatggcaatttccacc

SEQ ID NO: 5056958 - DNA, 25 bp, Homo sapien
gccagagcctgttgtcataatccct

SEQ ID NO: 5056959 - DNA, 25 bp, Homo sapien
agaccccatgggcatcgagctgact

SEQ ID NO: 5056960 - DNA, 25 bp, Homo sapien
cccagagaccccatgggacctgtcc

SEQ ID NO: 5056961 - DNA, 25 bp, Homo sapien
tgggcatcgagctgacttgctctgc

SEQ ID NO: 5056962 - DNA, 25 bp, Homo sapien
agcatgcttggtagccctaggcccc

SEQ ID NO: 5056963 - DNA, 25 bp, Homo sapien
tgactgccctggttcctcgccagag

SEQ ID NO: 5056964 - DNA, 25 bp, Homo sapien
aaccctccggtcctcaggagagcat

SEQ ID NO: 5056965 - DNA, 25 bp, Homo sapien
tgctcctgctgcaacactcgttctg

SEQ ID NO: 5056966 - DNA, 25 bp, Homo sapien
agggacggtcggctgggtctgccca

SEQ ID NO: 5056967 - DNA, 25 bp, Homo sapien
cagaaagcctgtcagatttctgcag

SEQ ID NO: 5056968 - DNA, 25 bp, Homo sapien
gagagggacggtcggctgggtctgc

SEQ ID NO: 5056969 - DNA, 25 bp, Homo sapien
caggagagggacggtcggctgggtc

SEQ ID NO: 5056970 - DNA, 25 bp, Homo sapien
actgctggaaggaggcaacagtgcc

SEQ ID NO: 5056971 - DNA, 25 bp, Homo sapien
ccaggggcccgggtaggcgttgcag

SEQ ID NO: 5056972 - DNA, 25 bp, Homo sapien
ccgggtaggcgttgcaggtcctcca

SEQ ID NO: 5056973 - DNA, 25 bp, Homo sapien
ccaccacacgcaccgctcgggcctg

SEQ ID NO: 5056974 - DNA, 25 bp, Homo sapien
cagaaaggggcttgggcaactggac

SEQ ID NO: 5056975 - DNA, 25 bp, Homo sapien
aactggaccagagcccggtctggcc

SEQ ID NO: 5056976 - DNA, 25 bp, Homo sapien
cttgggcaactggaccagagcccgg

SEQ ID NO: 5056977 - DNA, 25 bp, Homo sapien
gctggccaaggcacagcaaggctgt

SEQ ID NO: 5056978 - DNA, 25 bp, Homo sapien
caagcgctggggcgtggtgccaggg

SEQ ID NO: 5056979 - DNA, 25 bp, Homo sapien
tccaagcgctggggcgtggtgccag

SEQ ID NO: 5056980 - DNA, 25 bp, Homo sapien
ctggacatgctgctccaagcgctgg

SEQ ID NO: 5056981 - DNA, 25 bp, Homo sapien
tggacatgctgctccaagcgctggg

SEQ ID NO: 5056982 - DNA, 25 bp, Homo sapien
gggctcgtggtggagctggccgcag

SEQ ID NO: 5056983 - DNA, 25 bp, Homo sapien
tcgtggtggagctggccgcaggctc

SEQ ID NO: 5056984 - DNA, 25 bp, Homo sapien
gctcgtggtggagctggccgcaggc

SEQ ID NO: 5056985 - DNA, 25 bp, Homo sapien
ggggctcgtggtggagctggccgca

SEQ ID NO: 5056986 - DNA, 25 bp, Homo sapien
ccatgtagttcgtgatctgcctggg

SEQ ID NO: 5056987 - DNA, 25 bp, Homo sapien
ctgggcaccatgtagttcgtgatct

SEQ ID NO: 5056988 - DNA, 25 bp, Homo sapien
gcaccatgtagttcgtgatctgcct

SEQ ID NO: 5056989 - DNA, 25 bp, Homo sapien
gggcaccatgtagttcgtgatctgc

SEQ ID NO: 5056990 - DNA, 25 bp, Homo sapien
caaagtagagagtgagcagctcgtc

SEQ ID NO: 5056991 - DNA, 25 bp, Homo sapien
cctccagagcgtcggcggttttcaa

SEQ ID NO: 5056992 - DNA, 25 bp, Homo sapien
agggggcagtccacggacctccact

SEQ ID NO: 5056993 - DNA, 25 bp, Homo sapien
cggttttcaaagtagagagtgagca

SEQ ID NO: 5056994 - DNA, 25 bp, Homo sapien
atgagctcagccaggactcctgtgc

SEQ ID NO: 5056995 - DNA, 25 bp, Homo sapien
tccccgtggccgctaggcagcctca

SEQ ID NO: 5056996 - DNA, 25 bp, Homo sapien
taggcagcctcaggccatgagctca

SEQ ID NO: 5056997 - DNA, 25 bp, Homo sapien
tggccgctaggcagcctcaggccat

SEQ ID NO: 5056998 - DNA, 25 bp, Homo sapien
taaggccgagaacggacggtcagtc

SEQ ID NO: 5056999 - DNA, 25 bp, Homo sapien
cacgaggcctcgatttgggaactaa

SEQ ID NO: 5057000 - DNA, 25 bp, Homo sapien
taccgaacggccagtcaaattggcc

SEQ ID NO: 5057001 - DNA, 25 bp, Homo sapien
gcttcagcaaatcccgcatttagga

SEQ ID NO: 5057002 - DNA, 25 bp, Homo sapien
cggtgagtccccggcccgagcccag

SEQ ID NO: 5057003 - DNA, 25 bp, Homo sapien
ggagcgcctctgacccgctgcgccg

SEQ ID NO: 5057004 - DNA, 25 bp, Homo sapien
tgagtccccggcccgagcccaggag

SEQ ID NO: 5057005 - DNA, 25 bp, Homo sapien
gcccaggagcgcctctgacccgctg

SEQ ID NO: 5057006 - DNA, 25 bp, Homo sapien
ttggtcacagatggcccggggattt

SEQ ID NO: 5057007 - DNA, 25 bp, Homo sapien
cttaaagctgcttaaggggcgggat

SEQ ID NO: 5057008 - DNA, 25 bp, Homo sapien
cctgggatagaaatagccgccggct

SEQ ID NO: 5057009 - DNA, 25 bp, Homo sapien
gggctcgggcctttgttggtcacag

SEQ ID NO: 5057010 - DNA, 25 bp, Homo sapien
ggccatgtcccatgaaaagagtttt

SEQ ID NO: 5057011 - DNA, 25 bp, Homo sapien
agccctccccctacggtcagccagg

SEQ ID NO: 5057012 - DNA, 25 bp, Homo sapien
cacagggcccctacccacaagaggg

SEQ ID NO: 5057013 - DNA, 25 bp, Homo sapien
tggtgtctggggacaactatcctcc

SEQ ID NO: 5057014 - DNA, 25 bp, Homo sapien
gtgaaatgtgccaggacattgtttt

SEQ ID NO: 5057015 - DNA, 25 bp, Homo sapien
gtggtctcgggagtaactgccaagt

SEQ ID NO: 5057016 - DNA, 25 bp, Homo sapien
gagacggacacaaactcttggctga

SEQ ID NO: 5057017 - DNA, 25 bp, Homo sapien
cctgggaacggcaagctccagaggt

SEQ ID NO: 5057018 - DNA, 25 bp, Homo sapien
cccagaggacgccataatctgctgg

SEQ ID NO: 5057019 - DNA, 25 bp, Homo sapien
ctggaccttggctcaacgtcagcat

SEQ ID NO: 5057020 - DNA, 25 bp, Homo sapien
gaggacgccataatctgctggacct

SEQ ID NO: 5057021 - DNA, 25 bp, Homo sapien
gccataatctgctggaccttggctc

SEQ ID NO: 5057022 - DNA, 25 bp, Homo sapien
ctcctcgtcagcaacaggcagaccc

SEQ ID NO: 5057023 - DNA, 25 bp, Homo sapien
caacaggcagacccggaggttcaac

SEQ ID NO: 5057024 - DNA, 25 bp, Homo sapien
tcgtcagcaacaggcagacccggag

SEQ ID NO: 5057025 - DNA, 25 bp, Homo sapien
acaggcagacccggaggttcaacat

SEQ ID NO: 5057026 - DNA, 25 bp, Homo sapien
cgcccaccctgtgttcagacagaga

SEQ ID NO: 5057027 - DNA, 25 bp, Homo sapien
ccgagtgctgcataggaaaggcctg

SEQ ID NO: 5057028 - DNA, 25 bp, Homo sapien
gattgatttgtaatgcgcccaccct

SEQ ID NO: 5057029 - DNA, 25 bp, Homo sapien
cgtccgtggcagtgtcccgagtgct

SEQ ID NO: 5057030 - DNA, 25 bp, Homo sapien
gatggcagaaggcaacagtggaccc

SEQ ID NO: 5057031 - DNA, 25 bp, Homo sapien
cagtgcttgccagccagagaggatg

SEQ ID NO: 5057032 - DNA, 25 bp, Homo sapien
agcctgcatgcaggaaggcaacgag

SEQ ID NO: 5057033 - DNA, 25 bp, Homo sapien
agaaccccaactgaggagggtcctg

SEQ ID NO: 5057034 - DNA, 25 bp, Homo sapien
cagaaccgggagacttaaggcatct

SEQ ID NO: 5057035 - DNA, 25 bp, Homo sapien
agaaccgggagacttaaggcatctt

SEQ ID NO: 5057036 - DNA, 25 bp, Homo sapien
cccagaaccgggagacttaaggcat

SEQ ID NO: 5057037 - DNA, 25 bp, Homo sapien
ccagaaccgggagacttaaggcatc

SEQ ID NO: 5057038 - DNA, 25 bp, Homo sapien
ccgccgccgggcgtgtggagacaga

SEQ ID NO: 5057039 - DNA, 25 bp, Homo sapien
ggcgatactcatagacgctgccgtg

SEQ ID NO: 5057040 - DNA, 25 bp, Homo sapien
ccgggcgtgtggagacagaacacat

SEQ ID NO: 5057041 - DNA, 25 bp, Homo sapien
cctgggcccggcgatactcatagac

SEQ ID NO: 5057042 - DNA, 25 bp, Homo sapien
aggtctgcaactgttccccctctgt

SEQ ID NO: 5057043 - DNA, 25 bp, Homo sapien
gaggcgggctcagtgcaggcgtggc

SEQ ID NO: 5057044 - DNA, 25 bp, Homo sapien
ccatggaccacggaggcccggtacg

SEQ ID NO: 5057045 - DNA, 25 bp, Homo sapien
taaactcggcctctggtcaggtctg

SEQ ID NO: 5057046 - DNA, 25 bp, Homo sapien
cgtcttgccgcccagattcaccgtc

SEQ ID NO: 5057047 - DNA, 25 bp, Homo sapien
ttttgcggatcagcaggtttaggcc

SEQ ID NO: 5057048 - DNA, 25 bp, Homo sapien
cagattcaccgtccggccgtttttg

SEQ ID NO: 5057049 - DNA, 25 bp, Homo sapien
gggtacacggtcaccgacgtcttgc

SEQ ID NO: 5057050 - DNA, 25 bp, Homo sapien
ggccgcgagggctggggaaccgcgc

SEQ ID NO: 5057051 - DNA, 25 bp, Homo sapien
ctgcggagggaggcgaggagtccag

SEQ ID NO: 5057052 - DNA, 25 bp, Homo sapien
gccgcgagggctggggaaccgcgca

SEQ ID NO: 5057053 - DNA, 25 bp, Homo sapien
gggaggcgaggagtccagagagacc

SEQ ID NO: 5057054 - DNA, 25 bp, Homo sapien
cgtggagcccgtatggccggaaggc

SEQ ID NO: 5057055 - DNA, 25 bp, Homo sapien
tcacgaaagagcagctcgcgggtga

SEQ ID NO: 5057056 - DNA, 25 bp, Homo sapien
cgtatggccggaaggcgcggcgctc

SEQ ID NO: 5057057 - DNA, 25 bp, Homo sapien
gcagcgcctcctcacgaaagagcag

SEQ ID NO: 5057058 - DNA, 25 bp, Homo sapien
gaagcggcgcaggatgaccgggtac

SEQ ID NO: 5057059 - DNA, 25 bp, Homo sapien
cagctcgaagcggcgcaggatgacc

SEQ ID NO: 5057060 - DNA, 25 bp, Homo sapien
ccccgccgcagctcgaagcggcgca

SEQ ID NO: 5057061 - DNA, 25 bp, Homo sapien
ctcgaagcggcgcaggatgaccggg

SEQ ID NO: 5057062 - DNA, 25 bp, Homo sapien
tctcagggtcggtgatgcgtgtgtt

SEQ ID NO: 5057063 - DNA, 25 bp, Homo sapien
cggtgatgcgtgtgttggtcatgtg

SEQ ID NO: 5057064 - DNA, 25 bp, Homo sapien
acaccgctgcgcccgtgccagctgg

SEQ ID NO: 5057065 - DNA, 25 bp, Homo sapien
caggatctcagggtcggtgatgcgt

SEQ ID NO: 5057066 - DNA, 25 bp, Homo sapien
cgttgcccagggtcacgttgttcat

SEQ ID NO: 5057067 - DNA, 25 bp, Homo sapien
tagtagcccatgtgggcgttgccca

SEQ ID NO: 5057068 - DNA, 25 bp, Homo sapien
cgtctcgtagtagcccatgtgggcg

SEQ ID NO: 5057069 - DNA, 25 bp, Homo sapien
gcgttgcccagggtcacgttgttca

SEQ ID NO: 5057070 - DNA, 25 bp, Homo sapien
tgagggcacctggtcgctgcgctgg

SEQ ID NO: 5057071 - DNA, 25 bp, Homo sapien
agggcacctggtcgctgcgctgggc

SEQ ID NO: 5057072 - DNA, 25 bp, Homo sapien
ggcacctggtcgctgcgctgggctg

SEQ ID NO: 5057073 - DNA, 25 bp, Homo sapien
ggtgagggcacctggtcgctgcgct

SEQ ID NO: 5057074 - DNA, 25 bp, Homo sapien
tgcgacgtgagcacgttgccgccca

SEQ ID NO: 5057075 - DNA, 25 bp, Homo sapien
gggcgacgggtccaggatggagcct

SEQ ID NO: 5057076 - DNA, 25 bp, Homo sapien
ggatgacatccaccacgcgctgcga

SEQ ID NO: 5057077 - DNA, 25 bp, Homo sapien
aatgaccacgcgcactggcgccagg

SEQ ID NO: 5057078 - DNA, 25 bp, Homo sapien
ttgagtgggatgtcgcggcccacca

SEQ ID NO: 5057079 - DNA, 25 bp, Homo sapien
tggttgagtgggatgtcgcggccca

SEQ ID NO: 5057080 - DNA, 25 bp, Homo sapien
cgcggcccaccagacagcgcaggca

SEQ ID NO: 5057081 - DNA, 25 bp, Homo sapien
ctggttgagtgggatgtcgcggccc

SEQ ID NO: 5057082 - DNA, 25 bp, Homo sapien
attaccaaacacctccggcccagtg

SEQ ID NO: 5057083 - DNA, 25 bp, Homo sapien
ccagtgccgctgaagtcaaacacgg

SEQ ID NO: 5057084 - DNA, 25 bp, Homo sapien
tacggcccgcggtgcgttgagatta

SEQ ID NO: 5057085 - DNA, 25 bp, Homo sapien
ccgctgaagtcaaacacggcgctgc

SEQ ID NO: 5057086 - DNA, 25 bp, Homo sapien
gccgcctagaggcactctccccacg

SEQ ID NO: 5057087 - DNA, 25 bp, Homo sapien
tagaggcactctccccacggcccac

SEQ ID NO: 5057088 - DNA, 25 bp, Homo sapien
cgcctagaggcactctccccacggc

SEQ ID NO: 5057089 - DNA, 25 bp, Homo sapien
gcctagaggcactctccccacggcc

SEQ ID NO: 5057090 - DNA, 25 bp, Homo sapien
tctcgcacggccagctcagcgtttg

SEQ ID NO: 5057091 - DNA, 25 bp, Homo sapien
gggaggttccaaaggcacgcaacat

SEQ ID NO: 5057092 - DNA, 25 bp, Homo sapien
gaaccgtcgtccatgtggtcttccg

SEQ ID NO: 5057093 - DNA, 25 bp, Homo sapien
tgactcaggctgatctgcacacgga

SEQ ID NO: 5057094 - DNA, 25 bp, Homo sapien
tgggcacggaggtccgacaggttgt

SEQ ID NO: 5057095 - DNA, 25 bp, Homo sapien
ggccgtactgcccaatgagctcccc

SEQ ID NO: 5057096 - DNA, 25 bp, Homo sapien
gtcgtgcaggtttctggttccgctg

SEQ ID NO: 5057097 - DNA, 25 bp, Homo sapien
tatggcccatgtaggcctgcaccac

SEQ ID NO: 5057098 - DNA, 25 bp, Homo sapien
tggtgccctcggctggccacataga

SEQ ID NO: 5057099 - DNA, 25 bp, Homo sapien
gccacatagaacacaggccgcgtct

SEQ ID NO: 5057100 - DNA, 25 bp, Homo sapien
gcatggagcctggtgtgatgccccc

SEQ ID NO: 5057101 - DNA, 25 bp, Homo sapien
agaaagacggcaccctcctgttgca

SEQ ID NO: 5057102 - DNA, 25 bp, Homo sapien
tggagagccacggtcagctgcatcg

SEQ ID NO: 5057103 - DNA, 25 bp, Homo sapien
ggtggagagccacggtcagctgcat

SEQ ID NO: 5057104 - DNA, 25 bp, Homo sapien
gagagccacggtcagctgcatcggc

SEQ ID NO: 5057105 - DNA, 25 bp, Homo sapien
gagccacggtcagctgcatcggcca

SEQ ID NO: 5057106 - DNA, 25 bp, Homo sapien
cggtgtgataacagtcaggtctggc

SEQ ID NO: 5057107 - DNA, 25 bp, Homo sapien
tcgccagggtggagatcggccccca

SEQ ID NO: 5057108 - DNA, 25 bp, Homo sapien
ccccggcactgggatggttgctcag

SEQ ID NO: 5057109 - DNA, 25 bp, Homo sapien
gttgctcagtagcacgtcgccaggg

SEQ ID NO: 5057110 - DNA, 25 bp, Homo sapien
gtccagacgctccttgatgttggtg

SEQ ID NO: 5057111 - DNA, 25 bp, Homo sapien
caggagaagtccagacgctccttga

SEQ ID NO: 5057112 - DNA, 25 bp, Homo sapien
tggaactgcaccgtctcctgcatgg

SEQ ID NO: 5057113 - DNA, 25 bp, Homo sapien
tcctgcatggcacccaggtgcacag

SEQ ID NO: 5057114 - DNA, 25 bp, Homo sapien
aagcggtgtgagaagatggacagct

SEQ ID NO: 5057115 - DNA, 25 bp, Homo sapien
atgtcccctgtcttggtcacctctg

SEQ ID NO: 5057116 - DNA, 25 bp, Homo sapien
tcggcccccacggagatgcagatgt

SEQ ID NO: 5057117 - DNA, 25 bp, Homo sapien
cagcaatgctcatgaagcggtgtga

SEQ ID NO: 5057118 - DNA, 25 bp, Homo sapien
tggtagcccccctcaaagtagcact

SEQ ID NO: 5057119 - DNA, 25 bp, Homo sapien
tcctggtagcccccctcaaagtagc

SEQ ID NO: 5057120 - DNA, 25 bp, Homo sapien
ctgttactgtcgatgatgaggcagg

SEQ ID NO: 5057121 - DNA, 25 bp, Homo sapien
tggagcttgtgcccatagcccagct

SEQ ID NO: 5057122 - DNA, 25 bp, Homo sapien
gggcatcctcgaggcgaagaccact

SEQ ID NO: 5057123 - DNA, 25 bp, Homo sapien
atcctcgaggcgaagaccactgcgg

SEQ ID NO: 5057124 - DNA, 25 bp, Homo sapien
gaccaccggccgctcaggtatgaca

SEQ ID NO: 5057125 - DNA, 25 bp, Homo sapien
tatgacaaagccaaactccctcatg

SEQ ID NO: 5057126 - DNA, 25 bp, Homo sapien
tccgtgccctggtagcgcaggtgca

SEQ ID NO: 5057127 - DNA, 25 bp, Homo sapien
gcgagcgggctgtggctgggtgctg

SEQ ID NO: 5057128 - DNA, 25 bp, Homo sapien
agcacagtccgtgccctggtagcgc

SEQ ID NO: 5057129 - DNA, 25 bp, Homo sapien
gggcgagcgggctgtggctgggtgc

SEQ ID NO: 5057130 - DNA, 25 bp, Homo sapien
gcctgcagagcatccacacactgct

SEQ ID NO: 5057131 - DNA, 25 bp, Homo sapien
cacgaaggtctcaggcgcgtagagc

SEQ ID NO: 5057132 - DNA, 25 bp, Homo sapien
acgaaggtctcaggcgcgtagagca

SEQ ID NO: 5057133 - DNA, 25 bp, Homo sapien
cctgcagagcatccacacactgctc

SEQ ID NO: 5057134 - DNA, 25 bp, Homo sapien
cacatgggctgaggggtcatggcct

SEQ ID NO: 5057135 - DNA, 25 bp, Homo sapien
ccgggcgatggcacatgcatgctgc

SEQ ID NO: 5057136 - DNA, 25 bp, Homo sapien
aaagcaggccagcacatgggctgag

SEQ ID NO: 5057137 - DNA, 25 bp, Homo sapien
ctgtggatgtgcaccgtgtccatgc

SEQ ID NO: 5057138 - DNA, 25 bp, Homo sapien
cccccagcctgagcaggaggcctgg

SEQ ID NO: 5057139 - DNA, 25 bp, Homo sapien
cagcccccagcctgagcaggaggcc

SEQ ID NO: 5057140 - DNA, 25 bp, Homo sapien
tctaccccatccagcccccagcctg

SEQ ID NO: 5057141 - DNA, 25 bp, Homo sapien
aggaggcctggggcagggagcaggg

SEQ ID NO: 5057142 - DNA, 25 bp, Homo sapien
gacaggcgggagagcagaggtggac

SEQ ID NO: 5057143 - DNA, 25 bp, Homo sapien
gcaggacaggcgggagagcagaggt

SEQ ID NO: 5057144 - DNA, 25 bp, Homo sapien
ggcaggacaggcgggagagcagagg

SEQ ID NO: 5057145 - DNA, 25 bp, Homo sapien
ggcgggagagcagaggtggacgtac

SEQ ID NO: 5057146 - DNA, 25 bp, Homo sapien
aggcgacccaggaccagattagcat

SEQ ID NO: 5057147 - DNA, 25 bp, Homo sapien
tgagtgcacggatgggccggcacat

SEQ ID NO: 5057148 - DNA, 25 bp, Homo sapien
cctccagggctttgcgggaggcctc

SEQ ID NO: 5057149 - DNA, 25 bp, Homo sapien
ggcacatggcctcgttggccacgcg

SEQ ID NO: 5057150 - DNA, 25 bp, Homo sapien
ctgggcctgcggcggcaagcggagg

SEQ ID NO: 5057151 - DNA, 25 bp, Homo sapien
ccaggccggccagatcctgactctt

SEQ ID NO: 5057152 - DNA, 25 bp, Homo sapien
aggccggccagatcctgactcttac

SEQ ID NO: 5057153 - DNA, 25 bp, Homo sapien
ggcctgcggcggcaagcggagggca

SEQ ID NO: 5057154 - DNA, 25 bp, Homo sapien
gactcgggcccaaccacaaagaggc

SEQ ID NO: 5057155 - DNA, 25 bp, Homo sapien
tgctgactcgggcccaaccacaaag

SEQ ID NO: 5057156 - DNA, 25 bp, Homo sapien
tgggctcctgctgactcgggcccaa

SEQ ID NO: 5057157 - DNA, 25 bp, Homo sapien
gtgggctcctgctgactcgggccca

SEQ ID NO: 5057158 - DNA, 25 bp, Homo sapien
tcgaattccccagcatagcggctca

SEQ ID NO: 5057159 - DNA, 25 bp, Homo sapien
tgtgctggcctcgaagacgtgctcg

SEQ ID NO: 5057160 - DNA, 25 bp, Homo sapien
ccacggtgttgatgtccagctgcgg

SEQ ID NO: 5057161 - DNA, 25 bp, Homo sapien
tagcggctcacatccgtggacgtgc

SEQ ID NO: 5057162 - DNA, 25 bp, Homo sapien
ctcccatgtcaaagccgatgacagg

SEQ ID NO: 5057163 - DNA, 25 bp, Homo sapien
gccaggccgccatcggagcgcatga

SEQ ID NO: 5057164 - DNA, 25 bp, Homo sapien
tcaaagccgatgacaggctggccac

SEQ ID NO: 5057165 - DNA, 25 bp, Homo sapien
tcggagcgcatgaacaacacctgca

SEQ ID NO: 5057166 - DNA, 25 bp, Homo sapien
cgcaccatgggcatggcctccgagg

SEQ ID NO: 5057167 - DNA, 25 bp, Homo sapien
ccccgagggacgatgcgcaccatgg

SEQ ID NO: 5057168 - DNA, 25 bp, Homo sapien
cgtagcgctggatggcgggcgtgag

SEQ ID NO: 5057169 - DNA, 25 bp, Homo sapien
gacagtgacacgtgcgtgaagccca

SEQ ID NO: 5057170 - DNA, 25 bp, Homo sapien
gtgtacgagtgcatgagcaccacag

SEQ ID NO: 5057171 - DNA, 25 bp, Homo sapien
tacgagtgcatgagcaccacagcca

SEQ ID NO: 5057172 - DNA, 25 bp, Homo sapien
caggctgcggatgcctcgagatagc

SEQ ID NO: 5057173 - DNA, 25 bp, Homo sapien
agccaggctgcggatgcctcgagat

SEQ ID NO: 5057174 - DNA, 25 bp, Homo sapien
agcaccacgcgttcgtccacctcca

SEQ ID NO: 5057175 - DNA, 25 bp, Homo sapien
cgcctctccacggtgcagcaccacg

SEQ ID NO: 5057176 - DNA, 25 bp, Homo sapien
aggcgtcccggtgcccgcctctcca

SEQ ID NO: 5057177 - DNA, 25 bp, Homo sapien
ctttcacaggcgtcccggtgcccgc

SEQ ID NO: 5057178 - DNA, 25 bp, Homo sapien
atgctggcgatatgactggagtcca

SEQ ID NO: 5057179 - DNA, 25 bp, Homo sapien
agcaggtctcggaagccacgtgtca

SEQ ID NO: 5057180 - DNA, 25 bp, Homo sapien
tggccactgtggtgcccatgcggat

SEQ ID NO: 5057181 - DNA, 25 bp, Homo sapien
ccacgggcttgggtgccaatgtgca

SEQ ID NO: 5057182 - DNA, 25 bp, Homo sapien
gcgtccgcatagttggcagggtcct

SEQ ID NO: 5057183 - DNA, 25 bp, Homo sapien
tcgatggcaaagtggaagcggccct

SEQ ID NO: 5057184 - DNA, 25 bp, Homo sapien
tgagagcagttttaagacccgcacg

SEQ ID NO: 5057185 - DNA, 25 bp, Homo sapien
gcaaagacgtctgtgaaggtacccc

SEQ ID NO: 5057186 - DNA, 25 bp, Homo sapien
ggagtcccacaggagctcttcagct

SEQ ID NO: 5057187 - DNA, 25 bp, Homo sapien
cacaggagctcttcagctggtagcc

SEQ ID NO: 5057188 - DNA, 25 bp, Homo sapien
tcccacaggagctcttcagctggta

SEQ ID NO: 5057189 - DNA, 25 bp, Homo sapien
gagtcccacaggagctcttcagctg

SEQ ID NO: 5057190 - DNA, 25 bp, Homo sapien
gagtgggactagaggctccccagcc

SEQ ID NO: 5057191 - DNA, 25 bp, Homo sapien
ctgcgagtgggactagaggctcccc

SEQ ID NO: 5057192 - DNA, 25 bp, Homo sapien
ctccccagccctgcgcatgcggggg

SEQ ID NO: 5057193 - DNA, 25 bp, Homo sapien
ccagccctgcgcatgcggggggttc

SEQ ID NO: 5057194 - DNA, 25 bp, Homo sapien
ttcttgaatttgatcgttctccgcc

SEQ ID NO: 5057195 - DNA, 25 bp, Homo sapien
atcgttctccgcctgggtagccagg

SEQ ID NO: 5057196 - DNA, 25 bp, Homo sapien
aggctgctgccgcggttcctgagca

SEQ ID NO: 5057197 - DNA, 25 bp, Homo sapien
tgaatttgatcgttctccgcctggg

SEQ ID NO: 5057198 - DNA, 25 bp, Homo sapien
cgggggccagcaggccggccaggga

SEQ ID NO: 5057199 - DNA, 25 bp, Homo sapien
tggcagccagcggcggcagctggcg

SEQ ID NO: 5057200 - DNA, 25 bp, Homo sapien
gcctggcagccagcggcggcagctg

SEQ ID NO: 5057201 - DNA, 25 bp, Homo sapien
gcaggccggccagggacagcagacc

SEQ ID NO: 5057202 - DNA, 25 bp, Homo sapien
attgtgacaatttaattctcggccg

SEQ ID NO: 5057203 - DNA, 25 bp, Homo sapien
gaatcccaacagaaattgtgacaat

SEQ ID NO: 5057204 - DNA, 25 bp, Homo sapien
tgtgacaatttaattctcggccggg

SEQ ID NO: 5057205 - DNA, 25 bp, Homo sapien
aaattgtgacaatttaattctcggc

SEQ ID NO: 5057206 - DNA, 25 bp, Homo sapien
tgactgggcaattcctccttcggcg

SEQ ID NO: 5057207 - DNA, 25 bp, Homo sapien
caagtccttagtgtgctgcgcggtg

SEQ ID NO: 5057208 - DNA, 25 bp, Homo sapien
tctcactcggagtaaacgcaagtcc

SEQ ID NO: 5057209 - DNA, 25 bp, Homo sapien
gaaccggaagtgatggcggacctcc

SEQ ID NO: 5057210 - DNA, 25 bp, Homo sapien
tgggacgtcctgagtcattggcagt

SEQ ID NO: 5057211 - DNA, 25 bp, Homo sapien
tgaagcccgttttggccagtagtgc

SEQ ID NO: 5057212 - DNA, 25 bp, Homo sapien
cattggcagtctcgcttggcatcca

SEQ ID NO: 5057213 - DNA, 25 bp, Homo sapien
gactctgaaaacctcggtgctgggc

SEQ ID NO: 5057214 - DNA, 25 bp, Homo sapien
taggcagccatcagacacgttcaat

SEQ ID NO: 5057215 - DNA, 25 bp, Homo sapien
ttttcaaagcgcctgtggacatctc

SEQ ID NO: 5057216 - DNA, 25 bp, Homo sapien
caataacggaggttctgtgcgaatg

SEQ ID NO: 5057217 - DNA, 25 bp, Homo sapien
caagccctgagccaatgtggtagga

SEQ ID NO: 5057218 - DNA, 25 bp, Homo sapien
gagagaactttttgtcggaatgctg

SEQ ID NO: 5057219 - DNA, 25 bp, Homo sapien
tatggtaccagggaacaagcgttct

SEQ ID NO: 5057220 - DNA, 25 bp, Homo sapien
tgttaaacatgctcacaggcaggta

SEQ ID NO: 5057221 - DNA, 25 bp, Homo sapien
aatgctgatctttccttatggtacc

SEQ ID NO: 5057222 - DNA, 25 bp, Homo sapien
ggtctgctgtgcagcgcgcgtcccg

SEQ ID NO: 5057223 - DNA, 25 bp, Homo sapien
gcgcggccccgcatctccgtgaagg

SEQ ID NO: 5057224 - DNA, 25 bp, Homo sapien
ggcagctgcggcttcgcttcgcggg

SEQ ID NO: 5057225 - DNA, 25 bp, Homo sapien
tacggacacctcaggtgagcgctgg

SEQ ID NO: 5057226 - DNA, 25 bp, Homo sapien
agcagtcagtagaggtccccggagt

SEQ ID NO: 5057227 - DNA, 25 bp, Homo sapien
gcaagcagtcagtagaggtccccgg

SEQ ID NO: 5057228 - DNA, 25 bp, Homo sapien
aagcagtcagtagaggtccccggag

SEQ ID NO: 5057229 - DNA, 25 bp, Homo sapien
caagcagtcagtagaggtccccgga

SEQ ID NO: 5057230 - DNA, 25 bp, Homo sapien
gcctggagatgtcggacttgtgagg

SEQ ID NO: 5057231 - DNA, 25 bp, Homo sapien
tggagatgtcggacttgtgagggaa

SEQ ID NO: 5057232 - DNA, 25 bp, Homo sapien
agatgtcggacttgtgagggaaggg

SEQ ID NO: 5057233 - DNA, 25 bp, Homo sapien
ggcctggagatgtcggacttgtgag

SEQ ID NO: 5057234 - DNA, 25 bp, Homo sapien
ggagctgggtcattcctgtggattc

SEQ ID NO: 5057235 - DNA, 25 bp, Homo sapien
aggagctgggtcattcctgtggatt

SEQ ID NO: 5057236 - DNA, 25 bp, Homo sapien
agctgggtcattcctgtggattctg

SEQ ID NO: 5057237 - DNA, 25 bp, Homo sapien
ggaggagctgggtcattcctgtgga

SEQ ID NO: 5057238 - DNA, 25 bp, Homo sapien
ctgcagcaagggggtcccaagtgca

SEQ ID NO: 5057239 - DNA, 25 bp, Homo sapien
tgcagcaagggggtcccaagtgcag

SEQ ID NO: 5057240 - DNA, 25 bp, Homo sapien
gggcggtctggggcattgatgaagg

SEQ ID NO: 5057241 - DNA, 25 bp, Homo sapien
agggcggtctggggcattgatgaag

SEQ ID NO: 5057242 - DNA, 25 bp, Homo sapien
ggcggtctggggcattgatgaaggt

SEQ ID NO: 5057243 - DNA, 25 bp, Homo sapien
cagggcggtctggggcattgatgaa

SEQ ID NO: 5057244 - DNA, 25 bp, Homo sapien
tttccaatgcccatggctgtcctgg

SEQ ID NO: 5057245 - DNA, 25 bp, Homo sapien
ttccaatgcccatggctgtcctggc

SEQ ID NO: 5057246 - DNA, 25 bp, Homo sapien
ccaatgcccatggctgtcctggccc

SEQ ID NO: 5057247 - DNA, 25 bp, Homo sapien
tctttccaatgcccatggctgtcct

SEQ ID NO: 5057248 - DNA, 25 bp, Homo sapien
agcgtccaagttccccgtccatctt

SEQ ID NO: 5057249 - DNA, 25 bp, Homo sapien
tgatgggggaaacaagcgtccaagt

SEQ ID NO: 5057250 - DNA, 25 bp, Homo sapien
acaagcgtccaagttccccgtccat

SEQ ID NO: 5057251 - DNA, 25 bp, Homo sapien
ccaatgatgggggaaacaagcgtcc

SEQ ID NO: 5057252 - DNA, 25 bp, Homo sapien
gactgtggggctgcaccccacctcc

SEQ ID NO: 5057253 - DNA, 25 bp, Homo sapien
ggtggagctcaggactgtggggctg

SEQ ID NO: 5057254 - DNA, 25 bp, Homo sapien
ctgagggggtggagctcaggactgt

SEQ ID NO: 5057255 - DNA, 25 bp, Homo sapien
agggggtggagctcaggactgtggg

SEQ ID NO: 5057256 - DNA, 25 bp, Homo sapien
tgccgaaccccgtaagaggcaaggc

SEQ ID NO: 5057257 - DNA, 25 bp, Homo sapien
cgtccgatgacccagcgttgcacgg

SEQ ID NO: 5057258 - DNA, 25 bp, Homo sapien
gggcttctcgaggagctgacagcaa

SEQ ID NO: 5057259 - DNA, 25 bp, Homo sapien
aggcaccgtccgatgacccagcgtt

SEQ ID NO: 5057260 - DNA, 25 bp, Homo sapien
ctggcgggaaaccgagctctgagaa

SEQ ID NO: 5057261 - DNA, 25 bp, Homo sapien
tggcgggaaaccgagctctgagaac

SEQ ID NO: 5057262 - DNA, 25 bp, Homo sapien
gcgggaaaccgagctctgagaacac

SEQ ID NO: 5057263 - DNA, 25 bp, Homo sapien
ggcgggaaaccgagctctgagaaca

SEQ ID NO: 5057264 - DNA, 25 bp, Homo sapien
tcctggagagctgcaacagtgcagt

SEQ ID NO: 5057265 - DNA, 25 bp, Homo sapien
cctggagagctgcaacagtgcagtg

SEQ ID NO: 5057266 - DNA, 25 bp, Homo sapien
ctgctcctggagagctgcaacagtg

SEQ ID NO: 5057267 - DNA, 25 bp, Homo sapien
gctcctggagagctgcaacagtgca

SEQ ID NO: 5057268 - DNA, 25 bp, Homo sapien
gtgtgcagaggacgcggcggatgcg

SEQ ID NO: 5057269 - DNA, 25 bp, Homo sapien
ctgcagggcaacgtgtgcagaggac

SEQ ID NO: 5057270 - DNA, 25 bp, Homo sapien
agggcaacgtgtgcagaggacgcgg

SEQ ID NO: 5057271 - DNA, 25 bp, Homo sapien
aacgtgtgcagaggacgcggcggat

SEQ ID NO: 5057272 - DNA, 25 bp, Homo sapien
ctgtgccagaatgtgggttcaggga

SEQ ID NO: 5057273 - DNA, 25 bp, Homo sapien
acctgggatggtcacgaggacaagg

SEQ ID NO: 5057274 - DNA, 25 bp, Homo sapien
tgtgccagaatgtgggttcagggat

SEQ ID NO: 5057275 - DNA, 25 bp, Homo sapien
cctgggatggtcacgaggacaaggt

SEQ ID NO: 5057276 - DNA, 25 bp, Homo sapien
cctgaagctgaacactcagggccac

SEQ ID NO: 5057277 - DNA, 25 bp, Homo sapien
gctgaacactcagggccacacgatg

SEQ ID NO: 5057278 - DNA, 25 bp, Homo sapien
aacactcagggccacacgatgctgg

SEQ ID NO: 5057279 - DNA, 25 bp, Homo sapien
tgaagctgaacactcagggccacac

SEQ ID NO: 5057280 - DNA, 25 bp, Homo sapien
gtctccacctgcaatagcccgggcc

SEQ ID NO: 5057281 - DNA, 25 bp, Homo sapien
tcgtctccacctgcaatagcccggg

SEQ ID NO: 5057282 - DNA, 25 bp, Homo sapien
cacctgcaatagcccgggccaggct

SEQ ID NO: 5057283 - DNA, 25 bp, Homo sapien
ctccacctgcaatagcccgggccag

SEQ ID NO: 5057284 - DNA, 25 bp, Homo sapien
tggagggcccttgagtgtggaggct

SEQ ID NO: 5057285 - DNA, 25 bp, Homo sapien
gtggagggcccttgagtgtggaggc

SEQ ID NO: 5057286 - DNA, 25 bp, Homo sapien
aggtggagggcccttgagtgtggag

SEQ ID NO: 5057287 - DNA, 25 bp, Homo sapien
ggtggagggcccttgagtgtggagg

SEQ ID NO: 5057288 - DNA, 25 bp, Homo sapien
gctggtggtgagttgctcttgctgc

SEQ ID NO: 5057289 - DNA, 25 bp, Homo sapien
ggctggtggtgagttgctcttgctg

SEQ ID NO: 5057290 - DNA, 25 bp, Homo sapien
caaggctggtggtgagttgctcttg

SEQ ID NO: 5057291 - DNA, 25 bp, Homo sapien
aaggctggtggtgagttgctcttgc

SEQ ID NO: 5057292 - DNA, 25 bp, Homo sapien
agatatgggtgtgctgtgctgtggc

SEQ ID NO: 5057293 - DNA, 25 bp, Homo sapien
ctagaggtaagatatgggtgtgctg

SEQ ID NO: 5057294 - DNA, 25 bp, Homo sapien
tgtggcctctgtccaggcctctagg

SEQ ID NO: 5057295 - DNA, 25 bp, Homo sapien
gctgtggcctctgtccaggcctcta

SEQ ID NO: 5057296 - DNA, 25 bp, Homo sapien
gggtccccatccagtgctgacacag

SEQ ID NO: 5057297 - DNA, 25 bp, Homo sapien
ccagcccactgcaatgggggggtcc

SEQ ID NO: 5057298 - DNA, 25 bp, Homo sapien
gtctcaggcccactatattctacca

SEQ ID NO: 5057299 - DNA, 25 bp, Homo sapien
cagtgctgacacagctcccgtggtc

SEQ ID NO: 5057300 - DNA, 25 bp, Homo sapien
tctgggagccccatactacctagtc

SEQ ID NO: 5057301 - DNA, 25 bp, Homo sapien
gctgctgaatacatatgcttggtga

SEQ ID NO: 5057302 - DNA, 25 bp, Homo sapien
ggatgggaggttttgttcatgccaa

SEQ ID NO: 5057303 - DNA, 25 bp, Homo sapien
tgcttatctcgtttgtgggctgccc

SEQ ID NO: 5057304 - DNA, 25 bp, Homo sapien
aattgtatccattacagggcactga

SEQ ID NO: 5057305 - DNA, 25 bp, Homo sapien
aattccatcttctaagcatctctag

SEQ ID NO: 5057306 - DNA, 25 bp, Homo sapien
gctcttgggatgatgtcttctcaca

SEQ ID NO: 5057307 - DNA, 25 bp, Homo sapien
aacccttgccactgcagaactctgt

SEQ ID NO: 5057308 - DNA, 25 bp, Homo sapien
cctggtggaggctgtagctcgtgct

SEQ ID NO: 5057309 - DNA, 25 bp, Homo sapien
actaggactgcccaccgctgagctt

SEQ ID NO: 5057310 - DNA, 25 bp, Homo sapien
gaggctgtagctcgtgctgggtggg

SEQ ID NO: 5057311 - DNA, 25 bp, Homo sapien
ttccacggtggcacctcggactagg

SEQ ID NO: 5057312 - DNA, 25 bp, Homo sapien
gcagctgtgcctcggcgtctggccc

SEQ ID NO: 5057313 - DNA, 25 bp, Homo sapien
cgctcagggtccgcgctcagctgca

SEQ ID NO: 5057314 - DNA, 25 bp, Homo sapien
ccgctcagggtccgcgctcagctgc

SEQ ID NO: 5057315 - DNA, 25 bp, Homo sapien
agctgtgcctcggcgtctggcccgg

SEQ ID NO: 5057316 - DNA, 25 bp, Homo sapien
gcggcggagcccaagtccgaggccg

SEQ ID NO: 5057317 - DNA, 25 bp, Homo sapien
cgccgccccgcccgctggcggcgcc

SEQ ID NO: 5057318 - DNA, 25 bp, Homo sapien
ccgccccgcccgctggcggcgccat

SEQ ID NO: 5057319 - DNA, 25 bp, Homo sapien
ctgcggcggagcccaagtccgaggc

SEQ ID NO: 5057320 - DNA, 25 bp, Homo sapien
cttccgtgggatcgggccgctgagc

SEQ ID NO: 5057321 - DNA, 25 bp, Homo sapien
aggctggcggcgtgtacgaggctgg

SEQ ID NO: 5057322 - DNA, 25 bp, Homo sapien
gggacggcgccgagtggtgcactct

SEQ ID NO: 5057323 - DNA, 25 bp, Homo sapien
tttgcccacaaatggacacggcccg

SEQ ID NO: 5057324 - DNA, 25 bp, Homo sapien
ggctcggcggacgtagatgcatcca

SEQ ID NO: 5057325 - DNA, 25 bp, Homo sapien
agcgcctaacggcagctggacttcg

SEQ ID NO: 5057326 - DNA, 25 bp, Homo sapien
tagtacgacgagaagagtgacagac

SEQ ID NO: 5057327 - DNA, 25 bp, Homo sapien
acgcccacacgtcgcactaggttgg

SEQ ID NO: 5057328 - DNA, 25 bp, Homo sapien
accagtagacgtagaaggcagaact

SEQ ID NO: 5057329 - DNA, 25 bp, Homo sapien
ctctcgatctcggagactggagcgg

SEQ ID NO: 5057330 - DNA, 25 bp, Homo sapien
ggtacggcacccgatggctattcga

SEQ ID NO: 5057331 - DNA, 25 bp, Homo sapien
ctgactcgccggagcgctctgtggc

SEQ ID NO: 5057332 - DNA, 25 bp, Homo sapien
gcggagcttcttcccccggatacag

SEQ ID NO: 5057333 - DNA, 25 bp, Homo sapien
cccggatacagtgcggcccgagcgg

SEQ ID NO: 5057334 - DNA, 25 bp, Homo sapien
gccctccgatcttgaagagcccgcg

SEQ ID NO: 5057335 - DNA, 25 bp, Homo sapien
gcggcgccgccctccgatcttgaag

SEQ ID NO: 5057336 - DNA, 25 bp, Homo sapien
cctgatctaacccagccaggcaggt

SEQ ID NO: 5057337 - DNA, 25 bp, Homo sapien
cctgcgcaccggcaccgacgcggag

SEQ ID NO: 5057338 - DNA, 25 bp, Homo sapien
gcccggcgcggcctgatctaaccca

SEQ ID NO: 5057339 - DNA, 25 bp, Homo sapien
ggcaccgacgcggagcgacccagcc

SEQ ID NO: 5057340 - DNA, 25 bp, Homo sapien
tcccgttgcggactcaagagttacc

SEQ ID NO: 5057341 - DNA, 25 bp, Homo sapien
tcacgtcccgttgcggactcaagag

SEQ ID NO: 5057342 - DNA, 25 bp, Homo sapien
gactgcaggagtcacgtcccgttgc

SEQ ID NO: 5057343 - DNA, 25 bp, Homo sapien
gcaggagtcacgtcccgttgcggac

SEQ ID NO: 5057344 - DNA, 25 bp, Homo sapien
actgccgcgcccttcagtggaacct

SEQ ID NO: 5057345 - DNA, 25 bp, Homo sapien
gatgcccacatcattggcaggtgag

SEQ ID NO: 5057346 - DNA, 25 bp, Homo sapien
tggcatctcggaggtcacactgccg

SEQ ID NO: 5057347 - DNA, 25 bp, Homo sapien
ggagactggagatgcccacatcatt

SEQ ID NO: 5057348 - DNA, 25 bp, Homo sapien
ggagccgtcgcaggtcctgcccttt

SEQ ID NO: 5057349 - DNA, 25 bp, Homo sapien
tttcacggagccgtcgcaggtcctg

SEQ ID NO: 5057350 - DNA, 25 bp, Homo sapien
cagagttgactttcacggagccgtc

SEQ ID NO: 5057351 - DNA, 25 bp, Homo sapien
agttcctgcccgcagagttgacttt

SEQ ID NO: 5057352 - DNA, 25 bp, Homo sapien
tgctgtccctgtgcgcgagcagcat

SEQ ID NO: 5057353 - DNA, 25 bp, Homo sapien
gctgtggcgcgtacgcgagctctac

SEQ ID NO: 5057354 - DNA, 25 bp, Homo sapien
gccaggacaagctgtcccggcgcgt

SEQ ID NO: 5057355 - DNA, 25 bp, Homo sapien
gctctactcgccgttggcgcaactg

SEQ ID NO: 5057356 - DNA, 25 bp, Homo sapien
ggtagacagtacaaggctccagaga

SEQ ID NO: 5057357 - DNA, 25 bp, Homo sapien
ggcagactccaatactgggacagag

SEQ ID NO: 5057358 - DNA, 25 bp, Homo sapien
tcttctgccacgaccatggaactgg

SEQ ID NO: 5057359 - DNA, 25 bp, Homo sapien
gctctgagaaaatcggccagtggca

SEQ ID NO: 5057360 - DNA, 25 bp, Homo sapien
ctgcttcgagcaccgtgagtggtgg

SEQ ID NO: 5057361 - DNA, 25 bp, Homo sapien
acctcccaacaggtgcgtggtccag

SEQ ID NO: 5057362 - DNA, 25 bp, Homo sapien
tgcggcgcgggccttcctactggac

SEQ ID NO: 5057363 - DNA, 25 bp, Homo sapien
gacgctgcggaattgctgcttcgag

SEQ ID NO: 5057364 - DNA, 25 bp, Homo sapien
gacaagcagcgagaacctgatgcag

SEQ ID NO: 5057365 - DNA, 25 bp, Homo sapien
caggtgggacttacacaggcagagc

SEQ ID NO: 5057366 - DNA, 25 bp, Homo sapien
tgatgcagacatccgcaagatgctt

SEQ ID NO: 5057367 - DNA, 25 bp, Homo sapien
gcctgtcgacttgcagtacctgcca

SEQ ID NO: 5057368 - DNA, 25 bp, Homo sapien
tggtagagcccactataggcccagg

SEQ ID NO: 5057369 - DNA, 25 bp, Homo sapien
tcttgcattgggatcctgagggctg

SEQ ID NO: 5057370 - DNA, 25 bp, Homo sapien
taaaactggagcgtcccctatggtc

SEQ ID NO: 5057371 - DNA, 25 bp, Homo sapien
aagagcctccagatgtgcctgcagc

SEQ ID NO: 5057372 - DNA, 25 bp, Homo sapien
gctcagggcccgtattctccttggg

SEQ ID NO: 5057373 - DNA, 25 bp, Homo sapien
caggctggctgctacgagctctaga

SEQ ID NO: 5057374 - DNA, 25 bp, Homo sapien
gatgctcggagttgggactgcacct

SEQ ID NO: 5057375 - DNA, 25 bp, Homo sapien
gctctagaggaccagctgggcagaa

SEQ ID NO: 5057376 - DNA, 25 bp, Homo sapien
cactgaggaagagcgtgttcgctgc

SEQ ID NO: 5057377 - DNA, 25 bp, Homo sapien
cgtgttcgctgcaggcagcatccag

SEQ ID NO: 5057378 - DNA, 25 bp, Homo sapien
agcccccgaatcaagtcctggcact

SEQ ID NO: 5057379 - DNA, 25 bp, Homo sapien
cccaggcatgcgtttgggtgcagct

SEQ ID NO: 5057380 - DNA, 25 bp, Homo sapien
gtgtgggagtgtcatggggtggtgc

SEQ ID NO: 5057381 - DNA, 25 bp, Homo sapien
ctaggcctgagctaggtgtgggagt

SEQ ID NO: 5057382 - DNA, 25 bp, Homo sapien
gggagtgtcatggggtggtgctcac

SEQ ID NO: 5057383 - DNA, 25 bp, Homo sapien
tgggagtgtcatggggtggtgctca

SEQ ID NO: 5057384 - DNA, 25 bp, Homo sapien
gtgggaccgcggtgcatgaggtgca

SEQ ID NO: 5057385 - DNA, 25 bp, Homo sapien
tcccactcaccatggcatagaagat

SEQ ID NO: 5057386 - DNA, 25 bp, Homo sapien
tggccagaaggtgggaccgcggtgc

SEQ ID NO: 5057387 - DNA, 25 bp, Homo sapien
ttcccactcaccatggcatagaaga

SEQ ID NO: 5057388 - DNA, 25 bp, Homo sapien
tcagactccacaggtcggcccattg

SEQ ID NO: 5057389 - DNA, 25 bp, Homo sapien
tgcctggggtcagggctctcagact

SEQ ID NO: 5057390 - DNA, 25 bp, Homo sapien
caggtcggcccattgcctggggtca

SEQ ID NO: 5057391 - DNA, 25 bp, Homo sapien
tccacaggtcggcccattgcctggg

SEQ ID NO: 5057392 - DNA, 25 bp, Homo sapien
ccacaggtcggcccactccccgcta

SEQ ID NO: 5057393 - DNA, 25 bp, Homo sapien
acaggtcggcccactccccgctata

SEQ ID NO: 5057394 - DNA, 25 bp, Homo sapien
caggtcggcccactccccgctatac

SEQ ID NO: 5057395 - DNA, 25 bp, Homo sapien
cacaggtcggcccactccccgctat

SEQ ID NO: 5057396 - DNA, 25 bp, Homo sapien
ccgccgaaagtgctgagcggtgagt

SEQ ID NO: 5057397 - DNA, 25 bp, Homo sapien
tgctgagcggtgagttcctgggccc

SEQ ID NO: 5057398 - DNA, 25 bp, Homo sapien
gtgctgagcggtgagttcctgggcc

SEQ ID NO: 5057399 - DNA, 25 bp, Homo sapien
cgaaagtgctgagcggtgagttcct

SEQ ID NO: 5057400 - DNA, 25 bp, Homo sapien
aggccatggagaagaacatccagca

SEQ ID NO: 5057401 - DNA, 25 bp, Homo sapien
cggtcagcttgagaaggccatggag

SEQ ID NO: 5057402 - DNA, 25 bp, Homo sapien
tggagaagaacatccagcaggatgt

SEQ ID NO: 5057403 - DNA, 25 bp, Homo sapien
agcaggatgttctcgcacttcaggt

SEQ ID NO: 5057404 - DNA, 25 bp, Homo sapien
tgccatggcactaactagctgccag

SEQ ID NO: 5057405 - DNA, 25 bp, Homo sapien
tctgataggtctcatacagctgcac

SEQ ID NO: 5057406 - DNA, 25 bp, Homo sapien
agcacgagccggctgctctgatagg

SEQ ID NO: 5057407 - DNA, 25 bp, Homo sapien
gccggctgctctgataggtctcata

SEQ ID NO: 5057408 - DNA, 25 bp, Homo sapien
aggagcttgcgggagaactccaccg

SEQ ID NO: 5057409 - DNA, 25 bp, Homo sapien
gggcctcggttgtagagacgatctt

SEQ ID NO: 5057410 - DNA, 25 bp, Homo sapien
tgcttgtaggtagcgttgagtgaca

SEQ ID NO: 5057411 - DNA, 25 bp, Homo sapien
tagcgttgagtgacagatctcatgg

SEQ ID NO: 5057412 - DNA, 25 bp, Homo sapien
atgcactcgtgggtggcatcggcca

SEQ ID NO: 5057413 - DNA, 25 bp, Homo sapien
gccaagtacaccttggagaaggccc

SEQ ID NO: 5057414 - DNA, 25 bp, Homo sapien
tagccattgtccttgcactcacgca

SEQ ID NO: 5057415 - DNA, 25 bp, Homo sapien
tcacgcacctgctccgtgaaggttc

SEQ ID NO: 5057416 - DNA, 25 bp, Homo sapien
gggtgtggtggtccagtttcaccag

SEQ ID NO: 5057417 - DNA, 25 bp, Homo sapien
actgcgtccctcttgaggcagcagc

SEQ ID NO: 5057418 - DNA, 25 bp, Homo sapien
ttcaccagtcttggggggcacagct

SEQ ID NO: 5057419 - DNA, 25 bp, Homo sapien
gtgggaactgcgtccctcttgaggc

SEQ ID NO: 5057420 - DNA, 25 bp, Homo sapien
tgatggggctgcaagctcagggcgg

SEQ ID NO: 5057421 - DNA, 25 bp, Homo sapien
tggcacagctctggactgggcaggg

SEQ ID NO: 5057422 - DNA, 25 bp, Homo sapien
gcagggagtgatggggctgcaagct

SEQ ID NO: 5057423 - DNA, 25 bp, Homo sapien
tcagggcgggggctggcacagctct

SEQ ID NO: 5057424 - DNA, 25 bp, Homo sapien
ggacctgcccactctgaggacatct

SEQ ID NO: 5057425 - DNA, 25 bp, Homo sapien
caaagggtgcgtcttcttgttttga

SEQ ID NO: 5057426 - DNA, 25 bp, Homo sapien
tgcattgtgccctcaaagggtgcgt

SEQ ID NO: 5057427 - DNA, 25 bp, Homo sapien
aggacatcttgtgggaccagtcctg

SEQ ID NO: 5057428 - DNA, 25 bp, Homo sapien
cctcaggccttgtttggcaaattgc

SEQ ID NO: 5057429 - DNA, 25 bp, Homo sapien
gcaggatcagaacggccattggctc

SEQ ID NO: 5057430 - DNA, 25 bp, Homo sapien
ccctttgcagtctcgattatccgcg

SEQ ID NO: 5057431 - DNA, 25 bp, Homo sapien
cgattatccgcgtcgttgcctgcac

SEQ ID NO: 5057432 - DNA, 25 bp, Homo sapien
ccgcgagtgtcaagccaagtgatga

SEQ ID NO: 5057433 - DNA, 25 bp, Homo sapien
gggctggcgttcgtttgtgatcgga

SEQ ID NO: 5057434 - DNA, 25 bp, Homo sapien
ttcgtttgtgatcggagtgaaagtg

SEQ ID NO: 5057435 - DNA, 25 bp, Homo sapien
tcccggggcttcattgggcagccgt

SEQ ID NO: 5057436 - DNA, 25 bp, Homo sapien
cttcattgggcagccgtcccgtgcg

SEQ ID NO: 5057437 - DNA, 25 bp, Homo sapien
atcgctcttatcgcgtcccgagttc

SEQ ID NO: 5057438 - DNA, 25 bp, Homo sapien
ccaacgagcgcagggccctgcgagt

SEQ ID NO: 5057439 - DNA, 25 bp, Homo sapien
gcgtgtgcttgcgagcggccgcaac

SEQ ID NO: 5057440 - DNA, 25 bp, Homo sapien
tcgtcagggctgtatgcgtccgacg

SEQ ID NO: 5057441 - DNA, 25 bp, Homo sapien
cgtgtgggaatcgttgtttgcggca

SEQ ID NO: 5057442 - DNA, 25 bp, Homo sapien
cgaggcgagggctggagatgcgtgt

SEQ ID NO: 5057443 - DNA, 25 bp, Homo sapien
agacctcgggtcccggcgaggcgag

SEQ ID NO: 5057444 - DNA, 25 bp, Homo sapien
catggatggagatgtcccgaagacc

SEQ ID NO: 5057445 - DNA, 25 bp, Homo sapien
tggagtcagaagtctaccaagtctc

SEQ ID NO: 5057446 - DNA, 25 bp, Homo sapien
ccagctgagggccattcgcagcttc

SEQ ID NO: 5057447 - DNA, 25 bp, Homo sapien
gagtcagaagtctacaagggtccca

SEQ ID NO: 5057448 - DNA, 25 bp, Homo sapien
tgcatctgtaggacggaagctcctg

SEQ ID NO: 5057449 - DNA, 25 bp, Homo sapien
caaagcaggacatgttgctctgaga

SEQ ID NO: 5057450 - DNA, 25 bp, Homo sapien
gaactgtgctgaagcgatcatccta

SEQ ID NO: 5057451 - DNA, 25 bp, Homo sapien
tgttcgccagacacactgtagaggg

SEQ ID NO: 5057452 - DNA, 25 bp, Homo sapien
tgctgtttccgtggagcctctcact

SEQ ID NO: 5057453 - DNA, 25 bp, Homo sapien
tccggtttgatcatgagatcgcagc

SEQ ID NO: 5057454 - DNA, 25 bp, Homo sapien
cagatctgtgagagaaatcactgtc

SEQ ID NO: 5057455 - DNA, 25 bp, Homo sapien
ctatggcagcaatcgattaattacc

SEQ ID NO: 5057456 - DNA, 25 bp, Homo sapien
caaaatgggcgtcattcctctcaaa

SEQ ID NO: 5057457 - DNA, 25 bp, Homo sapien
tgtagaagcatttaggccggtacca

SEQ ID NO: 5057458 - DNA, 25 bp, Homo sapien
taaaatcggtgcgagcagacagcct

SEQ ID NO: 5057459 - DNA, 25 bp, Homo sapien
gctgtcccagctagaacgtccaata

SEQ ID NO: 5057460 - DNA, 25 bp, Homo sapien
taatttccttgcttagctgtcccag

SEQ ID NO: 5057461 - DNA, 25 bp, Homo sapien
tccgtggcttagtatcctagttcag

SEQ ID NO: 5057462 - DNA, 25 bp, Homo sapien
tccatcaaatgtacgttagccctca

SEQ ID NO: 5057463 - DNA, 25 bp, Homo sapien
cctagcaccgcatctgtccaggaag

SEQ ID NO: 5057464 - DNA, 25 bp, Homo sapien
tcgttgctcctgagagccaggtgaa

SEQ ID NO: 5057465 - DNA, 25 bp, Homo sapien
tctgagctcaggctcgtaaaggcct

SEQ ID NO: 5057466 - DNA, 25 bp, Homo sapien
taccagctctgtttacagatccctg

SEQ ID NO: 5057467 - DNA, 25 bp, Homo sapien
gctcagatctgaggccaagaggcca

SEQ ID NO: 5057468 - DNA, 25 bp, Homo sapien
tgagtagggacgtccctttcaagga

SEQ ID NO: 5057469 - DNA, 25 bp, Homo sapien
ctgtgcactgtttgaggtcatgtcc

SEQ ID NO: 5057470 - DNA, 25 bp, Homo sapien
gcactgtttgaggtcatgtccacgc

SEQ ID NO: 5057471 - DNA, 25 bp, Homo sapien
tgtttgaggtcatgtccacgcctgc

SEQ ID NO: 5057472 - DNA, 25 bp, Homo sapien
tttgaggtcatgtccacgcctgcag

SEQ ID NO: 5057473 - DNA, 25 bp, Homo sapien
ccccaattcaagaaggtgggagcac

SEQ ID NO: 5057474 - DNA, 25 bp, Homo sapien
ccaattcaagaaggtgggagcacca

SEQ ID NO: 5057475 - DNA, 25 bp, Homo sapien
cagggtaaaggctctgttgacttca

SEQ ID NO: 5057476 - DNA, 25 bp, Homo sapien
aaggctctgttgacttcagcacgac

SEQ ID NO: 5057477 - DNA, 25 bp, Homo sapien
tcgggtcagcacgtgtcccttcagc

SEQ ID NO: 5057478 - DNA, 25 bp, Homo sapien
tgaagaggcggacagtcccgtctgc

SEQ ID NO: 5057479 - DNA, 25 bp, Homo sapien
ccccgaggagaagacccacggctgg

SEQ ID NO: 5057480 - DNA, 25 bp, Homo sapien
agcactcccagatctcgggtcagca

SEQ ID NO: 5057481 - DNA, 25 bp, Homo sapien
gcctgacgcaaagagtgggtaccgc

SEQ ID NO: 5057482 - DNA, 25 bp, Homo sapien
gacgatgacactgccgtcgtccgag

SEQ ID NO: 5057483 - DNA, 25 bp, Homo sapien
tgggtaccgcgggtggaaggccaca

SEQ ID NO: 5057484 - DNA, 25 bp, Homo sapien
tgtacaccatgccatggcagacgat

SEQ ID NO: 5057485 - DNA, 25 bp, Homo sapien
tcagcatcctgtatggcttggtgga

SEQ ID NO: 5057486 - DNA, 25 bp, Homo sapien
agcttgctatcgtagctcccacaga

SEQ ID NO: 5057487 - DNA, 25 bp, Homo sapien
gatccaggtcaaaccacaccagctt

SEQ ID NO: 5057488 - DNA, 25 bp, Homo sapien
gctatcgtagctcccacagatgacg

SEQ ID NO: 5057489 - DNA, 25 bp, Homo sapien
aggctggacacccacttgcagttgg

SEQ ID NO: 5057490 - DNA, 25 bp, Homo sapien
gacacccacttgcagttgggcatca

SEQ ID NO: 5057491 - DNA, 25 bp, Homo sapien
gccaggctggacacccacttgcagt

SEQ ID NO: 5057492 - DNA, 25 bp, Homo sapien
gctggacacccacttgcagttgggc

SEQ ID NO: 5057493 - DNA, 25 bp, Homo sapien
ctgggacgccaccaacaggaagggc

SEQ ID NO: 5057494 - DNA, 25 bp, Homo sapien
tgggacgccaccaacaggaagggcc

SEQ ID NO: 5057495 - DNA, 25 bp, Homo sapien
gctcagctggtgaatcagcacctgg

SEQ ID NO: 5057496 - DNA, 25 bp, Homo sapien
ctgtccgtggctgcggcggaacgga

SEQ ID NO: 5057497 - DNA, 25 bp, Homo sapien
ccgtgccaggtcacctgcgtcactg

SEQ ID NO: 5057498 - DNA, 25 bp, Homo sapien
gcggaacggactctggctgcggcga

SEQ ID NO: 5057499 - DNA, 25 bp, Homo sapien
cccacttggcgctcctcctctgagg

SEQ ID NO: 5057500 - DNA, 25 bp, Homo sapien
ggacgaaggcgctcaacagctgatc

SEQ ID NO: 5057501 - DNA, 25 bp, Homo sapien
ttcccgtggcagatgcgcagccgca

SEQ ID NO: 5057502 - DNA, 25 bp, Homo sapien
ctcctcaggcgggacgaaggcgctc

SEQ ID NO: 5057503 - DNA, 25 bp, Homo sapien
cacgggaacagtcctcacacagcgg

SEQ ID NO: 5057504 - DNA, 25 bp, Homo sapien
ccaggccacactcttcaccacgccc

SEQ ID NO: 5057505 - DNA, 25 bp, Homo sapien
gaacagtcctcacacagcgggcagt

SEQ ID NO: 5057506 - DNA, 25 bp, Homo sapien
gagccgcagggagccgtcgtcagag

SEQ ID NO: 5057507 - DNA, 25 bp, Homo sapien
actgaggcaccggacaaggtcactg

SEQ ID NO: 5057508 - DNA, 25 bp, Homo sapien
gagacactgaggcaccggacaaggt

SEQ ID NO: 5057509 - DNA, 25 bp, Homo sapien
tgaggcaccggacaaggtcactgtg

SEQ ID NO: 5057510 - DNA, 25 bp, Homo sapien
gacactgaggcaccggacaaggtca

SEQ ID NO: 5057511 - DNA, 25 bp, Homo sapien
gcaggtccctcggccgaggcagctt

SEQ ID NO: 5057512 - DNA, 25 bp, Homo sapien
ggtccctcggccgaggcagcttggg

SEQ ID NO: 5057513 - DNA, 25 bp, Homo sapien
tgaggtcctcagggtctacattcac

SEQ ID NO: 5057514 - DNA, 25 bp, Homo sapien
agggctgcaggtccctcggccgagg

SEQ ID NO: 5057515 - DNA, 25 bp, Homo sapien
tgtgccacccccctggtgtgccacc

SEQ ID NO: 5057516 - DNA, 25 bp, Homo sapien
cctgtgccacccccctggtgtgcca

SEQ ID NO: 5057517 - DNA, 25 bp, Homo sapien
aggagagcgccaggtcagccttgcc

SEQ ID NO: 5057518 - DNA, 25 bp, Homo sapien
gtgccacccccctggtgtgccaccc

SEQ ID NO: 5057519 - DNA, 25 bp, Homo sapien
gaagcgttcctggatgaagcgtccg

SEQ ID NO: 5057520 - DNA, 25 bp, Homo sapien
gtcaaggcagcgctcgaagcgttcc

SEQ ID NO: 5057521 - DNA, 25 bp, Homo sapien
tgccgtgggcacaggtacaggtcaa

SEQ ID NO: 5057522 - DNA, 25 bp, Homo sapien
cttgcgtggcaaaaagctcagcttc

SEQ ID NO: 5057523 - DNA, 25 bp, Homo sapien
ccgagcacggcgttggggtcctcct

SEQ ID NO: 5057524 - DNA, 25 bp, Homo sapien
tgatggcgtgcaccatgcgagagac

SEQ ID NO: 5057525 - DNA, 25 bp, Homo sapien
agcaggtacgtgcatcttgtggcgc

SEQ ID NO: 5057526 - DNA, 25 bp, Homo sapien
tgggttgtacgactcggcgtggcct

SEQ ID NO: 5057527 - DNA, 25 bp, Homo sapien
gtggatcatgacgtccccgctgaag

SEQ ID NO: 5057528 - DNA, 25 bp, Homo sapien
atgaagctgcgcttgtcggccgggc

SEQ ID NO: 5057529 - DNA, 25 bp, Homo sapien
tccccgctgaagaagtcgacagccg

SEQ ID NO: 5057530 - DNA, 25 bp, Homo sapien
ttctccaccagggaggggatgaagc

SEQ ID NO: 5057531 - DNA, 25 bp, Homo sapien
acctgctcatccgtcagtctcaggt

SEQ ID NO: 5057532 - DNA, 25 bp, Homo sapien
tcataggggttgaagcccacatccc

SEQ ID NO: 5057533 - DNA, 25 bp, Homo sapien
tgtcatcgggtcctgcacggtgcgc

SEQ ID NO: 5057534 - DNA, 25 bp, Homo sapien
tcaggtcccgccctgtcatcgggtc

SEQ ID NO: 5057535 - DNA, 25 bp, Homo sapien
tcgtaccactccaagggcacgttgc

SEQ ID NO: 5057536 - DNA, 25 bp, Homo sapien
tgccatccaggtcgtagcccacgtg

SEQ ID NO: 5057537 - DNA, 25 bp, Homo sapien
agtcaggatcgtccatcttgtccag

SEQ ID NO: 5057538 - DNA, 25 bp, Homo sapien
gggcttgtagatgcgcctgccatcc

SEQ ID NO: 5057539 - DNA, 25 bp, Homo sapien
ggggccaccatgtcggcatctgatc

SEQ ID NO: 5057540 - DNA, 25 bp, Homo sapien
tgcagccgggggccaccatgtcggc

SEQ ID NO: 5057541 - DNA, 25 bp, Homo sapien
cgggggccaccatgtcggcatctga

SEQ ID NO: 5057542 - DNA, 25 bp, Homo sapien
cagccgggggccaccatgtcggcat

SEQ ID NO: 5057543 - DNA, 25 bp, Homo sapien
atgtccttcgccacgctgcgcccgg

SEQ ID NO: 5057544 - DNA, 25 bp, Homo sapien
agcagcgcgcgacagagctgacgcc

SEQ ID NO: 5057545 - DNA, 25 bp, Homo sapien
tgagcagcgcgcgacagagctgacg

SEQ ID NO: 5057546 - DNA, 25 bp, Homo sapien
cgccggccccatgtccttcgccacg

SEQ ID NO: 5057547 - DNA, 25 bp, Homo sapien
tgagcccgctgtcggaggacgagga

SEQ ID NO: 5057548 - DNA, 25 bp, Homo sapien
tcggaggacgaggaccgcggcagcg

SEQ ID NO: 5057549 - DNA, 25 bp, Homo sapien
ctgtaccccgaggtgagcccgctgt

SEQ ID NO: 5057550 - DNA, 25 bp, Homo sapien
gaccgcggcagcgacagctcgggct

SEQ ID NO: 5057551 - DNA, 25 bp, Homo sapien
gtcgcgtgcacgcggcgcgctgcgg

SEQ ID NO: 5057552 - DNA, 25 bp, Homo sapien
ctgtcgcgtgcacgcggcgcgctgc

SEQ ID NO: 5057553 - DNA, 25 bp, Homo sapien
tgtcgcgtgcacgcggcgcgctgcg

SEQ ID NO: 5057554 - DNA, 25 bp, Homo sapien
gcaccaacagcgtgaacacggcctt

SEQ ID NO: 5057555 - DNA, 25 bp, Homo sapien
gcacacggcgaacgcgcgcgagcga

SEQ ID NO: 5057556 - DNA, 25 bp, Homo sapien
gcctccagctacatctcgcacctgg

SEQ ID NO: 5057557 - DNA, 25 bp, Homo sapien
acggcgctgcgcacgctgatcccca

SEQ ID NO: 5057558 - DNA, 25 bp, Homo sapien
aggccacacgggcagggctccccaa

SEQ ID NO: 5057559 - DNA, 25 bp, Homo sapien
ccagtggagtgtggagtcccctgca

SEQ ID NO: 5057560 - DNA, 25 bp, Homo sapien
acacctgtaacacaggcctgccggg

SEQ ID NO: 5057561 - DNA, 25 bp, Homo sapien
agggcgtccctaggacactcggctc

SEQ ID NO: 5057562 - DNA, 25 bp, Homo sapien
ttcttccggccactgtgtgatggca

SEQ ID NO: 5057563 - DNA, 25 bp, Homo sapien
tgcccgggcccactggaactttctg

SEQ ID NO: 5057564 - DNA, 25 bp, Homo sapien
gcagcgggactctgcgctggcccca

SEQ ID NO: 5057565 - DNA, 25 bp, Homo sapien
aactttctgcgctggcttttcttcc

SEQ ID NO: 5057566 - DNA, 25 bp, Homo sapien
ggtagacagtacaaggctccagaga

SEQ ID NO: 5057567 - DNA, 25 bp, Homo sapien
ggcagactccaatactgggacagag

SEQ ID NO: 5057568 - DNA, 25 bp, Homo sapien
tcttctgccacgaccatggaactgg

SEQ ID NO: 5057569 - DNA, 25 bp, Homo sapien
gctctgagaaaatcggccagtggca

SEQ ID NO: 5057570 - DNA, 25 bp, Homo sapien
gcttccggccagacgccgagaccca

SEQ ID NO: 5057571 - DNA, 25 bp, Homo sapien
agcttccggccagacgccgagaccc

SEQ ID NO: 5057572 - DNA, 25 bp, Homo sapien
cttccggccagacgccgagacccat

SEQ ID NO: 5057573 - DNA, 25 bp, Homo sapien
ctgcttcgagcaccgtgagtggtgg

SEQ ID NO: 5057574 - DNA, 25 bp, Homo sapien
acctcccaacaggtgcgtggtccag

SEQ ID NO: 5057575 - DNA, 25 bp, Homo sapien
tgcggcgcgggccttcctactggac

SEQ ID NO: 5057576 - DNA, 25 bp, Homo sapien
gacgctgcggaattgctgcttcgag

SEQ ID NO: 5057577 - DNA, 25 bp, Homo sapien
tggtagagcccactataggcccagg

SEQ ID NO: 5057578 - DNA, 25 bp, Homo sapien
tcttgcattgggatcctgagggctg

SEQ ID NO: 5057579 - DNA, 25 bp, Homo sapien
taaaactggagcgtcccctatggtc

SEQ ID NO: 5057580 - DNA, 25 bp, Homo sapien
aagagcctccagatgtgcctgcagc

SEQ ID NO: 5057581 - DNA, 25 bp, Homo sapien
gctctagaggaccagctgggcagaa

SEQ ID NO: 5057582 - DNA, 25 bp, Homo sapien
gctcagggcccgtattctccttggg

SEQ ID NO: 5057583 - DNA, 25 bp, Homo sapien
caggctggctgctacgagctctaga

SEQ ID NO: 5057584 - DNA, 25 bp, Homo sapien
gatgctcggagttgggactgcacct

SEQ ID NO: 5057585 - DNA, 25 bp, Homo sapien
gtgtgggagtgtcatggggtggtgc

SEQ ID NO: 5057586 - DNA, 25 bp, Homo sapien
gggagtgtcatggggtggtgctcac

SEQ ID NO: 5057587 - DNA, 25 bp, Homo sapien
ctaggcctgagctaggtgtgggagt

SEQ ID NO: 5057588 - DNA, 25 bp, Homo sapien
tgggagtgtcatggggtggtgctca

SEQ ID NO: 5057589 - DNA, 25 bp, Homo sapien
gtgggaccgcggtgcatgaggtgca

SEQ ID NO: 5057590 - DNA, 25 bp, Homo sapien
tggccagaaggtgggaccgcggtgc

SEQ ID NO: 5057591 - DNA, 25 bp, Homo sapien
tcccactcaccatggcatagaagat

SEQ ID NO: 5057592 - DNA, 25 bp, Homo sapien
ttcccactcaccatggcatagaaga

SEQ ID NO: 5057593 - DNA, 25 bp, Homo sapien
tcagactccacaggtcggcccattg

SEQ ID NO: 5057594 - DNA, 25 bp, Homo sapien
tgcctggggtcagggctctcagact

SEQ ID NO: 5057595 - DNA, 25 bp, Homo sapien
caggtcggcccattgcctggggtca

SEQ ID NO: 5057596 - DNA, 25 bp, Homo sapien
tccacaggtcggcccattgcctggg

SEQ ID NO: 5057597 - DNA, 25 bp, Homo sapien
ccgccgaaagtgctgagcggtgagt

SEQ ID NO: 5057598 - DNA, 25 bp, Homo sapien
tgctgagcggtgagttcctgggccc

SEQ ID NO: 5057599 - DNA, 25 bp, Homo sapien
gtgctgagcggtgagttcctgggcc

SEQ ID NO: 5057600 - DNA, 25 bp, Homo sapien
cgaaagtgctgagcggtgagttcct

SEQ ID NO: 5057601 - DNA, 25 bp, Homo sapien
aggccatggagaagaacatccagca

SEQ ID NO: 5057602 - DNA, 25 bp, Homo sapien
cggtcagcttgagaaggccatggag

SEQ ID NO: 5057603 - DNA, 25 bp, Homo sapien
tggagaagaacatccagcaggatgt

SEQ ID NO: 5057604 - DNA, 25 bp, Homo sapien
agcaggatgttctcgcacttcaggt

SEQ ID NO: 5057605 - DNA, 25 bp, Homo sapien
tctgataggtctcatacagctgcac

SEQ ID NO: 5057606 - DNA, 25 bp, Homo sapien
gccggctgctctgataggtctcata

SEQ ID NO: 5057607 - DNA, 25 bp, Homo sapien
agcacgagccggctgctctgatagg

SEQ ID NO: 5057608 - DNA, 25 bp, Homo sapien
tgccatggcactaactagctgccag

SEQ ID NO: 5057609 - DNA, 25 bp, Homo sapien
tccaggatggggttgggctccagcc

SEQ ID NO: 5057610 - DNA, 25 bp, Homo sapien
caggttccaggatggggttgggctc

SEQ ID NO: 5057611 - DNA, 25 bp, Homo sapien
ggttccaggatggggttgggctcca

SEQ ID NO: 5057612 - DNA, 25 bp, Homo sapien
cagatccaggttccaggatggggtt

SEQ ID NO: 5057613 - DNA, 25 bp, Homo sapien
atgcactcgtgggtggcatcggcca

SEQ ID NO: 5057614 - DNA, 25 bp, Homo sapien
gccaagtacaccttggagaaggccc

SEQ ID NO: 5057615 - DNA, 25 bp, Homo sapien
tagccattgtccttgcactcacgca

SEQ ID NO: 5057616 - DNA, 25 bp, Homo sapien
tcacgcacctgctccgtgaaggttc

SEQ ID NO: 5057617 - DNA, 25 bp, Homo sapien
actgcgtccctcttgaggcagcagc

SEQ ID NO: 5057618 - DNA, 25 bp, Homo sapien
gtgggaactgcgtccctcttgaggc

SEQ ID NO: 5057619 - DNA, 25 bp, Homo sapien
ttcaccagtcttggggggcacagct

SEQ ID NO: 5057620 - DNA, 25 bp, Homo sapien
gggtgtggtggtccagtttcaccag

SEQ ID NO: 5057621 - DNA, 25 bp, Homo sapien
caaagggtgcgtcttcttgttttga

SEQ ID NO: 5057622 - DNA, 25 bp, Homo sapien
tgcattgtgccctcaaagggtgcgt

SEQ ID NO: 5057623 - DNA, 25 bp, Homo sapien
aggacatcttgtgggaccagtcctg

SEQ ID NO: 5057624 - DNA, 25 bp, Homo sapien
ggacctgcccactctgaggacatct

SEQ ID NO: 5057625 - DNA, 25 bp, Homo sapien
cctcaggccttgtttggcaaattgc

SEQ ID NO: 5057626 - DNA, 25 bp, Homo sapien
gagacatgtttgcagtaatgctgct

SEQ ID NO: 5057627 - DNA, 25 bp, Homo sapien
gacatgtttgcagtaatgctgcttt

SEQ ID NO: 5057628 - DNA, 25 bp, Homo sapien
catgtttgcagtaatgctgctttgt

SEQ ID NO: 5057629 - DNA, 25 bp, Homo sapien
tgtttgcagtaatgctgctttgtta

SEQ ID NO: 5057630 - DNA, 25 bp, Homo sapien
ccctttgcagtctcgattatccgcg

SEQ ID NO: 5057631 - DNA, 25 bp, Homo sapien
cgattatccgcgtcgttgcctgcac

SEQ ID NO: 5057632 - DNA, 25 bp, Homo sapien
ccgcgagtgtcaagccaagtgatga

SEQ ID NO: 5057633 - DNA, 25 bp, Homo sapien
gcaggatcagaacggccattggctc

SEQ ID NO: 5057634 - DNA, 25 bp, Homo sapien
gggctggcgttcgtttgtgatcgga

SEQ ID NO: 5057635 - DNA, 25 bp, Homo sapien
ttcgtttgtgatcggagtgaaagtg

SEQ ID NO: 5057636 - DNA, 25 bp, Homo sapien
tcccggggcttcattgggcagccgt

SEQ ID NO: 5057637 - DNA, 25 bp, Homo sapien
cttcattgggcagccgtcccgtgcg

SEQ ID NO: 5057638 - DNA, 25 bp, Homo sapien
atcgctcttatcgcgtcccgagttc

SEQ ID NO: 5057639 - DNA, 25 bp, Homo sapien
ccaacgagcgcagggccctgcgagt

SEQ ID NO: 5057640 - DNA, 25 bp, Homo sapien
gcgtgtgcttgcgagcggccgcaac

SEQ ID NO: 5057641 - DNA, 25 bp, Homo sapien
tcgtcagggctgtatgcgtccgacg

SEQ ID NO: 5057642 - DNA, 25 bp, Homo sapien
gggccgagcgtgaggcggagtctgc

SEQ ID NO: 5057643 - DNA, 25 bp, Homo sapien
ccgtggcggccgaactggcgctcaa

SEQ ID NO: 5057644 - DNA, 25 bp, Homo sapien
agcgtgaggcggagtctgcgcactg

SEQ ID NO: 5057645 - DNA, 25 bp, Homo sapien
cgaactggcgctcaacagacgggcg

SEQ ID NO: 5057646 - DNA, 25 bp, Homo sapien
gcccccgaccaataagtgcagagat

SEQ ID NO: 5057647 - DNA, 25 bp, Homo sapien
acgtgcccccgaccaataagtgcag

SEQ ID NO: 5057648 - DNA, 25 bp, Homo sapien
ccgaccaataagtgcagagatcgct

SEQ ID NO: 5057649 - DNA, 25 bp, Homo sapien
ccccgaccaataagtgcagagatcg

SEQ ID NO: 5057650 - DNA, 25 bp, Homo sapien
cgtgtgggaatcgttgtttgcggca

SEQ ID NO: 5057651 - DNA, 25 bp, Homo sapien
cgaggcgagggctggagatgcgtgt

SEQ ID NO: 5057652 - DNA, 25 bp, Homo sapien
agacctcgggtcccggcgaggcgag

SEQ ID NO: 5057653 - DNA, 25 bp, Homo sapien
catggatggagatgtcccgaagacc

SEQ ID NO: 5057654 - DNA, 25 bp, Homo sapien
tccgtggcttagtatcctagttcag

SEQ ID NO: 5057655 - DNA, 25 bp, Homo sapien
tccatcaaatgtacgttagccctca

SEQ ID NO: 5057656 - DNA, 25 bp, Homo sapien
tcgttgctcctgagagccaggtgaa

SEQ ID NO: 5057657 - DNA, 25 bp, Homo sapien
cctagcaccgcatctgtccaggaag

SEQ ID NO: 5057658 - DNA, 25 bp, Homo sapien
tctgagctcaggctcgtaaaggcct

SEQ ID NO: 5057659 - DNA, 25 bp, Homo sapien
taccagctctgtttacagatccctg

SEQ ID NO: 5057660 - DNA, 25 bp, Homo sapien
gctcagatctgaggccaagaggcca

SEQ ID NO: 5057661 - DNA, 25 bp, Homo sapien
tgagtagggacgtccctttcaagga

SEQ ID NO: 5057662 - DNA, 25 bp, Homo sapien
ctgtgcactgtttgaggtcatgtcc

SEQ ID NO: 5057663 - DNA, 25 bp, Homo sapien
tgtttgaggtcatgtccacgcctgc

SEQ ID NO: 5057664 - DNA, 25 bp, Homo sapien
gcactgtttgaggtcatgtccacgc

SEQ ID NO: 5057665 - DNA, 25 bp, Homo sapien
tttgaggtcatgtccacgcctgcag

SEQ ID NO: 5057666 - DNA, 25 bp, Homo sapien
ccccaattcaagaaggtgggagcac

SEQ ID NO: 5057667 - DNA, 25 bp, Homo sapien
ccaattcaagaaggtgggagcacca

SEQ ID NO: 5057668 - DNA, 25 bp, Homo sapien
aaggctctgttgacttcagcacgac

SEQ ID NO: 5057669 - DNA, 25 bp, Homo sapien
cagggtaaaggctctgttgacttca

SEQ ID NO: 5057670 - DNA, 25 bp, Homo sapien
tcgggtcagcacgtgtcccttcagc

SEQ ID NO: 5057671 - DNA, 25 bp, Homo sapien
tgaagaggcggacagtcccgtctgc

SEQ ID NO: 5057672 - DNA, 25 bp, Homo sapien
agcactcccagatctcgggtcagca

SEQ ID NO: 5057673 - DNA, 25 bp, Homo sapien
ccccgaggagaagacccacggctgg

SEQ ID NO: 5057674 - DNA, 25 bp, Homo sapien
tgtggggacgaggagggctcagggc

SEQ ID NO: 5057675 - DNA, 25 bp, Homo sapien
ctgtggggacgaggagggctcaggg

SEQ ID NO: 5057676 - DNA, 25 bp, Homo sapien
gcctgacgcaaagagtgggtaccgc

SEQ ID NO: 5057677 - DNA, 25 bp, Homo sapien
tgtacaccatgccatggcagacgat

SEQ ID NO: 5057678 - DNA, 25 bp, Homo sapien
tgggtaccgcgggtggaaggccaca

SEQ ID NO: 5057679 - DNA, 25 bp, Homo sapien
gacgatgacactgccgtcgtccgag

SEQ ID NO: 5057680 - DNA, 25 bp, Homo sapien
tcagcatcctgtatggcttggtgga

SEQ ID NO: 5057681 - DNA, 25 bp, Homo sapien
gatccaggtcaaaccacaccagctt

SEQ ID NO: 5057682 - DNA, 25 bp, Homo sapien
gctatcgtagctcccacagatgacg

SEQ ID NO: 5057683 - DNA, 25 bp, Homo sapien
agcttgctatcgtagctcccacaga

SEQ ID NO: 5057684 - DNA, 25 bp, Homo sapien
gccaggctggacacccacttgcagt

SEQ ID NO: 5057685 - DNA, 25 bp, Homo sapien
gacacccacttgcagttgggcatca

SEQ ID NO: 5057686 - DNA, 25 bp, Homo sapien
gctggacacccacttgcagttgggc

SEQ ID NO: 5057687 - DNA, 25 bp, Homo sapien
aggctggacacccacttgcagttgg

SEQ ID NO: 5057688 - DNA, 25 bp, Homo sapien
ctgggacgccaccaacaggaagggc

SEQ ID NO: 5057689 - DNA, 25 bp, Homo sapien
tgggacgccaccaacaggaagggcc

SEQ ID NO: 5057690 - DNA, 25 bp, Homo sapien
ctgtccgtggctgcggcggaacgga

SEQ ID NO: 5057691 - DNA, 25 bp, Homo sapien
ccgtgccaggtcacctgcgtcactg

SEQ ID NO: 5057692 - DNA, 25 bp, Homo sapien
gcggaacggactctggctgcggcga

SEQ ID NO: 5057693 - DNA, 25 bp, Homo sapien
gctcagctggtgaatcagcacctgg

SEQ ID NO: 5057694 - DNA, 25 bp, Homo sapien
cccacttggcgctcctcctctgagg

SEQ ID NO: 5057695 - DNA, 25 bp, Homo sapien
ctcctcaggcgggacgaaggcgctc

SEQ ID NO: 5057696 - DNA, 25 bp, Homo sapien
ttcccgtggcagatgcgcagccgca

SEQ ID NO: 5057697 - DNA, 25 bp, Homo sapien
ggacgaaggcgctcaacagctgatc

SEQ ID NO: 5057698 - DNA, 25 bp, Homo sapien
ccaccaggcagacagcggggctggg

SEQ ID NO: 5057699 - DNA, 25 bp, Homo sapien
cagccaccaggcagacagcggggct

SEQ ID NO: 5057700 - DNA, 25 bp, Homo sapien
accaggcagacagcggggctggggt

SEQ ID NO: 5057701 - DNA, 25 bp, Homo sapien
caggcagacagcggggctggggttc

SEQ ID NO: 5057702 - DNA, 25 bp, Homo sapien
gagccgcagggagccgtcgtcagag

SEQ ID NO: 5057703 - DNA, 25 bp, Homo sapien
ccccacgggaacagtcctcacacag

SEQ ID NO: 5057704 - DNA, 25 bp, Homo sapien
cacgggaacagtcctcacacagcgg

SEQ ID NO: 5057705 - DNA, 25 bp, Homo sapien
gaacagtcctcacacagcgggcagt

SEQ ID NO: 5057706 - DNA, 25 bp, Homo sapien
ctgccccccagctcaaggctgcccc

SEQ ID NO: 5057707 - DNA, 25 bp, Homo sapien
tgccccccagctcaaggctgccccc

SEQ ID NO: 5057708 - DNA, 25 bp, Homo sapien
cagctcaaggctgcccccagctcgg

SEQ ID NO: 5057709 - DNA, 25 bp, Homo sapien
aaggctgcccccagctcggacccac

SEQ ID NO: 5057710 - DNA, 25 bp, Homo sapien
actgaggcaccggacaaggtcactg

SEQ ID NO: 5057711 - DNA, 25 bp, Homo sapien
gagacactgaggcaccggacaaggt

SEQ ID NO: 5057712 - DNA, 25 bp, Homo sapien
tgaggcaccggacaaggtcactgtg

SEQ ID NO: 5057713 - DNA, 25 bp, Homo sapien
gacactgaggcaccggacaaggtca

SEQ ID NO: 5057714 - DNA, 25 bp, Homo sapien
gcaggtccctcggccgaggcagctt

SEQ ID NO: 5057715 - DNA, 25 bp, Homo sapien
ggtccctcggccgaggcagcttggg

SEQ ID NO: 5057716 - DNA, 25 bp, Homo sapien
tgaggtcctcagggtctacattcac

SEQ ID NO: 5057717 - DNA, 25 bp, Homo sapien
agggctgcaggtccctcggccgagg

SEQ ID NO: 5057718 - DNA, 25 bp, Homo sapien
aggagagcgccaggtcagccttgcc

SEQ ID NO: 5057719 - DNA, 25 bp, Homo sapien
cctgtgccacccccctggtgtgcca

SEQ ID NO: 5057720 - DNA, 25 bp, Homo sapien
tgtgccacccccctggtgtgccacc

SEQ ID NO: 5057721 - DNA, 25 bp, Homo sapien
gtgccacccccctggtgtgccaccc

SEQ ID NO: 5057722 - DNA, 25 bp, Homo sapien
cttgcgtggcaaaaagctcagcttc

SEQ ID NO: 5057723 - DNA, 25 bp, Homo sapien
gaagcgttcctggatgaagcgtccg

SEQ ID NO: 5057724 - DNA, 25 bp, Homo sapien
gtcaaggcagcgctcgaagcgttcc

SEQ ID NO: 5057725 - DNA, 25 bp, Homo sapien
tgccgtgggcacaggtacaggtcaa

SEQ ID NO: 5057726 - DNA, 25 bp, Homo sapien
tgatggcgtgcaccatgcgagagac

SEQ ID NO: 5057727 - DNA, 25 bp, Homo sapien
ccgagcacggcgttggggtcctcct

SEQ ID NO: 5057728 - DNA, 25 bp, Homo sapien
agcaggtacgtgcatcttgtggcgc

SEQ ID NO: 5057729 - DNA, 25 bp, Homo sapien
tgggttgtacgactcggcgtggcct

SEQ ID NO: 5057730 - DNA, 25 bp, Homo sapien
gtggatcatgacgtccccgctgaag

SEQ ID NO: 5057731 - DNA, 25 bp, Homo sapien
ttctccaccagggaggggatgaagc

SEQ ID NO: 5057732 - DNA, 25 bp, Homo sapien
atgaagctgcgcttgtcggccgggc

SEQ ID NO: 5057733 - DNA, 25 bp, Homo sapien
tccccgctgaagaagtcgacagccg

SEQ ID NO: 5057734 - DNA, 25 bp, Homo sapien
acctgctcatccgtcagtctcaggt

SEQ ID NO: 5057735 - DNA, 25 bp, Homo sapien
tcataggggttgaagcccacatccc

SEQ ID NO: 5057736 - DNA, 25 bp, Homo sapien
tgtcatcgggtcctgcacggtgcgc

SEQ ID NO: 5057737 - DNA, 25 bp, Homo sapien
tcaggtcccgccctgtcatcgggtc

SEQ ID NO: 5057738 - DNA, 25 bp, Homo sapien
tgctggccccaccccaccagccctc

SEQ ID NO: 5057739 - DNA, 25 bp, Homo sapien
ctggccccaccccaccagccctcac

SEQ ID NO: 5057740 - DNA, 25 bp, Homo sapien
gctggccccaccccaccagccctca

SEQ ID NO: 5057741 - DNA, 25 bp, Homo sapien
agtcaggatcgtccatcttgtccag

SEQ ID NO: 5057742 - DNA, 25 bp, Homo sapien
tcgtaccactccaagggcacgttgc

SEQ ID NO: 5057743 - DNA, 25 bp, Homo sapien
tgccatccaggtcgtagcccacgtg

SEQ ID NO: 5057744 - DNA, 25 bp, Homo sapien
gggcttgtagatgcgcctgccatcc

SEQ ID NO: 5057745 - DNA, 25 bp, Homo sapien
ggggccaccatgtcggcatctgatc

SEQ ID NO: 5057746 - DNA, 25 bp, Homo sapien
tgcagccgggggccaccatgtcggc

SEQ ID NO: 5057747 - DNA, 25 bp, Homo sapien
cagccgggggccaccatgtcggcat

SEQ ID NO: 5057748 - DNA, 25 bp, Homo sapien
cgggggccaccatgtcggcatctga

SEQ ID NO: 5057749 - DNA, 25 bp, Homo sapien
tgagcagcgcgcgacagagctgacg

SEQ ID NO: 5057750 - DNA, 25 bp, Homo sapien
atgtccttcgccacgctgcgcccgg

SEQ ID NO: 5057751 - DNA, 25 bp, Homo sapien
agcagcgcgcgacagagctgacgcc

SEQ ID NO: 5057752 - DNA, 25 bp, Homo sapien
cgccggccccatgtccttcgccacg

SEQ ID NO: 5057753 - DNA, 25 bp, Homo sapien
tgagcccgctgtcggaggacgagga

SEQ ID NO: 5057754 - DNA, 25 bp, Homo sapien
tcggaggacgaggaccgcggcagcg

SEQ ID NO: 5057755 - DNA, 25 bp, Homo sapien
ctgtaccccgaggtgagcccgctgt

SEQ ID NO: 5057756 - DNA, 25 bp, Homo sapien
gaccgcggcagcgacagctcgggct

SEQ ID NO: 5057757 - DNA, 25 bp, Homo sapien
gtcgcgtgcacgcggcgcgctgcgg

SEQ ID NO: 5057758 - DNA, 25 bp, Homo sapien
ctgtcgcgtgcacgcggcgcgctgc

SEQ ID NO: 5057759 - DNA, 25 bp, Homo sapien
tgtcgcgtgcacgcggcgcgctgcg

SEQ ID NO: 5057760 - DNA, 25 bp, Homo sapien
gcggcacacggcgaacgcgcgcgag

SEQ ID NO: 5057761 - DNA, 25 bp, Homo sapien
cagcggcacacggcgaacgcgcgcg

SEQ ID NO: 5057762 - DNA, 25 bp, Homo sapien
ggcacacggcgaacgcgcgcgagcg

SEQ ID NO: 5057763 - DNA, 25 bp, Homo sapien
gcacacggcgaacgcgcgcgagcga

SEQ ID NO: 5057764 - DNA, 25 bp, Homo sapien
caacagcgtgaacacggccttcacg

SEQ ID NO: 5057765 - DNA, 25 bp, Homo sapien
acagcgtgaacacggccttcacggc

SEQ ID NO: 5057766 - DNA, 25 bp, Homo sapien
gtgaacacggccttcacggcgctgc

SEQ ID NO: 5057767 - DNA, 25 bp, Homo sapien
acggcgctgcgcacgctgatcccca

SEQ ID NO: 5057768 - DNA, 25 bp, Homo sapien
cctggcctccagctacatctcgcac

SEQ ID NO: 5057769 - DNA, 25 bp, Homo sapien
ctccaagattgagacgctgcgcctg

SEQ ID NO: 5057770 - DNA, 25 bp, Homo sapien
aagattgagacgctgcgcctggcct

SEQ ID NO: 5057771 - DNA, 25 bp, Homo sapien
gcctggcctccagctacatctcgca

SEQ ID NO: 5057772 - DNA, 25 bp, Homo sapien
ctgggcaacgtgctgctggcgggcg

SEQ ID NO: 5057773 - DNA, 25 bp, Homo sapien
tgggcaacgtgctgctggcgggcga

SEQ ID NO: 5057774 - DNA, 25 bp, Homo sapien
tgcggcgacggacagccctgccact

SEQ ID NO: 5057775 - DNA, 25 bp, Homo sapien
cggcgacggacagccctgccactcc

SEQ ID NO: 5057776 - DNA, 25 bp, Homo sapien
gcgacggacagccctgccactccgg

SEQ ID NO: 5057777 - DNA, 25 bp, Homo sapien
ctgcggcgacggacagccctgccac

SEQ ID NO: 5057778 - DNA, 25 bp, Homo sapien
aaagttggtgagcacgggccgtggg

SEQ ID NO: 5057779 - DNA, 25 bp, Homo sapien
cagcaaccagagaaagttggtgagc

SEQ ID NO: 5057780 - DNA, 25 bp, Homo sapien
gcctcagcaaccagagaaagttggt

SEQ ID NO: 5057781 - DNA, 25 bp, Homo sapien
caaccagagaaagttggtgagcacg

SEQ ID NO: 5057782 - DNA, 25 bp, Homo sapien
tcggggggagaccaggtgctgtggc

SEQ ID NO: 5057783 - DNA, 25 bp, Homo sapien
cctcggggggagaccaggtgctgtg

SEQ ID NO: 5057784 - DNA, 25 bp, Homo sapien
ctcggggggagaccaggtgctgtgg

SEQ ID NO: 5057785 - DNA, 25 bp, Homo sapien
gcgggcctgactccgaccgcggctg

SEQ ID NO: 5057786 - DNA, 25 bp, Homo sapien
tgcgggcctgactccgaccgcggct

SEQ ID NO: 5057787 - DNA, 25 bp, Homo sapien
gggcctgactccgaccgcggctgca

SEQ ID NO: 5057788 - DNA, 25 bp, Homo sapien
ctgcgggcctgactccgaccgcggc

SEQ ID NO: 5057789 - DNA, 25 bp, Homo sapien
attcatcacggtcgcctgcgcccac

SEQ ID NO: 5057790 - DNA, 25 bp, Homo sapien
agctgctggcgggacacatgattca

SEQ ID NO: 5057791 - DNA, 25 bp, Homo sapien
gggaacgagctgctggcgggacaca

SEQ ID NO: 5057792 - DNA, 25 bp, Homo sapien
ggcgggacacatgattcatcacggt

SEQ ID NO: 5057793 - DNA, 25 bp, Homo sapien
gccagaggggagaaagccaggtcct

SEQ ID NO: 5057794 - DNA, 25 bp, Homo sapien
aaagccaggtcctgcttagtctcct

SEQ ID NO: 5057795 - DNA, 25 bp, Homo sapien
tactgaaggttccagcaggggtgct

SEQ ID NO: 5057796 - DNA, 25 bp, Homo sapien
gggagaaagccaggtcctgcttagt

SEQ ID NO: 5057797 - DNA, 25 bp, Homo sapien
tgtgaagctccaggcgcggtgggag

SEQ ID NO: 5057798 - DNA, 25 bp, Homo sapien
gatgagatcacgtctgtgaagctcc

SEQ ID NO: 5057799 - DNA, 25 bp, Homo sapien
gctggatgagatcacgtctgtgaag

SEQ ID NO: 5057800 - DNA, 25 bp, Homo sapien
gagatcacgtctgtgaagctccagg

SEQ ID NO: 5057801 - DNA, 25 bp, Homo sapien
cttcaaaagtcagcgtccagcaggg

SEQ ID NO: 5057802 - DNA, 25 bp, Homo sapien
gagctggagtacagctctcctgtga

SEQ ID NO: 5057803 - DNA, 25 bp, Homo sapien
ggaggggaataagacaccaagagct

SEQ ID NO: 5057804 - DNA, 25 bp, Homo sapien
gggctgctcaggtcttcaaaagtca

SEQ ID NO: 5057805 - DNA, 25 bp, Homo sapien
ataaaaaagtagccgacaggatgtg

SEQ ID NO: 5057806 - DNA, 25 bp, Homo sapien
caatcatcatcgatttctcaaaata

SEQ ID NO: 5057807 - DNA, 25 bp, Homo sapien
ggcctccgcgctccgtttacaatca

SEQ ID NO: 5057808 - DNA, 25 bp, Homo sapien
gcgctccgtttacaatcatcatcga

SEQ ID NO: 5057809 - DNA, 25 bp, Homo sapien
cagagctgtcctccgcatactcatc

SEQ ID NO: 5057810 - DNA, 25 bp, Homo sapien
tgtcctccgcatactcatccccaat

SEQ ID NO: 5057811 - DNA, 25 bp, Homo sapien
agctgtcctccgcatactcatcccc

SEQ ID NO: 5057812 - DNA, 25 bp, Homo sapien
catccccaatccgggcgctcgccat

SEQ ID NO: 5057813 - DNA, 25 bp, Homo sapien
tctgtcctcgggcaaggagtgctgg

SEQ ID NO: 5057814 - DNA, 25 bp, Homo sapien
ctctgtcctcgggcaaggagtgctg

SEQ ID NO: 5057815 - DNA, 25 bp, Homo sapien
ctgtcctcgggcaaggagtgctggc

SEQ ID NO: 5057816 - DNA, 25 bp, Homo sapien
acgtccacagcccaggctgacccca

SEQ ID NO: 5057817 - DNA, 25 bp, Homo sapien
cgtccacagcccaggctgaccccat

SEQ ID NO: 5057818 - DNA, 25 bp, Homo sapien
cacgtccacagcccaggctgacccc

SEQ ID NO: 5057819 - DNA, 25 bp, Homo sapien
agacttgtcacccagcgctctgtgc

SEQ ID NO: 5057820 - DNA, 25 bp, Homo sapien
cagggtcctggcaggtgacaaaaga

SEQ ID NO: 5057821 - DNA, 25 bp, Homo sapien
ggccttcgaaggtgctgggttccca

SEQ ID NO: 5057822 - DNA, 25 bp, Homo sapien
gtcctggcaggtgacaaaagacttg

SEQ ID NO: 5057823 - DNA, 25 bp, Homo sapien
ctgtgacaagcagattaaactgata

SEQ ID NO: 5057824 - DNA, 25 bp, Homo sapien
ctcacattcttgactgtgacaagca

SEQ ID NO: 5057825 - DNA, 25 bp, Homo sapien
cattcttgactgtgacaagcagatt

SEQ ID NO: 5057826 - DNA, 25 bp, Homo sapien
cttgactgtgacaagcagattaaac

SEQ ID NO: 5057827 - DNA, 25 bp, Homo sapien
aatgccacgtaattctacacagtcc

SEQ ID NO: 5057828 - DNA, 25 bp, Homo sapien
tcactgaatgccacgtaattctaca

SEQ ID NO: 5057829 - DNA, 25 bp, Homo sapien
tgaatgccacgtaattctacacagt

SEQ ID NO: 5057830 - DNA, 25 bp, Homo sapien
cactgaatgccacgtaattctacac

SEQ ID NO: 5057831 - DNA, 25 bp, Homo sapien
agaaaggaggcagggtcgtgtgcat

SEQ ID NO: 5057832 - DNA, 25 bp, Homo sapien
gcagggtcgtgtgcatgtcaatgct

SEQ ID NO: 5057833 - DNA, 25 bp, Homo sapien
ggaggcagggtcgtgtgcatgtcaa

SEQ ID NO: 5057834 - DNA, 25 bp, Homo sapien
tcgtgtgcatgtcaatgctaaaggc

SEQ ID NO: 5057835 - DNA, 25 bp, Homo sapien
ggaagcctgtggcccggccctgcag

SEQ ID NO: 5057836 - DNA, 25 bp, Homo sapien
gccctgcagccagaagcacgcccac

SEQ ID NO: 5057837 - DNA, 25 bp, Homo sapien
gaaagccagagggaagcctgtggcc

SEQ ID NO: 5057838 - DNA, 25 bp, Homo sapien
ctgagggcagaaagccagagggaag

SEQ ID NO: 5057839 - DNA, 25 bp, Homo sapien
aggtccggagcccttggcaggtcgc

SEQ ID NO: 5057840 - DNA, 25 bp, Homo sapien
gagcccttggcaggtcgccaggtct

SEQ ID NO: 5057841 - DNA, 25 bp, Homo sapien
ttggcaggtcgccaggtctccacag

SEQ ID NO: 5057842 - DNA, 25 bp, Homo sapien
tccccgctacaagggcctcccactg

SEQ ID NO: 5057843 - DNA, 25 bp, Homo sapien
tcagatgcacgaggcagaggccaca

SEQ ID NO: 5057844 - DNA, 25 bp, Homo sapien
gccacaggggccacgtcttgccaac

SEQ ID NO: 5057845 - DNA, 25 bp, Homo sapien
ggccacaggggccacgtcttgccaa

SEQ ID NO: 5057846 - DNA, 25 bp, Homo sapien
ccacaggggccacgtcttgccaacc

SEQ ID NO: 5057847 - DNA, 25 bp, Homo sapien
acgagtggccgtggccaggaccaca

SEQ ID NO: 5057848 - DNA, 25 bp, Homo sapien
cgaggcccatgaaccatctgcaaga

SEQ ID NO: 5057849 - DNA, 25 bp, Homo sapien
tgcaagaccacacgagtggccgtgg

SEQ ID NO: 5057850 - DNA, 25 bp, Homo sapien
gaaccatctgcaagaccacacgagt

SEQ ID NO: 5057851 - DNA, 25 bp, Homo sapien
cagcactgggctgccggctgagttt

SEQ ID NO: 5057852 - DNA, 25 bp, Homo sapien
ctgccggctgagtttccacctgcag

SEQ ID NO: 5057853 - DNA, 25 bp, Homo sapien
agccaagagaacatgcaggaggcag

SEQ ID NO: 5057854 - DNA, 25 bp, Homo sapien
gtggccacgctcatggaagccaaga

SEQ ID NO: 5057855 - DNA, 25 bp, Homo sapien
tggccctcgtcatcaagggctccgt

SEQ ID NO: 5057856 - DNA, 25 bp, Homo sapien
ctcgtcgccttcgtcatcatcctca

SEQ ID NO: 5057857 - DNA, 25 bp, Homo sapien
ttttaatcccactgtggccctcgtc

SEQ ID NO: 5057858 - DNA, 25 bp, Homo sapien
gctcctcagtggtctttttaatccc

SEQ ID NO: 5057859 - DNA, 25 bp, Homo sapien
tccaggcctgagaacacactctcct

SEQ ID NO: 5057860 - DNA, 25 bp, Homo sapien
tctcctcgctgtcggagacgccaga

SEQ ID NO: 5057861 - DNA, 25 bp, Homo sapien
gtcggagacgccagaatcgctgccg

SEQ ID NO: 5057862 - DNA, 25 bp, Homo sapien
tgtcactgccggaatcttccaggcc

SEQ ID NO: 5057863 - DNA, 25 bp, Homo sapien
ctgagaggagaggtgcagaggaggg

SEQ ID NO: 5057864 - DNA, 25 bp, Homo sapien
gaggagaggtgcagaggaggggggg

SEQ ID NO: 5057865 - DNA, 25 bp, Homo sapien
agaggagaggtgcagaggagggggg

SEQ ID NO: 5057866 - DNA, 25 bp, Homo sapien
gagaggagaggtgcagaggaggggg

SEQ ID NO: 5057867 - DNA, 25 bp, Homo sapien
agtcacaaacttccaccaaaagcat

SEQ ID NO: 5057868 - DNA, 25 bp, Homo sapien
cccctccagtcacaaacttccacca

SEQ ID NO: 5057869 - DNA, 25 bp, Homo sapien
ccctccagtcacaaacttccaccaa

SEQ ID NO: 5057870 - DNA, 25 bp, Homo sapien
ccagtcacaaacttccaccaaaagc

SEQ ID NO: 5057871 - DNA, 25 bp, Homo sapien
cacagtgttcgggtccttcactggc

SEQ ID NO: 5057872 - DNA, 25 bp, Homo sapien
gctggctgcgtgacaccggcacaca

SEQ ID NO: 5057873 - DNA, 25 bp, Homo sapien
gcacacacagtgttcgggtccttca

SEQ ID NO: 5057874 - DNA, 25 bp, Homo sapien
tgacaccggcacacacagtgttcgg

SEQ ID NO: 5057875 - DNA, 25 bp, Homo sapien
caggctccagttcgggctcagaccg

SEQ ID NO: 5057876 - DNA, 25 bp, Homo sapien
agttcgggctcagaccgccgcttct

SEQ ID NO: 5057877 - DNA, 25 bp, Homo sapien
gctcaggctccagttcgggctcaga

SEQ ID NO: 5057878 - DNA, 25 bp, Homo sapien
gccgcttctccggccgcacgctcgg

SEQ ID NO: 5057879 - DNA, 25 bp, Homo sapien
gccgcttccgacagcgaccgggccg

SEQ ID NO: 5057880 - DNA, 25 bp, Homo sapien
ccgcttccgacagcgaccgggccgc

SEQ ID NO: 5057881 - DNA, 25 bp, Homo sapien
ttccgacagcgaccgggccgcgtgc

SEQ ID NO: 5057882 - DNA, 25 bp, Homo sapien
gcttccgacagcgaccgggccgcgt

SEQ ID NO: 5057883 - DNA, 25 bp, Homo sapien
gcacttcagcttacgcgcggtgagc

SEQ ID NO: 5057884 - DNA, 25 bp, Homo sapien
gctacgagacccacactcggttcaa

SEQ ID NO: 5057885 - DNA, 25 bp, Homo sapien
taagttgggaaagcggctacgagac

SEQ ID NO: 5057886 - DNA, 25 bp, Homo sapien
acaccgacgcgctcatctgctggag

SEQ ID NO: 5057887 - DNA, 25 bp, Homo sapien
gggtgccaccaagcatgtgtggcct

SEQ ID NO: 5057888 - DNA, 25 bp, Homo sapien
actgatcattgggagcttttggagg

SEQ ID NO: 5057889 - DNA, 25 bp, Homo sapien
tgctgagtgcctcccatttgcacag

SEQ ID NO: 5057890 - DNA, 25 bp, Homo sapien
cttttggaggcaccgtgaccggcag

SEQ ID NO: 5057891 - DNA, 25 bp, Homo sapien
catgagtaactacacccggccaata

SEQ ID NO: 5057892 - DNA, 25 bp, Homo sapien
ggcttaatgttcgtaccaggtgtca

SEQ ID NO: 5057893 - DNA, 25 bp, Homo sapien
ggctcagatgccaccaggcttaatg

SEQ ID NO: 5057894 - DNA, 25 bp, Homo sapien
taagctttgcttgtttcacaggaag

SEQ ID NO: 5057895 - DNA, 25 bp, Homo sapien
cccggctgtgttacactttttgtgg

SEQ ID NO: 5057896 - DNA, 25 bp, Homo sapien
catgcccggctgtgttacacttttt

SEQ ID NO: 5057897 - DNA, 25 bp, Homo sapien
ttctcctactggagcacctcaattg

SEQ ID NO: 5057898 - DNA, 25 bp, Homo sapien
gcacctcaattgactgatcttcatg

SEQ ID NO: 5057899 - DNA, 25 bp, Homo sapien
aaccagcgcagccggctggaaaact

SEQ ID NO: 5057900 - DNA, 25 bp, Homo sapien
gcagccggctggaaaactggaactc

SEQ ID NO: 5057901 - DNA, 25 bp, Homo sapien
ccttcacctccggagctcaagggat

SEQ ID NO: 5057902 - DNA, 25 bp, Homo sapien
cagcgcagccggctggaaaactgga

SEQ ID NO: 5057903 - DNA, 25 bp, Homo sapien
tgctttgtgagtggaaacgtggcca

SEQ ID NO: 5057904 - DNA, 25 bp, Homo sapien
ctttgtgagtggaaacgtggccttc

SEQ ID NO: 5057905 - DNA, 25 bp, Homo sapien
tcctcgggagtaatgaaattagggc

SEQ ID NO: 5057906 - DNA, 25 bp, Homo sapien
gaacgcgactgtgttttcctcggga

SEQ ID NO: 5057907 - DNA, 25 bp, Homo sapien
tgtgagtgccggccctgcacccttg

SEQ ID NO: 5057908 - DNA, 25 bp, Homo sapien
caagaggaaagtgaccagtgtgagt

SEQ ID NO: 5057909 - DNA, 25 bp, Homo sapien
agtgtgagtgccggccctgcaccct

SEQ ID NO: 5057910 - DNA, 25 bp, Homo sapien
catcaagaggaaagtgaccagtgtg

SEQ ID NO: 5057911 - DNA, 25 bp, Homo sapien
caccaagctgctgacggacgtgcag

SEQ ID NO: 5057912 - DNA, 25 bp, Homo sapien
agcattatgggccacagcgggtcct

SEQ ID NO: 5057913 - DNA, 25 bp, Homo sapien
gagtgaagacataaagatccgccag

SEQ ID NO: 5057914 - DNA, 25 bp, Homo sapien
ggaagcaggagtgcatggactccaa

SEQ ID NO: 5057915 - DNA, 25 bp, Homo sapien
accgtcctcccttaacctggctgct

SEQ ID NO: 5057916 - DNA, 25 bp, Homo sapien
ctcaggccttggaagggcggcccaa

SEQ ID NO: 5057917 - DNA, 25 bp, Homo sapien
gccagtgtcgcagcctgaagaaccg

SEQ ID NO: 5057918 - DNA, 25 bp, Homo sapien
tcacaggcttgacagggcccagcct

SEQ ID NO: 5057919 - DNA, 25 bp, Homo sapien
caaggaccccactgtctcctagagg

SEQ ID NO: 5057920 - DNA, 25 bp, Homo sapien
cagtaggacaaacgggctcgggtct

SEQ ID NO: 5057921 - DNA, 25 bp, Homo sapien
gacggacaagacaggcagagatcta

SEQ ID NO: 5057922 - DNA, 25 bp, Homo sapien
tacacacagtggatggacggacaag

SEQ ID NO: 5057923 - DNA, 25 bp, Homo sapien
atgtgcttgcagttctttattgagg

SEQ ID NO: 5057924 - DNA, 25 bp, Homo sapien
gcagttctttattgagggaccaggg

SEQ ID NO: 5057925 - DNA, 25 bp, Homo sapien
tgcttgcagctagctccgtgcctgc

SEQ ID NO: 5057926 - DNA, 25 bp, Homo sapien
cggatgcttgcagctagctccgtgc

SEQ ID NO: 5057927 - DNA, 25 bp, Homo sapien
aggtgttcgcactcggacaggtgat

SEQ ID NO: 5057928 - DNA, 25 bp, Homo sapien
agccagcaccctgtgtaggcacggg

SEQ ID NO: 5057929 - DNA, 25 bp, Homo sapien
cgtagctttagggttctccactcag

SEQ ID NO: 5057930 - DNA, 25 bp, Homo sapien
acgggagcctgtcccgtagctttag

SEQ ID NO: 5057931 - DNA, 25 bp, Homo sapien
cttgttgggccatagctgcaggtct

SEQ ID NO: 5057932 - DNA, 25 bp, Homo sapien
ttaatcaagcagtcaccccagcaag

SEQ ID NO: 5057933 - DNA, 25 bp, Homo sapien
catagccattgtgtaccgtagcccc

SEQ ID NO: 5057934 - DNA, 25 bp, Homo sapien
tccagcttggtggattgcagggcct

SEQ ID NO: 5057935 - DNA, 25 bp, Homo sapien
cagaaaggccctgtggactgcccat

SEQ ID NO: 5057936 - DNA, 25 bp, Homo sapien
agaaaggccctgtggactgcccatc

SEQ ID NO: 5057937 - DNA, 25 bp, Homo sapien
cacggtgggtgcaagttgaccatcc

SEQ ID NO: 5057938 - DNA, 25 bp, Homo sapien
ctgagggccagagtgccgattcccg

SEQ ID NO: 5057939 - DNA, 25 bp, Homo sapien
ggacgcctgagctgagcttttctag

SEQ ID NO: 5057940 - DNA, 25 bp, Homo sapien
tcgcccttgtgggtgtggccatacc

SEQ ID NO: 5057941 - DNA, 25 bp, Homo sapien
acagcactttattgacaccctcgga

SEQ ID NO: 5057942 - DNA, 25 bp, Homo sapien
agcactttattgacaccctcggacc

SEQ ID NO: 5057943 - DNA, 25 bp, Homo sapien
atcagactgtgtctggcctgctgtc

SEQ ID NO: 5057944 - DNA, 25 bp, Homo sapien
tgctgtcgccatccctgaggggtgc

SEQ ID NO: 5057945 - DNA, 25 bp, Homo sapien
tgtccgatgatgagcgacagccaca

SEQ ID NO: 5057946 - DNA, 25 bp, Homo sapien
tcgtggacgtacatgaggacggcta

SEQ ID NO: 5057947 - DNA, 25 bp, Homo sapien
ttgccctggaaaaagcggcccacga

SEQ ID NO: 5057948 - DNA, 25 bp, Homo sapien
cagctgcgttgccatagttgccctg

SEQ ID NO: 5057949 - DNA, 25 bp, Homo sapien
gcggaacattcgcagagggacgctc

SEQ ID NO: 5057950 - DNA, 25 bp, Homo sapien
attcgcagagggacgctcaccaggt

SEQ ID NO: 5057951 - DNA, 25 bp, Homo sapien
gcccagaggcggaacattcgcagag

SEQ ID NO: 5057952 - DNA, 25 bp, Homo sapien
atcatgcccgtgaacgcccagaggc

SEQ ID NO: 5057953 - DNA, 25 bp, Homo sapien
gggatgaggcaagatgccccccaga

SEQ ID NO: 5057954 - DNA, 25 bp, Homo sapien
atgaggcaagatgccccccagagca

SEQ ID NO: 5057955 - DNA, 25 bp, Homo sapien
gcccagggatgaggcaagatgcccc

SEQ ID NO: 5057956 - DNA, 25 bp, Homo sapien
ctgcccagggatgaggcaagatgcc

SEQ ID NO: 5057957 - DNA, 25 bp, Homo sapien
gccccgtcgaagcatgggcttgtag

SEQ ID NO: 5057958 - DNA, 25 bp, Homo sapien
tgccccgtcgaagcatgggcttgta

SEQ ID NO: 5057959 - DNA, 25 bp, Homo sapien
tgctgccccgtcgaagcatgggctt

SEQ ID NO: 5057960 - DNA, 25 bp, Homo sapien
ttgctgctgccccgtcgaagcatgg

SEQ ID NO: 5057961 - DNA, 25 bp, Homo sapien
gcatggaaagcggttcaggttcaca

SEQ ID NO: 5057962 - DNA, 25 bp, Homo sapien
ggcatggaaagcggttcaggttcac

SEQ ID NO: 5057963 - DNA, 25 bp, Homo sapien
catggaaagcggttcaggttcacag

SEQ ID NO: 5057964 - DNA, 25 bp, Homo sapien
tggaaagcggttcaggttcacagcc

SEQ ID NO: 5057965 - DNA, 25 bp, Homo sapien
cacagggatgttccagttctgccag

SEQ ID NO: 5057966 - DNA, 25 bp, Homo sapien
gcacagggatgttccagttctgcca

SEQ ID NO: 5057967 - DNA, 25 bp, Homo sapien
gggccaagagaccacagggggatca

SEQ ID NO: 5057968 - DNA, 25 bp, Homo sapien
agagcacaccatggcccatcccagc

SEQ ID NO: 5057969 - DNA, 25 bp, Homo sapien
ggatcagagcacaccatggcccatc

SEQ ID NO: 5057970 - DNA, 25 bp, Homo sapien
acagggggatcagagcacaccatgg

SEQ ID NO: 5057971 - DNA, 25 bp, Homo sapien
gtagaactcccggtctccaaactgc

SEQ ID NO: 5057972 - DNA, 25 bp, Homo sapien
gaactcccggtctccaaactgcatg

SEQ ID NO: 5057973 - DNA, 25 bp, Homo sapien
agatgagccagatgaggtgattggg

SEQ ID NO: 5057974 - DNA, 25 bp, Homo sapien
aagatgagccagatgaggtgattgg

SEQ ID NO: 5057975 - DNA, 25 bp, Homo sapien
tcctgtcctgtgcatgcgccacctg

SEQ ID NO: 5057976 - DNA, 25 bp, Homo sapien
tgggggtgggcaccaagttctagaa

SEQ ID NO: 5057977 - DNA, 25 bp, Homo sapien
tgtgcatgcgccacctgtccgcact

SEQ ID NO: 5057978 - DNA, 25 bp, Homo sapien
tgggcaccaagttctagaaccttcc

SEQ ID NO: 5057979 - DNA, 25 bp, Homo sapien
aggaggcgctcgatgatgcgtgagt

SEQ ID NO: 5057980 - DNA, 25 bp, Homo sapien
ccagcttcaggaggcgctcgatgat

SEQ ID NO: 5057981 - DNA, 25 bp, Homo sapien
tcaggaggcgctcgatgatgcgtga

SEQ ID NO: 5057982 - DNA, 25 bp, Homo sapien
cttcaggaggcgctcgatgatgcgt

SEQ ID NO: 5057983 - DNA, 25 bp, Homo sapien
gctgcaagagcacctgagccactca

SEQ ID NO: 5057984 - DNA, 25 bp, Homo sapien
agctgcaagagcacctgagccactc

SEQ ID NO: 5057985 - DNA, 25 bp, Homo sapien
cttgaagggcttcatggagttctgg

SEQ ID NO: 5057986 - DNA, 25 bp, Homo sapien
agttctggatggtggggaccatcca

SEQ ID NO: 5057987 - DNA, 25 bp, Homo sapien
atggagttctggatggtggggacca

SEQ ID NO: 5057988 - DNA, 25 bp, Homo sapien
tggagttctggatggtggggaccat

SEQ ID NO: 5057989 - DNA, 25 bp, Homo sapien
atgcccagctacacccaaccctgcc

SEQ ID NO: 5057990 - DNA, 25 bp, Homo sapien
tcagccccacctggagctgggtgaa

SEQ ID NO: 5057991 - DNA, 25 bp, Homo sapien
ctggatcagccccacctggagctgg

SEQ ID NO: 5057992 - DNA, 25 bp, Homo sapien
ctgctggatcagccccacctggagc

SEQ ID NO: 5057993 - DNA, 25 bp, Homo sapien
cagccccacctggagctgggtgaag

SEQ ID NO: 5057994 - DNA, 25 bp, Homo sapien
cagcagaaagcgcttccggatgcgg

SEQ ID NO: 5057995 - DNA, 25 bp, Homo sapien
aagttgagctcgtagcacaaggtgg

SEQ ID NO: 5057996 - DNA, 25 bp, Homo sapien
gggaaagttgagctcgtagcacaag

SEQ ID NO: 5057997 - DNA, 25 bp, Homo sapien
catctcaaggatccgtcgcagcaga

SEQ ID NO: 5057998 - DNA, 25 bp, Homo sapien
cacggtgtgcggggcagcagcactg

SEQ ID NO: 5057999 - DNA, 25 bp, Homo sapien
attgtccgggtagctcacggtgtgc

SEQ ID NO: 5058000 - DNA, 25 bp, Homo sapien
cgcggtaggtcagattgtccgggta

SEQ ID NO: 5058001 - DNA, 25 bp, Homo sapien
gtaggtcagattgtccgggtagctc

SEQ ID NO: 5058002 - DNA, 25 bp, Homo sapien
accatgagttgacgtcgcggtagga

SEQ ID NO: 5058003 - DNA, 25 bp, Homo sapien
ttgacgtcgcggtaggagaagagct

SEQ ID NO: 5058004 - DNA, 25 bp, Homo sapien
aggatggtgtgcgccatcagcgcca

SEQ ID NO: 5058005 - DNA, 25 bp, Homo sapien
ctggccctgcggcaccatgagttga

SEQ ID NO: 5058006 - DNA, 25 bp, Homo sapien
tggctggcccgagacagatgggcag

SEQ ID NO: 5058007 - DNA, 25 bp, Homo sapien
catgcccgtggctggcccgagacag

SEQ ID NO: 5058008 - DNA, 25 bp, Homo sapien
ggagaggtggactcaggcctccaca

SEQ ID NO: 5058009 - DNA, 25 bp, Homo sapien
gccacagccggaggccatgcccgtg

SEQ ID NO: 5058010 - DNA, 25 bp, Homo sapien
aaccagtaagaccacagccgctggg

SEQ ID NO: 5058011 - DNA, 25 bp, Homo sapien
tagactcaaccagtaagaccacagc

SEQ ID NO: 5058012 - DNA, 25 bp, Homo sapien
ccagtaagaccacagccgctgggaa

SEQ ID NO: 5058013 - DNA, 25 bp, Homo sapien
ctggagtgatagactcaaccagtaa

SEQ ID NO: 5058014 - DNA, 25 bp, Homo sapien
aatgcagccacagcaaagacattgg

SEQ ID NO: 5058015 - DNA, 25 bp, Homo sapien
gcagccacagcaaagacattggccg

SEQ ID NO: 5058016 - DNA, 25 bp, Homo sapien
gaatgcagccacagcaaagacattg

SEQ ID NO: 5058017 - DNA, 25 bp, Homo sapien
tggaatgcagccacagcaaagacat

SEQ ID NO: 5058018 - DNA, 25 bp, Homo sapien
acagagaaaccacctggatggggtc

SEQ ID NO: 5058019 - DNA, 25 bp, Homo sapien
caataaccaggcatggggcgggcca

SEQ ID NO: 5058020 - DNA, 25 bp, Homo sapien
cgggccagctatagggatccttcag

SEQ ID NO: 5058021 - DNA, 25 bp, Homo sapien
gggcgggccagctatagggatcctt

SEQ ID NO: 5058022 - DNA, 25 bp, Homo sapien
ctccagaaataaccgggcattgctc

SEQ ID NO: 5058023 - DNA, 25 bp, Homo sapien
gaaataaccgggcattgctcaagat

SEQ ID NO: 5058024 - DNA, 25 bp, Homo sapien
ttctccagaaataaccgggcattgc

SEQ ID NO: 5058025 - DNA, 25 bp, Homo sapien
aggttctccagaaataaccgggcat

SEQ ID NO: 5058026 - DNA, 25 bp, Homo sapien
aagcactaccaacacctccattaag

SEQ ID NO: 5058027 - DNA, 25 bp, Homo sapien
tcgggcctcatgcggtagtgaactg

SEQ ID NO: 5058028 - DNA, 25 bp, Homo sapien
agacctggctgaccacccggagctc

SEQ ID NO: 5058029 - DNA, 25 bp, Homo sapien
gctgggccccaatgccgcagacctg

SEQ ID NO: 5058030 - DNA, 25 bp, Homo sapien
ctggcaagggaacactgagggtgtc

SEQ ID NO: 5058031 - DNA, 25 bp, Homo sapien
caagggaacactgagggtgtcttgc

SEQ ID NO: 5058032 - DNA, 25 bp, Homo sapien
tggcaagggaacactgagggtgtct

SEQ ID NO: 5058033 - DNA, 25 bp, Homo sapien
ggcaagggaacactgagggtgtctt

SEQ ID NO: 5058034 - DNA, 25 bp, Homo sapien
ctgcatggacacgtggcccacactg

SEQ ID NO: 5058035 - DNA, 25 bp, Homo sapien
cactgtcactggcctctcccgaggg

SEQ ID NO: 5058036 - DNA, 25 bp, Homo sapien
gcatggacacgtggcccacactgtc

SEQ ID NO: 5058037 - DNA, 25 bp, Homo sapien
cttctgcatggacacgtggcccaca

SEQ ID NO: 5058038 - DNA, 25 bp, Homo sapien
ccaaagctgccaatggacggtaccc

SEQ ID NO: 5058039 - DNA, 25 bp, Homo sapien
gcagaagccaaagctgccaatggac

SEQ ID NO: 5058040 - DNA, 25 bp, Homo sapien
aaagctgccaatggacggtacccac

SEQ ID NO: 5058041 - DNA, 25 bp, Homo sapien
gaagccaaagctgccaatggacggt

SEQ ID NO: 5058042 - DNA, 25 bp, Homo sapien
cctggggggctcctaggacccacag

SEQ ID NO: 5058043 - DNA, 25 bp, Homo sapien
tcctggggggctcctaggacccaca

SEQ ID NO: 5058044 - DNA, 25 bp, Homo sapien
caggatgccacggtagttgctgaag

SEQ ID NO: 5058045 - DNA, 25 bp, Homo sapien
ggatgccacggtagttgctgaagcc

SEQ ID NO: 5058046 - DNA, 25 bp, Homo sapien
atgccacggtagttgctgaagccac

SEQ ID NO: 5058047 - DNA, 25 bp, Homo sapien
agttcaggatgccacggtagttgct

SEQ ID NO: 5058048 - DNA, 25 bp, Homo sapien
gtactctggctgtggactagcactg

SEQ ID NO: 5058049 - DNA, 25 bp, Homo sapien
tggccactgccatgtactctggctg

SEQ ID NO: 5058050 - DNA, 25 bp, Homo sapien
gccatgtactctggctgtggactag

SEQ ID NO: 5058051 - DNA, 25 bp, Homo sapien
cactgccatgtactctggctgtgga

SEQ ID NO: 5058052 - DNA, 25 bp, Homo sapien
gtgcccacagagctccaagcagtca

SEQ ID NO: 5058053 - DNA, 25 bp, Homo sapien
agagctccaagcagtcagtgcggcc

SEQ ID NO: 5058054 - DNA, 25 bp, Homo sapien
ccagcagcatgtgggctacagggca

SEQ ID NO: 5058055 - DNA, 25 bp, Homo sapien
caagcagtcagtgcggccagcagca

SEQ ID NO: 5058056 - DNA, 25 bp, Homo sapien
gcaggctccctgcacctcgcagacc

SEQ ID NO: 5058057 - DNA, 25 bp, Homo sapien
tgggcctgggttcaagatggttggg

SEQ ID NO: 5058058 - DNA, 25 bp, Homo sapien
ggttggggcaggctccctgcacctc

SEQ ID NO: 5058059 - DNA, 25 bp, Homo sapien
ggctgggcctgggttcaagatggtt

SEQ ID NO: 5058060 - DNA, 25 bp, Homo sapien
cggaagaaaggagctcacacccaga

SEQ ID NO: 5058061 - DNA, 25 bp, Homo sapien
ggaagaaaggagctcacacccagag

SEQ ID NO: 5058062 - DNA, 25 bp, Homo sapien
gccggaagaaaggagctcacaccca

SEQ ID NO: 5058063 - DNA, 25 bp, Homo sapien
ggccggaagaaaggagctcacaccc

SEQ ID NO: 5058064 - DNA, 25 bp, Homo sapien
cacagggcccatagggcacaccgat

SEQ ID NO: 5058065 - DNA, 25 bp, Homo sapien
ggactcggagctcgcgcttcggcca

SEQ ID NO: 5058066 - DNA, 25 bp, Homo sapien
tagcccagggcccatgttctcggac

SEQ ID NO: 5058067 - DNA, 25 bp, Homo sapien
atagggcacaccgatccccgcttag

SEQ ID NO: 5058068 - DNA, 25 bp, Homo sapien
cgcgaccctgtcctccggcgccggg

SEQ ID NO: 5058069 - DNA, 25 bp, Homo sapien
cgcggctcccacgtcggggcccgca

SEQ ID NO: 5058070 - DNA, 25 bp, Homo sapien
acgccggcgtctccgtccttgttgg

SEQ ID NO: 5058071 - DNA, 25 bp, Homo sapien
gtggctcgagggccgcgaccctgtc

SEQ ID NO: 5058072 - DNA, 25 bp, Homo sapien
cacccggccgcagccaagcgtgggc

SEQ ID NO: 5058073 - DNA, 25 bp, Homo sapien
gccgggttcgtagcgcccgaggcgc

SEQ ID NO: 5058074 - DNA, 25 bp, Homo sapien
accagcgcgttcaacccgcccgcgt

SEQ ID NO: 5058075 - DNA, 25 bp, Homo sapien
gccgtagcccgggtgaccgcctcac

SEQ ID NO: 5058076 - DNA, 25 bp, Homo sapien
ggcctcaaggacaacggctgcgttg

SEQ ID NO: 5058077 - DNA, 25 bp, Homo sapien
caacggctgcgttgctccggagccg

SEQ ID NO: 5058078 - DNA, 25 bp, Homo sapien
gcctctctcgtccatttgtagtccg

SEQ ID NO: 5058079 - DNA, 25 bp, Homo sapien
ggccgcctctctcgtccatttgtag

SEQ ID NO: 5058080 - DNA, 25 bp, Homo sapien
acggccgcctctctcgtccatttgt

SEQ ID NO: 5058081 - DNA, 25 bp, Homo sapien
gccgcctctctcgtccatttgtagt

SEQ ID NO: 5058082 - DNA, 25 bp, Homo sapien
ggctgcgggccgcaagtgcgcgcag

SEQ ID NO: 5058083 - DNA, 25 bp, Homo sapien
cgcgcagcgggaacggaccttgcat

SEQ ID NO: 5058084 - DNA, 25 bp, Homo sapien
ctgggagtcgtagtcgccgcggccg

SEQ ID NO: 5058085 - DNA, 25 bp, Homo sapien
ggcgcgccggcgcagagcaccctgg

SEQ ID NO: 5058086 - DNA, 25 bp, Homo sapien
gagccctctggttaccccggcagga

SEQ ID NO: 5058087 - DNA, 25 bp, Homo sapien
ctggcgcgcttctgctccgcgagcc

SEQ ID NO: 5058088 - DNA, 25 bp, Homo sapien
agtaacgtccctggcgcgcttctgc

SEQ ID NO: 5058089 - DNA, 25 bp, Homo sapien
cccggcaggaacctgcttttcttcg

SEQ ID NO: 5058090 - DNA, 25 bp, Homo sapien
ctactcattctgtctagagcccttg

SEQ ID NO: 5058091 - DNA, 25 bp, Homo sapien
ctagagcccttgggcgatggttgca

SEQ ID NO: 5058092 - DNA, 25 bp, Homo sapien
tactcattctgtctagagcccttgg

SEQ ID NO: 5058093 - DNA, 25 bp, Homo sapien
actcattctgtctagagcccttggg

SEQ ID NO: 5058094 - DNA, 25 bp, Homo sapien
ctggaaccggtccaacccagctatc

SEQ ID NO: 5058095 - DNA, 25 bp, Homo sapien
ccatggaggcatccgcagacactgg

SEQ ID NO: 5058096 - DNA, 25 bp, Homo sapien
gctatccatggaggcatccgcagac

SEQ ID NO: 5058097 - DNA, 25 bp, Homo sapien
ggtccaacccagctatccatggagg

SEQ ID NO: 5058098 - DNA, 25 bp, Homo sapien
gcacctcgggccctacttgtagaat

SEQ ID NO: 5058099 - DNA, 25 bp, Homo sapien
cctattccgggtgggaatatgtaca

SEQ ID NO: 5058100 - DNA, 25 bp, Homo sapien
gaatcagtacaaaataggtgctacc

SEQ ID NO: 5058101 - DNA, 25 bp, Homo sapien
tctccttgtggaggtgcggtgctcc

SEQ ID NO: 5058102 - DNA, 25 bp, Homo sapien
gtgcatgcggcacaggtgggcaggc

SEQ ID NO: 5058103 - DNA, 25 bp, Homo sapien
gctttctccttaggtaggtagacag

SEQ ID NO: 5058104 - DNA, 25 bp, Homo sapien
tacctgaattcgctaagtcggttat

SEQ ID NO: 5058105 - DNA, 25 bp, Homo sapien
tcgctaagtcggttattgtgctgct

SEQ ID NO: 5058106 - DNA, 25 bp, Homo sapien
ctgtgcagagcggtgggtcatcctt

SEQ ID NO: 5058107 - DNA, 25 bp, Homo sapien
gcagagcggtgggtcatccttgtgg

SEQ ID NO: 5058108 - DNA, 25 bp, Homo sapien
cagagcggtgggtcatccttgtggg

SEQ ID NO: 5058109 - DNA, 25 bp, Homo sapien
ctgctgtgcagagcggtgggtcatc

SEQ ID NO: 5058110 - DNA, 25 bp, Homo sapien
ttctccagccatggctctgcccctg

SEQ ID NO: 5058111 - DNA, 25 bp, Homo sapien
ttcttctccagccatggctctgccc

SEQ ID NO: 5058112 - DNA, 25 bp, Homo sapien
aggctacagctggcaccttcttctc

SEQ ID NO: 5058113 - DNA, 25 bp, Homo sapien
ccttcttctccagccatggctctgc

SEQ ID NO: 5058114 - DNA, 25 bp, Homo sapien
ggacatggcagatgtgtgttggcca

SEQ ID NO: 5058115 - DNA, 25 bp, Homo sapien
gacatggcagatgtgtgttggccag

SEQ ID NO: 5058116 - DNA, 25 bp, Homo sapien
acatggcagatgtgtgttggccaga

SEQ ID NO: 5058117 - DNA, 25 bp, Homo sapien
gcctaactcaaaggtagagcccagt

SEQ ID NO: 5058118 - DNA, 25 bp, Homo sapien
tgaatgattaatgcctgaaggaggg

SEQ ID NO: 5058119 - DNA, 25 bp, Homo sapien
tcctggcggactcagcaattggcct

SEQ ID NO: 5058120 - DNA, 25 bp, Homo sapien
catgtgaacctagggacctggtctc

SEQ ID NO: 5058121 - DNA, 25 bp, Homo sapien
gggtcgccgccgaggctttggcata

SEQ ID NO: 5058122 - DNA, 25 bp, Homo sapien
catagacgggcgaaagttggcaacc

SEQ ID NO: 5058123 - DNA, 25 bp, Homo sapien
tgcatgcagtgacgtcacaaaggcg

SEQ ID NO: 5058124 - DNA, 25 bp, Homo sapien
cagccccgggtaggatcgggaggag

SEQ ID NO: 5058125 - DNA, 25 bp, Homo sapien
ccgcaaagcgaagacagaggtgtgt

SEQ ID NO: 5058126 - DNA, 25 bp, Homo sapien
gcgtggaaagtaatcccggacatcc

SEQ ID NO: 5058127 - DNA, 25 bp, Homo sapien
gtctgaggaggtcggataagtccat

SEQ ID NO: 5058128 - DNA, 25 bp, Homo sapien
gacccgagtgcaatccgttcataaa

SEQ ID NO: 5058129 - DNA, 25 bp, Homo sapien
gagcgcgaagctcttcttgcagcgc

SEQ ID NO: 5058130 - DNA, 25 bp, Homo sapien
gcccttgaagcaggccgactcgtag

SEQ ID NO: 5058131 - DNA, 25 bp, Homo sapien
gggctgagctgtggcggcgcaggag

SEQ ID NO: 5058132 - DNA, 25 bp, Homo sapien
tcgtagtgcttgttgagataggact

SEQ ID NO: 5058133 - DNA, 25 bp, Homo sapien
ggccatggccggcatggacacgtac

SEQ ID NO: 5058134 - DNA, 25 bp, Homo sapien
caggtgcatggccatggccggcatg

SEQ ID NO: 5058135 - DNA, 25 bp, Homo sapien
gccggcatggacacgtacaccttgc

SEQ ID NO: 5058136 - DNA, 25 bp, Homo sapien
ccatggccggcatggacacgtacac

SEQ ID NO: 5058137 - DNA, 25 bp, Homo sapien
tgcggtgcgtctgcttgtggcggct

SEQ ID NO: 5058138 - DNA, 25 bp, Homo sapien
ggctcaggttcgacgacgtggcgta

SEQ ID NO: 5058139 - DNA, 25 bp, Homo sapien
ctgtccaggctgcggtgcgtctgct

SEQ ID NO: 5058140 - DNA, 25 bp, Homo sapien
gcttgtggcggctcaggttcgacga

SEQ ID NO: 5058141 - DNA, 25 bp, Homo sapien
gcagagccggcattggaagccttac

SEQ ID NO: 5058142 - DNA, 25 bp, Homo sapien
agcggcggcagagccggcattggaa

SEQ ID NO: 5058143 - DNA, 25 bp, Homo sapien
ggcccggatcccaagctgcgcccgc

SEQ ID NO: 5058144 - DNA, 25 bp, Homo sapien
aggctgtggagggagcggcggcaga

SEQ ID NO: 5058145 - DNA, 25 bp, Homo sapien
atgaagaaggcgtccgccgcgtagc

SEQ ID NO: 5058146 - DNA, 25 bp, Homo sapien
agggccccacgtagtcgctgaggta

SEQ ID NO: 5058147 - DNA, 25 bp, Homo sapien
tcggcgtcgccatcgtagacggacg

SEQ ID NO: 5058148 - DNA, 25 bp, Homo sapien
acagctgctgcgtacatgggctccg

SEQ ID NO: 5058149 - DNA, 25 bp, Homo sapien
gcgcgtccgtaggcgctctccaggt

SEQ ID NO: 5058150 - DNA, 25 bp, Homo sapien
ctttatcgtgcagtggcgcgccgag

SEQ ID NO: 5058151 - DNA, 25 bp, Homo sapien
gaacgcgtcaagtttgaccttcttg

SEQ ID NO: 5058152 - DNA, 25 bp, Homo sapien
tccaggtcggccgaagagaacgcgt

SEQ ID NO: 5058153 - DNA, 25 bp, Homo sapien
attcctgcggggctccggcgctgtg

SEQ ID NO: 5058154 - DNA, 25 bp, Homo sapien
cctgcggggctccggcgctgtgggc

SEQ ID NO: 5058155 - DNA, 25 bp, Homo sapien
gattcctgcggggctccggcgctgt

SEQ ID NO: 5058156 - DNA, 25 bp, Homo sapien
ttcctgcggggctccggcgctgtgg

SEQ ID NO: 5058157 - DNA, 25 bp, Homo sapien
tgctgccgcgcgagtggtgtcctct

SEQ ID NO: 5058158 - DNA, 25 bp, Homo sapien
tggatgctgccgcgcgagtggtgtc

SEQ ID NO: 5058159 - DNA, 25 bp, Homo sapien
tttggatgctgccgcgcgagtggtg

SEQ ID NO: 5058160 - DNA, 25 bp, Homo sapien
gatgctgccgcgcgagtggtgtcct

SEQ ID NO: 5058161 - DNA, 25 bp, Homo sapien
taatgcctgaagatccggagagcca

SEQ ID NO: 5058162 - DNA, 25 bp, Homo sapien
tattaacttcctaacaatgggctcc

SEQ ID NO: 5058163 - DNA, 25 bp, Homo sapien
cctaggagtgcgcaacagtggaaga

SEQ ID NO: 5058164 - DNA, 25 bp, Homo sapien
gagttcccagcctctctagtgatgg

SEQ ID NO: 5058165 - DNA, 25 bp, Homo sapien
ttaccgagaacacagtcccgaggtg

SEQ ID NO: 5058166 - DNA, 25 bp, Homo sapien
gaaggccagtgagtgggactcacat

SEQ ID NO: 5058167 - DNA, 25 bp, Homo sapien
gctgaggcagctttattgaaaggaa

SEQ ID NO: 5058168 - DNA, 25 bp, Homo sapien
ggactcacatttgatctgccccaga

SEQ ID NO: 5058169 - DNA, 25 bp, Homo sapien
ggcttgtgacccatggggctcttgc

SEQ ID NO: 5058170 - DNA, 25 bp, Homo sapien
cgggcgatgtaacggcccaagtatt

SEQ ID NO: 5058171 - DNA, 25 bp, Homo sapien
tagttgatgttgagtttccgggcga

SEQ ID NO: 5058172 - DNA, 25 bp, Homo sapien
gccaggtagtcgaagtagttgatgt

SEQ ID NO: 5058173 - DNA, 25 bp, Homo sapien
ccagtggcgaaccacgtgccggtag

SEQ ID NO: 5058174 - DNA, 25 bp, Homo sapien
gacaggacagacccgagtcgccgtc

SEQ ID NO: 5058175 - DNA, 25 bp, Homo sapien
ccgagtcgccgtccaggcgtctcct

SEQ ID NO: 5058176 - DNA, 25 bp, Homo sapien
ggccgggacaggacagacccgagtc

SEQ ID NO: 5058177 - DNA, 25 bp, Homo sapien
gagtcgccgtccaggcgtctccttc

SEQ ID NO: 5058178 - DNA, 25 bp, Homo sapien
gaccgtgttgtatttaccctctgcg

SEQ ID NO: 5058179 - DNA, 25 bp, Homo sapien
gcaccgaagaccgtgttgtatttac

SEQ ID NO: 5058180 - DNA, 25 bp, Homo sapien
tatttaccctctgcgtgcggaaacg

SEQ ID NO: 5058181 - DNA, 25 bp, Homo sapien
ccccagcaccgaagaccgtgttgta

SEQ ID NO: 5058182 - DNA, 25 bp, Homo sapien
cttaaacagtgatcggtgtcatcgt

SEQ ID NO: 5058183 - DNA, 25 bp, Homo sapien
aacagtgatcggtgtcatcgtgtcc

SEQ ID NO: 5058184 - DNA, 25 bp, Homo sapien
tcatcgtgtcctgaggagggcgcgt

SEQ ID NO: 5058185 - DNA, 25 bp, Homo sapien
agggcgcgtgtctgggcgggaccca

SEQ ID NO: 5058186 - DNA, 25 bp, Homo sapien
aggggctccaacctgtggccgccga

SEQ ID NO: 5058187 - DNA, 25 bp, Homo sapien
gccgccgaggaccaggtggaagaag

SEQ ID NO: 5058188 - DNA, 25 bp, Homo sapien
gggctccaacctgtggccgccgagg

SEQ ID NO: 5058189 - DNA, 25 bp, Homo sapien
aggtggaagaagcaccttccgtggg

SEQ ID NO: 5058190 - DNA, 25 bp, Homo sapien
gcggggagagcggacttagccagcc

SEQ ID NO: 5058191 - DNA, 25 bp, Homo sapien
agagcggacttagccagcctggccg

SEQ ID NO: 5058192 - DNA, 25 bp, Homo sapien
ctggccgcccctccgacctcccaag

SEQ ID NO: 5058193 - DNA, 25 bp, Homo sapien
gcccctccgacctcccaagctgcct

SEQ ID NO: 5058194 - DNA, 25 bp, Homo sapien
gcggcagcgacgagatcacgagcca

SEQ ID NO: 5058195 - DNA, 25 bp, Homo sapien
cctggcacacggtgcggccctggat

SEQ ID NO: 5058196 - DNA, 25 bp, Homo sapien
caggcgcacgtagaccagatgcaag

SEQ ID NO: 5058197 - DNA, 25 bp, Homo sapien
tacacgccgcgcgtgtggttcagca

SEQ ID NO: 5058198 - DNA, 25 bp, Homo sapien
ccacgcggagagtctgagcggcgcg

SEQ ID NO: 5058199 - DNA, 25 bp, Homo sapien
gggcgccacgcggagagtctgagcg

SEQ ID NO: 5058200 - DNA, 25 bp, Homo sapien
acgcggagagtctgagcggcgcggg

SEQ ID NO: 5058201 - DNA, 25 bp, Homo sapien
ctgcgggcgccacgcggagagtctg

SEQ ID NO: 5058202 - DNA, 25 bp, Homo sapien
gctgatgatgaagagcagcatcccc

SEQ ID NO: 5058203 - DNA, 25 bp, Homo sapien
acgctgatgatgaagagcagcatcc

SEQ ID NO: 5058204 - DNA, 25 bp, Homo sapien
caggaccacgctgatgatgaagagc

SEQ ID NO: 5058205 - DNA, 25 bp, Homo sapien
tgatgatgaagagcagcatcccctt

SEQ ID NO: 5058206 - DNA, 25 bp, Homo sapien
tgtccaggtagtattcgagcacgaa

SEQ ID NO: 5058207 - DNA, 25 bp, Homo sapien
tccaggtagtattcgagcacgaaga

SEQ ID NO: 5058208 - DNA, 25 bp, Homo sapien
tgtgtccaggtagtattcgagcacg

SEQ ID NO: 5058209 - DNA, 25 bp, Homo sapien
cagtgtgtccaggtagtattcgagc

SEQ ID NO: 5058210 - DNA, 25 bp, Homo sapien
cgcggcgcgtgaggacgccccggcc

SEQ ID NO: 5058211 - DNA, 25 bp, Homo sapien
ctgcccgcagccgggggtggcggtg

SEQ ID NO: 5058212 - DNA, 25 bp, Homo sapien
gggtggcggtgccaaggcttggccc

SEQ ID NO: 5058213 - DNA, 25 bp, Homo sapien
ggtgccaaggcttggcccggactag

SEQ ID NO: 5058214 - DNA, 25 bp, Homo sapien
gtggcggtgccaaggcttggcccgg

SEQ ID NO: 5058215 - DNA, 25 bp, Homo sapien
gaagctattgttcttgaggcgtctg

SEQ ID NO: 5058216 - DNA, 25 bp, Homo sapien
tattgttcttgaggcgtctggccag

SEQ ID NO: 5058217 - DNA, 25 bp, Homo sapien
cacaaatgggtagaagctattgttc

SEQ ID NO: 5058218 - DNA, 25 bp, Homo sapien
tgctgcacaaatgggtagaagctat

SEQ ID NO: 5058219 - DNA, 25 bp, Homo sapien
agctggaagcgccagccgatggagg

SEQ ID NO: 5058220 - DNA, 25 bp, Homo sapien
gatggaggtcgtgggcaggctgccg

SEQ ID NO: 5058221 - DNA, 25 bp, Homo sapien
gccagccgatggaggtcgtgggcag

SEQ ID NO: 5058222 - DNA, 25 bp, Homo sapien
aagcgccagccgatggaggtcgtgg

SEQ ID NO: 5058223 - DNA, 25 bp, Homo sapien
tcagcctggccgctcgtccgctgcc

SEQ ID NO: 5058224 - DNA, 25 bp, Homo sapien
ccactgcccacagcggcactcctac

SEQ ID NO: 5058225 - DNA, 25 bp, Homo sapien
gtggtcagcctggccgctcgtccgc

SEQ ID NO: 5058226 - DNA, 25 bp, Homo sapien
agcctggccgctcgtccgctgccgc

SEQ ID NO: 5058227 - DNA, 25 bp, Homo sapien
caggaaggagcaggagctcacaggc

SEQ ID NO: 5058228 - DNA, 25 bp, Homo sapien
ggaaggagcaggagctcacaggcga

SEQ ID NO: 5058229 - DNA, 25 bp, Homo sapien
cccaggaaggagcaggagctcacag

SEQ ID NO: 5058230 - DNA, 25 bp, Homo sapien
ctgcaggcccaggaaggagcaggag

SEQ ID NO: 5058231 - DNA, 25 bp, Homo sapien
tgtccccgaggacggaacacacaca

SEQ ID NO: 5058232 - DNA, 25 bp, Homo sapien
tccccgaggacggaacacacacact

SEQ ID NO: 5058233 - DNA, 25 bp, Homo sapien
ccccgaggacggaacacacacactg

SEQ ID NO: 5058234 - DNA, 25 bp, Homo sapien
gctgaggtgtcccaggtctgtggct

SEQ ID NO: 5058235 - DNA, 25 bp, Homo sapien
caaatatctgaaattgggcaaaggt

SEQ ID NO: 5058236 - DNA, 25 bp, Homo sapien
caaaggtggagggtgggcaagctgg

SEQ ID NO: 5058237 - DNA, 25 bp, Homo sapien
aatgctcaaatatctgaaattgggc

SEQ ID NO: 5058238 - DNA, 25 bp, Homo sapien
tgggtgaggggctggtgagcagctg

SEQ ID NO: 5058239 - DNA, 25 bp, Homo sapien
ctagctgggtgaggggctggtgagc

SEQ ID NO: 5058240 - DNA, 25 bp, Homo sapien
ctgggtgaggggctggtgagcagct

SEQ ID NO: 5058241 - DNA, 25 bp, Homo sapien
agctgggtgaggggctggtgagcag

SEQ ID NO: 5058242 - DNA, 25 bp, Homo sapien
ggaaggcagcggcaggactccaggt

SEQ ID NO: 5058243 - DNA, 25 bp, Homo sapien
gcaggcccgggcagctgctgatcac

SEQ ID NO: 5058244 - DNA, 25 bp, Homo sapien
caggactccaggttgaggtagagca

SEQ ID NO: 5058245 - DNA, 25 bp, Homo sapien
caggccccggtaggcccgcttcaga

SEQ ID NO: 5058246 - DNA, 25 bp, Homo sapien
tgctggtgttcgacacctggctctg

SEQ ID NO: 5058247 - DNA, 25 bp, Homo sapien
gctctgccacccatagccaccaagg

SEQ ID NO: 5058248 - DNA, 25 bp, Homo sapien
tgggccaggctagggagctgtgcct

SEQ ID NO: 5058249 - DNA, 25 bp, Homo sapien
ggcaggacacaacttccaggcccca

SEQ ID NO: 5058250 - DNA, 25 bp, Homo sapien
tgcccctgaggttaagagagcacag

SEQ ID NO: 5058251 - DNA, 25 bp, Homo sapien
tgacgtgccatacaggcccagatga

SEQ ID NO: 5058252 - DNA, 25 bp, Homo sapien
tgtatggcaccacttctgggtcaaa

SEQ ID NO: 5058253 - DNA, 25 bp, Homo sapien
tcaagtccagttctcgcagtgtatg

SEQ ID NO: 5058254 - DNA, 25 bp, Homo sapien
ctgcagtgaaaggagtgagcataag

SEQ ID NO: 5058255 - DNA, 25 bp, Homo sapien
gcccggccaccacccaggactgctg

SEQ ID NO: 5058256 - DNA, 25 bp, Homo sapien
ccggccaccacccaggactgctgac

SEQ ID NO: 5058257 - DNA, 25 bp, Homo sapien
cgcccggccaccacccaggactgct

SEQ ID NO: 5058258 - DNA, 25 bp, Homo sapien
ccgcccggccaccacccaggactgc

SEQ ID NO: 5058259 - DNA, 25 bp, Homo sapien
gatcctgaaggccagccggcgtgat

SEQ ID NO: 5058260 - DNA, 25 bp, Homo sapien
tcctgaaggccagccggcgtgatgc

SEQ ID NO: 5058261 - DNA, 25 bp, Homo sapien
atggcagatcctgaaggccagccgg

SEQ ID NO: 5058262 - DNA, 25 bp, Homo sapien
gcagatcctgaaggccagccggcgt

SEQ ID NO: 5058263 - DNA, 25 bp, Homo sapien
gccacgaagatccagtaagcgcagg

SEQ ID NO: 5058264 - DNA, 25 bp, Homo sapien
gtaggcggcccaggacctcgttgct

SEQ ID NO: 5058265 - DNA, 25 bp, Homo sapien
agccacatcaggttcaacagccgca

SEQ ID NO: 5058266 - DNA, 25 bp, Homo sapien
tcacaaagttgcaggttgagctcgc

SEQ ID NO: 5058267 - DNA, 25 bp, Homo sapien
gggggagggtgtgacaggtgggaga

SEQ ID NO: 5058268 - DNA, 25 bp, Homo sapien
tgggggagggtgtgacaggtgggag

SEQ ID NO: 5058269 - DNA, 25 bp, Homo sapien
atgggggagggtgtgacaggtggga

SEQ ID NO: 5058270 - DNA, 25 bp, Homo sapien
gatgggggagggtgtgacaggtggg

SEQ ID NO: 5058271 - DNA, 25 bp, Homo sapien
cggttgatgccggtgctcacctcca

SEQ ID NO: 5058272 - DNA, 25 bp, Homo sapien
gctgaaggggaatgctattacggtt

SEQ ID NO: 5058273 - DNA, 25 bp, Homo sapien
gggaatgctattacggttgatgccg

SEQ ID NO: 5058274 - DNA, 25 bp, Homo sapien
ttctgcagagcctcgacaggcagct

SEQ ID NO: 5058275 - DNA, 25 bp, Homo sapien
tctgctcccaccaatgccaacttac

SEQ ID NO: 5058276 - DNA, 25 bp, Homo sapien
ctctgctcccaccaatgccaactta

SEQ ID NO: 5058277 - DNA, 25 bp, Homo sapien
gagggggtaggtcacagggtcagtg

SEQ ID NO: 5058278 - DNA, 25 bp, Homo sapien
ggggtaggtcacagggtcagtggcc

SEQ ID NO: 5058279 - DNA, 25 bp, Homo sapien
cagtgcgcccaggatggctgtcgtc

SEQ ID NO: 5058280 - DNA, 25 bp, Homo sapien
aacttgcgcattcgggaccctgcct

SEQ ID NO: 5058281 - DNA, 25 bp, Homo sapien
ggagctgtaggtcagccacaacttg

SEQ ID NO: 5058282 - DNA, 25 bp, Homo sapien
tccaagaagctcaccacagctgtgg

SEQ ID NO: 5058283 - DNA, 25 bp, Homo sapien
tggggccccaatacaagagcacccg

SEQ ID NO: 5058284 - DNA, 25 bp, Homo sapien
agagcacccgtcaccccggcctggg

SEQ ID NO: 5058285 - DNA, 25 bp, Homo sapien
ggccccaatacaagagcacccgtca

SEQ ID NO: 5058286 - DNA, 25 bp, Homo sapien
aatacaagagcacccgtcaccccgg

SEQ ID NO: 5058287 - DNA, 25 bp, Homo sapien
gctggcagcaggctttggctagcat

SEQ ID NO: 5058288 - DNA, 25 bp, Homo sapien
gccgaggacagcactcacctaccag

SEQ ID NO: 5058289 - DNA, 25 bp, Homo sapien
aagtgagccgaggacagcactcacc

SEQ ID NO: 5058290 - DNA, 25 bp, Homo sapien
tgagccgaggacagcactcacctac

SEQ ID NO: 5058291 - DNA, 25 bp, Homo sapien
agtgagccgaggacagcactcacct

SEQ ID NO: 5058292 - DNA, 25 bp, Homo sapien
acagacaagtggctggtgccaaccc

SEQ ID NO: 5058293 - DNA, 25 bp, Homo sapien
gacatccccacggagcagcgttggg

SEQ ID NO: 5058294 - DNA, 25 bp, Homo sapien
agtactgaacagtcccagagtgtca

SEQ ID NO: 5058295 - DNA, 25 bp, Homo sapien
gagacgacaggctaagatccacaag

SEQ ID NO: 5058296 - DNA, 25 bp, Homo sapien
gggtcagcctctggagctgtgaaaa

SEQ ID NO: 5058297 - DNA, 25 bp, Homo sapien
gacttccagtggatgagggtcagcc

SEQ ID NO: 5058298 - DNA, 25 bp, Homo sapien
tgagacttccagtggatgagggtca

SEQ ID NO: 5058299 - DNA, 25 bp, Homo sapien
tccagtggatgagggtcagcctctg

SEQ ID NO: 5058300 - DNA, 25 bp, Homo sapien
tgcactaatgttcccacacgagtcc

SEQ ID NO: 5058301 - DNA, 25 bp, Homo sapien
tgggccgacagcggaggcagagctg

SEQ ID NO: 5058302 - DNA, 25 bp, Homo sapien
ctgggccgacagcggaggcagagct

SEQ ID NO: 5058303 - DNA, 25 bp, Homo sapien
ggaggcagagctgcactaatgttcc

SEQ ID NO: 5058304 - DNA, 25 bp, Homo sapien
tgcagggagacggaaggagcctgga

SEQ ID NO: 5058305 - DNA, 25 bp, Homo sapien
gcctggagccaggggtaaggaagag

SEQ ID NO: 5058306 - DNA, 25 bp, Homo sapien
ctggagccaggggtaaggaagagag

SEQ ID NO: 5058307 - DNA, 25 bp, Homo sapien
cttggtgcagggagacggaaggagc

SEQ ID NO: 5058308 - DNA, 25 bp, Homo sapien
gggacgacagggtcacggtgtgcca

SEQ ID NO: 5058309 - DNA, 25 bp, Homo sapien
gattgggcataagccactccaggga

SEQ ID NO: 5058310 - DNA, 25 bp, Homo sapien
cagggaagcaaggagcttcttctcc

SEQ ID NO: 5058311 - DNA, 25 bp, Homo sapien
agagcgcgggttgggaagcggcctc

SEQ ID NO: 5058312 - DNA, 25 bp, Homo sapien
tgcgctctcggactgagcggtgcgc

SEQ ID NO: 5058313 - DNA, 25 bp, Homo sapien
agcgcagtagacaccccggctcaaa

SEQ ID NO: 5058314 - DNA, 25 bp, Homo sapien
ggctcaaagccgggctcctgggact

SEQ ID NO: 5058315 - DNA, 25 bp, Homo sapien
agcggtgcgcgctccgatgctttcg

SEQ ID NO: 5058316 - DNA, 25 bp, Homo sapien
cgtgggcgtgggtgccggtgcgggt

SEQ ID NO: 5058317 - DNA, 25 bp, Homo sapien
ttccaagggaatgcggtctccccag

SEQ ID NO: 5058318 - DNA, 25 bp, Homo sapien
gcaccaggatttccaagggaatgcg

SEQ ID NO: 5058319 - DNA, 25 bp, Homo sapien
aacaacccgaaaatctgcaccagga

SEQ ID NO: 5058320 - DNA, 25 bp, Homo sapien
tgcggcgggaagcgcgccgctgtgc

SEQ ID NO: 5058321 - DNA, 25 bp, Homo sapien
gtgcggcgggaagcgcgccgctgtg

SEQ ID NO: 5058322 - DNA, 25 bp, Homo sapien
cagcagcatgctgtcggactgcagc

SEQ ID NO: 5058323 - DNA, 25 bp, Homo sapien
agcatgctgtcggactgcagcaggt

SEQ ID NO: 5058324 - DNA, 25 bp, Homo sapien
gcccctcggcgccagccggtcccac

SEQ ID NO: 5058325 - DNA, 25 bp, Homo sapien
tgcagcaggtggtaccccgagcccc

SEQ ID NO: 5058326 - DNA, 25 bp, Homo sapien
tgcccgggctctgcgtcggacctgc

SEQ ID NO: 5058327 - DNA, 25 bp, Homo sapien
ctgcgtcggacctgccgggaggctg

SEQ ID NO: 5058328 - DNA, 25 bp, Homo sapien
tctgcgtcggacctgccgggaggct

SEQ ID NO: 5058329 - DNA, 25 bp, Homo sapien
ggctctgcgtcggacctgccgggag

SEQ ID NO: 5058330 - DNA, 25 bp, Homo sapien
ggcgaggcttatagaccgacaaccc

SEQ ID NO: 5058331 - DNA, 25 bp, Homo sapien
ccagggagcggaacgggcgaggctt

SEQ ID NO: 5058332 - DNA, 25 bp, Homo sapien
gaacgggcgaggcttatagaccgac

SEQ ID NO: 5058333 - DNA, 25 bp, Homo sapien
cgggcgaggcttatagaccgacaac

SEQ ID NO: 5058334 - DNA, 25 bp, Homo sapien
tctgacttggctcttgcggtcgcgg

SEQ ID NO: 5058335 - DNA, 25 bp, Homo sapien
tgtgcgtggctcctcctggtaggcg

SEQ ID NO: 5058336 - DNA, 25 bp, Homo sapien
tggtggtggcgttgactccagcccc

SEQ ID NO: 5058337 - DNA, 25 bp, Homo sapien
tcgcccacctgacggtaccgagagg

SEQ ID NO: 5058338 - DNA, 25 bp, Homo sapien
ccccatctgcgctcctgcccggggc

SEQ ID NO: 5058339 - DNA, 25 bp, Homo sapien
gcttccctgcctgccggcggtcccg

SEQ ID NO: 5058340 - DNA, 25 bp, Homo sapien
cagcgactcgggccggcttcctgct

SEQ ID NO: 5058341 - DNA, 25 bp, Homo sapien
ggccgcagcgactcgggccggcttc

SEQ ID NO: 5058342 - DNA, 25 bp, Homo sapien
ttcaagctagaagaagtcttcactt

SEQ ID NO: 5058343 - DNA, 25 bp, Homo sapien
cttcccaggagagccaaagcgtgtc

SEQ ID NO: 5058344 - DNA, 25 bp, Homo sapien
ttctgactccggctctgcatcctat

SEQ ID NO: 5058345 - DNA, 25 bp, Homo sapien
caggagagccaaagcgtgtctggcc

SEQ ID NO: 5058346 - DNA, 25 bp, Homo sapien
ggctctcttcggcatgggctcctgg

SEQ ID NO: 5058347 - DNA, 25 bp, Homo sapien
gctctcttcggcatgggctcctggg

SEQ ID NO: 5058348 - DNA, 25 bp, Homo sapien
tccccatccgggtggtgcaggtgct

SEQ ID NO: 5058349 - DNA, 25 bp, Homo sapien
ttgggcatcatgaccctgacatggc

SEQ ID NO: 5058350 - DNA, 25 bp, Homo sapien
gccccagtggcaggacagttgcatt

SEQ ID NO: 5058351 - DNA, 25 bp, Homo sapien
gcatgctgtgcctcgaatgtcactt

SEQ ID NO: 5058352 - DNA, 25 bp, Homo sapien
caggcattatgtggctggacggaaa

SEQ ID NO: 5058353 - DNA, 25 bp, Homo sapien
tcaattcccgaaataatggcattaa

SEQ ID NO: 5058354 - DNA, 25 bp, Homo sapien
ggctggaccctacagtgtcttagtt

SEQ ID NO: 5058355 - DNA, 25 bp, Homo sapien
tggttctggagatttggaggtccaa

SEQ ID NO: 5058356 - DNA, 25 bp, Homo sapien
tcgctgggccacaatacctgctgca

SEQ ID NO: 5058357 - DNA, 25 bp, Homo sapien
gcctcgctgggccacaatacctgct

SEQ ID NO: 5058358 - DNA, 25 bp, Homo sapien
aaagaatggggatacactggcaatc

SEQ ID NO: 5058359 - DNA, 25 bp, Homo sapien
tggggatacactggcaatcgaagag

SEQ ID NO: 5058360 - DNA, 25 bp, Homo sapien
tttattgagtgatacaataggtggg

SEQ ID NO: 5058361 - DNA, 25 bp, Homo sapien
tcataggtagtattagagaaggcaa

SEQ ID NO: 5058362 - DNA, 25 bp, Homo sapien
ggcaggtcataggtagtattagaga

SEQ ID NO: 5058363 - DNA, 25 bp, Homo sapien
gtggagattttattgagtgatacaa

SEQ ID NO: 5058364 - DNA, 25 bp, Homo sapien
tgggtgtggtagcattcacgttcgc

SEQ ID NO: 5058365 - DNA, 25 bp, Homo sapien
tggtagcattcacgttcgcctgtaa

SEQ ID NO: 5058366 - DNA, 25 bp, Homo sapien
gtagcattcacgttcgcctgtaatc

SEQ ID NO: 5058367 - DNA, 25 bp, Homo sapien
tgtggtagcattcacgttcgcctgt

SEQ ID NO: 5058368 - DNA, 25 bp, Homo sapien
caatggcttgatcttggctcactgc

SEQ ID NO: 5058369 - DNA, 25 bp, Homo sapien
tctgtcgtccgggctagagtgcaat

SEQ ID NO: 5058370 - DNA, 25 bp, Homo sapien
tgtctcccgggatgctaaaacagga

SEQ ID NO: 5058371 - DNA, 25 bp, Homo sapien
tgcagggcacacagaatcattgagc

SEQ ID NO: 5058372 - DNA, 25 bp, Homo sapien
caggagacacgccataacagaaggg

SEQ ID NO: 5058373 - DNA, 25 bp, Homo sapien
ccattacagaggaaaggttgccgag

SEQ ID NO: 5058374 - DNA, 25 bp, Homo sapien
ggaggtagttccgtgtgctggtggt

SEQ ID NO: 5058375 - DNA, 25 bp, Homo sapien
gggtgggaggtagttccgtgtgctg

SEQ ID NO: 5058376 - DNA, 25 bp, Homo sapien
tgggaggtagttccgtgtgctggtg

SEQ ID NO: 5058377 - DNA, 25 bp, Homo sapien
ggtagttccgtgtgctggtggtgac

SEQ ID NO: 5058378 - DNA, 25 bp, Homo sapien
tagaagtgggcggtgacgcggtccg

SEQ ID NO: 5058379 - DNA, 25 bp, Homo sapien
acgcggtccgtctccagcaagtcgt

SEQ ID NO: 5058380 - DNA, 25 bp, Homo sapien
gtccgtctccagcaagtcgtccagg

SEQ ID NO: 5058381 - DNA, 25 bp, Homo sapien
gcggtgacgcggtccgtctccagca

SEQ ID NO: 5058382 - DNA, 25 bp, Homo sapien
tggtgtggtgccgatcttcttggct

SEQ ID NO: 5058383 - DNA, 25 bp, Homo sapien
gggtgcggcggtccacgtgcagcat

SEQ ID NO: 5058384 - DNA, 25 bp, Homo sapien
cacgttgcgcacggcattctggagg

SEQ ID NO: 5058385 - DNA, 25 bp, Homo sapien
tcttggctagctcgctgcgctccat

SEQ ID NO: 5058386 - DNA, 25 bp, Homo sapien
agcatcagcagccgccggtaggtct

SEQ ID NO: 5058387 - DNA, 25 bp, Homo sapien
agcagccgccggtaggtcttctcct

SEQ ID NO: 5058388 - DNA, 25 bp, Homo sapien
tgaggccggcgtggtgtggcagcat

SEQ ID NO: 5058389 - DNA, 25 bp, Homo sapien
cgccggtaggtcttctcctgcatgg

SEQ ID NO: 5058390 - DNA, 25 bp, Homo sapien
tgagggttttggtgtgagccaggcc

SEQ ID NO: 5058391 - DNA, 25 bp, Homo sapien
gggtgagggttttggtgtgagccag

SEQ ID NO: 5058392 - DNA, 25 bp, Homo sapien
tagggtgagggttttggtgtgagcc

SEQ ID NO: 5058393 - DNA, 25 bp, Homo sapien
gtagggtgagggttttggtgtgagc

SEQ ID NO: 5058394 - DNA, 25 bp, Homo sapien
ccacacgaccgactttttgctgagc

SEQ ID NO: 5058395 - DNA, 25 bp, Homo sapien
caaaccacgtgatgtgcttattctc

SEQ ID NO: 5058396 - DNA, 25 bp, Homo sapien
acgtggaagtctgcccgacgcagca

SEQ ID NO: 5058397 - DNA, 25 bp, Homo sapien
cagaacgtgttcacgtgggcaccca

SEQ ID NO: 5058398 - DNA, 25 bp, Homo sapien
ctagaccagaaaggcctaggggtca

SEQ ID NO: 5058399 - DNA, 25 bp, Homo sapien
aaggcctaggggtcactgctagccc

SEQ ID NO: 5058400 - DNA, 25 bp, Homo sapien
cagaaaggcctaggggtcactgcta

SEQ ID NO: 5058401 - DNA, 25 bp, Homo sapien
gaccagaaaggcctaggggtcactg

SEQ ID NO: 5058402 - DNA, 25 bp, Homo sapien
tgtacaccatgaggttgcggtcgcg

SEQ ID NO: 5058403 - DNA, 25 bp, Homo sapien
acaccatgaggttgcggtcgcggtc

SEQ ID NO: 5058404 - DNA, 25 bp, Homo sapien
tacaccatgaggttgcggtcgcggt

SEQ ID NO: 5058405 - DNA, 25 bp, Homo sapien
atgtacaccatgaggttgcggtcgc

SEQ ID NO: 5058406 - DNA, 25 bp, Homo sapien
gaggcccagggtcagccccggccac

SEQ ID NO: 5058407 - DNA, 25 bp, Homo sapien
cccggccacccccagagcctcagct

SEQ ID NO: 5058408 - DNA, 25 bp, Homo sapien
cacccccagagcctcagctccccag

SEQ ID NO: 5058409 - DNA, 25 bp, Homo sapien
agcagaggcccagggtcagccccgg

SEQ ID NO: 5058410 - DNA, 25 bp, Homo sapien
aaacccagctgggcattgtccacca

SEQ ID NO: 5058411 - DNA, 25 bp, Homo sapien
aagtccacgctgtacacctccaggg

SEQ ID NO: 5058412 - DNA, 25 bp, Homo sapien
cccagctgggcattgtccaccatga

SEQ ID NO: 5058413 - DNA, 25 bp, Homo sapien
tccaccatgaagtccacgctgtaca

SEQ ID NO: 5058414 - DNA, 25 bp, Homo sapien
cagaggtgccttgggcgggtaccca

SEQ ID NO: 5058415 - DNA, 25 bp, Homo sapien
tcagaggtgccttgggcgggtaccc

SEQ ID NO: 5058416 - DNA, 25 bp, Homo sapien
gaagggggcgtcagaggtgccttgg

SEQ ID NO: 5058417 - DNA, 25 bp, Homo sapien
agacacgagcaccgccgccacaggt

SEQ ID NO: 5058418 - DNA, 25 bp, Homo sapien
ccagacacgagcaccgccgccacag

SEQ ID NO: 5058419 - DNA, 25 bp, Homo sapien
acacgagcaccgccgccacaggtgt

SEQ ID NO: 5058420 - DNA, 25 bp, Homo sapien
acgagcaccgccgccacaggtgtac

SEQ ID NO: 5058421 - DNA, 25 bp, Homo sapien
ccgcgacaccaggctcagcgtcttg

SEQ ID NO: 5058422 - DNA, 25 bp, Homo sapien
ctcctggtagcgcagcagcgaaatg

SEQ ID NO: 5058423 - DNA, 25 bp, Homo sapien
tttcctcctggtagcgcagcagcga

SEQ ID NO: 5058424 - DNA, 25 bp, Homo sapien
tagcgcagcagcgaaatgctcttca

SEQ ID NO: 5058425 - DNA, 25 bp, Homo sapien
gtagagctgcgtgtcgatgaaggcc

SEQ ID NO: 5058426 - DNA, 25 bp, Homo sapien
gtatgtagagctgcgtgtcgatgaa

SEQ ID NO: 5058427 - DNA, 25 bp, Homo sapien
ggtgtatgtagagctgcgtgtcgat

SEQ ID NO: 5058428 - DNA, 25 bp, Homo sapien
agagctgcgtgtcgatgaaggccat

SEQ ID NO: 5058429 - DNA, 25 bp, Homo sapien
ggactttgaacttgttcttggtcaa

SEQ ID NO: 5058430 - DNA, 25 bp, Homo sapien
cattgcagtggcacagggcggtcac

SEQ ID NO: 5058431 - DNA, 25 bp, Homo sapien
ccgacaccaggtggccattgcagtg

SEQ ID NO: 5058432 - DNA, 25 bp, Homo sapien
gctccttctcgtaaaggactttgaa

SEQ ID NO: 5058433 - DNA, 25 bp, Homo sapien
ctcactgcgcagagacactgtcttc

SEQ ID NO: 5058434 - DNA, 25 bp, Homo sapien
tttgaggcccgacacggtctcctca

SEQ ID NO: 5058435 - DNA, 25 bp, Homo sapien
acggtctcctcactgcgcagagaca

SEQ ID NO: 5058436 - DNA, 25 bp, Homo sapien
ggccacgtagcctttgaggcccgac

SEQ ID NO: 5058437 - DNA, 25 bp, Homo sapien
ggagatgagctggatggagaaggcc

SEQ ID NO: 5058438 - DNA, 25 bp, Homo sapien
tggcattgggaatagcctcccagct

SEQ ID NO: 5058439 - DNA, 25 bp, Homo sapien
cctcccagctgaccggggagatgag

SEQ ID NO: 5058440 - DNA, 25 bp, Homo sapien
tgctgggggtggatgtaccgctcat

SEQ ID NO: 5058441 - DNA, 25 bp, Homo sapien
tgggatgcgggcacacggcgtgttg

SEQ ID NO: 5058442 - DNA, 25 bp, Homo sapien
ggcacacggcgtgttggtgctggtg

SEQ ID NO: 5058443 - DNA, 25 bp, Homo sapien
tcatgcgtgggatgcgggcacacgg

SEQ ID NO: 5058444 - DNA, 25 bp, Homo sapien
cgccagtcatgcgtgggatgcgggc

SEQ ID NO: 5058445 - DNA, 25 bp, Homo sapien
cccggccaggcccagaaggtccctg

SEQ ID NO: 5058446 - DNA, 25 bp, Homo sapien
ccaggcccagaaggtccctggtggg

SEQ ID NO: 5058447 - DNA, 25 bp, Homo sapien
cggccaggcccagaaggtccctggt

SEQ ID NO: 5058448 - DNA, 25 bp, Homo sapien
gtggcccggccaggcccagaaggtc

SEQ ID NO: 5058449 - DNA, 25 bp, Homo sapien
tagtgggccgtgcagcgcagcggga

SEQ ID NO: 5058450 - DNA, 25 bp, Homo sapien
tccacgtggtaagccacatagtggg

SEQ ID NO: 5058451 - DNA, 25 bp, Homo sapien
cgtggtaagccacatagtgggccgt

SEQ ID NO: 5058452 - DNA, 25 bp, Homo sapien
aagccacatagtgggccgtgcagcg

SEQ ID NO: 5058453 - DNA, 25 bp, Homo sapien
tgccctctttcatggacagtcctga

SEQ ID NO: 5058454 - DNA, 25 bp, Homo sapien
gcatcccaggcagggtctcaagtga

SEQ ID NO: 5058455 - DNA, 25 bp, Homo sapien
tttggagcaaccaagtcacaggttc

SEQ ID NO: 5058456 - DNA, 25 bp, Homo sapien
tcctcagggtggagccaatggtccc

SEQ ID NO: 5058457 - DNA, 25 bp, Homo sapien
tctgttgaagtacaggaagccgcgg

SEQ ID NO: 5058458 - DNA, 25 bp, Homo sapien
gtctgttgaagtacaggaagccgcg

SEQ ID NO: 5058459 - DNA, 25 bp, Homo sapien
tgtctgttgaagtacaggaagccgc

SEQ ID NO: 5058460 - DNA, 25 bp, Homo sapien
ctgtctgttgaagtacaggaagccg

SEQ ID NO: 5058461 - DNA, 25 bp, Homo sapien
aaatatcctcgaagtagcggaaacg

SEQ ID NO: 5058462 - DNA, 25 bp, Homo sapien
cctctgcgccgccaccttctgcttt

SEQ ID NO: 5058463 - DNA, 25 bp, Homo sapien
tgcgccgccaccttctgctttcttc

SEQ ID NO: 5058464 - DNA, 25 bp, Homo sapien
tatcctcgaagtagcggaaacgcgc

SEQ ID NO: 5058465 - DNA, 25 bp, Homo sapien
tcttaaagcggactttgagattgcc

SEQ ID NO: 5058466 - DNA, 25 bp, Homo sapien
ttgccctggccgagctgagagtcgt

SEQ ID NO: 5058467 - DNA, 25 bp, Homo sapien
taagcagctcttggtccacatgcac

SEQ ID NO: 5058468 - DNA, 25 bp, Homo sapien
ggaaggcctcgtagataagcagctc

SEQ ID NO: 5058469 - DNA, 25 bp, Homo sapien
caccagccgccagtcgggaagctgg

SEQ ID NO: 5058470 - DNA, 25 bp, Homo sapien
gcctcgccctgtgtagtgggctgtc

SEQ ID NO: 5058471 - DNA, 25 bp, Homo sapien
ggctgtccaaaggagctgtccacaa

SEQ ID NO: 5058472 - DNA, 25 bp, Homo sapien
cttgacgaggggcagctccccctgg

SEQ ID NO: 5058473 - DNA, 25 bp, Homo sapien
gggagcccgaatccccatacagcat

SEQ ID NO: 5058474 - DNA, 25 bp, Homo sapien
tgaagagggagcccgaatccccata

SEQ ID NO: 5058475 - DNA, 25 bp, Homo sapien
cagtgggtaggctctgcccggaagg

SEQ ID NO: 5058476 - DNA, 25 bp, Homo sapien
ctctgcccggaagggtgcagggtcc

SEQ ID NO: 5058477 - DNA, 25 bp, Homo sapien
gggactcaagcccctacctgcgccc

SEQ ID NO: 5058478 - DNA, 25 bp, Homo sapien
ctgaggtctcggtacaggcacagcg

SEQ ID NO: 5058479 - DNA, 25 bp, Homo sapien
tgaggtctcggtacaggcacagcgt

SEQ ID NO: 5058480 - DNA, 25 bp, Homo sapien
tgatgaccacataggggtcggccac

SEQ ID NO: 5058481 - DNA, 25 bp, Homo sapien
cggccaccgtaggagtcactcttca

SEQ ID NO: 5058482 - DNA, 25 bp, Homo sapien
gtggtggcggccaccgtaggagtca

SEQ ID NO: 5058483 - DNA, 25 bp, Homo sapien
accacataggggtcggccacggcgc

SEQ ID NO: 5058484 - DNA, 25 bp, Homo sapien
ccaggtccacggggatgaagtgcag

SEQ ID NO: 5058485 - DNA, 25 bp, Homo sapien
cccaggtccacggggatgaagtgca

SEQ ID NO: 5058486 - DNA, 25 bp, Homo sapien
caggcggatgcccagggcccaacca

SEQ ID NO: 5058487 - DNA, 25 bp, Homo sapien
cagcaggcggatgcccagggcccaa

SEQ ID NO: 5058488 - DNA, 25 bp, Homo sapien
tccttccagcaggcggatgcccagg

SEQ ID NO: 5058489 - DNA, 25 bp, Homo sapien
ccttccagcaggcggatgcccaggg

SEQ ID NO: 5058490 - DNA, 25 bp, Homo sapien
cgatgttcccagcaaagaccgtggg

SEQ ID NO: 5058491 - DNA, 25 bp, Homo sapien
cctgagtggcgaagccactggtgtc

SEQ ID NO: 5058492 - DNA, 25 bp, Homo sapien
tgtagcggttgtccccgatgttccc

SEQ ID NO: 5058493 - DNA, 25 bp, Homo sapien
ttccagcaggcggatgcccagtggt

SEQ ID NO: 5058494 - DNA, 25 bp, Homo sapien
tctgcggccgtcgtcgtctgcttca

SEQ ID NO: 5058495 - DNA, 25 bp, Homo sapien
tgcggccgtcgtcgtctgcttcagg

SEQ ID NO: 5058496 - DNA, 25 bp, Homo sapien
tccgtgtctgcggccgtcgtcgtct

SEQ ID NO: 5058497 - DNA, 25 bp, Homo sapien
gtgtctgcggccgtcgtcgtctgct

SEQ ID NO: 5058498 - DNA, 25 bp, Homo sapien
cgggaagctcaaaggttgtcaccac

SEQ ID NO: 5058499 - DNA, 25 bp, Homo sapien
cagccgggaagctcaaaggttgtca

SEQ ID NO: 5058500 - DNA, 25 bp, Homo sapien
agctcaaaggttgtcaccacctggg

SEQ ID NO: 5058501 - DNA, 25 bp, Homo sapien
gaagctcaaaggttgtcaccacctg

SEQ ID NO: 5058502 - DNA, 25 bp, Homo sapien
ggccggagcaaaccacaatctccag

SEQ ID NO: 5058503 - DNA, 25 bp, Homo sapien
cggagcaaaccacaatctccaggtc

SEQ ID NO: 5058504 - DNA, 25 bp, Homo sapien
tcccgtggccggagcaaaccacaat

SEQ ID NO: 5058505 - DNA, 25 bp, Homo sapien
gcagcaccgacaaagccccgttctt

SEQ ID NO: 5058506 - DNA, 25 bp, Homo sapien
aggaaggcaggctcgcccacggcgg

SEQ ID NO: 5058507 - DNA, 25 bp, Homo sapien
cggcggcattggcacagggtccaat

SEQ ID NO: 5058508 - DNA, 25 bp, Homo sapien
ttggcacagggtccaatgttcagga

SEQ ID NO: 5058509 - DNA, 25 bp, Homo sapien
cccacggcggcattggcacagggtc

SEQ ID NO: 5058510 - DNA, 25 bp, Homo sapien
ctgcggcacagcaagagtcaggggc

SEQ ID NO: 5058511 - DNA, 25 bp, Homo sapien
cacagcaagagtcaggggcccgctg

SEQ ID NO: 5058512 - DNA, 25 bp, Homo sapien
gcacagcaagagtcaggggcccgct

SEQ ID NO: 5058513 - DNA, 25 bp, Homo sapien
cggcacagcaagagtcaggggcccg

SEQ ID NO: 5058514 - DNA, 25 bp, Homo sapien
tcgctgccgtacacttcaatctcgt

SEQ ID NO: 5058515 - DNA, 25 bp, Homo sapien
tgaccagccctggaccggccctcac

SEQ ID NO: 5058516 - DNA, 25 bp, Homo sapien
ctgggtcacctggccccgctcctga

SEQ ID NO: 5058517 - DNA, 25 bp, Homo sapien
gagcccacttgagcgcagccctggg

SEQ ID NO: 5058518 - DNA, 25 bp, Homo sapien
tggccccgctcctgaccagccctgg

SEQ ID NO: 5058519 - DNA, 25 bp, Homo sapien
ccggccgtcgcatccactcgcttct

SEQ ID NO: 5058520 - DNA, 25 bp, Homo sapien
ggccgtcgcatccactcgcttcttc

SEQ ID NO: 5058521 - DNA, 25 bp, Homo sapien
gaccagccggccgtcgcatccactc

SEQ ID NO: 5058522 - DNA, 25 bp, Homo sapien
agccggccgtcgcatccactcgctt

SEQ ID NO: 5058523 - DNA, 25 bp, Homo sapien
cttgtcggcagcctcacggacagca

SEQ ID NO: 5058524 - DNA, 25 bp, Homo sapien
ggtacccgggctccatggtgaccat

SEQ ID NO: 5058525 - DNA, 25 bp, Homo sapien
gcttctccgtgtacttgaggaggag

SEQ ID NO: 5058526 - DNA, 25 bp, Homo sapien
agggaattgcccaggcgagaaccca

SEQ ID NO: 5058527 - DNA, 25 bp, Homo sapien
gctgggccgggtctggacccagacc

SEQ ID NO: 5058528 - DNA, 25 bp, Homo sapien
ggctgggccgggtctggacccagac

SEQ ID NO: 5058529 - DNA, 25 bp, Homo sapien
gtgatggctgggccgggtctggacc

SEQ ID NO: 5058530 - DNA, 25 bp, Homo sapien
tgggccgggtctggacccagaccca

SEQ ID NO: 5058531 - DNA, 25 bp, Homo sapien
tcggacactgcgcatgccgtcggtg

SEQ ID NO: 5058532 - DNA, 25 bp, Homo sapien
aaagtggaacgctcggacactgcgc

SEQ ID NO: 5058533 - DNA, 25 bp, Homo sapien
cgccttgtcaaagtggaacgctcgg

SEQ ID NO: 5058534 - DNA, 25 bp, Homo sapien
gacactgcgcatgccgtcggtgatg

SEQ ID NO: 5058535 - DNA, 25 bp, Homo sapien
catcttgtcgtaggagatgaaggtg

SEQ ID NO: 5058536 - DNA, 25 bp, Homo sapien
gcgcagtccagggtgatccgcacac

SEQ ID NO: 5058537 - DNA, 25 bp, Homo sapien
gggtgatccgcacaccctcctgggt

SEQ ID NO: 5058538 - DNA, 25 bp, Homo sapien
tgagggagatgaccatcttgtcgta

SEQ ID NO: 5058539 - DNA, 25 bp, Homo sapien
tggtcaggccgactaggcaggccca

SEQ ID NO: 5058540 - DNA, 25 bp, Homo sapien
ggtggtcaggccgactaggcaggcc

SEQ ID NO: 5058541 - DNA, 25 bp, Homo sapien
ggccgactaggcaggcccaagccgt

SEQ ID NO: 5058542 - DNA, 25 bp, Homo sapien
gtcaggccgactaggcaggcccaag

SEQ ID NO: 5058543 - DNA, 25 bp, Homo sapien
aacagcgagttgacggcaaacacca

SEQ ID NO: 5058544 - DNA, 25 bp, Homo sapien
aaagccgtggttcctgtggtgaggc

SEQ ID NO: 5058545 - DNA, 25 bp, Homo sapien
agagccacgccatacggggggacgc

SEQ ID NO: 5058546 - DNA, 25 bp, Homo sapien
agcgggaaagccgtggttcctgtgg

SEQ ID NO: 5058547 - DNA, 25 bp, Homo sapien
tgcgtgatgttcagtgagatggcca

SEQ ID NO: 5058548 - DNA, 25 bp, Homo sapien
cttctgcgtgatgttcagtgagatg

SEQ ID NO: 5058549 - DNA, 25 bp, Homo sapien
gtgatgttcagtgagatggccacaa

SEQ ID NO: 5058550 - DNA, 25 bp, Homo sapien
cgtgtcctgccgcacggccacgcgc

SEQ ID NO: 5058551 - DNA, 25 bp, Homo sapien
ctagggcccgcacgtcgatgatgta

SEQ ID NO: 5058552 - DNA, 25 bp, Homo sapien
gtaggctcgtagtagccatgcagga

SEQ ID NO: 5058553 - DNA, 25 bp, Homo sapien
tggttgggctcaaacaggatgagga

SEQ ID NO: 5058554 - DNA, 25 bp, Homo sapien
tgagcagcttctcgtctagggcccg

SEQ ID NO: 5058555 - DNA, 25 bp, Homo sapien
tgccgtagacaagcatggctgcaca

SEQ ID NO: 5058556 - DNA, 25 bp, Homo sapien
cgcggcgtgtgtacattctgcacaa

SEQ ID NO: 5058557 - DNA, 25 bp, Homo sapien
cagccgcgtgccgtagacaagcatg

SEQ ID NO: 5058558 - DNA, 25 bp, Homo sapien
cgcactcgcggcgtgtgtacattct

SEQ ID NO: 5058559 - DNA, 25 bp, Homo sapien
tcctcaaagtagtgcagtgacaggg

SEQ ID NO: 5058560 - DNA, 25 bp, Homo sapien
ggctcctcaaagtagtgcagtgaca

SEQ ID NO: 5058561 - DNA, 25 bp, Homo sapien
catgggtgcccgggtcgtactccac

SEQ ID NO: 5058562 - DNA, 25 bp, Homo sapien
tgggtgcccgggtcgtactccacca

SEQ ID NO: 5058563 - DNA, 25 bp, Homo sapien
agggcatcccgcttggctcctgcca

SEQ ID NO: 5058564 - DNA, 25 bp, Homo sapien
cttggcatccttgaagcttaggagc

SEQ ID NO: 5058565 - DNA, 25 bp, Homo sapien
ggacatgacgttgccaaagaaggag

SEQ ID NO: 5058566 - DNA, 25 bp, Homo sapien
gcagcaagctcgagcttctcccggt

SEQ ID NO: 5058567 - DNA, 25 bp, Homo sapien
ctgtgctcctgtcattcttggtcag

SEQ ID NO: 5058568 - DNA, 25 bp, Homo sapien
gtgctcctgtcattcttggtcagag

SEQ ID NO: 5058569 - DNA, 25 bp, Homo sapien
tgtgctcctgtcattcttggtcaga

SEQ ID NO: 5058570 - DNA, 25 bp, Homo sapien
tgctcctgtcattcttggtcagagc

SEQ ID NO: 5058571 - DNA, 25 bp, Homo sapien
tatctgtagctactgatctgcgtgc

SEQ ID NO: 5058572 - DNA, 25 bp, Homo sapien
tcagggttagagtgcactctgtgtc

SEQ ID NO: 5058573 - DNA, 25 bp, Homo sapien
aacctgcctggttgcacacctacag

SEQ ID NO: 5058574 - DNA, 25 bp, Homo sapien
tgggtccaaatgtcacagggcagga

SEQ ID NO: 5058575 - DNA, 25 bp, Homo sapien
ttattccaggaacgcaaaactagat

SEQ ID NO: 5058576 - DNA, 25 bp, Homo sapien
cacaactgggttgagttattccagg

SEQ ID NO: 5058577 - DNA, 25 bp, Homo sapien
tcctcaaaacgcctgcagatgagcc

SEQ ID NO: 5058578 - DNA, 25 bp, Homo sapien
tagatttccgcaagaacagccatcg

SEQ ID NO: 5058579 - DNA, 25 bp, Homo sapien
aaggcattcgtgataaaaactccta

SEQ ID NO: 5058580 - DNA, 25 bp, Homo sapien
aaaaagcatctgataaaggcattcg

SEQ ID NO: 5058581 - DNA, 25 bp, Homo sapien
tctgataaaggcattcgtgataaaa

SEQ ID NO: 5058582 - DNA, 25 bp, Homo sapien
aagcatctgataaaggcattcgtga

SEQ ID NO: 5058583 - DNA, 25 bp, Homo sapien
tctgaataagaggacgtttacaggg

SEQ ID NO: 5058584 - DNA, 25 bp, Homo sapien
aatctgaataagaggacgtttacag

SEQ ID NO: 5058585 - DNA, 25 bp, Homo sapien
ctgaataagaggacgtttacagggt

SEQ ID NO: 5058586 - DNA, 25 bp, Homo sapien
ataagtccctacaagatacttttag

SEQ ID NO: 5058587 - DNA, 25 bp, Homo sapien
cccaaccaagcatcaaagcatcagc

SEQ ID NO: 5058588 - DNA, 25 bp, Homo sapien
aagctgatggggctgctgtttgcct

SEQ ID NO: 5058589 - DNA, 25 bp, Homo sapien
agcatccagtcatgaggcaaaggcc

SEQ ID NO: 5058590 - DNA, 25 bp, Homo sapien
cagcatccagtcatgaggcaaaggc

SEQ ID NO: 5058591 - DNA, 25 bp, Homo sapien
ctcaactgctttgggcctgtgcaca

SEQ ID NO: 5058592 - DNA, 25 bp, Homo sapien
tgggcctgggtaagaggtactcctc

SEQ ID NO: 5058593 - DNA, 25 bp, Homo sapien
ccttcaagagcaatggagaaactgc

SEQ ID NO: 5058594 - DNA, 25 bp, Homo sapien
tttcccaaacccttgaggcgtgtgc

SEQ ID NO: 5058595 - DNA, 25 bp, Homo sapien
gcacagtgggcgttcgctccttccg

SEQ ID NO: 5058596 - DNA, 25 bp, Homo sapien
acagtgggcgttcgctccttccgaa

SEQ ID NO: 5058597 - DNA, 25 bp, Homo sapien
ccagcgcacagtgggcgttcgctcc

SEQ ID NO: 5058598 - DNA, 25 bp, Homo sapien
agcgcacagtgggcgttcgctcctt

SEQ ID NO: 5058599 - DNA, 25 bp, Homo sapien
gcggatgcgcctgtttgtacacggc

SEQ ID NO: 5058600 - DNA, 25 bp, Homo sapien
gaagaagttgcagtacatggagaac

SEQ ID NO: 5058601 - DNA, 25 bp, Homo sapien
cggtacacgtagagctgcgaggtcc

SEQ ID NO: 5058602 - DNA, 25 bp, Homo sapien
aggtcccggccactaccaggttgcg

SEQ ID NO: 5058603 - DNA, 25 bp, Homo sapien
tgcgcaaggccgggagaggaagggt

SEQ ID NO: 5058604 - DNA, 25 bp, Homo sapien
ctgcgcaaggccgggagaggaaggg

SEQ ID NO: 5058605 - DNA, 25 bp, Homo sapien
ggtgagcggggtcgcccacgcagga

SEQ ID NO: 5058606 - DNA, 25 bp, Homo sapien
gagaggaagggtgagcggggtcgcc

SEQ ID NO: 5058607 - DNA, 25 bp, Homo sapien
agaggaaccgggacagcagcgaact

SEQ ID NO: 5058608 - DNA, 25 bp, Homo sapien
gaaggttccgggcttctgcgcctgc

SEQ ID NO: 5058609 - DNA, 25 bp, Homo sapien
agcagcgaactcagtccggccgggc

SEQ ID NO: 5058610 - DNA, 25 bp, Homo sapien
cagttggagccgactcgagaggaac

SEQ ID NO: 5058611 - DNA, 25 bp, Homo sapien
ctgtccgcccgccttgctcactgct

SEQ ID NO: 5058612 - DNA, 25 bp, Homo sapien
accccgcgagcccagcgctgtccgc

SEQ ID NO: 5058613 - DNA, 25 bp, Homo sapien
ccgccgccaacactcccgcggagga

SEQ ID NO: 5058614 - DNA, 25 bp, Homo sapien
aacactcccgcggaggacgcaggac

SEQ ID NO: 5058615 - DNA, 25 bp, Homo sapien
agcttggatcctggatcaggcacgg

SEQ ID NO: 5058616 - DNA, 25 bp, Homo sapien
gccagcttccgggagcttggatcct

SEQ ID NO: 5058617 - DNA, 25 bp, Homo sapien
ggagcttggatcctggatcaggcac

SEQ ID NO: 5058618 - DNA, 25 bp, Homo sapien
ggcccagtgccagcttccgggagct

SEQ ID NO: 5058619 - DNA, 25 bp, Homo sapien
ttaaggtagccctaggaggccacca

SEQ ID NO: 5058620 - DNA, 25 bp, Homo sapien
taagccctcggctgtgtaagcagtt

SEQ ID NO: 5058621 - DNA, 25 bp, Homo sapien
tcagagtcagaagaggctggcgtcc

SEQ ID NO: 5058622 - DNA, 25 bp, Homo sapien
cactcccctcgctaagatggtaaaa

SEQ ID NO: 5058623 - DNA, 25 bp, Homo sapien
tcagaaggtgatgtcatcctcgtac

SEQ ID NO: 5058624 - DNA, 25 bp, Homo sapien
cccgtactttcaacatcgccgggag

SEQ ID NO: 5058625 - DNA, 25 bp, Homo sapien
cgcgggtcccgtactttcaacatcg

SEQ ID NO: 5058626 - DNA, 25 bp, Homo sapien
agcagcaggacggtccagccgccca

SEQ ID NO: 5058627 - DNA, 25 bp, Homo sapien
cccagcaggcccacgttgtgcagca

SEQ ID NO: 5058628 - DNA, 25 bp, Homo sapien
tctgctcagctcccggcccagagca

SEQ ID NO: 5058629 - DNA, 25 bp, Homo sapien
tgggcaccgggtcagcgcccctgct

SEQ ID NO: 5058630 - DNA, 25 bp, Homo sapien
agcaagtgggcaccgggtcagcgcc

SEQ ID NO: 5058631 - DNA, 25 bp, Homo sapien
ctgaggagcaagtgggcaccgggtc

SEQ ID NO: 5058632 - DNA, 25 bp, Homo sapien
agtgcttggcgcacggacagccccg

SEQ ID NO: 5058633 - DNA, 25 bp, Homo sapien
cacgtagagaccagcgaaggccgtg

SEQ ID NO: 5058634 - DNA, 25 bp, Homo sapien
tccaaccgcgagtgccacgtagaga

SEQ ID NO: 5058635 - DNA, 25 bp, Homo sapien
cagagtgctacgtagaggaacaggc

SEQ ID NO: 5058636 - DNA, 25 bp, Homo sapien
gtggcaactcgtggcagaacacggc

SEQ ID NO: 5058637 - DNA, 25 bp, Homo sapien
agagtgatcatatagggcagtagcc

SEQ ID NO: 5058638 - DNA, 25 bp, Homo sapien
acggccagcccgtcggcgaagttgt

SEQ ID NO: 5058639 - DNA, 25 bp, Homo sapien
gcgaagttgtgcacggcgtcgccca

SEQ ID NO: 5058640 - DNA, 25 bp, Homo sapien
gtcgcctaccgccaagccttgggcc

SEQ ID NO: 5058641 - DNA, 25 bp, Homo sapien
cgggcgcagaggcccgtgggttcgc

SEQ ID NO: 5058642 - DNA, 25 bp, Homo sapien
ggttcgcgtggcctgtcgcctaccg

SEQ ID NO: 5058643 - DNA, 25 bp, Homo sapien
gccccacccgcgctccacacaaacc

SEQ ID NO: 5058644 - DNA, 25 bp, Homo sapien
gggctcagggttcagcagctccggg

SEQ ID NO: 5058645 - DNA, 25 bp, Homo sapien
cctgggctcagggttcagcagctcc

SEQ ID NO: 5058646 - DNA, 25 bp, Homo sapien
gggttcagcagctccgggctctcct

SEQ ID NO: 5058647 - DNA, 25 bp, Homo sapien
tcagggttcagcagctccgggctct

SEQ ID NO: 5058648 - DNA, 25 bp, Homo sapien
aggtctgcgcgggagccctcgtggg

SEQ ID NO: 5058649 - DNA, 25 bp, Homo sapien
ggtctgcgcgggagccctcgtgggg

SEQ ID NO: 5058650 - DNA, 25 bp, Homo sapien
ggcccccgtggctatggctgctgtg

SEQ ID NO: 5058651 - DNA, 25 bp, Homo sapien
caggtctgcgcgggagccctcgtgg

SEQ ID NO: 5058652 - DNA, 25 bp, Homo sapien
gctgaggccctcttcgctgtgtgta

SEQ ID NO: 5058653 - DNA, 25 bp, Homo sapien
caggagattgaagaggttctcaaac

SEQ ID NO: 5058654 - DNA, 25 bp, Homo sapien
ccagcatagccaggaggcgccaggt

SEQ ID NO: 5058655 - DNA, 25 bp, Homo sapien
agaaggcgtagagcccggccagcat

SEQ ID NO: 5058656 - DNA, 25 bp, Homo sapien
ggacagcgtccccagtgagtgcacc

SEQ ID NO: 5058657 - DNA, 25 bp, Homo sapien
cgtggccagggagccgtacagatac

SEQ ID NO: 5058658 - DNA, 25 bp, Homo sapien
gcaggatgtagtgggtgacccccct

SEQ ID NO: 5058659 - DNA, 25 bp, Homo sapien
ggcgtcagatgcaggacagcgtccc

SEQ ID NO: 5058660 - DNA, 25 bp, Homo sapien
gctgagctggtcctggacggggggc

SEQ ID NO: 5058661 - DNA, 25 bp, Homo sapien
ctggactgggaggtgcaggctccac

SEQ ID NO: 5058662 - DNA, 25 bp, Homo sapien
gagctggtcctggacggggggcctg

SEQ ID NO: 5058663 - DNA, 25 bp, Homo sapien
ggcctggactgggaggtgcaggctc

SEQ ID NO: 5058664 - DNA, 25 bp, Homo sapien
gacagtccatatgcagccatcacgt

SEQ ID NO: 5058665 - DNA, 25 bp, Homo sapien
atatgcagccatcacgtccctggca

SEQ ID NO: 5058666 - DNA, 25 bp, Homo sapien
ccatatgcagccatcacgtccctgg

SEQ ID NO: 5058667 - DNA, 25 bp, Homo sapien
gcctgttccgacagtccatatgcag

SEQ ID NO: 5058668 - DNA, 25 bp, Homo sapien
ggccccatcttaccccagggcgcag

SEQ ID NO: 5058669 - DNA, 25 bp, Homo sapien
ccggtgaggccccatcttaccccag

SEQ ID NO: 5058670 - DNA, 25 bp, Homo sapien
gcagaccccggtgaggccccatctt

SEQ ID NO: 5058671 - DNA, 25 bp, Homo sapien
gtgaggccccatcttaccccagggc

SEQ ID NO: 5058672 - DNA, 25 bp, Homo sapien
tgctggctcccctgtgccgatgact

SEQ ID NO: 5058673 - DNA, 25 bp, Homo sapien
caggcgctgcatcaaggctgacagc

SEQ ID NO: 5058674 - DNA, 25 bp, Homo sapien
tcccctgtgccgatgactgtggtca

SEQ ID NO: 5058675 - DNA, 25 bp, Homo sapien
cctgtgccgatgactgtggtcactg

SEQ ID NO: 5058676 - DNA, 25 bp, Homo sapien
gcaccgcgagtctgtgtgggctccg

SEQ ID NO: 5058677 - DNA, 25 bp, Homo sapien
gcgagtctgtgtgggctccggccct

SEQ ID NO: 5058678 - DNA, 25 bp, Homo sapien
cagggacgtggaggctggggactcg

SEQ ID NO: 5058679 - DNA, 25 bp, Homo sapien
gagaagagttggcaccgcgagtctg

SEQ ID NO: 5058680 - DNA, 25 bp, Homo sapien
ctcggcaaggcgtggaagcaagacc

SEQ ID NO: 5058681 - DNA, 25 bp, Homo sapien
cggccagcgtcatagggacctcgct

SEQ ID NO: 5058682 - DNA, 25 bp, Homo sapien
aagcaagacccgctcctgacatggt

SEQ ID NO: 5058683 - DNA, 25 bp, Homo sapien
caaagtccacgaagtactgagggct

SEQ ID NO: 5058684 - DNA, 25 bp, Homo sapien
gcagctgagggatatctacgcaggc

SEQ ID NO: 5058685 - DNA, 25 bp, Homo sapien
cagcagctgagggatatctacgcag

SEQ ID NO: 5058686 - DNA, 25 bp, Homo sapien
agcagctgagggatatctacgcagg

SEQ ID NO: 5058687 - DNA, 25 bp, Homo sapien
gccagcccgagcgtcctcacaggtg

SEQ ID NO: 5058688 - DNA, 25 bp, Homo sapien
gctgaggtacaggacggcggcggca

SEQ ID NO: 5058689 - DNA, 25 bp, Homo sapien
agaggccagcccgagcgtcctcaca

SEQ ID NO: 5058690 - DNA, 25 bp, Homo sapien
gggttgctgaggtacaggacggcgg

SEQ ID NO: 5058691 - DNA, 25 bp, Homo sapien
tcgcccaggcccagggcgtcctcca

SEQ ID NO: 5058692 - DNA, 25 bp, Homo sapien
ccgggggcagccctgacccctcagg

SEQ ID NO: 5058693 - DNA, 25 bp, Homo sapien
gccctgacccctcaggctcgcccag

SEQ ID NO: 5058694 - DNA, 25 bp, Homo sapien
ccagggcgtcctccacagacaggca

SEQ ID NO: 5058695 - DNA, 25 bp, Homo sapien
tttcaagtccaacaacgtccaccat

SEQ ID NO: 5058696 - DNA, 25 bp, Homo sapien
tgggcagagacaagtgagcaggggc

SEQ ID NO: 5058697 - DNA, 25 bp, Homo sapien
ctctcaacccctggcgcccttccgt

SEQ ID NO: 5058698 - DNA, 25 bp, Homo sapien
cccaacagtggtcccccatccccag

SEQ ID NO: 5058699 - DNA, 25 bp, Homo sapien
ggtgcacgcagaggggtccccaaca

SEQ ID NO: 5058700 - DNA, 25 bp, Homo sapien
tcctgcttccccaactacaggggtg

SEQ ID NO: 5058701 - DNA, 25 bp, Homo sapien
ggctctggcctgtggggagggtcag

SEQ ID NO: 5058702 - DNA, 25 bp, Homo sapien
ggagggtcagggtgcccaggtactg

SEQ ID NO: 5058703 - DNA, 25 bp, Homo sapien
tgcccaggtactgccactagcctcc

SEQ ID NO: 5058704 - DNA, 25 bp, Homo sapien
gtactgccactagcctcctccgcct

SEQ ID NO: 5058705 - DNA, 25 bp, Homo sapien
acacggcccgttggcgcagtgcaca

SEQ ID NO: 5058706 - DNA, 25 bp, Homo sapien
cagcgtatttaacaggccgcccaga

SEQ ID NO: 5058707 - DNA, 25 bp, Homo sapien
agtgcacacggtccgccagcgtatt

SEQ ID NO: 5058708 - DNA, 25 bp, Homo sapien
tccgccagcgtatttaacaggccgc

SEQ ID NO: 5058709 - DNA, 25 bp, Homo sapien
gctcccagcgtgctcagtgggtgtt

SEQ ID NO: 5058710 - DNA, 25 bp, Homo sapien
actcagctcccagcgtgctcagtgg

SEQ ID NO: 5058711 - DNA, 25 bp, Homo sapien
cccagcgtgctcagtgggtgttgct

SEQ ID NO: 5058712 - DNA, 25 bp, Homo sapien
tcagctcccagcgtgctcagtgggt

SEQ ID NO: 5058713 - DNA, 25 bp, Homo sapien
accggcgtggctcaccacgccaggc

SEQ ID NO: 5058714 - DNA, 25 bp, Homo sapien
ccggcgtggctcaccacgccaggcc

SEQ ID NO: 5058715 - DNA, 25 bp, Homo sapien
ttaccggcgtggctcaccacgccag

SEQ ID NO: 5058716 - DNA, 25 bp, Homo sapien
gcccccaaagttctgacaccaaaga

SEQ ID NO: 5058717 - DNA, 25 bp, Homo sapien
cccaaagttctgacaccaaagacag

SEQ ID NO: 5058718 - DNA, 25 bp, Homo sapien
ccccaaagttctgacaccaaagaca

SEQ ID NO: 5058719 - DNA, 25 bp, Homo sapien
ccttctgtgcaagggctagtgcccc

SEQ ID NO: 5058720 - DNA, 25 bp, Homo sapien
agacagtgagttgtgtggatgacca

SEQ ID NO: 5058721 - DNA, 25 bp, Homo sapien
aggagccatcgcctcagactctgcc

SEQ ID NO: 5058722 - DNA, 25 bp, Homo sapien
gctgcagacagtgagttgtgtggat

SEQ ID NO: 5058723 - DNA, 25 bp, Homo sapien
tgcaggaagcggttgaaggcgttgt

SEQ ID NO: 5058724 - DNA, 25 bp, Homo sapien
tgaaggcgttgtaggctgactccag

SEQ ID NO: 5058725 - DNA, 25 bp, Homo sapien
tccaggtcgaacagcatctgacgca

SEQ ID NO: 5058726 - DNA, 25 bp, Homo sapien
tctgacgcacctgtgagtcgtccag

SEQ ID NO: 5058727 - DNA, 25 bp, Homo sapien
tcatctgacgccgacatgccgctca

SEQ ID NO: 5058728 - DNA, 25 bp, Homo sapien
tgacgccgacatgccgctcagggtc

SEQ ID NO: 5058729 - DNA, 25 bp, Homo sapien
gccgacatgccgctcagggtctgca

SEQ ID NO: 5058730 - DNA, 25 bp, Homo sapien
atctgacgccgacatgccgctcagg

SEQ ID NO: 5058731 - DNA, 25 bp, Homo sapien
gtctcgggcactgcggggctctgcc

SEQ ID NO: 5058732 - DNA, 25 bp, Homo sapien
gtctccatcagctctcgcaggtcgg

SEQ ID NO: 5058733 - DNA, 25 bp, Homo sapien
ggctcatgcggtgcatggtctccat

SEQ ID NO: 5058734 - DNA, 25 bp, Homo sapien
tggctgaccgtctggcggccctcaa

SEQ ID NO: 5058735 - DNA, 25 bp, Homo sapien
ctcaaagtcgggtgggaggtggctc

SEQ ID NO: 5058736 - DNA, 25 bp, Homo sapien
cccgacgccggctccatcccctcct

SEQ ID NO: 5058737 - DNA, 25 bp, Homo sapien
ccgacgccggctccatcccctcctg

SEQ ID NO: 5058738 - DNA, 25 bp, Homo sapien
caggcgcagcttgtccatgaccgtg

SEQ ID NO: 5058739 - DNA, 25 bp, Homo sapien
agcttgtccatgaccgtgatgaaga

SEQ ID NO: 5058740 - DNA, 25 bp, Homo sapien
gatctccaggcgcagcttgtccatg

SEQ ID NO: 5058741 - DNA, 25 bp, Homo sapien
ctcatccatggcgcggatctccagg

SEQ ID NO: 5058742 - DNA, 25 bp, Homo sapien
ggctcgcgtgtccacgggtgcggga

SEQ ID NO: 5058743 - DNA, 25 bp, Homo sapien
ttctgcccagcaagtcagagtgctg

SEQ ID NO: 5058744 - DNA, 25 bp, Homo sapien
atccccccgacaggagtccaggtgg

SEQ ID NO: 5058745 - DNA, 25 bp, Homo sapien
gaactgaagggtgggcccacaccca

SEQ ID NO: 5058746 - DNA, 25 bp, Homo sapien
ggtgatgggccggtcctccttgatc

SEQ ID NO: 5058747 - DNA, 25 bp, Homo sapien
ccttgatccgctccatggccagcgg

SEQ ID NO: 5058748 - DNA, 25 bp, Homo sapien
atgcagcggttgaggttgcccttgt

SEQ ID NO: 5058749 - DNA, 25 bp, Homo sapien
gcggttgaggttgcccttgtcgtcc

SEQ ID NO: 5058750 - DNA, 25 bp, Homo sapien
atgcccgacagtctcgccccatggg

SEQ ID NO: 5058751 - DNA, 25 bp, Homo sapien
agagccctctggcaccccataccca

SEQ ID NO: 5058752 - DNA, 25 bp, Homo sapien
atacccatgcccgacagtctcgccc

SEQ ID NO: 5058753 - DNA, 25 bp, Homo sapien
tggcaccccatacccatgcccgaca

SEQ ID NO: 5058754 - DNA, 25 bp, Homo sapien
aattcgtcaatagagctgatttctg

SEQ ID NO: 5058755 - DNA, 25 bp, Homo sapien
cggaacttgcggcagaattcgtcaa

SEQ ID NO: 5058756 - DNA, 25 bp, Homo sapien
ggcagaattcgtcaatagagctgat

SEQ ID NO: 5058757 - DNA, 25 bp, Homo sapien
tgcggcagaattcgtcaatagagct

SEQ ID NO: 5058758 - DNA, 25 bp, Homo sapien
gaaggcagctttgtattggaccagg

SEQ ID NO: 5058759 - DNA, 25 bp, Homo sapien
ggcagctttgtattggaccaggagc

SEQ ID NO: 5058760 - DNA, 25 bp, Homo sapien
agctttgtattggaccaggagccgg

SEQ ID NO: 5058761 - DNA, 25 bp, Homo sapien
ctgaaggcagctttgtattggacca

SEQ ID NO: 5058762 - DNA, 25 bp, Homo sapien
ccagccctctgttgtgatggccgca

SEQ ID NO: 5058763 - DNA, 25 bp, Homo sapien
ttgctgcctatggagcacccaagcc

SEQ ID NO: 5058764 - DNA, 25 bp, Homo sapien
aaaagatcctgggacatccccaagc

SEQ ID NO: 5058765 - DNA, 25 bp, Homo sapien
cagctcatggtcctgtgcggtggcc

SEQ ID NO: 5058766 - DNA, 25 bp, Homo sapien
cacagtccttgatgtaggccttctc

SEQ ID NO: 5058767 - DNA, 25 bp, Homo sapien
gagacacagtccttgatgtaggcct

SEQ ID NO: 5058768 - DNA, 25 bp, Homo sapien
agtccttgatgtaggccttctccag

SEQ ID NO: 5058769 - DNA, 25 bp, Homo sapien
gacacagtccttgatgtaggccttc

SEQ ID NO: 5058770 - DNA, 25 bp, Homo sapien
gaggacacacctgtctatcgggcca

SEQ ID NO: 5058771 - DNA, 25 bp, Homo sapien
gagtgctaccccctgcccggaggtg

SEQ ID NO: 5058772 - DNA, 25 bp, Homo sapien
ggaggtgccactgcgggcgctctgc

SEQ ID NO: 5058773 - DNA, 25 bp, Homo sapien
gacacacctgtctatcgggccaggc

SEQ ID NO: 5058774 - DNA, 25 bp, Homo sapien
cctcaggaacagttccccagactga

SEQ ID NO: 5058775 - DNA, 25 bp, Homo sapien
agggcagccagatgcgcatgggtgt

SEQ ID NO: 5058776 - DNA, 25 bp, Homo sapien
gcagccagatgcgcatgggtgtgtt

SEQ ID NO: 5058777 - DNA, 25 bp, Homo sapien
tgtgttgggacagcctgggcgcctg

SEQ ID NO: 5058778 - DNA, 25 bp, Homo sapien
ggtgtgttgggacagcctgggcgcc

SEQ ID NO: 5058779 - DNA, 25 bp, Homo sapien
tcccgggcgttcttgtacaacttca

SEQ ID NO: 5058780 - DNA, 25 bp, Homo sapien
tccctctcccgggcgttcttgtaca

SEQ ID NO: 5058781 - DNA, 25 bp, Homo sapien
ctctcccgggcgttcttgtacaact

SEQ ID NO: 5058782 - DNA, 25 bp, Homo sapien
gggcgttcttgtacaacttcacttc

SEQ ID NO: 5058783 - DNA, 25 bp, Homo sapien
gagcgggctctgtgggccagtgcca

SEQ ID NO: 5058784 - DNA, 25 bp, Homo sapien
cgggctctgtgggccagtgccaaca

SEQ ID NO: 5058785 - DNA, 25 bp, Homo sapien
tttgctgttggccaatgccggccgg

SEQ ID NO: 5058786 - DNA, 25 bp, Homo sapien
ctgttggccaatgccggccgggtgg

SEQ ID NO: 5058787 - DNA, 25 bp, Homo sapien
ctcatacagctccggcttgttccca

SEQ ID NO: 5058788 - DNA, 25 bp, Homo sapien
atacagctccggcttgttcccaggg

SEQ ID NO: 5058789 - DNA, 25 bp, Homo sapien
tacagctccggcttgttcccagggg

SEQ ID NO: 5058790 - DNA, 25 bp, Homo sapien
catacagctccggcttgttcccagg

SEQ ID NO: 5058791 - DNA, 25 bp, Homo sapien
ggagcacagaggttccaacctcacc

SEQ ID NO: 5058792 - DNA, 25 bp, Homo sapien
ccaacctcacccctatcagtgtgtg

SEQ ID NO: 5058793 - DNA, 25 bp, Homo sapien
ctggagcacagaggttccaacctca

SEQ ID NO: 5058794 - DNA, 25 bp, Homo sapien
aacctcacccctatcagtgtgtggg

SEQ ID NO: 5058795 - DNA, 25 bp, Homo sapien
gaagccgggggccgcatgacaggcc

SEQ ID NO: 5058796 - DNA, 25 bp, Homo sapien
ctgatgataacacctctgagaagcc

SEQ ID NO: 5058797 - DNA, 25 bp, Homo sapien
agaagccgggggccgcatgacaggc

SEQ ID NO: 5058798 - DNA, 25 bp, Homo sapien
atgataacacctctgagaagccggg

SEQ ID NO: 5058799 - DNA, 25 bp, Homo sapien
ccaaggctgtacgagagcagggtca

SEQ ID NO: 5058800 - DNA, 25 bp, Homo sapien
tggaggtttctgagccctcagtgct

SEQ ID NO: 5058801 - DNA, 25 bp, Homo sapien
tggcggagtcacctgcacaacagtg

SEQ ID NO: 5058802 - DNA, 25 bp, Homo sapien
tgcaatgaactatttagcccctggc

SEQ ID NO: 5058803 - DNA, 25 bp, Homo sapien
gcgtggctgggatcccatgaaacat

SEQ ID NO: 5058804 - DNA, 25 bp, Homo sapien
ctcctatgcccggcgtggctgggat

SEQ ID NO: 5058805 - DNA, 25 bp, Homo sapien
tatgcccggcgtggctgggatccca

SEQ ID NO: 5058806 - DNA, 25 bp, Homo sapien
cccggcgtggctgggatcccatgaa

SEQ ID NO: 5058807 - DNA, 25 bp, Homo sapien
ctaggctctggggggggcacagcac

SEQ ID NO: 5058808 - DNA, 25 bp, Homo sapien
tctaggctctggggggggcacagca

SEQ ID NO: 5058809 - DNA, 25 bp, Homo sapien
cctctaggctctggggggggcacag

SEQ ID NO: 5058810 - DNA, 25 bp, Homo sapien
ctctaggctctggggggggcacagc

SEQ ID NO: 5058811 - DNA, 25 bp, Homo sapien
agagccagggccgactcaaagatgg

SEQ ID NO: 5058812 - DNA, 25 bp, Homo sapien
cggacgttgtggcatacggttgtaa

SEQ ID NO: 5058813 - DNA, 25 bp, Homo sapien
aaagatggcccctaagccaggcgct

SEQ ID NO: 5058814 - DNA, 25 bp, Homo sapien
acgttgtggcatacggttgtaatcc

SEQ ID NO: 5058815 - DNA, 25 bp, Homo sapien
ggaaacaacacacttaacagcccgc

SEQ ID NO: 5058816 - DNA, 25 bp, Homo sapien
tgtttgatggcccacgaggagagtt

SEQ ID NO: 5058817 - DNA, 25 bp, Homo sapien
cagctgtttgatggcccacgaggag

SEQ ID NO: 5058818 - DNA, 25 bp, Homo sapien
gagtttggggcacaggaaacaacac

SEQ ID NO: 5058819 - DNA, 25 bp, Homo sapien
tgaacttggaggaaccaacaagctg

SEQ ID NO: 5058820 - DNA, 25 bp, Homo sapien
tgcagcttctcgaaagagggggtcc

SEQ ID NO: 5058821 - DNA, 25 bp, Homo sapien
agaggtgcccctagttgggcagcga

SEQ ID NO: 5058822 - DNA, 25 bp, Homo sapien
gaaccaacaagctgaaggtgcagct

SEQ ID NO: 5058823 - DNA, 25 bp, Homo sapien
ctaactgggagtggacggtgctacc

SEQ ID NO: 5058824 - DNA, 25 bp, Homo sapien
tagggaacgtctgggtcaagctctc

SEQ ID NO: 5058825 - DNA, 25 bp, Homo sapien
taacgtgacttttgcggcgctcagc

SEQ ID NO: 5058826 - DNA, 25 bp, Homo sapien
ttctgcctaacagcgaaagcggacg

SEQ ID NO: 5058827 - DNA, 25 bp, Homo sapien
gctcggtcagcgactcggcattcgc

SEQ ID NO: 5058828 - DNA, 25 bp, Homo sapien
gggtgcgctcggtcagcgactcggc

SEQ ID NO: 5058829 - DNA, 25 bp, Homo sapien
acggctcgcggtcgggaagatggcg

SEQ ID NO: 5058830 - DNA, 25 bp, Homo sapien
ggacggctcgcggtcgggaagatgg

SEQ ID NO: 5058831 - DNA, 25 bp, Homo sapien
gcagcttcatttattaggggcttcg

SEQ ID NO: 5058832 - DNA, 25 bp, Homo sapien
cttcatttattaggggcttcggtga

SEQ ID NO: 5058833 - DNA, 25 bp, Homo sapien
ccagcagcttcatttattaggggct

SEQ ID NO: 5058834 - DNA, 25 bp, Homo sapien
gcttcatttattaggggcttcggtg

SEQ ID NO: 5058835 - DNA, 25 bp, Homo sapien
tcagaggcgccgaaagaagagcttg

SEQ ID NO: 5058836 - DNA, 25 bp, Homo sapien
ggagccgtggtccagcgtgcactcg

SEQ ID NO: 5058837 - DNA, 25 bp, Homo sapien
ggagctgcgcggctatcttgtccca

SEQ ID NO: 5058838 - DNA, 25 bp, Homo sapien
agctggcgcagggcgtccctgtcct

SEQ ID NO: 5058839 - DNA, 25 bp, Homo sapien
gctccagggaacaaactcgctttcg

SEQ ID NO: 5058840 - DNA, 25 bp, Homo sapien
actcgctttcgctgagggccccagg

SEQ ID NO: 5058841 - DNA, 25 bp, Homo sapien
aacaaactcgctttcgctgagggcc

SEQ ID NO: 5058842 - DNA, 25 bp, Homo sapien
aagagggcagacctcagcgctgcgg

SEQ ID NO: 5058843 - DNA, 25 bp, Homo sapien
cagcactcgggggccttcctggaaa

SEQ ID NO: 5058844 - DNA, 25 bp, Homo sapien
ctgacaggccaaggaagctaaggcc

SEQ ID NO: 5058845 - DNA, 25 bp, Homo sapien
caggccaaggaagctaaggccttgg

SEQ ID NO: 5058846 - DNA, 25 bp, Homo sapien
gttggcagacagatccagtgagatg

SEQ ID NO: 5058847 - DNA, 25 bp, Homo sapien
agggttggcagacagatccagtgag

SEQ ID NO: 5058848 - DNA, 25 bp, Homo sapien
tcaggtgggctagagcacagccttc

SEQ ID NO: 5058849 - DNA, 25 bp, Homo sapien
gcacaggtctctaacagccttgtcc

SEQ ID NO: 5058850 - DNA, 25 bp, Homo sapien
ctgcacaggtctctaacagccttgt

SEQ ID NO: 5058851 - DNA, 25 bp, Homo sapien
ccttgtcccccaggtggtttgcaga

SEQ ID NO: 5058852 - DNA, 25 bp, Homo sapien
atgaggtccgaatcacccttgccgg

SEQ ID NO: 5058853 - DNA, 25 bp, Homo sapien
ccagggcgttgtaggacagggacag

SEQ ID NO: 5058854 - DNA, 25 bp, Homo sapien
acggagctgagctctaagtgcagga

SEQ ID NO: 5058855 - DNA, 25 bp, Homo sapien
gccaggtatcggaatacaggctcca

SEQ ID NO: 5058856 - DNA, 25 bp, Homo sapien
gggtggcaagtgcagaggcaaaggc

SEQ ID NO: 5058857 - DNA, 25 bp, Homo sapien
aggcaaaggctctcgcccagattct

SEQ ID NO: 5058858 - DNA, 25 bp, Homo sapien
gggaaaccactaccgcagtgctcgc

SEQ ID NO: 5058859 - DNA, 25 bp, Homo sapien
cagttctggacaacttgccctctcc

SEQ ID NO: 5058860 - DNA, 25 bp, Homo sapien
gctgcccggactctgctctcggtgt

SEQ ID NO: 5058861 - DNA, 25 bp, Homo sapien
tcacagtggaactgcctcaggcgaa

SEQ ID NO: 5058862 - DNA, 25 bp, Homo sapien
acaggacactagctgcccggactct

SEQ ID NO: 5058863 - DNA, 25 bp, Homo sapien
acagcactcagctggcgagcacggg

SEQ ID NO: 5058864 - DNA, 25 bp, Homo sapien
atccatctattgctcccaggtgcca

SEQ ID NO: 5058865 - DNA, 25 bp, Homo sapien
gaaagtcctggaaaccctcaatgcc

SEQ ID NO: 5058866 - DNA, 25 bp, Homo sapien
agacgcccctcggaggcagaccctg

SEQ ID NO: 5058867 - DNA, 25 bp, Homo sapien
catcccaggcccctagacgttgttt

SEQ ID NO: 5058868 - DNA, 25 bp, Homo sapien
tcagaaagaagctggggccgaagcc

SEQ ID NO: 5058869 - DNA, 25 bp, Homo sapien
cacacgcctgcaggcgcagggtgct

SEQ ID NO: 5058870 - DNA, 25 bp, Homo sapien
ccagggggttcatgcttaagtccag

SEQ ID NO: 5058871 - DNA, 25 bp, Homo sapien
cttggaaagcactacccagtgctgt

SEQ ID NO: 5058872 - DNA, 25 bp, Homo sapien
agccccatggcaagctggcgcaggc

SEQ ID NO: 5058873 - DNA, 25 bp, Homo sapien
gtgctgtgtgcagcttgagggcccg

SEQ ID NO: 5058874 - DNA, 25 bp, Homo sapien
agcaggcgctgaacgagaggcccaa

SEQ ID NO: 5058875 - DNA, 25 bp, Homo sapien
caggccttcgggacccaggtgattg

SEQ ID NO: 5058876 - DNA, 25 bp, Homo sapien
ctggcaggccctgcggtagcggtca

SEQ ID NO: 5058877 - DNA, 25 bp, Homo sapien
gcggtcagtcaacgggggcaggtcc

SEQ ID NO: 5058878 - DNA, 25 bp, Homo sapien
ggccctgcggtagcggtcagtcaac

SEQ ID NO: 5058879 - DNA, 25 bp, Homo sapien
gcaggccctgcggtagcggtcagtc

SEQ ID NO: 5058880 - DNA, 25 bp, Homo sapien
ctggaaggcaccgtcatgagccacc

SEQ ID NO: 5058881 - DNA, 25 bp, Homo sapien
gaaggcaccgtcatgagccacctgg

SEQ ID NO: 5058882 - DNA, 25 bp, Homo sapien
tggaaggcaccgtcatgagccacct

SEQ ID NO: 5058883 - DNA, 25 bp, Homo sapien
ctcgtcattgctctgcagcacatca

SEQ ID NO: 5058884 - DNA, 25 bp, Homo sapien
agcccgcaggtctggtagtagcgct

SEQ ID NO: 5058885 - DNA, 25 bp, Homo sapien
gcagcagcccgcaggtctggtagta

SEQ ID NO: 5058886 - DNA, 25 bp, Homo sapien
cagcacatcagggatgaggtcctgt

SEQ ID NO: 5058887 - DNA, 25 bp, Homo sapien
cagggacagaggcgctgctgctgct

SEQ ID NO: 5058888 - DNA, 25 bp, Homo sapien
ctgcagggacagaggcgctgctgct

SEQ ID NO: 5058889 - DNA, 25 bp, Homo sapien
tgcagggacagaggcgctgctgctg

SEQ ID NO: 5058890 - DNA, 25 bp, Homo sapien
gggacagaggcgctgctgctgctgc

SEQ ID NO: 5058891 - DNA, 25 bp, Homo sapien
ctgcacacagccggggtaatgcccc

SEQ ID NO: 5058892 - DNA, 25 bp, Homo sapien
cacagccggggtaatgccccaggga

SEQ ID NO: 5058893 - DNA, 25 bp, Homo sapien
cacacagccggggtaatgccccagg

SEQ ID NO: 5058894 - DNA, 25 bp, Homo sapien
gcacacagccggggtaatgccccag

SEQ ID NO: 5058895 - DNA, 25 bp, Homo sapien
ctgaacttgaactcgaacccggatg

SEQ ID NO: 5058896 - DNA, 25 bp, Homo sapien
acttgaactcgaacccggatgggag

SEQ ID NO: 5058897 - DNA, 25 bp, Homo sapien
cttgaactcgaacccggatgggagg

SEQ ID NO: 5058898 - DNA, 25 bp, Homo sapien
tgaacttgaactcgaacccggatgg

SEQ ID NO: 5058899 - DNA, 25 bp, Homo sapien
ctgctgggccctgcgttaactggcg

SEQ ID NO: 5058900 - DNA, 25 bp, Homo sapien
taactggcgcactgcaactctgcat

SEQ ID NO: 5058901 - DNA, 25 bp, Homo sapien
gtactactgggcctgcggttgtctc

SEQ ID NO: 5058902 - DNA, 25 bp, Homo sapien
actgtccgacccagaggtactactg

SEQ ID NO: 5058903 - DNA, 25 bp, Homo sapien
tcctccgggatgagcgctgcctggg

SEQ ID NO: 5058904 - DNA, 25 bp, Homo sapien
tgcctggtaggctgcccggctggtg

SEQ ID NO: 5058905 - DNA, 25 bp, Homo sapien
gccgagcaccgaggcctcttctggg

SEQ ID NO: 5058906 - DNA, 25 bp, Homo sapien
ccacccgttgtgctgtggccgagca

SEQ ID NO: 5058907 - DNA, 25 bp, Homo sapien
tgcgctgtcctcgccttctgagctg

SEQ ID NO: 5058908 - DNA, 25 bp, Homo sapien
tccgaggcctggccatggctggtgc

SEQ ID NO: 5058909 - DNA, 25 bp, Homo sapien
gaggcctggccatggctggtgccgc

SEQ ID NO: 5058910 - DNA, 25 bp, Homo sapien
tgctcctccgaggcctggccatggc

SEQ ID NO: 5058911 - DNA, 25 bp, Homo sapien
ctgctcctccgaggcctggccatgg

SEQ ID NO: 5058912 - DNA, 25 bp, Homo sapien
ggcctctgggagtctagtgctatta

SEQ ID NO: 5058913 - DNA, 25 bp, Homo sapien
gggagaccctgacatgggcctgaga

SEQ ID NO: 5058914 - DNA, 25 bp, Homo sapien
tcaaacagaaggctgcttggggtgt

SEQ ID NO: 5058915 - DNA, 25 bp, Homo sapien
ggctcaaaggaggagaggtctcggg

SEQ ID NO: 5058916 - DNA, 25 bp, Homo sapien
gagagagaatgcgtgttgaggcagg

SEQ ID NO: 5058917 - DNA, 25 bp, Homo sapien
gtgggagagagaatgcgtgttgagg

SEQ ID NO: 5058918 - DNA, 25 bp, Homo sapien
agagagaatgcgtgttgaggcaggg

SEQ ID NO: 5058919 - DNA, 25 bp, Homo sapien
gggagagagaatgcgtgttgaggca

SEQ ID NO: 5058920 - DNA, 25 bp, Homo sapien
ggagcatctcccgaaatcagggccc

SEQ ID NO: 5058921 - DNA, 25 bp, Homo sapien
gcatctcccgaaatcagggcccggg

SEQ ID NO: 5058922 - DNA, 25 bp, Homo sapien
gatggagcatctcccgaaatcaggg

SEQ ID NO: 5058923 - DNA, 25 bp, Homo sapien
ctgtgatggagcatctcccgaaatc

SEQ ID NO: 5058924 - DNA, 25 bp, Homo sapien
gccctggccttctgccgcgtctcca

SEQ ID NO: 5058925 - DNA, 25 bp, Homo sapien
tggccctggccttctgccgcgtctc

SEQ ID NO: 5058926 - DNA, 25 bp, Homo sapien
cttggcccgaggcagccgcctggag

SEQ ID NO: 5058927 - DNA, 25 bp, Homo sapien
catggccctggccttctgccgcgtc

SEQ ID NO: 5058928 - DNA, 25 bp, Homo sapien
tgcagcgtctccagcgggctgaggc

SEQ ID NO: 5058929 - DNA, 25 bp, Homo sapien
tgctgcagcgtctccagcgggctga

SEQ ID NO: 5058930 - DNA, 25 bp, Homo sapien
actgctgcagcgtctccagcgggct

SEQ ID NO: 5058931 - DNA, 25 bp, Homo sapien
ctgctgcagcgtctccagcgggctg

SEQ ID NO: 5058932 - DNA, 25 bp, Homo sapien
tgggtcgtccactgcggccccgtgg

SEQ ID NO: 5058933 - DNA, 25 bp, Homo sapien
gggtgatgccttcgcagccctggcc

SEQ ID NO: 5058934 - DNA, 25 bp, Homo sapien
gccccccgttcaagcagcagctcag

SEQ ID NO: 5058935 - DNA, 25 bp, Homo sapien
ctttcgagtgcggagggtgacggac

SEQ ID NO: 5058936 - DNA, 25 bp, Homo sapien
cagccacagtagtcccgagggttaa

SEQ ID NO: 5058937 - DNA, 25 bp, Homo sapien
cagaggtgtccagccacagtagtcc

SEQ ID NO: 5058938 - DNA, 25 bp, Homo sapien
gcaggcctcgtgcagaggtgtccag

SEQ ID NO: 5058939 - DNA, 25 bp, Homo sapien
aggtgtccagccacagtagtcccga

SEQ ID NO: 5058940 - DNA, 25 bp, Homo sapien
tggccctcgatgcaggctcggtgca

SEQ ID NO: 5058941 - DNA, 25 bp, Homo sapien
gctggccctcgatgcaggctcggtg

SEQ ID NO: 5058942 - DNA, 25 bp, Homo sapien
ctgcctcacaaggtcctggacgcgg

SEQ ID NO: 5058943 - DNA, 25 bp, Homo sapien
gcctcacaaggtcctggacgcggcg

SEQ ID NO: 5058944 - DNA, 25 bp, Homo sapien
gcccaggtggccctgaagctcctcg

SEQ ID NO: 5058945 - DNA, 25 bp, Homo sapien
cttgctccccttccgccggcccagg

SEQ ID NO: 5058946 - DNA, 25 bp, Homo sapien
cccaggtggccctgaagctcctcgt

SEQ ID NO: 5058947 - DNA, 25 bp, Homo sapien
aggtggccctgaagctcctcgtcct

SEQ ID NO: 5058948 - DNA, 25 bp, Homo sapien
ctgcggggtcaggccatcggtgtcg

SEQ ID NO: 5058949 - DNA, 25 bp, Homo sapien
ccagatggcacgtgcctctctaacg

SEQ ID NO: 5058950 - DNA, 25 bp, Homo sapien
actcactcgactcccaaccactgtc

SEQ ID NO: 5058951 - DNA, 25 bp, Homo sapien
acgtgcctctctaacgggaccatgc

SEQ ID NO: 5058952 - DNA, 25 bp, Homo sapien
taacgggaccatgccccagctgaca

SEQ ID NO: 5058953 - DNA, 25 bp, Homo sapien
tatggagatgctgcaagacctgcct

SEQ ID NO: 5058954 - DNA, 25 bp, Homo sapien
gagctcccgtagtctggtttcggtc

SEQ ID NO: 5058955 - DNA, 25 bp, Homo sapien
tcttcagctacactgagctcccgta

SEQ ID NO: 5058956 - DNA, 25 bp, Homo sapien
ctcagctgcacggtatggagatgct

SEQ ID NO: 5058957 - DNA, 25 bp, Homo sapien
gagccagtatgggtgggatgggctc

SEQ ID NO: 5058958 - DNA, 25 bp, Homo sapien
ggagccagtatgggtgggatgggct

SEQ ID NO: 5058959 - DNA, 25 bp, Homo sapien
tgggcacagctgagcgctttctgga

SEQ ID NO: 5058960 - DNA, 25 bp, Homo sapien
agcagctcgtaggcatcgccggcct

SEQ ID NO: 5058961 - DNA, 25 bp, Homo sapien
gcctcctcgcgggacagtgcaatgt

SEQ ID NO: 5058962 - DNA, 25 bp, Homo sapien
gcaatgttcagccaggtcttggcct

SEQ ID NO: 5058963 - DNA, 25 bp, Homo sapien
ctgcattcgggcggggagcaagggt

SEQ ID NO: 5058964 - DNA, 25 bp, Homo sapien
tgcattcgggcggggagcaagggtt

SEQ ID NO: 5058965 - DNA, 25 bp, Homo sapien
ggcgcacggccccatggtggtcctt

SEQ ID NO: 5058966 - DNA, 25 bp, Homo sapien
gtccttcatgtctcccagtgtggtg

SEQ ID NO: 5058967 - DNA, 25 bp, Homo sapien
tcctcctcatagtggcgcacggccc

SEQ ID NO: 5058968 - DNA, 25 bp, Homo sapien
acacgtggatgatggcccgctcagc

SEQ ID NO: 5058969 - DNA, 25 bp, Homo sapien
tcacagatgaccatggcaccctgag

SEQ ID NO: 5058970 - DNA, 25 bp, Homo sapien
gggaaagtctcctgccttggagaag

SEQ ID NO: 5058971 - DNA, 25 bp, Homo sapien
gcttctggtaagcctcagctgccct

SEQ ID NO: 5058972 - DNA, 25 bp, Homo sapien
ttggagaagaggtcccctagctgct

SEQ ID NO: 5058973 - DNA, 25 bp, Homo sapien
ctggaccacgcgtgccatctcctct

SEQ ID NO: 5058974 - DNA, 25 bp, Homo sapien
ggaggctaggggtacaactactgtc

SEQ ID NO: 5058975 - DNA, 25 bp, Homo sapien
gggtacaactactgtctccagtttg

SEQ ID NO: 5058976 - DNA, 25 bp, Homo sapien
tctccagtttgccaatgaagatggt

SEQ ID NO: 5058977 - DNA, 25 bp, Homo sapien
cccagggccccattcgcacccccag

SEQ ID NO: 5058978 - DNA, 25 bp, Homo sapien
tcccagggccccattcgcaccccca

SEQ ID NO: 5058979 - DNA, 25 bp, Homo sapien
ggccccattcgcacccccaggctca

SEQ ID NO: 5058980 - DNA, 25 bp, Homo sapien
gggccccattcgcacccccaggctc

SEQ ID NO: 5058981 - DNA, 25 bp, Homo sapien
cgcttggcagccaaaaagtctccca

SEQ ID NO: 5058982 - DNA, 25 bp, Homo sapien
tcgcttggcagccaaaaagtctccc

SEQ ID NO: 5058983 - DNA, 25 bp, Homo sapien
ggctcgcttggcagccaaaaagtct

SEQ ID NO: 5058984 - DNA, 25 bp, Homo sapien
agggctcgcttggcagccaaaaagt

SEQ ID NO: 5058985 - DNA, 25 bp, Homo sapien
ctgagctcggagccacgcacagcgg

SEQ ID NO: 5058986 - DNA, 25 bp, Homo sapien
tgagctcggagccacgcacagcggg

SEQ ID NO: 5058987 - DNA, 25 bp, Homo sapien
tgtgcaataaccacgcagcactcgc

SEQ ID NO: 5058988 - DNA, 25 bp, Homo sapien
tccaagcagcgcatagcctgggagt

SEQ ID NO: 5058989 - DNA, 25 bp, Homo sapien
taggtcctcgtaaaggtggttctgc

SEQ ID NO: 5058990 - DNA, 25 bp, Homo sapien
tgaaccgcttcctcatggtgtgcgc

SEQ ID NO: 5058991 - DNA, 25 bp, Homo sapien
aagtaatcgttgcacagggctgtct

SEQ ID NO: 5058992 - DNA, 25 bp, Homo sapien
aggcccaggttgagatagaggcggg

SEQ ID NO: 5058993 - DNA, 25 bp, Homo sapien
tcttcctgaagtaatcgttgcacag

SEQ ID NO: 5058994 - DNA, 25 bp, Homo sapien
caggttgagatagaggcgggtcctc

SEQ ID NO: 5058995 - DNA, 25 bp, Homo sapien
ctcattcagctctccctgggccagt

SEQ ID NO: 5058996 - DNA, 25 bp, Homo sapien
attcagctctccctgggccagtgtc

SEQ ID NO: 5058997 - DNA, 25 bp, Homo sapien
tcattcagctctccctgggccagtg

SEQ ID NO: 5058998 - DNA, 25 bp, Homo sapien
ttcagctctccctgggccagtgtcc

SEQ ID NO: 5058999 - DNA, 25 bp, Homo sapien
cagcctcttcggcccgaagttcagg

SEQ ID NO: 5059000 - DNA, 25 bp, Homo sapien
tcttcggcccgaagttcaggaggca

SEQ ID NO: 5059001 - DNA, 25 bp, Homo sapien
tcggcccgaagttcaggaggcagaa

SEQ ID NO: 5059002 - DNA, 25 bp, Homo sapien
cagaaaacgcggaggggtctgccca

SEQ ID NO: 5059003 - DNA, 25 bp, Homo sapien
ttgcgcagggaatgtgccagctcca

SEQ ID NO: 5059004 - DNA, 25 bp, Homo sapien
tggtcatagatgtccaggtgggtgc

SEQ ID NO: 5059005 - DNA, 25 bp, Homo sapien
catccctcgactggcagtggtcata

SEQ ID NO: 5059006 - DNA, 25 bp, Homo sapien
gtgggtgcggccgatggtggcccag

SEQ ID NO: 5059007 - DNA, 25 bp, Homo sapien
acgaggccagtgagggcgcccgcac

SEQ ID NO: 5059008 - DNA, 25 bp, Homo sapien
gccaggcgctctccgatcttgcggt

SEQ ID NO: 5059009 - DNA, 25 bp, Homo sapien
aaggcagccgggtagtcctccatct

SEQ ID NO: 5059010 - DNA, 25 bp, Homo sapien
cgatcttgcggtgggccacggcaca

SEQ ID NO: 5059011 - DNA, 25 bp, Homo sapien
acagcccagagggtcgtcagcgcgc

SEQ ID NO: 5059012 - DNA, 25 bp, Homo sapien
gcgccttggctttcgccttgctcag

SEQ ID NO: 5059013 - DNA, 25 bp, Homo sapien
tggcacagcgcggcctcttcgcgcc

SEQ ID NO: 5059014 - DNA, 25 bp, Homo sapien
tgcgccttggctttcgccttgctca

SEQ ID NO: 5059015 - DNA, 25 bp, Homo sapien
agcgcggcctcttcgcgccgctgcc

SEQ ID NO: 5059016 - DNA, 25 bp, Homo sapien
ggcgaagctcgcgctccaggctcat

SEQ ID NO: 5059017 - DNA, 25 bp, Homo sapien
ggggtcgcagcgcgccctgggtggg

SEQ ID NO: 5059018 - DNA, 25 bp, Homo sapien
ctgcagcccccgtgccgcccgcgct

SEQ ID NO: 5059019 - DNA, 25 bp, Homo sapien
tcgcagcgcgccctgggtggggtct

SEQ ID NO: 5059020 - DNA, 25 bp, Homo sapien
tgcagcccccgtgccgcccgcgcta

SEQ ID NO: 5059021 - DNA, 25 bp, Homo sapien
ttggcaacgccacgggaagcccgtg

SEQ ID NO: 5059022 - DNA, 25 bp, Homo sapien
gaagggccttgtgtggacactgccc

SEQ ID NO: 5059023 - DNA, 25 bp, Homo sapien
tcatgtgtggcccacgttggcaacg

SEQ ID NO: 5059024 - DNA, 25 bp, Homo sapien
atgcctgctgagtacgctgggccgc

SEQ ID NO: 5059025 - DNA, 25 bp, Homo sapien
tatccaagagcctgcaaggagttta

SEQ ID NO: 5059026 - DNA, 25 bp, Homo sapien
gagacaatttcaccctgctttcgga

SEQ ID NO: 5059027 - DNA, 25 bp, Homo sapien
tcagtctcaagaccccatgacagag

SEQ ID NO: 5059028 - DNA, 25 bp, Homo sapien
tcctgggaagagacaatttcaccct

SEQ ID NO: 5059029 - DNA, 25 bp, Homo sapien
tgatcagatagtcctgtgaagcagc

SEQ ID NO: 5059030 - DNA, 25 bp, Homo sapien
gatatcccgtctgatgtcagcaagg

SEQ ID NO: 5059031 - DNA, 25 bp, Homo sapien
ggtgcaccgtctcctcttcgggtca

SEQ ID NO: 5059032 - DNA, 25 bp, Homo sapien
ccgcctgactgcacagaagggctgg

SEQ ID NO: 5059033 - DNA, 25 bp, Homo sapien
cagcagcttgttgcactccacggag

SEQ ID NO: 5059034 - DNA, 25 bp, Homo sapien
tgaacctgggcgtctcatagtacag

SEQ ID NO: 5059035 - DNA, 25 bp, Homo sapien
tagtacaggcgcgtgatgaagtcgt

SEQ ID NO: 5059036 - DNA, 25 bp, Homo sapien
tagtccgtctcgttgctctcgttgg

SEQ ID NO: 5059037 - DNA, 25 bp, Homo sapien
cagggccggaaagagccggctgtta

SEQ ID NO: 5059038 - DNA, 25 bp, Homo sapien
gacagggccggaaagagccggctgt

SEQ ID NO: 5059039 - DNA, 25 bp, Homo sapien
agggccggaaagagccggctgttag

SEQ ID NO: 5059040 - DNA, 25 bp, Homo sapien
gccggaaagagccggctgttagtgt

SEQ ID NO: 5059041 - DNA, 25 bp, Homo sapien
tgcttgtcacaagcaagccaaacgc

SEQ ID NO: 5059042 - DNA, 25 bp, Homo sapien
gcttgtcacaagcaagccaaacgca

SEQ ID NO: 5059043 - DNA, 25 bp, Homo sapien
tctgcttgtcacaagcaagccaaac

SEQ ID NO: 5059044 - DNA, 25 bp, Homo sapien
cttgtcacaagcaagccaaacgcaa

SEQ ID NO: 5059045 - DNA, 25 bp, Homo sapien
ccagggcggggtaagcagacacaca

SEQ ID NO: 5059046 - DNA, 25 bp, Homo sapien
ggcggggtaagcagacacacagaca

SEQ ID NO: 5059047 - DNA, 25 bp, Homo sapien
agggcggggtaagcagacacacaga

SEQ ID NO: 5059048 - DNA, 25 bp, Homo sapien
gggcggggtaagcagacacacagac

SEQ ID NO: 5059049 - DNA, 25 bp, Homo sapien
attggttctgatacagaggagctgc

SEQ ID NO: 5059050 - DNA, 25 bp, Homo sapien
gcactttattggttctgatacagag

SEQ ID NO: 5059051 - DNA, 25 bp, Homo sapien
acaagtgcactttattggttctgat

SEQ ID NO: 5059052 - DNA, 25 bp, Homo sapien
agaaaagccagcaggcggctgcggc

SEQ ID NO: 5059053 - DNA, 25 bp, Homo sapien
atccggagctgccaatcagcaggca

SEQ ID NO: 5059054 - DNA, 25 bp, Homo sapien
ccggcaagtccctccgtggaggcgt

SEQ ID NO: 5059055 - DNA, 25 bp, Homo sapien
gggcctgatccggagctgccaatca

SEQ ID NO: 5059056 - DNA, 25 bp, Homo sapien
tgggttcccaggtggccagtctttc

SEQ ID NO: 5059057 - DNA, 25 bp, Homo sapien
caggacagctaaggctgctactcac

SEQ ID NO: 5059058 - DNA, 25 bp, Homo sapien
tagactccacgaggccccggtatct

SEQ ID NO: 5059059 - DNA, 25 bp, Homo sapien
cagcctgcctagactccacgaggcc

SEQ ID NO: 5059060 - DNA, 25 bp, Homo sapien
cccggtatctccaggacagctaagg

SEQ ID NO: 5059061 - DNA, 25 bp, Homo sapien
ccctcggcctctctggcctgctcgg

SEQ ID NO: 5059062 - DNA, 25 bp, Homo sapien
cacgggctgtggctgccgcagagac

SEQ ID NO: 5059063 - DNA, 25 bp, Homo sapien
ggccctcggcctctctggcctgctc

SEQ ID NO: 5059064 - DNA, 25 bp, Homo sapien
ctgtggctgccgcagagaccccagg

SEQ ID NO: 5059065 - DNA, 25 bp, Homo sapien
cagagagccacgagatccagtgtgc

SEQ ID NO: 5059066 - DNA, 25 bp, Homo sapien
gtaggacctcactcggcagggtgct

SEQ ID NO: 5059067 - DNA, 25 bp, Homo sapien
ttctacagtttgagtcgggcaccct

SEQ ID NO: 5059068 - DNA, 25 bp, Homo sapien
tgctccccgacacgttcaaaggcgg

SEQ ID NO: 5059069 - DNA, 25 bp, Homo sapien
cgatgcgtttgtacttgcactgggt

SEQ ID NO: 5059070 - DNA, 25 bp, Homo sapien
ggctgaagatgctgttgtacagctg

SEQ ID NO: 5059071 - DNA, 25 bp, Homo sapien
ccaatcttctcgaagctgagcaggc

SEQ ID NO: 5059072 - DNA, 25 bp, Homo sapien
ccgtgccatgggcagccgatgcgtt

SEQ ID NO: 5059073 - DNA, 25 bp, Homo sapien
ggcagcagaggctcttactgatctc

SEQ ID NO: 5059074 - DNA, 25 bp, Homo sapien
gctcgctcacggctttctccacggc

SEQ ID NO: 5059075 - DNA, 25 bp, Homo sapien
gaggctcttactgatctcacaacga

SEQ ID NO: 5059076 - DNA, 25 bp, Homo sapien
tactgatctcacaacgacaattggg

SEQ ID NO: 5059077 - DNA, 25 bp, Homo sapien
gataaaacagccagcgcacatcaag

SEQ ID NO: 5059078 - DNA, 25 bp, Homo sapien
cagccagcgcacatcaagtgaccat

SEQ ID NO: 5059079 - DNA, 25 bp, Homo sapien
ctagtaggtggataaaacagccagc

SEQ ID NO: 5059080 - DNA, 25 bp, Homo sapien
taggtggataaaacagccagcgcac

SEQ ID NO: 5059081 - DNA, 25 bp, Homo sapien
cattcaagtcagaacacagggagtc

SEQ ID NO: 5059082 - DNA, 25 bp, Homo sapien
tcaaaggacctacatgtggagaacc

SEQ ID NO: 5059083 - DNA, 25 bp, Homo sapien
gatgacatcatgtggtgacagcacg

SEQ ID NO: 5059084 - DNA, 25 bp, Homo sapien
aaggtgtgaaaatccgccagccaag

SEQ ID NO: 5059085 - DNA, 25 bp, Homo sapien
gtgacccccatgcagacccagggtc

SEQ ID NO: 5059086 - DNA, 25 bp, Homo sapien
cagggtctccacctgagctacttct

SEQ ID NO: 5059087 - DNA, 25 bp, Homo sapien
cacctgagctacttcttccctgggg

SEQ ID NO: 5059088 - DNA, 25 bp, Homo sapien
tgagctacttcttccctggggttaa

SEQ ID NO: 5059089 - DNA, 25 bp, Homo sapien
cggaacaggctcaaggagccctgac

SEQ ID NO: 5059090 - DNA, 25 bp, Homo sapien
atgggcggaacaggctcaaggagcc

SEQ ID NO: 5059091 - DNA, 25 bp, Homo sapien
agatgggcggaacaggctcaaggag

SEQ ID NO: 5059092 - DNA, 25 bp, Homo sapien
ctagatgggcggaacaggctcaagg

SEQ ID NO: 5059093 - DNA, 25 bp, Homo sapien
tgtaggacccctttcacacctggac

SEQ ID NO: 5059094 - DNA, 25 bp, Homo sapien
tgagggcccccacgatttcctggtg

SEQ ID NO: 5059095 - DNA, 25 bp, Homo sapien
tcagctgaccttgtaggaccccttt

SEQ ID NO: 5059096 - DNA, 25 bp, Homo sapien
ctggtggtcccaaggtctctatggt

SEQ ID NO: 5059097 - DNA, 25 bp, Homo sapien
caggcccatgggagcagtgccctcg

SEQ ID NO: 5059098 - DNA, 25 bp, Homo sapien
catgggagcagtgccctcgctcacc

SEQ ID NO: 5059099 - DNA, 25 bp, Homo sapien
gagcagtgccctcgctcacccaggg

SEQ ID NO: 5059100 - DNA, 25 bp, Homo sapien
ggcccatgggagcagtgccctcgct

SEQ ID NO: 5059101 - DNA, 25 bp, Homo sapien
gcccgaagctccttggacatgtgga

SEQ ID NO: 5059102 - DNA, 25 bp, Homo sapien
tgcagtcctgtactgctgcccagga

SEQ ID NO: 5059103 - DNA, 25 bp, Homo sapien
gacatgtggatggtgactccacccc

SEQ ID NO: 5059104 - DNA, 25 bp, Homo sapien
tcaaagaacgagtcagctgcagtcc

SEQ ID NO: 5059105 - DNA, 25 bp, Homo sapien
cgagtgagcccgtttttgccttaag

SEQ ID NO: 5059106 - DNA, 25 bp, Homo sapien
gggtgggaacaatgcgcagtccctt

SEQ ID NO: 5059107 - DNA, 25 bp, Homo sapien
gggaacaatgcgcagtcccttcctc

SEQ ID NO: 5059108 - DNA, 25 bp, Homo sapien
ttgccttaagaatgccccatgaggg

SEQ ID NO: 5059109 - DNA, 25 bp, Homo sapien
tgacaagctctcgagttactgagga

SEQ ID NO: 5059110 - DNA, 25 bp, Homo sapien
ggatgacaagctctcgagttactga

SEQ ID NO: 5059111 - DNA, 25 bp, Homo sapien
aagctctcgagttactgaggaccca

SEQ ID NO: 5059112 - DNA, 25 bp, Homo sapien
ctcgagttactgaggacccagccaa

SEQ ID NO: 5059113 - DNA, 25 bp, Homo sapien
aaaaggaggcgtccataggatgttc

SEQ ID NO: 5059114 - DNA, 25 bp, Homo sapien
tctcgagcacaggactctgagccca

SEQ ID NO: 5059115 - DNA, 25 bp, Homo sapien
aaggagctctcgagcacaggactct

SEQ ID NO: 5059116 - DNA, 25 bp, Homo sapien
gaccaagagaaaggattcttccacc

SEQ ID NO: 5059117 - DNA, 25 bp, Homo sapien
cagcacagcaccgagtagagccgct

SEQ ID NO: 5059118 - DNA, 25 bp, Homo sapien
agcacagcaccgagtagagccgctc

SEQ ID NO: 5059119 - DNA, 25 bp, Homo sapien
tgcagcacagcaccgagtagagccg

SEQ ID NO: 5059120 - DNA, 25 bp, Homo sapien
ggtgcagcacagcaccgagtagagc

SEQ ID NO: 5059121 - DNA, 25 bp, Homo sapien
ccgcctcggctgcccgcagccgctt

SEQ ID NO: 5059122 - DNA, 25 bp, Homo sapien
ctccagtttcccgctgccggccgcc

SEQ ID NO: 5059123 - DNA, 25 bp, Homo sapien
tccagtttcccgctgccggccgccg

SEQ ID NO: 5059124 - DNA, 25 bp, Homo sapien
ctcggccgcctcggctgcccgcagc

SEQ ID NO: 5059125 - DNA, 25 bp, Homo sapien
ccggcccgcgcgtagccccacagcc

SEQ ID NO: 5059126 - DNA, 25 bp, Homo sapien
ggcgccggacatagcggccggccgg

SEQ ID NO: 5059127 - DNA, 25 bp, Homo sapien
gactagaagttaggggcgccgcgcg

SEQ ID NO: 5059128 - DNA, 25 bp, Homo sapien
gctgccgggcgcccgccaagcccgc

SEQ ID NO: 5059129 - DNA, 25 bp, Homo sapien
taacccaccggaatctaatcctctg

SEQ ID NO: 5059130 - DNA, 25 bp, Homo sapien
tattagggaatagggctggcttcca

SEQ ID NO: 5059131 - DNA, 25 bp, Homo sapien
aggacacaagtgaaaaatcccgccg

SEQ ID NO: 5059132 - DNA, 25 bp, Homo sapien
caggagcaagcggagagacttccag

SEQ ID NO: 5059133 - DNA, 25 bp, Homo sapien
gcagaagagtctacccctagggaga

SEQ ID NO: 5059134 - DNA, 25 bp, Homo sapien
cagcaaacccacttcagtaggcaga

SEQ ID NO: 5059135 - DNA, 25 bp, Homo sapien
gatttattggagactaggcctcttc

SEQ ID NO: 5059136 - DNA, 25 bp, Homo sapien
gaaagtgttcggcagggcagaaacc

SEQ ID NO: 5059137 - DNA, 25 bp, Homo sapien
gcagggcccggcagtaagcccagct

SEQ ID NO: 5059138 - DNA, 25 bp, Homo sapien
tgtatgcagggcccggcagtaagcc

SEQ ID NO: 5059139 - DNA, 25 bp, Homo sapien
ctgtgtatgcagggcccggcagtaa

SEQ ID NO: 5059140 - DNA, 25 bp, Homo sapien
tggaggcgctgtgtatgcagggccc

SEQ ID NO: 5059141 - DNA, 25 bp, Homo sapien
taagtgttggccgtgaagacagcta

SEQ ID NO: 5059142 - DNA, 25 bp, Homo sapien
cagacatcctccttcggtagcagca

SEQ ID NO: 5059143 - DNA, 25 bp, Homo sapien
ttggcagaggagcggtccccattca

SEQ ID NO: 5059144 - DNA, 25 bp, Homo sapien
tgaggatggtcactgcgaccaccaa

SEQ ID NO: 5059145 - DNA, 25 bp, Homo sapien
ggcagtcttcgtgtgtgctcagccc

SEQ ID NO: 5059146 - DNA, 25 bp, Homo sapien
agcaaggcagtcttcgtgtgtgctc

SEQ ID NO: 5059147 - DNA, 25 bp, Homo sapien
ccagtggaaatcgaaggccagaagg

SEQ ID NO: 5059148 - DNA, 25 bp, Homo sapien
acccaggctccagcaaggcagtctt

SEQ ID NO: 5059149 - DNA, 25 bp, Homo sapien
aggtatggggatgcgcccctgctca

SEQ ID NO: 5059150 - DNA, 25 bp, Homo sapien
ctaattcaggaaactaggtccttgg

SEQ ID NO: 5059151 - DNA, 25 bp, Homo sapien
tccatggagacctggtcttagacgc

SEQ ID NO: 5059152 - DNA, 25 bp, Homo sapien
tggtcttagacgcacttcccaccaa

SEQ ID NO: 5059153 - DNA, 25 bp, Homo sapien
ctgtgctccactcggcccccggctt

SEQ ID NO: 5059154 - DNA, 25 bp, Homo sapien
cagggctgtgctccactcggccccc

SEQ ID NO: 5059155 - DNA, 25 bp, Homo sapien
tcacggctgcgtgcagagacaccac

SEQ ID NO: 5059156 - DNA, 25 bp, Homo sapien
acggctgcgtgcagagacaccactc

SEQ ID NO: 5059157 - DNA, 25 bp, Homo sapien
gcactctagtaagcccaggttccag

SEQ ID NO: 5059158 - DNA, 25 bp, Homo sapien
ctagactttccggatccctgaggcc

SEQ ID NO: 5059159 - DNA, 25 bp, Homo sapien
tcaggcggcagtatgtacgaggaca

SEQ ID NO: 5059160 - DNA, 25 bp, Homo sapien
caggtccccattactggatgttagg

SEQ ID NO: 5059161 - DNA, 25 bp, Homo sapien
ggaaaacgactcagggtctaagctg

SEQ ID NO: 5059162 - DNA, 25 bp, Homo sapien
gtggagaagaagaacctaattcagc

SEQ ID NO: 5059163 - DNA, 25 bp, Homo sapien
ctgtggagaagaagaacctaattca

SEQ ID NO: 5059164 - DNA, 25 bp, Homo sapien
aaaacgactcagggtctaagctggg

SEQ ID NO: 5059165 - DNA, 25 bp, Homo sapien
acggcgcaggactccgggaggccag

SEQ ID NO: 5059166 - DNA, 25 bp, Homo sapien
cctgcgttccgggaggcgttgtcct

SEQ ID NO: 5059167 - DNA, 25 bp, Homo sapien
ggtccaggaggagcgacggcgcagg

SEQ ID NO: 5059168 - DNA, 25 bp, Homo sapien
tccgggaggccagccgtgcgcagtt

SEQ ID NO: 5059169 - DNA, 25 bp, Homo sapien
tcgggaacctccaccagcgagagga

SEQ ID NO: 5059170 - DNA, 25 bp, Homo sapien
agcgagcgcggtcgggaacctccac

SEQ ID NO: 5059171 - DNA, 25 bp, Homo sapien
aggcccgagcctgcgcaacgcaccg

SEQ ID NO: 5059172 - DNA, 25 bp, Homo sapien
gcggtcgggaacctccaccagcgag

SEQ ID NO: 5059173 - DNA, 25 bp, Homo sapien
gaaaacgctctgtttgggtgggtgc

SEQ ID NO: 5059174 - DNA, 25 bp, Homo sapien
cggttggaggccgtaggagcgggtg

SEQ ID NO: 5059175 - DNA, 25 bp, Homo sapien
aaaacgctctgtttgggtgggtgcg

SEQ ID NO: 5059176 - DNA, 25 bp, Homo sapien
aaacgctctgtttgggtgggtgcgt

SEQ ID NO: 5059177 - DNA, 25 bp, Homo sapien
tgcccgcgccagagctgtggaccga

SEQ ID NO: 5059178 - DNA, 25 bp, Homo sapien
ctagagagcccgcaagccccggggt

SEQ ID NO: 5059179 - DNA, 25 bp, Homo sapien
ccagagctgtggaccgagctgaccg

SEQ ID NO: 5059180 - DNA, 25 bp, Homo sapien
agctgtggaccgagctgaccggcct

SEQ ID NO: 5059181 - DNA, 25 bp, Homo sapien
ccttggctccctgtcaacaaggtgg

SEQ ID NO: 5059182 - DNA, 25 bp, Homo sapien
gtggcccaataaacaccgtggactc

SEQ ID NO: 5059183 - DNA, 25 bp, Homo sapien
aaaggtgctacctcctttccagaca

SEQ ID NO: 5059184 - DNA, 25 bp, Homo sapien
accagggtgagggttgtgcccagct

SEQ ID NO: 5059185 - DNA, 25 bp, Homo sapien
ccaggtcccgagggtggctgaccca

SEQ ID NO: 5059186 - DNA, 25 bp, Homo sapien
tggcaccccttggaagagggcgtct

SEQ ID NO: 5059187 - DNA, 25 bp, Homo sapien
aaacgtcgtagatgcttttgttggg

SEQ ID NO: 5059188 - DNA, 25 bp, Homo sapien
gcgtctagatcgcagagcagccctg

SEQ ID NO: 5059189 - DNA, 25 bp, Homo sapien
gcattaccacattgggagtgtagat

SEQ ID NO: 5059190 - DNA, 25 bp, Homo sapien
ccacattgggagtgtagataggcaa

SEQ ID NO: 5059191 - DNA, 25 bp, Homo sapien
tagataggcaagtaggaggtgggca

SEQ ID NO: 5059192 - DNA, 25 bp, Homo sapien
gtggtggtgccaagggcattaccac

SEQ ID NO: 5059193 - DNA, 25 bp, Homo sapien
tcccccaggaactgcggtgccctgc

SEQ ID NO: 5059194 - DNA, 25 bp, Homo sapien
cctccactctcgtggggccaggaag

SEQ ID NO: 5059195 - DNA, 25 bp, Homo sapien
tggggagagggttgagggcccgatg

SEQ ID NO: 5059196 - DNA, 25 bp, Homo sapien
ggagagggttgagggcccgatggct

SEQ ID NO: 5059197 - DNA, 25 bp, Homo sapien
ggctgctctgtggagctagccccgg

SEQ ID NO: 5059198 - DNA, 25 bp, Homo sapien
tgttccctgtgcctgcaggaactgg

SEQ ID NO: 5059199 - DNA, 25 bp, Homo sapien
tgggctgctctgtggagctagcccc

SEQ ID NO: 5059200 - DNA, 25 bp, Homo sapien
tgtgcctgcaggaactgggctgctc

SEQ ID NO: 5059201 - DNA, 25 bp, Homo sapien
cggaccctcctagcagggacttgat

SEQ ID NO: 5059202 - DNA, 25 bp, Homo sapien
cctcctagcagggacttgatgctga

SEQ ID NO: 5059203 - DNA, 25 bp, Homo sapien
cccggaccctcctagcagggacttg

SEQ ID NO: 5059204 - DNA, 25 bp, Homo sapien
gaccctcctagcagggacttgatgc

SEQ ID NO: 5059205 - DNA, 25 bp, Homo sapien
gtcgaccgcccagaagttgcccttg

SEQ ID NO: 5059206 - DNA, 25 bp, Homo sapien
tcgaccgcccagaagttgcccttgg

SEQ ID NO: 5059207 - DNA, 25 bp, Homo sapien
ttgtggcgaatggagtctttccagc

SEQ ID NO: 5059208 - DNA, 25 bp, Homo sapien
acacggcctggacctgacggatgat

SEQ ID NO: 5059209 - DNA, 25 bp, Homo sapien
cagccctcgtagtcttccctgaaga

SEQ ID NO: 5059210 - DNA, 25 bp, Homo sapien
catcggttggaggaaaggttgtggc

SEQ ID NO: 5059211 - DNA, 25 bp, Homo sapien
cgatcatggccaagtaggtgtaggg

SEQ ID NO: 5059212 - DNA, 25 bp, Homo sapien
ccagcttcagtctgcgggagggagc

SEQ ID NO: 5059213 - DNA, 25 bp, Homo sapien
gggcttgtcatgtcgcaggtacctc

SEQ ID NO: 5059214 - DNA, 25 bp, Homo sapien
ggagcggcctgaatcaccaaggcga

SEQ ID NO: 5059215 - DNA, 25 bp, Homo sapien
gccccaggcgggagccgctgcaggg

SEQ ID NO: 5059216 - DNA, 25 bp, Homo sapien
ccaggcgggagccgctgcagggccc

SEQ ID NO: 5059217 - DNA, 25 bp, Homo sapien
ctgggggccccaggcgggagccgct

SEQ ID NO: 5059218 - DNA, 25 bp, Homo sapien
ggcgggagccgctgcagggccccat

SEQ ID NO: 5059219 - DNA, 25 bp, Homo sapien
gcgggacggtagacagcgtgggcag

SEQ ID NO: 5059220 - DNA, 25 bp, Homo sapien
gacggtagacagcgtgggcaggggc

SEQ ID NO: 5059221 - DNA, 25 bp, Homo sapien
cgggacggtagacagcgtgggcagg

SEQ ID NO: 5059222 - DNA, 25 bp, Homo sapien
gggacggtagacagcgtgggcaggg

SEQ ID NO: 5059223 - DNA, 25 bp, Homo sapien
agcccgcaccctaggaacaagaggg

SEQ ID NO: 5059224 - DNA, 25 bp, Homo sapien
tgccgagggcttccacaattagcag

SEQ ID NO: 5059225 - DNA, 25 bp, Homo sapien
gctgcgatgacccatggctacttta

SEQ ID NO: 5059226 - DNA, 25 bp, Homo sapien
gagtatttagcccatgccaagctcc

SEQ ID NO: 5059227 - DNA, 25 bp, Homo sapien
tagcagctctgggaattagcagcgg

SEQ ID NO: 5059228 - DNA, 25 bp, Homo sapien
ggcccagggatatgcttttgccctt

SEQ ID NO: 5059229 - DNA, 25 bp, Homo sapien
gcagcctccaccatgataacctcaa

SEQ ID NO: 5059230 - DNA, 25 bp, Homo sapien
ctgaaaatctgcagcatacggtggg

SEQ ID NO: 5059231 - DNA, 25 bp, Homo sapien
ccgcggaagccagcggacccacttg

SEQ ID NO: 5059232 - DNA, 25 bp, Homo sapien
agccagcggacccacttgtgcggcg

SEQ ID NO: 5059233 - DNA, 25 bp, Homo sapien
cagcggacccacttgtgcggcggtc

SEQ ID NO: 5059234 - DNA, 25 bp, Homo sapien
cggaagccagcggacccacttgtgc

SEQ ID NO: 5059235 - DNA, 25 bp, Homo sapien
aagaggcctctggttgcgctgcctg

SEQ ID NO: 5059236 - DNA, 25 bp, Homo sapien
gcggcgtgcggctgggttgcctgag

SEQ ID NO: 5059237 - DNA, 25 bp, Homo sapien
cagagccacgactcgccgagaggag

SEQ ID NO: 5059238 - DNA, 25 bp, Homo sapien
ttgcgctgcctgattcagggaccca

SEQ ID NO: 5059239 - DNA, 25 bp, Homo sapien
agggagtggctctgctatgttcaga

SEQ ID NO: 5059240 - DNA, 25 bp, Homo sapien
agcccttgagggagtggctctgcta

SEQ ID NO: 5059241 - DNA, 25 bp, Homo sapien
cccttgagggagtggctctgctatg

SEQ ID NO: 5059242 - DNA, 25 bp, Homo sapien
tggctctgctatgttcagagtcact

SEQ ID NO: 5059243 - DNA, 25 bp, Homo sapien
tactggcacacggatgaggagtcgt

SEQ ID NO: 5059244 - DNA, 25 bp, Homo sapien
agcaagcctgtcgtctagtggaaga

SEQ ID NO: 5059245 - DNA, 25 bp, Homo sapien
tagtggaagacactggccgggacac

SEQ ID NO: 5059246 - DNA, 25 bp, Homo sapien
tttcagagtggaccctgtgagccgc

SEQ ID NO: 5059247 - DNA, 25 bp, Homo sapien
ggctcaagcgaccagcctgcttagg

SEQ ID NO: 5059248 - DNA, 25 bp, Homo sapien
gccccgccgatcttttgttctgtaa

SEQ ID NO: 5059249 - DNA, 25 bp, Homo sapien
agccactgttccctgacggttaaat

SEQ ID NO: 5059250 - DNA, 25 bp, Homo sapien
taatctttccttcccgtggctggag

SEQ ID NO: 5059251 - DNA, 25 bp, Homo sapien
tatgaaacacctgggtagaagtcca

SEQ ID NO: 5059252 - DNA, 25 bp, Homo sapien
tctgcggtctacagagctggccagg

SEQ ID NO: 5059253 - DNA, 25 bp, Homo sapien
tggcttaatttgacctggcccagga

SEQ ID NO: 5059254 - DNA, 25 bp, Homo sapien
gactatgtctagagtaggctgaacc

SEQ ID NO: 5059255 - DNA, 25 bp, Homo sapien
ttagtactgatgcactgacctcggc

SEQ ID NO: 5059256 - DNA, 25 bp, Homo sapien
tgcccggaagctggaaccttgttat

SEQ ID NO: 5059257 - DNA, 25 bp, Homo sapien
tacataggcagggttgtgccccagc

SEQ ID NO: 5059258 - DNA, 25 bp, Homo sapien
cacacttagtgtgtcgggcaggact

SEQ ID NO: 5059259 - DNA, 25 bp, Homo sapien
tgccctaggctctgcttgtgactct

SEQ ID NO: 5059260 - DNA, 25 bp, Homo sapien
tgggtgccgtctcatgccaaggctg

SEQ ID NO: 5059261 - DNA, 25 bp, Homo sapien
agcctgcagaaaaacctagtgcggg

SEQ ID NO: 5059262 - DNA, 25 bp, Homo sapien
tggtctccacctccgtgaaataggg

SEQ ID NO: 5059263 - DNA, 25 bp, Homo sapien
ctgtgccccacgcttgcagccccag

SEQ ID NO: 5059264 - DNA, 25 bp, Homo sapien
ggcactgtggtggcccttgagactc

SEQ ID NO: 5059265 - DNA, 25 bp, Homo sapien
agcagagagtaaagaggagccggca

SEQ ID NO: 5059266 - DNA, 25 bp, Homo sapien
cctccctccggagcagagagtaaag

SEQ ID NO: 5059267 - DNA, 25 bp, Homo sapien
gacttggccaacgaggacggcctga

SEQ ID NO: 5059268 - DNA, 25 bp, Homo sapien
tgggccgaagcacagttgacaggac

SEQ ID NO: 5059269 - DNA, 25 bp, Homo sapien
aaggagctgtggtagcctccaggca

SEQ ID NO: 5059270 - DNA, 25 bp, Homo sapien
gagagctcatgaacacagggctggc

SEQ ID NO: 5059271 - DNA, 25 bp, Homo sapien
ctttaacacagagggacgtagagcg

SEQ ID NO: 5059272 - DNA, 25 bp, Homo sapien
tgctcatcgccaggtagggcctgtt

SEQ ID NO: 5059273 - DNA, 25 bp, Homo sapien
tgggcagtatctgtggctctcggcc

SEQ ID NO: 5059274 - DNA, 25 bp, Homo sapien
cctgtgacagtgagtgctggacgcc

SEQ ID NO: 5059275 - DNA, 25 bp, Homo sapien
gatccctggatggatagagactgca

SEQ ID NO: 5059276 - DNA, 25 bp, Homo sapien
tggcggtcaacaccgacgggaacat

SEQ ID NO: 5059277 - DNA, 25 bp, Homo sapien
gatgatgagcagacgctggactgcc

SEQ ID NO: 5059278 - DNA, 25 bp, Homo sapien
tcagggctgcggtcattctcgagtg

SEQ ID NO: 5059279 - DNA, 25 bp, Homo sapien
catcctgtcctgcccgagtccaggg

SEQ ID NO: 5059280 - DNA, 25 bp, Homo sapien
gacgtggcgcggtacattgagaggc

SEQ ID NO: 5059281 - DNA, 25 bp, Homo sapien
agctgatccgggaggacgtggcgcg

SEQ ID NO: 5059282 - DNA, 25 bp, Homo sapien
gggcctacagcgtcagctccggcat

SEQ ID NO: 5059283 - DNA, 25 bp, Homo sapien
ttctgaagtaggcatgatagtcccc

SEQ ID NO: 5059284 - DNA, 25 bp, Homo sapien
tagtccccatttgatagacgtggaa

SEQ ID NO: 5059285 - DNA, 25 bp, Homo sapien
gctggggggtcactcaatctgcaca

SEQ ID NO: 5059286 - DNA, 25 bp, Homo sapien
gatagacgtggaaacctgcaaccca

SEQ ID NO: 5059287 - DNA, 25 bp, Homo sapien
cagaaaaatgcgttgggtccagtgc

SEQ ID NO: 5059288 - DNA, 25 bp, Homo sapien
acaaacttgggagataggactggcc

SEQ ID NO: 5059289 - DNA, 25 bp, Homo sapien
gacagggctggctttagagactcac

SEQ ID NO: 5059290 - DNA, 25 bp, Homo sapien
cctcaagtccgccaaggacagggct

SEQ ID NO: 5059291 - DNA, 25 bp, Homo sapien
cgggctcgaatcaggcagggtgctc

SEQ ID NO: 5059292 - DNA, 25 bp, Homo sapien
ccttgtcaccggacaccgaagggcg

SEQ ID NO: 5059293 - DNA, 25 bp, Homo sapien
gcagggcgggctcgaatcaggcagg

SEQ ID NO: 5059294 - DNA, 25 bp, Homo sapien
cagggtgctcctagccttgtcaccg

SEQ ID NO: 5059295 - DNA, 25 bp, Homo sapien
cacacttccctcctaacttccatgg

SEQ ID NO: 5059296 - DNA, 25 bp, Homo sapien
tgtccttctgagctaagctgggtcc

SEQ ID NO: 5059297 - DNA, 25 bp, Homo sapien
gctaagctgggtcctgacctttcac

SEQ ID NO: 5059298 - DNA, 25 bp, Homo sapien
ttccctcctaacttccatggctctg

SEQ ID NO: 5059299 - DNA, 25 bp, Homo sapien
caccggaagtatccagtggtagacg

SEQ ID NO: 5059300 - DNA, 25 bp, Homo sapien
gtatccagtggtagacggcggaacc

SEQ ID NO: 5059301 - DNA, 25 bp, Homo sapien
gggtccgcaccggaagtatccagtg

SEQ ID NO: 5059302 - DNA, 25 bp, Homo sapien
aagtatccagtggtagacggcggaa

SEQ ID NO: 5059303 - DNA, 25 bp, Homo sapien
actgcagcaaccacgcttcggctga

SEQ ID NO: 5059304 - DNA, 25 bp, Homo sapien
aacggacgccttcatgcgggcggct

SEQ ID NO: 5059305 - DNA, 25 bp, Homo sapien
tgggcactgcagcaaccacgcttcg

SEQ ID NO: 5059306 - DNA, 25 bp, Homo sapien
cttaagaaacggacgccttcatgcg

SEQ ID NO: 5059307 - DNA, 25 bp, Homo sapien
ttgcggtctctgtggcccgcgcgac

SEQ ID NO: 5059308 - DNA, 25 bp, Homo sapien
tggcccgttgcggtctctgtggccc

SEQ ID NO: 5059309 - DNA, 25 bp, Homo sapien
cgttgcggtctctgtggcccgcgcg

SEQ ID NO: 5059310 - DNA, 25 bp, Homo sapien
gctctggcccgttgcggtctctgtg

SEQ ID NO: 5059311 - DNA, 25 bp, Homo sapien
gtggtccgtgctccgctctgtggct

SEQ ID NO: 5059312 - DNA, 25 bp, Homo sapien
ctccagggggccgagaaactgctga

SEQ ID NO: 5059313 - DNA, 25 bp, Homo sapien
agaaactgctgagagtccggcccgg

SEQ ID NO: 5059314 - DNA, 25 bp, Homo sapien
tccagcgacgccgtgtggtccgtgc

SEQ ID NO: 5059315 - DNA, 25 bp, Homo sapien
gaggcagcggccccgccctctttac

SEQ ID NO: 5059316 - DNA, 25 bp, Homo sapien
ggaggcagcggccccgccctcttta

SEQ ID NO: 5059317 - DNA, 25 bp, Homo sapien
gccgagggccccgggaggcagcggc

SEQ ID NO: 5059318 - DNA, 25 bp, Homo sapien
ccgggaggcagcggccccgccctct

SEQ ID NO: 5059319 - DNA, 25 bp, Homo sapien
gaggcagtggccccgctcccctcac

SEQ ID NO: 5059320 - DNA, 25 bp, Homo sapien
ggaggcagtggccccgctcccctca

SEQ ID NO: 5059321 - DNA, 25 bp, Homo sapien
gggagccgcgggaggcagtggcccc

SEQ ID NO: 5059322 - DNA, 25 bp, Homo sapien
gctgggagccgcgggaggcagtggc

SEQ ID NO: 5059323 - DNA, 25 bp, Homo sapien
cccttccctgcggccgcgcagagca

SEQ ID NO: 5059324 - DNA, 25 bp, Homo sapien
cccccttccctgcggccgcgcagag

SEQ ID NO: 5059325 - DNA, 25 bp, Homo sapien
ctgcggtatcgcagagcatggtggg

SEQ ID NO: 5059326 - DNA, 25 bp, Homo sapien
ccttccctgcggccgcgcagagcat

SEQ ID NO: 5059327 - DNA, 25 bp, Homo sapien
ctcagtcactgccctagcctctgac

SEQ ID NO: 5059328 - DNA, 25 bp, Homo sapien
tagcctctgacaaccccagctctac

SEQ ID NO: 5059329 - DNA, 25 bp, Homo sapien
tgcattttggagcctcctcgttccc

SEQ ID NO: 5059330 - DNA, 25 bp, Homo sapien
cacaccctgtggcaggttttgccca

SEQ ID NO: 5059331 - DNA, 25 bp, Homo sapien
agaagcgtcggtcctgcccgtacac

SEQ ID NO: 5059332 - DNA, 25 bp, Homo sapien
caccagggcatggaagctcaggtgc

SEQ ID NO: 5059333 - DNA, 25 bp, Homo sapien
gctcaggtgcaggtattttctccag

SEQ ID NO: 5059334 - DNA, 25 bp, Homo sapien
cgtacacctgggccgggtagcaggg

SEQ ID NO: 5059335 - DNA, 25 bp, Homo sapien
cgatgccgtggaagatgcgggccac

SEQ ID NO: 5059336 - DNA, 25 bp, Homo sapien
gatgtcgcagcggacctggtcctcc

SEQ ID NO: 5059337 - DNA, 25 bp, Homo sapien
aggaactggcggatgtcgcagcgga

SEQ ID NO: 5059338 - DNA, 25 bp, Homo sapien
tggaagatgcgggccacagccctgc

SEQ ID NO: 5059339 - DNA, 25 bp, Homo sapien
tggctcggggccctgtgcgtcctcc

SEQ ID NO: 5059340 - DNA, 25 bp, Homo sapien
aagtagcggccgagcaggtccttga

SEQ ID NO: 5059341 - DNA, 25 bp, Homo sapien
agcggccgagcaggtccttgagcct

SEQ ID NO: 5059342 - DNA, 25 bp, Homo sapien
ctcaaagtagcggccgagcaggtcc

SEQ ID NO: 5059343 - DNA, 25 bp, Homo sapien
cgcagacgggccagggcctggcgct

SEQ ID NO: 5059344 - DNA, 25 bp, Homo sapien
gctgcgaaggtggaaggccagctca

SEQ ID NO: 5059345 - DNA, 25 bp, Homo sapien
catagaggaagtcacatatctggtc

SEQ ID NO: 5059346 - DNA, 25 bp, Homo sapien
cgggcctgcacacggccatagagga

SEQ ID NO: 5059347 - DNA, 25 bp, Homo sapien
ccggaaagcatgtcagatgcaggca

SEQ ID NO: 5059348 - DNA, 25 bp, Homo sapien
ctgccggaaagcatgtcagatgcag

SEQ ID NO: 5059349 - DNA, 25 bp, Homo sapien
cggaaagcatgtcagatgcaggcag

SEQ ID NO: 5059350 - DNA, 25 bp, Homo sapien
tgccggaaagcatgtcagatgcagg

SEQ ID NO: 5059351 - DNA, 25 bp, Homo sapien
tcctgggctcgtggtcccactgcag

SEQ ID NO: 5059352 - DNA, 25 bp, Homo sapien
ctgtcctgggctcgtggtcccactg

SEQ ID NO: 5059353 - DNA, 25 bp, Homo sapien
tgtcctgggctcgtggtcccactgc

SEQ ID NO: 5059354 - DNA, 25 bp, Homo sapien
gtcctgggctcgtggtcccactgca

SEQ ID NO: 5059355 - DNA, 25 bp, Homo sapien
tgggccaagcacacagccaaagggg

SEQ ID NO: 5059356 - DNA, 25 bp, Homo sapien
caagcacacagccaaagggggacac

SEQ ID NO: 5059357 - DNA, 25 bp, Homo sapien
ggccaagcacacagccaaaggggga

SEQ ID NO: 5059358 - DNA, 25 bp, Homo sapien
gccaagcacacagccaaagggggac

SEQ ID NO: 5059359 - DNA, 25 bp, Homo sapien
aggtagcacagcaaagtctcgatgg

SEQ ID NO: 5059360 - DNA, 25 bp, Homo sapien
caggtagcacagcaaagtctcgatg

SEQ ID NO: 5059361 - DNA, 25 bp, Homo sapien
cccagggcagttcagacggcaatgg

SEQ ID NO: 5059362 - DNA, 25 bp, Homo sapien
ggtataggtggtcgccagcagctcc

SEQ ID NO: 5059363 - DNA, 25 bp, Homo sapien
gagcagggctcagcggacgcgggga

SEQ ID NO: 5059364 - DNA, 25 bp, Homo sapien
ccacacccctgtggcttaccccagg

SEQ ID NO: 5059365 - DNA, 25 bp, Homo sapien
cagagcagggctcagcggacgcggg

SEQ ID NO: 5059366 - DNA, 25 bp, Homo sapien
ctccacacccctgtggcttacccca

SEQ ID NO: 5059367 - DNA, 25 bp, Homo sapien
acggtaagctgtattgggagtgccc

SEQ ID NO: 5059368 - DNA, 25 bp, Homo sapien
tgtccaaagcctgtacggtaagctg

SEQ ID NO: 5059369 - DNA, 25 bp, Homo sapien
agtgcccgctcatggcccatgcaga

SEQ ID NO: 5059370 - DNA, 25 bp, Homo sapien
gctgcttggtggctaagctgctcag

SEQ ID NO: 5059371 - DNA, 25 bp, Homo sapien
ggcgtgcacatgtctgcgcagctct

SEQ ID NO: 5059372 - DNA, 25 bp, Homo sapien
ctgcgcagctctcgcaggtcttcgc

SEQ ID NO: 5059373 - DNA, 25 bp, Homo sapien
tgctgtcggcgtgcacatgtctgcg

SEQ ID NO: 5059374 - DNA, 25 bp, Homo sapien
gccaggaagtccgtgctgtcggcgt

SEQ ID NO: 5059375 - DNA, 25 bp, Homo sapien
agggcaactttcatgagggtggggt

SEQ ID NO: 5059376 - DNA, 25 bp, Homo sapien
ggtggcagtgggcaggctgcccgtc

SEQ ID NO: 5059377 - DNA, 25 bp, Homo sapien
gcaggaagaggtggcagtgggcagg

SEQ ID NO: 5059378 - DNA, 25 bp, Homo sapien
tggcagtgggcaggctgcccgtcac

SEQ ID NO: 5059379 - DNA, 25 bp, Homo sapien
aggaagaggtggcagtgggcaggct

SEQ ID NO: 5059380 - DNA, 25 bp, Homo sapien
ctgcacgtagctctcgaagcttggg

SEQ ID NO: 5059381 - DNA, 25 bp, Homo sapien
acggcctgcacgtagctctcgaagc

SEQ ID NO: 5059382 - DNA, 25 bp, Homo sapien
agatgcagcacagcccgcacatctg

SEQ ID NO: 5059383 - DNA, 25 bp, Homo sapien
gcctgcacgtagctctcgaagcttg

SEQ ID NO: 5059384 - DNA, 25 bp, Homo sapien
ggccctgcatgaaggctcgctgtac

SEQ ID NO: 5059385 - DNA, 25 bp, Homo sapien
aactggccctgcatgaaggctcgct

SEQ ID NO: 5059386 - DNA, 25 bp, Homo sapien
tggccctgcatgaaggctcgctgta

SEQ ID NO: 5059387 - DNA, 25 bp, Homo sapien
accaccacccggcaactggccctgc

SEQ ID NO: 5059388 - DNA, 25 bp, Homo sapien
gcacatgcccgcgtggtaggcctcg

SEQ ID NO: 5059389 - DNA, 25 bp, Homo sapien
ctgcacatgcccgcgtggtaggcct

SEQ ID NO: 5059390 - DNA, 25 bp, Homo sapien
ggctgcacatgcccgcgtggtaggc

SEQ ID NO: 5059391 - DNA, 25 bp, Homo sapien
ccggctgcacatgcccgcgtggtag

SEQ ID NO: 5059392 - DNA, 25 bp, Homo sapien
taaatgataatggaatcgaggtttt

SEQ ID NO: 5059393 - DNA, 25 bp, Homo sapien
gctctgtgtcctcgcgccggttgca

SEQ ID NO: 5059394 - DNA, 25 bp, Homo sapien
acccaggctgcgtgcaggcaggttc

SEQ ID NO: 5059395 - DNA, 25 bp, Homo sapien
ttcggaggagcgcagcgatccgctc

SEQ ID NO: 5059396 - DNA, 25 bp, Homo sapien
ccacgtcactggcagtgcggcgtgt

SEQ ID NO: 5059397 - DNA, 25 bp, Homo sapien
tggcccgtggaggtcaggctcttca

SEQ ID NO: 5059398 - DNA, 25 bp, Homo sapien
aggaagcagtgcacgcccatgcgct

SEQ ID NO: 5059399 - DNA, 25 bp, Homo sapien
caggtgctgtgccacgtcactggca

SEQ ID NO: 5059400 - DNA, 25 bp, Homo sapien
gcctcatcaatgcaggcaaaagcaa

SEQ ID NO: 5059401 - DNA, 25 bp, Homo sapien
aggtagcagggccggaagttgtggg

SEQ ID NO: 5059402 - DNA, 25 bp, Homo sapien
ctcatcaatgcaggcaaaagcaact

SEQ ID NO: 5059403 - DNA, 25 bp, Homo sapien
ggtagcagggccggaagttgtggga

SEQ ID NO: 5059404 - DNA, 25 bp, Homo sapien
tgtgcggctggagggaggcctcccg

SEQ ID NO: 5059405 - DNA, 25 bp, Homo sapien
ctgtgcggctggagggaggcctccc

SEQ ID NO: 5059406 - DNA, 25 bp, Homo sapien
gctggagggaggcctcccgccccca

SEQ ID NO: 5059407 - DNA, 25 bp, Homo sapien
gcggctggagggaggcctcccgccc

SEQ ID NO: 5059408 - DNA, 25 bp, Homo sapien
gcacgtgtacctgggctgcccgaat

SEQ ID NO: 5059409 - DNA, 25 bp, Homo sapien
tcaggtgtcagcatcagcacgtgta

SEQ ID NO: 5059410 - DNA, 25 bp, Homo sapien
tgtcagcatcagcacgtgtacctgg

SEQ ID NO: 5059411 - DNA, 25 bp, Homo sapien
catcagcacgtgtacctgggctgcc

SEQ ID NO: 5059412 - DNA, 25 bp, Homo sapien
tctgcaggacagattcccgttgctt

SEQ ID NO: 5059413 - DNA, 25 bp, Homo sapien
ttctgcaggacagattcccgttgct

SEQ ID NO: 5059414 - DNA, 25 bp, Homo sapien
tatgcaggccgccttgagacacggt

SEQ ID NO: 5059415 - DNA, 25 bp, Homo sapien
cgagtgtatgcaggccgccttgaga

SEQ ID NO: 5059416 - DNA, 25 bp, Homo sapien
gcccgagtgtatgcaggccgccttg

SEQ ID NO: 5059417 - DNA, 25 bp, Homo sapien
caggccgccttgagacacggtggca

SEQ ID NO: 5059418 - DNA, 25 bp, Homo sapien
agcaggggagagacgaccaacgtga

SEQ ID NO: 5059419 - DNA, 25 bp, Homo sapien
tggtagcacagggacttgccggcac

SEQ ID NO: 5059420 - DNA, 25 bp, Homo sapien
gggctgcgccggctgtagagcagcg

SEQ ID NO: 5059421 - DNA, 25 bp, Homo sapien
gagagacgaccaacgtgaggcaggg

SEQ ID NO: 5059422 - DNA, 25 bp, Homo sapien
ctgtaggcagcaccagcagcgtgga

SEQ ID NO: 5059423 - DNA, 25 bp, Homo sapien
taggcagcaccagcagcgtggagat

SEQ ID NO: 5059424 - DNA, 25 bp, Homo sapien
ggcagcaccagcagcgtggagatgc

SEQ ID NO: 5059425 - DNA, 25 bp, Homo sapien
tgtaggcagcaccagcagcgtggag

SEQ ID NO: 5059426 - DNA, 25 bp, Homo sapien
ccagggcgaaaggcttggtgcccca

SEQ ID NO: 5059427 - DNA, 25 bp, Homo sapien
agacaggatccgcatgactgcacgc

SEQ ID NO: 5059428 - DNA, 25 bp, Homo sapien
tcctgcccagggcgaaaggcttggt

SEQ ID NO: 5059429 - DNA, 25 bp, Homo sapien
gggcctggaacacctcagccggcgt

SEQ ID NO: 5059430 - DNA, 25 bp, Homo sapien
tggtgaaggaaccagtggctcaggc

SEQ ID NO: 5059431 - DNA, 25 bp, Homo sapien
ccagggagtagagtggcagcacggt

SEQ ID NO: 5059432 - DNA, 25 bp, Homo sapien
cagggagtagagtggcagcacggtg

SEQ ID NO: 5059433 - DNA, 25 bp, Homo sapien
ttgtggtgaaggaaccagtggctca

SEQ ID NO: 5059434 - DNA, 25 bp, Homo sapien
aagcagaaaagagtgacagccatcg

SEQ ID NO: 5059435 - DNA, 25 bp, Homo sapien
agagtgacagccatcgtcgtccctg

SEQ ID NO: 5059436 - DNA, 25 bp, Homo sapien
cagaaaagagtgacagccatcgtcg

SEQ ID NO: 5059437 - DNA, 25 bp, Homo sapien
aaaagagtgacagccatcgtcgtcc

SEQ ID NO: 5059438 - DNA, 25 bp, Homo sapien
gggctgcccagtgatcgaactgctc

SEQ ID NO: 5059439 - DNA, 25 bp, Homo sapien
tggttgtgactgtggcaccaccacc

SEQ ID NO: 5059440 - DNA, 25 bp, Homo sapien
aaacaagactccttggttgtgactg

SEQ ID NO: 5059441 - DNA, 25 bp, Homo sapien
ctgctcgttcaggaaacaagactcc

SEQ ID NO: 5059442 - DNA, 25 bp, Homo sapien
ccgcacgtagtgtttctgcttcatg

SEQ ID NO: 5059443 - DNA, 25 bp, Homo sapien
tgcttgcggaggagcctgctacgga

SEQ ID NO: 5059444 - DNA, 25 bp, Homo sapien
agtgcccggccccgcacgtagtgtt

SEQ ID NO: 5059445 - DNA, 25 bp, Homo sapien
catgttgagccgtacgtaattgccc

SEQ ID NO: 5059446 - DNA, 25 bp, Homo sapien
gggccagccgagggaagatgtgcag

SEQ ID NO: 5059447 - DNA, 25 bp, Homo sapien
gcgggccagccgagggaagatgtgc

SEQ ID NO: 5059448 - DNA, 25 bp, Homo sapien
cgggccagccgagggaagatgtgca

SEQ ID NO: 5059449 - DNA, 25 bp, Homo sapien
tgggggctccccacacggatgctga

SEQ ID NO: 5059450 - DNA, 25 bp, Homo sapien
ctcgttccatctccgcttctcgcct

SEQ ID NO: 5059451 - DNA, 25 bp, Homo sapien
tgtgcctgtacaggttcccctggag

SEQ ID NO: 5059452 - DNA, 25 bp, Homo sapien
tgctctcctgctggacctgtgcggg

SEQ ID NO: 5059453 - DNA, 25 bp, Homo sapien
ggagccagcaccaggaccaaggaca

SEQ ID NO: 5059454 - DNA, 25 bp, Homo sapien
ccaggaccaaggacagccgactcac

SEQ ID NO: 5059455 - DNA, 25 bp, Homo sapien
gcaccaggaccaaggacagccgact

SEQ ID NO: 5059456 - DNA, 25 bp, Homo sapien
ctgggagccagcaccaggaccaagg

SEQ ID NO: 5059457 - DNA, 25 bp, Homo sapien
agttgtgattcctctgagcctagat

SEQ ID NO: 5059458 - DNA, 25 bp, Homo sapien
tgattcctctgagcctagatcaggc

SEQ ID NO: 5059459 - DNA, 25 bp, Homo sapien
ctctgagcctagatcaggcctgcag

SEQ ID NO: 5059460 - DNA, 25 bp, Homo sapien
cagggatcagaagttgtgattcctc

SEQ ID NO: 5059461 - DNA, 25 bp, Homo sapien
gagctgtggaggctcatcactgact

SEQ ID NO: 5059462 - DNA, 25 bp, Homo sapien
atgctggagccggcctggccttggc

SEQ ID NO: 5059463 - DNA, 25 bp, Homo sapien
gctgtggaggctcatcactgacttt

SEQ ID NO: 5059464 - DNA, 25 bp, Homo sapien
tgtggaggctcatcactgacttttt

SEQ ID NO: 5059465 - DNA, 25 bp, Homo sapien
tgcaaaggaggggacaggccctgta

SEQ ID NO: 5059466 - DNA, 25 bp, Homo sapien
ctgcaaaggaggggacaggccctgt

SEQ ID NO: 5059467 - DNA, 25 bp, Homo sapien
gcaaaggaggggacaggccctgtac

SEQ ID NO: 5059468 - DNA, 25 bp, Homo sapien
ggtggatgccttagatgaggctctt

SEQ ID NO: 5059469 - DNA, 25 bp, Homo sapien
tcttcctagaggccacggtctgcgg

SEQ ID NO: 5059470 - DNA, 25 bp, Homo sapien
tggatgccttagatgaggctcttcc

SEQ ID NO: 5059471 - DNA, 25 bp, Homo sapien
ttcctagaggccacggtctgcggcc

SEQ ID NO: 5059472 - DNA, 25 bp, Homo sapien
ttgagccgctgcccgtagtccggca

SEQ ID NO: 5059473 - DNA, 25 bp, Homo sapien
gtggactcttggtcgcagcccgatt

SEQ ID NO: 5059474 - DNA, 25 bp, Homo sapien
gccctggcgtagactgtggactctt

SEQ ID NO: 5059475 - DNA, 25 bp, Homo sapien
ggtgcctttcagattggccttgagc

SEQ ID NO: 5059476 - DNA, 25 bp, Homo sapien
gggagcgactcggagctgcggagcc

SEQ ID NO: 5059477 - DNA, 25 bp, Homo sapien
ccgtggtacgcttcagagtgcggta

SEQ ID NO: 5059478 - DNA, 25 bp, Homo sapien
cggcctggcccgtggtacgcttcag

SEQ ID NO: 5059479 - DNA, 25 bp, Homo sapien
cagagtgcggtattcccggtagagc

SEQ ID NO: 5059480 - DNA, 25 bp, Homo sapien
tctcctccggcgccgcctccacgtc

SEQ ID NO: 5059481 - DNA, 25 bp, Homo sapien
tcctccggcgccgcctccacgtcgt

SEQ ID NO: 5059482 - DNA, 25 bp, Homo sapien
ggtctcctccggcgccgcctccacg

SEQ ID NO: 5059483 - DNA, 25 bp, Homo sapien
cgcgggtctcctccggcgccgcctc

SEQ ID NO: 5059484 - DNA, 25 bp, Homo sapien
taaagggaacgcgtcagccgcgggc

SEQ ID NO: 5059485 - DNA, 25 bp, Homo sapien
cgcccgcgctgccgtcggaacgcgc

SEQ ID NO: 5059486 - DNA, 25 bp, Homo sapien
ctgccgtcggaacgcgcgctcccac

SEQ ID NO: 5059487 - DNA, 25 bp, Homo sapien
ccgcgctgccgtcggaacgcgcgct

SEQ ID NO: 5059488 - DNA, 25 bp, Homo sapien
gcgctgccgtcggaacgcgcgctcc

SEQ ID NO: 5059489 - DNA, 25 bp, Homo sapien
gcgcttgcgatcgtccagcgaatct

SEQ ID NO: 5059490 - DNA, 25 bp, Homo sapien
ggcctccgcgcttgcgatcgtccag

SEQ ID NO: 5059491 - DNA, 25 bp, Homo sapien
ttgcgatcgtccagcgaatctcccg

SEQ ID NO: 5059492 - DNA, 25 bp, Homo sapien
tccgcgcttgcgatcgtccagcgaa

SEQ ID NO: 5059493 - DNA, 25 bp, Homo sapien
cctttactgacggagcatgcgcgag

SEQ ID NO: 5059494 - DNA, 25 bp, Homo sapien
aggattcccgagtgcaacgttcccg

SEQ ID NO: 5059495 - DNA, 25 bp, Homo sapien
cttttcggaagagcttcaagggagg

SEQ ID NO: 5059496 - DNA, 25 bp, Homo sapien
tcggaggcccaagatcctactgtgg

SEQ ID NO: 5059497 - DNA, 25 bp, Homo sapien
tagcagtggatctcgtaggcgaccg

SEQ ID NO: 5059498 - DNA, 25 bp, Homo sapien
tgatgacgaacatctcgtggccgcg

SEQ ID NO: 5059499 - DNA, 25 bp, Homo sapien
caagtagtcgttgacgaacagcgct

SEQ ID NO: 5059500 - DNA, 25 bp, Homo sapien
acagatcatggcgaccaggagcagc

SEQ ID NO: 5059501 - DNA, 25 bp, Homo sapien
tgtggccacgcccagggcgcggaag

SEQ ID NO: 5059502 - DNA, 25 bp, Homo sapien
ctgtgtggccacgcccagggcgcgg

SEQ ID NO: 5059503 - DNA, 25 bp, Homo sapien
tggccacgcccagggcgcggaaggc

SEQ ID NO: 5059504 - DNA, 25 bp, Homo sapien
tgtgtggccacgcccagggcgcgga

SEQ ID NO: 5059505 - DNA, 25 bp, Homo sapien
gcggccggaggcggcggttgcgcgg

SEQ ID NO: 5059506 - DNA, 25 bp, Homo sapien
ggccggaggcggcggttgcgcgggc

SEQ ID NO: 5059507 - DNA, 25 bp, Homo sapien
ctcgggccggggctcgctgccggcg

SEQ ID NO: 5059508 - DNA, 25 bp, Homo sapien
gccggggctcgctgccggcggggcg

SEQ ID NO: 5059509 - DNA, 25 bp, Homo sapien
caggagccggaagggcacgcgggca

SEQ ID NO: 5059510 - DNA, 25 bp, Homo sapien
gagccggaagggcacgcgggcagcg

SEQ ID NO: 5059511 - DNA, 25 bp, Homo sapien
gcagcgccgccggcgttggaggcct

SEQ ID NO: 5059512 - DNA, 25 bp, Homo sapien
cgggcagcgccgccggcgttggagg

SEQ ID NO: 5059513 - DNA, 25 bp, Homo sapien
ccggcgtgcgccagcgtgatgttgc

SEQ ID NO: 5059514 - DNA, 25 bp, Homo sapien
cggcgtgcgccagcgtgatgttgct

SEQ ID NO: 5059515 - DNA, 25 bp, Homo sapien
accggcgtgcgccagcgtgatgttg

SEQ ID NO: 5059516 - DNA, 25 bp, Homo sapien
taccggcgtgcgccagcgtgatgtt

SEQ ID NO: 5059517 - DNA, 25 bp, Homo sapien
ctgcccgtgtcggatgccgagtgtc

SEQ ID NO: 5059518 - DNA, 25 bp, Homo sapien
tcggatgccgagtgtccgcccaggc

SEQ ID NO: 5059519 - DNA, 25 bp, Homo sapien
gtgtcggatgccgagtgtccgccca

SEQ ID NO: 5059520 - DNA, 25 bp, Homo sapien
agcaacccgccttctagctgggcct

SEQ ID NO: 5059521 - DNA, 25 bp, Homo sapien
tagccggaggcttggcaggcaaccc

SEQ ID NO: 5059522 - DNA, 25 bp, Homo sapien
tgtgggatacgtccaggagactctg

SEQ ID NO: 5059523 - DNA, 25 bp, Homo sapien
tcaccaatggctgcgggtagccgga

SEQ ID NO: 5059524 - DNA, 25 bp, Homo sapien
agtgcagggcgcagtcacagcgcca

SEQ ID NO: 5059525 - DNA, 25 bp, Homo sapien
cacagcgttttcacacggagtccaa

SEQ ID NO: 5059526 - DNA, 25 bp, Homo sapien
gggtgctgctaaaacagcctgtgca

SEQ ID NO: 5059527 - DNA, 25 bp, Homo sapien
tgcctgttacagatcacttctccgt

SEQ ID NO: 5059528 - DNA, 25 bp, Homo sapien
tctccgtcggtctctgagaaagcac

SEQ ID NO: 5059529 - DNA, 25 bp, Homo sapien
gcagaaccctcaattctgttaagtc

SEQ ID NO: 5059530 - DNA, 25 bp, Homo sapien
agaaccctcaattctgttaagtcac

SEQ ID NO: 5059531 - DNA, 25 bp, Homo sapien
tgcagaaccctcaattctgttaagt

SEQ ID NO: 5059532 - DNA, 25 bp, Homo sapien
cagaaccctcaattctgttaagtca

SEQ ID NO: 5059533 - DNA, 25 bp, Homo sapien
cagtgctagggaggacagccccgct

SEQ ID NO: 5059534 - DNA, 25 bp, Homo sapien
aggacagccccgctagagcctggtc

SEQ ID NO: 5059535 - DNA, 25 bp, Homo sapien
gctgttttcttgcaggtgaagctcc

SEQ ID NO: 5059536 - DNA, 25 bp, Homo sapien
ctgtgaggcgcaggacttgcagact

SEQ ID NO: 5059537 - DNA, 25 bp, Homo sapien
cgcagccggttgctagtgagcgcca

SEQ ID NO: 5059538 - DNA, 25 bp, Homo sapien
ctcccggctctaggcgggcgatgtt

SEQ ID NO: 5059539 - DNA, 25 bp, Homo sapien
tccagggcgcgcaggctgttgttgt

SEQ ID NO: 5059540 - DNA, 25 bp, Homo sapien
ttgttgtgcaggtagagccggcgca

SEQ ID NO: 5059541 - DNA, 25 bp, Homo sapien
ctgcaggccggggaaagaggaggcg

SEQ ID NO: 5059542 - DNA, 25 bp, Homo sapien
tgcaggccggggaaagaggaggcgc

SEQ ID NO: 5059543 - DNA, 25 bp, Homo sapien
gcaggccggggaaagaggaggcgct

SEQ ID NO: 5059544 - DNA, 25 bp, Homo sapien
caggccggggaaagaggaggcgctt

SEQ ID NO: 5059545 - DNA, 25 bp, Homo sapien
cgttgcgggggtcttcctctccctg

SEQ ID NO: 5059546 - DNA, 25 bp, Homo sapien
gcgggattcccagcgggacgacgcg

SEQ ID NO: 5059547 - DNA, 25 bp, Homo sapien
tgcgtccctggcgggattcccagcg

SEQ ID NO: 5059548 - DNA, 25 bp, Homo sapien
ggcgccacactccaccgtggcgctg

SEQ ID NO: 5059549 - DNA, 25 bp, Homo sapien
agcggcagcagtgcgggggccctca

SEQ ID NO: 5059550 - DNA, 25 bp, Homo sapien
tcaccggcccttccgcggttcagcc

SEQ ID NO: 5059551 - DNA, 25 bp, Homo sapien
ggcccttccgcggttcagccgcaga

SEQ ID NO: 5059552 - DNA, 25 bp, Homo sapien
tcctcaccggcccttccgcggttca

SEQ ID NO: 5059553 - DNA, 25 bp, Homo sapien
ttccgcggttcagccgcagacgcgt

SEQ ID NO: 5059554 - DNA, 25 bp, Homo sapien
agcaggtcaggagcttcctgctcag

SEQ ID NO: 5059555 - DNA, 25 bp, Homo sapien
ttcctgctcaggacgtggatgtgtg

SEQ ID NO: 5059556 - DNA, 25 bp, Homo sapien
gctgctgcttggttctagggtgcaa

SEQ ID NO: 5059557 - DNA, 25 bp, Homo sapien
acagggtatggcttgagaactttgc

SEQ ID NO: 5059558 - DNA, 25 bp, Homo sapien
gccttggtgtttaaatcttgcccta

SEQ ID NO: 5059559 - DNA, 25 bp, Homo sapien
ccaagtggccttggtgtttaaatct

SEQ ID NO: 5059560 - DNA, 25 bp, Homo sapien
aaacatttgcctgtccatcagctct

SEQ ID NO: 5059561 - DNA, 25 bp, Homo sapien
tcctcctttcgagtcatgtggaaag

SEQ ID NO: 5059562 - DNA, 25 bp, Homo sapien
tataaagtgttggtacgtggctcca

SEQ ID NO: 5059563 - DNA, 25 bp, Homo sapien
gacgcgtgtgaaccccaagaagttg

SEQ ID NO: 5059564 - DNA, 25 bp, Homo sapien
gaggacaactccctaatccgctggg

SEQ ID NO: 5059565 - DNA, 25 bp, Homo sapien
cagatcggtgtagaaaggcctgcca

SEQ ID NO: 5059566 - DNA, 25 bp, Homo sapien
cacgagagccggttgattttcggcc

SEQ ID NO: 5059567 - DNA, 25 bp, Homo sapien
cagcgctgcgacctggtgcctgtat

SEQ ID NO: 5059568 - DNA, 25 bp, Homo sapien
gaagaggatggaacgccctgtgtct

SEQ ID NO: 5059569 - DNA, 25 bp, Homo sapien
ccaagctggtctttgggcggccctt

SEQ ID NO: 5059570 - DNA, 25 bp, Homo sapien
gagggcgccggagtcgggtgcgcgg

SEQ ID NO: 5059571 - DNA, 25 bp, Homo sapien
gccagtgcctgacgtctcgagcgca

SEQ ID NO: 5059572 - DNA, 25 bp, Homo sapien
aggcgcactaggctgccgcgagcgc

SEQ ID NO: 5059573 - DNA, 25 bp, Homo sapien
ggcccgagcagtcgccgggctggga

SEQ ID NO: 5059574 - DNA, 25 bp, Homo sapien
tcagggcgaccgagccgcgagcagc

SEQ ID NO: 5059575 - DNA, 25 bp, Homo sapien
gggcgaccgagccgcgagcagcagc

SEQ ID NO: 5059576 - DNA, 25 bp, Homo sapien
cgaccgagccgcgagcagcagcggg

SEQ ID NO: 5059577 - DNA, 25 bp, Homo sapien
cagggcgaccgagccgcgagcagca

SEQ ID NO: 5059578 - DNA, 25 bp, Homo sapien
aggaagttgcgctctctgccgcagg

SEQ ID NO: 5059579 - DNA, 25 bp, Homo sapien
gcccgtactcgaagcaggcgctgag

SEQ ID NO: 5059580 - DNA, 25 bp, Homo sapien
tcgccaccgccgcagtaggagaggc

SEQ ID NO: 5059581 - DNA, 25 bp, Homo sapien
cggtcagcaggtgcgtgaagaccac

SEQ ID NO: 5059582 - DNA, 25 bp, Homo sapien
tggcctcactcagcggggctcctga

SEQ ID NO: 5059583 - DNA, 25 bp, Homo sapien
gcccaggaccataccgagggcaggc

SEQ ID NO: 5059584 - DNA, 25 bp, Homo sapien
agggcaggcgccgacggtaagaggt

SEQ ID NO: 5059585 - DNA, 25 bp, Homo sapien
gatgaagggtgcgtgtactcagcgc

SEQ ID NO: 5059586 - DNA, 25 bp, Homo sapien
ggcccgtcggcagagtcggggagcc

SEQ ID NO: 5059587 - DNA, 25 bp, Homo sapien
tgggcccgtcggcagagtcggggag

SEQ ID NO: 5059588 - DNA, 25 bp, Homo sapien
gggcccgtcggcagagtcggggagc

SEQ ID NO: 5059589 - DNA, 25 bp, Homo sapien
ctgggcccgtcggcagagtcgggga

SEQ ID NO: 5059590 - DNA, 25 bp, Homo sapien
ggagaaagaaggggctggagaggga

SEQ ID NO: 5059591 - DNA, 25 bp, Homo sapien
gggctggagagggaggcacagcatt

SEQ ID NO: 5059592 - DNA, 25 bp, Homo sapien
aagaaggggctggagagggaggcac

SEQ ID NO: 5059593 - DNA, 25 bp, Homo sapien
gctggagagggaggcacagcattac

SEQ ID NO: 5059594 - DNA, 25 bp, Homo sapien
ttgaagcaggtgatgaaattcttca

SEQ ID NO: 5059595 - DNA, 25 bp, Homo sapien
tttgaagcaggtgatgaaattcttc

SEQ ID NO: 5059596 - DNA, 25 bp, Homo sapien
gaagcaggtgatgaaattcttcatt

SEQ ID NO: 5059597 - DNA, 25 bp, Homo sapien
tgaagcaggtgatgaaattcttcat

SEQ ID NO: 5059598 - DNA, 25 bp, Homo sapien
tcctgaagctcgggaggtcctgaac

SEQ ID NO: 5059599 - DNA, 25 bp, Homo sapien
gccaggccgtgataagtcccagcgt

SEQ ID NO: 5059600 - DNA, 25 bp, Homo sapien
gcagggaggcgcgtgaaaggtaaac

SEQ ID NO: 5059601 - DNA, 25 bp, Homo sapien
tgtctgtgcacaccgcatgcaggga

SEQ ID NO: 5059602 - DNA, 25 bp, Homo sapien
cctggtcagccaattctttcccgca

SEQ ID NO: 5059603 - DNA, 25 bp, Homo sapien
tttcaagtttgtaatcagttgtacc

SEQ ID NO: 5059604 - DNA, 25 bp, Homo sapien
ctcttttcaagtttgtaatcagttg

SEQ ID NO: 5059605 - DNA, 25 bp, Homo sapien
agtttgtaatcagttgtaccacctc

SEQ ID NO: 5059606 - DNA, 25 bp, Homo sapien
gctgccttttgacagggcttccaaa

SEQ ID NO: 5059607 - DNA, 25 bp, Homo sapien
gggacttgtaggacagagtccgaag

SEQ ID NO: 5059608 - DNA, 25 bp, Homo sapien
cctggcagcggcgagaagtcagcgc

SEQ ID NO: 5059609 - DNA, 25 bp, Homo sapien
ggcggcccgggtgtctccctggcag

SEQ ID NO: 5059610 - DNA, 25 bp, Homo sapien
gacgcggcccatgtaggagcctcgg

SEQ ID NO: 5059611 - DNA, 25 bp, Homo sapien
ctgcacaacgcagcagggacgcggc

SEQ ID NO: 5059612 - DNA, 25 bp, Homo sapien
aggagtcgaggttgcccaccgcgca

SEQ ID NO: 5059613 - DNA, 25 bp, Homo sapien
gctctgaggagtcgaggttgcccac

SEQ ID NO: 5059614 - DNA, 25 bp, Homo sapien
gccccgcctctcgagcaacggccct

SEQ ID NO: 5059615 - DNA, 25 bp, Homo sapien
ccggccccgcctctcgagcaacggc

SEQ ID NO: 5059616 - DNA, 25 bp, Homo sapien
ggccccgcctctcgagcaacggccc

SEQ ID NO: 5059617 - DNA, 25 bp, Homo sapien
cggccccgcctctcgagcaacggcc

SEQ ID NO: 5059618 - DNA, 25 bp, Homo sapien
tggccctggtggtccacgtagtaga

SEQ ID NO: 5059619 - DNA, 25 bp, Homo sapien
tccggactctggccctgcgtgtagg

SEQ ID NO: 5059620 - DNA, 25 bp, Homo sapien
tagtagaaatactcgcgggtccgcg

SEQ ID NO: 5059621 - DNA, 25 bp, Homo sapien
ggagcgtcccgcaaggcggccacat

SEQ ID NO: 5059622 - DNA, 25 bp, Homo sapien
cggtgctgcgcgaactcgcgcctgc

SEQ ID NO: 5059623 - DNA, 25 bp, Homo sapien
cggaagcgaccagcaggtcacgccg

SEQ ID NO: 5059624 - DNA, 25 bp, Homo sapien
tagccccgcgcttcgcgttccggcg

SEQ ID NO: 5059625 - DNA, 25 bp, Homo sapien
gcctgcccgcagtagccccgcgctt

SEQ ID NO: 5059626 - DNA, 25 bp, Homo sapien
tgcactttattcactcgtgtcgtcg

SEQ ID NO: 5059627 - DNA, 25 bp, Homo sapien
cgggaccacccgactgaggacgccg

SEQ ID NO: 5059628 - DNA, 25 bp, Homo sapien
ggcgagcgtctcagccgggcgggac

SEQ ID NO: 5059629 - DNA, 25 bp, Homo sapien
tcgcctctcgggtccatgcgtcggg

SEQ ID NO: 5059630 - DNA, 25 bp, Homo sapien
ctctggccccgagaacggacagtcc

SEQ ID NO: 5059631 - DNA, 25 bp, Homo sapien
aatgtacaaactcggtcccccagca

SEQ ID NO: 5059632 - DNA, 25 bp, Homo sapien
gcccggcgccttcccgctcgctcgt

SEQ ID NO: 5059633 - DNA, 25 bp, Homo sapien
ccttcccgctcgctcgtctcctgca

SEQ ID NO: 5059634 - DNA, 25 bp, Homo sapien
cagaaggcactttctcggagctgac

SEQ ID NO: 5059635 - DNA, 25 bp, Homo sapien
tcaacttgctctgcacggaggacgg

SEQ ID NO: 5059636 - DNA, 25 bp, Homo sapien
tatctctatacacggtgggctgcga

SEQ ID NO: 5059637 - DNA, 25 bp, Homo sapien
gctgcgatgcaggatagattctgga

SEQ ID NO: 5059638 - DNA, 25 bp, Homo sapien
cggtgcccgcgggaactggccgtga

SEQ ID NO: 5059639 - DNA, 25 bp, Homo sapien
tgcccgcgggaactggccgtgaggt

SEQ ID NO: 5059640 - DNA, 25 bp, Homo sapien
cccgcgggaactggccgtgaggtgg

SEQ ID NO: 5059641 - DNA, 25 bp, Homo sapien
ggcgaggcggtgcccgcgggaactg

SEQ ID NO: 5059642 - DNA, 25 bp, Homo sapien
ggcagaagacgtggggagcgccggg

SEQ ID NO: 5059643 - DNA, 25 bp, Homo sapien
gctgggccgggcgattctggcccct

SEQ ID NO: 5059644 - DNA, 25 bp, Homo sapien
ggctgggccgggcgattctggcccc

SEQ ID NO: 5059645 - DNA, 25 bp, Homo sapien
agagcgagtgcggagttcggcctgg

SEQ ID NO: 5059646 - DNA, 25 bp, Homo sapien
gagtgcggagttcggcctggctggg

SEQ ID NO: 5059647 - DNA, 25 bp, Homo sapien
ggagagcgagtgcggagttcggcct

SEQ ID NO: 5059648 - DNA, 25 bp, Homo sapien
ggggcggcaggacatccctcctgtc

SEQ ID NO: 5059649 - DNA, 25 bp, Homo sapien
gcagttgggcgccatcaccatggcc

SEQ ID NO: 5059650 - DNA, 25 bp, Homo sapien
ttctcgaagatgacgcgcgggtcgt

SEQ ID NO: 5059651 - DNA, 25 bp, Homo sapien
cgtcggactggcagcgcaagcagtt

SEQ ID NO: 5059652 - DNA, 25 bp, Homo sapien
ccatcttggtgaccgcgacgttggc

SEQ ID NO: 5059653 - DNA, 25 bp, Homo sapien
gctcgtagaactcgtgcgggatcag

SEQ ID NO: 5059654 - DNA, 25 bp, Homo sapien
gtcgtagtgcgcgatgcactgctcg

SEQ ID NO: 5059655 - DNA, 25 bp, Homo sapien
gaggtagcacagcaccatgcggttg

SEQ ID NO: 5059656 - DNA, 25 bp, Homo sapien
gatgcactgctcgtagaactcgtgc

SEQ ID NO: 5059657 - DNA, 25 bp, Homo sapien
cattcacctcgtcaatgtccccagg

SEQ ID NO: 5059658 - DNA, 25 bp, Homo sapien
agggcattcacctcgtcaatgtccc

SEQ ID NO: 5059659 - DNA, 25 bp, Homo sapien
ttcacctcgtcaatgtccccaggga

SEQ ID NO: 5059660 - DNA, 25 bp, Homo sapien
ggcattcacctcgtcaatgtcccca

SEQ ID NO: 5059661 - DNA, 25 bp, Homo sapien
cctgcagtgcgctgccgaacatgga

SEQ ID NO: 5059662 - DNA, 25 bp, Homo sapien
acctcctcagagagccgtgtctgca

SEQ ID NO: 5059663 - DNA, 25 bp, Homo sapien
tctgtctggtcaccgttgagcgcca

SEQ ID NO: 5059664 - DNA, 25 bp, Homo sapien
acatggacgggctgaacacggcgtt

SEQ ID NO: 5059665 - DNA, 25 bp, Homo sapien
tgtggtaacagtacttggcatacgt

SEQ ID NO: 5059666 - DNA, 25 bp, Homo sapien
ggtaacagtacttggcatacgtgct

SEQ ID NO: 5059667 - DNA, 25 bp, Homo sapien
ttggcatacgtgcttatcgccaccc

SEQ ID NO: 5059668 - DNA, 25 bp, Homo sapien
cagtacttggcatacgtgcttatcg

SEQ ID NO: 5059669 - DNA, 25 bp, Homo sapien
ccaaggagcacttccccacctgcag

SEQ ID NO: 5059670 - DNA, 25 bp, Homo sapien
cttgccccggtcaccccctgcccag

SEQ ID NO: 5059671 - DNA, 25 bp, Homo sapien
aggcccaaggagcacttccccacct

SEQ ID NO: 5059672 - DNA, 25 bp, Homo sapien
tgatcagcctgatgtgggtgtgtgg

SEQ ID NO: 5059673 - DNA, 25 bp, Homo sapien
cctcctacggccacgcaggaacagg

SEQ ID NO: 5059674 - DNA, 25 bp, Homo sapien
ggtctgagggcctctagaccccact

SEQ ID NO: 5059675 - DNA, 25 bp, Homo sapien
ctgccctcctacggccacgcaggaa

SEQ ID NO: 5059676 - DNA, 25 bp, Homo sapien
ggggcctgacccagggagctgtcca

SEQ ID NO: 5059677 - DNA, 25 bp, Homo sapien
tcatttccacctacccagcacccgc

SEQ ID NO: 5059678 - DNA, 25 bp, Homo sapien
cttcctaaaactcagcccgacagca

SEQ ID NO: 5059679 - DNA, 25 bp, Homo sapien
ggcactgagctatctgcacagcaag

SEQ ID NO: 5059680 - DNA, 25 bp, Homo sapien
aaaactcagcccgacagcagggtcc

SEQ ID NO: 5059681 - DNA, 25 bp, Homo sapien
atcctgacccccaatcggaacacct

SEQ ID NO: 5059682 - DNA, 25 bp, Homo sapien
gatcctgacccccaatcggaacacc

SEQ ID NO: 5059683 - DNA, 25 bp, Homo sapien
ctgacccccaatcggaacacctttg

SEQ ID NO: 5059684 - DNA, 25 bp, Homo sapien
tcacaactgtagtgggcaggccagg

SEQ ID NO: 5059685 - DNA, 25 bp, Homo sapien
tagaaaatctgtcatggtccttggg

SEQ ID NO: 5059686 - DNA, 25 bp, Homo sapien
gacagcgtagctctcaaaagggaga

SEQ ID NO: 5059687 - DNA, 25 bp, Homo sapien
cttttatggccagcggtgtcggtcc

SEQ ID NO: 5059688 - DNA, 25 bp, Homo sapien
gattctgaacaccaggcttggctct

SEQ ID NO: 5059689 - DNA, 25 bp, Homo sapien
aaagcaggggacgactccttgcaga

SEQ ID NO: 5059690 - DNA, 25 bp, Homo sapien
aacaccaggcttggctcttgtggcc

SEQ ID NO: 5059691 - DNA, 25 bp, Homo sapien
ctccttgcagattctgaacaccagg

SEQ ID NO: 5059692 - DNA, 25 bp, Homo sapien
ccagcaagcaagttggaaatggctc

SEQ ID NO: 5059693 - DNA, 25 bp, Homo sapien
cacaggcctgaggttagtggcccca

SEQ ID NO: 5059694 - DNA, 25 bp, Homo sapien
agacacgtgtggacaggcttgaccg

SEQ ID NO: 5059695 - DNA, 25 bp, Homo sapien
cccagaagcggttagagaagagaag

SEQ ID NO: 5059696 - DNA, 25 bp, Homo sapien
cttcaacataaggcttgggtttctt

SEQ ID NO: 5059697 - DNA, 25 bp, Homo sapien
tcaacataaggcttgggtttctttc

SEQ ID NO: 5059698 - DNA, 25 bp, Homo sapien
tcccgcacttggctggtgagcaggc

SEQ ID NO: 5059699 - DNA, 25 bp, Homo sapien
cagaacaaaacgccaggagccagcg

SEQ ID NO: 5059700 - DNA, 25 bp, Homo sapien
gggagcaaagacaaccatcagcacg

SEQ ID NO: 5059701 - DNA, 25 bp, Homo sapien
ccatcagcacgacagaacaaaacgc

SEQ ID NO: 5059702 - DNA, 25 bp, Homo sapien
gaggtgccgggggcccttctgagca

SEQ ID NO: 5059703 - DNA, 25 bp, Homo sapien
ccgtgcctgtgctggcgtgagtgga

SEQ ID NO: 5059704 - DNA, 25 bp, Homo sapien
cgtttctggggggacgtggctgtgt

SEQ ID NO: 5059705 - DNA, 25 bp, Homo sapien
agctgccgtgcctgtgctggcgtga

SEQ ID NO: 5059706 - DNA, 25 bp, Homo sapien
tgcctgccggtcagaaaaccaacag

SEQ ID NO: 5059707 - DNA, 25 bp, Homo sapien
ccacactctgtaggaggagtcactg

SEQ ID NO: 5059708 - DNA, 25 bp, Homo sapien
taactccgcagtgttgccactggcc

SEQ ID NO: 5059709 - DNA, 25 bp, Homo sapien
cactggcctcgatgacctagctgag

SEQ ID NO: 5059710 - DNA, 25 bp, Homo sapien
tacaatctctatcctgactggcttc

SEQ ID NO: 5059711 - DNA, 25 bp, Homo sapien
tgggaatctgactgctctagggcct

SEQ ID NO: 5059712 - DNA, 25 bp, Homo sapien
gcctcacggagggagaatcctacaa

SEQ ID NO: 5059713 - DNA, 25 bp, Homo sapien
ctgctgtgaacgaggtgtacaaatc

SEQ ID NO: 5059714 - DNA, 25 bp, Homo sapien
gcaaatgcccatgttcaatccgcca

SEQ ID NO: 5059715 - DNA, 25 bp, Homo sapien
actgctgttttagtgagttcaaggc

SEQ ID NO: 5059716 - DNA, 25 bp, Homo sapien
aagccgggagaccttgttggatgca

SEQ ID NO: 5059717 - DNA, 25 bp, Homo sapien
gatgcatgaagaagcgagcagtgaa

SEQ ID NO: 5059718 - DNA, 25 bp, Homo sapien
tgtctgtgtcgagaacctgttgagg

SEQ ID NO: 5059719 - DNA, 25 bp, Homo sapien
atgtctgtgtcgagaacctgttgag

SEQ ID NO: 5059720 - DNA, 25 bp, Homo sapien
tctgtgtcgagaacctgttgaggga

SEQ ID NO: 5059721 - DNA, 25 bp, Homo sapien
gatgtctgtgtcgagaacctgttga

SEQ ID NO: 5059722 - DNA, 25 bp, Homo sapien
ctggtgtgaaaggtgtgagcaccca

SEQ ID NO: 5059723 - DNA, 25 bp, Homo sapien
tgaaaggtgtgagcacccatgagac

SEQ ID NO: 5059724 - DNA, 25 bp, Homo sapien
agcacccatgagacaaggctaagct

SEQ ID NO: 5059725 - DNA, 25 bp, Homo sapien
cacccatgagacaaggctaagctgg

SEQ ID NO: 5059726 - DNA, 25 bp, Homo sapien
tgctggccgatgagtcaaaggctcc

SEQ ID NO: 5059727 - DNA, 25 bp, Homo sapien
gtgctggccgatgagtcaaaggctc

SEQ ID NO: 5059728 - DNA, 25 bp, Homo sapien
gtgctcagggcgacgcaccaggctc

SEQ ID NO: 5059729 - DNA, 25 bp, Homo sapien
ccacagtacaggctatatccgacat

SEQ ID NO: 5059730 - DNA, 25 bp, Homo sapien
taagaactgtgctgcagcctagctg

SEQ ID NO: 5059731 - DNA, 25 bp, Homo sapien
caccgagggtccctaggctacagtt

SEQ ID NO: 5059732 - DNA, 25 bp, Homo sapien
acccagacggtgctgttggccttca

SEQ ID NO: 5059733 - DNA, 25 bp, Homo sapien
ccaacccagacggtgctgttggcct

SEQ ID NO: 5059734 - DNA, 25 bp, Homo sapien
cgctgtcactccaacccagacggtg

SEQ ID NO: 5059735 - DNA, 25 bp, Homo sapien
gtcactccaacccagacggtgctgt

SEQ ID NO: 5059736 - DNA, 25 bp, Homo sapien
ctccagctcaggcacgacattccca

SEQ ID NO: 5059737 - DNA, 25 bp, Homo sapien
tccagctcaggcacgacattcccag

SEQ ID NO: 5059738 - DNA, 25 bp, Homo sapien
agctcaggcacgacattcccaggcc

SEQ ID NO: 5059739 - DNA, 25 bp, Homo sapien
tcaggcacgacattcccaggcccct

SEQ ID NO: 5059740 - DNA, 25 bp, Homo sapien
taataggggtaaggcccagcaaggc

SEQ ID NO: 5059741 - DNA, 25 bp, Homo sapien
gcaaggccctgaccaggggctcaat

SEQ ID NO: 5059742 - DNA, 25 bp, Homo sapien
taaggcccagcaaggccctgaccag

SEQ ID NO: 5059743 - DNA, 25 bp, Homo sapien
aaggccctgaccaggggctcaatct

SEQ ID NO: 5059744 - DNA, 25 bp, Homo sapien
gaagcatcgtcttggagagccctgg

SEQ ID NO: 5059745 - DNA, 25 bp, Homo sapien
agagacaacccggatcttgccaggg

SEQ ID NO: 5059746 - DNA, 25 bp, Homo sapien
tgctgcgtgacctgcatgtgagcca

SEQ ID NO: 5059747 - DNA, 25 bp, Homo sapien
atgtgatgatggctccgacgtgcga

SEQ ID NO: 5059748 - DNA, 25 bp, Homo sapien
cagaaggcaagtgcggcaggcacac

SEQ ID NO: 5059749 - DNA, 25 bp, Homo sapien
ttttgggaggtgtgtgtcgaaccat

SEQ ID NO: 5059750 - DNA, 25 bp, Homo sapien
tccgccctcggcgtcttcgtgcctg

SEQ ID NO: 5059751 - DNA, 25 bp, Homo sapien
gagcagagtggatgcggccattgag

SEQ ID NO: 5059752 - DNA, 25 bp, Homo sapien
gcatgttggcgatggacaccttccg

SEQ ID NO: 5059753 - DNA, 25 bp, Homo sapien
gcttgttgaagtgcttggaggccca

SEQ ID NO: 5059754 - DNA, 25 bp, Homo sapien
ccatgtgccggtagatgtagccttc

SEQ ID NO: 5059755 - DNA, 25 bp, Homo sapien
gaagttctcggtggtctgccggcac

SEQ ID NO: 5059756 - DNA, 25 bp, Homo sapien
ggcagcctgctgatgggtgacccag

SEQ ID NO: 5059757 - DNA, 25 bp, Homo sapien
agggcagcctgctgatgggtgaccc

SEQ ID NO: 5059758 - DNA, 25 bp, Homo sapien
gcccagcccgtccacagatgcagct

SEQ ID NO: 5059759 - DNA, 25 bp, Homo sapien
cagcctgctgatgggtgacccaggt

SEQ ID NO: 5059760 - DNA, 25 bp, Homo sapien
cggaagctgctctgagttctccacc

SEQ ID NO: 5059761 - DNA, 25 bp, Homo sapien
cagcctcgaattgcacgtccatggg

SEQ ID NO: 5059762 - DNA, 25 bp, Homo sapien
gtggcttggcacaaagagggctttc

SEQ ID NO: 5059763 - DNA, 25 bp, Homo sapien
tgggctgcaaggagtacgaaccacc

SEQ ID NO: 5059764 - DNA, 25 bp, Homo sapien
gggctcccgatcagcgaccttgatg

SEQ ID NO: 5059765 - DNA, 25 bp, Homo sapien
cagggcccttaatgtgggtgctgtg

SEQ ID NO: 5059766 - DNA, 25 bp, Homo sapien
tgttgtacaccttcctcgctggggc

SEQ ID NO: 5059767 - DNA, 25 bp, Homo sapien
ggtgctgtgcgggtgtctccagagc

SEQ ID NO: 5059768 - DNA, 25 bp, Homo sapien
tgagcagtggcgttggacccgtccc

SEQ ID NO: 5059769 - DNA, 25 bp, Homo sapien
caaggtgggcactggtcctgtgtcc

SEQ ID NO: 5059770 - DNA, 25 bp, Homo sapien
cccaaggtgggcactggtcctgtgt

SEQ ID NO: 5059771 - DNA, 25 bp, Homo sapien
ggcccaaggtgggcactggtcctgt

SEQ ID NO: 5059772 - DNA, 25 bp, Homo sapien
gcggcccaaggtgggcactggtcct

SEQ ID NO: 5059773 - DNA, 25 bp, Homo sapien
ctcaccctcccaaattcccacacct

SEQ ID NO: 5059774 - DNA, 25 bp, Homo sapien
tcctcaccctcccaaattcccacac

SEQ ID NO: 5059775 - DNA, 25 bp, Homo sapien
caccctcccaaattcccacacctct

SEQ ID NO: 5059776 - DNA, 25 bp, Homo sapien
tcctcctcaccctcccaaattccca

SEQ ID NO: 5059777 - DNA, 25 bp, Homo sapien
cctggctggctctcaactgttctgc

SEQ ID NO: 5059778 - DNA, 25 bp, Homo sapien
ccaggttagctgaggatgggatctc

SEQ ID NO: 5059779 - DNA, 25 bp, Homo sapien
cattatgctgatggcaacttgtgaa

SEQ ID NO: 5059780 - DNA, 25 bp, Homo sapien
ttcacagggactttatttcttgcca

SEQ ID NO: 5059781 - DNA, 25 bp, Homo sapien
ggcctggccagcacatggatgtact

SEQ ID NO: 5059782 - DNA, 25 bp, Homo sapien
tagtttacggcccagaggtgcagct

SEQ ID NO: 5059783 - DNA, 25 bp, Homo sapien
gatgtactcgtggtctgaacaggga

SEQ ID NO: 5059784 - DNA, 25 bp, Homo sapien
cagagctcgatgtgggctgtcgcct

SEQ ID NO: 5059785 - DNA, 25 bp, Homo sapien
aaaggcacaacagaggcagaggcca

SEQ ID NO: 5059786 - DNA, 25 bp, Homo sapien
agaggccacaggaagtgcgccagtg

SEQ ID NO: 5059787 - DNA, 25 bp, Homo sapien
aagtgcgccagtggagggttgcggg

SEQ ID NO: 5059788 - DNA, 25 bp, Homo sapien
tgagaggggccaaaggcacaacaga

SEQ ID NO: 5059789 - DNA, 25 bp, Homo sapien
gaggatccttggaccttcgtggaga

SEQ ID NO: 5059790 - DNA, 25 bp, Homo sapien
cttggaccttcgtggagaccaggac

SEQ ID NO: 5059791 - DNA, 25 bp, Homo sapien
gatccttggaccttcgtggagacca

SEQ ID NO: 5059792 - DNA, 25 bp, Homo sapien
tggaccttcgtggagaccaggacct

SEQ ID NO: 5059793 - DNA, 25 bp, Homo sapien
aaggaggccgagccaccagagtggc

SEQ ID NO: 5059794 - DNA, 25 bp, Homo sapien
ctgaaggaggccgagccaccagagt

SEQ ID NO: 5059795 - DNA, 25 bp, Homo sapien
gaaggaggccgagccaccagagtgg

SEQ ID NO: 5059796 - DNA, 25 bp, Homo sapien
tgaaggaggccgagccaccagagtg

SEQ ID NO: 5059797 - DNA, 25 bp, Homo sapien
tgggtgccacagatgagctcaggga

SEQ ID NO: 5059798 - DNA, 25 bp, Homo sapien
aagctctgtgggtgccacagatgag

SEQ ID NO: 5059799 - DNA, 25 bp, Homo sapien
ctctgtgggtgccacagatgagctc

SEQ ID NO: 5059800 - DNA, 25 bp, Homo sapien
ctgtgggtgccacagatgagctcag

SEQ ID NO: 5059801 - DNA, 25 bp, Homo sapien
tccaagctccagctgttcaatcgtc

SEQ ID NO: 5059802 - DNA, 25 bp, Homo sapien
aatcgtctgtgcagaacgccagagc

SEQ ID NO: 5059803 - DNA, 25 bp, Homo sapien
tgggtggcccatgctgcggacaccc

SEQ ID NO: 5059804 - DNA, 25 bp, Homo sapien
catctcccacagcaaactggtcacc

SEQ ID NO: 5059805 - DNA, 25 bp, Homo sapien
aagaagctggccgtccgcactgtaa

SEQ ID NO: 5059806 - DNA, 25 bp, Homo sapien
tgtaatcccggtaaatctcatagtc

SEQ ID NO: 5059807 - DNA, 25 bp, Homo sapien
tcatagtccttctcaaggaacactc

SEQ ID NO: 5059808 - DNA, 25 bp, Homo sapien
tctcatagtccttctcaaggaacac

SEQ ID NO: 5059809 - DNA, 25 bp, Homo sapien
atagtattcagaggcaaaaggctga

SEQ ID NO: 5059810 - DNA, 25 bp, Homo sapien
tcatagtattcagaggcaaaaggct

SEQ ID NO: 5059811 - DNA, 25 bp, Homo sapien
agtattcagaggcaaaaggctgaac

SEQ ID NO: 5059812 - DNA, 25 bp, Homo sapien
cttcatagtattcagaggcaaaagg

SEQ ID NO: 5059813 - DNA, 25 bp, Homo sapien
caaaggctgaaccttcgtagtattc

SEQ ID NO: 5059814 - DNA, 25 bp, Homo sapien
ggcaaaggctgaaccttcgtagtat

SEQ ID NO: 5059815 - DNA, 25 bp, Homo sapien
gcaaaggctgaaccttcgtagtatt

SEQ ID NO: 5059816 - DNA, 25 bp, Homo sapien
tagtattcagcggcaaaaggctgaa

SEQ ID NO: 5059817 - DNA, 25 bp, Homo sapien
agtattcagcggcaaaaggctgaac

SEQ ID NO: 5059818 - DNA, 25 bp, Homo sapien
caaaggctgaaccttcgtagtattc

SEQ ID NO: 5059819 - DNA, 25 bp, Homo sapien
ggcaaaggctgaaccttcgtagtat

SEQ ID NO: 5059820 - DNA, 25 bp, Homo sapien
gcaaaggctgaaccttcgtagtatt

SEQ ID NO: 5059821 - DNA, 25 bp, Homo sapien
caaaggctgaaccttcgtagtattc

SEQ ID NO: 5059822 - DNA, 25 bp, Homo sapien
ggcaaaggctgaaccttcgtagtat

SEQ ID NO: 5059823 - DNA, 25 bp, Homo sapien
gcaaaggctgaaccttcgtagtatt

SEQ ID NO: 5059824 - DNA, 25 bp, Homo sapien
ttataagccgagcagaacgtgagat

SEQ ID NO: 5059825 - DNA, 25 bp, Homo sapien
gatgatgaactaaatcctcttgttg

SEQ ID NO: 5059826 - DNA, 25 bp, Homo sapien
gcaatctcgtcaatgactggaacaa

SEQ ID NO: 5059827 - DNA, 25 bp, Homo sapien
gttgcatcagcaatctcgtcaatga

SEQ ID NO: 5059828 - DNA, 25 bp, Homo sapien
tcaccggtgaccaggttggcgtaca

SEQ ID NO: 5059829 - DNA, 25 bp, Homo sapien
cgggtgcgcggttcgatgatctcca

SEQ ID NO: 5059830 - DNA, 25 bp, Homo sapien
tgcgctttctcagtgtcgggctcgg

SEQ ID NO: 5059831 - DNA, 25 bp, Homo sapien
cattgtagtagtagaagcgggacgt

SEQ ID NO: 5059832 - DNA, 25 bp, Homo sapien
gatcgtggcacaggcctgcgagtca

SEQ ID NO: 5059833 - DNA, 25 bp, Homo sapien
aggcctgcgagtcatcactgcacac

SEQ ID NO: 5059834 - DNA, 25 bp, Homo sapien
gtagcccctccgctgcaactggacc

SEQ ID NO: 5059835 - DNA, 25 bp, Homo sapien
cactgctccgtcctgcaggatcgtg

SEQ ID NO: 5059836 - DNA, 25 bp, Homo sapien
aagccgggccctcacacagtggcgg

SEQ ID NO: 5059837 - DNA, 25 bp, Homo sapien
gacaccaaggatccaggcggagtct

SEQ ID NO: 5059838 - DNA, 25 bp, Homo sapien
aaggcaccgagggacagtccacgtg

SEQ ID NO: 5059839 - DNA, 25 bp, Homo sapien
ggccactgggcactgtttgctcctc

SEQ ID NO: 5059840 - DNA, 25 bp, Homo sapien
caactgctcggcacgtggaggcaca

SEQ ID NO: 5059841 - DNA, 25 bp, Homo sapien
caggagacaactgctcggcacgtgg

SEQ ID NO: 5059842 - DNA, 25 bp, Homo sapien
cgcaacaggaagtggcgcacgcatt

SEQ ID NO: 5059843 - DNA, 25 bp, Homo sapien
cctgaaaccgcaacaggaagtggcg

SEQ ID NO: 5059844 - DNA, 25 bp, Homo sapien
taatgagtgccacgtgcatgccaga

SEQ ID NO: 5059845 - DNA, 25 bp, Homo sapien
ttcaacaaacgtgcaggtggacgtc

SEQ ID NO: 5059846 - DNA, 25 bp, Homo sapien
tcgagaccactccatcgggaaagga

SEQ ID NO: 5059847 - DNA, 25 bp, Homo sapien
tgcaagatgtctacgatccccaggg

SEQ ID NO: 5059848 - DNA, 25 bp, Homo sapien
gcaaccacctcatcaaatcccagga

SEQ ID NO: 5059849 - DNA, 25 bp, Homo sapien
taacgagggctcacaacagcaaggt

SEQ ID NO: 5059850 - DNA, 25 bp, Homo sapien
tgcgtttgctctgtgaggacgtggg

SEQ ID NO: 5059851 - DNA, 25 bp, Homo sapien
gccttagggctgtaacgagggctca

SEQ ID NO: 5059852 - DNA, 25 bp, Homo sapien
caaagcccaacgtcttctctgggtg

SEQ ID NO: 5059853 - DNA, 25 bp, Homo sapien
agtccaaagcccaacgtcttctctg

SEQ ID NO: 5059854 - DNA, 25 bp, Homo sapien
aagcccaacgtcttctctgggtggg

SEQ ID NO: 5059855 - DNA, 25 bp, Homo sapien
tctgggtggggccgactggtcctgt

SEQ ID NO: 5059856 - DNA, 25 bp, Homo sapien
gagggcggaggcatctttgaatcaa

SEQ ID NO: 5059857 - DNA, 25 bp, Homo sapien
agggcggaggcatctttgaatcaaa

SEQ ID NO: 5059858 - DNA, 25 bp, Homo sapien
gggcggaggcatctttgaatcaaag

SEQ ID NO: 5059859 - DNA, 25 bp, Homo sapien
ggcggaggcatctttgaatcaaagg

SEQ ID NO: 5059860 - DNA, 25 bp, Homo sapien
gagagtccggccagagtaggagctc

SEQ ID NO: 5059861 - DNA, 25 bp, Homo sapien
gaaggagagtccggccagagtagga

SEQ ID NO: 5059862 - DNA, 25 bp, Homo sapien
gggaaggagagtccggccagagtag

SEQ ID NO: 5059863 - DNA, 25 bp, Homo sapien
aggagagtccggccagagtaggagc

SEQ ID NO: 5059864 - DNA, 25 bp, Homo sapien
cttgggaacagccagcgacgaatcc

SEQ ID NO: 5059865 - DNA, 25 bp, Homo sapien
cacggagaatcctgcatgcacactg

SEQ ID NO: 5059866 - DNA, 25 bp, Homo sapien
gaaaaacgacgaatcatggcgaccc

SEQ ID NO: 5059867 - DNA, 25 bp, Homo sapien
actgtgcacaggtggcatcggccat

SEQ ID NO: 5059868 - DNA, 25 bp, Homo sapien
gacattatggctcctgcactcgtag

SEQ ID NO: 5059869 - DNA, 25 bp, Homo sapien
cctcgactccggcaggtcgacatta

SEQ ID NO: 5059870 - DNA, 25 bp, Homo sapien
cactcgtagtcctgcgtctgggaca

SEQ ID NO: 5059871 - DNA, 25 bp, Homo sapien
gagtgttcgaccctggaatcctcga

SEQ ID NO: 5059872 - DNA, 25 bp, Homo sapien
aacgccagcatcagacgggaaggtg

SEQ ID NO: 5059873 - DNA, 25 bp, Homo sapien
gtggacagacgtcagggcaccatac

SEQ ID NO: 5059874 - DNA, 25 bp, Homo sapien
ctgtttgcttccgcgcccacgtgga

SEQ ID NO: 5059875 - DNA, 25 bp, Homo sapien
acgtcagggcaccatacgcacaacg

SEQ ID NO: 5059876 - DNA, 25 bp, Homo sapien
tcaggcgtcacctctcaggaagctt

SEQ ID NO: 5059877 - DNA, 25 bp, Homo sapien
cctcttagactcaactcaggcgtca

SEQ ID NO: 5059878 - DNA, 25 bp, Homo sapien
aggaagcttcctcccatctgggacc

SEQ ID NO: 5059879 - DNA, 25 bp, Homo sapien
tctgcaatcaggcactgcgagtccc

SEQ ID NO: 5059880 - DNA, 25 bp, Homo sapien
tctgctggtaatgaactagttcagc

SEQ ID NO: 5059881 - DNA, 25 bp, Homo sapien
ccttcagcctaaagcatctgtaaca

SEQ ID NO: 5059882 - DNA, 25 bp, Homo sapien
tgtatagatccagacttccacatgg

SEQ ID NO: 5059883 - DNA, 25 bp, Homo sapien
tctttatgtcaccttcacttaaaag

SEQ ID NO: 5059884 - DNA, 25 bp, Homo sapien
catgctctgaaagctcggctgtgag

SEQ ID NO: 5059885 - DNA, 25 bp, Homo sapien
tcatgctctgaaagctcggctgtga

SEQ ID NO: 5059886 - DNA, 25 bp, Homo sapien
ttctgaacaatgaacccagtctcat

SEQ ID NO: 5059887 - DNA, 25 bp, Homo sapien
tggagacacaaggccccattctccc

SEQ ID NO: 5059888 - DNA, 25 bp, Homo sapien
ctggagacacaaggccccattctcc

SEQ ID NO: 5059889 - DNA, 25 bp, Homo sapien
gccatggaatggacttgggaggtca

SEQ ID NO: 5059890 - DNA, 25 bp, Homo sapien
catggaatggacttgggaggtcagg

SEQ ID NO: 5059891 - DNA, 25 bp, Homo sapien
gacaggccaggttgaggggtttaga

SEQ ID NO: 5059892 - DNA, 25 bp, Homo sapien
aagccatggaatggacttgggaggt

SEQ ID NO: 5059893 - DNA, 25 bp, Homo sapien
ggggcccaagggccataggggcagc

SEQ ID NO: 5059894 - DNA, 25 bp, Homo sapien
ggcccaagggccataggggcagcat

SEQ ID NO: 5059895 - DNA, 25 bp, Homo sapien
gggcccaagggccataggggcagca

SEQ ID NO: 5059896 - DNA, 25 bp, Homo sapien
gcccaagggccataggggcagcatc

SEQ ID NO: 5059897 - DNA, 25 bp, Homo sapien
aaggacggcgagtgccagtggcatc

SEQ ID NO: 5059898 - DNA, 25 bp, Homo sapien
tcccacgaaggacggcgagtgccag

SEQ ID NO: 5059899 - DNA, 25 bp, Homo sapien
gaaggacggcgagtgccagtggcat

SEQ ID NO: 5059900 - DNA, 25 bp, Homo sapien
ctgggtcccacgaaggacggcgagt

SEQ ID NO: 5059901 - DNA, 25 bp, Homo sapien
caggcgggacaagcggcgcagcacc

SEQ ID NO: 5059902 - DNA, 25 bp, Homo sapien
actgactttggcaggcgggacaagc

SEQ ID NO: 5059903 - DNA, 25 bp, Homo sapien
ggcgggacaagcggcgcagcaccag

SEQ ID NO: 5059904 - DNA, 25 bp, Homo sapien
tcactgactttggcaggcgggacaa

SEQ ID NO: 5059905 - DNA, 25 bp, Homo sapien
cacccagcgccgcaaaccaggagac

SEQ ID NO: 5059906 - DNA, 25 bp, Homo sapien
tgagcacccagcgccgcaaaccagg

SEQ ID NO: 5059907 - DNA, 25 bp, Homo sapien
ctgagcacccagcgccgcaaaccag

SEQ ID NO: 5059908 - DNA, 25 bp, Homo sapien
agcacccagcgccgcaaaccaggag

SEQ ID NO: 5059909 - DNA, 25 bp, Homo sapien
ctgtggcgtggcgtgagcaggaccg

SEQ ID NO: 5059910 - DNA, 25 bp, Homo sapien
acagttgcgcactggtgacagcggc

SEQ ID NO: 5059911 - DNA, 25 bp, Homo sapien
gacagcggcctcgtctggttcttcc

SEQ ID NO: 5059912 - DNA, 25 bp, Homo sapien
cctatgaggcaggtgtgctccgtcc

SEQ ID NO: 5059913 - DNA, 25 bp, Homo sapien
ggcaacaggcgcttgcttccaacgt

SEQ ID NO: 5059914 - DNA, 25 bp, Homo sapien
aagttccagtcatgagtgggcaaca

SEQ ID NO: 5059915 - DNA, 25 bp, Homo sapien
tcccacgccgaatctggaacagagg

SEQ ID NO: 5059916 - DNA, 25 bp, Homo sapien
tctgctgggaaagcaagcgcggaaa

SEQ ID NO: 5059917 - DNA, 25 bp, Homo sapien
gcgacgcccgccatagaccagggtg

SEQ ID NO: 5059918 - DNA, 25 bp, Homo sapien
tgccagaggcccctcgctccgagaa

SEQ ID NO: 5059919 - DNA, 25 bp, Homo sapien
gcgcgggtccccatccccgctccag

SEQ ID NO: 5059920 - DNA, 25 bp, Homo sapien
ggcgacgcccgccatagaccagggt

SEQ ID NO: 5059921 - DNA, 25 bp, Homo sapien
cgacacggctgcacgaacagcaaaa

SEQ ID NO: 5059922 - DNA, 25 bp, Homo sapien
ggctgcacgaacagcaaaaccgcag

SEQ ID NO: 5059923 - DNA, 25 bp, Homo sapien
gttcacggagcacccactgcactgc

SEQ ID NO: 5059924 - DNA, 25 bp, Homo sapien
tgcacgaacagcaaaaccgcagcat

SEQ ID NO: 5059925 - DNA, 25 bp, Homo sapien
aaagcatgtcgacaaaccctcactg

SEQ ID NO: 5059926 - DNA, 25 bp, Homo sapien
tggcctcagcgtgcacgaggactgt

SEQ ID NO: 5059927 - DNA, 25 bp, Homo sapien
actggagcagcctgtgaccgatcaa

SEQ ID NO: 5059928 - DNA, 25 bp, Homo sapien
cctggtggaactggcgaatcgaggg

SEQ ID NO: 5059929 - DNA, 25 bp, Homo sapien
aaagatgtcatcagactgaaagaag

SEQ ID NO: 5059930 - DNA, 25 bp, Homo sapien
gatgtcatcagactgaaagaagccc

SEQ ID NO: 5059931 - DNA, 25 bp, Homo sapien
tgtcatcagactgaaagaagccctc

SEQ ID NO: 5059932 - DNA, 25 bp, Homo sapien
tataaagatgtcatcagactgaaag

SEQ ID NO: 5059933 - DNA, 25 bp, Homo sapien
gcgggacgcctggtacatcagagca

SEQ ID NO: 5059934 - DNA, 25 bp, Homo sapien
gagcagatgctaacacagacacagc

SEQ ID NO: 5059935 - DNA, 25 bp, Homo sapien
gatgcaggcgatgtgaagatgccca

SEQ ID NO: 5059936 - DNA, 25 bp, Homo sapien
cagacacagcattaccaaaccccat

SEQ ID NO: 5059937 - DNA, 25 bp, Homo sapien
tcactgccgacatggaatctggctt

SEQ ID NO: 5059938 - DNA, 25 bp, Homo sapien
tggctttctcggatctgctcagtaa

SEQ ID NO: 5059939 - DNA, 25 bp, Homo sapien
tatactgcgtttccattacctaggg

SEQ ID NO: 5059940 - DNA, 25 bp, Homo sapien
tctgtagcacaaacaggatgaatcc

SEQ ID NO: 5059941 - DNA, 25 bp, Homo sapien
tgcgatgcttcagccatagagaggg

SEQ ID NO: 5059942 - DNA, 25 bp, Homo sapien
gatggctgcacgactctacaaattt

SEQ ID NO: 5059943 - DNA, 25 bp, Homo sapien
ggtggacccactcaatgcgatgctt

SEQ ID NO: 5059944 - DNA, 25 bp, Homo sapien
tgatggaaatgctcaacaggaggtg

SEQ ID NO: 5059945 - DNA, 25 bp, Homo sapien
gtcataaccaaaggggctgcctgag

SEQ ID NO: 5059946 - DNA, 25 bp, Homo sapien
aggaaagtcataaccaaaggggctg

SEQ ID NO: 5059947 - DNA, 25 bp, Homo sapien
aagtcataaccaaaggggctgcctg

SEQ ID NO: 5059948 - DNA, 25 bp, Homo sapien
gaaagtcataaccaaaggggctgcc

SEQ ID NO: 5059949 - DNA, 25 bp, Homo sapien
ctgggggcagcagggaggacagaga

SEQ ID NO: 5059950 - DNA, 25 bp, Homo sapien
tgggggcagcagggaggacagagac

SEQ ID NO: 5059951 - DNA, 25 bp, Homo sapien
ggggcagcagggaggacagagacac

SEQ ID NO: 5059952 - DNA, 25 bp, Homo sapien
gggggcagcagggaggacagagaca

SEQ ID NO: 5059953 - DNA, 25 bp, Homo sapien
caacagggtaacacccagatggccc

SEQ ID NO: 5059954 - DNA, 25 bp, Homo sapien
catctttaggatgtcactgtgtaac

SEQ ID NO: 5059955 - DNA, 25 bp, Homo sapien
cagatgctcccggatggagctggcc

SEQ ID NO: 5059956 - DNA, 25 bp, Homo sapien
tatgcggcagcaacaccatctttag

SEQ ID NO: 5059957 - DNA, 25 bp, Homo sapien
caccatgggcttgagtcctgtgctc

SEQ ID NO: 5059958 - DNA, 25 bp, Homo sapien
accatgggcttgagtcctgtgctca

SEQ ID NO: 5059959 - DNA, 25 bp, Homo sapien
gcaccatgggcttgagtcctgtgct

SEQ ID NO: 5059960 - DNA, 25 bp, Homo sapien
cactctccctcccgattatccacct

SEQ ID NO: 5059961 - DNA, 25 bp, Homo sapien
accactctccctcccgattatccac

SEQ ID NO: 5059962 - DNA, 25 bp, Homo sapien
ctccctcccgattatccaccttggg

SEQ ID NO: 5059963 - DNA, 25 bp, Homo sapien
ctctccctcccgattatccaccttg

SEQ ID NO: 5059964 - DNA, 25 bp, Homo sapien
ggccatccaatgtgtggtaatggga

SEQ ID NO: 5059965 - DNA, 25 bp, Homo sapien
ccatccaatgtgtggtaatgggaga

SEQ ID NO: 5059966 - DNA, 25 bp, Homo sapien
caggccatccaatgtgtggtaatgg

SEQ ID NO: 5059967 - DNA, 25 bp, Homo sapien
catccaatgtgtggtaatgggagat

SEQ ID NO: 5059968 - DNA, 25 bp, Homo sapien
agagcgtaccgggaagctggatgag

SEQ ID NO: 5059969 - DNA, 25 bp, Homo sapien
ggaccaggcggctgtaaaaagcaac

SEQ ID NO: 5059970 - DNA, 25 bp, Homo sapien
tgggaccaggcggctgtaaaaagca

SEQ ID NO: 5059971 - DNA, 25 bp, Homo sapien
ggcctgggaccaggcggctgtaaaa

SEQ ID NO: 5059972 - DNA, 25 bp, Homo sapien
gagtgtaccgggaagcaggatcagc

SEQ ID NO: 5059973 - DNA, 25 bp, Homo sapien
gtgtaccgggaagcaggatcagcac

SEQ ID NO: 5059974 - DNA, 25 bp, Homo sapien
tagagtgtaccgggaagcaggatca

SEQ ID NO: 5059975 - DNA, 25 bp, Homo sapien
ctagagtgtaccgggaagcaggatc

SEQ ID NO: 5059976 - DNA, 25 bp, Homo sapien
tgggctctcgccaacactccagtca

SEQ ID NO: 5059977 - DNA, 25 bp, Homo sapien
gggctctcgccaacactccagtcac

SEQ ID NO: 5059978 - DNA, 25 bp, Homo sapien
ctgggctctcgccaacactccagtc

SEQ ID NO: 5059979 - DNA, 25 bp, Homo sapien
ggctctcgccaacactccagtcaca

SEQ ID NO: 5059980 - DNA, 25 bp, Homo sapien
catacaggcaacagtaaagacaggg

SEQ ID NO: 5059981 - DNA, 25 bp, Homo sapien
gagagccctgccagagcaatggaga

SEQ ID NO: 5059982 - DNA, 25 bp, Homo sapien
tggcaaacacaagaccaggtgtgag

SEQ ID NO: 5059983 - DNA, 25 bp, Homo sapien
gatgttagcacaactcactcccgtg

SEQ ID NO: 5059984 - DNA, 25 bp, Homo sapien
cttcagcacagctctgagtggcagg

SEQ ID NO: 5059985 - DNA, 25 bp, Homo sapien
actgcagaggcttcagcacagctct

SEQ ID NO: 5059986 - DNA, 25 bp, Homo sapien
tgcagaggcttcagcacagctctga

SEQ ID NO: 5059987 - DNA, 25 bp, Homo sapien
agcacagctctgagtggcaggagga

SEQ ID NO: 5059988 - DNA, 25 bp, Homo sapien
tacagcgtagtgcaggagggacatg

SEQ ID NO: 5059989 - DNA, 25 bp, Homo sapien
agagccccaggaggtacagcgtagt

SEQ ID NO: 5059990 - DNA, 25 bp, Homo sapien
gggacatggtgcaggtcccactcag

SEQ ID NO: 5059991 - DNA, 25 bp, Homo sapien
caggcaggggttctgatcactgttc

SEQ ID NO: 5059992 - DNA, 25 bp, Homo sapien
tggagccgtaccacatggcagctga

SEQ ID NO: 5059993 - DNA, 25 bp, Homo sapien
ctggagccgtaccacatggcagctg

SEQ ID NO: 5059994 - DNA, 25 bp, Homo sapien
ggagccgtaccacatggcagctgag

SEQ ID NO: 5059995 - DNA, 25 bp, Homo sapien
gaaaagacactaggtttctgccact

SEQ ID NO: 5059996 - DNA, 25 bp, Homo sapien
tttggtccgtggaccctgagatgcc

SEQ ID NO: 5059997 - DNA, 25 bp, Homo sapien
gtccaggatggtgccggaaaagaca

SEQ ID NO: 5059998 - DNA, 25 bp, Homo sapien
ccccataggaggctgtacgtcacac

SEQ ID NO: 5059999 - DNA, 25 bp, Homo sapien
cttgctccttgtggatcgggcgccg

SEQ ID NO: 5060000 - DNA, 25 bp, Homo sapien
tgctccttgtggatcgggcgccgcc

SEQ ID NO: 5060001 - DNA, 25 bp, Homo sapien
accacctgctgtctatagagggcac

SEQ ID NO: 5060002 - DNA, 25 bp, Homo sapien
gggcgccgccgacggaaccacctgc

SEQ ID NO: 5060003 - DNA, 25 bp, Homo sapien
cgcagcgtccaattcccctcactgg

SEQ ID NO: 5060004 - DNA, 25 bp, Homo sapien
ctaggacgcagcgtccaattcccct

SEQ ID NO: 5060005 - DNA, 25 bp, Homo sapien
aggacgcagcgtccaattcccctca

SEQ ID NO: 5060006 - DNA, 25 bp, Homo sapien
gacgcagcgtccaattcccctcact

SEQ ID NO: 5060007 - DNA, 25 bp, Homo sapien
aagacaaatctccgtattgttgtac

SEQ ID NO: 5060008 - DNA, 25 bp, Homo sapien
aaaagacaaatctccgtattgttgt

SEQ ID NO: 5060009 - DNA, 25 bp, Homo sapien
aaagacaaatctccgtattgttgta

SEQ ID NO: 5060010 - DNA, 25 bp, Homo sapien
tggttaaacccgtacagcactgagg

SEQ ID NO: 5060011 - DNA, 25 bp, Homo sapien
tgggaagcggctcggaacacaccca

SEQ ID NO: 5060012 - DNA, 25 bp, Homo sapien
gggcccggctgcgtttccgaagctg

SEQ ID NO: 5060013 - DNA, 25 bp, Homo sapien
gaggtcactggaggtctggttaaac

SEQ ID NO: 5060014 - DNA, 25 bp, Homo sapien
cccacacccacattggggccgggca

SEQ ID NO: 5060015 - DNA, 25 bp, Homo sapien
ccaccgtggacaggggcacactcac

SEQ ID NO: 5060016 - DNA, 25 bp, Homo sapien
caccgtggacaggggcacactcaca

SEQ ID NO: 5060017 - DNA, 25 bp, Homo sapien
cccacattggggccgggcacactca

SEQ ID NO: 5060018 - DNA, 25 bp, Homo sapien
ctgtgaccacgcactggcggcgagc

SEQ ID NO: 5060019 - DNA, 25 bp, Homo sapien
cccgtgaccacgcactggcggcgag

SEQ ID NO: 5060020 - DNA, 25 bp, Homo sapien
tgaccacgcactggcggcgagcact

SEQ ID NO: 5060021 - DNA, 25 bp, Homo sapien
tgaccacacactggcggcgaccatt

SEQ ID NO: 5060022 - DNA, 25 bp, Homo sapien
cgagcacttcccaccccgtgaccac

SEQ ID NO: 5060023 - DNA, 25 bp, Homo sapien
gcgagcacttcccaccccgtgacca

SEQ ID NO: 5060024 - DNA, 25 bp, Homo sapien
cctgtgaccacgcactggcggcgag

SEQ ID NO: 5060025 - DNA, 25 bp, Homo sapien
gcgagcatttcccacccctgtgacc

SEQ ID NO: 5060026 - DNA, 25 bp, Homo sapien
gaccacgcactggcggcgagcattt

SEQ ID NO: 5060027 - DNA, 25 bp, Homo sapien
cggcgagcatttcccacccctgtga

SEQ ID NO: 5060028 - DNA, 25 bp, Homo sapien
acaagaagccggcattgactacgca

SEQ ID NO: 5060029 - DNA, 25 bp, Homo sapien
cctattgattgttatgcagaggctg

SEQ ID NO: 5060030 - DNA, 25 bp, Homo sapien
gccttgcaaggtcgggtgtctagta

SEQ ID NO: 5060031 - DNA, 25 bp, Homo sapien
tctttggatcgggtgagggccatta

SEQ ID NO: 5060032 - DNA, 25 bp, Homo sapien
cttcatgctggtgtcagcgccatag

SEQ ID NO: 5060033 - DNA, 25 bp, Homo sapien
gtgtcagcgccatagagtatctgtc

SEQ ID NO: 5060034 - DNA, 25 bp, Homo sapien
tggtgtcagcgccatagagtatctg

SEQ ID NO: 5060035 - DNA, 25 bp, Homo sapien
catgctggtgtcagcgccatagagt

SEQ ID NO: 5060036 - DNA, 25 bp, Homo sapien
tatcattttggcgtgttaagcttcg

SEQ ID NO: 5060037 - DNA, 25 bp, Homo sapien
gtatgtaggtatccttgtattcctg

SEQ ID NO: 5060038 - DNA, 25 bp, Homo sapien
tgatatgctgcttgattctatttgc

SEQ ID NO: 5060039 - DNA, 25 bp, Homo sapien
taagcttcgctatggtttgggtgtt

SEQ ID NO: 5060040 - DNA, 25 bp, Homo sapien
gaggacacagcttcacctctaagga

SEQ ID NO: 5060041 - DNA, 25 bp, Homo sapien
tgtctcttgggaggtacccggagcc

SEQ ID NO: 5060042 - DNA, 25 bp, Homo sapien
tagcattctgcctaaaaaagcaggg

SEQ ID NO: 5060043 - DNA, 25 bp, Homo sapien
tactgagaggacgaaggccttttcc

SEQ ID NO: 5060044 - DNA, 25 bp, Homo sapien
gatgccagtggtgcaaacagtcggc

SEQ ID NO: 5060045 - DNA, 25 bp, Homo sapien
cctcgttctcctacgaaggcgcgaa

SEQ ID NO: 5060046 - DNA, 25 bp, Homo sapien
aaggcgcgaacgttccagactctcg

SEQ ID NO: 5060047 - DNA, 25 bp, Homo sapien
gccatttcccgagggtctcaggcgt

SEQ ID NO: 5060048 - DNA, 25 bp, Homo sapien
tccttgtcccaccagtcgggcggtg

SEQ ID NO: 5060049 - DNA, 25 bp, Homo sapien
cgggcggtgaattggactgactggt

SEQ ID NO: 5060050 - DNA, 25 bp, Homo sapien
tgtgacccgctgacctgtccttgtc

SEQ ID NO: 5060051 - DNA, 25 bp, Homo sapien
tgggcaccggagcaggcggacaggg

SEQ ID NO: 5060052 - DNA, 25 bp, Homo sapien
cgcgggtcggagtctataaaggcaa

SEQ ID NO: 5060053 - DNA, 25 bp, Homo sapien
tgaggagcttgttccccgaatgagg

SEQ ID NO: 5060054 - DNA, 25 bp, Homo sapien
tcacggagcggagccaataaaagcg

SEQ ID NO: 5060055 - DNA, 25 bp, Homo sapien
tcacagggcgggatctacgaaggat

SEQ ID NO: 5060056 - DNA, 25 bp, Homo sapien
tagtaggctaatggtcaaaggcaac

SEQ ID NO: 5060057 - DNA, 25 bp, Homo sapien
cacagcatggaagaagatccgaacg

SEQ ID NO: 5060058 - DNA, 25 bp, Homo sapien
tctgacatgttgcttccgggctcct

SEQ ID NO: 5060059 - DNA, 25 bp, Homo sapien
caactttatctttgtgaccaggaga

SEQ ID NO: 5060060 - DNA, 25 bp, Homo sapien
ccctagaagtggcagtgggcgcaat

SEQ ID NO: 5060061 - DNA, 25 bp, Homo sapien
cagtgctcctttcggctccagggaa

SEQ ID NO: 5060062 - DNA, 25 bp, Homo sapien
cgcagacctctgtggacggctactt

SEQ ID NO: 5060063 - DNA, 25 bp, Homo sapien
tcatccgggtgtctcagagcagacc

SEQ ID NO: 5060064 - DNA, 25 bp, Homo sapien
taatgtacccagtgtgctcatggac

SEQ ID NO: 5060065 - DNA, 25 bp, Homo sapien
catttacgcaaagcacattcttggc

SEQ ID NO: 5060066 - DNA, 25 bp, Homo sapien
tcgtgtgctggagataaaaaggtgc

SEQ ID NO: 5060067 - DNA, 25 bp, Homo sapien
ggtgcataagacaacatctctgaca

SEQ ID NO: 5060068 - DNA, 25 bp, Homo sapien
tgctactcggtgcaaaaaagcactc

SEQ ID NO: 5060069 - DNA, 25 bp, Homo sapien
tacacaggcaatatggatgactcca

SEQ ID NO: 5060070 - DNA, 25 bp, Homo sapien
gggttaaccacaagagagcacaaag

SEQ ID NO: 5060071 - DNA, 25 bp, Homo sapien
tagttgcccatactgaaaatgccca

SEQ ID NO: 5060072 - DNA, 25 bp, Homo sapien
aacgtctacctgcagttcatctggg

SEQ ID NO: 5060073 - DNA, 25 bp, Homo sapien
tatccggatacagcaccacacggtt

SEQ ID NO: 5060074 - DNA, 25 bp, Homo sapien
aagttctctgtaccacacttggagg

SEQ ID NO: 5060075 - DNA, 25 bp, Homo sapien
taaactgtagagctccttagaacca

SEQ ID NO: 5060076 - DNA, 25 bp, Homo sapien
aacagttgctaaactgtcttctgca

SEQ ID NO: 5060077 - DNA, 25 bp, Homo sapien
tatctttcattatgccatcttatct

SEQ ID NO: 5060078 - DNA, 25 bp, Homo sapien
atatttagaccttatatatctttca

SEQ ID NO: 5060079 - DNA, 25 bp, Homo sapien
aagtgaacagttgctaaactgtctt

SEQ ID NO: 5060080 - DNA, 25 bp, Homo sapien
gatatgaataaagtatcttttagag

SEQ ID NO: 5060081 - DNA, 25 bp, Homo sapien
aataaagtatcttttagagccatca

SEQ ID NO: 5060082 - DNA, 25 bp, Homo sapien
cttcttgatatgaataaagtatctt

SEQ ID NO: 5060083 - DNA, 25 bp, Homo sapien
tatgaataaagtatcttttagagcc

SEQ ID NO: 5060084 - DNA, 25 bp, Homo sapien
gtgtgagctgtgaactctggctgaa

SEQ ID NO: 5060085 - DNA, 25 bp, Homo sapien
acgagtctgctgaggtggtgtgagc

SEQ ID NO: 5060086 - DNA, 25 bp, Homo sapien
ggtggtgtgagctgtgaactctggc

SEQ ID NO: 5060087 - DNA, 25 bp, Homo sapien
tgctgaggtggtgtgagctgtgaac

SEQ ID NO: 5060088 - DNA, 25 bp, Homo sapien
gttgactttccactgaaggcgtttc

SEQ ID NO: 5060089 - DNA, 25 bp, Homo sapien
tgactttccactgaaggcgtttcca

SEQ ID NO: 5060090 - DNA, 25 bp, Homo sapien
atcttcagtgggtcgtgaggtggga

SEQ ID NO: 5060091 - DNA, 25 bp, Homo sapien
atctgatcttcagtgggtcgtgagg

SEQ ID NO: 5060092 - DNA, 25 bp, Homo sapien
tctgccgtgcttctctccagtggga

SEQ ID NO: 5060093 - DNA, 25 bp, Homo sapien
gtgtgaactgtccagcgcagaatga

SEQ ID NO: 5060094 - DNA, 25 bp, Homo sapien
actgtccagcgcagaatgagatttg

SEQ ID NO: 5060095 - DNA, 25 bp, Homo sapien
accatggttaaaggctctgccgtgc

SEQ ID NO: 5060096 - DNA, 25 bp, Homo sapien
ctggagccatgaacaaaggctggac

SEQ ID NO: 5060097 - DNA, 25 bp, Homo sapien
catgaacaaaggctggaccatgttt

SEQ ID NO: 5060098 - DNA, 25 bp, Homo sapien
gagccatgaacaaaggctggaccat

SEQ ID NO: 5060099 - DNA, 25 bp, Homo sapien
gccatgaacaaaggctggaccatgt

SEQ ID NO: 5060100 - DNA, 25 bp, Homo sapien
tttctgatgctgaatgagggttgac

SEQ ID NO: 5060101 - DNA, 25 bp, Homo sapien
cagtgtgaatgtgatggtgcagaac

SEQ ID NO: 5060102 - DNA, 25 bp, Homo sapien
tggaactccgacgaaaggctttgcc

SEQ ID NO: 5060103 - DNA, 25 bp, Homo sapien
caagatttgagctgtgagtaaaggc

SEQ ID NO: 5060104 - DNA, 25 bp, Homo sapien
cagtatgaacccgatgatggaggaa

SEQ ID NO: 5060105 - DNA, 25 bp, Homo sapien
caaatgcactacactcttgggttct

SEQ ID NO: 5060106 - DNA, 25 bp, Homo sapien
aacattttggtccagattcaagttt

SEQ ID NO: 5060107 - DNA, 25 bp, Homo sapien
gtttctatcaaatgcactacactct

SEQ ID NO: 5060108 - DNA, 25 bp, Homo sapien
ctttctcccaaagatctttccctgc

SEQ ID NO: 5060109 - DNA, 25 bp, Homo sapien
ctcttgtgaatattgggtttgttca

SEQ ID NO: 5060110 - DNA, 25 bp, Homo sapien
tctcttgtgaatattgggtttgttc

SEQ ID NO: 5060111 - DNA, 25 bp, Homo sapien
ggcagaatttcccacgcgctctttg

SEQ ID NO: 5060112 - DNA, 25 bp, Homo sapien
gcggcctgtgcattatcccttaaga

SEQ ID NO: 5060113 - DNA, 25 bp, Homo sapien
tttgagtttgccctcacggccccat

SEQ ID NO: 5060114 - DNA, 25 bp, Homo sapien
atgcttcccgaaactcagcggcctg

SEQ ID NO: 5060115 - DNA, 25 bp, Homo sapien
tagatagttccttcttggtcccaac

SEQ ID NO: 5060116 - DNA, 25 bp, Homo sapien
tagttccttcttggtcccaacctca

SEQ ID NO: 5060117 - DNA, 25 bp, Homo sapien
aatagatagttccttcttggtccca

SEQ ID NO: 5060118 - DNA, 25 bp, Homo sapien
tccttcttggtcccaacctcagaat

SEQ ID NO: 5060119 - DNA, 25 bp, Homo sapien
aatgtccataatgtggtagaagctc

SEQ ID NO: 5060120 - DNA, 25 bp, Homo sapien
tgtggtagaagctcctataaaccat

SEQ ID NO: 5060121 - DNA, 25 bp, Homo sapien
gaaaaccttccatcaggcataatgt

SEQ ID NO: 5060122 - DNA, 25 bp, Homo sapien
tcaggcataatgtccataatgtggt

SEQ ID NO: 5060123 - DNA, 25 bp, Homo sapien
ccctgatgtctcatatcaacgtaac

SEQ ID NO: 5060124 - DNA, 25 bp, Homo sapien
tccctgatgtctcatatcaacgtaa

SEQ ID NO: 5060125 - DNA, 25 bp, Homo sapien
gcctctcccttcgtacatcaccaga

SEQ ID NO: 5060126 - DNA, 25 bp, Homo sapien
tcccttcgtacatcaccagagtcgg

SEQ ID NO: 5060127 - DNA, 25 bp, Homo sapien
gtgcctctcccttcgtacatcacca

SEQ ID NO: 5060128 - DNA, 25 bp, Homo sapien
tctcccttcgtacatcaccagagtc

SEQ ID NO: 5060129 - DNA, 25 bp, Homo sapien
tctcatgccattcagacacccagtg

SEQ ID NO: 5060130 - DNA, 25 bp, Homo sapien
cacccagtgacggtcgtgggaaccg

SEQ ID NO: 5060131 - DNA, 25 bp, Homo sapien
tcaagatctcatgccattcagacac

SEQ ID NO: 5060132 - DNA, 25 bp, Homo sapien
ttcagacacccagtgacggtcgtgg

SEQ ID NO: 5060133 - DNA, 25 bp, Homo sapien
ttgggcactgtgtcgcgcagacaca

SEQ ID NO: 5060134 - DNA, 25 bp, Homo sapien
tgaagacggactctcctccaactgc

SEQ ID NO: 5060135 - DNA, 25 bp, Homo sapien
tccaactgccccaacaggacttaaa

SEQ ID NO: 5060136 - DNA, 25 bp, Homo sapien
agacacatgggattaagactgaaga

SEQ ID NO: 5060137 - DNA, 25 bp, Homo sapien
atcttgatagaggtttggtttacac

SEQ ID NO: 5060138 - DNA, 25 bp, Homo sapien
tcctcaatggtatactgtgtaccga

SEQ ID NO: 5060139 - DNA, 25 bp, Homo sapien
tatgtatttaaaggaagcgtcctgt

SEQ ID NO: 5060140 - DNA, 25 bp, Homo sapien
tgatctccaattaatgacacatatg

SEQ ID NO: 5060141 - DNA, 25 bp, Homo sapien
gggtcagtgacctcccacagaggtc

SEQ ID NO: 5060142 - DNA, 25 bp, Homo sapien
acagcaacggcatgaactctacttg

SEQ ID NO: 5060143 - DNA, 25 bp, Homo sapien
tcacagcaacggcatgaactctact

SEQ ID NO: 5060144 - DNA, 25 bp, Homo sapien
tgggggccaaccctgacaccagaaa

SEQ ID NO: 5060145 - DNA, 25 bp, Homo sapien
tatgccccgtagaaaggcaaacgct

SEQ ID NO: 5060146 - DNA, 25 bp, Homo sapien
cactctgcctcgtggagtctcagga

SEQ ID NO: 5060147 - DNA, 25 bp, Homo sapien
gtctcaggaggaaacatggtccacc

SEQ ID NO: 5060148 - DNA, 25 bp, Homo sapien
caaagagcagctcaatatgccccgt

SEQ ID NO: 5060149 - DNA, 25 bp, Homo sapien
agttgatgccgtcttttacagagca

SEQ ID NO: 5060150 - DNA, 25 bp, Homo sapien
aaattccacttcttcgttgccagta

SEQ ID NO: 5060151 - DNA, 25 bp, Homo sapien
cgcatctactgatatgaccacatga

SEQ ID NO: 5060152 - DNA, 25 bp, Homo sapien
ttttgaccaataccacactgccttg

SEQ ID NO: 5060153 - DNA, 25 bp, Homo sapien
tgaaattgggtactatgggtcctcc

SEQ ID NO: 5060154 - DNA, 25 bp, Homo sapien
ccatgagtcatgatcaagctactgc

SEQ ID NO: 5060155 - DNA, 25 bp, Homo sapien
gccatgagtcatgatcaagctactg

SEQ ID NO: 5060156 - DNA, 25 bp, Homo sapien
tgccatgagtcatgatcaagctact

SEQ ID NO: 5060157 - DNA, 25 bp, Homo sapien
ctgccatgagtcatgatcaagctac

SEQ ID NO: 5060158 - DNA, 25 bp, Homo sapien
ctcttttgcttacattatcaatctg

SEQ ID NO: 5060159 - DNA, 25 bp, Homo sapien
gcaatcctgctacactatgaggagt

SEQ ID NO: 5060160 - DNA, 25 bp, Homo sapien
taaagccctcagcacgttaatcata

SEQ ID NO: 5060161 - DNA, 25 bp, Homo sapien
aaatacctggtctgattactccaac

SEQ ID NO: 5060162 - DNA, 25 bp, Homo sapien
tgacttctaaagtccttacatgtca

SEQ ID NO: 5060163 - DNA, 25 bp, Homo sapien
ttttacttgttaggacacagtgatg

SEQ ID NO: 5060164 - DNA, 25 bp, Homo sapien
tgatttgtcctctgacctcacacct

SEQ ID NO: 5060165 - DNA, 25 bp, Homo sapien
caattttgagagcagtgatttgtcc

SEQ ID NO: 5060166 - DNA, 25 bp, Homo sapien
caagatacatgaagccaacactaca

SEQ ID NO: 5060167 - DNA, 25 bp, Homo sapien
gtaagtcttataatacagcttcaag

SEQ ID NO: 5060168 - DNA, 25 bp, Homo sapien
ccagagacaaacaggaattctctta

SEQ ID NO: 5060169 - DNA, 25 bp, Homo sapien
cataatgatagtcataagtgaagta

SEQ ID NO: 5060170 - DNA, 25 bp, Homo sapien
caagctccagccaaccaagagatgg

SEQ ID NO: 5060171 - DNA, 25 bp, Homo sapien
tgtctcagtagctggcagtcaaaga

SEQ ID NO: 5060172 - DNA, 25 bp, Homo sapien
taagccagtaacaaagctgcggata

SEQ ID NO: 5060173 - DNA, 25 bp, Homo sapien
gaacaagcttgttgactgtctcagt

SEQ ID NO: 5060174 - DNA, 25 bp, Homo sapien
caaagaaacagaccagcaagataaa

SEQ ID NO: 5060175 - DNA, 25 bp, Homo sapien
gcaaagaaacagaccagcaagataa

SEQ ID NO: 5060176 - DNA, 25 bp, Homo sapien
aaagaaacagaccagcaagataaaa

SEQ ID NO: 5060177 - DNA, 25 bp, Homo sapien
cacatttgtagaggggctgtatctg

SEQ ID NO: 5060178 - DNA, 25 bp, Homo sapien
tgctcacatttgtagaggggctgta

SEQ ID NO: 5060179 - DNA, 25 bp, Homo sapien
ctcacatttgtagaggggctgtatc

SEQ ID NO: 5060180 - DNA, 25 bp, Homo sapien
aggggctgtatctgtgagactgccc

SEQ ID NO: 5060181 - DNA, 25 bp, Homo sapien
ccagctgtccctcgcttggagcctc

SEQ ID NO: 5060182 - DNA, 25 bp, Homo sapien
gccattaatatgaacgccatgcccc

SEQ ID NO: 5060183 - DNA, 25 bp, Homo sapien
gggaggccattaatatgaacgccat

SEQ ID NO: 5060184 - DNA, 25 bp, Homo sapien
taatatgaacgccatgccccagctg

SEQ ID NO: 5060185 - DNA, 25 bp, Homo sapien
ggaggctgctcccaggattagcatc

SEQ ID NO: 5060186 - DNA, 25 bp, Homo sapien
caggattagcatcccatccattctc

SEQ ID NO: 5060187 - DNA, 25 bp, Homo sapien
ccaggattagcatcccatccattct

SEQ ID NO: 5060188 - DNA, 25 bp, Homo sapien
gatcaactccggcttagggacaggg

SEQ ID NO: 5060189 - DNA, 25 bp, Homo sapien
ccagctgggagatcaactccggctt

SEQ ID NO: 5060190 - DNA, 25 bp, Homo sapien
gatatctggttcctcagctcccaga

SEQ ID NO: 5060191 - DNA, 25 bp, Homo sapien
tctggcagcttttcaagatatctgg

SEQ ID NO: 5060192 - DNA, 25 bp, Homo sapien
atcacatcccggtagagcgcccgct

SEQ ID NO: 5060193 - DNA, 25 bp, Homo sapien
ccctccgcctgagagaagtacacgg

SEQ ID NO: 5060194 - DNA, 25 bp, Homo sapien
cagagaggccacgttcccatagttc

SEQ ID NO: 5060195 - DNA, 25 bp, Homo sapien
cgcccctccgcctgagagaagtaca

SEQ ID NO: 5060196 - DNA, 25 bp, Homo sapien
gaccagccaacttcagctacacggg

SEQ ID NO: 5060197 - DNA, 25 bp, Homo sapien
cctgctgtggtcagtatgaactgtg

SEQ ID NO: 5060198 - DNA, 25 bp, Homo sapien
tcacggttgctatgagcccctggct

SEQ ID NO: 5060199 - DNA, 25 bp, Homo sapien
tgaactgtgtatcagcaggtccctg

SEQ ID NO: 5060200 - DNA, 25 bp, Homo sapien
ctggaagctggaatgtggctgccat

SEQ ID NO: 5060201 - DNA, 25 bp, Homo sapien
ccctggaagctggaatgtggctgcc

SEQ ID NO: 5060202 - DNA, 25 bp, Homo sapien
ctggtgccctggaagctggaatgtg

SEQ ID NO: 5060203 - DNA, 25 bp, Homo sapien
tgccctggaagctggaatgtggctg

SEQ ID NO: 5060204 - DNA, 25 bp, Homo sapien
tggcctgaagtctccccgaacttac

SEQ ID NO: 5060205 - DNA, 25 bp, Homo sapien
ggctcagccccattcaaccaggggt

SEQ ID NO: 5060206 - DNA, 25 bp, Homo sapien
tcagccccattcaaccaggggtgtg

SEQ ID NO: 5060207 - DNA, 25 bp, Homo sapien
gccccattcaaccaggggtgtggaa

SEQ ID NO: 5060208 - DNA, 25 bp, Homo sapien
caggctcagccccattcaaccaggg

SEQ ID NO: 5060209 - DNA, 25 bp, Homo sapien
cgacgtgccctactgctcagtgact

SEQ ID NO: 5060210 - DNA, 25 bp, Homo sapien
ggccgacgtgccctactgctcagtg

SEQ ID NO: 5060211 - DNA, 25 bp, Homo sapien
tcactatgcagcacgggccgacgtg

SEQ ID NO: 5060212 - DNA, 25 bp, Homo sapien
ctgggtcgcgggaggcaggtcacta

SEQ ID NO: 5060213 - DNA, 25 bp, Homo sapien
tgaaatcccagaacggccagagcca

SEQ ID NO: 5060214 - DNA, 25 bp, Homo sapien
ctgaaatcccagaacggccagagcc

SEQ ID NO: 5060215 - DNA, 25 bp, Homo sapien
tgcagggccgttctacctgcctggc

SEQ ID NO: 5060216 - DNA, 25 bp, Homo sapien
ccaaggctgaggacgtgagaaggag

SEQ ID NO: 5060217 - DNA, 25 bp, Homo sapien
tgaaagctggcagttcccgtggtcc

SEQ ID NO: 5060218 - DNA, 25 bp, Homo sapien
gccaacctggggcaaagagccacgt

SEQ ID NO: 5060219 - DNA, 25 bp, Homo sapien
gcagtcgcaccgagcccggaacgga

SEQ ID NO: 5060220 - DNA, 25 bp, Homo sapien
cctcccacagaaccgggtccagagc

SEQ ID NO: 5060221 - DNA, 25 bp, Homo sapien
aagcgccgaggagctgcgcagtcgc

SEQ ID NO: 5060222 - DNA, 25 bp, Homo sapien
ctgtttgctcgacccggggaagcca

SEQ ID NO: 5060223 - DNA, 25 bp, Homo sapien
ccgggccgagctgcgcacacgcagg

SEQ ID NO: 5060224 - DNA, 25 bp, Homo sapien
gggccgggccgagctgcgcacacgc

SEQ ID NO: 5060225 - DNA, 25 bp, Homo sapien
ggccgagctgcgcacacgcaggctt

SEQ ID NO: 5060226 - DNA, 25 bp, Homo sapien
gggccgagctgcgcacacgcaggct

SEQ ID NO: 5060227 - DNA, 25 bp, Homo sapien
cagtacgcctccgagaacgccggga

SEQ ID NO: 5060228 - DNA, 25 bp, Homo sapien
gattcttccggggccgctctgggat

SEQ ID NO: 5060229 - DNA, 25 bp, Homo sapien
aagccagccgcggttccgcccggat

SEQ ID NO: 5060230 - DNA, 25 bp, Homo sapien
cttccggggccgctctgggatgact

SEQ ID NO: 5060231 - DNA, 25 bp, Homo sapien
ccacggcagctgagcggagggtctg

SEQ ID NO: 5060232 - DNA, 25 bp, Homo sapien
gcagctgagcggagggtctggcgcg

SEQ ID NO: 5060233 - DNA, 25 bp, Homo sapien
agcggagggtctggcgcggtgacgc

SEQ ID NO: 5060234 - DNA, 25 bp, Homo sapien
tctggcgcggtgacgctgcgcatcc

SEQ ID NO: 5060235 - DNA, 25 bp, Homo sapien
ggctcccccgtcggtcaccatacat

SEQ ID NO: 5060236 - DNA, 25 bp, Homo sapien
cggctcccccgtcggtcaccataca

SEQ ID NO: 5060237 - DNA, 25 bp, Homo sapien
caacgccccaaaatgaaggcctggg

SEQ ID NO: 5060238 - DNA, 25 bp, Homo sapien
tgtgtgaaaactggcggtaaaggcc

SEQ ID NO: 5060239 - DNA, 25 bp, Homo sapien
tggcccctacacaataaagcatggt

SEQ ID NO: 5060240 - DNA, 25 bp, Homo sapien
taaccaccagaaagtcgcttatgaa

SEQ ID NO: 5060241 - DNA, 25 bp, Homo sapien
gatggaccttgccacacagctatgt

SEQ ID NO: 5060242 - DNA, 25 bp, Homo sapien
ccacagatgctaggctggtttgcca

SEQ ID NO: 5060243 - DNA, 25 bp, Homo sapien
gaggaacctccaagcattctgccaa

SEQ ID NO: 5060244 - DNA, 25 bp, Homo sapien
gctatgtgaagatgtccaaggtcct

SEQ ID NO: 5060245 - DNA, 25 bp, Homo sapien
gcaatccgtctgtatcttcctccag

SEQ ID NO: 5060246 - DNA, 25 bp, Homo sapien
gggacggatggcaatccgtctgtat

SEQ ID NO: 5060247 - DNA, 25 bp, Homo sapien
ggcaatccgtctgtatcttcctcca

SEQ ID NO: 5060248 - DNA, 25 bp, Homo sapien
ggatggcaatccgtctgtatcttcc

SEQ ID NO: 5060249 - DNA, 25 bp, Homo sapien
caagccagccgatgcttaggaaaaa

SEQ ID NO: 5060250 - DNA, 25 bp, Homo sapien
atcggggcagattccccaatactac

SEQ ID NO: 5060251 - DNA, 25 bp, Homo sapien
cagccgatgcttaggaaaaatagaa

SEQ ID NO: 5060252 - DNA, 25 bp, Homo sapien
gaacttacgtgaatatcggggcaga

SEQ ID NO: 5060253 - DNA, 25 bp, Homo sapien
cagagaatgagttggaggagcagaa

SEQ ID NO: 5060254 - DNA, 25 bp, Homo sapien
tctccacacgcaggtacttcactct

SEQ ID NO: 5060255 - DNA, 25 bp, Homo sapien
aagccagatgctcccctaaaacagc

SEQ ID NO: 5060256 - DNA, 25 bp, Homo sapien
gtttccctggtcctgagagtgttgt

SEQ ID NO: 5060257 - DNA, 25 bp, Homo sapien
tccaccgtgtaaagtgctggctccc

SEQ ID NO: 5060258 - DNA, 25 bp, Homo sapien
tactcctgagttatatgtgatatgt

SEQ ID NO: 5060259 - DNA, 25 bp, Homo sapien
cctcctgcttccaccgtgtaaagtg

SEQ ID NO: 5060260 - DNA, 25 bp, Homo sapien
tagctactcctgagttatatgtgat

SEQ ID NO: 5060261 - DNA, 25 bp, Homo sapien
aaaaaaggactatcctgaacttcat

SEQ ID NO: 5060262 - DNA, 25 bp, Homo sapien
aatggtgttttttgtacatatagaa

SEQ ID NO: 5060263 - DNA, 25 bp, Homo sapien
gaatggcaagtgaccccaaatagcc

SEQ ID NO: 5060264 - DNA, 25 bp, Homo sapien
aacttcatatggaatggcaagtgac

SEQ ID NO: 5060265 - DNA, 25 bp, Homo sapien
gctgcaatgacaagcattacggtat

SEQ ID NO: 5060266 - DNA, 25 bp, Homo sapien
caaaagtgaagatcctaggtgctgc

SEQ ID NO: 5060267 - DNA, 25 bp, Homo sapien
gaattgaggttaccagcagtaggga

SEQ ID NO: 5060268 - DNA, 25 bp, Homo sapien
taaaatgctctccagtatgtctcga

SEQ ID NO: 5060269 - DNA, 25 bp, Homo sapien
gaaaacatcgtgtggataatacata

SEQ ID NO: 5060270 - DNA, 25 bp, Homo sapien
ctggactctgccctcggacaccgcg

SEQ ID NO: 5060271 - DNA, 25 bp, Homo sapien
ttcactctgtgaaaacatcgtgtgg

SEQ ID NO: 5060272 - DNA, 25 bp, Homo sapien
gataatacataaagggcagagtcag

SEQ ID NO: 5060273 - DNA, 25 bp, Homo sapien
gaagtcctcccggaggtgaatccgc

SEQ ID NO: 5060274 - DNA, 25 bp, Homo sapien
ttacatggagaagtcctcccggagg

SEQ ID NO: 5060275 - DNA, 25 bp, Homo sapien
acatggagaagtcctcccggaggtg

SEQ ID NO: 5060276 - DNA, 25 bp, Homo sapien
gtcctcccggaggtgaatccgctga

SEQ ID NO: 5060277 - DNA, 25 bp, Homo sapien
tggatcctccggtgctgaatcaagt

SEQ ID NO: 5060278 - DNA, 25 bp, Homo sapien
tgtggatcctccggtgctgaatcaa

SEQ ID NO: 5060279 - DNA, 25 bp, Homo sapien
ggtgtggatcctccggtgctgaatc

SEQ ID NO: 5060280 - DNA, 25 bp, Homo sapien
gatcctccggtgctgaatcaagtac

SEQ ID NO: 5060281 - DNA, 25 bp, Homo sapien
tctgatgttggataaggttagaact

SEQ ID NO: 5060282 - DNA, 25 bp, Homo sapien
tctctgatgttccacgagtttggtt

SEQ ID NO: 5060283 - DNA, 25 bp, Homo sapien
ctccggtgtgagtccgacgatgtcg

SEQ ID NO: 5060284 - DNA, 25 bp, Homo sapien
gacgatgtcggataaggattgagcc

SEQ ID NO: 5060285 - DNA, 25 bp, Homo sapien
gtgataaatcagggaagagtaggcg

SEQ ID NO: 5060286 - DNA, 25 bp, Homo sapien
ggtgataaatcagggaagagtaggc

SEQ ID NO: 5060287 - DNA, 25 bp, Homo sapien
ctggtgataaatcagggaagagtag

SEQ ID NO: 5060288 - DNA, 25 bp, Homo sapien
ctctggtgataaatcagggaagagt

SEQ ID NO: 5060289 - DNA, 25 bp, Homo sapien
tgattgatgaactcgcagctctggc

SEQ ID NO: 5060290 - DNA, 25 bp, Homo sapien
tcgtcacaccggtagggaatctctc

SEQ ID NO: 5060291 - DNA, 25 bp, Homo sapien
tcaggaacaggtcttgacagcaacc

SEQ ID NO: 5060292 - DNA, 25 bp, Homo sapien
ggtcacaggcttctactggctcaga

SEQ ID NO: 5060293 - DNA, 25 bp, Homo sapien
cagaggtgccctgaacatccaggac

SEQ ID NO: 5060294 - DNA, 25 bp, Homo sapien
ctgggctgttgactctcaggtgctc

SEQ ID NO: 5060295 - DNA, 25 bp, Homo sapien
gggctgttgactctcaggtgctctt

SEQ ID NO: 5060296 - DNA, 25 bp, Homo sapien
tgggctgttgactctcaggtgctct

SEQ ID NO: 5060297 - DNA, 25 bp, Homo sapien
gctccaactgcgagatcactccagg

SEQ ID NO: 5060298 - DNA, 25 bp, Homo sapien
ctcgctccaactgcgagatcactcc

SEQ ID NO: 5060299 - DNA, 25 bp, Homo sapien
tcatcccctcgctccaactgcgaga

SEQ ID NO: 5060300 - DNA, 25 bp, Homo sapien
tcccctcgctccaactgcgagatca

SEQ ID NO: 5060301 - DNA, 25 bp, Homo sapien
actaggttcccgtaggtctccagca

SEQ ID NO: 5060302 - DNA, 25 bp, Homo sapien
gtgagactaggttcccgtaggtctc

SEQ ID NO: 5060303 - DNA, 25 bp, Homo sapien
agactaggttcccgtaggtctccag

SEQ ID NO: 5060304 - DNA, 25 bp, Homo sapien
ctaggttcccgtaggtctccagcat

SEQ ID NO: 5060305 - DNA, 25 bp, Homo sapien
ttcctcccgggagaggtacacagcc

SEQ ID NO: 5060306 - DNA, 25 bp, Homo sapien
cccgggagaggtacacagccacgtc

SEQ ID NO: 5060307 - DNA, 25 bp, Homo sapien
gccacgtcctcgaaggtcacctcgg

SEQ ID NO: 5060308 - DNA, 25 bp, Homo sapien
cattcctcccgggagaggtacacag

SEQ ID NO: 5060309 - DNA, 25 bp, Homo sapien
atctgccaccgagccagctaataca

SEQ ID NO: 5060310 - DNA, 25 bp, Homo sapien
gaggcagcagaagcatgctaaaggc

SEQ ID NO: 5060311 - DNA, 25 bp, Homo sapien
cagaagcatgctaaaggcagcagca

SEQ ID NO: 5060312 - DNA, 25 bp, Homo sapien
tgacagggactactgcagcccaggt

SEQ ID NO: 5060313 - DNA, 25 bp, Homo sapien
tcccaaaccagagacacctggcagt

SEQ ID NO: 5060314 - DNA, 25 bp, Homo sapien
tgtttgccaaggaaagccctgggta

SEQ ID NO: 5060315 - DNA, 25 bp, Homo sapien
ggcagtgtttgccaaggaaagccct

SEQ ID NO: 5060316 - DNA, 25 bp, Homo sapien
cagtgtttgccaaggaaagccctgg

SEQ ID NO: 5060317 - DNA, 25 bp, Homo sapien
tggggcagacaggaacaaggccgcc

SEQ ID NO: 5060318 - DNA, 25 bp, Homo sapien
gtggggcagacaggaacaaggccgc

SEQ ID NO: 5060319 - DNA, 25 bp, Homo sapien
gggtggggcagacaggaacaaggcc

SEQ ID NO: 5060320 - DNA, 25 bp, Homo sapien
gggcagacaggaacaaggccgccat

SEQ ID NO: 5060321 - DNA, 25 bp, Homo sapien
gcagtgagcaggagctggtcactga

SEQ ID NO: 5060322 - DNA, 25 bp, Homo sapien
tgagggcagtgagcaggagctggtc

SEQ ID NO: 5060323 - DNA, 25 bp, Homo sapien
agggcagtgagcaggagctggtcac

SEQ ID NO: 5060324 - DNA, 25 bp, Homo sapien
ctgagggcagtgagcaggagctggt

SEQ ID NO: 5060325 - DNA, 25 bp, Homo sapien
gatacatgtgatgcaactatttggc

SEQ ID NO: 5060326 - DNA, 25 bp, Homo sapien
cagaagcatgagactctcggattag

SEQ ID NO: 5060327 - DNA, 25 bp, Homo sapien
gactctcggattagatacatgtgat

SEQ ID NO: 5060328 - DNA, 25 bp, Homo sapien
gcatgagactctcggattagataca

SEQ ID NO: 5060329 - DNA, 25 bp, Homo sapien
gccaccgtgctctgccatacatatg

SEQ ID NO: 5060330 - DNA, 25 bp, Homo sapien
tagagatataagaaaacgaggccgg

SEQ ID NO: 5060331 - DNA, 25 bp, Homo sapien
gagaaaagccttggagcgccagaag

SEQ ID NO: 5060332 - DNA, 25 bp, Homo sapien
atcgggacgcagaagccgctctgtg

SEQ ID NO: 5060333 - DNA, 25 bp, Homo sapien
ctgatggcgggacggacccacgcct

SEQ ID NO: 5060334 - DNA, 25 bp, Homo sapien
tcgaacaggaagtgccgctgatggc

SEQ ID NO: 5060335 - DNA, 25 bp, Homo sapien
cagcaccgcgagaggaccgggcaca

SEQ ID NO: 5060336 - DNA, 25 bp, Homo sapien
aggagccccgtgaggagcgacccca

SEQ ID NO: 5060337 - DNA, 25 bp, Homo sapien
gatccggaagtgacgtcagccgact

SEQ ID NO: 5060338 - DNA, 25 bp, Homo sapien
tcagccgactgtctgggtccgaggc

SEQ ID NO: 5060339 - DNA, 25 bp, Homo sapien
ccgctctgggaagctaggacgccgc

SEQ ID NO: 5060340 - DNA, 25 bp, Homo sapien
ggacccgcgaatggcaaagccgtaa

SEQ ID NO: 5060341 - DNA, 25 bp, Homo sapien
ctgccaccgggtggcagtccgaagc

SEQ ID NO: 5060342 - DNA, 25 bp, Homo sapien
gccaccgggtggcagtccgaagcca

SEQ ID NO: 5060343 - DNA, 25 bp, Homo sapien
ccgggtggcagtccgaagccacggc

SEQ ID NO: 5060344 - DNA, 25 bp, Homo sapien
caccgggtggcagtccgaagccacg

SEQ ID NO: 5060345 - DNA, 25 bp, Homo sapien
tttcgggtgcctgagctgcttctgg

SEQ ID NO: 5060346 - DNA, 25 bp, Homo sapien
actcctgtaaatggggcccagtgtc

SEQ ID NO: 5060347 - DNA, 25 bp, Homo sapien
agcctgtcttgggtttaacctattg

SEQ ID NO: 5060348 - DNA, 25 bp, Homo sapien
gctcctcatccttaactcctgtaaa

SEQ ID NO: 5060349 - DNA, 25 bp, Homo sapien
caggaaagcaagatcacgaaatggg

SEQ ID NO: 5060350 - DNA, 25 bp, Homo sapien
taaggttctctagagacagcgtgga

SEQ ID NO: 5060351 - DNA, 25 bp, Homo sapien
gggtaaggttctctagagacagcgt

SEQ ID NO: 5060352 - DNA, 25 bp, Homo sapien
tcaggaaagcaagatcacgaaatgg

SEQ ID NO: 5060353 - DNA, 25 bp, Homo sapien
ttccccaacacttccaacctgattc

SEQ ID NO: 5060354 - DNA, 25 bp, Homo sapien
ccaacacttccaacctgattccact

SEQ ID NO: 5060355 - DNA, 25 bp, Homo sapien
ttccaacctgattccactcaatcat

SEQ ID NO: 5060356 - DNA, 25 bp, Homo sapien
tgccctcccattgcagggggggttc

SEQ ID NO: 5060357 - DNA, 25 bp, Homo sapien
cgtccagtccggcgggcagcaatga

SEQ ID NO: 5060358 - DNA, 25 bp, Homo sapien
ccggagacgtccagtccggcgggca

SEQ ID NO: 5060359 - DNA, 25 bp, Homo sapien
tttctcctgcacagtcttggttccc

SEQ ID NO: 5060360 - DNA, 25 bp, Homo sapien
cacagtcttggttccccggagacgt

SEQ ID NO: 5060361 - DNA, 25 bp, Homo sapien
catctctgcggatggtggagggctt

SEQ ID NO: 5060362 - DNA, 25 bp, Homo sapien
atgtgctggtggttgccacctccaa

SEQ ID NO: 5060363 - DNA, 25 bp, Homo sapien
tttgcggccagcaggggcatctctg

SEQ ID NO: 5060364 - DNA, 25 bp, Homo sapien
ggcatctctgcggatggtggagggc

SEQ ID NO: 5060365 - DNA, 25 bp, Homo sapien
gctgctcctcccaccgtagatcccc

SEQ ID NO: 5060366 - DNA, 25 bp, Homo sapien
agcaggatcaacagtcccgtgacta

SEQ ID NO: 5060367 - DNA, 25 bp, Homo sapien
tcaacagtcccgtgactacaaacca

SEQ ID NO: 5060368 - DNA, 25 bp, Homo sapien
aggatcaacagtcccgtgactacaa

SEQ ID NO: 5060369 - DNA, 25 bp, Homo sapien
ggtttgtcaattcggccacctccag

SEQ ID NO: 5060370 - DNA, 25 bp, Homo sapien
cttatatttgtggtacgcccggcca

SEQ ID NO: 5060371 - DNA, 25 bp, Homo sapien
attcatggccacaccccgtactcgt

SEQ ID NO: 5060372 - DNA, 25 bp, Homo sapien
ggtacgcccggccagccttcaagat

SEQ ID NO: 5060373 - DNA, 25 bp, Homo sapien
tgcaccctgtgagctgacatccagt

SEQ ID NO: 5060374 - DNA, 25 bp, Homo sapien
tgcatccaactacccagcaaaaagc

SEQ ID NO: 5060375 - DNA, 25 bp, Homo sapien
tgtcatgcaccttcccaatactgca

SEQ ID NO: 5060376 - DNA, 25 bp, Homo sapien
tcttcaatccacaatgggcaggcaa

SEQ ID NO: 5060377 - DNA, 25 bp, Homo sapien
ctcaccatgtgtgagacgtcaggcc

SEQ ID NO: 5060378 - DNA, 25 bp, Homo sapien
gagctccaagcgcagggaagcaccc

SEQ ID NO: 5060379 - DNA, 25 bp, Homo sapien
catcacctagaatgctggctgagct

SEQ ID NO: 5060380 - DNA, 25 bp, Homo sapien
tgtgagacgtcaggccggccactca

SEQ ID NO: 5060381 - DNA, 25 bp, Homo sapien
gacgtaagacacttgattcagcctg

SEQ ID NO: 5060382 - DNA, 25 bp, Homo sapien
cgtaagacacttgattcagcctgcc

SEQ ID NO: 5060383 - DNA, 25 bp, Homo sapien
aagacacttgattcagcctgcccca

SEQ ID NO: 5060384 - DNA, 25 bp, Homo sapien
ctgacgtaagacacttgattcagcc

SEQ ID NO: 5060385 - DNA, 25 bp, Homo sapien
gagactacaggatgagctcaaactt

SEQ ID NO: 5060386 - DNA, 25 bp, Homo sapien
cagggaccaagtctagccactggct

SEQ ID NO: 5060387 - DNA, 25 bp, Homo sapien
taacgcctcaacagcagtaaagcag

SEQ ID NO: 5060388 - DNA, 25 bp, Homo sapien
caggtaatcgaattccagggaccaa

SEQ ID NO: 5060389 - DNA, 25 bp, Homo sapien
caaccacagctctgttggctgagga

SEQ ID NO: 5060390 - DNA, 25 bp, Homo sapien
cagctctgttggctgaggagataac

SEQ ID NO: 5060391 - DNA, 25 bp, Homo sapien
cacagctctgttggctgaggagata

SEQ ID NO: 5060392 - DNA, 25 bp, Homo sapien
accacagctctgttggctgaggaga

SEQ ID NO: 5060393 - DNA, 25 bp, Homo sapien
gggcagcttcacacgggtcttcttg

SEQ ID NO: 5060394 - DNA, 25 bp, Homo sapien
ggcagcttcacacgggtcttcttgg

SEQ ID NO: 5060395 - DNA, 25 bp, Homo sapien
tccaggcagcacacgattgtaccct

SEQ ID NO: 5060396 - DNA, 25 bp, Homo sapien
agcacacgattgtaccctcaggcat

SEQ ID NO: 5060397 - DNA, 25 bp, Homo sapien
cagggagcacattgccaatgttgag

SEQ ID NO: 5060398 - DNA, 25 bp, Homo sapien
gccagcttgccacggtctccaggct

SEQ ID NO: 5060399 - DNA, 25 bp, Homo sapien
tctgcctgcgaggttcccatatcgg

SEQ ID NO: 5060400 - DNA, 25 bp, Homo sapien
catatcggcttaggacgttaactcc

SEQ ID NO: 5060401 - DNA, 25 bp, Homo sapien
cacagtaagaaacaatgcgaacccc

SEQ ID NO: 5060402 - DNA, 25 bp, Homo sapien
agcatcaggccgtcagcacagtaag

SEQ ID NO: 5060403 - DNA, 25 bp, Homo sapien
atacacaaactggcccgtgtgaatg

SEQ ID NO: 5060404 - DNA, 25 bp, Homo sapien
cggcaatgaacagctccgtccgctt

SEQ ID NO: 5060405 - DNA, 25 bp, Homo sapien
gcaatgaacagctccgtccgcttct

SEQ ID NO: 5060406 - DNA, 25 bp, Homo sapien
gaacagctccgtccgcttcttaaac

SEQ ID NO: 5060407 - DNA, 25 bp, Homo sapien
ctcggcggcaatgaacagctccgtc

SEQ ID NO: 5060408 - DNA, 25 bp, Homo sapien
gccgcggcccgggtcgtggatgatg

SEQ ID NO: 5060409 - DNA, 25 bp, Homo sapien
cgcggcccgggtcgtggatgatgtc

SEQ ID NO: 5060410 - DNA, 25 bp, Homo sapien
ccgcggcccgggtcgtggatgatgt

SEQ ID NO: 5060411 - DNA, 25 bp, Homo sapien
ggcggcgtgagtgcggcgttccggc

SEQ ID NO: 5060412 - DNA, 25 bp, Homo sapien
cagaggcggcgtgagtgcggcgttc

SEQ ID NO: 5060413 - DNA, 25 bp, Homo sapien
ctgtgggcagaggcggcgtgagtgc

SEQ ID NO: 5060414 - DNA, 25 bp, Homo sapien
tgagtgcggcgttccggccgggcgt

SEQ ID NO: 5060415 - DNA, 25 bp, Homo sapien
gtagccgtgccgctcagcgaaatcc

SEQ ID NO: 5060416 - DNA, 25 bp, Homo sapien
acgtgcgcgcggaacacagacccgg

SEQ ID NO: 5060417 - DNA, 25 bp, Homo sapien
cttgacgatgcccttgatgtagccg

SEQ ID NO: 5060418 - DNA, 25 bp, Homo sapien
ggcgcgcagcgcctttacggtgctt

SEQ ID NO: 5060419 - DNA, 25 bp, Homo sapien
tgggggcgactcacgattagcgcgg

SEQ ID NO: 5060420 - DNA, 25 bp, Homo sapien
gggcgactcacgattagcgcggccg

SEQ ID NO: 5060421 - DNA, 25 bp, Homo sapien
cgactcacgattagcgcggccgggc

SEQ ID NO: 5060422 - DNA, 25 bp, Homo sapien
ctgggggcgactcacgattagcgcg

SEQ ID NO: 5060423 - DNA, 25 bp, Homo sapien
tcagcgcgcctcacggaagaggatg

SEQ ID NO: 5060424 - DNA, 25 bp, Homo sapien
ggcatcctctcaggagggccggtcc

SEQ ID NO: 5060425 - DNA, 25 bp, Homo sapien
atggcggcggatactgcccatgccg

SEQ ID NO: 5060426 - DNA, 25 bp, Homo sapien
gccgcaaggccgcaaggatgaccta

SEQ ID NO: 5060427 - DNA, 25 bp, Homo sapien
ggccgaaagaggaaacacggcgtca

SEQ ID NO: 5060428 - DNA, 25 bp, Homo sapien
acggcgtcagcgagcggccttatct

SEQ ID NO: 5060429 - DNA, 25 bp, Homo sapien
tcagcgagcggccttatcttccggg

SEQ ID NO: 5060430 - DNA, 25 bp, Homo sapien
ctgttcaccagcgcggccgaaagag

SEQ ID NO: 5060431 - DNA, 25 bp, Homo sapien
ttctcgctggtgcagagcaggagat

SEQ ID NO: 5060432 - DNA, 25 bp, Homo sapien
cgtggacccactcgtggaacgtcat

SEQ ID NO: 5060433 - DNA, 25 bp, Homo sapien
tgcaggagtgctcggctttcaccgg

SEQ ID NO: 5060434 - DNA, 25 bp, Homo sapien
gccaagtggttgagtgacctgtcca

SEQ ID NO: 5060435 - DNA, 25 bp, Homo sapien
catggagactggtagtggtcctgaa

SEQ ID NO: 5060436 - DNA, 25 bp, Homo sapien
cctttccaggtctgctatgtaacta

SEQ ID NO: 5060437 - DNA, 25 bp, Homo sapien
tgggcgagtttgactgatgtcaggc

SEQ ID NO: 5060438 - DNA, 25 bp, Homo sapien
cctgtccgggcgtgacagaggctca

SEQ ID NO: 5060439 - DNA, 25 bp, Homo sapien
caagaagttcgtttgtgagtgtaga

SEQ ID NO: 5060440 - DNA, 25 bp, Homo sapien
tgaggacgggtcagataaacccacc

SEQ ID NO: 5060441 - DNA, 25 bp, Homo sapien
tgtagaggctggatcatccttccgt

SEQ ID NO: 5060442 - DNA, 25 bp, Homo sapien
ctgggatcatggagtctcctctgca

SEQ ID NO: 5060443 - DNA, 25 bp, Homo sapien
gggccctagcgcagaaattcagaac

SEQ ID NO: 5060444 - DNA, 25 bp, Homo sapien
ggtcttcgtgcagaaccattgggca

SEQ ID NO: 5060445 - DNA, 25 bp, Homo sapien
ggagctacacgctgaacgagcacta

SEQ ID NO: 5060446 - DNA, 25 bp, Homo sapien
ttccggaaatgtccaggagcgggca

SEQ ID NO: 5060447 - DNA, 25 bp, Homo sapien
cacactgtacttggcagctggcgaa

SEQ ID NO: 5060448 - DNA, 25 bp, Homo sapien
catgggcaggaaagcacgaaggtca

SEQ ID NO: 5060449 - DNA, 25 bp, Homo sapien
caattccaggtgctgtaaagccgac

SEQ ID NO: 5060450 - DNA, 25 bp, Homo sapien
ccataagtgtgtgggccagttcgcc

SEQ ID NO: 5060451 - DNA, 25 bp, Homo sapien
agtggagcggcgagtggaggttgca

SEQ ID NO: 5060452 - DNA, 25 bp, Homo sapien
gtggagcggcgagtggaggttgcag

SEQ ID NO: 5060453 - DNA, 25 bp, Homo sapien
tattcatcgtcaaaggaggaaatcc

SEQ ID NO: 5060454 - DNA, 25 bp, Homo sapien
gagaactattcatcgtcaaaggagg

SEQ ID NO: 5060455 - DNA, 25 bp, Homo sapien
gaactattcatcgtcaaaggaggaa

SEQ ID NO: 5060456 - DNA, 25 bp, Homo sapien
cagtggagaactattcatcgtcaaa

SEQ ID NO: 5060457 - DNA, 25 bp, Homo sapien
gcttctgcccaaaacgtctcggagt

SEQ ID NO: 5060458 - DNA, 25 bp, Homo sapien
cttgtgaggacgagctgagagacca

SEQ ID NO: 5060459 - DNA, 25 bp, Homo sapien
taatctgacactgtatgggtggcca

SEQ ID NO: 5060460 - DNA, 25 bp, Homo sapien
aatgtcataggctcccacaaggaag

SEQ ID NO: 5060461 - DNA, 25 bp, Homo sapien
gaaggatcccttgcctcctgagatg

SEQ ID NO: 5060462 - DNA, 25 bp, Homo sapien
caagcccaaggctgatggacagacc

SEQ ID NO: 5060463 - DNA, 25 bp, Homo sapien
acttcaaacggccatgtgctgctga

SEQ ID NO: 5060464 - DNA, 25 bp, Homo sapien
taacagctgctaatcgaaccccagg

SEQ ID NO: 5060465 - DNA, 25 bp, Homo sapien
ggctgctctggcactcgtgggtctc

SEQ ID NO: 5060466 - DNA, 25 bp, Homo sapien
tgtcgactcataaccagcccgtgtg

SEQ ID NO: 5060467 - DNA, 25 bp, Homo sapien
tctggcactcgtgggtctctgtatg

SEQ ID NO: 5060468 - DNA, 25 bp, Homo sapien
catccctggtgtgatggcagcacgg

SEQ ID NO: 5060469 - DNA, 25 bp, Homo sapien
gaggctcctggctcctagttctctg

SEQ ID NO: 5060470 - DNA, 25 bp, Homo sapien
ggctcctagttctctgtcctccgaa

SEQ ID NO: 5060471 - DNA, 25 bp, Homo sapien
ggctcctggctcctagttctctgtc

SEQ ID NO: 5060472 - DNA, 25 bp, Homo sapien
gctcctagttctctgtcctccgaaa

SEQ ID NO: 5060473 - DNA, 25 bp, Homo sapien
taagcaccgtgaccatgtgagggcc

SEQ ID NO: 5060474 - DNA, 25 bp, Homo sapien
tatgaggtggatgctctagccaggc

SEQ ID NO: 5060475 - DNA, 25 bp, Homo sapien
ctttatcagggaatgtgcccggccc

SEQ ID NO: 5060476 - DNA, 25 bp, Homo sapien
ccacccaggtacatttgcagcaagg

SEQ ID NO: 5060477 - DNA, 25 bp, Homo sapien
cagtaacctctcctcgggtaagcat

SEQ ID NO: 5060478 - DNA, 25 bp, Homo sapien
ggtaagcatattccctgaggcagct

SEQ ID NO: 5060479 - DNA, 25 bp, Homo sapien
gcttgtggatgcgtccctcactctg

SEQ ID NO: 5060480 - DNA, 25 bp, Homo sapien
caggctccaggagtgcattactttc

SEQ ID NO: 5060481 - DNA, 25 bp, Homo sapien
cctcgggaagcaagttggacagtcc

SEQ ID NO: 5060482 - DNA, 25 bp, Homo sapien
cgccggccattctagcgatttggga

SEQ ID NO: 5060483 - DNA, 25 bp, Homo sapien
taatctgcaacgactgtgtttccaa

SEQ ID NO: 5060484 - DNA, 25 bp, Homo sapien
cctcatggtgactaattaatctgca

SEQ ID NO: 5060485 - DNA, 25 bp, Homo sapien
tgggcaggaaccgaagcttgaagcc

SEQ ID NO: 5060486 - DNA, 25 bp, Homo sapien
gagcatccctgctacacaatgaggt

SEQ ID NO: 5060487 - DNA, 25 bp, Homo sapien
ttgggaggagtgtcaagcaagccct

SEQ ID NO: 5060488 - DNA, 25 bp, Homo sapien
ggaagacctttggagatccctggaa

SEQ ID NO: 5060489 - DNA, 25 bp, Homo sapien
aagcctgtgcttacttggagagtcc

SEQ ID NO: 5060490 - DNA, 25 bp, Homo sapien
cacaccagtgcctgtaggatggacc

SEQ ID NO: 5060491 - DNA, 25 bp, Homo sapien
tgagctcacgtagtaagtcccttgg

SEQ ID NO: 5060492 - DNA, 25 bp, Homo sapien
tggtcagaatctccccacaggactt

SEQ ID NO: 5060493 - DNA, 25 bp, Homo sapien
tcccagagatgcgaggagtgtggca

SEQ ID NO: 5060494 - DNA, 25 bp, Homo sapien
gaagcagcggcctggattgtcagcc

SEQ ID NO: 5060495 - DNA, 25 bp, Homo sapien
aaggacgcaccccagggatgtaagg

SEQ ID NO: 5060496 - DNA, 25 bp, Homo sapien
tgaggagactgtggttcccaagacc

SEQ ID NO: 5060497 - DNA, 25 bp, Homo sapien
tggtaaaggttcagaattgctctca

SEQ ID NO: 5060498 - DNA, 25 bp, Homo sapien
tcacatgggatagaccacttacata

SEQ ID NO: 5060499 - DNA, 25 bp, Homo sapien
atcgtagctcaaggcttacccagca

SEQ ID NO: 5060500 - DNA, 25 bp, Homo sapien
gaatatccaacttcaggccgagtgt

SEQ ID NO: 5060501 - DNA, 25 bp, Homo sapien
tcacgagaaatcctgtggccattcc

SEQ ID NO: 5060502 - DNA, 25 bp, Homo sapien
cacgagaaatcctgtggccattcca

SEQ ID NO: 5060503 - DNA, 25 bp, Homo sapien
acgagaaatcctgtggccattccac

SEQ ID NO: 5060504 - DNA, 25 bp, Homo sapien
gggacggcaggcagaatactcactg

SEQ ID NO: 5060505 - DNA, 25 bp, Homo sapien
tcttggcacatgcaggaacatggag

SEQ ID NO: 5060506 - DNA, 25 bp, Homo sapien
cactgtggttgtcagggccctatca

SEQ ID NO: 5060507 - DNA, 25 bp, Homo sapien
tgacacaaccttgagaagtggccca

SEQ ID NO: 5060508 - DNA, 25 bp, Homo sapien
aagggtgatggtgctctccacagcc

SEQ ID NO: 5060509 - DNA, 25 bp, Homo sapien
gctcctcccggtgtacaagggtgat

SEQ ID NO: 5060510 - DNA, 25 bp, Homo sapien
ggctcctcccggtgtacaagggtga

SEQ ID NO: 5060511 - DNA, 25 bp, Homo sapien
cctcccggtgtacaagggtgatggt

SEQ ID NO: 5060512 - DNA, 25 bp, Homo sapien
cgtccagcaccaaagacaaatgtac

SEQ ID NO: 5060513 - DNA, 25 bp, Homo sapien
aactgtatgttgtctacaaagggcc

SEQ ID NO: 5060514 - DNA, 25 bp, Homo sapien
ctacaaaagcacctggctacatggg

SEQ ID NO: 5060515 - DNA, 25 bp, Homo sapien
tgaggtccaacactcacctatagaa

SEQ ID NO: 5060516 - DNA, 25 bp, Homo sapien
aagagcctgcctcatgggaagggca

SEQ ID NO: 5060517 - DNA, 25 bp, Homo sapien
cagggctgtcgtgggaagagtcagc

SEQ ID NO: 5060518 - DNA, 25 bp, Homo sapien
gccggatctgaatgggactggtcaa

SEQ ID NO: 5060519 - DNA, 25 bp, Homo sapien
gcaccatctcaggtgcctgtccaag

SEQ ID NO: 5060520 - DNA, 25 bp, Homo sapien
caggatgatgcaggtatggagttgc

SEQ ID NO: 5060521 - DNA, 25 bp, Homo sapien
ctgctcctccggcaggttggcgctg

SEQ ID NO: 5060522 - DNA, 25 bp, Homo sapien
gatgcaggtatggagttgcagcccc

SEQ ID NO: 5060523 - DNA, 25 bp, Homo sapien
tggagattgctacatccacccgcca

SEQ ID NO: 5060524 - DNA, 25 bp, Homo sapien
ccagcccaggaggtcggtcccagat

SEQ ID NO: 5060525 - DNA, 25 bp, Homo sapien
gccagcccaggaggtcggtcccaga

SEQ ID NO: 5060526 - DNA, 25 bp, Homo sapien
cagcccaggaggtcggtcccagatg

SEQ ID NO: 5060527 - DNA, 25 bp, Homo sapien
ggaggtcggtcccagatgcagatgc

SEQ ID NO: 5060528 - DNA, 25 bp, Homo sapien
attcagaagtcccagctgtttccac

SEQ ID NO: 5060529 - DNA, 25 bp, Homo sapien
gaggaagtgacatctaaggcatgaa

SEQ ID NO: 5060530 - DNA, 25 bp, Homo sapien
atcttgaatccttcacaacagtggg

SEQ ID NO: 5060531 - DNA, 25 bp, Homo sapien
gaagcctagacctgtctattcagaa

SEQ ID NO: 5060532 - DNA, 25 bp, Homo sapien
caactccttcaccgtcccgccagca

SEQ ID NO: 5060533 - DNA, 25 bp, Homo sapien
ccaactccttcaccgtcccgccagc

SEQ ID NO: 5060534 - DNA, 25 bp, Homo sapien
aactccttcaccgtcccgccagcac

SEQ ID NO: 5060535 - DNA, 25 bp, Homo sapien
gccaactccttcaccgtcccgccag

SEQ ID NO: 5060536 - DNA, 25 bp, Homo sapien
tccgggaaggcctccgagctgcccg

SEQ ID NO: 5060537 - DNA, 25 bp, Homo sapien
cgcggcttggaaggccgggttcgca

SEQ ID NO: 5060538 - DNA, 25 bp, Homo sapien
ccgcttccggtcgcgcggcttggaa

SEQ ID NO: 5060539 - DNA, 25 bp, Homo sapien
ttcccactccaaagagccatccggg

SEQ ID NO: 5060540 - DNA, 25 bp, Homo sapien
ccgcggctctgatgggggcgcggcg

SEQ ID NO: 5060541 - DNA, 25 bp, Homo sapien
ggctctgatgggggcgcggcgtcgc

SEQ ID NO: 5060542 - DNA, 25 bp, Homo sapien
gatgggggcgcggcgtcgcccgttc

SEQ ID NO: 5060543 - DNA, 25 bp, Homo sapien
ctgatgggggcgcggcgtcgcccgt

SEQ ID NO: 5060544 - DNA, 25 bp, Homo sapien
cagagtcaaattggcactcggccgt

SEQ ID NO: 5060545 - DNA, 25 bp, Homo sapien
tgcacagagtcaaattggcactcgg

SEQ ID NO: 5060546 - DNA, 25 bp, Homo sapien
tcaaattggcactcggccgtcgccg

SEQ ID NO: 5060547 - DNA, 25 bp, Homo sapien
gagtcaaattggcactcggccgtcg

SEQ ID NO: 5060548 - DNA, 25 bp, Homo sapien
aaagccccgcagtatccagagctct

SEQ ID NO: 5060549 - DNA, 25 bp, Homo sapien
atccagagctctccgaacacagcgg

SEQ ID NO: 5060550 - DNA, 25 bp, Homo sapien
tcctccgcggaaaagccccgcagta

SEQ ID NO: 5060551 - DNA, 25 bp, Homo sapien
gaacacagcggcgaagcagcctttc

SEQ ID NO: 5060552 - DNA, 25 bp, Homo sapien
cccacgctcccgctgtccgagtcgc

SEQ ID NO: 5060553 - DNA, 25 bp, Homo sapien
ccacacccccagctcgggagggaga

SEQ ID NO: 5060554 - DNA, 25 bp, Homo sapien
acgctcccgctgtccgagtcgcccc

SEQ ID NO: 5060555 - DNA, 25 bp, Homo sapien
cccagctcgggagggagactccatc

SEQ ID NO: 5060556 - DNA, 25 bp, Homo sapien
aggcagcaatgaccgccccactgtg

SEQ ID NO: 5060557 - DNA, 25 bp, Homo sapien
tgatgcagccaaaagcgggcctggt

SEQ ID NO: 5060558 - DNA, 25 bp, Homo sapien
tggcgccggcaatccccggctgatg

SEQ ID NO: 5060559 - DNA, 25 bp, Homo sapien
tgagagccacttccgggccgctcta

SEQ ID NO: 5060560 - DNA, 25 bp, Homo sapien
ggaaaccgcgagaccttgaggatca

SEQ ID NO: 5060561 - DNA, 25 bp, Homo sapien
gactcggttccgctttgggctgctc

SEQ ID NO: 5060562 - DNA, 25 bp, Homo sapien
gcctccagggttttgagagctgccc

SEQ ID NO: 5060563 - DNA, 25 bp, Homo sapien
gagctcggtccgaaacaatggccga

SEQ ID NO: 5060564 - DNA, 25 bp, Homo sapien
tggtggccgatgttagactcctgca

SEQ ID NO: 5060565 - DNA, 25 bp, Homo sapien
tgtggctgcccgagatactactttg

SEQ ID NO: 5060566 - DNA, 25 bp, Homo sapien
tgcttactgcggagcaatccctcag

SEQ ID NO: 5060567 - DNA, 25 bp, Homo sapien
cataccaaggtcttcacacaaggcc

SEQ ID NO: 5060568 - DNA, 25 bp, Homo sapien
tggacaccagtcctcactgtcagcc

SEQ ID NO: 5060569 - DNA, 25 bp, Homo sapien
agtggacaccagtcctcactgtcag

SEQ ID NO: 5060570 - DNA, 25 bp, Homo sapien
cagtggacaccagtcctcactgtca

SEQ ID NO: 5060571 - DNA, 25 bp, Homo sapien
acaccagtcctcactgtcagccact

SEQ ID NO: 5060572 - DNA, 25 bp, Homo sapien
tgccacctctggatgtccaaattgt

SEQ ID NO: 5060573 - DNA, 25 bp, Homo sapien
acctctggatgtccaaattgtccat

SEQ ID NO: 5060574 - DNA, 25 bp, Homo sapien
cacctctggatgtccaaattgtcca

SEQ ID NO: 5060575 - DNA, 25 bp, Homo sapien
gccacctctggatgtccaaattgtc

SEQ ID NO: 5060576 - DNA, 25 bp, Homo sapien
tgggattgatacttgctggagctgc

SEQ ID NO: 5060577 - DNA, 25 bp, Homo sapien
ggagacctctcacctggtactggaa

SEQ ID NO: 5060578 - DNA, 25 bp, Homo sapien
caaagtggtgagcattctgacggcg

SEQ ID NO: 5060579 - DNA, 25 bp, Homo sapien
ttctgacggcgtcccctgagagggt

SEQ ID NO: 5060580 - DNA, 25 bp, Homo sapien
aaaacgcctgttgccaagtagaccg

SEQ ID NO: 5060581 - DNA, 25 bp, Homo sapien
aacgcctgttgccaagtagaccgtg

SEQ ID NO: 5060582 - DNA, 25 bp, Homo sapien
ctgggaaaacgcctgttgccaagta

SEQ ID NO: 5060583 - DNA, 25 bp, Homo sapien
ggaaaacgcctgttgccaagtagac

SEQ ID NO: 5060584 - DNA, 25 bp, Homo sapien
cattggctccttgactggtaaaggc

SEQ ID NO: 5060585 - DNA, 25 bp, Homo sapien
ccacattggctccttgactggtaaa

SEQ ID NO: 5060586 - DNA, 25 bp, Homo sapien
ccttgactggtaaaggctattatgg

SEQ ID NO: 5060587 - DNA, 25 bp, Homo sapien
taaaggctattatggttggaaacgc

SEQ ID NO: 5060588 - DNA, 25 bp, Homo sapien
tactcttaaagccatccctgtggtg

SEQ ID NO: 5060589 - DNA, 25 bp, Homo sapien
tcttttccagaggacattgggtgaa

SEQ ID NO: 5060590 - DNA, 25 bp, Homo sapien
aactggtctcggcaagtgacgtcca

SEQ ID NO: 5060591 - DNA, 25 bp, Homo sapien
actggagcaacggagaatgtggaac

SEQ ID NO: 5060592 - DNA, 25 bp, Homo sapien
aatgctaatcccgactgcctggcag

SEQ ID NO: 5060593 - DNA, 25 bp, Homo sapien
gcagctctgcgacctatcagaggga

SEQ ID NO: 5060594 - DNA, 25 bp, Homo sapien
taaaaaggtaactgcagattcgact

SEQ ID NO: 5060595 - DNA, 25 bp, Homo sapien
cataaggctactctgctagcacagg

SEQ ID NO: 5060596 - DNA, 25 bp, Homo sapien
cggacatgggatagccacagcagaa

SEQ ID NO: 5060597 - DNA, 25 bp, Homo sapien
tgtctcctcacaccggacatgggat

SEQ ID NO: 5060598 - DNA, 25 bp, Homo sapien
tccggacacaaagggatgagtcata

SEQ ID NO: 5060599 - DNA, 25 bp, Homo sapien
cacaaagggatgagtcataccactg

SEQ ID NO: 5060600 - DNA, 25 bp, Homo sapien
tccaggctagatagtatgatcacag

SEQ ID NO: 5060601 - DNA, 25 bp, Homo sapien
tatatcccaaaaaggtagatagccc

SEQ ID NO: 5060602 - DNA, 25 bp, Homo sapien
gatagcccacatgttccagtaggtc

SEQ ID NO: 5060603 - DNA, 25 bp, Homo sapien
agaaaatgtagcctgggaatcctcc

SEQ ID NO: 5060604 - DNA, 25 bp, Homo sapien
attctcaccagtggatcaatggcag

SEQ ID NO: 5060605 - DNA, 25 bp, Homo sapien
ttctcaccagtggatcaatggcagc

SEQ ID NO: 5060606 - DNA, 25 bp, Homo sapien
cattctcaccagtggatcaatggca

SEQ ID NO: 5060607 - DNA, 25 bp, Homo sapien
gcattctcaccagtggatcaatggc

SEQ ID NO: 5060608 - DNA, 25 bp, Homo sapien
ggaatccagaataacttgtactgtg

SEQ ID NO: 5060609 - DNA, 25 bp, Homo sapien
cctaggttattggaatccagaataa

SEQ ID NO: 5060610 - DNA, 25 bp, Homo sapien
caggcagaatgatattaagctcatt

SEQ ID NO: 5060611 - DNA, 25 bp, Homo sapien
gaacaggcagaatgatattaagctc

SEQ ID NO: 5060612 - DNA, 25 bp, Homo sapien
ctttggactgttacctcagtgatct

SEQ ID NO: 5060613 - DNA, 25 bp, Homo sapien
gaagtaacacctcagtaatctcagt

SEQ ID NO: 5060614 - DNA, 25 bp, Homo sapien
gttcctctttggactgttacctcag

SEQ ID NO: 5060615 - DNA, 25 bp, Homo sapien
tcttggctctgaagtaacacctcag

SEQ ID NO: 5060616 - DNA, 25 bp, Homo sapien
caagagcaagactttgtctcaaaaa

SEQ ID NO: 5060617 - DNA, 25 bp, Homo sapien
aaagtatgcttaaaacagaacaaat

SEQ ID NO: 5060618 - DNA, 25 bp, Homo sapien
gagcaagactttgtctcaaaaaaaa

SEQ ID NO: 5060619 - DNA, 25 bp, Homo sapien
aaacagaacaaataattctgaatac

SEQ ID NO: 5060620 - DNA, 25 bp, Homo sapien
ggaaataccataagatgtaaagagg

SEQ ID NO: 5060621 - DNA, 25 bp, Homo sapien
ccataagatgtaaagaggtacccac

SEQ ID NO: 5060622 - DNA, 25 bp, Homo sapien
tttgggggaaataccataagatgta

SEQ ID NO: 5060623 - DNA, 25 bp, Homo sapien
tcagcattgttttgggggaaatacc

SEQ ID NO: 5060624 - DNA, 25 bp, Homo sapien
attgagacatctcacggtttctggg

SEQ ID NO: 5060625 - DNA, 25 bp, Homo sapien
ccctcctttgcctgcatgggaattg

SEQ ID NO: 5060626 - DNA, 25 bp, Homo sapien
tgtaacagctatgaggtctgctgag

SEQ ID NO: 5060627 - DNA, 25 bp, Homo sapien
ggtgtaacagctatgaggtctgctg

SEQ ID NO: 5060628 - DNA, 25 bp, Homo sapien
gtcataagggcaagttttgaggaaa

SEQ ID NO: 5060629 - DNA, 25 bp, Homo sapien
cacacttaggatggaaatccacaca

SEQ ID NO: 5060630 - DNA, 25 bp, Homo sapien
taggatttccaaccattttacatga

SEQ ID NO: 5060631 - DNA, 25 bp, Homo sapien
gtccgactttcaaattttaagtgca

SEQ ID NO: 5060632 - DNA, 25 bp, Homo sapien
tgtttcatacaaaacaggactccac

SEQ ID NO: 5060633 - DNA, 25 bp, Homo sapien
gtgacactgaatcgccaaagaaaag

SEQ ID NO: 5060634 - DNA, 25 bp, Homo sapien
tctcttgggctgaaggctgcttgtg

SEQ ID NO: 5060635 - DNA, 25 bp, Homo sapien
tttccacaggaacagcacgctaagt

SEQ ID NO: 5060636 - DNA, 25 bp, Homo sapien
gaaaagcttcctatagagttaacag

SEQ ID NO: 5060637 - DNA, 25 bp, Homo sapien
ctggtgctggattaggtggccatgc

SEQ ID NO: 5060638 - DNA, 25 bp, Homo sapien
taggtggccatgctggttgaaggca

SEQ ID NO: 5060639 - DNA, 25 bp, Homo sapien
tgctggattaggtggccatgctggt

SEQ ID NO: 5060640 - DNA, 25 bp, Homo sapien
atgctggttgaaggcacgcccacac

SEQ ID NO: 5060641 - DNA, 25 bp, Homo sapien
tcaggtgcacaatcagagttgcttt

SEQ ID NO: 5060642 - DNA, 25 bp, Homo sapien
tgtgagtgctgaacgaaggccttcc

SEQ ID NO: 5060643 - DNA, 25 bp, Homo sapien
atgctggatcagagaccggcgtgca

SEQ ID NO: 5060644 - DNA, 25 bp, Homo sapien
gaggactgagcggtcgctgaaggcc

SEQ ID NO: 5060645 - DNA, 25 bp, Homo sapien
tggatccgctcgtgattcatcagtg

SEQ ID NO: 5060646 - DNA, 25 bp, Homo sapien
tggctccgcagaacagtgctatggt

SEQ ID NO: 5060647 - DNA, 25 bp, Homo sapien
cctctggtggctccgcagaacagtg

SEQ ID NO: 5060648 - DNA, 25 bp, Homo sapien
aacagtgctatggttgaaggctttc

SEQ ID NO: 5060649 - DNA, 25 bp, Homo sapien
acaacggacacacatatggcctttc

SEQ ID NO: 5060650 - DNA, 25 bp, Homo sapien
tgaaggaggtgggaactccggccaa

SEQ ID NO: 5060651 - DNA, 25 bp, Homo sapien
ctgaaggaggtgggaactccggcca

SEQ ID NO: 5060652 - DNA, 25 bp, Homo sapien
gaggtgggaactccggccaaagcac

SEQ ID NO: 5060653 - DNA, 25 bp, Homo sapien
ggaactccggccaaagcacttccca

SEQ ID NO: 5060654 - DNA, 25 bp, Homo sapien
tagggcctctctccactaggcactg

SEQ ID NO: 5060655 - DNA, 25 bp, Homo sapien
agggcctctctccactaggcactgc

SEQ ID NO: 5060656 - DNA, 25 bp, Homo sapien
gtagggcctctctccactaggcact

SEQ ID NO: 5060657 - DNA, 25 bp, Homo sapien
tcttgatcaatcctccccaagggtg

SEQ ID NO: 5060658 - DNA, 25 bp, Homo sapien
gaaattaatggcttcggactcaagt

SEQ ID NO: 5060659 - DNA, 25 bp, Homo sapien
ttggactcagacagaagctttgctt

SEQ ID NO: 5060660 - DNA, 25 bp, Homo sapien
tgaacttcacggtggtcaacagagt

SEQ ID NO: 5060661 - DNA, 25 bp, Homo sapien
ctgtattttgactctctcccttggt

SEQ ID NO: 5060662 - DNA, 25 bp, Homo sapien
tgactctctcccttggtttcacatt

SEQ ID NO: 5060663 - DNA, 25 bp, Homo sapien
tttgactctctcccttggtttcaca

SEQ ID NO: 5060664 - DNA, 25 bp, Homo sapien
tattttgactctctcccttggtttc

SEQ ID NO: 5060665 - DNA, 25 bp, Homo sapien
caaaatccctcaatgcacacgttgg

SEQ ID NO: 5060666 - DNA, 25 bp, Homo sapien
tgcaaaatccctcaatgcacacgtt

SEQ ID NO: 5060667 - DNA, 25 bp, Homo sapien
gcaaaatccctcaatgcacacgttg

SEQ ID NO: 5060668 - DNA, 25 bp, Homo sapien
aaaatccctcaatgcacacgttggt

SEQ ID NO: 5060669 - DNA, 25 bp, Homo sapien
tcactgtcttcagtttaatacaatt

SEQ ID NO: 5060670 - DNA, 25 bp, Homo sapien
aaaatttaaattcactgtcttcagt

SEQ ID NO: 5060671 - DNA, 25 bp, Homo sapien
ctgtcttcagtttaatacaattttt

SEQ ID NO: 5060672 - DNA, 25 bp, Homo sapien
aaaaatttaaattcactgtcttcag

SEQ ID NO: 5060673 - DNA, 25 bp, Homo sapien
ctattgtctgaagtttcacccggtg

SEQ ID NO: 5060674 - DNA, 25 bp, Homo sapien
aaagtattacttctattgtctgaag

SEQ ID NO: 5060675 - DNA, 25 bp, Homo sapien
tctgaagtttcacccggtgtggtgg

SEQ ID NO: 5060676 - DNA, 25 bp, Homo sapien
cactgaaaagtattacttctattgt

SEQ ID NO: 5060677 - DNA, 25 bp, Homo sapien
taaaaacccagtaatctctctaggc

SEQ ID NO: 5060678 - DNA, 25 bp, Homo sapien
gcccctccctggtgttttgtagcaa

SEQ ID NO: 5060679 - DNA, 25 bp, Homo sapien
taggcctactatggctcacaagaaa

SEQ ID NO: 5060680 - DNA, 25 bp, Homo sapien
taacacgcttcatagcaccgagtcg

SEQ ID NO: 5060681 - DNA, 25 bp, Homo sapien
aactgtcttgttgtgtacaggctgt

SEQ ID NO: 5060682 - DNA, 25 bp, Homo sapien
ctgtcttgttgtgtacaggctgtag

SEQ ID NO: 5060683 - DNA, 25 bp, Homo sapien
aggctgtagtgtggtcatatttgag

SEQ ID NO: 5060684 - DNA, 25 bp, Homo sapien
tgtagtgtggtcatatttgaggttg

SEQ ID NO: 5060685 - DNA, 25 bp, Homo sapien
cttcaagagtggaaaatcctggccg

SEQ ID NO: 5060686 - DNA, 25 bp, Homo sapien
aatactcccttcaagagtggaaaat

SEQ ID NO: 5060687 - DNA, 25 bp, Homo sapien
aaaacagcgagttgaagtgacaaca

SEQ ID NO: 5060688 - DNA, 25 bp, Homo sapien
tgaaccccggagacaagaagttgca

SEQ ID NO: 5060689 - DNA, 25 bp, Homo sapien
ttaagctctccatcaggcgagtaca

SEQ ID NO: 5060690 - DNA, 25 bp, Homo sapien
tcaaagggcgctcaaaggcagttta

SEQ ID NO: 5060691 - DNA, 25 bp, Homo sapien
tcaaaggcagtttaagctctccatc

SEQ ID NO: 5060692 - DNA, 25 bp, Homo sapien
agctctccatcaggcgagtacatag

SEQ ID NO: 5060693 - DNA, 25 bp, Homo sapien
tatagactcctttgccagataaggc

SEQ ID NO: 5060694 - DNA, 25 bp, Homo sapien
ccagtgagcggcacagtatgaacta

SEQ ID NO: 5060695 - DNA, 25 bp, Homo sapien
tatgaactaggtccacagctttgct

SEQ ID NO: 5060696 - DNA, 25 bp, Homo sapien
caggacctgtttagccctcagtgag

SEQ ID NO: 5060697 - DNA, 25 bp, Homo sapien
ctgggagattatgtcaggcttggat

SEQ ID NO: 5060698 - DNA, 25 bp, Homo sapien
tgggagattatgtcaggcttggatc

SEQ ID NO: 5060699 - DNA, 25 bp, Homo sapien
agctgggagattatgtcaggcttgg

SEQ ID NO: 5060700 - DNA, 25 bp, Homo sapien
tccagctgggagattatgtcaggct

SEQ ID NO: 5060701 - DNA, 25 bp, Homo sapien
actacattcccataggtttccatca

SEQ ID NO: 5060702 - DNA, 25 bp, Homo sapien
tgagactacattcccataggtttcc

SEQ ID NO: 5060703 - DNA, 25 bp, Homo sapien
gactacattcccataggtttccatc

SEQ ID NO: 5060704 - DNA, 25 bp, Homo sapien
agactacattcccataggtttccat

SEQ ID NO: 5060705 - DNA, 25 bp, Homo sapien
tgtagagacccctctgagcagggca

SEQ ID NO: 5060706 - DNA, 25 bp, Homo sapien
cacatttctgtagagacccctctga

SEQ ID NO: 5060707 - DNA, 25 bp, Homo sapien
gagcagggcacaggcggtcccattc

SEQ ID NO: 5060708 - DNA, 25 bp, Homo sapien
tgagcagggcacaggcggtcccatt

SEQ ID NO: 5060709 - DNA, 25 bp, Homo sapien
tgggagaggagcacagccacatcct

SEQ ID NO: 5060710 - DNA, 25 bp, Homo sapien
gccacatcctcgaaggtcagcttgg

SEQ ID NO: 5060711 - DNA, 25 bp, Homo sapien
atcctgggagaggagcacagccaca

SEQ ID NO: 5060712 - DNA, 25 bp, Homo sapien
ccacatcctcgaaggtcagcttggc

SEQ ID NO: 5060713 - DNA, 25 bp, Homo sapien
ctgcaggtaaaaccaaatcctgatg

SEQ ID NO: 5060714 - DNA, 25 bp, Homo sapien
tgcaggtaaaaccaaatcctgatgt

SEQ ID NO: 5060715 - DNA, 25 bp, Homo sapien
tgatggggagtgggtgcatgtgaca

SEQ ID NO: 5060716 - DNA, 25 bp, Homo sapien
tgtgacatgtgacatgagcagttgg

SEQ ID NO: 5060717 - DNA, 25 bp, Homo sapien
acatgagcagttggcagtggggggc

SEQ ID NO: 5060718 - DNA, 25 bp, Homo sapien
tggggagtgggtgcatgtgacatgt

SEQ ID NO: 5060719 - DNA, 25 bp, Homo sapien
gcatgtggtgacgctctggctgctc

SEQ ID NO: 5060720 - DNA, 25 bp, Homo sapien
ctacggggcacggaaggaaccacag

SEQ ID NO: 5060721 - DNA, 25 bp, Homo sapien
gggcactgcataagcactggggaca

SEQ ID NO: 5060722 - DNA, 25 bp, Homo sapien
tgctcttaggagctctacggggcac

SEQ ID NO: 5060723 - DNA, 25 bp, Homo sapien
tcctgccggcactggcaggagtctg

SEQ ID NO: 5060724 - DNA, 25 bp, Homo sapien
gggtcctgccggcactggcaggagt

SEQ ID NO: 5060725 - DNA, 25 bp, Homo sapien
tgccggcactggcaggagtctggct

SEQ ID NO: 5060726 - DNA, 25 bp, Homo sapien
ctggggtcctgccggcactggcagg

SEQ ID NO: 5060727 - DNA, 25 bp, Homo sapien
cctggggactccgaggatcacggaa

SEQ ID NO: 5060728 - DNA, 25 bp, Homo sapien
gggactccgaggatcacggaaattg

SEQ ID NO: 5060729 - DNA, 25 bp, Homo sapien
ctccgaggatcacggaaattgaagg

SEQ ID NO: 5060730 - DNA, 25 bp, Homo sapien
cgaggatcacggaaattgaaggagc

SEQ ID NO: 5060731 - DNA, 25 bp, Homo sapien
tttccgagaagctgctgctaggcat

SEQ ID NO: 5060732 - DNA, 25 bp, Homo sapien
gcttttccgagaagctgctgctagg

SEQ ID NO: 5060733 - DNA, 25 bp, Homo sapien
ctggccagcttttccgagaagctgc

SEQ ID NO: 5060734 - DNA, 25 bp, Homo sapien
gatgatgctggccagcttttccgag

SEQ ID NO: 5060735 - DNA, 25 bp, Homo sapien
cttccaagcacatccagaacctgac

SEQ ID NO: 5060736 - DNA, 25 bp, Homo sapien
tccaagcacatccagaacctgacca

SEQ ID NO: 5060737 - DNA, 25 bp, Homo sapien
ttccaagcacatccagaacctgacc

SEQ ID NO: 5060738 - DNA, 25 bp, Homo sapien
ccaagcacatccagaacctgaccat

SEQ ID NO: 5060739 - DNA, 25 bp, Homo sapien
acactttaaactggcaggcatggga

SEQ ID NO: 5060740 - DNA, 25 bp, Homo sapien
gagctcacactttatgccatctgta

SEQ ID NO: 5060741 - DNA, 25 bp, Homo sapien
tctgtaatagccaagtacggagtca

SEQ ID NO: 5060742 - DNA, 25 bp, Homo sapien
catactcttaagaaggcgacctagc

SEQ ID NO: 5060743 - DNA, 25 bp, Homo sapien
cagataaaggtttcagtttcctgga

SEQ ID NO: 5060744 - DNA, 25 bp, Homo sapien
tatggcagataaaggtttcagtttc

SEQ ID NO: 5060745 - DNA, 25 bp, Homo sapien
tggcagataaaggtttcagtttcct

SEQ ID NO: 5060746 - DNA, 25 bp, Homo sapien
actatggcagataaaggtttcagtt

SEQ ID NO: 5060747 - DNA, 25 bp, Homo sapien
caggcacatttggagtctcctgatc

SEQ ID NO: 5060748 - DNA, 25 bp, Homo sapien
tttctgctaacaagcactgctccct

SEQ ID NO: 5060749 - DNA, 25 bp, Homo sapien
catcctcactccctggactttctgc

SEQ ID NO: 5060750 - DNA, 25 bp, Homo sapien
tgggacaggcacatttggagtctcc

SEQ ID NO: 5060751 - DNA, 25 bp, Homo sapien
ttattatttcatgtgggaagggctg

SEQ ID NO: 5060752 - DNA, 25 bp, Homo sapien
cacagatctgcagcttataaatcaa

SEQ ID NO: 5060753 - DNA, 25 bp, Homo sapien
tgttctaagcaaaataccaaaagca

SEQ ID NO: 5060754 - DNA, 25 bp, Homo sapien
cattgtatgctatccttgtatcaaa

SEQ ID NO: 5060755 - DNA, 25 bp, Homo sapien
gaagcatgttttcaacatacatgga

SEQ ID NO: 5060756 - DNA, 25 bp, Homo sapien
aaaatatgagctggcaaatcacaaa

SEQ ID NO: 5060757 - DNA, 25 bp, Homo sapien
gaaatacaaatggcgaaaacacaaa

SEQ ID NO: 5060758 - DNA, 25 bp, Homo sapien
gcacaaagcccaaaatgccttaagg

SEQ ID NO: 5060759 - DNA, 25 bp, Homo sapien
caataaacgcaaaacgtcgacctgg

SEQ ID NO: 5060760 - DNA, 25 bp, Homo sapien
tccagggcgggaatgtcaatggcaa

SEQ ID NO: 5060761 - DNA, 25 bp, Homo sapien
ggaatgcagtgacctgtcaaagccc

SEQ ID NO: 5060762 - DNA, 25 bp, Homo sapien
cgcaaaacgtcgacctggcaggaat

SEQ ID NO: 5060763 - DNA, 25 bp, Homo sapien
tcgtagagaccaccggacagagaaa

SEQ ID NO: 5060764 - DNA, 25 bp, Homo sapien
ttcgtagagaccaccggacagagaa

SEQ ID NO: 5060765 - DNA, 25 bp, Homo sapien
acttcgtagagaccaccggacagag

SEQ ID NO: 5060766 - DNA, 25 bp, Homo sapien
ccacttcgtagagaccaccggacag

SEQ ID NO: 5060767 - DNA, 25 bp, Homo sapien
acccggcggaggacgagtggagcgc

SEQ ID NO: 5060768 - DNA, 25 bp, Homo sapien
caagttacgaactgaaaaatctgcg

SEQ ID NO: 5060769 - DNA, 25 bp, Homo sapien
aatctgcgagtacccacccggcgga

SEQ ID NO: 5060770 - DNA, 25 bp, Homo sapien
cctgccgcccctggtgttagtcaaa

SEQ ID NO: 5060771 - DNA, 25 bp, Homo sapien
cagagtgtcgggggggatgactttt

SEQ ID NO: 5060772 - DNA, 25 bp, Homo sapien
ggcagagtgtcgggggggatgactt

SEQ ID NO: 5060773 - DNA, 25 bp, Homo sapien
tgcctcttcatacactggcagagtg

SEQ ID NO: 5060774 - DNA, 25 bp, Homo sapien
ctaacggcattcaaaaattctgaaa

SEQ ID NO: 5060775 - DNA, 25 bp, Homo sapien
cagaaaagacagcatcgacagcaaa

SEQ ID NO: 5060776 - DNA, 25 bp, Homo sapien
gaggataagacacccggcaagtagc

SEQ ID NO: 5060777 - DNA, 25 bp, Homo sapien
cactcgaccaactgctgaaacgaaa

SEQ ID NO: 5060778 - DNA, 25 bp, Homo sapien
ttcattaaaatagggctctaacaca

SEQ ID NO: 5060779 - DNA, 25 bp, Homo sapien
cacagccgagttcgccaatcctgga

SEQ ID NO: 5060780 - DNA, 25 bp, Homo sapien
agttcgccaatcctggagggcaagc

SEQ ID NO: 5060781 - DNA, 25 bp, Homo sapien
cgcgaaggaacggcatcccgcagca

SEQ ID NO: 5060782 - DNA, 25 bp, Homo sapien
ccgcagcaccttcagacaaagggct

SEQ ID NO: 5060783 - DNA, 25 bp, Homo sapien
tgaggttattcctcccacttaggag

SEQ ID NO: 5060784 - DNA, 25 bp, Homo sapien
cagtgcgaatgtcgccttctcaggg

SEQ ID NO: 5060785 - DNA, 25 bp, Homo sapien
ctcgacttgcgctggcttcggccgt

SEQ ID NO: 5060786 - DNA, 25 bp, Homo sapien
ggccgtcctggaactcgagctcgtt

SEQ ID NO: 5060787 - DNA, 25 bp, Homo sapien
ccgaaggtcaggtccgcgtcgtcca

SEQ ID NO: 5060788 - DNA, 25 bp, Homo sapien
tcccgaaggtcaggtccgcgtcgtc

SEQ ID NO: 5060789 - DNA, 25 bp, Homo sapien
cgaaggtcaggtccgcgtcgtccat

SEQ ID NO: 5060790 - DNA, 25 bp, Homo sapien
tgtccctagacgtgtgaggacaagt

SEQ ID NO: 5060791 - DNA, 25 bp, Homo sapien
ttctgtccctagacgtgtgaggaca

SEQ ID NO: 5060792 - DNA, 25 bp, Homo sapien
ggttctgtccctagacgtgtgagga

SEQ ID NO: 5060793 - DNA, 25 bp, Homo sapien
ttggttctgtccctagacgtgtgag

SEQ ID NO: 5060794 - DNA, 25 bp, Homo sapien
tcccttgtaacaaacgtgcagtccg

SEQ ID NO: 5060795 - DNA, 25 bp, Homo sapien
tgagctgagtccaggctttcggtct

SEQ ID NO: 5060796 - DNA, 25 bp, Homo sapien
cccaagacatcacaagaggcaagag

SEQ ID NO: 5060797 - DNA, 25 bp, Homo sapien
gctatgtggccactggatgtaggca

SEQ ID NO: 5060798 - DNA, 25 bp, Homo sapien
gggcttcagcccattatgaatcctc

SEQ ID NO: 5060799 - DNA, 25 bp, Homo sapien
aggaccgaacgctgactgaaggctt

SEQ ID NO: 5060800 - DNA, 25 bp, Homo sapien
caactttgatcgctggctgaaggct

SEQ ID NO: 5060801 - DNA, 25 bp, Homo sapien
ggtgctggatgaggaccgaacgctg

SEQ ID NO: 5060802 - DNA, 25 bp, Homo sapien
actcgctggtgaaggatgaggttgg

SEQ ID NO: 5060803 - DNA, 25 bp, Homo sapien
gtggactcgctggtgaaggatgagg

SEQ ID NO: 5060804 - DNA, 25 bp, Homo sapien
agtgtggactcgctggtgaaggatg

SEQ ID NO: 5060805 - DNA, 25 bp, Homo sapien
ggactcgctggtgaaggatgaggtt

SEQ ID NO: 5060806 - DNA, 25 bp, Homo sapien
gtggcaggcgtagggcttgtcgcct

SEQ ID NO: 5060807 - DNA, 25 bp, Homo sapien
ggtcttcccacactcgtggcaggcg

SEQ ID NO: 5060808 - DNA, 25 bp, Homo sapien
aaaggtcttcccacactcgtggcag

SEQ ID NO: 5060809 - DNA, 25 bp, Homo sapien
accaaaggtcttcccacactcgtgg

SEQ ID NO: 5060810 - DNA, 25 bp, Homo sapien
ggtgctgaatgagggctgagctgtg

SEQ ID NO: 5060811 - DNA, 25 bp, Homo sapien
tcccacagacactgcatctgtacgg

SEQ ID NO: 5060812 - DNA, 25 bp, Homo sapien
agacactgcatctgtacggcttctc

SEQ ID NO: 5060813 - DNA, 25 bp, Homo sapien
cacagacactgcatctgtacggctt

SEQ ID NO: 5060814 - DNA, 25 bp, Homo sapien
gctttcggagcactgagctataact

SEQ ID NO: 5060815 - DNA, 25 bp, Homo sapien
catacattacacacgtgaggctttt

SEQ ID NO: 5060816 - DNA, 25 bp, Homo sapien
taatgaggttggagacccgactgaa

SEQ ID NO: 5060817 - DNA, 25 bp, Homo sapien
gaggtttgagcttcgcctgaaggcc

SEQ ID NO: 5060818 - DNA, 25 bp, Homo sapien
gaggtttgagctccgcctaaaagcc

SEQ ID NO: 5060819 - DNA, 25 bp, Homo sapien
tgagtgccctcggaaggctttccca

SEQ ID NO: 5060820 - DNA, 25 bp, Homo sapien
cattcgctgcactggtaagctttct

SEQ ID NO: 5060821 - DNA, 25 bp, Homo sapien
gatgcctagaaaagtctgagtgccc

SEQ ID NO: 5060822 - DNA, 25 bp, Homo sapien
tccccagtgtggactatttgacgct

SEQ ID NO: 5060823 - DNA, 25 bp, Homo sapien
gcctccccagtgtggactatttgac

SEQ ID NO: 5060824 - DNA, 25 bp, Homo sapien
tatttgacgctgaataaggtcagga

SEQ ID NO: 5060825 - DNA, 25 bp, Homo sapien
tgtggactatttgacgctgaataag

SEQ ID NO: 5060826 - DNA, 25 bp, Homo sapien
caagctcgggtacctgggaaacatc

SEQ ID NO: 5060827 - DNA, 25 bp, Homo sapien
tcatcacacagatctccaagctcgg

SEQ ID NO: 5060828 - DNA, 25 bp, Homo sapien
ccatgtcatatggatgtggcctctc

SEQ ID NO: 5060829 - DNA, 25 bp, Homo sapien
ggctcagactgaagcgactgtcaaa

SEQ ID NO: 5060830 - DNA, 25 bp, Homo sapien
tgtttgcggatgacttctggcctcg

SEQ ID NO: 5060831 - DNA, 25 bp, Homo sapien
gcggatgacttctggcctcgtaaca

SEQ ID NO: 5060832 - DNA, 25 bp, Homo sapien
tctgactggtgtttgcggatgactt

SEQ ID NO: 5060833 - DNA, 25 bp, Homo sapien
tctggcctcgtaacaatgtgcgtca

SEQ ID NO: 5060834 - DNA, 25 bp, Homo sapien
tgaaccacccttatatcctgggtta

SEQ ID NO: 5060835 - DNA, 25 bp, Homo sapien
cacttggtcatatgctattggattc

SEQ ID NO: 5060836 - DNA, 25 bp, Homo sapien
tcctcctttgcaagagtttgcgaag

SEQ ID NO: 5060837 - DNA, 25 bp, Homo sapien
tggaatcagtgtaaagttgaccttg

SEQ ID NO: 5060838 - DNA, 25 bp, Homo sapien
tgtaacgctgttcaaatcccctagt

SEQ ID NO: 5060839 - DNA, 25 bp, Homo sapien
gccttttgactggagacttcacatg

SEQ ID NO: 5060840 - DNA, 25 bp, Homo sapien
gatggtcgtccattaggtctagttg

SEQ ID NO: 5060841 - DNA, 25 bp, Homo sapien
taaggagataatcccattcacaggg

SEQ ID NO: 5060842 - DNA, 25 bp, Homo sapien
tgtcatacctcttcgtgtcaagtgg

SEQ ID NO: 5060843 - DNA, 25 bp, Homo sapien
tagatggccaactgtatgggtaacc

SEQ ID NO: 5060844 - DNA, 25 bp, Homo sapien
attacaggcgagagtgatcacaccc

SEQ ID NO: 5060845 - DNA, 25 bp, Homo sapien
tcacagttctgctcaaggtgccagg

SEQ ID NO: 5060846 - DNA, 25 bp, Homo sapien
ataagggcaccagcggagaactgtt

SEQ ID NO: 5060847 - DNA, 25 bp, Homo sapien
ccagcggagaactgttcttaaagta

SEQ ID NO: 5060848 - DNA, 25 bp, Homo sapien
ccagaataagggcaccagcggagaa

SEQ ID NO: 5060849 - DNA, 25 bp, Homo sapien
caccagcggagaactgttcttaaag

SEQ ID NO: 5060850 - DNA, 25 bp, Homo sapien
agtatcactacagcagggggtacca

SEQ ID NO: 5060851 - DNA, 25 bp, Homo sapien
ccagctcagtatcactacagcaggg

SEQ ID NO: 5060852 - DNA, 25 bp, Homo sapien
cttccagctcagtatcactacagca

SEQ ID NO: 5060853 - DNA, 25 bp, Homo sapien
tatcactacagcagggggtaccaca

SEQ ID NO: 5060854 - DNA, 25 bp, Homo sapien
ctcctcacggcgagttctgaggctg

SEQ ID NO: 5060855 - DNA, 25 bp, Homo sapien
tactgtgggcctgtaccctactgtg

SEQ ID NO: 5060856 - DNA, 25 bp, Homo sapien
cctgtgtcctactgtgggcctgtac

SEQ ID NO: 5060857 - DNA, 25 bp, Homo sapien
tactgtgggccataccctgctgtgg

SEQ ID NO: 5060858 - DNA, 25 bp, Homo sapien
tgggcctgtaccctactgtgggcca

SEQ ID NO: 5060859 - DNA, 25 bp, Homo sapien
attcacaatgctctgaagctgggca

SEQ ID NO: 5060860 - DNA, 25 bp, Homo sapien
cctgctgtgaccactcttctcactc

SEQ ID NO: 5060861 - DNA, 25 bp, Homo sapien
tgaccactcttctcactccttgttg

SEQ ID NO: 5060862 - DNA, 25 bp, Homo sapien
ctgaagctgggcaggccagacccac

SEQ ID NO: 5060863 - DNA, 25 bp, Homo sapien
ggtgcccactgggagcactgacata

SEQ ID NO: 5060864 - DNA, 25 bp, Homo sapien
ccgggtgcccactgggagcactgac

SEQ ID NO: 5060865 - DNA, 25 bp, Homo sapien
gtgcccactgggagcactgacatac

SEQ ID NO: 5060866 - DNA, 25 bp, Homo sapien
ctgcccgggtgcccactgggagcac

SEQ ID NO: 5060867 - DNA, 25 bp, Homo sapien
atgagcaccagctgagaatgagggt

SEQ ID NO: 5060868 - DNA, 25 bp, Homo sapien
catgagcaccagctgagaatgaggg

SEQ ID NO: 5060869 - DNA, 25 bp, Homo sapien
tgagcaccagctgagaatgagggtg

SEQ ID NO: 5060870 - DNA, 25 bp, Homo sapien
gactcttctgtccttcatgagcacc

SEQ ID NO: 5060871 - DNA, 25 bp, Homo sapien
ttctatctggggcagcgtagcctct

SEQ ID NO: 5060872 - DNA, 25 bp, Homo sapien
agcaccgtggcacgaagacgtctca

SEQ ID NO: 5060873 - DNA, 25 bp, Homo sapien
agacgtctcagccaacgccggctga

SEQ ID NO: 5060874 - DNA, 25 bp, Homo sapien
ctcaacgggtcgcgcttggaaagga

SEQ ID NO: 5060875 - DNA, 25 bp, Homo sapien
tctgctggtacaggcataaaactcc

SEQ ID NO: 5060876 - DNA, 25 bp, Homo sapien
ggtaacaagctctaagtccctggat

SEQ ID NO: 5060877 - DNA, 25 bp, Homo sapien
tatattgggccagctacaagactgc

SEQ ID NO: 5060878 - DNA, 25 bp, Homo sapien
caggagattaaggtttccagccacc

SEQ ID NO: 5060879 - DNA, 25 bp, Homo sapien
taactgtaccttagggtctggtgcc

SEQ ID NO: 5060880 - DNA, 25 bp, Homo sapien
cgattacacgtatgaggttgctccc

SEQ ID NO: 5060881 - DNA, 25 bp, Homo sapien
gatgactgtgcgctagagttcccca

SEQ ID NO: 5060882 - DNA, 25 bp, Homo sapien
taagtttcacatatctacagggctc

SEQ ID NO: 5060883 - DNA, 25 bp, Homo sapien
gaataaggtgtgacccctggctaaa

SEQ ID NO: 5060884 - DNA, 25 bp, Homo sapien
tagggtggatatctgcccaaaggtt

SEQ ID NO: 5060885 - DNA, 25 bp, Homo sapien
taagggataagcatgcactgaagga

SEQ ID NO: 5060886 - DNA, 25 bp, Homo sapien
tgaatgctgactgaacgccttgcca

SEQ ID NO: 5060887 - DNA, 25 bp, Homo sapien
ttcataggacttctcaccattgtgt

SEQ ID NO: 5060888 - DNA, 25 bp, Homo sapien
tgaataagatgtcccttttgactaa

SEQ ID NO: 5060889 - DNA, 25 bp, Homo sapien
ataagatgtcccttttgactaaagg

SEQ ID NO: 5060890 - DNA, 25 bp, Homo sapien
gatgctgaataagatgtcccttttg

SEQ ID NO: 5060891 - DNA, 25 bp, Homo sapien
tgctgaataagatgtcccttttgac

SEQ ID NO: 5060892 - DNA, 25 bp, Homo sapien
gctggataagggatagacgagcacc

SEQ ID NO: 5060893 - DNA, 25 bp, Homo sapien
ctgatgctggataagggatagacga

SEQ ID NO: 5060894 - DNA, 25 bp, Homo sapien
gatagacgagcaccaaatgattttc

SEQ ID NO: 5060895 - DNA, 25 bp, Homo sapien
tagacgagcaccaaatgattttcca

SEQ ID NO: 5060896 - DNA, 25 bp, Homo sapien
tcttatgttgaataacttgtgagca

SEQ ID NO: 5060897 - DNA, 25 bp, Homo sapien
cttatgttgaataacttgtgagcat

SEQ ID NO: 5060898 - DNA, 25 bp, Homo sapien
taaggtttgattgtctgttgaaggc

SEQ ID NO: 5060899 - DNA, 25 bp, Homo sapien
ggttcaggctaaaggattttgcaca

SEQ ID NO: 5060900 - DNA, 25 bp, Homo sapien
aataattgtgtactgaaggctttgc

SEQ ID NO: 5060901 - DNA, 25 bp, Homo sapien
ctgatggacagtaagagttcggttc

SEQ ID NO: 5060902 - DNA, 25 bp, Homo sapien
tttagatgttgaacataagatgaat

SEQ ID NO: 5060903 - DNA, 25 bp, Homo sapien
aatttttagatgttgaacataagat

SEQ ID NO: 5060904 - DNA, 25 bp, Homo sapien
ttagatgttgaacataagatgaatg

SEQ ID NO: 5060905 - DNA, 25 bp, Homo sapien
tttttagatgttgaacataagatga

SEQ ID NO: 5060906 - DNA, 25 bp, Homo sapien
ttttacaatgctgaataaagtatga

SEQ ID NO: 5060907 - DNA, 25 bp, Homo sapien
aatgctgaataaagtatgagtgaac

SEQ ID NO: 5060908 - DNA, 25 bp, Homo sapien
tacaatgctgaataaagtatgagtg

SEQ ID NO: 5060909 - DNA, 25 bp, Homo sapien
tctctagtgtgaattttacaatgct

SEQ ID NO: 5060910 - DNA, 25 bp, Homo sapien
gatttgccacaatcctcacatgtgt

SEQ ID NO: 5060911 - DNA, 25 bp, Homo sapien
gccacaatcctcacatgtgtagagt

SEQ ID NO: 5060912 - DNA, 25 bp, Homo sapien
gaaagatttgccacaatcctcacat

SEQ ID NO: 5060913 - DNA, 25 bp, Homo sapien
aagatttgccacaatcctcacatgt

SEQ ID NO: 5060914 - DNA, 25 bp, Homo sapien
actgaggatagagggccaactgaaa

SEQ ID NO: 5060915 - DNA, 25 bp, Homo sapien
tactgaggatagagggccaactgaa

SEQ ID NO: 5060916 - DNA, 25 bp, Homo sapien
ctctgttctgattgtaagtttttcc

SEQ ID NO: 5060917 - DNA, 25 bp, Homo sapien
tttttccacacccagtactctcaaa

SEQ ID NO: 5060918 - DNA, 25 bp, Homo sapien
tagaccctctaagatgtttggcagg

SEQ ID NO: 5060919 - DNA, 25 bp, Homo sapien
ctaagaactgagctctgtctgggca

SEQ ID NO: 5060920 - DNA, 25 bp, Homo sapien
ttgacacacttggatggagactctc

SEQ ID NO: 5060921 - DNA, 25 bp, Homo sapien
gcagttttctccaacagcattgaac

SEQ ID NO: 5060922 - DNA, 25 bp, Homo sapien
gaaatgtcctgctttggaatcattt

SEQ ID NO: 5060923 - DNA, 25 bp, Homo sapien
gagttcttaactccttctactgcat

SEQ ID NO: 5060924 - DNA, 25 bp, Homo sapien
tctttttcaatcctagaatcacagc

SEQ ID NO: 5060925 - DNA, 25 bp, Homo sapien
aaattgctcttctgggagaatgagt

SEQ ID NO: 5060926 - DNA, 25 bp, Homo sapien
ttatcagaatagtactgcaacccct

SEQ ID NO: 5060927 - DNA, 25 bp, Homo sapien
atcagaatagtactgcaacccctgc

SEQ ID NO: 5060928 - DNA, 25 bp, Homo sapien
ttttatcagaatagtactgcaaccc

SEQ ID NO: 5060929 - DNA, 25 bp, Homo sapien
tgttttatcagaatagtactgcaac

SEQ ID NO: 5060930 - DNA, 25 bp, Homo sapien
aaaaggcctggtgcggtgcttcatg

SEQ ID NO: 5060931 - DNA, 25 bp, Homo sapien
tcattagagtcatcacttaaaaaag

SEQ ID NO: 5060932 - DNA, 25 bp, Homo sapien
caactaaaaagctaatggagaagaa

SEQ ID NO: 5060933 - DNA, 25 bp, Homo sapien
aaaagaatataaaaggcctggtgcg

SEQ ID NO: 5060934 - DNA, 25 bp, Homo sapien
cgggaggcggagcttgcagtgagcc

SEQ ID NO: 5060935 - DNA, 25 bp, Homo sapien
ctgaggcaggagaatggccttaacc

SEQ ID NO: 5060936 - DNA, 25 bp, Homo sapien
cctgtagtcccagctacacaggaga

SEQ ID NO: 5060937 - DNA, 25 bp, Homo sapien
aaaaagccaggcgtggtcgtgggtg

SEQ ID NO: 5060938 - DNA, 25 bp, Homo sapien
cccctgagttctcaggatgtgaggg

SEQ ID NO: 5060939 - DNA, 25 bp, Homo sapien
gtctatggttcgtccccccgctcca

SEQ ID NO: 5060940 - DNA, 25 bp, Homo sapien
ggatgtgaggggtctatggttcgtc

SEQ ID NO: 5060941 - DNA, 25 bp, Homo sapien
tgtgaggggtctatggttcgtcccc

SEQ ID NO: 5060942 - DNA, 25 bp, Homo sapien
tgcttccatgaggagatccacaagg

SEQ ID NO: 5060943 - DNA, 25 bp, Homo sapien
tgaagctgcgacacctagaagacct

SEQ ID NO: 5060944 - DNA, 25 bp, Homo sapien
caaaactagcttttcaggaggacgg

SEQ ID NO: 5060945 - DNA, 25 bp, Homo sapien
gactggcacatacgagatctctgac

SEQ ID NO: 5060946 - DNA, 25 bp, Homo sapien
aaagtcagcatttgtcctgggttcc

SEQ ID NO: 5060947 - DNA, 25 bp, Homo sapien
tttgactggttttgcaacaacaggt

SEQ ID NO: 5060948 - DNA, 25 bp, Homo sapien
ccttgtgtgatctgtttgaaccaag

SEQ ID NO: 5060949 - DNA, 25 bp, Homo sapien
gggttacctagataatgccaaagtc

SEQ ID NO: 5060950 - DNA, 25 bp, Homo sapien
caagttgttgcaagtatcttcttcc

SEQ ID NO: 5060951 - DNA, 25 bp, Homo sapien
cccttgtgctgcgcttttacagcca

SEQ ID NO: 5060952 - DNA, 25 bp, Homo sapien
tagaatgtaatcttatgaggttgac

SEQ ID NO: 5060953 - DNA, 25 bp, Homo sapien
gacaattatatgcagtattatcatg

SEQ ID NO: 5060954 - DNA, 25 bp, Homo sapien
tgttgagtcgtatcccatggtatgg

SEQ ID NO: 5060955 - DNA, 25 bp, Homo sapien
tttgattgttgagtcgtatcccatg

SEQ ID NO: 5060956 - DNA, 25 bp, Homo sapien
ttccttttgattgttgagtcgtatc

SEQ ID NO: 5060957 - DNA, 25 bp, Homo sapien
gattgttgagtcgtatcccatggta

SEQ ID NO: 5060958 - DNA, 25 bp, Homo sapien
tatcatgtaccattaacctaacaag

SEQ ID NO: 5060959 - DNA, 25 bp, Homo sapien
tatttctgactggtgcctttcccct

SEQ ID NO: 5060960 - DNA, 25 bp, Homo sapien
ggagcaatgaaagctactctgttag

SEQ ID NO: 5060961 - DNA, 25 bp, Homo sapien
tgttttgttgatgcttttgttccca

SEQ ID NO: 5060962 - DNA, 25 bp, Homo sapien
cagatctgccaccaataggctgtgt

SEQ ID NO: 5060963 - DNA, 25 bp, Homo sapien
cctcaaggttaaggagcaggaagcc

SEQ ID NO: 5060964 - DNA, 25 bp, Homo sapien
gacagtatttgttagcctcaggttc

SEQ ID NO: 5060965 - DNA, 25 bp, Homo sapien
gaaagcagggctctgaaaccgaaca

SEQ ID NO: 5060966 - DNA, 25 bp, Homo sapien
gaaaccacgatgtggaatgacaaga

SEQ ID NO: 5060967 - DNA, 25 bp, Homo sapien
ctaatgagagtaggttcccataggt

SEQ ID NO: 5060968 - DNA, 25 bp, Homo sapien
catcctcaaaggaaaccacgatgtg

SEQ ID NO: 5060969 - DNA, 25 bp, Homo sapien
tgagagtaggttcccataggtcccc

SEQ ID NO: 5060970 - DNA, 25 bp, Homo sapien
tgacagccatcactaggtctctgag

SEQ ID NO: 5060971 - DNA, 25 bp, Homo sapien
tctgagacttctaagcctagacatt

SEQ ID NO: 5060972 - DNA, 25 bp, Homo sapien
gtagcagagacccaattatgagctg

SEQ ID NO: 5060973 - DNA, 25 bp, Homo sapien
agacattttgtggtagcagagaccc

SEQ ID NO: 5060974 - DNA, 25 bp, Homo sapien
ctccccataggtgctctgagacttc

SEQ ID NO: 5060975 - DNA, 25 bp, Homo sapien
aggactgtggcagtgcacttggcca

SEQ ID NO: 5060976 - DNA, 25 bp, Homo sapien
acaatggactgcgtttcccaggccc

SEQ ID NO: 5060977 - DNA, 25 bp, Homo sapien
ggtcctgcgcagacggcaaacagct

SEQ ID NO: 5060978 - DNA, 25 bp, Homo sapien
aaacagctgagaacagcggaccagg

SEQ ID NO: 5060979 - DNA, 25 bp, Homo sapien
caccaagatgttaagggaagtttgc

SEQ ID NO: 5060980 - DNA, 25 bp, Homo sapien
tcaccaagatgttaagggaagtttg

SEQ ID NO: 5060981 - DNA, 25 bp, Homo sapien
ctttcaatcaatacattcctgctaa

SEQ ID NO: 5060982 - DNA, 25 bp, Homo sapien
gggaaggagcgcgaacgctaaatcc

SEQ ID NO: 5060983 - DNA, 25 bp, Homo sapien
cgggaagggaaggagcgcgaacgct

SEQ ID NO: 5060984 - DNA, 25 bp, Homo sapien
cgaacgctaaatcccgtgccgcggg

SEQ ID NO: 5060985 - DNA, 25 bp, Homo sapien
agcgcgaacgctaaatcccgtgccg

SEQ ID NO: 5060986 - DNA, 25 bp, Homo sapien
cgctctaggcggctgatagtactca

SEQ ID NO: 5060987 - DNA, 25 bp, Homo sapien
tgaattccaggtttcgtgggtccgc

SEQ ID NO: 5060988 - DNA, 25 bp, Homo sapien
caggtttcgtgggtccgctctaggc

SEQ ID NO: 5060989 - DNA, 25 bp, Homo sapien
gatagtactcaatgctccggcagtc

SEQ ID NO: 5060990 - DNA, 25 bp, Homo sapien
ctgtagtcttttgacctcatcgccc

SEQ ID NO: 5060991 - DNA, 25 bp, Homo sapien
tcatcgccccctctagaaggctgct

SEQ ID NO: 5060992 - DNA, 25 bp, Homo sapien
atcgccccctctagaaggctgctgc

SEQ ID NO: 5060993 - DNA, 25 bp, Homo sapien
cctcatcgccccctctagaaggctg

SEQ ID NO: 5060994 - DNA, 25 bp, Homo sapien
gaaatgctgctataggatgtgggaa

SEQ ID NO: 5060995 - DNA, 25 bp, Homo sapien
tttccagctgaaactagtagagtac

SEQ ID NO: 5060996 - DNA, 25 bp, Homo sapien
cttctctaagatctagtctgtcctg

SEQ ID NO: 5060997 - DNA, 25 bp, Homo sapien
cctggaggaactgtacttctctaag

SEQ ID NO: 5060998 - DNA, 25 bp, Homo sapien
gtagtattcccctgatgcttcataa

SEQ ID NO: 5060999 - DNA, 25 bp, Homo sapien
tacatgtgtgtagggttgctcacca

SEQ ID NO: 5061000 - DNA, 25 bp, Homo sapien
cagatgtcgaataaaggctggatgc

SEQ ID NO: 5061001 - DNA, 25 bp, Homo sapien
tgtctttattactttgtacactgct

SEQ ID NO: 5061002 - DNA, 25 bp, Homo sapien
ctttggtgttacacaagattagagc

SEQ ID NO: 5061003 - DNA, 25 bp, Homo sapien
ctttccacgtttgttacactgataa

SEQ ID NO: 5061004 - DNA, 25 bp, Homo sapien
tgttacacaagattagagctgtagt

SEQ ID NO: 5061005 - DNA, 25 bp, Homo sapien
acacaagattagagctgtagttgaa

SEQ ID NO: 5061006 - DNA, 25 bp, Homo sapien
cattaaaggctgtactctgacgttc

SEQ ID NO: 5061007 - DNA, 25 bp, Homo sapien
tccatggtaactatttgggtgctca

SEQ ID NO: 5061008 - DNA, 25 bp, Homo sapien
ctgacgttctgcatgtttttgagat

SEQ ID NO: 5061009 - DNA, 25 bp, Homo sapien
gctgtgtccagatgaattacgttga

SEQ ID NO: 5061010 - DNA, 25 bp, Homo sapien
gctgggggaaccaaagcaggaaaga

SEQ ID NO: 5061011 - DNA, 25 bp, Homo sapien
aggaaagagcagcaaggtggaggcc

SEQ ID NO: 5061012 - DNA, 25 bp, Homo sapien
tgggggaaccaaagcaggaaagagc

SEQ ID NO: 5061013 - DNA, 25 bp, Homo sapien
accaaagcaggaaagagcagcaagg

SEQ ID NO: 5061014 - DNA, 25 bp, Homo sapien
caaaaatgatctagttgcttttgct

SEQ ID NO: 5061015 - DNA, 25 bp, Homo sapien
ccaaaaatgatctagttgcttttgc

SEQ ID NO: 5061016 - DNA, 25 bp, Homo sapien
aaaaatgatctagttgcttttgctt

SEQ ID NO: 5061017 - DNA, 25 bp, Homo sapien
aaaatgatctagttgcttttgcttt

SEQ ID NO: 5061018 - DNA, 25 bp, Homo sapien
tttgctaaactatcctaacttgtct

SEQ ID NO: 5061019 - DNA, 25 bp, Homo sapien
cgtagcagtatctgtcccgccagtc

SEQ ID NO: 5061020 - DNA, 25 bp, Homo sapien
taaatctccccagaatcgccatctt

SEQ ID NO: 5061021 - DNA, 25 bp, Homo sapien
ccttccctcagagggcacgtagcag

SEQ ID NO: 5061022 - DNA, 25 bp, Homo sapien
caggtgagagattagcagttcctga

SEQ ID NO: 5061023 - DNA, 25 bp, Homo sapien
aggtgagagattagcagttcctgag

SEQ ID NO: 5061024 - DNA, 25 bp, Homo sapien
gtgagagattagcagttcctgaggc

SEQ ID NO: 5061025 - DNA, 25 bp, Homo sapien
ccaggtgagagattagcagttcctg

SEQ ID NO: 5061026 - DNA, 25 bp, Homo sapien
tattttcatgatttcagcagaaagg

SEQ ID NO: 5061027 - DNA, 25 bp, Homo sapien
tcagcaaaaagcatgtgagcaaagg

SEQ ID NO: 5061028 - DNA, 25 bp, Homo sapien
tataccaagacgttcagttcccagg

SEQ ID NO: 5061029 - DNA, 25 bp, Homo sapien
gccaacatgtctcacctcccaccat

SEQ ID NO: 5061030 - DNA, 25 bp, Homo sapien
cattttccttagttaattgccctgg

SEQ ID NO: 5061031 - DNA, 25 bp, Homo sapien
tgattagagctttgtagcctttgta

SEQ ID NO: 5061032 - DNA, 25 bp, Homo sapien
tgcattaggacataaatctctgaga

SEQ ID NO: 5061033 - DNA, 25 bp, Homo sapien
cagatgatttaactgataatccata

SEQ ID NO: 5061034 - DNA, 25 bp, Homo sapien
ctattgtcaggcctgtgtttgcaac

SEQ ID NO: 5061035 - DNA, 25 bp, Homo sapien
actgtctctaactggttcctgggtc

SEQ ID NO: 5061036 - DNA, 25 bp, Homo sapien
tgtcaggcctgtgtttgcaacctct

SEQ ID NO: 5061037 - DNA, 25 bp, Homo sapien
tcaggcctgtgtttgcaacctctgt

SEQ ID NO: 5061038 - DNA, 25 bp, Homo sapien
tctgtgtttcagacccgatgggaga

SEQ ID NO: 5061039 - DNA, 25 bp, Homo sapien
ccagaacacttccttatgagagaga

SEQ ID NO: 5061040 - DNA, 25 bp, Homo sapien
taacgtctatctgtgggcaacctaa

SEQ ID NO: 5061041 - DNA, 25 bp, Homo sapien
cacaagcatgtatattggctgcagg

SEQ ID NO: 5061042 - DNA, 25 bp, Homo sapien
gacttcttgaagtttgagacacaca

SEQ ID NO: 5061043 - DNA, 25 bp, Homo sapien
gaggctaaaatgtctccagcgtcct

SEQ ID NO: 5061044 - DNA, 25 bp, Homo sapien
gcagctgtcagtatcagaggctaaa

SEQ ID NO: 5061045 - DNA, 25 bp, Homo sapien
tgtgaggtttttatctggcccgcgg

SEQ ID NO: 5061046 - DNA, 25 bp, Homo sapien
ccagctaactacaaacatggaagtt

SEQ ID NO: 5061047 - DNA, 25 bp, Homo sapien
ttaaataaatagagccacttgaggc

SEQ ID NO: 5061048 - DNA, 25 bp, Homo sapien
gaggtggatattggaaagatttata

SEQ ID NO: 5061049 - DNA, 25 bp, Homo sapien
tgaggcccaacactgtggcttacac

SEQ ID NO: 5061050 - DNA, 25 bp, Homo sapien
ctgttgcaaagtggaccatggtcta

SEQ ID NO: 5061051 - DNA, 25 bp, Homo sapien
ccgaggggacatagtgcgaagtggc

SEQ ID NO: 5061052 - DNA, 25 bp, Homo sapien
caaagtggaccatggtctagcagta

SEQ ID NO: 5061053 - DNA, 25 bp, Homo sapien
agatgcctgttgcaaagtggaccat

SEQ ID NO: 5061054 - DNA, 25 bp, Homo sapien
gactcaaaggtagagagacagtatg

SEQ ID NO: 5061055 - DNA, 25 bp, Homo sapien
gaagctgtcctattgtagccctctg

SEQ ID NO: 5061056 - DNA, 25 bp, Homo sapien
cagtatgaggtagatcaagatcaat

SEQ ID NO: 5061057 - DNA, 25 bp, Homo sapien
tactctgaggatgtccaactggccc

SEQ ID NO: 5061058 - DNA, 25 bp, Homo sapien
cagtcagtggatacatatcaccagc

SEQ ID NO: 5061059 - DNA, 25 bp, Homo sapien
agtttcgatgatagtcaccccagtc

SEQ ID NO: 5061060 - DNA, 25 bp, Homo sapien
ctgccgaaagtttcgatgatagtca

SEQ ID NO: 5061061 - DNA, 25 bp, Homo sapien
tcaccccagtcagtggatacatatc

SEQ ID NO: 5061062 - DNA, 25 bp, Homo sapien
gaatcacgtttcctctggcatgaag

SEQ ID NO: 5061063 - DNA, 25 bp, Homo sapien
tactccttacaatgcacagcgctct

SEQ ID NO: 5061064 - DNA, 25 bp, Homo sapien
gctgccccgcagaacatattatact

SEQ ID NO: 5061065 - DNA, 25 bp, Homo sapien
caggagccctcggttcacattactc

SEQ ID NO: 5061066 - DNA, 25 bp, Homo sapien
agctcttggggtgcgttacattccg

SEQ ID NO: 5061067 - DNA, 25 bp, Homo sapien
taactggtacagcattgcctacatg

SEQ ID NO: 5061068 - DNA, 25 bp, Homo sapien
caatcaaaggtacattaactggtac

SEQ ID NO: 5061069 - DNA, 25 bp, Homo sapien
catcttctgatttgccacaatcaaa

SEQ ID NO: 5061070 - DNA, 25 bp, Homo sapien
ttgctgacaggccttcggaagcttg

SEQ ID NO: 5061071 - DNA, 25 bp, Homo sapien
caagtgtgtatcaagcatgggccaa

SEQ ID NO: 5061072 - DNA, 25 bp, Homo sapien
taagttggacgttgccttgagggaa

SEQ ID NO: 5061073 - DNA, 25 bp, Homo sapien
cacttgccttactgagatgacgaaa

SEQ ID NO: 5061074 - DNA, 25 bp, Homo sapien
actctccggtgctgcacgacactgt

SEQ ID NO: 5061075 - DNA, 25 bp, Homo sapien
aatgagagctcatccatacatgttt

SEQ ID NO: 5061076 - DNA, 25 bp, Homo sapien
catccatacatgttttcactctgtt

SEQ ID NO: 5061077 - DNA, 25 bp, Homo sapien
agccaaggcactgataaatgagagc

SEQ ID NO: 5061078 - DNA, 25 bp, Homo sapien
ttttgcaaagtctgctggacataca

SEQ ID NO: 5061079 - DNA, 25 bp, Homo sapien
tttgcaaagtctgctggacatacac

SEQ ID NO: 5061080 - DNA, 25 bp, Homo sapien
ttccttgttttcccctgctgacaaa

SEQ ID NO: 5061081 - DNA, 25 bp, Homo sapien
tccttgttttcccctgctgacaaaa

SEQ ID NO: 5061082 - DNA, 25 bp, Homo sapien
tacaattgttgtaggccaggtagca

SEQ ID NO: 5061083 - DNA, 25 bp, Homo sapien
gcttctaacagcgaaaagtgtgcta

SEQ ID NO: 5061084 - DNA, 25 bp, Homo sapien
gaagtcttagccagtgtaacaaagc

SEQ ID NO: 5061085 - DNA, 25 bp, Homo sapien
tagagcctccagaaatagacctgct

SEQ ID NO: 5061086 - DNA, 25 bp, Homo sapien
ccacgtagaatccgcgatgcgctgc

SEQ ID NO: 5061087 - DNA, 25 bp, Homo sapien
gatttctacaggactcagatggaga

SEQ ID NO: 5061088 - DNA, 25 bp, Homo sapien
cacaacagggcagttcgctcttggt

SEQ ID NO: 5061089 - DNA, 25 bp, Homo sapien
taagatagcaacgatgatcctcgca

SEQ ID NO: 5061090 - DNA, 25 bp, Homo sapien
atcctcgcagcaacacacaacaggg

SEQ ID NO: 5061091 - DNA, 25 bp, Homo sapien
gtgcctggccccctcttcatattct

SEQ ID NO: 5061092 - DNA, 25 bp, Homo sapien
tcgttatctgcccacttgggctccc

SEQ ID NO: 5061093 - DNA, 25 bp, Homo sapien
aacccctgatctcgttatctgccca

SEQ ID NO: 5061094 - DNA, 25 bp, Homo sapien
cctggccccctcttcatattctttt

SEQ ID NO: 5061095 - DNA, 25 bp, Homo sapien
ggagcctgtagtctgcagcaaaaca

SEQ ID NO: 5061096 - DNA, 25 bp, Homo sapien
gaaataacagctttgcccactcaga

SEQ ID NO: 5061097 - DNA, 25 bp, Homo sapien
catgacaacgaaatagggatctcca

SEQ ID NO: 5061098 - DNA, 25 bp, Homo sapien
ccttcaagccggcagatattcctaa

SEQ ID NO: 5061099 - DNA, 25 bp, Homo sapien
ggagcctgtagtctgcagcaaaaca

SEQ ID NO: 5061100 - DNA, 25 bp, Homo sapien
gaaataacagctttgcccactcaga

SEQ ID NO: 5061101 - DNA, 25 bp, Homo sapien
catgacaacgaaatagggatctcca

SEQ ID NO: 5061102 - DNA, 25 bp, Homo sapien
ccttcaagccggcagatattcctaa

SEQ ID NO: 5061103 - DNA, 25 bp, Homo sapien
tgggaggtggcagtaacgagaacat

SEQ ID NO: 5061104 - DNA, 25 bp, Homo sapien
gtgggaggtggcagtaacgagaaca

SEQ ID NO: 5061105 - DNA, 25 bp, Homo sapien
ctaaactggggcggctactttcagg

SEQ ID NO: 5061106 - DNA, 25 bp, Homo sapien
aaactggggcggctactttcaggca

SEQ ID NO: 5061107 - DNA, 25 bp, Homo sapien
gcatatatttgcgtgaatgcctgtg

SEQ ID NO: 5061108 - DNA, 25 bp, Homo sapien
cctccctgtgactgtctatgtggac

SEQ ID NO: 5061109 - DNA, 25 bp, Homo sapien
tgtttctgggtccatgtgtccatgt

SEQ ID NO: 5061110 - DNA, 25 bp, Homo sapien
tgtataaacccactatccttgtgtg

SEQ ID NO: 5061111 - DNA, 25 bp, Homo sapien
tgaatatagaactccttgaaaaggc

SEQ ID NO: 5061112 - DNA, 25 bp, Homo sapien
gatgaaattgctccttatcagtagg

SEQ ID NO: 5061113 - DNA, 25 bp, Homo sapien
ttagaaaaccttgggcagtctcgtc

SEQ ID NO: 5061114 - DNA, 25 bp, Homo sapien
catagcacagtcaacttaccagagt

SEQ ID NO: 5061115 - DNA, 25 bp, Homo sapien
taagtaaatggtagttctcctagtc

SEQ ID NO: 5061116 - DNA, 25 bp, Homo sapien
ggagtccagccctgggtggcattaa

SEQ ID NO: 5061117 - DNA, 25 bp, Homo sapien
taacatgaccgaaaggcatggcacc

SEQ ID NO: 5061118 - DNA, 25 bp, Homo sapien
tacctacctcacagcattgtcctga

SEQ ID NO: 5061119 - DNA, 25 bp, Homo sapien
taccacatacatgcctaattaatgt

SEQ ID NO: 5061120 - DNA, 25 bp, Homo sapien
ttaacaactctataccacatacatg

SEQ ID NO: 5061121 - DNA, 25 bp, Homo sapien
tctataccacatacatgcctaatta

SEQ ID NO: 5061122 - DNA, 25 bp, Homo sapien
caactctataccacatacatgccta

SEQ ID NO: 5061123 - DNA, 25 bp, Homo sapien
cactggccgttgattggatggtgcc

SEQ ID NO: 5061124 - DNA, 25 bp, Homo sapien
gaactctcaaaatatgccatctaca

SEQ ID NO: 5061125 - DNA, 25 bp, Homo sapien
ttcttcctgctttactctagccgca

SEQ ID NO: 5061126 - DNA, 25 bp, Homo sapien
ctggaagacttagcaaatcggcctc

SEQ ID NO: 5061127 - DNA, 25 bp, Homo sapien
caattcctatctcagccatctgcgg

SEQ ID NO: 5061128 - DNA, 25 bp, Homo sapien
tcagccatctgcggcatatctgaca

SEQ ID NO: 5061129 - DNA, 25 bp, Homo sapien
ctccaattcctatctcagccatctg

SEQ ID NO: 5061130 - DNA, 25 bp, Homo sapien
cagccatctgcggcatatctgacat

SEQ ID NO: 5061131 - DNA, 25 bp, Homo sapien
ggaggcatcgtgcaacaccaccttt

SEQ ID NO: 5061132 - DNA, 25 bp, Homo sapien
gaggcatcgtgcaacaccacctttc

SEQ ID NO: 5061133 - DNA, 25 bp, Homo sapien
caggcctatgcaacacttctggagg

SEQ ID NO: 5061134 - DNA, 25 bp, Homo sapien
gtcagcaggcctatgcaacacttct

SEQ ID NO: 5061135 - DNA, 25 bp, Homo sapien
gatgcaatagctacatccaaccaag

SEQ ID NO: 5061136 - DNA, 25 bp, Homo sapien
aatagctacatccaaccaaggccgt

SEQ ID NO: 5061137 - DNA, 25 bp, Homo sapien
gtgatgacagatgcaatagctacat

SEQ ID NO: 5061138 - DNA, 25 bp, Homo sapien
gacagatgcaatagctacatccaac

SEQ ID NO: 5061139 - DNA, 25 bp, Homo sapien
ggctgcctaatgtcctgagctgtac

SEQ ID NO: 5061140 - DNA, 25 bp, Homo sapien
tgtaagatcctccactgagttacag

SEQ ID NO: 5061141 - DNA, 25 bp, Homo sapien
cttctgtaagatcctccactgagtt

SEQ ID NO: 5061142 - DNA, 25 bp, Homo sapien
tctgtaagatcctccactgagttac

SEQ ID NO: 5061143 - DNA, 25 bp, Homo sapien
aagatcctccactgagttacagcaa

SEQ ID NO: 5061144 - DNA, 25 bp, Homo sapien
aagcagaggcgttcattccagacca

SEQ ID NO: 5061145 - DNA, 25 bp, Homo sapien
tgtagcttccaaacacgactttatg

SEQ ID NO: 5061146 - DNA, 25 bp, Homo sapien
gactttatgctaatatccaggtaga

SEQ ID NO: 5061147 - DNA, 25 bp, Homo sapien
agggagttcccatacgttatgctag

SEQ ID NO: 5061148 - DNA, 25 bp, Homo sapien
cttggcgtgaaggaggctagtcatt

SEQ ID NO: 5061149 - DNA, 25 bp, Homo sapien
gcagcaaggtggaaaattcttgcct

SEQ ID NO: 5061150 - DNA, 25 bp, Homo sapien
gctagtcattgtggccaaacttctg

SEQ ID NO: 5061151 - DNA, 25 bp, Homo sapien
ggccaaatgtcggactgccaattaa

SEQ ID NO: 5061152 - DNA, 25 bp, Homo sapien
agagtagccttctgtgctcagggtg

SEQ ID NO: 5061153 - DNA, 25 bp, Homo sapien
cagctcctggcagcactctgtatct

SEQ ID NO: 5061154 - DNA, 25 bp, Homo sapien
cagggtggcagctcctggcagcact

SEQ ID NO: 5061155 - DNA, 25 bp, Homo sapien
ggctgctgcagagtagccttctgtg

SEQ ID NO: 5061156 - DNA, 25 bp, Homo sapien
cctttctggctgcttctatggccat

SEQ ID NO: 5061157 - DNA, 25 bp, Homo sapien
tgttcctgtccacagtgtcagctca

SEQ ID NO: 5061158 - DNA, 25 bp, Homo sapien
catgttcctgtccacagtgtcagct

SEQ ID NO: 5061159 - DNA, 25 bp, Homo sapien
ccatgttcctgtccacagtgtcagc

SEQ ID NO: 5061160 - DNA, 25 bp, Homo sapien
gttcctgtccacagtgtcagctcag

SEQ ID NO: 5061161 - DNA, 25 bp, Homo sapien
ctataagccgaatctagattcctgc

SEQ ID NO: 5061162 - DNA, 25 bp, Homo sapien
ccggccacctttgtagttccatact

SEQ ID NO: 5061163 - DNA, 25 bp, Homo sapien
tcatcctacatgaagcctgctctgg

SEQ ID NO: 5061164 - DNA, 25 bp, Homo sapien
ctcatttgagtatctgtagagtctc

SEQ ID NO: 5061165 - DNA, 25 bp, Homo sapien
tgctctggtaattctagtttgccga

SEQ ID NO: 5061166 - DNA, 25 bp, Homo sapien
agtttgccgaaacctctcatttgag

SEQ ID NO: 5061167 - DNA, 25 bp, Homo sapien
ggccagccccacatcgtctagtggc

SEQ ID NO: 5061168 - DNA, 25 bp, Homo sapien
ccccacatcgtctagtggcattttg

SEQ ID NO: 5061169 - DNA, 25 bp, Homo sapien
cagccccacatcgtctagtggcatt

SEQ ID NO: 5061170 - DNA, 25 bp, Homo sapien
gccccacatcgtctagtggcatttt

SEQ ID NO: 5061171 - DNA, 25 bp, Homo sapien
tcacaataaactgggatctcaagaa

SEQ ID NO: 5061172 - DNA, 25 bp, Homo sapien
ccacatccgaatcccttaaggagta

SEQ ID NO: 5061173 - DNA, 25 bp, Homo sapien
aaagaccgggatacttcaacatgcc

SEQ ID NO: 5061174 - DNA, 25 bp, Homo sapien
gaaaactagcattgaacccttctgg

SEQ ID NO: 5061175 - DNA, 25 bp, Homo sapien
ctgggctgacatcctgtgtcagagg

SEQ ID NO: 5061176 - DNA, 25 bp, Homo sapien
ctgacatcctgtgtcagaggtgaga

SEQ ID NO: 5061177 - DNA, 25 bp, Homo sapien
gtgagaggtttgctggcatagttct

SEQ ID NO: 5061178 - DNA, 25 bp, Homo sapien
ggctgacatcctgtgtcagaggtga

SEQ ID NO: 5061179 - DNA, 25 bp, Homo sapien
gcaggcctgctcttgcctggctctg

SEQ ID NO: 5061180 - DNA, 25 bp, Homo sapien
tgggagcccatgcaggcctgctctt

SEQ ID NO: 5061181 - DNA, 25 bp, Homo sapien
ggagcccatgcaggcctgctcttgc

SEQ ID NO: 5061182 - DNA, 25 bp, Homo sapien
ccgcatgggagcccatgcaggcctg

SEQ ID NO: 5061183 - DNA, 25 bp, Homo sapien
ctggttagcagggggtgagggagag

SEQ ID NO: 5061184 - DNA, 25 bp, Homo sapien
cagggggtgagggagaggaggaggg

SEQ ID NO: 5061185 - DNA, 25 bp, Homo sapien
tgcagaggctctcttttatctgggc

SEQ ID NO: 5061186 - DNA, 25 bp, Homo sapien
ttagctgaacaccgcgagaggaggc

SEQ ID NO: 5061187 - DNA, 25 bp, Homo sapien
ctgaacaccgcgagaggaggctgta

SEQ ID NO: 5061188 - DNA, 25 bp, Homo sapien
gcctcgatgctgctgtcgggagaaa

SEQ ID NO: 5061189 - DNA, 25 bp, Homo sapien
tgctgctgtcgggagaaacaccaac

SEQ ID NO: 5061190 - DNA, 25 bp, Homo sapien
tcgtaaagggagattgcgggtggca

SEQ ID NO: 5061191 - DNA, 25 bp, Homo sapien
aggcacagtgcagcctcgtaaaggg

SEQ ID NO: 5061192 - DNA, 25 bp, Homo sapien
ttcatgtgggaggtaccgctcctgt

SEQ ID NO: 5061193 - DNA, 25 bp, Homo sapien
ttctttagacggctcccaaggcaca

SEQ ID NO: 5061194 - DNA, 25 bp, Homo sapien
gtgccctgacggtacccacaggtgg

SEQ ID NO: 5061195 - DNA, 25 bp, Homo sapien
ccttaagcacaggaacgatcatctc

SEQ ID NO: 5061196 - DNA, 25 bp, Homo sapien
taggagtaaggctcttgtttcattc

SEQ ID NO: 5061197 - DNA, 25 bp, Homo sapien
tgggggaacccatagccttaagcac

SEQ ID NO: 5061198 - DNA, 25 bp, Homo sapien
agtcagaggcatgagcagcgctggt

SEQ ID NO: 5061199 - DNA, 25 bp, Homo sapien
agaggcatgagcagcgctggtctgg

SEQ ID NO: 5061200 - DNA, 25 bp, Homo sapien
agaaaccatgagcagaagtcagagg

SEQ ID NO: 5061201 - DNA, 25 bp, Homo sapien
tttgagaaaccatgagcagaagtca

SEQ ID NO: 5061202 - DNA, 25 bp, Homo sapien
gacatgacaaccagagaggttggga

SEQ ID NO: 5061203 - DNA, 25 bp, Homo sapien
tttcgcttgtgtcctccctggcaag

SEQ ID NO: 5061204 - DNA, 25 bp, Homo sapien
catctgaaggttagggaactgagtc

SEQ ID NO: 5061205 - DNA, 25 bp, Homo sapien
gctgaagtttctttcgcttgtgtcc

SEQ ID NO: 5061206 - DNA, 25 bp, Homo sapien
acatctgggtgagcccaagggccat

SEQ ID NO: 5061207 - DNA, 25 bp, Homo sapien
gctgggttgacaggttctagctgac

SEQ ID NO: 5061208 - DNA, 25 bp, Homo sapien
aaacatctgggtgagcccaagggcc

SEQ ID NO: 5061209 - DNA, 25 bp, Homo sapien
gacactccagttggctttccagctg

SEQ ID NO: 5061210 - DNA, 25 bp, Homo sapien
ctacatgccggtccctgaatgtgtg

SEQ ID NO: 5061211 - DNA, 25 bp, Homo sapien
tggtcacaactacatgccggtccct

SEQ ID NO: 5061212 - DNA, 25 bp, Homo sapien
tgtgtggggtgtgcaaagtgaccca

SEQ ID NO: 5061213 - DNA, 25 bp, Homo sapien
tcacaactacatgccggtccctgaa

SEQ ID NO: 5061214 - DNA, 25 bp, Homo sapien
ttggattaatgcagagccggaggaa

SEQ ID NO: 5061215 - DNA, 25 bp, Homo sapien
tgtctgcaggtgtttagtaattgga

SEQ ID NO: 5061216 - DNA, 25 bp, Homo sapien
catttctaaggcttttggcacccaa

SEQ ID NO: 5061217 - DNA, 25 bp, Homo sapien
ggcacccaaactgttattgcatgtc

SEQ ID NO: 5061218 - DNA, 25 bp, Homo sapien
tgtttaatggggtccgtggctgtca

SEQ ID NO: 5061219 - DNA, 25 bp, Homo sapien
tacaattactaagaagttcaaaatg

SEQ ID NO: 5061220 - DNA, 25 bp, Homo sapien
ttctaatgtgtaccgaacattcctg

SEQ ID NO: 5061221 - DNA, 25 bp, Homo sapien
actcaaatgcctgtcacgttgtctt

SEQ ID NO: 5061222 - DNA, 25 bp, Homo sapien
tccttgtggccatgggccatcctgt

SEQ ID NO: 5061223 - DNA, 25 bp, Homo sapien
gtggccatgggccatcctgtagctt

SEQ ID NO: 5061224 - DNA, 25 bp, Homo sapien
ggccatgggccatcctgtagcttct

SEQ ID NO: 5061225 - DNA, 25 bp, Homo sapien
tgtgtaagttggtgggatgaggtta

SEQ ID NO: 5061226 - DNA, 25 bp, Homo sapien
aaaggacgtctttacattgccttgg

SEQ ID NO: 5061227 - DNA, 25 bp, Homo sapien
tatgcagactaagtgaccaggagga

SEQ ID NO: 5061228 - DNA, 25 bp, Homo sapien
caccttgttcgccaggacattacta

SEQ ID NO: 5061229 - DNA, 25 bp, Homo sapien
gacattactactcttatttcctggt

SEQ ID NO: 5061230 - DNA, 25 bp, Homo sapien
gtcccgcaggcagtgaactggcaca

SEQ ID NO: 5061231 - DNA, 25 bp, Homo sapien
tcccgcaggcagtgaactggcacag

SEQ ID NO: 5061232 - DNA, 25 bp, Homo sapien
cccgcaggcagtgaactggcacagc

SEQ ID NO: 5061233 - DNA, 25 bp, Homo sapien
gccatctgttgagttaaatgttgcc

SEQ ID NO: 5061234 - DNA, 25 bp, Homo sapien
gagttaaatgttgcctgcctcagtc

SEQ ID NO: 5061235 - DNA, 25 bp, Homo sapien
cgttggcaaagccatctgttgagtt

SEQ ID NO: 5061236 - DNA, 25 bp, Homo sapien
tctgttgagttaaatgttgcctgcc

SEQ ID NO: 5061237 - DNA, 25 bp, Homo sapien
cagactaggattgcagtgccaggaa

SEQ ID NO: 5061238 - DNA, 25 bp, Homo sapien
agccggggatacagccatggtccca

SEQ ID NO: 5061239 - DNA, 25 bp, Homo sapien
ccagactaggattgcagtgccagga

SEQ ID NO: 5061240 - DNA, 25 bp, Homo sapien
cagaaagccggggatacagccatgg

SEQ ID NO: 5061241 - DNA, 25 bp, Homo sapien
cagtgtcagggagctagccttcacc

SEQ ID NO: 5061242 - DNA, 25 bp, Homo sapien
gaaactcagcctgcagtgtcaggga

SEQ ID NO: 5061243 - DNA, 25 bp, Homo sapien
cagggagctagccttcaccacagtg

SEQ ID NO: 5061244 - DNA, 25 bp, Homo sapien
cttcaccacagtgcgtgtggacagc

SEQ ID NO: 5061245 - DNA, 25 bp, Homo sapien
ctgaaatgatattgcgtgaagtctg

SEQ ID NO: 5061246 - DNA, 25 bp, Homo sapien
aagtctggaccaattgctgtgttaa

SEQ ID NO: 5061247 - DNA, 25 bp, Homo sapien
catgtaatgtttctgtatgatgttt

SEQ ID NO: 5061248 - DNA, 25 bp, Homo sapien
tgatattgcgtgaagtctggaccaa

SEQ ID NO: 5061249 - DNA, 25 bp, Homo sapien
caaagcttatgtgaagtggtgcttc

SEQ ID NO: 5061250 - DNA, 25 bp, Homo sapien
aatatgtggtgtaggcagaaacgac

SEQ ID NO: 5061251 - DNA, 25 bp, Homo sapien
gaaacgacgaatcaggcaaagctta

SEQ ID NO: 5061252 - DNA, 25 bp, Homo sapien
catcaatctagagaagcttcagtgt

SEQ ID NO: 5061253 - DNA, 25 bp, Homo sapien
gcatcccactgttaagccagattgt

SEQ ID NO: 5061254 - DNA, 25 bp, Homo sapien
tcagctgaaaagcctgacattgagc

SEQ ID NO: 5061255 - DNA, 25 bp, Homo sapien
agattgtccactcagctgaaaagcc

SEQ ID NO: 5061256 - DNA, 25 bp, Homo sapien
taagccagattgtccactcagctga

SEQ ID NO: 5061257 - DNA, 25 bp, Homo sapien
tgcgacatggtccttcttccactgt

SEQ ID NO: 5061258 - DNA, 25 bp, Homo sapien
ggattcatcagattaggaggaatgc

SEQ ID NO: 5061259 - DNA, 25 bp, Homo sapien
tgtgtgcagaatgccgtcaaacagc

SEQ ID NO: 5061260 - DNA, 25 bp, Homo sapien
tgcctgggctgaatttatggcaagg

SEQ ID NO: 5061261 - DNA, 25 bp, Homo sapien
gactgtgtaggtggacctgtctttt

SEQ ID NO: 5061262 - DNA, 25 bp, Homo sapien
tgatttactagcttcttgtggaggg

SEQ ID NO: 5061263 - DNA, 25 bp, Homo sapien
actgctgatttactagcttcttgtg

SEQ ID NO: 5061264 - DNA, 25 bp, Homo sapien
gtgtaggtggacctgtcttttccac

SEQ ID NO: 5061265 - DNA, 25 bp, Homo sapien
aatgtttagggcactctcatttgtg

SEQ ID NO: 5061266 - DNA, 25 bp, Homo sapien
acccaaggggtctgatgcctttgca

SEQ ID NO: 5061267 - DNA, 25 bp, Homo sapien
aacatgagaaggcataatctctgtc

SEQ ID NO: 5061268 - DNA, 25 bp, Homo sapien
gattctgtgtacatgggtgggaccc

SEQ ID NO: 5061269 - DNA, 25 bp, Homo sapien
gtccaagatgggaatggaatctcat

SEQ ID NO: 5061270 - DNA, 25 bp, Homo sapien
gcatggggtgattcttagctccttg

SEQ ID NO: 5061271 - DNA, 25 bp, Homo sapien
ccttgtccaagatgggaatggaatc

SEQ ID NO: 5061272 - DNA, 25 bp, Homo sapien
tagctccttgtccaagatgggaatg

SEQ ID NO: 5061273 - DNA, 25 bp, Homo sapien
aataggatattcgacttttgcaact

SEQ ID NO: 5061274 - DNA, 25 bp, Homo sapien
gagaattttcaataggatattcgac

SEQ ID NO: 5061275 - DNA, 25 bp, Homo sapien
ctttaatgagaccagatgctctggg

SEQ ID NO: 5061276 - DNA, 25 bp, Homo sapien
tttgcaactttaatgagaccagatg

SEQ ID NO: 5061277 - DNA, 25 bp, Homo sapien
tcatcccccaatgttgtctccaaag

SEQ ID NO: 5061278 - DNA, 25 bp, Homo sapien
ctgtctttgagtgagtggcctgtga

SEQ ID NO: 5061279 - DNA, 25 bp, Homo sapien
gattttataaagaacctgatcctct

SEQ ID NO: 5061280 - DNA, 25 bp, Homo sapien
agagggggcagcaaccctccaggct

SEQ ID NO: 5061281 - DNA, 25 bp, Homo sapien
ccaactcccttattggcagcagcag

SEQ ID NO: 5061282 - DNA, 25 bp, Homo sapien
gaattatttgtggtgcttgatggaa

SEQ ID NO: 5061283 - DNA, 25 bp, Homo sapien
aaggtgtgatcatgggagtctgtgg

SEQ ID NO: 5061284 - DNA, 25 bp, Homo sapien
cagacaggctagactcttcctggct

SEQ ID NO: 5061285 - DNA, 25 bp, Homo sapien
tcatcacagtcacctccaaaggctg

SEQ ID NO: 5061286 - DNA, 25 bp, Homo sapien
tacagcactagtcagaatgcaatgg

SEQ ID NO: 5061287 - DNA, 25 bp, Homo sapien
ggtatgtggcctatctacagcacta

SEQ ID NO: 5061288 - DNA, 25 bp, Homo sapien
aatgcaatggatagagggccactct

SEQ ID NO: 5061289 - DNA, 25 bp, Homo sapien
aataattataagatgcgatgaaggc

SEQ ID NO: 5061290 - DNA, 25 bp, Homo sapien
cagcttttatggagtgtcaaccact

SEQ ID NO: 5061291 - DNA, 25 bp, Homo sapien
tataagatgcgatgaaggctgcacc

SEQ ID NO: 5061292 - DNA, 25 bp, Homo sapien
taggacatcctagattgcttttcca

SEQ ID NO: 5061293 - DNA, 25 bp, Homo sapien
ttggattttcggtggctgcatggaa

SEQ ID NO: 5061294 - DNA, 25 bp, Homo sapien
tggaagaccagcttatccttgagtt

SEQ ID NO: 5061295 - DNA, 25 bp, Homo sapien
ttatccttgagttcaccctgaccat

SEQ ID NO: 5061296 - DNA, 25 bp, Homo sapien
ccagcttatccttgagttcaccctg

SEQ ID NO: 5061297 - DNA, 25 bp, Homo sapien
cagttggtagttgggcccagttggc

SEQ ID NO: 5061298 - DNA, 25 bp, Homo sapien
tagagcccagttggtagttgggccc

SEQ ID NO: 5061299 - DNA, 25 bp, Homo sapien
ctagagcccagttggtagttgggcc

SEQ ID NO: 5061300 - DNA, 25 bp, Homo sapien
agcccagttggtagttgggcccagt

SEQ ID NO: 5061301 - DNA, 25 bp, Homo sapien
gctgcggtcccagctcttttgggca

SEQ ID NO: 5061302 - DNA, 25 bp, Homo sapien
tctctgaggtagagctctcagacgg

SEQ ID NO: 5061303 - DNA, 25 bp, Homo sapien
tcagacggtcttcagcccggtggaa

SEQ ID NO: 5061304 - DNA, 25 bp, Homo sapien
caaggccagaaagttcgctgcggtc

SEQ ID NO: 5061305 - DNA, 25 bp, Homo sapien
cgggcgcatccagccgttggcgtat

SEQ ID NO: 5061306 - DNA, 25 bp, Homo sapien
tgtgggcagaaaatgcagacgagaa

SEQ ID NO: 5061307 - DNA, 25 bp, Homo sapien
gagaaagtgggtggcgcttggctaa

SEQ ID NO: 5061308 - DNA, 25 bp, Homo sapien
ctaatgcgggctggagcccttgact

SEQ ID NO: 5061309 - DNA, 25 bp, Homo sapien
aatcgtcgcggagttcagtgttttg

SEQ ID NO: 5061310 - DNA, 25 bp, Homo sapien
agtccggaagctgacggcggtgcgt

SEQ ID NO: 5061311 - DNA, 25 bp, Homo sapien
agggcagcagttgccgcggcgtact

SEQ ID NO: 5061312 - DNA, 25 bp, Homo sapien
aaaggaactcgcaggccagtgctgc

SEQ ID NO: 5061313 - DNA, 25 bp, Homo sapien
acgatccgcagacccgaagcgttgg

SEQ ID NO: 5061314 - DNA, 25 bp, Homo sapien
gaatcagtggtttagagtggtctcc

SEQ ID NO: 5061315 - DNA, 25 bp, Homo sapien
gggcggtgccctgcagcgtcctctt

SEQ ID NO: 5061316 - DNA, 25 bp, Homo sapien
ccgaagcgttggcagctgtcctgag

SEQ ID NO: 5061317 - DNA, 25 bp, Homo sapien
tgtgcgggctagaacttcgaggccc

SEQ ID NO: 5061318 - DNA, 25 bp, Homo sapien
cctgagtcctgtgcgggctagaact

SEQ ID NO: 5061319 - DNA, 25 bp, Homo sapien
gaacgctcctgagtcctgtgcgggc

SEQ ID NO: 5061320 - DNA, 25 bp, Homo sapien
ctccgggaacgctcctgagtcctgt

SEQ ID NO: 5061321 - DNA, 25 bp, Homo sapien
tcaagccgggccctgctggctgaga

SEQ ID NO: 5061322 - DNA, 25 bp, Homo sapien
agccagccaagagccgggcgttata

SEQ ID NO: 5061323 - DNA, 25 bp, Homo sapien
ttatgctgaccatcggtaacggaca

SEQ ID NO: 5061324 - DNA, 25 bp, Homo sapien
ggtaacggacatttatcactggagt

SEQ ID NO: 5061325 - DNA, 25 bp, Homo sapien
ccgggcgttatattgcgattggcac

SEQ ID NO: 5061326 - DNA, 25 bp, Homo sapien
gggcccggcctccgctgccgcgaca

SEQ ID NO: 5061327 - DNA, 25 bp, Homo sapien
tgcagggggcccggcctccgctgcc

SEQ ID NO: 5061328 - DNA, 25 bp, Homo sapien
agggggcccggcctccgctgccgcg

SEQ ID NO: 5061329 - DNA, 25 bp, Homo sapien
ctgcagggggcccggcctccgctgc

SEQ ID NO: 5061330 - DNA, 25 bp, Homo sapien
cgtgggctccgggactaggagagcg

SEQ ID NO: 5061331 - DNA, 25 bp, Homo sapien
ctccgggactaggagagcgggacgg

SEQ ID NO: 5061332 - DNA, 25 bp, Homo sapien
ggctccgggactaggagagcgggac

SEQ ID NO: 5061333 - DNA, 25 bp, Homo sapien
ctaggagagcgggacggggacctcg

SEQ ID NO: 5061334 - DNA, 25 bp, Homo sapien
tataagcttgtaactctgactgcgg

SEQ ID NO: 5061335 - DNA, 25 bp, Homo sapien
ccccggagcctgcaaaagtgtaatc

SEQ ID NO: 5061336 - DNA, 25 bp, Homo sapien
tcttggccaaaaggcggtactcacg

SEQ ID NO: 5061337 - DNA, 25 bp, Homo sapien
caacgaagtccttagcactggcagc

SEQ ID NO: 5061338 - DNA, 25 bp, Homo sapien
cagggctcacaacacacaagaacat

SEQ ID NO: 5061339 - DNA, 25 bp, Homo sapien
ccagggctcacaacacacaagaaca

SEQ ID NO: 5061340 - DNA, 25 bp, Homo sapien
ctgcccagggctcacaacacacaag

SEQ ID NO: 5061341 - DNA, 25 bp, Homo sapien
gcccagggctcacaacacacaagaa

SEQ ID NO: 5061342 - DNA, 25 bp, Homo sapien
agccaggctttgaaagcctcgctgc

SEQ ID NO: 5061343 - DNA, 25 bp, Homo sapien
tgaaagcctcgctgcagcgaaaggc

SEQ ID NO: 5061344 - DNA, 25 bp, Homo sapien
gctttgaaagcctcgctgcagcgaa

SEQ ID NO: 5061345 - DNA, 25 bp, Homo sapien
cctcgctgcagcgaaaggcagagga

SEQ ID NO: 5061346 - DNA, 25 bp, Homo sapien
gaggccagatcacgcagataatatg

SEQ ID NO: 5061347 - DNA, 25 bp, Homo sapien
ggatagtctcaatttgtcccgggca

SEQ ID NO: 5061348 - DNA, 25 bp, Homo sapien
tagagatgaccgttgctgaagccac

SEQ ID NO: 5061349 - DNA, 25 bp, Homo sapien
tccttgtgtccgagctctgggatag

SEQ ID NO: 5061350 - DNA, 25 bp, Homo sapien
gctggcttggccttggataggccaa

SEQ ID NO: 5061351 - DNA, 25 bp, Homo sapien
ttcgggacagtgtgcaggccagagt

SEQ ID NO: 5061352 - DNA, 25 bp, Homo sapien
tccgggacccggagataaggatctg

SEQ ID NO: 5061353 - DNA, 25 bp, Homo sapien
ataggccaagcacccagaggagcag

SEQ ID NO: 5061354 - DNA, 25 bp, Homo sapien
gcctagcgaggttggtggtttctcc

SEQ ID NO: 5061355 - DNA, 25 bp, Homo sapien
aaggcgaggaaaggcctagcgaggt

SEQ ID NO: 5061356 - DNA, 25 bp, Homo sapien
aggaaaggcctagcgaggttggtgg

SEQ ID NO: 5061357 - DNA, 25 bp, Homo sapien
aggcctagcgaggttggtggtttct

SEQ ID NO: 5061358 - DNA, 25 bp, Homo sapien
ccctacggagcccaagacggctccg

SEQ ID NO: 5061359 - DNA, 25 bp, Homo sapien
agcccaagacggctccggtcttggc

SEQ ID NO: 5061360 - DNA, 25 bp, Homo sapien
gcccaagacggctccggtcttggct

SEQ ID NO: 5061361 - DNA, 25 bp, Homo sapien
tacggagcccaagacggctccggtc

SEQ ID NO: 5061362 - DNA, 25 bp, Homo sapien
ggaaaacaagatcgggcagatagcc

SEQ ID NO: 5061363 - DNA, 25 bp, Homo sapien
gcactggcttccgaatgcttcagaa

SEQ ID NO: 5061364 - DNA, 25 bp, Homo sapien
cagatagcccggaaaggttggctcc

SEQ ID NO: 5061365 - DNA, 25 bp, Homo sapien
caggaaccattatagctgcaagcac

SEQ ID NO: 5061366 - DNA, 25 bp, Homo sapien
cccgagcgcgaattgcgtctgctgt

SEQ ID NO: 5061367 - DNA, 25 bp, Homo sapien
gctgtgcgtggtcgggtccccttat

SEQ ID NO: 5061368 - DNA, 25 bp, Homo sapien
taggactggccgcagacctgggatt

SEQ ID NO: 5061369 - DNA, 25 bp, Homo sapien
cccgcactgcgcagggactcgggat

SEQ ID NO: 5061370 - DNA, 25 bp, Homo sapien
catgcaattccatgctagtatttat

SEQ ID NO: 5061371 - DNA, 25 bp, Homo sapien
atgcaattccatgctagtatttatg

SEQ ID NO: 5061372 - DNA, 25 bp, Homo sapien
cgatgatcgtatgcccatgcaattc

SEQ ID NO: 5061373 - DNA, 25 bp, Homo sapien
gatcgtatgcccatgcaattccatg

SEQ ID NO: 5061374 - DNA, 25 bp, Homo sapien
caggattccaccctaactattcaca

SEQ ID NO: 5061375 - DNA, 25 bp, Homo sapien
taggtggctctatctgcaggattcc

SEQ ID NO: 5061376 - DNA, 25 bp, Homo sapien
tgttctccaacatccccggctgatt

SEQ ID NO: 5061377 - DNA, 25 bp, Homo sapien
cacaattccgttcaaactactgttc

SEQ ID NO: 5061378 - DNA, 25 bp, Homo sapien
aaactctccgggtgatctcgtggca

SEQ ID NO: 5061379 - DNA, 25 bp, Homo sapien
ggattctccttagcaagacccagac

SEQ ID NO: 5061380 - DNA, 25 bp, Homo sapien
taccacacaggcaggatctagctga

SEQ ID NO: 5061381 - DNA, 25 bp, Homo sapien
tgtgggcctcctaaatcagagtgct

SEQ ID NO: 5061382 - DNA, 25 bp, Homo sapien
ttgcaatgctgttactgggtaaatc

SEQ ID NO: 5061383 - DNA, 25 bp, Homo sapien
ttactgggtaaatcacattgccggg

SEQ ID NO: 5061384 - DNA, 25 bp, Homo sapien
ccagctttgagttgcaatgctgtta

SEQ ID NO: 5061385 - DNA, 25 bp, Homo sapien
cacattgccggggtcaaatttctca

SEQ ID NO: 5061386 - DNA, 25 bp, Homo sapien
gcccaggcatgggtgtatctgtcta

SEQ ID NO: 5061387 - DNA, 25 bp, Homo sapien
gaacatcactgcctgatgcaagctt

SEQ ID NO: 5061388 - DNA, 25 bp, Homo sapien
tgtgcctgcaggtctatgaaaggct

SEQ ID NO: 5061389 - DNA, 25 bp, Homo sapien
ttcataaagctgctacactgaagag

SEQ ID NO: 5061390 - DNA, 25 bp, Homo sapien
tcagataatccacttcttcagccat

SEQ ID NO: 5061391 - DNA, 25 bp, Homo sapien
aatcagataatccacttcttcagcc

SEQ ID NO: 5061392 - DNA, 25 bp, Homo sapien
caatcagataatccacttcttcagc

SEQ ID NO: 5061393 - DNA, 25 bp, Homo sapien
atcagataatccacttcttcagcca

SEQ ID NO: 5061394 - DNA, 25 bp, Homo sapien
tgggctgcaggtattttgccagttc

SEQ ID NO: 5061395 - DNA, 25 bp, Homo sapien
ttgggctgcaggtattttgccagtt

SEQ ID NO: 5061396 - DNA, 25 bp, Homo sapien
acacaattatagagcccgtgcaaac

SEQ ID NO: 5061397 - DNA, 25 bp, Homo sapien
gcctgatgctagctcatctagagtc

SEQ ID NO: 5061398 - DNA, 25 bp, Homo sapien
tcctgcatgggcctgcagataacac

SEQ ID NO: 5061399 - DNA, 25 bp, Homo sapien
ctgatgctagctcatctagagtcct

SEQ ID NO: 5061400 - DNA, 25 bp, Homo sapien
ctgtgggactgctagatggcctata

SEQ ID NO: 5061401 - DNA, 25 bp, Homo sapien
ttccaacagccattcgcacagcatt

SEQ ID NO: 5061402 - DNA, 25 bp, Homo sapien
ctatatgaaacacactcatccctgc

SEQ ID NO: 5061403 - DNA, 25 bp, Homo sapien
taattcaacagggacatcctcttcc

SEQ ID NO: 5061404 - DNA, 25 bp, Homo sapien
cattgctattctccgaatatggtgg

SEQ ID NO: 5061405 - DNA, 25 bp, Homo sapien
ccttgttctggactcactagttggt

SEQ ID NO: 5061406 - DNA, 25 bp, Homo sapien
gtagtcgagtccacttaaataagaa

SEQ ID NO: 5061407 - DNA, 25 bp, Homo sapien
tctagacttgaatccaacttcacat

SEQ ID NO: 5061408 - DNA, 25 bp, Homo sapien
tatattgtcaggaataaacagtccc

SEQ ID NO: 5061409 - DNA, 25 bp, Homo sapien
tctctatattgtcaggaataaacag

SEQ ID NO: 5061410 - DNA, 25 bp, Homo sapien
cgctgaagtcctttcttggcactgg

SEQ ID NO: 5061411 - DNA, 25 bp, Homo sapien
cttttgacgctgaagtcctttcttg

SEQ ID NO: 5061412 - DNA, 25 bp, Homo sapien
ttttgacttcaccatgactttgaag

SEQ ID NO: 5061413 - DNA, 25 bp, Homo sapien
tttttcccggccttgatcacccaca

SEQ ID NO: 5061414 - DNA, 25 bp, Homo sapien
tgatcacccacatctctgaagataa

SEQ ID NO: 5061415 - DNA, 25 bp, Homo sapien
gaagataaatccttgcacctggaaa

SEQ ID NO: 5061416 - DNA, 25 bp, Homo sapien
gccagggagagcagatcccgggtct

SEQ ID NO: 5061417 - DNA, 25 bp, Homo sapien
cagggagagcagatcccgggtctca

SEQ ID NO: 5061418 - DNA, 25 bp, Homo sapien
gggagagcagatcccgggtctcatt

SEQ ID NO: 5061419 - DNA, 25 bp, Homo sapien
ttgccagggagagcagatcccgggt

SEQ ID NO: 5061420 - DNA, 25 bp, Homo sapien
aggaagatggtgacatgtagagatg

SEQ ID NO: 5061421 - DNA, 25 bp, Homo sapien
tgacatgtagagatggtatggcagc

SEQ ID NO: 5061422 - DNA, 25 bp, Homo sapien
tggtgacatgtagagatggtatggc

SEQ ID NO: 5061423 - DNA, 25 bp, Homo sapien
acatgtagagatggtatggcagcag

SEQ ID NO: 5061424 - DNA, 25 bp, Homo sapien
tgtgacgaacttggatcccatcaag

SEQ ID NO: 5061425 - DNA, 25 bp, Homo sapien
ccagcagcccatcaagagtgtgacg

SEQ ID NO: 5061426 - DNA, 25 bp, Homo sapien
ccatcaagtctgacatccagattgg

SEQ ID NO: 5061427 - DNA, 25 bp, Homo sapien
gtctgacatccagattggaagggtt

SEQ ID NO: 5061428 - DNA, 25 bp, Homo sapien
tcttgaacagagttgccaaacagct

SEQ ID NO: 5061429 - DNA, 25 bp, Homo sapien
cattgtacgcccactgaagtctggg

SEQ ID NO: 5061430 - DNA, 25 bp, Homo sapien
tcctggaccttaagctgtcttgaac

SEQ ID NO: 5061431 - DNA, 25 bp, Homo sapien
gattgccagtgcattcgctgttccc

SEQ ID NO: 5061432 - DNA, 25 bp, Homo sapien
gctcctgtctgtaaagccagcatct

SEQ ID NO: 5061433 - DNA, 25 bp, Homo sapien
cctgtgtcatccatgggttagagct

SEQ ID NO: 5061434 - DNA, 25 bp, Homo sapien
aacataagcgagctttcccagtggc

SEQ ID NO: 5061435 - DNA, 25 bp, Homo sapien
ggttagagctatagctacccagctg

SEQ ID NO: 5061436 - DNA, 25 bp, Homo sapien
cagacttaaaactcttgccaggaac

SEQ ID NO: 5061437 - DNA, 25 bp, Homo sapien
taaatatagacttatacttctggct

SEQ ID NO: 5061438 - DNA, 25 bp, Homo sapien
tctgatgactcagtgtagtatccaa

SEQ ID NO: 5061439 - DNA, 25 bp, Homo sapien
tatgatgtagtagtttgtggcagac

SEQ ID NO: 5061440 - DNA, 25 bp, Homo sapien
aacgcttgccgctttccagtaattg

SEQ ID NO: 5061441 - DNA, 25 bp, Homo sapien
tttccagtaattgtgtctttccagg

SEQ ID NO: 5061442 - DNA, 25 bp, Homo sapien
aatttctacaggaaaacgcttgccg

SEQ ID NO: 5061443 - DNA, 25 bp, Homo sapien
tctacaggaaaacgcttgccgcttt

SEQ ID NO: 5061444 - DNA, 25 bp, Homo sapien
gtccaagaccaaggcgttggcagta

SEQ ID NO: 5061445 - DNA, 25 bp, Homo sapien
tcagcttgaatatggccaccttctc

SEQ ID NO: 5061446 - DNA, 25 bp, Homo sapien
tctgtgaacgacctctctggtatct

SEQ ID NO: 5061447 - DNA, 25 bp, Homo sapien
ggtctttcctctgtgaacgacctct

SEQ ID NO: 5061448 - DNA, 25 bp, Homo sapien
atccaaaaggaatagaatgtgtgtt

SEQ ID NO: 5061449 - DNA, 25 bp, Homo sapien
tgtgtttggtcaatggaattggcaa

SEQ ID NO: 5061450 - DNA, 25 bp, Homo sapien
aatgtgtgtttggtcaatggaattg

SEQ ID NO: 5061451 - DNA, 25 bp, Homo sapien
aatccaaaaggaatagaatgtgtgt

SEQ ID NO: 5061452 - DNA, 25 bp, Homo sapien
cttgcccactttagcgaagatcaga

SEQ ID NO: 5061453 - DNA, 25 bp, Homo sapien
cactttagcgaagatcagattctca

SEQ ID NO: 5061454 - DNA, 25 bp, Homo sapien
gatcagattctcatgagaatcaggg

SEQ ID NO: 5061455 - DNA, 25 bp, Homo sapien
gcgaagatcagattctcatgagaat

SEQ ID NO: 5061456 - DNA, 25 bp, Homo sapien
gcacatctgagaggctctaaactca

SEQ ID NO: 5061457 - DNA, 25 bp, Homo sapien
ggcagggcacatctgagaggctcta

SEQ ID NO: 5061458 - DNA, 25 bp, Homo sapien
gggcacatctgagaggctctaaact

SEQ ID NO: 5061459 - DNA, 25 bp, Homo sapien
acatctgagaggctctaaactcagc

SEQ ID NO: 5061460 - DNA, 25 bp, Homo sapien
ttggatgccctctcacaatcccttt

SEQ ID NO: 5061461 - DNA, 25 bp, Homo sapien
cttcaagaacataagaaatgtttgg

SEQ ID NO: 5061462 - DNA, 25 bp, Homo sapien
tgtttggatgccctctcacaatccc

SEQ ID NO: 5061463 - DNA, 25 bp, Homo sapien
gaaatgtttggatgccctctcacaa

SEQ ID NO: 5061464 - DNA, 25 bp, Homo sapien
tgtccacggtccatcaaggtctcag

SEQ ID NO: 5061465 - DNA, 25 bp, Homo sapien
ggtgtccacggtccatcaaggtctc

SEQ ID NO: 5061466 - DNA, 25 bp, Homo sapien
gtccacggtccatcaaggtctcagg

SEQ ID NO: 5061467 - DNA, 25 bp, Homo sapien
gtgtccacggtccatcaaggtctca

SEQ ID NO: 5061468 - DNA, 25 bp, Homo sapien
tcagtgtggccctgatctttgccat

SEQ ID NO: 5061469 - DNA, 25 bp, Homo sapien
cagtgtggccctgatctttgccatg

SEQ ID NO: 5061470 - DNA, 25 bp, Homo sapien
agtgtggccctgatctttgccatgg

SEQ ID NO: 5061471 - DNA, 25 bp, Homo sapien
tctgtataaccaggacattgggtga

SEQ ID NO: 5061472 - DNA, 25 bp, Homo sapien
ggtttatcctttctagaaacatcta

SEQ ID NO: 5061473 - DNA, 25 bp, Homo sapien
ccttggaattaaatatgttaagcat

SEQ ID NO: 5061474 - DNA, 25 bp, Homo sapien
ttaaatatgttaagcatctggttta

SEQ ID NO: 5061475 - DNA, 25 bp, Homo sapien
gctcattgattacaataatttctaa

SEQ ID NO: 5061476 - DNA, 25 bp, Homo sapien
gatacctggccattgctaaatgaaa

SEQ ID NO: 5061477 - DNA, 25 bp, Homo sapien
tatctatttggccatgatacctggc

SEQ ID NO: 5061478 - DNA, 25 bp, Homo sapien
aatacctttgcttggccattctgag

SEQ ID NO: 5061479 - DNA, 25 bp, Homo sapien
gagtcactgttgcatcagacatggc

SEQ ID NO: 5061480 - DNA, 25 bp, Homo sapien
agtgacaacgcttccaacccttctc

SEQ ID NO: 5061481 - DNA, 25 bp, Homo sapien
gtatttagcctgatattcaacaccc

SEQ ID NO: 5061482 - DNA, 25 bp, Homo sapien
caggctcttcgctctgcagtgacaa

SEQ ID NO: 5061483 - DNA, 25 bp, Homo sapien
aagtggaggaatgctcgttgctttc

SEQ ID NO: 5061484 - DNA, 25 bp, Homo sapien
gacttgactaactcatgaaaaatag

SEQ ID NO: 5061485 - DNA, 25 bp, Homo sapien
gatgatgatccggtctaaggtaaca

SEQ ID NO: 5061486 - DNA, 25 bp, Homo sapien
aagcactgagtgtctcctctgcaat

SEQ ID NO: 5061487 - DNA, 25 bp, Homo sapien
aaaaataggggtaatagaagcactg

SEQ ID NO: 5061488 - DNA, 25 bp, Homo sapien
cagagacagtcagttggactgcaga

SEQ ID NO: 5061489 - DNA, 25 bp, Homo sapien
cacaattctgatgttctcatgtttc

SEQ ID NO: 5061490 - DNA, 25 bp, Homo sapien
ggcccaggggcacaattctgatgtt

SEQ ID NO: 5061491 - DNA, 25 bp, Homo sapien
tgcagaatcaagggactggcccagg

SEQ ID NO: 5061492 - DNA, 25 bp, Homo sapien
tcccaagcaggttgcttaattcctt

SEQ ID NO: 5061493 - DNA, 25 bp, Homo sapien
cagctttgagggaccaactttcatg

SEQ ID NO: 5061494 - DNA, 25 bp, Homo sapien
ccacaacgaagagagccagctttga

SEQ ID NO: 5061495 - DNA, 25 bp, Homo sapien
tttgctgggccacaacgaagagagc

SEQ ID NO: 5061496 - DNA, 25 bp, Homo sapien
gagaggaagccctgtgctcgtcttg

SEQ ID NO: 5061497 - DNA, 25 bp, Homo sapien
tgaagagaggaagccctgtgctcgt

SEQ ID NO: 5061498 - DNA, 25 bp, Homo sapien
gaagccctgtgctcgtcttgggcat

SEQ ID NO: 5061499 - DNA, 25 bp, Homo sapien
ctgaagagaggaagccctgtgctcg

SEQ ID NO: 5061500 - DNA, 25 bp, Homo sapien
gaaagcaaatctaagacccaaccaa

SEQ ID NO: 5061501 - DNA, 25 bp, Homo sapien
gagggggacaagtattgtgcttaac

SEQ ID NO: 5061502 - DNA, 25 bp, Homo sapien
gcagagttgggcaagcaagtcctcc

SEQ ID NO: 5061503 - DNA, 25 bp, Homo sapien
gcagctgcaggaaagcaaatctaag

SEQ ID NO: 5061504 - DNA, 25 bp, Homo sapien
tccataagaagattagtcgagttcc

SEQ ID NO: 5061505 - DNA, 25 bp, Homo sapien
tccagagagtacaactatgtgaagt

SEQ ID NO: 5061506 - DNA, 25 bp, Homo sapien
gatgtcccagctgcctggatatgca

SEQ ID NO: 5061507 - DNA, 25 bp, Homo sapien
tgcatttggagctcttcttgtgctg

SEQ ID NO: 5061508 - DNA, 25 bp, Homo sapien
ttttggatggcaaccaatgctgact

SEQ ID NO: 5061509 - DNA, 25 bp, Homo sapien
tttggatggcaaccaatgctgactg

SEQ ID NO: 5061510 - DNA, 25 bp, Homo sapien
attttggatggcaaccaatgctgac

SEQ ID NO: 5061511 - DNA, 25 bp, Homo sapien
tcttgagtcccagacgctctctgct

SEQ ID NO: 5061512 - DNA, 25 bp, Homo sapien
caacgtagcctggatggacactgtc

SEQ ID NO: 5061513 - DNA, 25 bp, Homo sapien
aacagatctccggtggcagcttcgg

SEQ ID NO: 5061514 - DNA, 25 bp, Homo sapien
tttggcaactgtacacgtcctcggt

SEQ ID NO: 5061515 - DNA, 25 bp, Homo sapien
tcctggagctatggctgtctctggg

SEQ ID NO: 5061516 - DNA, 25 bp, Homo sapien
ctggagctatggctgtctctgggtt

SEQ ID NO: 5061517 - DNA, 25 bp, Homo sapien
cctggagctatggctgtctctgggt

SEQ ID NO: 5061518 - DNA, 25 bp, Homo sapien
ggcccgtgccacatttcatcagcgt

SEQ ID NO: 5061519 - DNA, 25 bp, Homo sapien
taagtttgcaaaccttggcccatca

SEQ ID NO: 5061520 - DNA, 25 bp, Homo sapien
tagattgccagtgctatttgggatc

SEQ ID NO: 5061521 - DNA, 25 bp, Homo sapien
tccaaagcctgtggccgcatgtggc

SEQ ID NO: 5061522 - DNA, 25 bp, Homo sapien
tgtggcccttacaataacacatgat

SEQ ID NO: 5061523 - DNA, 25 bp, Homo sapien
tctcccaggtatttaggcattgaat

SEQ ID NO: 5061524 - DNA, 25 bp, Homo sapien
cccattaggagagtgattgacactg

SEQ ID NO: 5061525 - DNA, 25 bp, Homo sapien
taaaacctagtgtctgaatgcacct

SEQ ID NO: 5061526 - DNA, 25 bp, Homo sapien
ttgacggttgagtctatggcaagac

SEQ ID NO: 5061527 - DNA, 25 bp, Homo sapien
tgccctctgatatggttgattggtc

SEQ ID NO: 5061528 - DNA, 25 bp, Homo sapien
gagtggacaatggatgaccccaggc

SEQ ID NO: 5061529 - DNA, 25 bp, Homo sapien
gaccagtgtactctcttgacggttg

SEQ ID NO: 5061530 - DNA, 25 bp, Homo sapien
cagcatgtcagtgtgggatggacct

SEQ ID NO: 5061531 - DNA, 25 bp, Homo sapien
gcttagcggcggtgcttccttttcc

SEQ ID NO: 5061532 - DNA, 25 bp, Homo sapien
cacccaattgccctgttgggagagt

SEQ ID NO: 5061533 - DNA, 25 bp, Homo sapien
tcctgtttttggagcctgggaacat

SEQ ID NO: 5061534 - DNA, 25 bp, Homo sapien
gacaccattgttccatttaatatat

SEQ ID NO: 5061535 - DNA, 25 bp, Homo sapien
gcaggtacataagcatgttcatatc

SEQ ID NO: 5061536 - DNA, 25 bp, Homo sapien
ttttcaacttgcaggtacataagca

SEQ ID NO: 5061537 - DNA, 25 bp, Homo sapien
aagagggatgttttagagtgatgtc

SEQ ID NO: 5061538 - DNA, 25 bp, Homo sapien
gctctcttggaggataactgggctt

SEQ ID NO: 5061539 - DNA, 25 bp, Homo sapien
gggaccaagattgcatgtgcacccc

SEQ ID NO: 5061540 - DNA, 25 bp, Homo sapien
agactctttgggaaggtacatccag

SEQ ID NO: 5061541 - DNA, 25 bp, Homo sapien
tctgattagaacagcccgtaggttc

SEQ ID NO: 5061542 - DNA, 25 bp, Homo sapien
cattcatcatgagaaagatcaaggc

SEQ ID NO: 5061543 - DNA, 25 bp, Homo sapien
ccatccacattcatcatgagaaaga

SEQ ID NO: 5061544 - DNA, 25 bp, Homo sapien
agatgggttgagcagatgcaaagcc

SEQ ID NO: 5061545 - DNA, 25 bp, Homo sapien
tggagatgggttgagcagatgcaaa

SEQ ID NO: 5061546 - DNA, 25 bp, Homo sapien
tgggagaagaaacgagggctggcag

SEQ ID NO: 5061547 - DNA, 25 bp, Homo sapien
ctgggagaagaaacgagggctggca

SEQ ID NO: 5061548 - DNA, 25 bp, Homo sapien
gagaagaaacgagggctggcaggcc

SEQ ID NO: 5061549 - DNA, 25 bp, Homo sapien
agaagaaacgagggctggcaggccc

SEQ ID NO: 5061550 - DNA, 25 bp, Homo sapien
gctgtgagcagctccttcaatttac

SEQ ID NO: 5061551 - DNA, 25 bp, Homo sapien
ctgtgagcagctccttcaatttacc

SEQ ID NO: 5061552 - DNA, 25 bp, Homo sapien
tgtgagcagctccttcaatttaccc

SEQ ID NO: 5061553 - DNA, 25 bp, Homo sapien
ctaccagcaacacggatggtgtcaa

SEQ ID NO: 5061554 - DNA, 25 bp, Homo sapien
gtctttgtgggaattgtagcggtat

SEQ ID NO: 5061555 - DNA, 25 bp, Homo sapien
tgtgggaattgtagcggtatcctgc

SEQ ID NO: 5061556 - DNA, 25 bp, Homo sapien
ctttgtgggaattgtagcggtatcc

SEQ ID NO: 5061557 - DNA, 25 bp, Homo sapien
ggaattgtagcggtatcctgcctca

SEQ ID NO: 5061558 - DNA, 25 bp, Homo sapien
ctgtgtaaatgcctcaagcttcagg

SEQ ID NO: 5061559 - DNA, 25 bp, Homo sapien
ggctcccatctctagcatagactca

SEQ ID NO: 5061560 - DNA, 25 bp, Homo sapien
tcttcacactggttttgtcctttca

SEQ ID NO: 5061561 - DNA, 25 bp, Homo sapien
catagactcaatctcttcacactgg

SEQ ID NO: 5061562 - DNA, 25 bp, Homo sapien
tgtgactcaaaatcatggaagacct

SEQ ID NO: 5061563 - DNA, 25 bp, Homo sapien
tgagagatgttggtgtaggcttcct

SEQ ID NO: 5061564 - DNA, 25 bp, Homo sapien
gacctcatctccacttctggtgctg

SEQ ID NO: 5061565 - DNA, 25 bp, Homo sapien
gatggagtgaagaacgaatgcttcc

SEQ ID NO: 5061566 - DNA, 25 bp, Homo sapien
ggagggaaagacgacctctgtgtct

SEQ ID NO: 5061567 - DNA, 25 bp, Homo sapien
agttcaggagggaaagacgacctct

SEQ ID NO: 5061568 - DNA, 25 bp, Homo sapien
ttcaggagggaaagacgacctctgt

SEQ ID NO: 5061569 - DNA, 25 bp, Homo sapien
caggagggaaagacgacctctgtgt

SEQ ID NO: 5061570 - DNA, 25 bp, Homo sapien
tctctggaggttaaaacactccgat

SEQ ID NO: 5061571 - DNA, 25 bp, Homo sapien
taatagtgaccattgtgaggacatc

SEQ ID NO: 5061572 - DNA, 25 bp, Homo sapien
caatcttcgactgacatctgtgaaa

SEQ ID NO: 5061573 - DNA, 25 bp, Homo sapien
tcagaaccacctgatggtagctcag

SEQ ID NO: 5061574 - DNA, 25 bp, Homo sapien
tgtaggatgggtactgagatgtcac

SEQ ID NO: 5061575 - DNA, 25 bp, Homo sapien
tgggtactgagatgtcacatggcaa

SEQ ID NO: 5061576 - DNA, 25 bp, Homo sapien
tgtcacatggcaatagggtccgtgc

SEQ ID NO: 5061577 - DNA, 25 bp, Homo sapien
tactccactgactatgtaggatggg

SEQ ID NO: 5061578 - DNA, 25 bp, Homo sapien
tgacattggctaggatgccagtcag

SEQ ID NO: 5061579 - DNA, 25 bp, Homo sapien
ttctgacattggctaggatgccagt

SEQ ID NO: 5061580 - DNA, 25 bp, Homo sapien
tctgacattggctaggatgccagtc

SEQ ID NO: 5061581 - DNA, 25 bp, Homo sapien
ctttctgacattggctaggatgcca

SEQ ID NO: 5061582 - DNA, 25 bp, Homo sapien
gctggctcacaattttgcttattcc

SEQ ID NO: 5061583 - DNA, 25 bp, Homo sapien
tgttggggatgtaactcggaggact

SEQ ID NO: 5061584 - DNA, 25 bp, Homo sapien
ctgagctggctcacaattttgctta

SEQ ID NO: 5061585 - DNA, 25 bp, Homo sapien
ttgttccaggagtagcccacgagag

SEQ ID NO: 5061586 - DNA, 25 bp, Homo sapien
taaatatgctaactggtttcagctg

SEQ ID NO: 5061587 - DNA, 25 bp, Homo sapien
tcaccacaaattgttgatgtaacac

SEQ ID NO: 5061588 - DNA, 25 bp, Homo sapien
taacactcattctcggcagatactg

SEQ ID NO: 5061589 - DNA, 25 bp, Homo sapien
tcggcagatactgagtactaaatat

SEQ ID NO: 5061590 - DNA, 25 bp, Homo sapien
tactgcggggaacgtgcaaaaacta

SEQ ID NO: 5061591 - DNA, 25 bp, Homo sapien
ctagtgtccgtagtactgcggggaa

SEQ ID NO: 5061592 - DNA, 25 bp, Homo sapien
cagtgatgggccgagaaattccgac

SEQ ID NO: 5061593 - DNA, 25 bp, Homo sapien
caaaaactaaggcaggctccagtga

SEQ ID NO: 5061594 - DNA, 25 bp, Homo sapien
cttcaaattcccatggaaagtctct

SEQ ID NO: 5061595 - DNA, 25 bp, Homo sapien
ttcaaattcccatggaaagtctcta

SEQ ID NO: 5061596 - DNA, 25 bp, Homo sapien
tcaaattcccatggaaagtctctac

SEQ ID NO: 5061597 - DNA, 25 bp, Homo sapien
tccctgaccacgctgttactctgtg

SEQ ID NO: 5061598 - DNA, 25 bp, Homo sapien
ttctgtcaacattattccaaactaa

SEQ ID NO: 5061599 - DNA, 25 bp, Homo sapien
gctgtggatgtttctgtcaacatta

SEQ ID NO: 5061600 - DNA, 25 bp, Homo sapien
agacaccacgttcctctttgtggat

SEQ ID NO: 5061601 - DNA, 25 bp, Homo sapien
gcttgcgttctgtcttccacccagg

SEQ ID NO: 5061602 - DNA, 25 bp, Homo sapien
gcatttgtgcatatgcgcgcatgca

SEQ ID NO: 5061603 - DNA, 25 bp, Homo sapien
gaatgtagcctctctgcgagttagg

SEQ ID NO: 5061604 - DNA, 25 bp, Homo sapien
aaaggtctgcgagtgggtcatagtt

SEQ ID NO: 5061605 - DNA, 25 bp, Homo sapien
tagacttgttcagactatggcaggg

SEQ ID NO: 5061606 - DNA, 25 bp, Homo sapien
cccaggggcaggtgacatagacttg

SEQ ID NO: 5061607 - DNA, 25 bp, Homo sapien
tcagactatggcagggcctgacatc

SEQ ID NO: 5061608 - DNA, 25 bp, Homo sapien
ggcaggtgacatagacttgttcaga

SEQ ID NO: 5061609 - DNA, 25 bp, Homo sapien
acaatcatcttgtaactctgagcaa

SEQ ID NO: 5061610 - DNA, 25 bp, Homo sapien
gccctggccggtttgtttgccctga

SEQ ID NO: 5061611 - DNA, 25 bp, Homo sapien
gatctgttaactcgctgtcaccttc

SEQ ID NO: 5061612 - DNA, 25 bp, Homo sapien
tctctaggtctggtccaggcaccct

SEQ ID NO: 5061613 - DNA, 25 bp, Homo sapien
ggcccttggtccagaataatcgttg

SEQ ID NO: 5061614 - DNA, 25 bp, Homo sapien
tggcccctttcaggtgtgtagagga

SEQ ID NO: 5061615 - DNA, 25 bp, Homo sapien
catgaatggatcaggtggtcacctc

SEQ ID NO: 5061616 - DNA, 25 bp, Homo sapien
ctgttgatatagctgccccggtgga

SEQ ID NO: 5061617 - DNA, 25 bp, Homo sapien
ctctacccagtgaagggcattggaa

SEQ ID NO: 5061618 - DNA, 25 bp, Homo sapien
ctctccacttgggaatgccccggga

SEQ ID NO: 5061619 - DNA, 25 bp, Homo sapien
ctggaggaccgaggaagaaaacgca

SEQ ID NO: 5061620 - DNA, 25 bp, Homo sapien
ggaatgccccgggacaagaagatga

SEQ ID NO: 5061621 - DNA, 25 bp, Homo sapien
ctttcttcctgacggagggtgtaga

SEQ ID NO: 5061622 - DNA, 25 bp, Homo sapien
agttgttctgtgtgaggtgttgtta

SEQ ID NO: 5061623 - DNA, 25 bp, Homo sapien
tcactcttatggtcaactgggagtg

SEQ ID NO: 5061624 - DNA, 25 bp, Homo sapien
ggcagttgttctgtgtgaggtgttg

SEQ ID NO: 5061625 - DNA, 25 bp, Homo sapien
acaggcttgagtctgagtgaaggca

SEQ ID NO: 5061626 - DNA, 25 bp, Homo sapien
tgtcagctggttgagtccacagttg

SEQ ID NO: 5061627 - DNA, 25 bp, Homo sapien
gctgagccacaggtgggttgttact

SEQ ID NO: 5061628 - DNA, 25 bp, Homo sapien
ggtggttactgaagtgaagtgtaca

SEQ ID NO: 5061629 - DNA, 25 bp, Homo sapien
aaagggtgatgccttccatgttcac

SEQ ID NO: 5061630 - DNA, 25 bp, Homo sapien
ctggaataaatgtgcggcaggcctt

SEQ ID NO: 5061631 - DNA, 25 bp, Homo sapien
tgttactggaataaatgtgcggcag

SEQ ID NO: 5061632 - DNA, 25 bp, Homo sapien
tactggaataaatgtgcggcaggcc

SEQ ID NO: 5061633 - DNA, 25 bp, Homo sapien
tggaataaatgtgcggcaggccttg

SEQ ID NO: 5061634 - DNA, 25 bp, Homo sapien
cttttaaatgtataggggtccactg

SEQ ID NO: 5061635 - DNA, 25 bp, Homo sapien
tgggcgctgtctggaaacaggcttt

SEQ ID NO: 5061636 - DNA, 25 bp, Homo sapien
gggtccactgtcaacttaaggctgt

SEQ ID NO: 5061637 - DNA, 25 bp, Homo sapien
gattgtcgagggagtccactgggcg

SEQ ID NO: 5061638 - DNA, 25 bp, Homo sapien
tccttgtcgtcagctctcttgccag

SEQ ID NO: 5061639 - DNA, 25 bp, Homo sapien
tcaggcttggtaatgcactcttccc

SEQ ID NO: 5061640 - DNA, 25 bp, Homo sapien
tcccaggagcttggatctataatca

SEQ ID NO: 5061641 - DNA, 25 bp, Homo sapien
cccgatttggttatgtctgagcagc

SEQ ID NO: 5061642 - DNA, 25 bp, Homo sapien
gcatgggaggcggagtggatccaag

SEQ ID NO: 5061643 - DNA, 25 bp, Homo sapien
gcggagtggatccaaggagctcttg

SEQ ID NO: 5061644 - DNA, 25 bp, Homo sapien
ccttggatggcaataaatagagcca

SEQ ID NO: 5061645 - DNA, 25 bp, Homo sapien
ccatttagctctaacatgctgagcc

SEQ ID NO: 5061646 - DNA, 25 bp, Homo sapien
tgctcctggtgctcctgatgatctg

SEQ ID NO: 5061647 - DNA, 25 bp, Homo sapien
gacccttggtcaattcctagagtga

SEQ ID NO: 5061648 - DNA, 25 bp, Homo sapien
cctagagtgatatggaacaaggaaa

SEQ ID NO: 5061649 - DNA, 25 bp, Homo sapien
gagatctagtttcccgcttctcttg

SEQ ID NO: 5061650 - DNA, 25 bp, Homo sapien
ttttcccaactcttgccagtgtcag

SEQ ID NO: 5061651 - DNA, 25 bp, Homo sapien
gggctacgacatgtgggcagactga

SEQ ID NO: 5061652 - DNA, 25 bp, Homo sapien
gactgaggatgtgtgccctttcaag

SEQ ID NO: 5061653 - DNA, 25 bp, Homo sapien
cagctggagccctatggctggtgga

SEQ ID NO: 5061654 - DNA, 25 bp, Homo sapien
ttcatcatggggtgggctacgacat

SEQ ID NO: 5061655 - DNA, 25 bp, Homo sapien
ctctccttaaccttccggagcactg

SEQ ID NO: 5061656 - DNA, 25 bp, Homo sapien
cttaaccttccggagcactgacttc

SEQ ID NO: 5061657 - DNA, 25 bp, Homo sapien
tccttaaccttccggagcactgact

SEQ ID NO: 5061658 - DNA, 25 bp, Homo sapien
ctggtctaaagggatctcctctctc

SEQ ID NO: 5061659 - DNA, 25 bp, Homo sapien
atctgacacctgggaaactgtgtgc

SEQ ID NO: 5061660 - DNA, 25 bp, Homo sapien
cagatctgacacctgggaaactgtg

SEQ ID NO: 5061661 - DNA, 25 bp, Homo sapien
caaacagatctgacacctgggaaac

SEQ ID NO: 5061662 - DNA, 25 bp, Homo sapien
ctgacacctgggaaactgtgtgcat

SEQ ID NO: 5061663 - DNA, 25 bp, Homo sapien
ttgtcacaaagatatctcttggacg

SEQ ID NO: 5061664 - DNA, 25 bp, Homo sapien
aaagatatctcttggacgttttgac

SEQ ID NO: 5061665 - DNA, 25 bp, Homo sapien
tcttggacgttttgacagggcagga

SEQ ID NO: 5061666 - DNA, 25 bp, Homo sapien
tatctcttggacgttttgacagggc

SEQ ID NO: 5061667 - DNA, 25 bp, Homo sapien
ggttcagagtactcattcaagttgg

SEQ ID NO: 5061668 - DNA, 25 bp, Homo sapien
ttcgctgagacccagatggcacatg

SEQ ID NO: 5061669 - DNA, 25 bp, Homo sapien
agctagggcactggatataatcctg

SEQ ID NO: 5061670 - DNA, 25 bp, Homo sapien
agccctgtccactggttcgctgaga

SEQ ID NO: 5061671 - DNA, 25 bp, Homo sapien
aggctggtcgcagtcattaactgga

SEQ ID NO: 5061672 - DNA, 25 bp, Homo sapien
tcatggaaagctgaactctgagacc

SEQ ID NO: 5061673 - DNA, 25 bp, Homo sapien
tttccatcaaacgagaggaccctgc

SEQ ID NO: 5061674 - DNA, 25 bp, Homo sapien
tcccctgcaataaggtagacttgca

SEQ ID NO: 5061675 - DNA, 25 bp, Homo sapien
gctctgcttcatgtttggtatcttc

SEQ ID NO: 5061676 - DNA, 25 bp, Homo sapien
gcagacacagacatgcgagtgaagc

SEQ ID NO: 5061677 - DNA, 25 bp, Homo sapien
atcttccggaaacacacacaacagg

SEQ ID NO: 5061678 - DNA, 25 bp, Homo sapien
acagacatgcgagtgaagctgtgtg

SEQ ID NO: 5061679 - DNA, 25 bp, Homo sapien
tagatggtgcttttgggacgtgaac

SEQ ID NO: 5061680 - DNA, 25 bp, Homo sapien
cgcagcctcccatcaaaatgaaggt

SEQ ID NO: 5061681 - DNA, 25 bp, Homo sapien
tacaaactgaggagacgcagcctcc

SEQ ID NO: 5061682 - DNA, 25 bp, Homo sapien
cagtagtgaagcttgcaaggtgagt

SEQ ID NO: 5061683 - DNA, 25 bp, Homo sapien
taaaaacgggatggttggagctatc

SEQ ID NO: 5061684 - DNA, 25 bp, Homo sapien
tgaggccaattgtgtcatccaaggc

SEQ ID NO: 5061685 - DNA, 25 bp, Homo sapien
aaagatttgctgactgggtgaggcc

SEQ ID NO: 5061686 - DNA, 25 bp, Homo sapien
ttctataaacatctcgacagcagtg

SEQ ID NO: 5061687 - DNA, 25 bp, Homo sapien
gacatttcacaagcagggcagttgg

SEQ ID NO: 5061688 - DNA, 25 bp, Homo sapien
ttttcggtttccagtgacacacgcc

SEQ ID NO: 5061689 - DNA, 25 bp, Homo sapien
gagacatgtttgttggctcgagccc

SEQ ID NO: 5061690 - DNA, 25 bp, Homo sapien
cagggaaccccaagcatgatactat

SEQ ID NO: 5061691 - DNA, 25 bp, Homo sapien
tgagctgcacccacacaacatcagc

SEQ ID NO: 5061692 - DNA, 25 bp, Homo sapien
atcagcctgtgggtgttctgcaggc

SEQ ID NO: 5061693 - DNA, 25 bp, Homo sapien
gcctgtgggtgttctgcaggcaccc

SEQ ID NO: 5061694 - DNA, 25 bp, Homo sapien
acccacacaacatcagcctgtgggt

SEQ ID NO: 5061695 - DNA, 25 bp, Homo sapien
aaccttggaggtgggggcattgcca

SEQ ID NO: 5061696 - DNA, 25 bp, Homo sapien
accttggaggtgggggcattgccat

SEQ ID NO: 5061697 - DNA, 25 bp, Homo sapien
tgttctgctcagtgcaggtagcagg

SEQ ID NO: 5061698 - DNA, 25 bp, Homo sapien
gttctgctcagtgcaggtagcaggt

SEQ ID NO: 5061699 - DNA, 25 bp, Homo sapien
gtgttctgctcagtgcaggtagcag

SEQ ID NO: 5061700 - DNA, 25 bp, Homo sapien
tcctaaagccgccaccactggcata

SEQ ID NO: 5061701 - DNA, 25 bp, Homo sapien
tgtagctgtttgcaagctcctcaga

SEQ ID NO: 5061702 - DNA, 25 bp, Homo sapien
cactggcataaggttgccagccaca

SEQ ID NO: 5061703 - DNA, 25 bp, Homo sapien
cacatttgtagctgtttgcaagctc

SEQ ID NO: 5061704 - DNA, 25 bp, Homo sapien
ttgggaaacatccgtcctgcagggc

SEQ ID NO: 5061705 - DNA, 25 bp, Homo sapien
tttgggaaacatccgtcctgcaggg

SEQ ID NO: 5061706 - DNA, 25 bp, Homo sapien
ttttgggaaacatccgtcctgcagg

SEQ ID NO: 5061707 - DNA, 25 bp, Homo sapien
gtgctaattctgtagacaaaggcac

SEQ ID NO: 5061708 - DNA, 25 bp, Homo sapien
tgctaattctgtagacaaaggcact

SEQ ID NO: 5061709 - DNA, 25 bp, Homo sapien
gctaattctgtagacaaaggcacta

SEQ ID NO: 5061710 - DNA, 25 bp, Homo sapien
taattctgtagacaaaggcactaac

SEQ ID NO: 5061711 - DNA, 25 bp, Homo sapien
aggtgactgggcttaacagggacca

SEQ ID NO: 5061712 - DNA, 25 bp, Homo sapien
tatttactgcccctctggaaagcag

SEQ ID NO: 5061713 - DNA, 25 bp, Homo sapien
tcaggactagatggctggaaactac

SEQ ID NO: 5061714 - DNA, 25 bp, Homo sapien
gataccaaccccttctacgtgcagg

SEQ ID NO: 5061715 - DNA, 25 bp, Homo sapien
aggaatttttattgtagtgcagcat

SEQ ID NO: 5061716 - DNA, 25 bp, Homo sapien
agcctcagctctctggcacagcccc

SEQ ID NO: 5061717 - DNA, 25 bp, Homo sapien
cagcctcagctctctggcacagccc

SEQ ID NO: 5061718 - DNA, 25 bp, Homo sapien
cctcagctctctggcacagccccat

SEQ ID NO: 5061719 - DNA, 25 bp, Homo sapien
gcctcagctctctggcacagcccca

SEQ ID NO: 5061720 - DNA, 25 bp, Homo sapien
agggcctcgtttccagcttccaaca

SEQ ID NO: 5061721 - DNA, 25 bp, Homo sapien
tgagagctgttctgcccatggactt

SEQ ID NO: 5061722 - DNA, 25 bp, Homo sapien
tgcccatggacttgagggcctcgtt

SEQ ID NO: 5061723 - DNA, 25 bp, Homo sapien
caggaggttgatgagagctgttctg

SEQ ID NO: 5061724 - DNA, 25 bp, Homo sapien
atgcagctagagctggcccagcttt

SEQ ID NO: 5061725 - DNA, 25 bp, Homo sapien
ctgatggtgcccaatgcagctagag

SEQ ID NO: 5061726 - DNA, 25 bp, Homo sapien
gcccaatgcagctagagctggccca

SEQ ID NO: 5061727 - DNA, 25 bp, Homo sapien
tggtgcccaatgcagctagagctgg

SEQ ID NO: 5061728 - DNA, 25 bp, Homo sapien
tggccctgaaatgggagctcagtgg

SEQ ID NO: 5061729 - DNA, 25 bp, Homo sapien
agctcagtggcggacaatcggtgat

SEQ ID NO: 5061730 - DNA, 25 bp, Homo sapien
cggacaatcggtgatgtttatagtt

SEQ ID NO: 5061731 - DNA, 25 bp, Homo sapien
gtttatagttgatgtttgcgtcttc

SEQ ID NO: 5061732 - DNA, 25 bp, Homo sapien
gagagccctccaagttgtctctgga

SEQ ID NO: 5061733 - DNA, 25 bp, Homo sapien
ttcctaagtacagttggaatgtccc

SEQ ID NO: 5061734 - DNA, 25 bp, Homo sapien
aggagatgtcatagatttttgtctt

SEQ ID NO: 5061735 - DNA, 25 bp, Homo sapien
ttaagtagattacagcctgagagcc

SEQ ID NO: 5061736 - DNA, 25 bp, Homo sapien
gagctgagtgcagtttgcactctcc

SEQ ID NO: 5061737 - DNA, 25 bp, Homo sapien
catctttatcagtaaacatgcagga

SEQ ID NO: 5061738 - DNA, 25 bp, Homo sapien
gaagcatcaccgtgtctaggcacca

SEQ ID NO: 5061739 - DNA, 25 bp, Homo sapien
cagagccttgaccttttcctgtggc

SEQ ID NO: 5061740 - DNA, 25 bp, Homo sapien
tccaaagacagtgatctgactccaa

SEQ ID NO: 5061741 - DNA, 25 bp, Homo sapien
aagacagtgatctgactccaaacat

SEQ ID NO: 5061742 - DNA, 25 bp, Homo sapien
ttccccgttgcagcagtagagccag

SEQ ID NO: 5061743 - DNA, 25 bp, Homo sapien
caagccctttgcaggcgcctgactt

SEQ ID NO: 5061744 - DNA, 25 bp, Homo sapien
tctagcagaatctggtcggagtcat

SEQ ID NO: 5061745 - DNA, 25 bp, Homo sapien
ctggtcggagtcatgtgcttggtca

SEQ ID NO: 5061746 - DNA, 25 bp, Homo sapien
tcttcgctgggagtaaactagccac

SEQ ID NO: 5061747 - DNA, 25 bp, Homo sapien
ggcttagaggagaatccagacattc

SEQ ID NO: 5061748 - DNA, 25 bp, Homo sapien
tcgttcctgagactaattgccccat

SEQ ID NO: 5061749 - DNA, 25 bp, Homo sapien
ctctgcctttcgttcctgagactaa

SEQ ID NO: 5061750 - DNA, 25 bp, Homo sapien
tgcctttcgttcctgagactaattg

SEQ ID NO: 5061751 - DNA, 25 bp, Homo sapien
tttcgttcctgagactaattgcccc

SEQ ID NO: 5061752 - DNA, 25 bp, Homo sapien
ctgtgtaggattaggcgttttcatt

SEQ ID NO: 5061753 - DNA, 25 bp, Homo sapien
tgtgtaggattaggcgttttcattt

SEQ ID NO: 5061754 - DNA, 25 bp, Homo sapien
cagtccccagtggtatttcttggag

SEQ ID NO: 5061755 - DNA, 25 bp, Homo sapien
tgtacttagggtcagtgggtcactg

SEQ ID NO: 5061756 - DNA, 25 bp, Homo sapien
ccagtgacatctgcgtggcttgtga

SEQ ID NO: 5061757 - DNA, 25 bp, Homo sapien
ggagtccttaggctctctgggtaca

SEQ ID NO: 5061758 - DNA, 25 bp, Homo sapien
cagggcattgtagcctctgaagagg

SEQ ID NO: 5061759 - DNA, 25 bp, Homo sapien
aaggacagggcattgtagcctctga

SEQ ID NO: 5061760 - DNA, 25 bp, Homo sapien
cctctgaagaggctacggagggcct

SEQ ID NO: 5061761 - DNA, 25 bp, Homo sapien
tgtagcctctgaagaggctacggag

SEQ ID NO: 5061762 - DNA, 25 bp, Homo sapien
agcacatgttgtgtgcccagccttc

SEQ ID NO: 5061763 - DNA, 25 bp, Homo sapien
gcctctgaggatgggcttaatctca

SEQ ID NO: 5061764 - DNA, 25 bp, Homo sapien
gcccagccttctggcgggcctctga

SEQ ID NO: 5061765 - DNA, 25 bp, Homo sapien
cgggcctctgaggatgggcttaatc

SEQ ID NO: 5061766 - DNA, 25 bp, Homo sapien
aagtgcccacatgaatccattcagc

SEQ ID NO: 5061767 - DNA, 25 bp, Homo sapien
tcaagtgcccacatgaatccattca

SEQ ID NO: 5061768 - DNA, 25 bp, Homo sapien
gtgcccacatgaatccattcagcct

SEQ ID NO: 5061769 - DNA, 25 bp, Homo sapien
gcccacatgaatccattcagccttt

SEQ ID NO: 5061770 - DNA, 25 bp, Homo sapien
tgttccatgtaaagcagggattcct

SEQ ID NO: 5061771 - DNA, 25 bp, Homo sapien
caccaattgatgtacatgttagggc

SEQ ID NO: 5061772 - DNA, 25 bp, Homo sapien
gctaaaacctcaataccgcaaggcc

SEQ ID NO: 5061773 - DNA, 25 bp, Homo sapien
gcaggatggttaaacttggcaccaa

SEQ ID NO: 5061774 - DNA, 25 bp, Homo sapien
gccccaagggttccagactgtagaa

SEQ ID NO: 5061775 - DNA, 25 bp, Homo sapien
ctgccccaagggttccagactgtag

SEQ ID NO: 5061776 - DNA, 25 bp, Homo sapien
tgccccaagggttccagactgtaga

SEQ ID NO: 5061777 - DNA, 25 bp, Homo sapien
gctgccccaagggttccagactgta

SEQ ID NO: 5061778 - DNA, 25 bp, Homo sapien
tcagctgaaccaaagctgtatttca

SEQ ID NO: 5061779 - DNA, 25 bp, Homo sapien
tctggcttgtgggtctgtccctttg

SEQ ID NO: 5061780 - DNA, 25 bp, Homo sapien
ttatttctggcttgtgggtctgtcc

SEQ ID NO: 5061781 - DNA, 25 bp, Homo sapien
gaaggcaaaattgctgtttccctcc

SEQ ID NO: 5061782 - DNA, 25 bp, Homo sapien
gagtgcttgaaatcagtgtgggtcc

SEQ ID NO: 5061783 - DNA, 25 bp, Homo sapien
cggcatctcctgtgacctcttttgc

SEQ ID NO: 5061784 - DNA, 25 bp, Homo sapien
cccacattctgagtgcttgaaatca

SEQ ID NO: 5061785 - DNA, 25 bp, Homo sapien
gcatctcctgtgacctcttttgctt

SEQ ID NO: 5061786 - DNA, 25 bp, Homo sapien
tccggtttcgtgtttgtctcttcca

SEQ ID NO: 5061787 - DNA, 25 bp, Homo sapien
ggtttcgtgtttgtctcttccacat

SEQ ID NO: 5061788 - DNA, 25 bp, Homo sapien
ctctccttagactccggtttcgtgt

SEQ ID NO: 5061789 - DNA, 25 bp, Homo sapien
tagactccggtttcgtgtttgtctc

SEQ ID NO: 5061790 - DNA, 25 bp, Homo sapien
tcttcccttgaacttcctttctgac

SEQ ID NO: 5061791 - DNA, 25 bp, Homo sapien
gagtgggggccctagaagatgaacc

SEQ ID NO: 5061792 - DNA, 25 bp, Homo sapien
ctactagatttacccagaggctgtg

SEQ ID NO: 5061793 - DNA, 25 bp, Homo sapien
ctcccctactagatttacccagagg

SEQ ID NO: 5061794 - DNA, 25 bp, Homo sapien
aagatgaacccccttgctgccaggc

SEQ ID NO: 5061795 - DNA, 25 bp, Homo sapien
tattctcattgtctgggacagtttc

SEQ ID NO: 5061796 - DNA, 25 bp, Homo sapien
tcattgtctgggacagtttcttgag

SEQ ID NO: 5061797 - DNA, 25 bp, Homo sapien
tgttagttattctcattgtctggga

SEQ ID NO: 5061798 - DNA, 25 bp, Homo sapien
ttctcattgtctgggacagtttctt

SEQ ID NO: 5061799 - DNA, 25 bp, Homo sapien
gactccaccagaatgggagatagga

SEQ ID NO: 5061800 - DNA, 25 bp, Homo sapien
ggactccaccagaatgggagatagg

SEQ ID NO: 5061801 - DNA, 25 bp, Homo sapien
tgaattcattcttagtggagctgtg

SEQ ID NO: 5061802 - DNA, 25 bp, Homo sapien
tcattcttagtggagctgtgtctct

SEQ ID NO: 5061803 - DNA, 25 bp, Homo sapien
cttgtgatgtcacccttgcagatgt

SEQ ID NO: 5061804 - DNA, 25 bp, Homo sapien
gcttgtgatgtcacccttgcagatg

SEQ ID NO: 5061805 - DNA, 25 bp, Homo sapien
ctaggcctggcccctgcatctaatc

SEQ ID NO: 5061806 - DNA, 25 bp, Homo sapien
ctggcccctgcatctaatcacagct

SEQ ID NO: 5061807 - DNA, 25 bp, Homo sapien
ccctgcatctaatcacagcttcatc

SEQ ID NO: 5061808 - DNA, 25 bp, Homo sapien
ctgcatctaatcacagcttcatcac

SEQ ID NO: 5061809 - DNA, 25 bp, Homo sapien
aagtccattgcgcagttgagggcat

SEQ ID NO: 5061810 - DNA, 25 bp, Homo sapien
cattgcgcagttgagggcatcattg

SEQ ID NO: 5061811 - DNA, 25 bp, Homo sapien
tcctgaagtccattgcgcagttgag

SEQ ID NO: 5061812 - DNA, 25 bp, Homo sapien
tagtcctgaagtccattgcgcagtt

SEQ ID NO: 5061813 - DNA, 25 bp, Homo sapien
tgtggaagagtgtgggacgcaaagt

SEQ ID NO: 5061814 - DNA, 25 bp, Homo sapien
ggcaggtcaggtgtggaagagtgtg

SEQ ID NO: 5061815 - DNA, 25 bp, Homo sapien
cgcaaagtgaaggtgccttggtcct

SEQ ID NO: 5061816 - DNA, 25 bp, Homo sapien
ttgggccatggtcataaccaggttc

SEQ ID NO: 5061817 - DNA, 25 bp, Homo sapien
cgtcattgcttgcaaggcgtgtgca

SEQ ID NO: 5061818 - DNA, 25 bp, Homo sapien
gcgtcattgcttgcaaggcgtgtgc

SEQ ID NO: 5061819 - DNA, 25 bp, Homo sapien
ggcgtcattgcttgcaaggcgtgtg

SEQ ID NO: 5061820 - DNA, 25 bp, Homo sapien
tgctggaactggaagtcagactcat

SEQ ID NO: 5061821 - DNA, 25 bp, Homo sapien
ctcgtatgctggaactggaagtcag

SEQ ID NO: 5061822 - DNA, 25 bp, Homo sapien
cgtatgctggaactggaagtcagac

SEQ ID NO: 5061823 - DNA, 25 bp, Homo sapien
tatgctggaactggaagtcagactc

SEQ ID NO: 5061824 - DNA, 25 bp, Homo sapien
gctctcccagcagcaatagtaaatg

SEQ ID NO: 5061825 - DNA, 25 bp, Homo sapien
gaaggttcatcatagctttattctg

SEQ ID NO: 5061826 - DNA, 25 bp, Homo sapien
aaggttcatcatagctttattctga

SEQ ID NO: 5061827 - DNA, 25 bp, Homo sapien
atagtaaatgctgtgatccattcaa

SEQ ID NO: 5061828 - DNA, 25 bp, Homo sapien
tttctcgatgatcagaggtcccacg

SEQ ID NO: 5061829 - DNA, 25 bp, Homo sapien
cgatgatcagaggtcccacgttgtc

SEQ ID NO: 5061830 - DNA, 25 bp, Homo sapien
cgttgtctccagtctgttcgttgtg

SEQ ID NO: 5061831 - DNA, 25 bp, Homo sapien
atcacagaatgggaactttttatac

SEQ ID NO: 5061832 - DNA, 25 bp, Homo sapien
agcatcccttaaagggctctgtgca

SEQ ID NO: 5061833 - DNA, 25 bp, Homo sapien
tgaggatgtcgggtcatcagtcatc

SEQ ID NO: 5061834 - DNA, 25 bp, Homo sapien
ctgatccaggtgactccgtttagga

SEQ ID NO: 5061835 - DNA, 25 bp, Homo sapien
tctatgttcaattccacaggtgggc

SEQ ID NO: 5061836 - DNA, 25 bp, Homo sapien
gcagtgaagcagtagtagggccttg

SEQ ID NO: 5061837 - DNA, 25 bp, Homo sapien
ggctgaagaatatgttcggccttca

SEQ ID NO: 5061838 - DNA, 25 bp, Homo sapien
tggctgaagaatatgttcggccttc

SEQ ID NO: 5061839 - DNA, 25 bp, Homo sapien
tgatggctgaagaatatgttcggcc

SEQ ID NO: 5061840 - DNA, 25 bp, Homo sapien
tgaagaatatgttcggccttcagct

SEQ ID NO: 5061841 - DNA, 25 bp, Homo sapien
tttgttcacatttacgtggccaaag

SEQ ID NO: 5061842 - DNA, 25 bp, Homo sapien
ttttgttcacatttacgtggccaaa

SEQ ID NO: 5061843 - DNA, 25 bp, Homo sapien
gccaaagcccattgcagacaaaaca

SEQ ID NO: 5061844 - DNA, 25 bp, Homo sapien
ttacgtggccaaagcccattgcaga

SEQ ID NO: 5061845 - DNA, 25 bp, Homo sapien
ggttgtttgtgcaccatcacagtta

SEQ ID NO: 5061846 - DNA, 25 bp, Homo sapien
gattttggctcctaactgggcactg

SEQ ID NO: 5061847 - DNA, 25 bp, Homo sapien
aaaacatgcttttttggccgacagc

SEQ ID NO: 5061848 - DNA, 25 bp, Homo sapien
ggccgacagcatgttctatgatttc

SEQ ID NO: 5061849 - DNA, 25 bp, Homo sapien
ccctcctgcatgcagcgcagccagg

SEQ ID NO: 5061850 - DNA, 25 bp, Homo sapien
cacgtgggttgttgggcccctcctg

SEQ ID NO: 5061851 - DNA, 25 bp, Homo sapien
gtgaaggtgagagccgctgctgtcg

SEQ ID NO: 5061852 - DNA, 25 bp, Homo sapien
tggtgaaggtgagagccgctgctgt

SEQ ID NO: 5061853 - DNA, 25 bp, Homo sapien
gggtgcacggatcccttccttagag

SEQ ID NO: 5061854 - DNA, 25 bp, Homo sapien
ttgttaccattgtggccgctcccct

SEQ ID NO: 5061855 - DNA, 25 bp, Homo sapien
ggatcccttccttagaggtcaccca

SEQ ID NO: 5061856 - DNA, 25 bp, Homo sapien
agtgtgggtgcacggatcccttcct

SEQ ID NO: 5061857 - DNA, 25 bp, Homo sapien
ctctctgcaccagaatccgatccat

SEQ ID NO: 5061858 - DNA, 25 bp, Homo sapien
tgtccggacacttcttgttggtttc

SEQ ID NO: 5061859 - DNA, 25 bp, Homo sapien
tgctgaaatcctgctagcgtgtccg

SEQ ID NO: 5061860 - DNA, 25 bp, Homo sapien
ccccgcatcttgttagctctgtatg

SEQ ID NO: 5061861 - DNA, 25 bp, Homo sapien
ctttgcccatgcccccattctctcc

SEQ ID NO: 5061862 - DNA, 25 bp, Homo sapien
ttctctccagcttgtatgtgtatct

SEQ ID NO: 5061863 - DNA, 25 bp, Homo sapien
ctctccagcttgtatgtgtatctca

SEQ ID NO: 5061864 - DNA, 25 bp, Homo sapien
ccattctctccagcttgtatgtgta

SEQ ID NO: 5061865 - DNA, 25 bp, Homo sapien
cttgtggtggccctgaactgatggc

SEQ ID NO: 5061866 - DNA, 25 bp, Homo sapien
gtggtggccctgaactgatggctga

SEQ ID NO: 5061867 - DNA, 25 bp, Homo sapien
tgtggtggccctgaactgatggctg

SEQ ID NO: 5061868 - DNA, 25 bp, Homo sapien
ttgtggtggccctgaactgatggct

SEQ ID NO: 5061869 - DNA, 25 bp, Homo sapien
aagaagagcccgcgaccactgagca

SEQ ID NO: 5061870 - DNA, 25 bp, Homo sapien
aaagaagagcccgcgaccactgagc

SEQ ID NO: 5061871 - DNA, 25 bp, Homo sapien
ctaaagaagagcccgcgaccactga

SEQ ID NO: 5061872 - DNA, 25 bp, Homo sapien
taaagaagagcccgcgaccactgag

SEQ ID NO: 5061873 - DNA, 25 bp, Homo sapien
tctgtcgtgctgatatgcagacaaa

SEQ ID NO: 5061874 - DNA, 25 bp, Homo sapien
gctgttttctgtcgtgctgatatgc

SEQ ID NO: 5061875 - DNA, 25 bp, Homo sapien
gagatacggtgcagctgttttctgt

SEQ ID NO: 5061876 - DNA, 25 bp, Homo sapien
ctgcctgagatacggtgcagctgtt

SEQ ID NO: 5061877 - DNA, 25 bp, Homo sapien
caggagcagaaagaagagcctaggc

SEQ ID NO: 5061878 - DNA, 25 bp, Homo sapien
gagcagaaagaagagcctaggcagg

SEQ ID NO: 5061879 - DNA, 25 bp, Homo sapien
agcagaaagaagagcctaggcagga

SEQ ID NO: 5061880 - DNA, 25 bp, Homo sapien
aggagcagaaagaagagcctaggca

SEQ ID NO: 5061881 - DNA, 25 bp, Homo sapien
agggtcgcttgagcgccgaggccgg

SEQ ID NO: 5061882 - DNA, 25 bp, Homo sapien
gcttgagcgccgaggccggggccat

SEQ ID NO: 5061883 - DNA, 25 bp, Homo sapien
gagcgagagggtcgcttgagcgccg

SEQ ID NO: 5061884 - DNA, 25 bp, Homo sapien
gcgagagggtcgcttgagcgccgag

SEQ ID NO: 5061885 - DNA, 25 bp, Homo sapien
gaccacatgacaggccagtacagag

SEQ ID NO: 5061886 - DNA, 25 bp, Homo sapien
tggttgaccacatgacaggccagta

SEQ ID NO: 5061887 - DNA, 25 bp, Homo sapien
agacaacacgtagccacagcgtggg

SEQ ID NO: 5061888 - DNA, 25 bp, Homo sapien
gtttccccaggcgtcttcagacaac

SEQ ID NO: 5061889 - DNA, 25 bp, Homo sapien
gacaggacatggtatagttgtaggt

SEQ ID NO: 5061890 - DNA, 25 bp, Homo sapien
gaacccagacacctcgatgttcaca

SEQ ID NO: 5061891 - DNA, 25 bp, Homo sapien
ttcaccagcttccatgaacccagac

SEQ ID NO: 5061892 - DNA, 25 bp, Homo sapien
gaatcttcctcgaggcccatgtgaa

SEQ ID NO: 5061893 - DNA, 25 bp, Homo sapien
cataatcctccctgtgggatgctgg

SEQ ID NO: 5061894 - DNA, 25 bp, Homo sapien
gggatgctggaacatcacctgccat

SEQ ID NO: 5061895 - DNA, 25 bp, Homo sapien
catagtcctgcttggccatgtggct

SEQ ID NO: 5061896 - DNA, 25 bp, Homo sapien
gcctcattgctggagtagggctaat

SEQ ID NO: 5061897 - DNA, 25 bp, Homo sapien
gggcttcgttcacaccaaaggatca

SEQ ID NO: 5061898 - DNA, 25 bp, Homo sapien
gaaaggagttctgttttgaccacca

SEQ ID NO: 5061899 - DNA, 25 bp, Homo sapien
cacgtgtgctccaagaataggtgga

SEQ ID NO: 5061900 - DNA, 25 bp, Homo sapien
cttcaacggaagtggcagggaacat

SEQ ID NO: 5061901 - DNA, 25 bp, Homo sapien
gttgaagagtcttgtcccagggacc

SEQ ID NO: 5061902 - DNA, 25 bp, Homo sapien
tgaagagtcttgtcccagggaccgt

SEQ ID NO: 5061903 - DNA, 25 bp, Homo sapien
ttgaagagtcttgtcccagggaccg

SEQ ID NO: 5061904 - DNA, 25 bp, Homo sapien
aagagtcttgtcccagggaccgtgt

SEQ ID NO: 5061905 - DNA, 25 bp, Homo sapien
tctgaaataggatagggcacagttc

SEQ ID NO: 5061906 - DNA, 25 bp, Homo sapien
ggatagggcacagttctgatcccca

SEQ ID NO: 5061907 - DNA, 25 bp, Homo sapien
acttctgaaataggatagggcacag

SEQ ID NO: 5061908 - DNA, 25 bp, Homo sapien
aataggatagggcacagttctgatc

SEQ ID NO: 5061909 - DNA, 25 bp, Homo sapien
tggtttcccatctggacccacgctc

SEQ ID NO: 5061910 - DNA, 25 bp, Homo sapien
tataccatttctgcagggtaggaga

SEQ ID NO: 5061911 - DNA, 25 bp, Homo sapien
gaaactatataccatttctgcaggg

SEQ ID NO: 5061912 - DNA, 25 bp, Homo sapien
cacatggaggacatagtgggtttca

SEQ ID NO: 5061913 - DNA, 25 bp, Homo sapien
tggagctgtcaaacctataggcagg

SEQ ID NO: 5061914 - DNA, 25 bp, Homo sapien
tccactgcgtgtggctgagaaggcc

SEQ ID NO: 5061915 - DNA, 25 bp, Homo sapien
taagaggatgacacctagcagagct

SEQ ID NO: 5061916 - DNA, 25 bp, Homo sapien
tgtatgagcagccacccattctctg

SEQ ID NO: 5061917 - DNA, 25 bp, Homo sapien
cctccttagcccgtcaaccagctta

SEQ ID NO: 5061918 - DNA, 25 bp, Homo sapien
tcaaccagcttaagccctcggggga

SEQ ID NO: 5061919 - DNA, 25 bp, Homo sapien
ccaggacagtggctgcacaacttct

SEQ ID NO: 5061920 - DNA, 25 bp, Homo sapien
aggacagtggctgcacaacttctct

SEQ ID NO: 5061921 - DNA, 25 bp, Homo sapien
gccacagtcccactagggaaacaca

SEQ ID NO: 5061922 - DNA, 25 bp, Homo sapien
tgcaggtgcaatccttcagtgtggc

SEQ ID NO: 5061923 - DNA, 25 bp, Homo sapien
tcagtgtggccttgcacatgtcaat

SEQ ID NO: 5061924 - DNA, 25 bp, Homo sapien
ccatcatggaagagatggccacagt

SEQ ID NO: 5061925 - DNA, 25 bp, Homo sapien
tttaactgagtagtagcagagcagc

SEQ ID NO: 5061926 - DNA, 25 bp, Homo sapien
agaatgtcaagctgagggcacccag

SEQ ID NO: 5061927 - DNA, 25 bp, Homo sapien
gctactcttgcctggatctccagtg

SEQ ID NO: 5061928 - DNA, 25 bp, Homo sapien
ctggtggcaggacagctttcttctt

SEQ ID NO: 5061929 - DNA, 25 bp, Homo sapien
gagacagggtaaaagtctacctcta

SEQ ID NO: 5061930 - DNA, 25 bp, Homo sapien
tctacctctagcaggttattctctt

SEQ ID NO: 5061931 - DNA, 25 bp, Homo sapien
tgaggggtattggaccttctcaccc

SEQ ID NO: 5061932 - DNA, 25 bp, Homo sapien
tctgggtgccacaaacttcaccagc

SEQ ID NO: 5061933 - DNA, 25 bp, Homo sapien
cttaaggagccaaggatctggaagc

SEQ ID NO: 5061934 - DNA, 25 bp, Homo sapien
taaggagccaaggatctggaagctt

SEQ ID NO: 5061935 - DNA, 25 bp, Homo sapien
cagcatctcgagctcggtgtgggca

SEQ ID NO: 5061936 - DNA, 25 bp, Homo sapien
cttccacagcatctcgagctcggtg

SEQ ID NO: 5061937 - DNA, 25 bp, Homo sapien
tctctcctctggatagtactggcca

SEQ ID NO: 5061938 - DNA, 25 bp, Homo sapien
gattgggtcaggtggtacagataca

SEQ ID NO: 5061939 - DNA, 25 bp, Homo sapien
acaatgcccgtcagggtccaagtgt

SEQ ID NO: 5061940 - DNA, 25 bp, Homo sapien
tccaagtgtaggcaggattgggtca

SEQ ID NO: 5061941 - DNA, 25 bp, Homo sapien
tcatggaatgatgtacaggtcatct

SEQ ID NO: 5061942 - DNA, 25 bp, Homo sapien
tggaatgatgtacaggtcatcttgg

SEQ ID NO: 5061943 - DNA, 25 bp, Homo sapien
tcatcttggacaggaccagcacagt

SEQ ID NO: 5061944 - DNA, 25 bp, Homo sapien
ggtcatcttggacaggaccagcaca

SEQ ID NO: 5061945 - DNA, 25 bp, Homo sapien
tgctgctagccttcttccttgctag

SEQ ID NO: 5061946 - DNA, 25 bp, Homo sapien
taaatgcctctaggatgcaataacc

SEQ ID NO: 5061947 - DNA, 25 bp, Homo sapien
tctaggatgcaataaccattcttgc

SEQ ID NO: 5061948 - DNA, 25 bp, Homo sapien
cttgctagtaatatgtccgctggta

SEQ ID NO: 5061949 - DNA, 25 bp, Homo sapien
ccagttagtgaagcatgccccggtg

SEQ ID NO: 5061950 - DNA, 25 bp, Homo sapien
ttatgggcactgaagacgtcctgca

SEQ ID NO: 5061951 - DNA, 25 bp, Homo sapien
taagttgtgggtgcatgtctccagc

SEQ ID NO: 5061952 - DNA, 25 bp, Homo sapien
tactgaggacagcaacctacctgga

SEQ ID NO: 5061953 - DNA, 25 bp, Homo sapien
tcccaggtttatatgtgtcatcaca

SEQ ID NO: 5061954 - DNA, 25 bp, Homo sapien
tcttattctgcatagaggatgaagc

SEQ ID NO: 5061955 - DNA, 25 bp, Homo sapien
ggaacacaacagtgtaatcccaggt

SEQ ID NO: 5061956 - DNA, 25 bp, Homo sapien
aaagaacacgtcatgtagcaagaca

SEQ ID NO: 5061957 - DNA, 25 bp, Homo sapien
tcgcagcatcagacaacggacttgg

SEQ ID NO: 5061958 - DNA, 25 bp, Homo sapien
tggaaatcagtttgcgaccacgcat

SEQ ID NO: 5061959 - DNA, 25 bp, Homo sapien
gaatgtcgacacaaagcgtttcagg

SEQ ID NO: 5061960 - DNA, 25 bp, Homo sapien
taacaaacggatagtgtctcgcagc

SEQ ID NO: 5061961 - DNA, 25 bp, Homo sapien
tttatgacggaaagggctcaagtac

SEQ ID NO: 5061962 - DNA, 25 bp, Homo sapien
tacacagcaggcatgtagggtagcg

SEQ ID NO: 5061963 - DNA, 25 bp, Homo sapien
gcaaaacagaatcgagggacgccga

SEQ ID NO: 5061964 - DNA, 25 bp, Homo sapien
gggacgccgagaagatacacagcag

SEQ ID NO: 5061965 - DNA, 25 bp, Homo sapien
tatgagtcaatctagttggttttat

SEQ ID NO: 5061966 - DNA, 25 bp, Homo sapien
gttggttttattcgacatgaaggaa

SEQ ID NO: 5061967 - DNA, 25 bp, Homo sapien
atgtcttggggacctttgtcttctg

SEQ ID NO: 5061968 - DNA, 25 bp, Homo sapien
taatgatctgccataatgtcttggg

SEQ ID NO: 5061969 - DNA, 25 bp, Homo sapien
cggtgtccttgctcaggaaataagc

SEQ ID NO: 5061970 - DNA, 25 bp, Homo sapien
cccttatgccatagtccagtgggat

SEQ ID NO: 5061971 - DNA, 25 bp, Homo sapien
caggaagcccaatcactgagtatca

SEQ ID NO: 5061972 - DNA, 25 bp, Homo sapien
tgcagtgtatgcaaacacggtgtcc

SEQ ID NO: 5061973 - DNA, 25 bp, Homo sapien
tgaggggtgacccacttataaccag

SEQ ID NO: 5061974 - DNA, 25 bp, Homo sapien
gggtgacccacttataaccagctca

SEQ ID NO: 5061975 - DNA, 25 bp, Homo sapien
cttaaagtgctaccatgaggggtga

SEQ ID NO: 5061976 - DNA, 25 bp, Homo sapien
gacccacttataaccagctcagtat

SEQ ID NO: 5061977 - DNA, 25 bp, Homo sapien
tacttctctaggaagtaatcctggg

SEQ ID NO: 5061978 - DNA, 25 bp, Homo sapien
gggaaatgaagatcattttcttgaa

SEQ ID NO: 5061979 - DNA, 25 bp, Homo sapien
tcctcaagcattcatgcaacactta

SEQ ID NO: 5061980 - DNA, 25 bp, Homo sapien
gtagctgcctgagtacttctctagg

SEQ ID NO: 5061981 - DNA, 25 bp, Homo sapien
cttagatcacggaatcccaaagagg

SEQ ID NO: 5061982 - DNA, 25 bp, Homo sapien
aggcaactggcttagatcacggaat

SEQ ID NO: 5061983 - DNA, 25 bp, Homo sapien
tgaatcataagccattcagggagaa

SEQ ID NO: 5061984 - DNA, 25 bp, Homo sapien
agctgaatcataagccattcaggga

SEQ ID NO: 5061985 - DNA, 25 bp, Homo sapien
gaatatattttgtcagcagtgataa

SEQ ID NO: 5061986 - DNA, 25 bp, Homo sapien
tttataaaaggttgaatctgtcttc

SEQ ID NO: 5061987 - DNA, 25 bp, Homo sapien
agaatatattttgtcagcagtgata

SEQ ID NO: 5061988 - DNA, 25 bp, Homo sapien
taaaaggttgaatctgtcttctatt

SEQ ID NO: 5061989 - DNA, 25 bp, Homo sapien
tttggactttttgatgtacttcgga

SEQ ID NO: 5061990 - DNA, 25 bp, Homo sapien
cggattgttggaataactgatttca

SEQ ID NO: 5061991 - DNA, 25 bp, Homo sapien
tacttcggattgttggaataactga

SEQ ID NO: 5061992 - DNA, 25 bp, Homo sapien
ttttgatgtacttcggattgttgga

SEQ ID NO: 5061993 - DNA, 25 bp, Homo sapien
aaaaagtatatagggccatggaagc

SEQ ID NO: 5061994 - DNA, 25 bp, Homo sapien
agtatatagggccatggaagccaac

SEQ ID NO: 5061995 - DNA, 25 bp, Homo sapien
gaaaaagtatatagggccatggaag

SEQ ID NO: 5061996 - DNA, 25 bp, Homo sapien
tatagggccatggaagccaactgca

SEQ ID NO: 5061997 - DNA, 25 bp, Homo sapien
tttctgctacgactgccaaggcctc

SEQ ID NO: 5061998 - DNA, 25 bp, Homo sapien
ggattgaggtggcatttcttgcttt

SEQ ID NO: 5061999 - DNA, 25 bp, Homo sapien
tgctttttctgctacgactgccaag

SEQ ID NO: 5062000 - DNA, 25 bp, Homo sapien
gtttgaggatgatggccctgactag

SEQ ID NO: 5062001 - DNA, 25 bp, Homo sapien
tatagtaatgccacctgaggcgcgg

SEQ ID NO: 5062002 - DNA, 25 bp, Homo sapien
tgcccttattcgaacgggcgcctct

SEQ ID NO: 5062003 - DNA, 25 bp, Homo sapien
tgaggcgcggctccatagcgatcat

SEQ ID NO: 5062004 - DNA, 25 bp, Homo sapien
ggcgcctctcctcttaggtttatag

SEQ ID NO: 5062005 - DNA, 25 bp, Homo sapien
tgctataaatcgacaaaatctaatg

SEQ ID NO: 5062006 - DNA, 25 bp, Homo sapien
tataaatcgacaaaatctaatgttg

SEQ ID NO: 5062007 - DNA, 25 bp, Homo sapien
taaatcgacaaaatctaatgttgtc

SEQ ID NO: 5062008 - DNA, 25 bp, Homo sapien
aaaattgctataaatcgacaaaatc

SEQ ID NO: 5062009 - DNA, 25 bp, Homo sapien
ctatggctgcacttctcaaactagt

SEQ ID NO: 5062010 - DNA, 25 bp, Homo sapien
tctcaaactagtgacaagtgtccca

SEQ ID NO: 5062011 - DNA, 25 bp, Homo sapien
gacaagtgtcccagttggtacttta

SEQ ID NO: 5062012 - DNA, 25 bp, Homo sapien
gtgtcccagttggtactttaagctg

SEQ ID NO: 5062013 - DNA, 25 bp, Homo sapien
actgatggaaacaaagggctgtaga

SEQ ID NO: 5062014 - DNA, 25 bp, Homo sapien
gagagccggctccttatgaaagcag

SEQ ID NO: 5062015 - DNA, 25 bp, Homo sapien
cagtatggaactaagcattgggagc

SEQ ID NO: 5062016 - DNA, 25 bp, Homo sapien
cattgggagcatacaaagaagccta

SEQ ID NO: 5062017 - DNA, 25 bp, Homo sapien
gttacctgccacaggagggccagcc

SEQ ID NO: 5062018 - DNA, 25 bp, Homo sapien
tgggttacctgccacaggagggcca

SEQ ID NO: 5062019 - DNA, 25 bp, Homo sapien
cagcctccttcaacaggcctccttg

SEQ ID NO: 5062020 - DNA, 25 bp, Homo sapien
cagtggaggttgggttacctgccac

SEQ ID NO: 5062021 - DNA, 25 bp, Homo sapien
taggttaatgtgaaacgcagccatc

SEQ ID NO: 5062022 - DNA, 25 bp, Homo sapien
ttgggtttcaaagctagcacctggg

SEQ ID NO: 5062023 - DNA, 25 bp, Homo sapien
catgcttgtgggtgagagcctctcc

SEQ ID NO: 5062024 - DNA, 25 bp, Homo sapien
tgcagtcagacttggctgggatccc

SEQ ID NO: 5062025 - DNA, 25 bp, Homo sapien
aaatccgagcctcgcgtgggctcct

SEQ ID NO: 5062026 - DNA, 25 bp, Homo sapien
tcctggcccccgacggacaccacca

SEQ ID NO: 5062027 - DNA, 25 bp, Homo sapien
ctttaaatccgagcctcgcgtgggc

SEQ ID NO: 5062028 - DNA, 25 bp, Homo sapien
tggcccccgacggacaccaccaggc

SEQ ID NO: 5062029 - DNA, 25 bp, Homo sapien
cagtcgggcaaaccagtggcagaag

SEQ ID NO: 5062030 - DNA, 25 bp, Homo sapien
gccccagtcgggcaaaccagtggca

SEQ ID NO: 5062031 - DNA, 25 bp, Homo sapien
ctaggagcagggtttcatcttcagc

SEQ ID NO: 5062032 - DNA, 25 bp, Homo sapien
tcagccccagtcgggcaaaccagtg

SEQ ID NO: 5062033 - DNA, 25 bp, Homo sapien
ggttaagcaagagcaaagtgccatt

SEQ ID NO: 5062034 - DNA, 25 bp, Homo sapien
caggaagactgacttaaatattcgg

SEQ ID NO: 5062035 - DNA, 25 bp, Homo sapien
ggaaagagggtacttgccacatagt

SEQ ID NO: 5062036 - DNA, 25 bp, Homo sapien
tacttgctaccctgagtactttcag

SEQ ID NO: 5062037 - DNA, 25 bp, Homo sapien
ccgggacggtgtgccaaactatggc

SEQ ID NO: 5062038 - DNA, 25 bp, Homo sapien
tcttaccgagttgtgcagagcacca

SEQ ID NO: 5062039 - DNA, 25 bp, Homo sapien
caaaaacccagcagctaagtagttc

SEQ ID NO: 5062040 - DNA, 25 bp, Homo sapien
ctagcaacagaatgcccgggacggt

SEQ ID NO: 5062041 - DNA, 25 bp, Homo sapien
accagccggatgtgctcttgcccag

SEQ ID NO: 5062042 - DNA, 25 bp, Homo sapien
agccggatgtgctcttgcccagcag

SEQ ID NO: 5062043 - DNA, 25 bp, Homo sapien
taaaaccagccggatgtgctcttgc

SEQ ID NO: 5062044 - DNA, 25 bp, Homo sapien
tgaataaaaccagccggatgtgctc

SEQ ID NO: 5062045 - DNA, 25 bp, Homo sapien
ttagacagctagagcagtgggacga

SEQ ID NO: 5062046 - DNA, 25 bp, Homo sapien
ctttgatattggtgagagtcagcag

SEQ ID NO: 5062047 - DNA, 25 bp, Homo sapien
gagagtcagcagttgattgttcact

SEQ ID NO: 5062048 - DNA, 25 bp, Homo sapien
gcagtgggacgaactcctttactaa

SEQ ID NO: 5062049 - DNA, 25 bp, Homo sapien
ggacagaggcactcaaggatcacgc

SEQ ID NO: 5062050 - DNA, 25 bp, Homo sapien
taccagaccagaatgtacagcagac

SEQ ID NO: 5062051 - DNA, 25 bp, Homo sapien
gggtaatcctttcagcttgagcatg

SEQ ID NO: 5062052 - DNA, 25 bp, Homo sapien
tctgccttaagagggaaagctctgg

SEQ ID NO: 5062053 - DNA, 25 bp, Homo sapien
agcaggccccgcctcactggagtga

SEQ ID NO: 5062054 - DNA, 25 bp, Homo sapien
aagccctcccatgtccaccgcagtt

SEQ ID NO: 5062055 - DNA, 25 bp, Homo sapien
cagttctgagtgctgcagcggtagc

SEQ ID NO: 5062056 - DNA, 25 bp, Homo sapien
ccatgtccaccgcagttctgagtgc

SEQ ID NO: 5062057 - DNA, 25 bp, Homo sapien
tcagatgcgaaaatgattaaccttg

SEQ ID NO: 5062058 - DNA, 25 bp, Homo sapien
aatgattaaccttggtgctgaagac

SEQ ID NO: 5062059 - DNA, 25 bp, Homo sapien
aagacagtgggagccattgtaggtc

SEQ ID NO: 5062060 - DNA, 25 bp, Homo sapien
agatgcgaaaatgattaaccttggt

SEQ ID NO: 5062061 - DNA, 25 bp, Homo sapien
cagaatggccaccactctggttcat

SEQ ID NO: 5062062 - DNA, 25 bp, Homo sapien
acagaatggccaccactctggttca

SEQ ID NO: 5062063 - DNA, 25 bp, Homo sapien
aaatctcgaagatgaggaatgttgg

SEQ ID NO: 5062064 - DNA, 25 bp, Homo sapien
aatctcgaagatgaggaatgttgga

SEQ ID NO: 5062065 - DNA, 25 bp, Homo sapien
tccatactggggaggactttgcatg

SEQ ID NO: 5062066 - DNA, 25 bp, Homo sapien
ggaggactttgcatgtcgctgtgta

SEQ ID NO: 5062067 - DNA, 25 bp, Homo sapien
aggactttgcatgtcgctgtgtaac

SEQ ID NO: 5062068 - DNA, 25 bp, Homo sapien
tactggggaggactttgcatgtcgc

SEQ ID NO: 5062069 - DNA, 25 bp, Homo sapien
tgaagttggtaggacaccacaggct

SEQ ID NO: 5062070 - DNA, 25 bp, Homo sapien
caggtattcaagtatcacggcccca

SEQ ID NO: 5062071 - DNA, 25 bp, Homo sapien
cccaaatggttatgcacaggactct

SEQ ID NO: 5062072 - DNA, 25 bp, Homo sapien
gaccttaacccaggagagagatgaa

SEQ ID NO: 5062073 - DNA, 25 bp, Homo sapien
cactgattgaggcactggatttccg

SEQ ID NO: 5062074 - DNA, 25 bp, Homo sapien
cttgccccactgattgaggcactgg

SEQ ID NO: 5062075 - DNA, 25 bp, Homo sapien
ggatttccggttggaaggcttcatc

SEQ ID NO: 5062076 - DNA, 25 bp, Homo sapien
catccagatgcttctaaagtgctga

SEQ ID NO: 5062077 - DNA, 25 bp, Homo sapien
tggtcccacctagcaggatggcctt

SEQ ID NO: 5062078 - DNA, 25 bp, Homo sapien
ggtcccacctagcaggatggccttg

SEQ ID NO: 5062079 - DNA, 25 bp, Homo sapien
tcccacctagcaggatggccttgac

SEQ ID NO: 5062080 - DNA, 25 bp, Homo sapien
ctggtcccacctagcaggatggcct

SEQ ID NO: 5062081 - DNA, 25 bp, Homo sapien
gtcagccagtcagcggccatgctga

SEQ ID NO: 5062082 - DNA, 25 bp, Homo sapien
gagctccttgttccccagtggaaag

SEQ ID NO: 5062083 - DNA, 25 bp, Homo sapien
acagtgatgaggctctggaccttgg

SEQ ID NO: 5062084 - DNA, 25 bp, Homo sapien
gggacagctgtttccagcagggctc

SEQ ID NO: 5062085 - DNA, 25 bp, Homo sapien
ggctgggacttcctttacttccata

SEQ ID NO: 5062086 - DNA, 25 bp, Homo sapien
tagttcagctttgtctcttcaacca

SEQ ID NO: 5062087 - DNA, 25 bp, Homo sapien
gaaatctgggtctttttaattctgc

SEQ ID NO: 5062088 - DNA, 25 bp, Homo sapien
catggtctcgcagtttggtcttggg

SEQ ID NO: 5062089 - DNA, 25 bp, Homo sapien
tgaatagatggctcaaagacagccc

SEQ ID NO: 5062090 - DNA, 25 bp, Homo sapien
tcctgaatagatggctcaaagacag

SEQ ID NO: 5062091 - DNA, 25 bp, Homo sapien
ctgaatagatggctcaaagacagcc

SEQ ID NO: 5062092 - DNA, 25 bp, Homo sapien
cttcctgaatagatggctcaaagac

SEQ ID NO: 5062093 - DNA, 25 bp, Homo sapien
ctcccgccctgacactctccagagg

SEQ ID NO: 5062094 - DNA, 25 bp, Homo sapien
ggagacttcatccaggagctccaag

SEQ ID NO: 5062095 - DNA, 25 bp, Homo sapien
gagacttcatccaggagctccaagg

SEQ ID NO: 5062096 - DNA, 25 bp, Homo sapien
cctgacactctccagaggagacttc

SEQ ID NO: 5062097 - DNA, 25 bp, Homo sapien
ccagctatggtgccaaaggctccaa

SEQ ID NO: 5062098 - DNA, 25 bp, Homo sapien
tgccagcttccctccgtgtggcttg

SEQ ID NO: 5062099 - DNA, 25 bp, Homo sapien
cagcttccctccgtgtggcttggat

SEQ ID NO: 5062100 - DNA, 25 bp, Homo sapien
ttccctccgtgtggcttggatgcct

SEQ ID NO: 5062101 - DNA, 25 bp, Homo sapien
caccctcatcgccttcatttctgtc

SEQ ID NO: 5062102 - DNA, 25 bp, Homo sapien
ttatcttgcataccctctgatgtgg

SEQ ID NO: 5062103 - DNA, 25 bp, Homo sapien
tgcataccctctgatgtggtttggg

SEQ ID NO: 5062104 - DNA, 25 bp, Homo sapien
aactttatcttgcataccctctgat

SEQ ID NO: 5062105 - DNA, 25 bp, Homo sapien
tcttgcataccctctgatgtggttt

SEQ ID NO: 5062106 - DNA, 25 bp, Homo sapien
tggacaagaccatgagtgagcctag

SEQ ID NO: 5062107 - DNA, 25 bp, Homo sapien
ccctataactaaggcatcgggcagg

SEQ ID NO: 5062108 - DNA, 25 bp, Homo sapien
tgtgagccagataccggacacctgg

SEQ ID NO: 5062109 - DNA, 25 bp, Homo sapien
aaagactgtccggtggcagtgacgc

SEQ ID NO: 5062110 - DNA, 25 bp, Homo sapien
tgccagggccctgacctagcaccat

SEQ ID NO: 5062111 - DNA, 25 bp, Homo sapien
atggctgccagggccctgacctagc

SEQ ID NO: 5062112 - DNA, 25 bp, Homo sapien
gctgccagggccctgacctagcacc

SEQ ID NO: 5062113 - DNA, 25 bp, Homo sapien
tggctgccagggccctgacctagca

SEQ ID NO: 5062114 - DNA, 25 bp, Homo sapien
tctggcctggatgtgttcaggttct

SEQ ID NO: 5062115 - DNA, 25 bp, Homo sapien
gccagtgcatcatcccgtggctctg

SEQ ID NO: 5062116 - DNA, 25 bp, Homo sapien
cataggcccttgttgggagtggcca

SEQ ID NO: 5062117 - DNA, 25 bp, Homo sapien
gctctggagagccataggcccttgt

SEQ ID NO: 5062118 - DNA, 25 bp, Homo sapien
ctgtaggaccaagtttggccccaat

SEQ ID NO: 5062119 - DNA, 25 bp, Homo sapien
ctggcgaatgggtgtatggcaagtt

SEQ ID NO: 5062120 - DNA, 25 bp, Homo sapien
tcatctggcgaatgggtgtatggca

SEQ ID NO: 5062121 - DNA, 25 bp, Homo sapien
catctggcgaatgggtgtatggcaa

SEQ ID NO: 5062122 - DNA, 25 bp, Homo sapien
tctggcgaatgggtgtatggcaagt

SEQ ID NO: 5062123 - DNA, 25 bp, Homo sapien
ggcacaagagttctgaccggctccg

SEQ ID NO: 5062124 - DNA, 25 bp, Homo sapien
gattggcacaagagttctgaccggc

SEQ ID NO: 5062125 - DNA, 25 bp, Homo sapien
attggcacaagagttctgaccggct

SEQ ID NO: 5062126 - DNA, 25 bp, Homo sapien
tggcacaagagttctgaccggctcc

SEQ ID NO: 5062127 - DNA, 25 bp, Homo sapien
cacaaatttgcatgtgatcctttgt

SEQ ID NO: 5062128 - DNA, 25 bp, Homo sapien
atttgcatgtgatcctttgtgcagg

SEQ ID NO: 5062129 - DNA, 25 bp, Homo sapien
caattttagtatatgtgctgccaga

SEQ ID NO: 5062130 - DNA, 25 bp, Homo sapien
ggccatgctaatctctgtatcattc

SEQ ID NO: 5062131 - DNA, 25 bp, Homo sapien
acttcctggccatagttgaagccac

SEQ ID NO: 5062132 - DNA, 25 bp, Homo sapien
ccacagatataggtgtcgggggaca

SEQ ID NO: 5062133 - DNA, 25 bp, Homo sapien
ctggtggggcaggaaaagtgcgtgt

SEQ ID NO: 5062134 - DNA, 25 bp, Homo sapien
gggacataggtgagacgctggtggg

SEQ ID NO: 5062135 - DNA, 25 bp, Homo sapien
cgggtgtcgggcagcttgccctggg

SEQ ID NO: 5062136 - DNA, 25 bp, Homo sapien
ggagagttccgggtgtcgggcagct

SEQ ID NO: 5062137 - DNA, 25 bp, Homo sapien
cttgagggagagttccgggtgtcgg

SEQ ID NO: 5062138 - DNA, 25 bp, Homo sapien
gagttccgggtgtcgggcagcttgc

SEQ ID NO: 5062139 - DNA, 25 bp, Homo sapien
ataaccaaaacaattgtgtgaatga

SEQ ID NO: 5062140 - DNA, 25 bp, Homo sapien
aaccaaaacaattgtgtgaatgaac

SEQ ID NO: 5062141 - DNA, 25 bp, Homo sapien
tgcttaacatcctgagaataaccaa

SEQ ID NO: 5062142 - DNA, 25 bp, Homo sapien
ttaacatcctgagaataaccaaaac

SEQ ID NO: 5062143 - DNA, 25 bp, Homo sapien
cttgggcaccgggatccaggctctc

SEQ ID NO: 5062144 - DNA, 25 bp, Homo sapien
ttgctgccgcagaacctgcttggtg

SEQ ID NO: 5062145 - DNA, 25 bp, Homo sapien
gctcttctgagttgctgccgcagaa

SEQ ID NO: 5062146 - DNA, 25 bp, Homo sapien
ttctgagttgctgccgcagaacctg

SEQ ID NO: 5062147 - DNA, 25 bp, Homo sapien
aacacttggtcaggtgtcagggaga

SEQ ID NO: 5062148 - DNA, 25 bp, Homo sapien
gcctggaatggtgggtgggattttc

SEQ ID NO: 5062149 - DNA, 25 bp, Homo sapien
gctggcctggaatggtgggtgggat

SEQ ID NO: 5062150 - DNA, 25 bp, Homo sapien
agcagggaacacttggtcaggtgtc

SEQ ID NO: 5062151 - DNA, 25 bp, Homo sapien
accaggtctggtgagaaccaggccg

SEQ ID NO: 5062152 - DNA, 25 bp, Homo sapien
gaccaggtctggtgagaaccaggcc

SEQ ID NO: 5062153 - DNA, 25 bp, Homo sapien
gggggcctcaaggatgcagactcca

SEQ ID NO: 5062154 - DNA, 25 bp, Homo sapien
ggccggggggcctcaaggatgcaga

SEQ ID NO: 5062155 - DNA, 25 bp, Homo sapien
gatgtggccccagatgagatgactt

SEQ ID NO: 5062156 - DNA, 25 bp, Homo sapien
cagatgtggccccagatgagatgac

SEQ ID NO: 5062157 - DNA, 25 bp, Homo sapien
gatgagatgacttctcgtacttccc

SEQ ID NO: 5062158 - DNA, 25 bp, Homo sapien
gatgacttctcgtacttcccaggat

SEQ ID NO: 5062159 - DNA, 25 bp, Homo sapien
cccagggtgacatccgttaaccagg

SEQ ID NO: 5062160 - DNA, 25 bp, Homo sapien
cacagactgagacggtgtggagccc

SEQ ID NO: 5062161 - DNA, 25 bp, Homo sapien
gtgacatccgttaaccagggctgcc

SEQ ID NO: 5062162 - DNA, 25 bp, Homo sapien
gctgcctccttctgatcctcagctt

SEQ ID NO: 5062163 - DNA, 25 bp, Homo sapien
taggcaagaagccatacagattccc

SEQ ID NO: 5062164 - DNA, 25 bp, Homo sapien
gcaagaagccatacagattccccgg

SEQ ID NO: 5062165 - DNA, 25 bp, Homo sapien
cacatagtaactggctgagccacgt

SEQ ID NO: 5062166 - DNA, 25 bp, Homo sapien
cacgtgggtcactgttaggcaagaa

SEQ ID NO: 5062167 - DNA, 25 bp, Homo sapien
cagagtccccgctggaccatggcct

SEQ ID NO: 5062168 - DNA, 25 bp, Homo sapien
ggcctgacagcttgcgctgcttctc

SEQ ID NO: 5062169 - DNA, 25 bp, Homo sapien
gtccccgctggaccatggcctgaca

SEQ ID NO: 5062170 - DNA, 25 bp, Homo sapien
gagtccccgctggaccatggcctga

SEQ ID NO: 5062171 - DNA, 25 bp, Homo sapien
ccagaaattttttccgtgcacatac

SEQ ID NO: 5062172 - DNA, 25 bp, Homo sapien
ttccagaaattttttccgtgcacat

SEQ ID NO: 5062173 - DNA, 25 bp, Homo sapien
tccagaaattttttccgtgcacata

SEQ ID NO: 5062174 - DNA, 25 bp, Homo sapien
aggggctggaatgcggagcggcagg

SEQ ID NO: 5062175 - DNA, 25 bp, Homo sapien
gggctggaatgcggagcggcagggc

SEQ ID NO: 5062176 - DNA, 25 bp, Homo sapien
agggaggggctggaatgcggagcgg

SEQ ID NO: 5062177 - DNA, 25 bp, Homo sapien
ctggaatgcggagcggcagggctgc

SEQ ID NO: 5062178 - DNA, 25 bp, Homo sapien
gacgtgaccggacttttctgcaaac

SEQ ID NO: 5062179 - DNA, 25 bp, Homo sapien
ggaaacttggctcgaatctctgtgc

SEQ ID NO: 5062180 - DNA, 25 bp, Homo sapien
cctggaggtcggtaggttcagccaa

SEQ ID NO: 5062181 - DNA, 25 bp, Homo sapien
tatggactatctgtctggtggcccc

SEQ ID NO: 5062182 - DNA, 25 bp, Homo sapien
tctcggagcagaactaggcactgag

SEQ ID NO: 5062183 - DNA, 25 bp, Homo sapien
tagaagtccatctggcagaggtgcc

SEQ ID NO: 5062184 - DNA, 25 bp, Homo sapien
gatcccttgtttggctctcggagca

SEQ ID NO: 5062185 - DNA, 25 bp, Homo sapien
gatcgagtgtccttgtgggtcccta

SEQ ID NO: 5062186 - DNA, 25 bp, Homo sapien
tgcgtggcccaggaaggtttaattc

SEQ ID NO: 5062187 - DNA, 25 bp, Homo sapien
cgtgcgggtgcagctgtttaaacta

SEQ ID NO: 5062188 - DNA, 25 bp, Homo sapien
tttcttgcagcccttccgtgcgggt

SEQ ID NO: 5062189 - DNA, 25 bp, Homo sapien
gagagagggcgttgtcttccacaga

SEQ ID NO: 5062190 - DNA, 25 bp, Homo sapien
tccgtggtgccgtgctgtgagacca

SEQ ID NO: 5062191 - DNA, 25 bp, Homo sapien
cgcgcttggccgtgagtgactttta

SEQ ID NO: 5062192 - DNA, 25 bp, Homo sapien
cctctggtagaggtagaaccttcga

SEQ ID NO: 5062193 - DNA, 25 bp, Homo sapien
gatctgtggagccaccctctggtag

SEQ ID NO: 5062194 - DNA, 25 bp, Homo sapien
cagatctgtattccgcccaggagaa

SEQ ID NO: 5062195 - DNA, 25 bp, Homo sapien
cagtcggcaactaaaggcttcagca

SEQ ID NO: 5062196 - DNA, 25 bp, Homo sapien
taaaaggcccaacaccaagtcatag

SEQ ID NO: 5062197 - DNA, 25 bp, Homo sapien
taatcatgtggctacgcgtggctgt

SEQ ID NO: 5062198 - DNA, 25 bp, Homo sapien
tgtcaccttgtatgtcgaactgcat

SEQ ID NO: 5062199 - DNA, 25 bp, Homo sapien
gtcaccttgtatgtcgaactgcata

SEQ ID NO: 5062200 - DNA, 25 bp, Homo sapien
tcaccttgtatgtcgaactgcataa

SEQ ID NO: 5062201 - DNA, 25 bp, Homo sapien
tgatgacctattggaaaagatctgg

SEQ ID NO: 5062202 - DNA, 25 bp, Homo sapien
gtacttccttactccaggaccacag

SEQ ID NO: 5062203 - DNA, 25 bp, Homo sapien
ccaaaggcaattaccaggttacaca

SEQ ID NO: 5062204 - DNA, 25 bp, Homo sapien
tccattgaggaattggatagcacta

SEQ ID NO: 5062205 - DNA, 25 bp, Homo sapien
cacagagtgagctggatgctgaaac

SEQ ID NO: 5062206 - DNA, 25 bp, Homo sapien
cagtggcccgaacctgtaacttgat

SEQ ID NO: 5062207 - DNA, 25 bp, Homo sapien
taatgccgatgtgactctacgtagt

SEQ ID NO: 5062208 - DNA, 25 bp, Homo sapien
gaactcactactccaaagggtggtg

SEQ ID NO: 5062209 - DNA, 25 bp, Homo sapien
tgttctggagccactgattcctctg

SEQ ID NO: 5062210 - DNA, 25 bp, Homo sapien
gataaaatacccctctgtacctcag

SEQ ID NO: 5062211 - DNA, 25 bp, Homo sapien
gcccattcaggtttactccgacgta

SEQ ID NO: 5062212 - DNA, 25 bp, Homo sapien
tagcccgttttcacatgaactcgag

SEQ ID NO: 5062213 - DNA, 25 bp, Homo sapien
caagcggccttatgtacatttccca

SEQ ID NO: 5062214 - DNA, 25 bp, Homo sapien
gatatttggttaccatggaggccaa

SEQ ID NO: 5062215 - DNA, 25 bp, Homo sapien
caattgggcaaaactacctaggctt

SEQ ID NO: 5062216 - DNA, 25 bp, Homo sapien
caacctcagagtatttcggcccgta

SEQ ID NO: 5062217 - DNA, 25 bp, Homo sapien
ttcagtttggtttgcaatgagaaag

SEQ ID NO: 5062218 - DNA, 25 bp, Homo sapien
aattactgccctaaaatgtctctgg

SEQ ID NO: 5062219 - DNA, 25 bp, Homo sapien
tacaaaatcatggtgacacttccaa

SEQ ID NO: 5062220 - DNA, 25 bp, Homo sapien
cacaaactatcatgcaaataacgag

SEQ ID NO: 5062221 - DNA, 25 bp, Homo sapien
ggcaaagcacagaatgcctgtatat

SEQ ID NO: 5062222 - DNA, 25 bp, Homo sapien
tgcctgtatatgatgtaactgtatc

SEQ ID NO: 5062223 - DNA, 25 bp, Homo sapien
gccctgagtggagacctatcagatt

SEQ ID NO: 5062224 - DNA, 25 bp, Homo sapien
tcagattggattgctggcaaagcac

SEQ ID NO: 5062225 - DNA, 25 bp, Homo sapien
gaaggaccagtatgccaattacgtg

SEQ ID NO: 5062226 - DNA, 25 bp, Homo sapien
aagtgtgttactcatgcctcccgtg

SEQ ID NO: 5062227 - DNA, 25 bp, Homo sapien
tactgattgacgaggtttgctgcca

SEQ ID NO: 5062228 - DNA, 25 bp, Homo sapien
cagaatgatggtcctcacagtgcct

SEQ ID NO: 5062229 - DNA, 25 bp, Homo sapien
gactaatgggaaaattgcaaaacta

SEQ ID NO: 5062230 - DNA, 25 bp, Homo sapien
gttaccgctttatcacattggctgt

SEQ ID NO: 5062231 - DNA, 25 bp, Homo sapien
tgcaaaactatacccttcacccatg

SEQ ID NO: 5062232 - DNA, 25 bp, Homo sapien
tctgggataatttgagactaatggg

SEQ ID NO: 5062233 - DNA, 25 bp, Homo sapien
taggaatggatccagcagaagaagt

SEQ ID NO: 5062234 - DNA, 25 bp, Homo sapien
tggtctaaagattgaacgctatcaa

SEQ ID NO: 5062235 - DNA, 25 bp, Homo sapien
cagatgtgcttcatgagagatttgc

SEQ ID NO: 5062236 - DNA, 25 bp, Homo sapien
gactccctattataaagataccagc

SEQ ID NO: 5062237 - DNA, 25 bp, Homo sapien
aactccagtctttgtgctcatagta

SEQ ID NO: 5062238 - DNA, 25 bp, Homo sapien
tttttctacctggagctagctgact

SEQ ID NO: 5062239 - DNA, 25 bp, Homo sapien
caaactaacggcttcttgccctgta

SEQ ID NO: 5062240 - DNA, 25 bp, Homo sapien
cttactaggtataaagcagtgttcg

SEQ ID NO: 5062241 - DNA, 25 bp, Homo sapien
taaaacacttgttcaaatttgcagc

SEQ ID NO: 5062242 - DNA, 25 bp, Homo sapien
actagtaatcacttttgggttgaag

SEQ ID NO: 5062243 - DNA, 25 bp, Homo sapien
aatgcccagtagcaacagtctgtgc

SEQ ID NO: 5062244 - DNA, 25 bp, Homo sapien
ttttagcaggatgactagtaatcac

SEQ ID NO: 5062245 - DNA, 25 bp, Homo sapien
tgtaacctccatgttgctttataga

SEQ ID NO: 5062246 - DNA, 25 bp, Homo sapien
acctttgtaggttctccgtgctgga

SEQ ID NO: 5062247 - DNA, 25 bp, Homo sapien
tgtaataaatacacagttgtccaag

SEQ ID NO: 5062248 - DNA, 25 bp, Homo sapien
gctgttaagagctagtgattgtgtt

SEQ ID NO: 5062249 - DNA, 25 bp, Homo sapien
gctcatttagaaaaggactagtcga

SEQ ID NO: 5062250 - DNA, 25 bp, Homo sapien
tggtcacctcttagctggccaatag

SEQ ID NO: 5062251 - DNA, 25 bp, Homo sapien
actccactgtgctggtaaagcatga

SEQ ID NO: 5062252 - DNA, 25 bp, Homo sapien
taccatatgggtttggtcacgacca

SEQ ID NO: 5062253 - DNA, 25 bp, Homo sapien
cacaccatgacagagagattatttc

SEQ ID NO: 5062254 - DNA, 25 bp, Homo sapien
agcaaagcatcttgagcacaccatg

SEQ ID NO: 5062255 - DNA, 25 bp, Homo sapien
ggaattaaaagtatgcgccactatg

SEQ ID NO: 5062256 - DNA, 25 bp, Homo sapien
tcaagatggatgatagagaaaccgt

SEQ ID NO: 5062257 - DNA, 25 bp, Homo sapien
tgcagcatgctagcctgccactgag

SEQ ID NO: 5062258 - DNA, 25 bp, Homo sapien
ggcacgcacttacagtccaagctat

SEQ ID NO: 5062259 - DNA, 25 bp, Homo sapien
ttataaaagtgctgtggtgtgggca

SEQ ID NO: 5062260 - DNA, 25 bp, Homo sapien
aacttgtgattacagtgcagcatgc

SEQ ID NO: 5062261 - DNA, 25 bp, Homo sapien
ccagagaagcatgcggattgcaagt

SEQ ID NO: 5062262 - DNA, 25 bp, Homo sapien
ctttggcgccgtcgaggatggctcc

SEQ ID NO: 5062263 - DNA, 25 bp, Homo sapien
aggttagagaccgagctgtcggccc

SEQ ID NO: 5062264 - DNA, 25 bp, Homo sapien
agtccgcgttcgctctttctccggt

SEQ ID NO: 5062265 - DNA, 25 bp, Homo sapien
taccataaggatccaggaatgcggc

SEQ ID NO: 5062266 - DNA, 25 bp, Homo sapien
gatggaaccagtctgcccaagggat

SEQ ID NO: 5062267 - DNA, 25 bp, Homo sapien
caattccatattctaagggagggcc

SEQ ID NO: 5062268 - DNA, 25 bp, Homo sapien
aatgcggctcagactccaagggtag

SEQ ID NO: 5062269 - DNA, 25 bp, Homo sapien
tccagggcactcttagtcaacacaa

SEQ ID NO: 5062270 - DNA, 25 bp, Homo sapien
aaaagcagtcctcctagcttgccat

SEQ ID NO: 5062271 - DNA, 25 bp, Homo sapien
taacagacttggctgctatgacagg

SEQ ID NO: 5062272 - DNA, 25 bp, Homo sapien
cactgagctaggactcttaacagac

SEQ ID NO: 5062273 - DNA, 25 bp, Homo sapien
gtgtgagaacaaatataggcgccaa

SEQ ID NO: 5062274 - DNA, 25 bp, Homo sapien
taggcgccaacaggttaagattata

SEQ ID NO: 5062275 - DNA, 25 bp, Homo sapien
gattataagagcactggcctcgtgc

SEQ ID NO: 5062276 - DNA, 25 bp, Homo sapien
ctgcatctcccttgacctgccaaag

SEQ ID NO: 5062277 - DNA, 25 bp, Homo sapien
tataatgaggtcatacccaaagctg

SEQ ID NO: 5062278 - DNA, 25 bp, Homo sapien
tatgcccagagataatcaaagtgca

SEQ ID NO: 5062279 - DNA, 25 bp, Homo sapien
gaagcttcagttgcccatatgccca

SEQ ID NO: 5062280 - DNA, 25 bp, Homo sapien
caatgtatccaaggatgctgcctgc

SEQ ID NO: 5062281 - DNA, 25 bp, Homo sapien
gatgccagagccaatcatacagcca

SEQ ID NO: 5062282 - DNA, 25 bp, Homo sapien
taagactggccccaggattgcccat

SEQ ID NO: 5062283 - DNA, 25 bp, Homo sapien
tatacttgccccagattcaggaaca

SEQ ID NO: 5062284 - DNA, 25 bp, Homo sapien
gattgcccatgtggaccaagacccc

SEQ ID NO: 5062285 - DNA, 25 bp, Homo sapien
ccagcaaatatgtgaagatgaccag

SEQ ID NO: 5062286 - DNA, 25 bp, Homo sapien
ggtagccatgcacacatttgtcagc

SEQ ID NO: 5062287 - DNA, 25 bp, Homo sapien
ggtggccagcttcaagctccagcag

SEQ ID NO: 5062288 - DNA, 25 bp, Homo sapien
agctccagcagttagccaccatcag

SEQ ID NO: 5062289 - DNA, 25 bp, Homo sapien
ggaaccattgcatgctcagcaaagc

SEQ ID NO: 5062290 - DNA, 25 bp, Homo sapien
tgcagcatcatgtggtggaaggcag

SEQ ID NO: 5062291 - DNA, 25 bp, Homo sapien
cttccgtgcatatgtggccctggcc

SEQ ID NO: 5062292 - DNA, 25 bp, Homo sapien
aaggccatgccaatgtgccccgcct

SEQ ID NO: 5062293 - DNA, 25 bp, Homo sapien
aggcagacagaagggcttccgtgca

SEQ ID NO: 5062294 - DNA, 25 bp, Homo sapien
tcacatagttgatgctattccagcc

SEQ ID NO: 5062295 - DNA, 25 bp, Homo sapien
tgctattccagccaccgaaggacca

SEQ ID NO: 5062296 - DNA, 25 bp, Homo sapien
cctccatcacatagttgatgctatt

SEQ ID NO: 5062297 - DNA, 25 bp, Homo sapien
catcacatagttgatgctattccag

SEQ ID NO: 5062298 - DNA, 25 bp, Homo sapien
cattgagcatggtctcttacaggca

SEQ ID NO: 5062299 - DNA, 25 bp, Homo sapien
ctgaatcccaagctgtcctgaagac

SEQ ID NO: 5062300 - DNA, 25 bp, Homo sapien
tacaggcagtgtgaccgcaaaatca

SEQ ID NO: 5062301 - DNA, 25 bp, Homo sapien
tgtgaattaactacctgctgcagtg

SEQ ID NO: 5062302 - DNA, 25 bp, Homo sapien
cagcgaaacagagaagaggcgattc

SEQ ID NO: 5062303 - DNA, 25 bp, Homo sapien
gtgcattcgaacacagcgttgctgt

SEQ ID NO: 5062304 - DNA, 25 bp, Homo sapien
tttgggcacggtaccaaactgtgca

SEQ ID NO: 5062305 - DNA, 25 bp, Homo sapien
ttgggaaagccaggcacgcatttgc

SEQ ID NO: 5062306 - DNA, 25 bp, Homo sapien
tgcccccagtagtggctactgcctt

SEQ ID NO: 5062307 - DNA, 25 bp, Homo sapien
atatcatgcccccagtagtggctac

SEQ ID NO: 5062308 - DNA, 25 bp, Homo sapien
taggcaatatcatgcccccagtagt

SEQ ID NO: 5062309 - DNA, 25 bp, Homo sapien
ctgctataggcaatatcatgccccc

SEQ ID NO: 5062310 - DNA, 25 bp, Homo sapien
ctggagttggtatgggacgataaat

SEQ ID NO: 5062311 - DNA, 25 bp, Homo sapien
gtatgggacgataaataagagccat

SEQ ID NO: 5062312 - DNA, 25 bp, Homo sapien
ggtatgggacgataaataagagcca

SEQ ID NO: 5062313 - DNA, 25 bp, Homo sapien
taaataagagccattgacagaattc

SEQ ID NO: 5062314 - DNA, 25 bp, Homo sapien
tcacggtggtactgaaacttcctgg

SEQ ID NO: 5062315 - DNA, 25 bp, Homo sapien
ttgccttatgaagttcacggtggta

SEQ ID NO: 5062316 - DNA, 25 bp, Homo sapien
ccttatgaagttcacggtggtactg

SEQ ID NO: 5062317 - DNA, 25 bp, Homo sapien
gaaacttcctggaatgcccaggacc

SEQ ID NO: 5062318 - DNA, 25 bp, Homo sapien
ctggggatggttgatgacgggcgcc

SEQ ID NO: 5062319 - DNA, 25 bp, Homo sapien
tgtgatggcgggaatgaaggtggga

SEQ ID NO: 5062320 - DNA, 25 bp, Homo sapien
atggttgatgacgggcgccagcacc

SEQ ID NO: 5062321 - DNA, 25 bp, Homo sapien
gcgccagcaccagtagagataagcc

SEQ ID NO: 5062322 - DNA, 25 bp, Homo sapien
agaggaagatgtttaggaactctgt

SEQ ID NO: 5062323 - DNA, 25 bp, Homo sapien
ggacaagtgggaagtacaccaggaa

SEQ ID NO: 5062324 - DNA, 25 bp, Homo sapien
ctagagatgtagagcggccagctgc

SEQ ID NO: 5062325 - DNA, 25 bp, Homo sapien
caaaaattgattggtccatgatgca

SEQ ID NO: 5062326 - DNA, 25 bp, Homo sapien
gcatgatggaccaatcacattcacc

SEQ ID NO: 5062327 - DNA, 25 bp, Homo sapien
cattcaccaaaaattgattggtcca

SEQ ID NO: 5062328 - DNA, 25 bp, Homo sapien
tgtcttctggtttgcatgatggacc

SEQ ID NO: 5062329 - DNA, 25 bp, Homo sapien
gcgttctctcgctgcgcttcggctg

SEQ ID NO: 5062330 - DNA, 25 bp, Homo sapien
tcccgggcggtggtcgctctgctca

SEQ ID NO: 5062331 - DNA, 25 bp, Homo sapien
atagggcgcaccgtgcgtctcgccg

SEQ ID NO: 5062332 - DNA, 25 bp, Homo sapien
gggcctcgctgagcatacaagacaa

SEQ ID NO: 5062333 - DNA, 25 bp, Homo sapien
ctcccgctcgccgctcactgctcac

SEQ ID NO: 5062334 - DNA, 25 bp, Homo sapien
cctcccgctcgccgctcactgctca

SEQ ID NO: 5062335 - DNA, 25 bp, Homo sapien
cgggcagcaggagggggcccgcgaa

SEQ ID NO: 5062336 - DNA, 25 bp, Homo sapien
gagcgggccgggcccgggcagcagg

SEQ ID NO: 5062337 - DNA, 25 bp, Homo sapien
gcgggccgggcccgggcagcaggag

SEQ ID NO: 5062338 - DNA, 25 bp, Homo sapien
gcagcaggagggggcccgcgaacgc

SEQ ID NO: 5062339 - DNA, 25 bp, Homo sapien
gccacatagttctcgaagacggtgg

SEQ ID NO: 5062340 - DNA, 25 bp, Homo sapien
ccttactgaacacgatcagcaggca

SEQ ID NO: 5062341 - DNA, 25 bp, Homo sapien
gggaactcgtccttactgaacacga

SEQ ID NO: 5062342 - DNA, 25 bp, Homo sapien
cacgtcttgccacacgcgccgtcgc

SEQ ID NO: 5062343 - DNA, 25 bp, Homo sapien
acatgagaatgacgtcggtgtccgg

SEQ ID NO: 5062344 - DNA, 25 bp, Homo sapien
tgtccaccgagaagcacatgagaat

SEQ ID NO: 5062345 - DNA, 25 bp, Homo sapien
tcttggcagagcactcgaggtagtc

SEQ ID NO: 5062346 - DNA, 25 bp, Homo sapien
acgggttcctgcttcatgcgggcca

SEQ ID NO: 5062347 - DNA, 25 bp, Homo sapien
tacagacaagggatatcaagctccc

SEQ ID NO: 5062348 - DNA, 25 bp, Homo sapien
tatcaaaactgtgtgcatgacctgc

SEQ ID NO: 5062349 - DNA, 25 bp, Homo sapien
cctgttcatgcttgggcgggagtct

SEQ ID NO: 5062350 - DNA, 25 bp, Homo sapien
taggacaggcacaaagttcgcttat

SEQ ID NO: 5062351 - DNA, 25 bp, Homo sapien
cttatagaacttttatgtaaacatc

SEQ ID NO: 5062352 - DNA, 25 bp, Homo sapien
tgctataagggaaacggagttggca

SEQ ID NO: 5062353 - DNA, 25 bp, Homo sapien
gaacaacctggtctcccttggtcac

SEQ ID NO: 5062354 - DNA, 25 bp, Homo sapien
caagaaaggatctcgcctaggagaa

SEQ ID NO: 5062355 - DNA, 25 bp, Homo sapien
agatcttcggtctcacccaattgaa

SEQ ID NO: 5062356 - DNA, 25 bp, Homo sapien
atgcagcaagaagagtgtgttccgg

SEQ ID NO: 5062357 - DNA, 25 bp, Homo sapien
gagtaacaccagatgttttacctct

SEQ ID NO: 5062358 - DNA, 25 bp, Homo sapien
ttttccagcctacagcaattcatct

SEQ ID NO: 5062359 - DNA, 25 bp, Homo sapien
caggattatgaaatgccacgcattt

SEQ ID NO: 5062360 - DNA, 25 bp, Homo sapien
cagaagggtccaggggcacatgcat

SEQ ID NO: 5062361 - DNA, 25 bp, Homo sapien
ctctgccagaagggtccaggggcac

SEQ ID NO: 5062362 - DNA, 25 bp, Homo sapien
ctgccagaagggtccaggggcacat

SEQ ID NO: 5062363 - DNA, 25 bp, Homo sapien
gccagaagggtccaggggcacatgc

SEQ ID NO: 5062364 - DNA, 25 bp, Homo sapien
tctacagctggagtttgggggtcct

SEQ ID NO: 5062365 - DNA, 25 bp, Homo sapien
agtcacttctagcagggacagccaa

SEQ ID NO: 5062366 - DNA, 25 bp, Homo sapien
ttcaggagccgccttggacagagga

SEQ ID NO: 5062367 - DNA, 25 bp, Homo sapien
aacttgctccttcaggagccgcctt

SEQ ID NO: 5062368 - DNA, 25 bp, Homo sapien
tctccctggtaattgcagagttgtt

SEQ ID NO: 5062369 - DNA, 25 bp, Homo sapien
ctctccctggtaattgcagagttgt

SEQ ID NO: 5062370 - DNA, 25 bp, Homo sapien
aaaccagattgagtaccacctctca

SEQ ID NO: 5062371 - DNA, 25 bp, Homo sapien
aagtgtagaacaaggggttcagtct

SEQ ID NO: 5062372 - DNA, 25 bp, Homo sapien
agtgtagaacaaggggttcagtctg

SEQ ID NO: 5062373 - DNA, 25 bp, Homo sapien
gtgtagaacaaggggttcagtctgt

SEQ ID NO: 5062374 - DNA, 25 bp, Homo sapien
gagggtgaacttctcaacaggcaga

SEQ ID NO: 5062375 - DNA, 25 bp, Homo sapien
tatttgctctagtggaagtcttgtc

SEQ ID NO: 5062376 - DNA, 25 bp, Homo sapien
cagagactggcctgtagcagaacta

SEQ ID NO: 5062377 - DNA, 25 bp, Homo sapien
ttggtcaaatcaggtaatagcatct

SEQ ID NO: 5062378 - DNA, 25 bp, Homo sapien
cttgataaagagatgaagggagcag

SEQ ID NO: 5062379 - DNA, 25 bp, Homo sapien
ctctttcccaaagtagttgaattga

SEQ ID NO: 5062380 - DNA, 25 bp, Homo sapien
tgttcaatatttggaggaggccaat

SEQ ID NO: 5062381 - DNA, 25 bp, Homo sapien
gaggaggccaatttaccaggtcttg

SEQ ID NO: 5062382 - DNA, 25 bp, Homo sapien
ccttatcaaaagctgcaacaagcat

SEQ ID NO: 5062383 - DNA, 25 bp, Homo sapien
gccttatcaaaagctgcaacaagca

SEQ ID NO: 5062384 - DNA, 25 bp, Homo sapien
tgccttatcaaaagctgcaacaagc

SEQ ID NO: 5062385 - DNA, 25 bp, Homo sapien
ctaaatgctttagccttctcctggg

SEQ ID NO: 5062386 - DNA, 25 bp, Homo sapien
cattatgggaactccagcggagaag

SEQ ID NO: 5062387 - DNA, 25 bp, Homo sapien
ctccagcggagaagtctctaatggg

SEQ ID NO: 5062388 - DNA, 25 bp, Homo sapien
actaacactaaatgctttagccttc

SEQ ID NO: 5062389 - DNA, 25 bp, Homo sapien
tgcagggtgcgcagtgtgagctccc

SEQ ID NO: 5062390 - DNA, 25 bp, Homo sapien
gccattcaccatccggtctccaaca

SEQ ID NO: 5062391 - DNA, 25 bp, Homo sapien
tccccaggggtctctgtaccaggag

SEQ ID NO: 5062392 - DNA, 25 bp, Homo sapien
tggaagctagcatcagccctgatgc

SEQ ID NO: 5062393 - DNA, 25 bp, Homo sapien
aggcttagccctcctggagagagga

SEQ ID NO: 5062394 - DNA, 25 bp, Homo sapien
ctcctggagagaggatgcagcccat

SEQ ID NO: 5062395 - DNA, 25 bp, Homo sapien
ccccaggcttagccctcctggagag

SEQ ID NO: 5062396 - DNA, 25 bp, Homo sapien
cgggcccccaggcttagccctcctg

SEQ ID NO: 5062397 - DNA, 25 bp, Homo sapien
ccatgaggggtgagactgactcggg

SEQ ID NO: 5062398 - DNA, 25 bp, Homo sapien
gaagttctgtctgcagcgagtgtgc

SEQ ID NO: 5062399 - DNA, 25 bp, Homo sapien
tgtctgcagcgagtgtgcccagagc

SEQ ID NO: 5062400 - DNA, 25 bp, Homo sapien
agactgactcgggaagttctgtctg

SEQ ID NO: 5062401 - DNA, 25 bp, Homo sapien
tgatgccttctgaaacgtgagtgcc

SEQ ID NO: 5062402 - DNA, 25 bp, Homo sapien
tcacgaaacgcacaaagctgcctag

SEQ ID NO: 5062403 - DNA, 25 bp, Homo sapien
gccaagcgtttgatgcatttccagc

SEQ ID NO: 5062404 - DNA, 25 bp, Homo sapien
gcatttccagcaaagtcacgaaacg

SEQ ID NO: 5062405 - DNA, 25 bp, Homo sapien
gaagtatcgtcaccatttctacacc

SEQ ID NO: 5062406 - DNA, 25 bp, Homo sapien
gtatcgtcaccatttctacacccaa

SEQ ID NO: 5062407 - DNA, 25 bp, Homo sapien
catccagtaggaagtatcgtcacca

SEQ ID NO: 5062408 - DNA, 25 bp, Homo sapien
cagtaggaagtatcgtcaccatttc

SEQ ID NO: 5062409 - DNA, 25 bp, Homo sapien
tggcaggtggcctgcaacaggactt

SEQ ID NO: 5062410 - DNA, 25 bp, Homo sapien
cctgcaacaggacttctggggggca

SEQ ID NO: 5062411 - DNA, 25 bp, Homo sapien
ctgcaacaggacttctggggggcac

SEQ ID NO: 5062412 - DNA, 25 bp, Homo sapien
caggtggcctgcaacaggacttctg

SEQ ID NO: 5062413 - DNA, 25 bp, Homo sapien
ctgtggtagaagaacgggagccctg

SEQ ID NO: 5062414 - DNA, 25 bp, Homo sapien
gctgcaaatctctaatggcagctcc

SEQ ID NO: 5062415 - DNA, 25 bp, Homo sapien
gccctgaggggatagagctgcaaat

SEQ ID NO: 5062416 - DNA, 25 bp, Homo sapien
aatctctaatggcagctcccgccat

SEQ ID NO: 5062417 - DNA, 25 bp, Homo sapien
gggtgaccccttaaccttgccatca

SEQ ID NO: 5062418 - DNA, 25 bp, Homo sapien
cccggggggattctggctgctgtgc

SEQ ID NO: 5062419 - DNA, 25 bp, Homo sapien
caacccggggggattctggctgctg

SEQ ID NO: 5062420 - DNA, 25 bp, Homo sapien
tcctctctgactgtcgggtgacccc

SEQ ID NO: 5062421 - DNA, 25 bp, Homo sapien
gaggcacatctaagatgccccgcag

SEQ ID NO: 5062422 - DNA, 25 bp, Homo sapien
caggaggcacatctaagatgccccg

SEQ ID NO: 5062423 - DNA, 25 bp, Homo sapien
ggcacatctaagatgccccgcagct

SEQ ID NO: 5062424 - DNA, 25 bp, Homo sapien
ggaggcacatctaagatgccccgca

SEQ ID NO: 5062425 - DNA, 25 bp, Homo sapien
agtgttgctgggcttgttctgaacc

SEQ ID NO: 5062426 - DNA, 25 bp, Homo sapien
aaatgggtagagacgagcctggaag

SEQ ID NO: 5062427 - DNA, 25 bp, Homo sapien
cctggaaggagctaagagaactgat

SEQ ID NO: 5062428 - DNA, 25 bp, Homo sapien
tttccactgccgtttgctccagcaa

SEQ ID NO: 5062429 - DNA, 25 bp, Homo sapien
cagggccggtgtcaaatgggtagag

SEQ ID NO: 5062430 - DNA, 25 bp, Homo sapien
gaccagcatggcgactggtcccaca

SEQ ID NO: 5062431 - DNA, 25 bp, Homo sapien
ctcgcggaccagcatggcgactggt

SEQ ID NO: 5062432 - DNA, 25 bp, Homo sapien
agactcctcgcggaccagcatggcg

SEQ ID NO: 5062433 - DNA, 25 bp, Homo sapien
atggcgactggtcccacaaccatct

SEQ ID NO: 5062434 - DNA, 25 bp, Homo sapien
cctgcaggggacactccacatctga

SEQ ID NO: 5062435 - DNA, 25 bp, Homo sapien
gcctgcaggggacactccacatctg

SEQ ID NO: 5062436 - DNA, 25 bp, Homo sapien
tcaggcctgcaggggacactccaca

SEQ ID NO: 5062437 - DNA, 25 bp, Homo sapien
aggcctgcaggggacactccacatc

SEQ ID NO: 5062438 - DNA, 25 bp, Homo sapien
tgtctggttggccccgcagcccttg

SEQ ID NO: 5062439 - DNA, 25 bp, Homo sapien
gtctggttggccccgcagcccttgt

SEQ ID NO: 5062440 - DNA, 25 bp, Homo sapien
aggatgtgaagatctcccgtgggca

SEQ ID NO: 5062441 - DNA, 25 bp, Homo sapien
aaagcctattgagggcaggatgtga

SEQ ID NO: 5062442 - DNA, 25 bp, Homo sapien
gccccacagcagaaggcggttgagc

SEQ ID NO: 5062443 - DNA, 25 bp, Homo sapien
gccaatcatgacattgatgcaatag

SEQ ID NO: 5062444 - DNA, 25 bp, Homo sapien
caatgtgatcttcgaagagtctcag

SEQ ID NO: 5062445 - DNA, 25 bp, Homo sapien
tagcaatgtgatcttcgaagagtct

SEQ ID NO: 5062446 - DNA, 25 bp, Homo sapien
gagtccttcagaggcttcaggccaa

SEQ ID NO: 5062447 - DNA, 25 bp, Homo sapien
aagatagcaatgtgatcttcgaaga

SEQ ID NO: 5062448 - DNA, 25 bp, Homo sapien
ccgtaggagccatttgacaagctct

SEQ ID NO: 5062449 - DNA, 25 bp, Homo sapien
gagccatttgacaagctcttgttga

SEQ ID NO: 5062450 - DNA, 25 bp, Homo sapien
ccatttgacaagctcttgttgaaca

SEQ ID NO: 5062451 - DNA, 25 bp, Homo sapien
taggagccatttgacaagctcttgt

SEQ ID NO: 5062452 - DNA, 25 bp, Homo sapien
tgtctcatctttccagaactggccc

SEQ ID NO: 5062453 - DNA, 25 bp, Homo sapien
ctgtctcatctttccagaactggcc

SEQ ID NO: 5062454 - DNA, 25 bp, Homo sapien
gtctcatctttccagaactggccca

SEQ ID NO: 5062455 - DNA, 25 bp, Homo sapien
tgtaagatctttgatctcacaaaca

SEQ ID NO: 5062456 - DNA, 25 bp, Homo sapien
tatctgcacggggagatgccccacg

SEQ ID NO: 5062457 - DNA, 25 bp, Homo sapien
tgccccacgtgtggcgagtgttaga

SEQ ID NO: 5062458 - DNA, 25 bp, Homo sapien
ctgaccctccgaccagatcagagcc

SEQ ID NO: 5062459 - DNA, 25 bp, Homo sapien
agcatcatatctgcacggggagatg

SEQ ID NO: 5062460 - DNA, 25 bp, Homo sapien
gctgccctccaatgagggtgtgttg

SEQ ID NO: 5062461 - DNA, 25 bp, Homo sapien
cctccaatgagggtgtgttgagctg

SEQ ID NO: 5062462 - DNA, 25 bp, Homo sapien
ttgttccacgtcagctgccctccaa

SEQ ID NO: 5062463 - DNA, 25 bp, Homo sapien
tgccctccaatgagggtgtgttgag

SEQ ID NO: 5062464 - DNA, 25 bp, Homo sapien
tcccagaagggatgcttctacgacg

SEQ ID NO: 5062465 - DNA, 25 bp, Homo sapien
tcagtcggggcttcccagaagggat

SEQ ID NO: 5062466 - DNA, 25 bp, Homo sapien
cagaagggatgcttctacgacgaat

SEQ ID NO: 5062467 - DNA, 25 bp, Homo sapien
agaagggatgcttctacgacgaatc

SEQ ID NO: 5062468 - DNA, 25 bp, Homo sapien
cgcagaagtgagcatgaacgacagc

SEQ ID NO: 5062469 - DNA, 25 bp, Homo sapien
gcagaagtgagcatgaacgacagct

SEQ ID NO: 5062470 - DNA, 25 bp, Homo sapien
cagaagtgagcatgaacgacagctc

SEQ ID NO: 5062471 - DNA, 25 bp, Homo sapien
gaagtgagcatgaacgacagctcac

SEQ ID NO: 5062472 - DNA, 25 bp, Homo sapien
aactaggttgatggtagcgagcaca

SEQ ID NO: 5062473 - DNA, 25 bp, Homo sapien
ggctcatagggtacaatgggtgctc

SEQ ID NO: 5062474 - DNA, 25 bp, Homo sapien
ctgccacttaggctcatagggtaca

SEQ ID NO: 5062475 - DNA, 25 bp, Homo sapien
caggagcactggattgaactaggtt

SEQ ID NO: 5062476 - DNA, 25 bp, Homo sapien
ctcagggtatgtgaaggtacctgat

SEQ ID NO: 5062477 - DNA, 25 bp, Homo sapien
aaaggctctgttgggctacttgctc

SEQ ID NO: 5062478 - DNA, 25 bp, Homo sapien
tatgtgaaggtacctgatgctacca

SEQ ID NO: 5062479 - DNA, 25 bp, Homo sapien
cccaaaggctctgttgggctacttg

SEQ ID NO: 5062480 - DNA, 25 bp, Homo sapien
gcacttttaccttcacacatagact

SEQ ID NO: 5062481 - DNA, 25 bp, Homo sapien
taccttcacacatagactcaatata

SEQ ID NO: 5062482 - DNA, 25 bp, Homo sapien
ctcaatatattgtgaagtcttacag

SEQ ID NO: 5062483 - DNA, 25 bp, Homo sapien
catagactcaatatattgtgaagtc

SEQ ID NO: 5062484 - DNA, 25 bp, Homo sapien
cgtgtgcagtaagagaatccctctg

SEQ ID NO: 5062485 - DNA, 25 bp, Homo sapien
gaacaaactgaacacggcagtcatg

SEQ ID NO: 5062486 - DNA, 25 bp, Homo sapien
cttcaagcagcctaggtttagtgac

SEQ ID NO: 5062487 - DNA, 25 bp, Homo sapien
tagcttagaaatgcggtaaccttga

SEQ ID NO: 5062488 - DNA, 25 bp, Homo sapien
cgtccgtttctgaagagggaaactg

SEQ ID NO: 5062489 - DNA, 25 bp, Homo sapien
gggccctgtaaccatcttgctccag

SEQ ID NO: 5062490 - DNA, 25 bp, Homo sapien
tgtccatgtgggtttgcctccccct

SEQ ID NO: 5062491 - DNA, 25 bp, Homo sapien
tcatgggccccccagtagagtggcc

SEQ ID NO: 5062492 - DNA, 25 bp, Homo sapien
gccctgactctacatccatctcact

SEQ ID NO: 5062493 - DNA, 25 bp, Homo sapien
tatgtggtagctagcttggagcgct

SEQ ID NO: 5062494 - DNA, 25 bp, Homo sapien
agctagcttggagcgctcagccatg

SEQ ID NO: 5062495 - DNA, 25 bp, Homo sapien
aggaagcaatgcgtatgtggtagct

SEQ ID NO: 5062496 - DNA, 25 bp, Homo sapien
tggggctggtgaccgagagaggcat

SEQ ID NO: 5062497 - DNA, 25 bp, Homo sapien
gtggggctggtgaccgagagaggca

SEQ ID NO: 5062498 - DNA, 25 bp, Homo sapien
agtggggctggtgaccgagagaggc

SEQ ID NO: 5062499 - DNA, 25 bp, Homo sapien
ggctgcaatggaggctctcttttgt

SEQ ID NO: 5062500 - DNA, 25 bp, Homo sapien
atgaccaagttcagctgccaggcga

SEQ ID NO: 5062501 - DNA, 25 bp, Homo sapien
acatcgagtaccaatgagcccggca

SEQ ID NO: 5062502 - DNA, 25 bp, Homo sapien
tcttttgtctttatacccatgacca

SEQ ID NO: 5062503 - DNA, 25 bp, Homo sapien
ttgggcagttcttgggaaccacctc

SEQ ID NO: 5062504 - DNA, 25 bp, Homo sapien
cttgctctgtcagcctgggtagccc

SEQ ID NO: 5062505 - DNA, 25 bp, Homo sapien
gcagttcttgggaaccacctcttgc

SEQ ID NO: 5062506 - DNA, 25 bp, Homo sapien
tcagcctgggtagccccaagatgtc

SEQ ID NO: 5062507 - DNA, 25 bp, Homo sapien
ggaggaccaataccaggcatccgag

SEQ ID NO: 5062508 - DNA, 25 bp, Homo sapien
cttctcaggaggaccaataccaggc

SEQ ID NO: 5062509 - DNA, 25 bp, Homo sapien
tggcgccagtctgtttggccaatga

SEQ ID NO: 5062510 - DNA, 25 bp, Homo sapien
gcatccgaggcacgctgtttttcca

SEQ ID NO: 5062511 - DNA, 25 bp, Homo sapien
tcctgtcctcccttgctggggtagc

SEQ ID NO: 5062512 - DNA, 25 bp, Homo sapien
gccaggcccgtggataaggaatgcc

SEQ ID NO: 5062513 - DNA, 25 bp, Homo sapien
gaatgccgggccttgaggcacaaac

SEQ ID NO: 5062514 - DNA, 25 bp, Homo sapien
accaaggagacagaggcgttgctgc

SEQ ID NO: 5062515 - DNA, 25 bp, Homo sapien
gaggagctgtactgggcaggcttct

SEQ ID NO: 5062516 - DNA, 25 bp, Homo sapien
ggaggagctgtactgggcaggcttc

SEQ ID NO: 5062517 - DNA, 25 bp, Homo sapien
aggaggagctgtactgggcaggctt

SEQ ID NO: 5062518 - DNA, 25 bp, Homo sapien
ttttcccgggaacatctggaatgcg

SEQ ID NO: 5062519 - DNA, 25 bp, Homo sapien
cattgtttgttagaaagtccttcct

SEQ ID NO: 5062520 - DNA, 25 bp, Homo sapien
tgggaagaggctgtcacactgagat

SEQ ID NO: 5062521 - DNA, 25 bp, Homo sapien
tcctccccagaggacggtgtattgg

SEQ ID NO: 5062522 - DNA, 25 bp, Homo sapien
ctctgatactttctgggccactgac

SEQ ID NO: 5062523 - DNA, 25 bp, Homo sapien
tacatgcttcctaagagtgggctcg

SEQ ID NO: 5062524 - DNA, 25 bp, Homo sapien
ttggtgaacacaaacatcctgctct

SEQ ID NO: 5062525 - DNA, 25 bp, Homo sapien
taaatgggcttgtggcatccctacc

SEQ ID NO: 5062526 - DNA, 25 bp, Homo sapien
ttgttcttcacccacaggactgcga

SEQ ID NO: 5062527 - DNA, 25 bp, Homo sapien
ccccagatattgatgctccagtatc

SEQ ID NO: 5062528 - DNA, 25 bp, Homo sapien
tgctccagtatctgtggcttgttct

SEQ ID NO: 5062529 - DNA, 25 bp, Homo sapien
tggcctgcccgttgtgtattcatcc

SEQ ID NO: 5062530 - DNA, 25 bp, Homo sapien
agcgccctcggtggcttatccgggc

SEQ ID NO: 5062531 - DNA, 25 bp, Homo sapien
gagggtagagaactagccaaggaca

SEQ ID NO: 5062532 - DNA, 25 bp, Homo sapien
ggtggcgaccccgatttacagatga

SEQ ID NO: 5062533 - DNA, 25 bp, Homo sapien
cctcctaggccagggacctggtgca

SEQ ID NO: 5062534 - DNA, 25 bp, Homo sapien
atgtctgtacgttccccttctgagg

SEQ ID NO: 5062535 - DNA, 25 bp, Homo sapien
tctttccctgggctacgttggcagg

SEQ ID NO: 5062536 - DNA, 25 bp, Homo sapien
cgttggcaggtgatacgatctctct

SEQ ID NO: 5062537 - DNA, 25 bp, Homo sapien
catcgccctgccgtgaattctggta

SEQ ID NO: 5062538 - DNA, 25 bp, Homo sapien
cactggaaggaggattgacagatca

SEQ ID NO: 5062539 - DNA, 25 bp, Homo sapien
caattcccatatagcactggaagga

SEQ ID NO: 5062540 - DNA, 25 bp, Homo sapien
cagatcacgggaacagaatagaatc

SEQ ID NO: 5062541 - DNA, 25 bp, Homo sapien
aaataaaccaattcccatatagcac

SEQ ID NO: 5062542 - DNA, 25 bp, Homo sapien
tacatcgtcaaacaataaatcctcc

SEQ ID NO: 5062543 - DNA, 25 bp, Homo sapien
tcgtcaaacaataaatcctccttgg

SEQ ID NO: 5062544 - DNA, 25 bp, Homo sapien
ttttacatcgtcaaacaataaatcc

SEQ ID NO: 5062545 - DNA, 25 bp, Homo sapien
aaacaataaatcctccttggagatc

SEQ ID NO: 5062546 - DNA, 25 bp, Homo sapien
ctgcagctgtgtcttcagtagattt

SEQ ID NO: 5062547 - DNA, 25 bp, Homo sapien
gcagctgtgtcttcagtagattttc

SEQ ID NO: 5062548 - DNA, 25 bp, Homo sapien
cagctgtgtcttcagtagattttct

SEQ ID NO: 5062549 - DNA, 25 bp, Homo sapien
tctgcagctgtgtcttcagtagatt

SEQ ID NO: 5062550 - DNA, 25 bp, Homo sapien
gcaggtgaacaagctcgcatggggc

SEQ ID NO: 5062551 - DNA, 25 bp, Homo sapien
acaagctcgcatggggctgtaaggt

SEQ ID NO: 5062552 - DNA, 25 bp, Homo sapien
tgaacaagctcgcatggggctgtaa

SEQ ID NO: 5062553 - DNA, 25 bp, Homo sapien
caggtgaacaagctcgcatggggct

SEQ ID NO: 5062554 - DNA, 25 bp, Homo sapien
gtgatacccggccccaggttactca

SEQ ID NO: 5062555 - DNA, 25 bp, Homo sapien
cgggtggccgcgcagagagaggcca

SEQ ID NO: 5062556 - DNA, 25 bp, Homo sapien
cctagagtggagaccagggccggag

SEQ ID NO: 5062557 - DNA, 25 bp, Homo sapien
acaggatgctcccggcggcctcaaa

SEQ ID NO: 5062558 - DNA, 25 bp, Homo sapien
gctgaaagctccggcggccgctatg

SEQ ID NO: 5062559 - DNA, 25 bp, Homo sapien
gggcggcgcgggctccgtggctccg

SEQ ID NO: 5062560 - DNA, 25 bp, Homo sapien
gcggcgcgggctccgtggctccggg

SEQ ID NO: 5062561 - DNA, 25 bp, Homo sapien
ggcgcgggctccgtggctccgggaa

SEQ ID NO: 5062562 - DNA, 25 bp, Homo sapien
cgcgggctccgtggctccgggaagt

SEQ ID NO: 5062563 - DNA, 25 bp, Homo sapien
accgagccgttcctgaagccggagc

SEQ ID NO: 5062564 - DNA, 25 bp, Homo sapien
catgaagtggtgcggcaccaccgag

SEQ ID NO: 5062565 - DNA, 25 bp, Homo sapien
agtggtgcggcaccaccgagccgtt

SEQ ID NO: 5062566 - DNA, 25 bp, Homo sapien
acggcggccgcttccagcccgtcgc

SEQ ID NO: 5062567 - DNA, 25 bp, Homo sapien
cggtgatcgtgtccgcgcgaccatg

SEQ ID NO: 5062568 - DNA, 25 bp, Homo sapien
tctgtgaagccggtgatcgtgtccg

SEQ ID NO: 5062569 - DNA, 25 bp, Homo sapien
tcccggccaggctccggtaaagcga

SEQ ID NO: 5062570 - DNA, 25 bp, Homo sapien
ggcccgaggcggagacagcggctgc

SEQ ID NO: 5062571 - DNA, 25 bp, Homo sapien
aggacctgacgggatgggcgggcac

SEQ ID NO: 5062572 - DNA, 25 bp, Homo sapien
ctccaaatgtaacggagctgcggca

SEQ ID NO: 5062573 - DNA, 25 bp, Homo sapien
atgtaacggagctgcggcacggctc

SEQ ID NO: 5062574 - DNA, 25 bp, Homo sapien
gggccgcggctccaaatgtaacgga

SEQ ID NO: 5062575 - DNA, 25 bp, Homo sapien
cagaccattccccaagaagcgaatc

SEQ ID NO: 5062576 - DNA, 25 bp, Homo sapien
ctctcgccgtgactcccgggaacac

SEQ ID NO: 5062577 - DNA, 25 bp, Homo sapien
caagaagcgaatcttggcctccgcc

SEQ ID NO: 5062578 - DNA, 25 bp, Homo sapien
ccgtgcagtccctctcgccgtgact

SEQ ID NO: 5062579 - DNA, 25 bp, Homo sapien
cagcaacggcggagaagtccagctg

SEQ ID NO: 5062580 - DNA, 25 bp, Homo sapien
tctgcgtcgttaaggctggacacgt

SEQ ID NO: 5062581 - DNA, 25 bp, Homo sapien
agctgcccgcgagtacagcaggcgt

SEQ ID NO: 5062582 - DNA, 25 bp, Homo sapien
tggacacgtcgaacaggaagctctg

SEQ ID NO: 5062583 - DNA, 25 bp, Homo sapien
gggcgcggatctcccggaataagct

SEQ ID NO: 5062584 - DNA, 25 bp, Homo sapien
ggatctcccggaataagctctcttt

SEQ ID NO: 5062585 - DNA, 25 bp, Homo sapien
ctctctttcctctgcgtgcgggagg

SEQ ID NO: 5062586 - DNA, 25 bp, Homo sapien
ctttcctctgcgtgcgggaggagac

SEQ ID NO: 5062587 - DNA, 25 bp, Homo sapien
tgcggccgccaatgactgcccttgg

SEQ ID NO: 5062588 - DNA, 25 bp, Homo sapien
tctgcggccgccaatgactgccctt

SEQ ID NO: 5062589 - DNA, 25 bp, Homo sapien
tccgtctgcggccgccaatgactgc

SEQ ID NO: 5062590 - DNA, 25 bp, Homo sapien
ggccgccaatgactgcccttggcga

SEQ ID NO: 5062591 - DNA, 25 bp, Homo sapien
tgccctgcgctgtccgcgtcccggc

SEQ ID NO: 5062592 - DNA, 25 bp, Homo sapien
ctgcgctgtccgcgtcccggccaac

SEQ ID NO: 5062593 - DNA, 25 bp, Homo sapien
cctgcgctgtccgcgtcccggccaa

SEQ ID NO: 5062594 - DNA, 25 bp, Homo sapien
cgctgccctgcgctgtccgcgtccc

SEQ ID NO: 5062595 - DNA, 25 bp, Homo sapien
tagacaacgttgttggcggcgtcga

SEQ ID NO: 5062596 - DNA, 25 bp, Homo sapien
tgaagtccacgtgcaacggcttgcg

SEQ ID NO: 5062597 - DNA, 25 bp, Homo sapien
cgcaaagggaagtcgcaaaggccct

SEQ ID NO: 5062598 - DNA, 25 bp, Homo sapien
tgagcagcgtctgaatgatggcatg

SEQ ID NO: 5062599 - DNA, 25 bp, Homo sapien
gctgctcatcagctggggatcctcg

SEQ ID NO: 5062600 - DNA, 25 bp, Homo sapien
atcctcggccgcgtggctgccccct

SEQ ID NO: 5062601 - DNA, 25 bp, Homo sapien
atcagctggggatcctcggccgcgt

SEQ ID NO: 5062602 - DNA, 25 bp, Homo sapien
tgctcatcagctggggatcctcggc

SEQ ID NO: 5062603 - DNA, 25 bp, Homo sapien
ccattctggaacttcgaatttccta

SEQ ID NO: 5062604 - DNA, 25 bp, Homo sapien
tcctaacccgttgttgctacctgat

SEQ ID NO: 5062605 - DNA, 25 bp, Homo sapien
tgctacctgattttcgtgcctctaa

SEQ ID NO: 5062606 - DNA, 25 bp, Homo sapien
tcgtgcctctaactgcaacatcagc

SEQ ID NO: 5062607 - DNA, 25 bp, Homo sapien
cacagggtggaaataatgctcccca

SEQ ID NO: 5062608 - DNA, 25 bp, Homo sapien
aagatggaattgtaccagagcagcc

SEQ ID NO: 5062609 - DNA, 25 bp, Homo sapien
gatgaaaaccgattcaggtagggcc

SEQ ID NO: 5062610 - DNA, 25 bp, Homo sapien
aaacgagagtgaggcatctctggca

SEQ ID NO: 5062611 - DNA, 25 bp, Homo sapien
tactaccaactgtgctggcagaacg

SEQ ID NO: 5062612 - DNA, 25 bp, Homo sapien
gctacctagaagacagagagctcag

SEQ ID NO: 5062613 - DNA, 25 bp, Homo sapien
gagagctcagggtgctactaccaac

SEQ ID NO: 5062614 - DNA, 25 bp, Homo sapien
ccatccatggtgactggagattcca

SEQ ID NO: 5062615 - DNA, 25 bp, Homo sapien
tggatacaatgactgagcacagctc

SEQ ID NO: 5062616 - DNA, 25 bp, Homo sapien
tcttcagtacccaaggtgaggcgcc

SEQ ID NO: 5062617 - DNA, 25 bp, Homo sapien
gacccagtgcggctgtttggaaagt

SEQ ID NO: 5062618 - DNA, 25 bp, Homo sapien
catccacgggattatcggtactctc

SEQ ID NO: 5062619 - DNA, 25 bp, Homo sapien
tgcagttgcaccagctcaccagctt

SEQ ID NO: 5062620 - DNA, 25 bp, Homo sapien
acgaaccttactcggaagtctcgct

SEQ ID NO: 5062621 - DNA, 25 bp, Homo sapien
gcaggatgcctgttaacgaacctta

SEQ ID NO: 5062622 - DNA, 25 bp, Homo sapien
ctcaggaaatgtcctcgagggaagt

SEQ ID NO: 5062623 - DNA, 25 bp, Homo sapien
gcatgggctgcccatagcccatgag

SEQ ID NO: 5062624 - DNA, 25 bp, Homo sapien
ggtctccccaggatgacctgtgagt

SEQ ID NO: 5062625 - DNA, 25 bp, Homo sapien
gggctgcccatagcccatgagcggt

SEQ ID NO: 5062626 - DNA, 25 bp, Homo sapien
agcccatgagcggtctccccaggat

SEQ ID NO: 5062627 - DNA, 25 bp, Homo sapien
ggccctcaacacacctggtcactgc

SEQ ID NO: 5062628 - DNA, 25 bp, Homo sapien
acataggtttctaccagccctggga

SEQ ID NO: 5062629 - DNA, 25 bp, Homo sapien
tataagctggtacgggagctctgca

SEQ ID NO: 5062630 - DNA, 25 bp, Homo sapien
tgacccaggaaatgagccctgcttg

SEQ ID NO: 5062631 - DNA, 25 bp, Homo sapien
tgggtgtcactgcaaagcgaaagga

SEQ ID NO: 5062632 - DNA, 25 bp, Homo sapien
acttcatgccgtgtgaggctgtgtg

SEQ ID NO: 5062633 - DNA, 25 bp, Homo sapien
cagtttcataccagtcaccaagacc

SEQ ID NO: 5062634 - DNA, 25 bp, Homo sapien
atacagtttcataccagtcaccaag

SEQ ID NO: 5062635 - DNA, 25 bp, Homo sapien
gcagtgacttcatgccgtgtgaggc

SEQ ID NO: 5062636 - DNA, 25 bp, Homo sapien
tgtgcatcctccaggtggggagggc

SEQ ID NO: 5062637 - DNA, 25 bp, Homo sapien
tgcatcctccaggtggggagggctc

SEQ ID NO: 5062638 - DNA, 25 bp, Homo sapien
ctgtgcatcctccaggtggggaggg

SEQ ID NO: 5062639 - DNA, 25 bp, Homo sapien
catcctccaggtggggagggctcat

SEQ ID NO: 5062640 - DNA, 25 bp, Homo sapien
aagagcacatgcatccatgaccacg

SEQ ID NO: 5062641 - DNA, 25 bp, Homo sapien
ctaggacacaagagcacatgcatcc

SEQ ID NO: 5062642 - DNA, 25 bp, Homo sapien
tgcatccatgaccacgttgggcacc

SEQ ID NO: 5062643 - DNA, 25 bp, Homo sapien
ggacacaagagcacatgcatccatg

SEQ ID NO: 5062644 - DNA, 25 bp, Homo sapien
gcagagttaccgagtgctcagcgat

SEQ ID NO: 5062645 - DNA, 25 bp, Homo sapien
cacacccgtgtttgttcctagtctg

SEQ ID NO: 5062646 - DNA, 25 bp, Homo sapien
tgtatgtcccagtcaaccacatgga

SEQ ID NO: 5062647 - DNA, 25 bp, Homo sapien
gcgattgagctttgaccacacccgt

SEQ ID NO: 5062648 - DNA, 25 bp, Homo sapien
gaggatggagttcttagctacttaa

SEQ ID NO: 5062649 - DNA, 25 bp, Homo sapien
caggcttggatgtgccaacgtacag

SEQ ID NO: 5062650 - DNA, 25 bp, Homo sapien
gaccatcaatgagccaaatagtgtg

SEQ ID NO: 5062651 - DNA, 25 bp, Homo sapien
cttagcctcccaggttataagctcc

SEQ ID NO: 5062652 - DNA, 25 bp, Homo sapien
tggacctgtacaccgcaagcaaaga

SEQ ID NO: 5062653 - DNA, 25 bp, Homo sapien
gaagccctgcgttagagaaactaga

SEQ ID NO: 5062654 - DNA, 25 bp, Homo sapien
tactaatattgtagcttgttgcctg

SEQ ID NO: 5062655 - DNA, 25 bp, Homo sapien
tagcatgatgttgtggcttaggcac

SEQ ID NO: 5062656 - DNA, 25 bp, Homo sapien
aaccctgctggtatagcctttctga

SEQ ID NO: 5062657 - DNA, 25 bp, Homo sapien
gccctgcttgacttgaaccttccta

SEQ ID NO: 5062658 - DNA, 25 bp, Homo sapien
gaatcttctagtcttgcagctcgtc

SEQ ID NO: 5062659 - DNA, 25 bp, Homo sapien
catctgggtttctaagactatctgg

SEQ ID NO: 5062660 - DNA, 25 bp, Homo sapien
tatttcaaaattaacgccagtctaa

SEQ ID NO: 5062661 - DNA, 25 bp, Homo sapien
tgaactcagtgtcgcttaggtaaga

SEQ ID NO: 5062662 - DNA, 25 bp, Homo sapien
tacaacacctccagttgtttttcac

SEQ ID NO: 5062663 - DNA, 25 bp, Homo sapien
tgattatcgtaatgaccacagtcct

SEQ ID NO: 5062664 - DNA, 25 bp, Homo sapien
tcaatctgacgctttgcagtagacc

SEQ ID NO: 5062665 - DNA, 25 bp, Homo sapien
tatgacgttgtccataaacacagag

SEQ ID NO: 5062666 - DNA, 25 bp, Homo sapien
gatatcagcttgttcagggtaacag

SEQ ID NO: 5062667 - DNA, 25 bp, Homo sapien
cagtagacctctgcatttcagcaaa

SEQ ID NO: 5062668 - DNA, 25 bp, Homo sapien
actctagtgtaatcttgtgtttttt

SEQ ID NO: 5062669 - DNA, 25 bp, Homo sapien
ctcttgcctacatttgattgattat

SEQ ID NO: 5062670 - DNA, 25 bp, Homo sapien
aacaagattattttgatagctgcca

SEQ ID NO: 5062671 - DNA, 25 bp, Homo sapien
ttcatagtcctcttaaaagaactag

SEQ ID NO: 5062672 - DNA, 25 bp, Homo sapien
aaaaagctatttcttccagcctagg

SEQ ID NO: 5062673 - DNA, 25 bp, Homo sapien
ggagagctactttcaatatacatgg

SEQ ID NO: 5062674 - DNA, 25 bp, Homo sapien
gagaagagaatttaggccttggcaa

SEQ ID NO: 5062675 - DNA, 25 bp, Homo sapien
gtatctcactgacaggtaaagtagg

SEQ ID NO: 5062676 - DNA, 25 bp, Homo sapien
agacttccatgatcttccaccgtta

SEQ ID NO: 5062677 - DNA, 25 bp, Homo sapien
gatcttccaccgttacctgtgcttc

SEQ ID NO: 5062678 - DNA, 25 bp, Homo sapien
ctgttttgatatcttgtcttctgtg

SEQ ID NO: 5062679 - DNA, 25 bp, Homo sapien
ttgcttatgtggccccttctatctg

SEQ ID NO: 5062680 - DNA, 25 bp, Homo sapien
tcatgcaggctctatccaaggaaac

SEQ ID NO: 5062681 - DNA, 25 bp, Homo sapien
tgatagctcatactgtacacatggc

SEQ ID NO: 5062682 - DNA, 25 bp, Homo sapien
tatactgaaactgcatgatgtctga

SEQ ID NO: 5062683 - DNA, 25 bp, Homo sapien
tctgaaactgacgacaatcttatgg

SEQ ID NO: 5062684 - DNA, 25 bp, Homo sapien
ctggctacctccatattagcagcca

SEQ ID NO: 5062685 - DNA, 25 bp, Homo sapien
ctacctccatattagcagccacata

SEQ ID NO: 5062686 - DNA, 25 bp, Homo sapien
gctacctccatattagcagccacat

SEQ ID NO: 5062687 - DNA, 25 bp, Homo sapien
ggctacctccatattagcagccaca

SEQ ID NO: 5062688 - DNA, 25 bp, Homo sapien
tgaaagtctctttgcggaataattc

SEQ ID NO: 5062689 - DNA, 25 bp, Homo sapien
gcggaataattccctgttggaaaca

SEQ ID NO: 5062690 - DNA, 25 bp, Homo sapien
gaataattccctgttggaaacattc

SEQ ID NO: 5062691 - DNA, 25 bp, Homo sapien
gaaagtctctttgcggaataattcc

SEQ ID NO: 5062692 - DNA, 25 bp, Homo sapien
agtgttcagccggttataaggatct

SEQ ID NO: 5062693 - DNA, 25 bp, Homo sapien
atgttttgtagtgttcagccggtta

SEQ ID NO: 5062694 - DNA, 25 bp, Homo sapien
ggttataaggatcttttaccagaga

SEQ ID NO: 5062695 - DNA, 25 bp, Homo sapien
tcagccggttataaggatcttttac

SEQ ID NO: 5062696 - DNA, 25 bp, Homo sapien
tcaaccctcagagtcaggatgatag

SEQ ID NO: 5062697 - DNA, 25 bp, Homo sapien
gataggaattcacttcagtggagac

SEQ ID NO: 5062698 - DNA, 25 bp, Homo sapien
gtttctcattcttccgcaacacacg

SEQ ID NO: 5062699 - DNA, 25 bp, Homo sapien
cacacgcagaacatgaatgccttct

SEQ ID NO: 5062700 - DNA, 25 bp, Homo sapien
gagctttccttggagaggcactggt

SEQ ID NO: 5062701 - DNA, 25 bp, Homo sapien
tttccttggagaggcactggtgaca

SEQ ID NO: 5062702 - DNA, 25 bp, Homo sapien
tgaggagctttccttggagaggcac

SEQ ID NO: 5062703 - DNA, 25 bp, Homo sapien
ctgaggagctttccttggagaggca

SEQ ID NO: 5062704 - DNA, 25 bp, Homo sapien
gccactcagatcctgatgtcctact

SEQ ID NO: 5062705 - DNA, 25 bp, Homo sapien
tgtctgcaatttgatggggccgcag

SEQ ID NO: 5062706 - DNA, 25 bp, Homo sapien
ctgtctggacgtaggacccggaaag

SEQ ID NO: 5062707 - DNA, 25 bp, Homo sapien
tgtcctactgtctggacgtaggacc

SEQ ID NO: 5062708 - DNA, 25 bp, Homo sapien
ggtgttgatgtaggaccttagaaat

SEQ ID NO: 5062709 - DNA, 25 bp, Homo sapien
gatgtaggaccttagaaatgggttc

SEQ ID NO: 5062710 - DNA, 25 bp, Homo sapien
tgttgatgtaggaccttagaaatgg

SEQ ID NO: 5062711 - DNA, 25 bp, Homo sapien
tcaaaggtgttgatgtaggacctta

SEQ ID NO: 5062712 - DNA, 25 bp, Homo sapien
cagccacgtcctcttggttggagcc

SEQ ID NO: 5062713 - DNA, 25 bp, Homo sapien
ggttggagcctgagttctggaagct

SEQ ID NO: 5062714 - DNA, 25 bp, Homo sapien
cctttacttccatcctaatggcagc

SEQ ID NO: 5062715 - DNA, 25 bp, Homo sapien
tacttccatcctaatggcagccacg

SEQ ID NO: 5062716 - DNA, 25 bp, Homo sapien
gcaggacctgcccatgtgattgatg

SEQ ID NO: 5062717 - DNA, 25 bp, Homo sapien
gtgattgatgagccaccgaggtgtg

SEQ ID NO: 5062718 - DNA, 25 bp, Homo sapien
ccgcaggacctgcccatgtgattga

SEQ ID NO: 5062719 - DNA, 25 bp, Homo sapien
gccaccgaggtgtgcagggggctgc

SEQ ID NO: 5062720 - DNA, 25 bp, Homo sapien
acattccatcgcaggtcgtggctca

SEQ ID NO: 5062721 - DNA, 25 bp, Homo sapien
tcgtggctcactgggtagatgccat

SEQ ID NO: 5062722 - DNA, 25 bp, Homo sapien
ggcccctctgtgacattccatcgca

SEQ ID NO: 5062723 - DNA, 25 bp, Homo sapien
cctccttaggtgaaaagtgggcagg

SEQ ID NO: 5062724 - DNA, 25 bp, Homo sapien
tcataggaagatcaagtggaggaag

SEQ ID NO: 5062725 - DNA, 25 bp, Homo sapien
tctgagaagggatttccaggttcat

SEQ ID NO: 5062726 - DNA, 25 bp, Homo sapien
tgaattctatccaggttaggaaagg

SEQ ID NO: 5062727 - DNA, 25 bp, Homo sapien
taggaaaggttgtcttctgagaagg

SEQ ID NO: 5062728 - DNA, 25 bp, Homo sapien
cccaacaagacagtcagtctccatc

SEQ ID NO: 5062729 - DNA, 25 bp, Homo sapien
ccatcttctggggtattcattctta

SEQ ID NO: 5062730 - DNA, 25 bp, Homo sapien
agacagtcagtctccatcttctggg

SEQ ID NO: 5062731 - DNA, 25 bp, Homo sapien
tctccatcttctggggtattcattc

SEQ ID NO: 5062732 - DNA, 25 bp, Homo sapien
tcatgcattgctgagaggatggctc

SEQ ID NO: 5062733 - DNA, 25 bp, Homo sapien
tgtcaccacactgcgttggcacagg

SEQ ID NO: 5062734 - DNA, 25 bp, Homo sapien
gcttggatatgcatagaggccttct

SEQ ID NO: 5062735 - DNA, 25 bp, Homo sapien
gacccagcaaatccacatcaaggtg

SEQ ID NO: 5062736 - DNA, 25 bp, Homo sapien
tgtgcttcatgcatggtgcactgca

SEQ ID NO: 5062737 - DNA, 25 bp, Homo sapien
tgttacttcatagctcggaaacttc

SEQ ID NO: 5062738 - DNA, 25 bp, Homo sapien
tcggaaacttcatctgaagggccat

SEQ ID NO: 5062739 - DNA, 25 bp, Homo sapien
cagtggagttcccttgcccgatgtg

SEQ ID NO: 5062740 - DNA, 25 bp, Homo sapien
cactggtggagcacagagacttggc

SEQ ID NO: 5062741 - DNA, 25 bp, Homo sapien
gagacttggcactagaaagactccg

SEQ ID NO: 5062742 - DNA, 25 bp, Homo sapien
gcacagtcatcattgcctgctacgg

SEQ ID NO: 5062743 - DNA, 25 bp, Homo sapien
ggcactagaaagactccgttgtcaa

SEQ ID NO: 5062744 - DNA, 25 bp, Homo sapien
cttggctgggcctgggtttcacggg

SEQ ID NO: 5062745 - DNA, 25 bp, Homo sapien
tgggtttcacgggtctcatcccttc

SEQ ID NO: 5062746 - DNA, 25 bp, Homo sapien
tcctattagtttgtcccgtgccctc

SEQ ID NO: 5062747 - DNA, 25 bp, Homo sapien
tcctcctattagtttgtcccgtgcc

SEQ ID NO: 5062748 - DNA, 25 bp, Homo sapien
gtcagagtagggagacccctggtca

SEQ ID NO: 5062749 - DNA, 25 bp, Homo sapien
cagagtagggagacccctggtcact

SEQ ID NO: 5062750 - DNA, 25 bp, Homo sapien
ttcttgttccctcaatacatcacct

SEQ ID NO: 5062751 - DNA, 25 bp, Homo sapien
catcacctccagtccctatcatgaa

SEQ ID NO: 5062752 - DNA, 25 bp, Homo sapien
acgctgaggtcagtgtaaaccaagg

SEQ ID NO: 5062753 - DNA, 25 bp, Homo sapien
tttgaggatcagacgctgaggtcag

SEQ ID NO: 5062754 - DNA, 25 bp, Homo sapien
tgctttgaggatcagacgctgaggt

SEQ ID NO: 5062755 - DNA, 25 bp, Homo sapien
ctgctttgaggatcagacgctgagg

SEQ ID NO: 5062756 - DNA, 25 bp, Homo sapien
ggaaagcggatggccctgattatct

SEQ ID NO: 5062757 - DNA, 25 bp, Homo sapien
aaagcggatggccctgattatctgt

SEQ ID NO: 5062758 - DNA, 25 bp, Homo sapien
gaaagcggatggccctgattatctg

SEQ ID NO: 5062759 - DNA, 25 bp, Homo sapien
caagcggagattatacctccttgcc

SEQ ID NO: 5062760 - DNA, 25 bp, Homo sapien
ggagattatacctccttgcccaacc

SEQ ID NO: 5062761 - DNA, 25 bp, Homo sapien
tgctccaagcggagattatacctcc

SEQ ID NO: 5062762 - DNA, 25 bp, Homo sapien
ctccagccatgctccaagcggagat

SEQ ID NO: 5062763 - DNA, 25 bp, Homo sapien
tgcctggctttgactccaggaacaa

SEQ ID NO: 5062764 - DNA, 25 bp, Homo sapien
acaagcttgctcagccactggtcca

SEQ ID NO: 5062765 - DNA, 25 bp, Homo sapien
ggctgtgtcccgagtctgcctggct

SEQ ID NO: 5062766 - DNA, 25 bp, Homo sapien
tctctgcactatcttgtttcttgca

SEQ ID NO: 5062767 - DNA, 25 bp, Homo sapien
gcactcatattactgacaagggtag

SEQ ID NO: 5062768 - DNA, 25 bp, Homo sapien
caataagaaattggaggtcaccacc

SEQ ID NO: 5062769 - DNA, 25 bp, Homo sapien
gcaatatccagtcagagcctccaag

SEQ ID NO: 5062770 - DNA, 25 bp, Homo sapien
caagggtagatataaaacagcgcat

SEQ ID NO: 5062771 - DNA, 25 bp, Homo sapien
tccaaaagattgattgacctgtcca

SEQ ID NO: 5062772 - DNA, 25 bp, Homo sapien
gcagaagcacatatgaactggacct

SEQ ID NO: 5062773 - DNA, 25 bp, Homo sapien
tctgaactcagaaggatggcatttt

SEQ ID NO: 5062774 - DNA, 25 bp, Homo sapien
gaacccctacatgaagcttgctcca

SEQ ID NO: 5062775 - DNA, 25 bp, Homo sapien
gctacgtaatcttcaggacctttta

SEQ ID NO: 5062776 - DNA, 25 bp, Homo sapien
taatcttcaggaccttttacaattc

SEQ ID NO: 5062777 - DNA, 25 bp, Homo sapien
tcttcaggaccttttacaattcatt

SEQ ID NO: 5062778 - DNA, 25 bp, Homo sapien
tacgtaatcttcaggaccttttaca

SEQ ID NO: 5062779 - DNA, 25 bp, Homo sapien
tatacactagggaggaactttgcac

SEQ ID NO: 5062780 - DNA, 25 bp, Homo sapien
tctctgaaagacaacgtgcccaagg

SEQ ID NO: 5062781 - DNA, 25 bp, Homo sapien
tcaaaactgagttgagggtccggga

SEQ ID NO: 5062782 - DNA, 25 bp, Homo sapien
gacgtgaggttccagaaagcagcca

SEQ ID NO: 5062783 - DNA, 25 bp, Homo sapien
cccagccgtaggcaccgtgggcatg

SEQ ID NO: 5062784 - DNA, 25 bp, Homo sapien
ccccagccgtaggcaccgtgggcat

SEQ ID NO: 5062785 - DNA, 25 bp, Homo sapien
aatgggaaggaaaagcgcacctcaa

SEQ ID NO: 5062786 - DNA, 25 bp, Homo sapien
tgggaaggaaaagcgcacctcaata

SEQ ID NO: 5062787 - DNA, 25 bp, Homo sapien
ggaaggaaaagcgcacctcaatatc

SEQ ID NO: 5062788 - DNA, 25 bp, Homo sapien
ggaatgggaaggaaaagcgcacctc

SEQ ID NO: 5062789 - DNA, 25 bp, Homo sapien
cacacaaaatcgaagatggtacgtt

SEQ ID NO: 5062790 - DNA, 25 bp, Homo sapien
gaagatggtacgttagcctctaaga

SEQ ID NO: 5062791 - DNA, 25 bp, Homo sapien
aaaggaacatttgcacaccgtgact

SEQ ID NO: 5062792 - DNA, 25 bp, Homo sapien
tttgcacaccgtgacttcagtgcag

SEQ ID NO: 5062793 - DNA, 25 bp, Homo sapien
gactgcacgctttgaggtagactct

SEQ ID NO: 5062794 - DNA, 25 bp, Homo sapien
gagccaggtcgagctttccaatgac

SEQ ID NO: 5062795 - DNA, 25 bp, Homo sapien
ccagcattggtaggagacagcatct

SEQ ID NO: 5062796 - DNA, 25 bp, Homo sapien
tgcctgagcagaccattgagattcc

SEQ ID NO: 5062797 - DNA, 25 bp, Homo sapien
ttacagtcagactccagaacaccag

SEQ ID NO: 5062798 - DNA, 25 bp, Homo sapien
gaggaattactctccaatgtatggg

SEQ ID NO: 5062799 - DNA, 25 bp, Homo sapien
tgaggcccagcaatattcttaagag

SEQ ID NO: 5062800 - DNA, 25 bp, Homo sapien
gaacaccagaattaagccatggcat

SEQ ID NO: 5062801 - DNA, 25 bp, Homo sapien
gtatgactctgtttgcactcaccca

SEQ ID NO: 5062802 - DNA, 25 bp, Homo sapien
aagagactgatatgggtggagaaca

SEQ ID NO: 5062803 - DNA, 25 bp, Homo sapien
gttaaaacacagctggacctggtgg

SEQ ID NO: 5062804 - DNA, 25 bp, Homo sapien
acaaccactcgggtgtccgtatggg

SEQ ID NO: 5062805 - DNA, 25 bp, Homo sapien
tcctgatgtaaccagagtggctgca

SEQ ID NO: 5062806 - DNA, 25 bp, Homo sapien
tccctaagaccaaagtcagcatggg

SEQ ID NO: 5062807 - DNA, 25 bp, Homo sapien
gaaactcagagagtacccagtggga

SEQ ID NO: 5062808 - DNA, 25 bp, Homo sapien
gctgtgggagataagtccgtcacct

SEQ ID NO: 5062809 - DNA, 25 bp, Homo sapien
tcactggagggagtttagctgccca

SEQ ID NO: 5062810 - DNA, 25 bp, Homo sapien
agcttgtctccctaaccagagtgga

SEQ ID NO: 5062811 - DNA, 25 bp, Homo sapien
cactagcggtttcctgcgtacacag

SEQ ID NO: 5062812 - DNA, 25 bp, Homo sapien
ggaatcatcagtcttcaccagtagc

SEQ ID NO: 5062813 - DNA, 25 bp, Homo sapien
cctgtcctacatctaagtgtttttg

SEQ ID NO: 5062814 - DNA, 25 bp, Homo sapien
ctgttttccctgtcctacatctaag

SEQ ID NO: 5062815 - DNA, 25 bp, Homo sapien
tttccctgtcctacatctaagtgtt

SEQ ID NO: 5062816 - DNA, 25 bp, Homo sapien
gttttccctgtcctacatctaagtg

SEQ ID NO: 5062817 - DNA, 25 bp, Homo sapien
gatttccaatttccctccgactgca

SEQ ID NO: 5062818 - DNA, 25 bp, Homo sapien
gcagcatgtccaaaaacaagtaagt

SEQ ID NO: 5062819 - DNA, 25 bp, Homo sapien
tggagagcatagatcaccctgtggt

SEQ ID NO: 5062820 - DNA, 25 bp, Homo sapien
aatgtcacttctgtcatcggtgtgg

SEQ ID NO: 5062821 - DNA, 25 bp, Homo sapien
ctgggcacagcactaccctttgaaa

SEQ ID NO: 5062822 - DNA, 25 bp, Homo sapien
cagcactaccctttgaaactgaggt

SEQ ID NO: 5062823 - DNA, 25 bp, Homo sapien
agctccatccattgaattctcagaa

SEQ ID NO: 5062824 - DNA, 25 bp, Homo sapien
gctccatccattgaattctcagaaa

SEQ ID NO: 5062825 - DNA, 25 bp, Homo sapien
cattcataatgaggaatctggccta

SEQ ID NO: 5062826 - DNA, 25 bp, Homo sapien
ggcctatagtcagcgggtaaccact

SEQ ID NO: 5062827 - DNA, 25 bp, Homo sapien
tcctggataatgagcacaaaatagc

SEQ ID NO: 5062828 - DNA, 25 bp, Homo sapien
gcacaaaatagcattcataatgagg

SEQ ID NO: 5062829 - DNA, 25 bp, Homo sapien
attcaggcagttaaactcaagagaa

SEQ ID NO: 5062830 - DNA, 25 bp, Homo sapien
aattcaggcagttaaactcaagaga

SEQ ID NO: 5062831 - DNA, 25 bp, Homo sapien
gcttccagaggtgtatgatattacc

SEQ ID NO: 5062832 - DNA, 25 bp, Homo sapien
gatcatagcccacaatcagtagagg

SEQ ID NO: 5062833 - DNA, 25 bp, Homo sapien
tctgtgaagctctggcagtgccaag

SEQ ID NO: 5062834 - DNA, 25 bp, Homo sapien
gaaattcttgtactcctaattggcc

SEQ ID NO: 5062835 - DNA, 25 bp, Homo sapien
cctggactctactgcagacctggtg

SEQ ID NO: 5062836 - DNA, 25 bp, Homo sapien
atctagatatagtggcagccttccc

SEQ ID NO: 5062837 - DNA, 25 bp, Homo sapien
tatcagagtttataggcaggcaaag

SEQ ID NO: 5062838 - DNA, 25 bp, Homo sapien
ccagtagtatttgagctcagctcca

SEQ ID NO: 5062839 - DNA, 25 bp, Homo sapien
gctgacaatgcttgagcaaggccct

SEQ ID NO: 5062840 - DNA, 25 bp, Homo sapien
ggagaaccgaagtgaccctgcattg

SEQ ID NO: 5062841 - DNA, 25 bp, Homo sapien
cattgtgtccaagcttgggctgaca

SEQ ID NO: 5062842 - DNA, 25 bp, Homo sapien
ggtccacagcctgcaactgaaaggt

SEQ ID NO: 5062843 - DNA, 25 bp, Homo sapien
tgtcatatgggtgtgacacattggg

SEQ ID NO: 5062844 - DNA, 25 bp, Homo sapien
aggatgtagcttgtcatatgggtgt

SEQ ID NO: 5062845 - DNA, 25 bp, Homo sapien
cctggctgtgcaagggttggagttc

SEQ ID NO: 5062846 - DNA, 25 bp, Homo sapien
cacattggggtggtatcaccccact

SEQ ID NO: 5062847 - DNA, 25 bp, Homo sapien
gggagttcttgaagctggcattagg

SEQ ID NO: 5062848 - DNA, 25 bp, Homo sapien
tgggagttcttgaagctggcattag

SEQ ID NO: 5062849 - DNA, 25 bp, Homo sapien
aggccatggagagactctggacggg

SEQ ID NO: 5062850 - DNA, 25 bp, Homo sapien
ccagagctggaaaaataccgctagg

SEQ ID NO: 5062851 - DNA, 25 bp, Homo sapien
tgcagctgcgcaaagcgtcccgcct

SEQ ID NO: 5062852 - DNA, 25 bp, Homo sapien
aaaaataccgctagggcccaagatg

SEQ ID NO: 5062853 - DNA, 25 bp, Homo sapien
cccagggagcatgtgcgggcttgaa

SEQ ID NO: 5062854 - DNA, 25 bp, Homo sapien
taatatgtgatattgtcagatccac

SEQ ID NO: 5062855 - DNA, 25 bp, Homo sapien
aatatgtgatattgtcagatccaca

SEQ ID NO: 5062856 - DNA, 25 bp, Homo sapien
atatgtgatattgtcagatccacat

SEQ ID NO: 5062857 - DNA, 25 bp, Homo sapien
ttaatatgtgatattgtcagatcca

SEQ ID NO: 5062858 - DNA, 25 bp, Homo sapien
gcaatacatggtagtcaaactcaca

SEQ ID NO: 5062859 - DNA, 25 bp, Homo sapien
ccgcgatctatgaggagcactgtat

SEQ ID NO: 5062860 - DNA, 25 bp, Homo sapien
tgaagcaatctgtggaccagcaact

SEQ ID NO: 5062861 - DNA, 25 bp, Homo sapien
caaatactacccgtggcggtagctc

SEQ ID NO: 5062862 - DNA, 25 bp, Homo sapien
tcctaattgtaactcgagagcctga

SEQ ID NO: 5062863 - DNA, 25 bp, Homo sapien
tagcttgcacataacctttcacttg

SEQ ID NO: 5062864 - DNA, 25 bp, Homo sapien
ctgcaacttatccagaacatgctga

SEQ ID NO: 5062865 - DNA, 25 bp, Homo sapien
catttgcagaggtaaaatagcttgc

SEQ ID NO: 5062866 - DNA, 25 bp, Homo sapien
cacacgtgggactagtttcttgaca

SEQ ID NO: 5062867 - DNA, 25 bp, Homo sapien
cataaattgagggtatagcctcgct

SEQ ID NO: 5062868 - DNA, 25 bp, Homo sapien
gcagtccaaaattatcacacgtggg

SEQ ID NO: 5062869 - DNA, 25 bp, Homo sapien
acttgggctcaatgcagatgatacc

SEQ ID NO: 5062870 - DNA, 25 bp, Homo sapien
ctgcaaagctgtttacatcagacac

SEQ ID NO: 5062871 - DNA, 25 bp, Homo sapien
tgaatcagacatcggacaaagtact

SEQ ID NO: 5062872 - DNA, 25 bp, Homo sapien
cttgtctcactcaagatattggaga

SEQ ID NO: 5062873 - DNA, 25 bp, Homo sapien
gtacttgtgtgcctacagtcttcag

SEQ ID NO: 5062874 - DNA, 25 bp, Homo sapien
gctatgtaggcagcctctatctcca

SEQ ID NO: 5062875 - DNA, 25 bp, Homo sapien
taatacatatgctataaaagctatg

SEQ ID NO: 5062876 - DNA, 25 bp, Homo sapien
tataaaagctatgtaggcagcctct

SEQ ID NO: 5062877 - DNA, 25 bp, Homo sapien
gatgggtttaatacatatgctataa

SEQ ID NO: 5062878 - DNA, 25 bp, Homo sapien
tctcaagaatatgtgcagctccagg

SEQ ID NO: 5062879 - DNA, 25 bp, Homo sapien
tacatggataactcagccttggcaa

SEQ ID NO: 5062880 - DNA, 25 bp, Homo sapien
tattaacagctagggactttggcaa

SEQ ID NO: 5062881 - DNA, 25 bp, Homo sapien
tgaacagcacatcgctaaggcaggc

SEQ ID NO: 5062882 - DNA, 25 bp, Homo sapien
catgcatgtgtggttaaaatctttc

SEQ ID NO: 5062883 - DNA, 25 bp, Homo sapien
ttgtgaaacgtcatgcgtgtgtgca

SEQ ID NO: 5062884 - DNA, 25 bp, Homo sapien
caaaatcagacaatactgtagtgca

SEQ ID NO: 5062885 - DNA, 25 bp, Homo sapien
tcaaaataagcgcaggaagctcact

SEQ ID NO: 5062886 - DNA, 25 bp, Homo sapien
ttggtagggaacaatgactagcaac

SEQ ID NO: 5062887 - DNA, 25 bp, Homo sapien
gcttaattcagccaaagtcagcttc

SEQ ID NO: 5062888 - DNA, 25 bp, Homo sapien
acatagggatagtagcaacagtgac

SEQ ID NO: 5062889 - DNA, 25 bp, Homo sapien
ttctcattgggcaagttatgcaaca

SEQ ID NO: 5062890 - DNA, 25 bp, Homo sapien
tttggccaaccagaaaagagcaatg

SEQ ID NO: 5062891 - DNA, 25 bp, Homo sapien
ccaaccagaaaagagcaatgtgaga

SEQ ID NO: 5062892 - DNA, 25 bp, Homo sapien
aaccagaaaagagcaatgtgagaaa

SEQ ID NO: 5062893 - DNA, 25 bp, Homo sapien
ggccaaccagaaaagagcaatgtga

SEQ ID NO: 5062894 - DNA, 25 bp, Homo sapien
cagagacgtgaatttgctcaaagtc

SEQ ID NO: 5062895 - DNA, 25 bp, Homo sapien
tcacaaagtagtaagtaacagagct

SEQ ID NO: 5062896 - DNA, 25 bp, Homo sapien
atctagacacctgcagaccagcctg

SEQ ID NO: 5062897 - DNA, 25 bp, Homo sapien
gagctaggatccaaatctagacacc

SEQ ID NO: 5062898 - DNA, 25 bp, Homo sapien
tgtgtaatcatgtctctcagggctg

SEQ ID NO: 5062899 - DNA, 25 bp, Homo sapien
ccacaggatatagggagaccaaaag

SEQ ID NO: 5062900 - DNA, 25 bp, Homo sapien
caatgtcagggctctatcatagacc

SEQ ID NO: 5062901 - DNA, 25 bp, Homo sapien
agggctgactgacacgtttgtgctc

SEQ ID NO: 5062902 - DNA, 25 bp, Homo sapien
gacaccaccagaatattaagtacta

SEQ ID NO: 5062903 - DNA, 25 bp, Homo sapien
tactggacaccaccagaatattaag

SEQ ID NO: 5062904 - DNA, 25 bp, Homo sapien
aaaacttgtactggacaccaccaga

SEQ ID NO: 5062905 - DNA, 25 bp, Homo sapien
acttgtactggacaccaccagaata

SEQ ID NO: 5062906 - DNA, 25 bp, Homo sapien
ttctaaagaaaggacaatgtcaccg

SEQ ID NO: 5062907 - DNA, 25 bp, Homo sapien
gagataaaccctgctcgtatttcct

SEQ ID NO: 5062908 - DNA, 25 bp, Homo sapien
aaaggacaatgtcaccgagggtgct

SEQ ID NO: 5062909 - DNA, 25 bp, Homo sapien
ccgagggtgctagaagagataaacc

SEQ ID NO: 5062910 - DNA, 25 bp, Homo sapien
cagaagccggtgctctttactggcc

SEQ ID NO: 5062911 - DNA, 25 bp, Homo sapien
gcacagacgcaaacccagagacgtt

SEQ ID NO: 5062912 - DNA, 25 bp, Homo sapien
tttcagaaatctcagtccggctcac

SEQ ID NO: 5062913 - DNA, 25 bp, Homo sapien
ggctcagtgccaagctctctgtcat

SEQ ID NO: 5062914 - DNA, 25 bp, Homo sapien
gagagaccattcatactgcctggca

SEQ ID NO: 5062915 - DNA, 25 bp, Homo sapien
ggtgatccctctggaacacggtgag

SEQ ID NO: 5062916 - DNA, 25 bp, Homo sapien
taattgcacagacaagagagaccat

SEQ ID NO: 5062917 - DNA, 25 bp, Homo sapien
tcccaagctcatacaaagtccaggc

SEQ ID NO: 5062918 - DNA, 25 bp, Homo sapien
gatttagaagtggagccatattcac

SEQ ID NO: 5062919 - DNA, 25 bp, Homo sapien
tttagaagtggagccatattcaccc

SEQ ID NO: 5062920 - DNA, 25 bp, Homo sapien
gatgcaatcgcttccagtggatgga

SEQ ID NO: 5062921 - DNA, 25 bp, Homo sapien
ctgtcagcaggatgcaatcgcttcc

SEQ ID NO: 5062922 - DNA, 25 bp, Homo sapien
ggacacagttcctggtctgggggag

SEQ ID NO: 5062923 - DNA, 25 bp, Homo sapien
agccttgatagccctccctgagctg

SEQ ID NO: 5062924 - DNA, 25 bp, Homo sapien
gccttgatagccctccctgagctgg

SEQ ID NO: 5062925 - DNA, 25 bp, Homo sapien
cacagttcctggtctgggggagtcc

SEQ ID NO: 5062926 - DNA, 25 bp, Homo sapien
tcttgattcttaagcttccattccc

SEQ ID NO: 5062927 - DNA, 25 bp, Homo sapien
tcttaagcttccattcccatttaag

SEQ ID NO: 5062928 - DNA, 25 bp, Homo sapien
gattcttaagcttccattcccattt

SEQ ID NO: 5062929 - DNA, 25 bp, Homo sapien
ttaagcttccattcccatttaagtg

SEQ ID NO: 5062930 - DNA, 25 bp, Homo sapien
cttggaccctcacatcagctgagaa

SEQ ID NO: 5062931 - DNA, 25 bp, Homo sapien
tcacatcagctgagaatccttcacc

SEQ ID NO: 5062932 - DNA, 25 bp, Homo sapien
agaatccttcaccaccactaagcat

SEQ ID NO: 5062933 - DNA, 25 bp, Homo sapien
aagcaccttggaccctcacatcagc

SEQ ID NO: 5062934 - DNA, 25 bp, Homo sapien
tatcacctccctcaattgagttggg

SEQ ID NO: 5062935 - DNA, 25 bp, Homo sapien
gagttgggatttcctgtgcgccccg

SEQ ID NO: 5062936 - DNA, 25 bp, Homo sapien
gggcaacagataatcagggcacatt

SEQ ID NO: 5062937 - DNA, 25 bp, Homo sapien
tgctaggcactatgacaggccctga

SEQ ID NO: 5062938 - DNA, 25 bp, Homo sapien
cgatggccactgaaagggaccagga

SEQ ID NO: 5062939 - DNA, 25 bp, Homo sapien
tggccactgaaagggaccaggaggg

SEQ ID NO: 5062940 - DNA, 25 bp, Homo sapien
accgatggccactgaaagggaccag

SEQ ID NO: 5062941 - DNA, 25 bp, Homo sapien
caccgatggccactgaaagggacca

SEQ ID NO: 5062942 - DNA, 25 bp, Homo sapien
agttcaccggcatcatcacagccct

SEQ ID NO: 5062943 - DNA, 25 bp, Homo sapien
ttagttcaccggcatcatcacagcc

SEQ ID NO: 5062944 - DNA, 25 bp, Homo sapien
tagttcaccggcatcatcacagccc

SEQ ID NO: 5062945 - DNA, 25 bp, Homo sapien
gggacaggaccatggtatttgtcaa

SEQ ID NO: 5062946 - DNA, 25 bp, Homo sapien
gacaggaccatggtatttgtcaaga

SEQ ID NO: 5062947 - DNA, 25 bp, Homo sapien
tagccacaggggacaggaccatggt

SEQ ID NO: 5062948 - DNA, 25 bp, Homo sapien
cacaggggacaggaccatggtattt

SEQ ID NO: 5062949 - DNA, 25 bp, Homo sapien
tcgtcagtgctgactacaatagctc

SEQ ID NO: 5062950 - DNA, 25 bp, Homo sapien
ggtggctcgtcagtgctgactacaa

SEQ ID NO: 5062951 - DNA, 25 bp, Homo sapien
tgactacaatagctccatctcctga

SEQ ID NO: 5062952 - DNA, 25 bp, Homo sapien
gaggctggtggctcgtcagtgctga

SEQ ID NO: 5062953 - DNA, 25 bp, Homo sapien
ggacctgcagaggatccctgtctgc

SEQ ID NO: 5062954 - DNA, 25 bp, Homo sapien
agcaggaggacctgcagaggatccc

SEQ ID NO: 5062955 - DNA, 25 bp, Homo sapien
gaggacctgcagaggatccctgtct

SEQ ID NO: 5062956 - DNA, 25 bp, Homo sapien
aggaggacctgcagaggatccctgt

SEQ ID NO: 5062957 - DNA, 25 bp, Homo sapien
gacctcggtcctccttactgtacag

SEQ ID NO: 5062958 - DNA, 25 bp, Homo sapien
ctcggtcctccttactgtacagctc

SEQ ID NO: 5062959 - DNA, 25 bp, Homo sapien
catgacctcggtcctccttactgta

SEQ ID NO: 5062960 - DNA, 25 bp, Homo sapien
ctcatgacctcggtcctccttactg

SEQ ID NO: 5062961 - DNA, 25 bp, Homo sapien
agcagccgccgacctctcagaatgg

SEQ ID NO: 5062962 - DNA, 25 bp, Homo sapien
ttagcagccgccgacctctcagaat

SEQ ID NO: 5062963 - DNA, 25 bp, Homo sapien
gtcagaggccacttcgtggccagag

SEQ ID NO: 5062964 - DNA, 25 bp, Homo sapien
tctcagaatggccaagtcagaggcc

SEQ ID NO: 5062965 - DNA, 25 bp, Homo sapien
agataggttctacagccaccccaag

SEQ ID NO: 5062966 - DNA, 25 bp, Homo sapien
caagatcattgaacacctgcgtgtg

SEQ ID NO: 5062967 - DNA, 25 bp, Homo sapien
accccaagatcattgaacacctgcg

SEQ ID NO: 5062968 - DNA, 25 bp, Homo sapien
taatgccccttcaaagataggttct

SEQ ID NO: 5062969 - DNA, 25 bp, Homo sapien
gagtctcatatcctgtcatccacaa

SEQ ID NO: 5062970 - DNA, 25 bp, Homo sapien
tccacaggtccagagtctcatatcc

SEQ ID NO: 5062971 - DNA, 25 bp, Homo sapien
tcccagagggcagttctccggagtt

SEQ ID NO: 5062972 - DNA, 25 bp, Homo sapien
ggcagttctccggagttctctcctc

SEQ ID NO: 5062973 - DNA, 25 bp, Homo sapien
ggtttggcggctgtagcttcatgct

SEQ ID NO: 5062974 - DNA, 25 bp, Homo sapien
tggtcatacagttggtgtcagtggc

SEQ ID NO: 5062975 - DNA, 25 bp, Homo sapien
tcataggttgcaaggtaacgtgagg

SEQ ID NO: 5062976 - DNA, 25 bp, Homo sapien
tgacaacacaaagctgcatagaagt

SEQ ID NO: 5062977 - DNA, 25 bp, Homo sapien
taagtccctgctgtgcaacttgcat

SEQ ID NO: 5062978 - DNA, 25 bp, Homo sapien
tattaagtccctgctgtgcaacttg

SEQ ID NO: 5062979 - DNA, 25 bp, Homo sapien
ttaagtccctgctgtgcaacttgca

SEQ ID NO: 5062980 - DNA, 25 bp, Homo sapien
cttattaagtccctgctgtgcaact

SEQ ID NO: 5062981 - DNA, 25 bp, Homo sapien
caatgctgcagcgtcttaaatcttt

SEQ ID NO: 5062982 - DNA, 25 bp, Homo sapien
tgcaatgctgcagcgtcttaaatct

SEQ ID NO: 5062983 - DNA, 25 bp, Homo sapien
gctgcagcgtcttaaatcttttcca

SEQ ID NO: 5062984 - DNA, 25 bp, Homo sapien
cggtgcaatgctgcagcgtcttaaa

SEQ ID NO: 5062985 - DNA, 25 bp, Homo sapien
ttagaggcgagctgtctccctggtg

SEQ ID NO: 5062986 - DNA, 25 bp, Homo sapien
gctaaatttagaggcgagctgtctc

SEQ ID NO: 5062987 - DNA, 25 bp, Homo sapien
gtctccctggtgtgagaggtccggg

SEQ ID NO: 5062988 - DNA, 25 bp, Homo sapien
aaatttagaggcgagctgtctccct

SEQ ID NO: 5062989 - DNA, 25 bp, Homo sapien
tcatggcccccgcttgtccactgtc

SEQ ID NO: 5062990 - DNA, 25 bp, Homo sapien
catggcccccgcttgtccactgtct

SEQ ID NO: 5062991 - DNA, 25 bp, Homo sapien
tagccatggagtcaaaaatcccttg

SEQ ID NO: 5062992 - DNA, 25 bp, Homo sapien
gtagaatcaaggtctgctccccaga

SEQ ID NO: 5062993 - DNA, 25 bp, Homo sapien
tctcaaaaggccaagtgtagactgc

SEQ ID NO: 5062994 - DNA, 25 bp, Homo sapien
tacttttaggatagctctgaacgca

SEQ ID NO: 5062995 - DNA, 25 bp, Homo sapien
tgtgtgcctacagaacaacaaagcg

SEQ ID NO: 5062996 - DNA, 25 bp, Homo sapien
gatggttcacatcagggttcaacga

SEQ ID NO: 5062997 - DNA, 25 bp, Homo sapien
cagagcatcgaaggattaggtcacc

SEQ ID NO: 5062998 - DNA, 25 bp, Homo sapien
gaactaccaaggcaaaagatgtctg

SEQ ID NO: 5062999 - DNA, 25 bp, Homo sapien
ccgacccttcttgcctcacattgag

SEQ ID NO: 5063000 - DNA, 25 bp, Homo sapien
atggaaatcccaatacacccatgca

SEQ ID NO: 5063001 - DNA, 25 bp, Homo sapien
tgatttagcgctaactctccaccct

SEQ ID NO: 5063002 - DNA, 25 bp, Homo sapien
tacacccatgcactccttgttgttt

SEQ ID NO: 5063003 - DNA, 25 bp, Homo sapien
caatgctatttctagacaatttccc

SEQ ID NO: 5063004 - DNA, 25 bp, Homo sapien
ttcctgtagaaggtcccctgcttct

SEQ ID NO: 5063005 - DNA, 25 bp, Homo sapien
ctgttttcctgtagaaggtcccctg

SEQ ID NO: 5063006 - DNA, 25 bp, Homo sapien
acattctctgatagctgctcaatgc

SEQ ID NO: 5063007 - DNA, 25 bp, Homo sapien
aggaattattaatgtaccctccctg

SEQ ID NO: 5063008 - DNA, 25 bp, Homo sapien
ctccctggagggtttcaatttcact

SEQ ID NO: 5063009 - DNA, 25 bp, Homo sapien
taccaagtgtatgttcagtgtgcct

SEQ ID NO: 5063010 - DNA, 25 bp, Homo sapien
cagtgtgcctatctatgaaatttaa

SEQ ID NO: 5063011 - DNA, 25 bp, Homo sapien
cctgccaaggtcatagtttcaatct

SEQ ID NO: 5063012 - DNA, 25 bp, Homo sapien
aaatcttctgcactacctgccaagg

SEQ ID NO: 5063013 - DNA, 25 bp, Homo sapien
tacatagctcttatcaggaaatccc

SEQ ID NO: 5063014 - DNA, 25 bp, Homo sapien
aaatcccttgaaagctgaattccag

SEQ ID NO: 5063015 - DNA, 25 bp, Homo sapien
cagaggctggaagaaacatctcatc

SEQ ID NO: 5063016 - DNA, 25 bp, Homo sapien
cagtcactaaaaccatctgtgtggg

SEQ ID NO: 5063017 - DNA, 25 bp, Homo sapien
catgtgataaatagccccagacggc

SEQ ID NO: 5063018 - DNA, 25 bp, Homo sapien
gaaatggagctgcacaaaagataca

SEQ ID NO: 5063019 - DNA, 25 bp, Homo sapien
gcctgcttccctaggttgcgggtta

SEQ ID NO: 5063020 - DNA, 25 bp, Homo sapien
gacagctaggtcatctcctaccagg

SEQ ID NO: 5063021 - DNA, 25 bp, Homo sapien
ctaatttgtgagagaatggccctgg

SEQ ID NO: 5063022 - DNA, 25 bp, Homo sapien
cagatagattctgcttggagctcca

SEQ ID NO: 5063023 - DNA, 25 bp, Homo sapien
ttctcatcatggtcagcggtaactg

SEQ ID NO: 5063024 - DNA, 25 bp, Homo sapien
tcatcatggtcagcggtaactgaat

SEQ ID NO: 5063025 - DNA, 25 bp, Homo sapien
catggtcagcggtaactgaatacaa

SEQ ID NO: 5063026 - DNA, 25 bp, Homo sapien
cagcggtaactgaatacaaggccat

SEQ ID NO: 5063027 - DNA, 25 bp, Homo sapien
gacatggttacagatcagtctttcc

SEQ ID NO: 5063028 - DNA, 25 bp, Homo sapien
gaagagaggccaatttaccacaacc

SEQ ID NO: 5063029 - DNA, 25 bp, Homo sapien
cagtagggcaggtaacatgtatgtc

SEQ ID NO: 5063030 - DNA, 25 bp, Homo sapien
tatctatgcgtaaggtggatctctc

SEQ ID NO: 5063031 - DNA, 25 bp, Homo sapien
tcatgtcattaggaaggccaagtct

SEQ ID NO: 5063032 - DNA, 25 bp, Homo sapien
tatcctctatagacacacacgtgtg

SEQ ID NO: 5063033 - DNA, 25 bp, Homo sapien
caaaaggcattcaaacgggctaatc

SEQ ID NO: 5063034 - DNA, 25 bp, Homo sapien
aagtctaagatctacagggccaatg

SEQ ID NO: 5063035 - DNA, 25 bp, Homo sapien
gccagagcctgtccatcattattcc

SEQ ID NO: 5063036 - DNA, 25 bp, Homo sapien
tgccagagcctgtccatcattattc

SEQ ID NO: 5063037 - DNA, 25 bp, Homo sapien
cagagcctgtccatcattattccat

SEQ ID NO: 5063038 - DNA, 25 bp, Homo sapien
gagcctgtccatcattattccatag

SEQ ID NO: 5063039 - DNA, 25 bp, Homo sapien
gcactgttgagaagttgaccccaga

SEQ ID NO: 5063040 - DNA, 25 bp, Homo sapien
agagccatgcacaggagaagaccgc

SEQ ID NO: 5063041 - DNA, 25 bp, Homo sapien
gccccagagagcagtcacatattgt

SEQ ID NO: 5063042 - DNA, 25 bp, Homo sapien
gaagaccgcaaaacaagatcgacag

SEQ ID NO: 5063043 - DNA, 25 bp, Homo sapien
acaaacacaggacgggcagccagaa

SEQ ID NO: 5063044 - DNA, 25 bp, Homo sapien
tgaacaaacacaggacgggcagcca

SEQ ID NO: 5063045 - DNA, 25 bp, Homo sapien
ttctgaacaaacacaggacgggcag

SEQ ID NO: 5063046 - DNA, 25 bp, Homo sapien
cattctgaacaaacacaggacgggc

SEQ ID NO: 5063047 - DNA, 25 bp, Homo sapien
cagttctgagcacagatttatcttt

SEQ ID NO: 5063048 - DNA, 25 bp, Homo sapien
tatctttatcaaatactgattggtc

SEQ ID NO: 5063049 - DNA, 25 bp, Homo sapien
ttatcaaatactgattggtctctgg

SEQ ID NO: 5063050 - DNA, 25 bp, Homo sapien
tgtcctggtgtgtcggggaacaaag

SEQ ID NO: 5063051 - DNA, 25 bp, Homo sapien
cctctaaggtagtagtgcaattgtc

SEQ ID NO: 5063052 - DNA, 25 bp, Homo sapien
ggcctgacaagagcacttagaaatc

SEQ ID NO: 5063053 - DNA, 25 bp, Homo sapien
gagaggaaacggagactgagcttta

SEQ ID NO: 5063054 - DNA, 25 bp, Homo sapien
tatataatacaaccaccagctgtgt

SEQ ID NO: 5063055 - DNA, 25 bp, Homo sapien
ggactccaacatcgggctgcctcca

SEQ ID NO: 5063056 - DNA, 25 bp, Homo sapien
acacacatgccagactgccatcact

SEQ ID NO: 5063057 - DNA, 25 bp, Homo sapien
catttgcctgctcaggtttccttct

SEQ ID NO: 5063058 - DNA, 25 bp, Homo sapien
ctgtaacacatttgcctgctcaggt

SEQ ID NO: 5063059 - DNA, 25 bp, Homo sapien
ccaggctgcacgatgctttcctcac

SEQ ID NO: 5063060 - DNA, 25 bp, Homo sapien
gccaggctgcacgatgctttcctca

SEQ ID NO: 5063061 - DNA, 25 bp, Homo sapien
tgccaggctgcacgatgctttcctc

SEQ ID NO: 5063062 - DNA, 25 bp, Homo sapien
gagatttcccttcctcggtgcagag

SEQ ID NO: 5063063 - DNA, 25 bp, Homo sapien
aaagagatttcccttcctcggtgca

SEQ ID NO: 5063064 - DNA, 25 bp, Homo sapien
aagagatttcccttcctcggtgcag

SEQ ID NO: 5063065 - DNA, 25 bp, Homo sapien
gatttcccttcctcggtgcagagcc

SEQ ID NO: 5063066 - DNA, 25 bp, Homo sapien
ccccattaggcgcatctcactagtg

SEQ ID NO: 5063067 - DNA, 25 bp, Homo sapien
ccattaggcgcatctcactagtggc

SEQ ID NO: 5063068 - DNA, 25 bp, Homo sapien
tctcactagtggcacaagcactgca

SEQ ID NO: 5063069 - DNA, 25 bp, Homo sapien
gggatgaactcccccattaggcgca

SEQ ID NO: 5063070 - DNA, 25 bp, Homo sapien
caaactttggatgaagacatgagat

SEQ ID NO: 5063071 - DNA, 25 bp, Homo sapien
gccagcagaagtcctgacatgtagg

SEQ ID NO: 5063072 - DNA, 25 bp, Homo sapien
tccagggatgcaggtagtaacttca

SEQ ID NO: 5063073 - DNA, 25 bp, Homo sapien
tgatgcctgaaagagctcacagctg

SEQ ID NO: 5063074 - DNA, 25 bp, Homo sapien
ttttctgagacttttgatccaccct

SEQ ID NO: 5063075 - DNA, 25 bp, Homo sapien
tctgccttacatgatttgagccatc

SEQ ID NO: 5063076 - DNA, 25 bp, Homo sapien
accctctgccatagcaattctggta

SEQ ID NO: 5063077 - DNA, 25 bp, Homo sapien
catgatttgagccatcagtttcttc

SEQ ID NO: 5063078 - DNA, 25 bp, Homo sapien
caagctcagcagttagcaggagaga

SEQ ID NO: 5063079 - DNA, 25 bp, Homo sapien
gaaggaccaggtgctttaacagagc

SEQ ID NO: 5063080 - DNA, 25 bp, Homo sapien
caggagagatagacacgcacataca

SEQ ID NO: 5063081 - DNA, 25 bp, Homo sapien
taacagagcaggctgtcctgagact

SEQ ID NO: 5063082 - DNA, 25 bp, Homo sapien
gcacgtctattatcaaagttagtca

SEQ ID NO: 5063083 - DNA, 25 bp, Homo sapien
cttcctttctttgcacgtctattat

SEQ ID NO: 5063084 - DNA, 25 bp, Homo sapien
ggaaatccaatattaacatcatgaa

SEQ ID NO: 5063085 - DNA, 25 bp, Homo sapien
catcatgaaacagcaataacattgt

SEQ ID NO: 5063086 - DNA, 25 bp, Homo sapien
ttttattgacctccttctgatgtct

SEQ ID NO: 5063087 - DNA, 25 bp, Homo sapien
ccttctgatgtctatgacatctaat

SEQ ID NO: 5063088 - DNA, 25 bp, Homo sapien
tctgatgtctatgacatctaatcat

SEQ ID NO: 5063089 - DNA, 25 bp, Homo sapien
attttattgacctccttctgatgtc

SEQ ID NO: 5063090 - DNA, 25 bp, Homo sapien
tctgtgccattgtcttcaatcgcat

SEQ ID NO: 5063091 - DNA, 25 bp, Homo sapien
aacattctgtctatgtgctctgaaa

SEQ ID NO: 5063092 - DNA, 25 bp, Homo sapien
tggtagcctccactaacacctgctg

SEQ ID NO: 5063093 - DNA, 25 bp, Homo sapien
tgatattccctcacaattgtaagcc

SEQ ID NO: 5063094 - DNA, 25 bp, Homo sapien
gaagatcactttagtgtgtcttttt

SEQ ID NO: 5063095 - DNA, 25 bp, Homo sapien
ggaagatcactttagtgtgtctttt

SEQ ID NO: 5063096 - DNA, 25 bp, Homo sapien
tattgaaatgccagagtctttcttg

SEQ ID NO: 5063097 - DNA, 25 bp, Homo sapien
tgtattgaaatgccagagtctttct

SEQ ID NO: 5063098 - DNA, 25 bp, Homo sapien
gtattgaaatgccagagtctttctt

SEQ ID NO: 5063099 - DNA, 25 bp, Homo sapien
ctgtattgaaatgccagagtctttc

SEQ ID NO: 5063100 - DNA, 25 bp, Homo sapien
tctctgacacggtttggtatttctc

SEQ ID NO: 5063101 - DNA, 25 bp, Homo sapien
tgatataccaatctgtgatcagtga

SEQ ID NO: 5063102 - DNA, 25 bp, Homo sapien
caaacctcacccataaaagacggtg

SEQ ID NO: 5063103 - DNA, 25 bp, Homo sapien
ttgttttgggatgccgcaaacctca

SEQ ID NO: 5063104 - DNA, 25 bp, Homo sapien
tttaccctctccacgtacttcatgc

SEQ ID NO: 5063105 - DNA, 25 bp, Homo sapien
cctttaccctctccacgtacttcat

SEQ ID NO: 5063106 - DNA, 25 bp, Homo sapien
taccctctccacgtacttcatgcag

SEQ ID NO: 5063107 - DNA, 25 bp, Homo sapien
cctctccacgtacttcatgcagttg

SEQ ID NO: 5063108 - DNA, 25 bp, Homo sapien
tcaatcctgcatgctttgcttgaag

SEQ ID NO: 5063109 - DNA, 25 bp, Homo sapien
gcagtaattgtcataggctccatgt

SEQ ID NO: 5063110 - DNA, 25 bp, Homo sapien
tggaggtccaactgtatagcagctt

SEQ ID NO: 5063111 - DNA, 25 bp, Homo sapien
cccttgtcgctggattgctggaggt

SEQ ID NO: 5063112 - DNA, 25 bp, Homo sapien
gcagctttatgcaaccatttcaaga

SEQ ID NO: 5063113 - DNA, 25 bp, Homo sapien
gtttagatgttgagaggcttgtcat

SEQ ID NO: 5063114 - DNA, 25 bp, Homo sapien
gagtgacagccgactgctgctctgt

SEQ ID NO: 5063115 - DNA, 25 bp, Homo sapien
ttgtcattacattctgccctggagg

SEQ ID NO: 5063116 - DNA, 25 bp, Homo sapien
agaggcttgtcattacattctgccc

SEQ ID NO: 5063117 - DNA, 25 bp, Homo sapien
agtgcaaaatcagaagagtctgcat

SEQ ID NO: 5063118 - DNA, 25 bp, Homo sapien
ttagtgcaaaatcagaagagtctgc

SEQ ID NO: 5063119 - DNA, 25 bp, Homo sapien
tttagtgcaaaatcagaagagtctg

SEQ ID NO: 5063120 - DNA, 25 bp, Homo sapien
tagtgcaaaatcagaagagtctgca

SEQ ID NO: 5063121 - DNA, 25 bp, Homo sapien
gtgaggccctcaaaaacatgaagtc

SEQ ID NO: 5063122 - DNA, 25 bp, Homo sapien
cactgctgcttccaaatttggagct

SEQ ID NO: 5063123 - DNA, 25 bp, Homo sapien
tgcttccaaatttggagctttgttt

SEQ ID NO: 5063124 - DNA, 25 bp, Homo sapien
tgctgcttccaaatttggagctttg

SEQ ID NO: 5063125 - DNA, 25 bp, Homo sapien
tcactgctgcttccaaatttggagc

SEQ ID NO: 5063126 - DNA, 25 bp, Homo sapien
aacctctcttggtcttgtgccctac

SEQ ID NO: 5063127 - DNA, 25 bp, Homo sapien
tagaagagcctgcagtataatcaca

SEQ ID NO: 5063128 - DNA, 25 bp, Homo sapien
gatttccatcataggcaattttatc

SEQ ID NO: 5063129 - DNA, 25 bp, Homo sapien
ttgtgccctactgggaccggcaggc

SEQ ID NO: 5063130 - DNA, 25 bp, Homo sapien
aacactctgatagataaagcaacat

SEQ ID NO: 5063131 - DNA, 25 bp, Homo sapien
tccaaaacactctgatagataaagc

SEQ ID NO: 5063132 - DNA, 25 bp, Homo sapien
cagatctggttctatttcgatcaaa

SEQ ID NO: 5063133 - DNA, 25 bp, Homo sapien
caacattattgatttggctgaaatc

SEQ ID NO: 5063134 - DNA, 25 bp, Homo sapien
cactggctgatagaatagcccactg

SEQ ID NO: 5063135 - DNA, 25 bp, Homo sapien
actggctgatagaatagcccactgg

SEQ ID NO: 5063136 - DNA, 25 bp, Homo sapien
tggctgatagaatagcccactggat

SEQ ID NO: 5063137 - DNA, 25 bp, Homo sapien
gctgatagaatagcccactggatgc

SEQ ID NO: 5063138 - DNA, 25 bp, Homo sapien
gctaagagctcggagttctgtttct

SEQ ID NO: 5063139 - DNA, 25 bp, Homo sapien
tccttcccctaacacatgtacatgt

SEQ ID NO: 5063140 - DNA, 25 bp, Homo sapien
cccaggcacatattggaggctttta

SEQ ID NO: 5063141 - DNA, 25 bp, Homo sapien
tgtgcctgcatatagttcccatata

SEQ ID NO: 5063142 - DNA, 25 bp, Homo sapien
aaagccaacattggccacggtagcc

SEQ ID NO: 5063143 - DNA, 25 bp, Homo sapien
gacaacattaagcacgcagctggaa

SEQ ID NO: 5063144 - DNA, 25 bp, Homo sapien
cacattacatgaaggaggcacacag

SEQ ID NO: 5063145 - DNA, 25 bp, Homo sapien
gaaatttatttgacaacattaagca

SEQ ID NO: 5063146 - DNA, 25 bp, Homo sapien
aggaaaactattagaggatctcaca

SEQ ID NO: 5063147 - DNA, 25 bp, Homo sapien
taggatacagtgtttactaggttgc

SEQ ID NO: 5063148 - DNA, 25 bp, Homo sapien
atacagtgtttactaggttgcagtg

SEQ ID NO: 5063149 - DNA, 25 bp, Homo sapien
ggatacagtgtttactaggttgcag

SEQ ID NO: 5063150 - DNA, 25 bp, Homo sapien
atatttgagatgcttcgaggtctaa

SEQ ID NO: 5063151 - DNA, 25 bp, Homo sapien
tgatagcctcattaggctgtgccat

SEQ ID NO: 5063152 - DNA, 25 bp, Homo sapien
gtctaatcgcatcagtgtgttactg

SEQ ID NO: 5063153 - DNA, 25 bp, Homo sapien
tgtgttactgatagcctcattaggc

SEQ ID NO: 5063154 - DNA, 25 bp, Homo sapien
tgcatgccatgtatgtattcatcca

SEQ ID NO: 5063155 - DNA, 25 bp, Homo sapien
catttcagttgatttgctattagca

SEQ ID NO: 5063156 - DNA, 25 bp, Homo sapien
gcattacccgcatcatccatttcag

SEQ ID NO: 5063157 - DNA, 25 bp, Homo sapien
aagacacaaatcattgcaggtttgg

SEQ ID NO: 5063158 - DNA, 25 bp, Homo sapien
gctatcagtctactttgtgtcccaa

SEQ ID NO: 5063159 - DNA, 25 bp, Homo sapien
tcagctatcagtctactttgtgtcc

SEQ ID NO: 5063160 - DNA, 25 bp, Homo sapien
tatcagtctactttgtgtcccaagg

SEQ ID NO: 5063161 - DNA, 25 bp, Homo sapien
tcagtctactttgtgtcccaaggcc

SEQ ID NO: 5063162 - DNA, 25 bp, Homo sapien
gggcatagaaatgcacaggtagatt

SEQ ID NO: 5063163 - DNA, 25 bp, Homo sapien
gatagaaccgagtaagtggtgatga

SEQ ID NO: 5063164 - DNA, 25 bp, Homo sapien
agaaaggacaggtgctaagcactgt

SEQ ID NO: 5063165 - DNA, 25 bp, Homo sapien
cttcaatattaacctcattgctcag

SEQ ID NO: 5063166 - DNA, 25 bp, Homo sapien
atccttattcacatccctggagtct

SEQ ID NO: 5063167 - DNA, 25 bp, Homo sapien
tcaggaagcgttcaacccaaccagc

SEQ ID NO: 5063168 - DNA, 25 bp, Homo sapien
ccctcccatggagcttgtaatcagg

SEQ ID NO: 5063169 - DNA, 25 bp, Homo sapien
tgtaatcaggattgccgttcagatc

SEQ ID NO: 5063170 - DNA, 25 bp, Homo sapien
tatagttcaggttgcctcatgcaaa

SEQ ID NO: 5063171 - DNA, 25 bp, Homo sapien
gagagaaataaagacctagccaggg

SEQ ID NO: 5063172 - DNA, 25 bp, Homo sapien
tcatagacactgaccacataccagg

SEQ ID NO: 5063173 - DNA, 25 bp, Homo sapien
catgtaacacagtcacctggctgta

SEQ ID NO: 5063174 - DNA, 25 bp, Homo sapien
aagcatgcttggtacaaagggacca

SEQ ID NO: 5063175 - DNA, 25 bp, Homo sapien
gcttggtacaaagggaccaagcacc

SEQ ID NO: 5063176 - DNA, 25 bp, Homo sapien
caaagggaccaagcacccttgttct

SEQ ID NO: 5063177 - DNA, 25 bp, Homo sapien
aagggaccaagcacccttgttctcg

SEQ ID NO: 5063178 - DNA, 25 bp, Homo sapien
ggaggatatcatcaataatgttgta

SEQ ID NO: 5063179 - DNA, 25 bp, Homo sapien
gtttacagatcttgctttgaacagc

SEQ ID NO: 5063180 - DNA, 25 bp, Homo sapien
ctttgtcctcattgtgtttacagat

SEQ ID NO: 5063181 - DNA, 25 bp, Homo sapien
aaatacttggagcatattgcgggaa

SEQ ID NO: 5063182 - DNA, 25 bp, Homo sapien
tgaaccatctccacaagcagaactg

SEQ ID NO: 5063183 - DNA, 25 bp, Homo sapien
gggtcacccctactggctgctataa

SEQ ID NO: 5063184 - DNA, 25 bp, Homo sapien
ggacatatggcccaaagcactttgc

SEQ ID NO: 5063185 - DNA, 25 bp, Homo sapien
catctaactaaggaggtgaaccatc

SEQ ID NO: 5063186 - DNA, 25 bp, Homo sapien
tgttttcatagaggtgcctgcaggg

SEQ ID NO: 5063187 - DNA, 25 bp, Homo sapien
tgccaacttatttccttgttctgtt

SEQ ID NO: 5063188 - DNA, 25 bp, Homo sapien
aaaaatgcccacatttaagctaaat

SEQ ID NO: 5063189 - DNA, 25 bp, Homo sapien
gatgggcttgttggtaggaatattc

SEQ ID NO: 5063190 - DNA, 25 bp, Homo sapien
tttgttgcaaatcaagcagtctcat

SEQ ID NO: 5063191 - DNA, 25 bp, Homo sapien
cctgctgtgattttgctggtcctaa

SEQ ID NO: 5063192 - DNA, 25 bp, Homo sapien
tcattttgccaaccacagggttacg

SEQ ID NO: 5063193 - DNA, 25 bp, Homo sapien
tctgtctaaactgtccccaagagca

SEQ ID NO: 5063194 - DNA, 25 bp, Homo sapien
cctccgaatgtacagtgctgccgca

SEQ ID NO: 5063195 - DNA, 25 bp, Homo sapien
tggagatcacccctccgaatgtaca

SEQ ID NO: 5063196 - DNA, 25 bp, Homo sapien
tcacccctccgaatgtacagtgctg

SEQ ID NO: 5063197 - DNA, 25 bp, Homo sapien
gaatgtacagtgctgccgcagattt

SEQ ID NO: 5063198 - DNA, 25 bp, Homo sapien
ctttcaacccatctataatcagtgt

SEQ ID NO: 5063199 - DNA, 25 bp, Homo sapien
tatgaaccaaaggttgacttgagtc

SEQ ID NO: 5063200 - DNA, 25 bp, Homo sapien
cctgggagcctgtatgaaccaaagg

SEQ ID NO: 5063201 - DNA, 25 bp, Homo sapien
gagcctgtatgaaccaaaggttgac

SEQ ID NO: 5063202 - DNA, 25 bp, Homo sapien
tatgttatcataatcgcagctttcc

SEQ ID NO: 5063203 - DNA, 25 bp, Homo sapien
tatcataatcgcagctttccttctt

SEQ ID NO: 5063204 - DNA, 25 bp, Homo sapien
tttcctccatatgttatcataatcg

SEQ ID NO: 5063205 - DNA, 25 bp, Homo sapien
tccatatgttatcataatcgcagct

SEQ ID NO: 5063206 - DNA, 25 bp, Homo sapien
ttctgttcccgccgttctctgatgc

SEQ ID NO: 5063207 - DNA, 25 bp, Homo sapien
cttctgttcccgccgttctctgatg

SEQ ID NO: 5063208 - DNA, 25 bp, Homo sapien
tgttcccgccgttctctgatgcaca

SEQ ID NO: 5063209 - DNA, 25 bp, Homo sapien
tctgttcccgccgttctctgatgca

SEQ ID NO: 5063210 - DNA, 25 bp, Homo sapien
agtgctagtttaattgaactgctgt

SEQ ID NO: 5063211 - DNA, 25 bp, Homo sapien
gtagcatataactctccccttgatg

SEQ ID NO: 5063212 - DNA, 25 bp, Homo sapien
gctagtttaattgaactgctgtgct

SEQ ID NO: 5063213 - DNA, 25 bp, Homo sapien
ccaagaggggtgaacggtagcatat

SEQ ID NO: 5063214 - DNA, 25 bp, Homo sapien
tgttccatcgtagatggtgactggg

SEQ ID NO: 5063215 - DNA, 25 bp, Homo sapien
cagcctgttccatcgtagatggtga

SEQ ID NO: 5063216 - DNA, 25 bp, Homo sapien
agagaccagcctgttccatcgtaga

SEQ ID NO: 5063217 - DNA, 25 bp, Homo sapien
gactgggtaagctgcagggatggag

SEQ ID NO: 5063218 - DNA, 25 bp, Homo sapien
caggtgaaggcatatgtttctgcga

SEQ ID NO: 5063219 - DNA, 25 bp, Homo sapien
cattggaccctgtgtaaactttgga

SEQ ID NO: 5063220 - DNA, 25 bp, Homo sapien
ggcctagtaggtcgtatatccaatt

SEQ ID NO: 5063221 - DNA, 25 bp, Homo sapien
agacggctgcctctccttggaagaa

SEQ ID NO: 5063222 - DNA, 25 bp, Homo sapien
tgattagatcctctatatgtaactc

SEQ ID NO: 5063223 - DNA, 25 bp, Homo sapien
gattagatcctctatatgtaactct

SEQ ID NO: 5063224 - DNA, 25 bp, Homo sapien
ctgattagatcctctatatgtaact

SEQ ID NO: 5063225 - DNA, 25 bp, Homo sapien
tagcgagttttgacggagaagagca

SEQ ID NO: 5063226 - DNA, 25 bp, Homo sapien
aggtgatctcttgggaatccaacag

SEQ ID NO: 5063227 - DNA, 25 bp, Homo sapien
aatccaacaggaaataatagcgagt

SEQ ID NO: 5063228 - DNA, 25 bp, Homo sapien
caaagcaataccttgaaaccccatt

SEQ ID NO: 5063229 - DNA, 25 bp, Homo sapien
caattgttcattgcccgcagactta

SEQ ID NO: 5063230 - DNA, 25 bp, Homo sapien
ttcattgcccgcagacttaaatctg

SEQ ID NO: 5063231 - DNA, 25 bp, Homo sapien
ctggcaattgttcattgcccgcaga

SEQ ID NO: 5063232 - DNA, 25 bp, Homo sapien
gttcattgcccgcagacttaaatct

SEQ ID NO: 5063233 - DNA, 25 bp, Homo sapien
aaagtaattcttggagaagtacctg

SEQ ID NO: 5063234 - DNA, 25 bp, Homo sapien
tgctgagttaggagtggataaaatg

SEQ ID NO: 5063235 - DNA, 25 bp, Homo sapien
taattcttggagaagtacctgggct

SEQ ID NO: 5063236 - DNA, 25 bp, Homo sapien
gctgagttaggagtggataaaatgc

SEQ ID NO: 5063237 - DNA, 25 bp, Homo sapien
aaggttcctgactatttctccctgg

SEQ ID NO: 5063238 - DNA, 25 bp, Homo sapien
atttatccacacgtaaagtttctag

SEQ ID NO: 5063239 - DNA, 25 bp, Homo sapien
gaaggcccagcaaggttcctgacta

SEQ ID NO: 5063240 - DNA, 25 bp, Homo sapien
agtttctagagaaggcccagcaagg

SEQ ID NO: 5063241 - DNA, 25 bp, Homo sapien
tatctcgtaataaagtccatgcatt

SEQ ID NO: 5063242 - DNA, 25 bp, Homo sapien
ttaatcttatctcgtaataaagtcc

SEQ ID NO: 5063243 - DNA, 25 bp, Homo sapien
taaagtccatgcatttttacacctg

SEQ ID NO: 5063244 - DNA, 25 bp, Homo sapien
ccatgcatttttacacctgtattgc

SEQ ID NO: 5063245 - DNA, 25 bp, Homo sapien
cacactatccaatgtgcagctgttg

SEQ ID NO: 5063246 - DNA, 25 bp, Homo sapien
ctgccacactatccaatgtgcagct

SEQ ID NO: 5063247 - DNA, 25 bp, Homo sapien
gccacactatccaatgtgcagctgt

SEQ ID NO: 5063248 - DNA, 25 bp, Homo sapien
tgccacactatccaatgtgcagctg

SEQ ID NO: 5063249 - DNA, 25 bp, Homo sapien
aatcctggggaagcatagccacttg

SEQ ID NO: 5063250 - DNA, 25 bp, Homo sapien
ctgtacttggacaaaccagcaatcc

SEQ ID NO: 5063251 - DNA, 25 bp, Homo sapien
caccatcaatctgtacttggacaaa

SEQ ID NO: 5063252 - DNA, 25 bp, Homo sapien
gccacttgtagacccaaaactgtgg

SEQ ID NO: 5063253 - DNA, 25 bp, Homo sapien
gtgaatcacagaatgctggcctcat

SEQ ID NO: 5063254 - DNA, 25 bp, Homo sapien
ctccagagaggcacagaaatgagga

SEQ ID NO: 5063255 - DNA, 25 bp, Homo sapien
tgtgttttccaggtgaatcacagaa

SEQ ID NO: 5063256 - DNA, 25 bp, Homo sapien
agaagtggggacttgtgttttccag

SEQ ID NO: 5063257 - DNA, 25 bp, Homo sapien
ctcttgaggcaatgaaacagcgctg

SEQ ID NO: 5063258 - DNA, 25 bp, Homo sapien
gaagccgctcttaaagtactttctg

SEQ ID NO: 5063259 - DNA, 25 bp, Homo sapien
gagaatgcggtgctttctggacgct

SEQ ID NO: 5063260 - DNA, 25 bp, Homo sapien
agagctgcctggattgtcccagaaa

SEQ ID NO: 5063261 - DNA, 25 bp, Homo sapien
tccatccaggcaagcagcatcgact

SEQ ID NO: 5063262 - DNA, 25 bp, Homo sapien
ttccatccaggcaagcagcatcgac

SEQ ID NO: 5063263 - DNA, 25 bp, Homo sapien
ttattccatccaggcaagcagcatc

SEQ ID NO: 5063264 - DNA, 25 bp, Homo sapien
attccatccaggcaagcagcatcga

SEQ ID NO: 5063265 - DNA, 25 bp, Homo sapien
gcaaaactctatgtgctggcatgag

SEQ ID NO: 5063266 - DNA, 25 bp, Homo sapien
gaaaagggtgaaggattttcatctc

SEQ ID NO: 5063267 - DNA, 25 bp, Homo sapien
gaaatgtctattaacttgtcagcaa

SEQ ID NO: 5063268 - DNA, 25 bp, Homo sapien
cagatgaattggaacaggtgcagca

SEQ ID NO: 5063269 - DNA, 25 bp, Homo sapien
aatttctccgtcatttatccgagag

SEQ ID NO: 5063270 - DNA, 25 bp, Homo sapien
ctgaagaatttctccgtcatttatc

SEQ ID NO: 5063271 - DNA, 25 bp, Homo sapien
ttttatggtagctgcatagtaactg

SEQ ID NO: 5063272 - DNA, 25 bp, Homo sapien
cgtcatttatccgagagttattcat

SEQ ID NO: 5063273 - DNA, 25 bp, Homo sapien
tacatgcttgtttggacatttgcct

SEQ ID NO: 5063274 - DNA, 25 bp, Homo sapien
ttaattacatgcttgtttggacatt

SEQ ID NO: 5063275 - DNA, 25 bp, Homo sapien
atgcttgtttggacatttgcctcta

SEQ ID NO: 5063276 - DNA, 25 bp, Homo sapien
tgcttgtttggacatttgcctctaa

SEQ ID NO: 5063277 - DNA, 25 bp, Homo sapien
tctctgactccctgttcttgtttca

SEQ ID NO: 5063278 - DNA, 25 bp, Homo sapien
tatgaatcttcatctgagactttgc

SEQ ID NO: 5063279 - DNA, 25 bp, Homo sapien
tctctttatatgaatcttcatctga

SEQ ID NO: 5063280 - DNA, 25 bp, Homo sapien
ttctctgactccctgttcttgtttc

SEQ ID NO: 5063281 - DNA, 25 bp, Homo sapien
tctgaaaaagaaggcctagacaagc

SEQ ID NO: 5063282 - DNA, 25 bp, Homo sapien
gaacatatgtaaaacatggactgtg

SEQ ID NO: 5063283 - DNA, 25 bp, Homo sapien
aacaagcagaagactggggatatct

SEQ ID NO: 5063284 - DNA, 25 bp, Homo sapien
tgagtctcagaaccctaggcactcc

SEQ ID NO: 5063285 - DNA, 25 bp, Homo sapien
agggagaggccagaatgttttaaag

SEQ ID NO: 5063286 - DNA, 25 bp, Homo sapien
ttagccacagttcggtaattagtac

SEQ ID NO: 5063287 - DNA, 25 bp, Homo sapien
gcctgtgcatggcagacttagccac

SEQ ID NO: 5063288 - DNA, 25 bp, Homo sapien
gagaggccagaatgttttaaaggcc

SEQ ID NO: 5063289 - DNA, 25 bp, Homo sapien
aactctgactcttcatctattcgtc

SEQ ID NO: 5063290 - DNA, 25 bp, Homo sapien
catctattcgtctatcgcctgtctc

SEQ ID NO: 5063291 - DNA, 25 bp, Homo sapien
aatttcagaggccaactctgactct

SEQ ID NO: 5063292 - DNA, 25 bp, Homo sapien
gtctatcgcctgtctcccacttata

SEQ ID NO: 5063293 - DNA, 25 bp, Homo sapien
gacacatgatgagcatagcgcacta

SEQ ID NO: 5063294 - DNA, 25 bp, Homo sapien
gcatagcgcactacaatcctggacc

SEQ ID NO: 5063295 - DNA, 25 bp, Homo sapien
cacgcttccttatgcaatccagcag

SEQ ID NO: 5063296 - DNA, 25 bp, Homo sapien
acaggatatcactaggttgccccag

SEQ ID NO: 5063297 - DNA, 25 bp, Homo sapien
ttatgcaagatagcaggtaacacct

SEQ ID NO: 5063298 - DNA, 25 bp, Homo sapien
cttttgaagataacaagggatattc

SEQ ID NO: 5063299 - DNA, 25 bp, Homo sapien
agcaggtaacacctttcttttgaat

SEQ ID NO: 5063300 - DNA, 25 bp, Homo sapien
tttgaagataacaagggatattcat

SEQ ID NO: 5063301 - DNA, 25 bp, Homo sapien
ctgaattccctttaggttatatttg

SEQ ID NO: 5063302 - DNA, 25 bp, Homo sapien
ctgtggttttctgaattccctttag

SEQ ID NO: 5063303 - DNA, 25 bp, Homo sapien
cactgtggttttctgaattcccttt

SEQ ID NO: 5063304 - DNA, 25 bp, Homo sapien
cccagagctaaagacaagattccct

SEQ ID NO: 5063305 - DNA, 25 bp, Homo sapien
tccagccacatcacttttactgctg

SEQ ID NO: 5063306 - DNA, 25 bp, Homo sapien
ccccagagctaaagacaagattccc

SEQ ID NO: 5063307 - DNA, 25 bp, Homo sapien
ccagagctaaagacaagattccctt

SEQ ID NO: 5063308 - DNA, 25 bp, Homo sapien
gcagagagaaacagcagttcattac

SEQ ID NO: 5063309 - DNA, 25 bp, Homo sapien
cctccaagagatgggtgcaggttat

SEQ ID NO: 5063310 - DNA, 25 bp, Homo sapien
ctgtcctccaagagatgggtgcagg

SEQ ID NO: 5063311 - DNA, 25 bp, Homo sapien
tgtcctccaagagatgggtgcaggt

SEQ ID NO: 5063312 - DNA, 25 bp, Homo sapien
agaacatatgtcaattgccaaccca

SEQ ID NO: 5063313 - DNA, 25 bp, Homo sapien
aagaacatatgtcaattgccaaccc

SEQ ID NO: 5063314 - DNA, 25 bp, Homo sapien
tcaaaactgtccctcgtccatggtt

SEQ ID NO: 5063315 - DNA, 25 bp, Homo sapien
aactgtccctcgtccatggtttgac

SEQ ID NO: 5063316 - DNA, 25 bp, Homo sapien
tgtccctcgtccatggtttgacaga

SEQ ID NO: 5063317 - DNA, 25 bp, Homo sapien
gtccctcgtccatggtttgacagat

SEQ ID NO: 5063318 - DNA, 25 bp, Homo sapien
tcctagaagcaatattgaagtgact

SEQ ID NO: 5063319 - DNA, 25 bp, Homo sapien
cattaggctagttagaaattcgccc

SEQ ID NO: 5063320 - DNA, 25 bp, Homo sapien
tagagaagctaatggacactttaac

SEQ ID NO: 5063321 - DNA, 25 bp, Homo sapien
tgtcttctctctgatggatgctaag

SEQ ID NO: 5063322 - DNA, 25 bp, Homo sapien
aaatcttggttctgctatgtatccg

SEQ ID NO: 5063323 - DNA, 25 bp, Homo sapien
gaaccaagtacacgaacagaaatga

SEQ ID NO: 5063324 - DNA, 25 bp, Homo sapien
aatgagttgtggaatgagacaggtc

SEQ ID NO: 5063325 - DNA, 25 bp, Homo sapien
cattgggtggtagtcctaaggctcc

SEQ ID NO: 5063326 - DNA, 25 bp, Homo sapien
aaagtccctgagatgagtagctgtt

SEQ ID NO: 5063327 - DNA, 25 bp, Homo sapien
tgagtagctgttctctttataaata

SEQ ID NO: 5063328 - DNA, 25 bp, Homo sapien
ccctgagatgagtagctgttctctt

SEQ ID NO: 5063329 - DNA, 25 bp, Homo sapien
gatgagtagctgttctctttataaa

SEQ ID NO: 5063330 - DNA, 25 bp, Homo sapien
ctgcagcttttgccctctgcagcac

SEQ ID NO: 5063331 - DNA, 25 bp, Homo sapien
atgcagggcagaggcagtgaatcct

SEQ ID NO: 5063332 - DNA, 25 bp, Homo sapien
ctatgcagggcagaggcagtgaatc

SEQ ID NO: 5063333 - DNA, 25 bp, Homo sapien
tgcagggcagaggcagtgaatcctg

SEQ ID NO: 5063334 - DNA, 25 bp, Homo sapien
tatgcagggcagaggcagtgaatcc

SEQ ID NO: 5063335 - DNA, 25 bp, Homo sapien
gaaaacatacactgcatatacactg

SEQ ID NO: 5063336 - DNA, 25 bp, Homo sapien
gagagcatgagtttctaccccatca

SEQ ID NO: 5063337 - DNA, 25 bp, Homo sapien
cgttgttattaagtagtgtgagagc

SEQ ID NO: 5063338 - DNA, 25 bp, Homo sapien
gcatatacactgtcattatcgttgt

SEQ ID NO: 5063339 - DNA, 25 bp, Homo sapien
ttgttctagtttcatagtaaatgct

SEQ ID NO: 5063340 - DNA, 25 bp, Homo sapien
tctgacggcagtgtgggctctcttg

SEQ ID NO: 5063341 - DNA, 25 bp, Homo sapien
catagtaaatgctctgacggcagtg

SEQ ID NO: 5063342 - DNA, 25 bp, Homo sapien
taaatgctctgacggcagtgtgggc

SEQ ID NO: 5063343 - DNA, 25 bp, Homo sapien
taattacacacggattcaatagaac

SEQ ID NO: 5063344 - DNA, 25 bp, Homo sapien
tgaggaaaatgtggactccttcctc

SEQ ID NO: 5063345 - DNA, 25 bp, Homo sapien
gggccacttggcatagttcagcgtt

SEQ ID NO: 5063346 - DNA, 25 bp, Homo sapien
gacaacttggatatggacctctgga

SEQ ID NO: 5063347 - DNA, 25 bp, Homo sapien
tctactttgcaccagttattgagca

SEQ ID NO: 5063348 - DNA, 25 bp, Homo sapien
tgcaccagttattgagcagactgtc

SEQ ID NO: 5063349 - DNA, 25 bp, Homo sapien
ttagcttctactttgcaccagttat

SEQ ID NO: 5063350 - DNA, 25 bp, Homo sapien
ttattgagcagactgtcacagacac

SEQ ID NO: 5063351 - DNA, 25 bp, Homo sapien
gcaagatgttgcaaaggggcatata

SEQ ID NO: 5063352 - DNA, 25 bp, Homo sapien
ctagcagtcacatgtaggtgccact

SEQ ID NO: 5063353 - DNA, 25 bp, Homo sapien
gacccagggagcgtttgagcaagat

SEQ ID NO: 5063354 - DNA, 25 bp, Homo sapien
ggtgccactctatcatcatttgtaa

SEQ ID NO: 5063355 - DNA, 25 bp, Homo sapien
aggtccgaggtcctccatatgccac

SEQ ID NO: 5063356 - DNA, 25 bp, Homo sapien
aaggtccgaggtcctccatatgcca

SEQ ID NO: 5063357 - DNA, 25 bp, Homo sapien
ggtaggatctcagggttgtggctcc

SEQ ID NO: 5063358 - DNA, 25 bp, Homo sapien
tcttgtgtgggtaggatctcagggt

SEQ ID NO: 5063359 - DNA, 25 bp, Homo sapien
gagccttcaaaggtttgtgctgttc

SEQ ID NO: 5063360 - DNA, 25 bp, Homo sapien
tggagccttcaaaggtttgtgctgt

SEQ ID NO: 5063361 - DNA, 25 bp, Homo sapien
ctggagccttcaaaggtttgtgctg

SEQ ID NO: 5063362 - DNA, 25 bp, Homo sapien
ggagccttcaaaggtttgtgctgtt

SEQ ID NO: 5063363 - DNA, 25 bp, Homo sapien
gacagcttcgcctctgaacaaattg

SEQ ID NO: 5063364 - DNA, 25 bp, Homo sapien
cacgttccacgtggtaatagttggt

SEQ ID NO: 5063365 - DNA, 25 bp, Homo sapien
aatgtccacagctgtcaagtgaaat

SEQ ID NO: 5063366 - DNA, 25 bp, Homo sapien
gaggtctatagcagctcttcacgtt

SEQ ID NO: 5063367 - DNA, 25 bp, Homo sapien
cagaagcagaatgatttgcaatgtc

SEQ ID NO: 5063368 - DNA, 25 bp, Homo sapien
gaatgatctgatgccgtgaaatagt

SEQ ID NO: 5063369 - DNA, 25 bp, Homo sapien
tcaggtaattctgtagctgcagaag

SEQ ID NO: 5063370 - DNA, 25 bp, Homo sapien
tgaaatagtagactttaacagtacc

SEQ ID NO: 5063371 - DNA, 25 bp, Homo sapien
aactggccctccatatggccatctg

SEQ ID NO: 5063372 - DNA, 25 bp, Homo sapien
caactggacttgctcatccctgata

SEQ ID NO: 5063373 - DNA, 25 bp, Homo sapien
tacctggaaagtatgtatctctgta

SEQ ID NO: 5063374 - DNA, 25 bp, Homo sapien
tcaagttatccttgatgtgagtgga

SEQ ID NO: 5063375 - DNA, 25 bp, Homo sapien
ccaccagggttccatgttgacacag

SEQ ID NO: 5063376 - DNA, 25 bp, Homo sapien
ggttccatgttgacacagttttcct

SEQ ID NO: 5063377 - DNA, 25 bp, Homo sapien
ccatgttgacacagttttccttcca

SEQ ID NO: 5063378 - DNA, 25 bp, Homo sapien
cagggttccatgttgacacagtttt

SEQ ID NO: 5063379 - DNA, 25 bp, Homo sapien
gctccattccaactttcagagcaca

SEQ ID NO: 5063380 - DNA, 25 bp, Homo sapien
gcagtacacttgtgaaaaagagatt

SEQ ID NO: 5063381 - DNA, 25 bp, Homo sapien
agagcacagctgcagtacacttgtg

SEQ ID NO: 5063382 - DNA, 25 bp, Homo sapien
tctgtgctgccggagatatctctcg

SEQ ID NO: 5063383 - DNA, 25 bp, Homo sapien
taacaattttctgtgttaattccca

SEQ ID NO: 5063384 - DNA, 25 bp, Homo sapien
tatattcccgtgaattgcttttgcc

SEQ ID NO: 5063385 - DNA, 25 bp, Homo sapien
ttttagcatatattcccgtgaattg

SEQ ID NO: 5063386 - DNA, 25 bp, Homo sapien
gcatatattcccgtgaattgctttt

SEQ ID NO: 5063387 - DNA, 25 bp, Homo sapien
tattctttggagaagtttcaaatat

SEQ ID NO: 5063388 - DNA, 25 bp, Homo sapien
gtgatcccagcttagaggcattttc

SEQ ID NO: 5063389 - DNA, 25 bp, Homo sapien
tctagtgttttagcaaaggcttgtg

SEQ ID NO: 5063390 - DNA, 25 bp, Homo sapien
tgttttagcaaaggcttgtgatccc

SEQ ID NO: 5063391 - DNA, 25 bp, Homo sapien
tttagcaaaggcttgtgatcccagc

SEQ ID NO: 5063392 - DNA, 25 bp, Homo sapien
gaaaagtcagcagttaacctggata

SEQ ID NO: 5063393 - DNA, 25 bp, Homo sapien
tgatatacgggcacagagcttctgt

SEQ ID NO: 5063394 - DNA, 25 bp, Homo sapien
tatatattccttgtaccagcccctg

SEQ ID NO: 5063395 - DNA, 25 bp, Homo sapien
tctccaaacctaaacatagcgtgct

SEQ ID NO: 5063396 - DNA, 25 bp, Homo sapien
caaaaccggctgatgatgactctca

SEQ ID NO: 5063397 - DNA, 25 bp, Homo sapien
tcaaggcactgacactaagcttcct

SEQ ID NO: 5063398 - DNA, 25 bp, Homo sapien
gctgaagtgacaagccccacatctg

SEQ ID NO: 5063399 - DNA, 25 bp, Homo sapien
ctaaatgtggtctagagatcagttc

SEQ ID NO: 5063400 - DNA, 25 bp, Homo sapien
ggttccttcacgtgtgtgcttttcc

SEQ ID NO: 5063401 - DNA, 25 bp, Homo sapien
ccagagagggagatcatctagctga

SEQ ID NO: 5063402 - DNA, 25 bp, Homo sapien
gggctttacttcttgctccatcgtg

SEQ ID NO: 5063403 - DNA, 25 bp, Homo sapien
tgtcagtcacacatgtcggcacagg

SEQ ID NO: 5063404 - DNA, 25 bp, Homo sapien
gcaaggtgcttgaaacactgagttg

SEQ ID NO: 5063405 - DNA, 25 bp, Homo sapien
cactgagttgacacaaacctgttgg

SEQ ID NO: 5063406 - DNA, 25 bp, Homo sapien
tgacacaaacctgttggtaatccat

SEQ ID NO: 5063407 - DNA, 25 bp, Homo sapien
ttgaaacactgagttgacacaaacc

SEQ ID NO: 5063408 - DNA, 25 bp, Homo sapien
gtaaactccgagagactcaaattca

SEQ ID NO: 5063409 - DNA, 25 bp, Homo sapien
ttcaaattctgcaattaattgatct

SEQ ID NO: 5063410 - DNA, 25 bp, Homo sapien
tcttgttgttctacattaaggctgt

SEQ ID NO: 5063411 - DNA, 25 bp, Homo sapien
tgatcccaccagtcacctgaatgct

SEQ ID NO: 5063412 - DNA, 25 bp, Homo sapien
tcagttctcacaaagggcccaacat

SEQ ID NO: 5063413 - DNA, 25 bp, Homo sapien
ttccactcaaggtctttgacatttt

SEQ ID NO: 5063414 - DNA, 25 bp, Homo sapien
ctaaatgatgctattagaagttgct

SEQ ID NO: 5063415 - DNA, 25 bp, Homo sapien
tttccactcaaggtctttgacattt

SEQ ID NO: 5063416 - DNA, 25 bp, Homo sapien
tgatgctattagaagttgctggctg

SEQ ID NO: 5063417 - DNA, 25 bp, Homo sapien
tactctgtagtcagaaatttcataa

SEQ ID NO: 5063418 - DNA, 25 bp, Homo sapien
cagagggcgtagccctctttttaag

SEQ ID NO: 5063419 - DNA, 25 bp, Homo sapien
tctttaatgtgaatactctgtagtc

SEQ ID NO: 5063420 - DNA, 25 bp, Homo sapien
taatgtgaatactctgtagtcagaa

SEQ ID NO: 5063421 - DNA, 25 bp, Homo sapien
ttggaacaaagattctccctgagta

SEQ ID NO: 5063422 - DNA, 25 bp, Homo sapien
gaacaaagattctccctgagtactc

SEQ ID NO: 5063423 - DNA, 25 bp, Homo sapien
tggaacaaagattctccctgagtac

SEQ ID NO: 5063424 - DNA, 25 bp, Homo sapien
acaaagattctccctgagtactcat

SEQ ID NO: 5063425 - DNA, 25 bp, Homo sapien
gctcaaggcatgcttgttaacaaag

SEQ ID NO: 5063426 - DNA, 25 bp, Homo sapien
tctatacagggagacgtggacgtgc

SEQ ID NO: 5063427 - DNA, 25 bp, Homo sapien
ttaacaaaggccactgatcggacgg

SEQ ID NO: 5063428 - DNA, 25 bp, Homo sapien
gacggctgtgatgccccattggttg

SEQ ID NO: 5063429 - DNA, 25 bp, Homo sapien
cagggcatgctgagtatagttgtac

SEQ ID NO: 5063430 - DNA, 25 bp, Homo sapien
tcaccagtgattccatgttcccaga

SEQ ID NO: 5063431 - DNA, 25 bp, Homo sapien
gatgcctttcaccagtgattccatg

SEQ ID NO: 5063432 - DNA, 25 bp, Homo sapien
cagggcgacaactgacatgtgactc

SEQ ID NO: 5063433 - DNA, 25 bp, Homo sapien
tatcacaggatctgaactggcactg

SEQ ID NO: 5063434 - DNA, 25 bp, Homo sapien
gtatcacaggatctgaactggcact

SEQ ID NO: 5063435 - DNA, 25 bp, Homo sapien
atcacaggatctgaactggcactgg

SEQ ID NO: 5063436 - DNA, 25 bp, Homo sapien
gaagatgcatggtgttcctttagaa

SEQ ID NO: 5063437 - DNA, 25 bp, Homo sapien
tcagaagatgcatggtgttccttta

SEQ ID NO: 5063438 - DNA, 25 bp, Homo sapien
tgttcctttagaagtgttgtctttg

SEQ ID NO: 5063439 - DNA, 25 bp, Homo sapien
tgtctttgtttgactcagtagttgc

SEQ ID NO: 5063440 - DNA, 25 bp, Homo sapien
ctgaggaggagtacctgctaataat

SEQ ID NO: 5063441 - DNA, 25 bp, Homo sapien
gagtacctgctaataattctgtcct

SEQ ID NO: 5063442 - DNA, 25 bp, Homo sapien
aagttgatagctgaggaggagtacc

SEQ ID NO: 5063443 - DNA, 25 bp, Homo sapien
agacagtctgagaagttgatagctg

SEQ ID NO: 5063444 - DNA, 25 bp, Homo sapien
tcatgtgtgcaggaagatcggcttg

SEQ ID NO: 5063445 - DNA, 25 bp, Homo sapien
gcatagacatattccgacggccctg

SEQ ID NO: 5063446 - DNA, 25 bp, Homo sapien
tccctgctacagaagtgtcctggca

SEQ ID NO: 5063447 - DNA, 25 bp, Homo sapien
aagcaaaagatgtgcgacgcaggcc

SEQ ID NO: 5063448 - DNA, 25 bp, Homo sapien
taggatagggtcaagcattttccag

SEQ ID NO: 5063449 - DNA, 25 bp, Homo sapien
aaactaagttttgtgcaaaagtgca

SEQ ID NO: 5063450 - DNA, 25 bp, Homo sapien
ccctgctatgaattgataggatagg

SEQ ID NO: 5063451 - DNA, 25 bp, Homo sapien
taaatgctctgtcaaaagtgggcca

SEQ ID NO: 5063452 - DNA, 25 bp, Homo sapien
aagcctatctatggttgtttcctgg

SEQ ID NO: 5063453 - DNA, 25 bp, Homo sapien
ttctctgctctctggtgtaccttga

SEQ ID NO: 5063454 - DNA, 25 bp, Homo sapien
gatatctcagagactaatgaaagcc

SEQ ID NO: 5063455 - DNA, 25 bp, Homo sapien
acactggctcccaatcttgggtgct

SEQ ID NO: 5063456 - DNA, 25 bp, Homo sapien
aaacattacattccaatcttctgtc

SEQ ID NO: 5063457 - DNA, 25 bp, Homo sapien
tcttctgaggtgttttggagttaca

SEQ ID NO: 5063458 - DNA, 25 bp, Homo sapien
ttttactcaagatgtcgcaggcttt

SEQ ID NO: 5063459 - DNA, 25 bp, Homo sapien
tcgcaggcttttagacttctgttac

SEQ ID NO: 5063460 - DNA, 25 bp, Homo sapien
tcctgcatatactagatcaacagct

SEQ ID NO: 5063461 - DNA, 25 bp, Homo sapien
gatcatgtaccttggagtacccaga

SEQ ID NO: 5063462 - DNA, 25 bp, Homo sapien
ttctatgctcacatagcagatcatg

SEQ ID NO: 5063463 - DNA, 25 bp, Homo sapien
gcaggtaagttctgaggatgacaac

SEQ ID NO: 5063464 - DNA, 25 bp, Homo sapien
ttgccaaaatgctcatggataattg

SEQ ID NO: 5063465 - DNA, 25 bp, Homo sapien
tcatggataattgcgaggccagggt

SEQ ID NO: 5063466 - DNA, 25 bp, Homo sapien
aattgcgaggccagggttgcaagtc

SEQ ID NO: 5063467 - DNA, 25 bp, Homo sapien
ggcaaagcctgcatcagacacttgc

SEQ ID NO: 5063468 - DNA, 25 bp, Homo sapien
ctgcagagtcaacactatattattt

SEQ ID NO: 5063469 - DNA, 25 bp, Homo sapien
caagccaaatgagtcgttatttcca

SEQ ID NO: 5063470 - DNA, 25 bp, Homo sapien
aactcaggggctctacgatctggtc

SEQ ID NO: 5063471 - DNA, 25 bp, Homo sapien
aaatggagtcatggctccctaatat

SEQ ID NO: 5063472 - DNA, 25 bp, Homo sapien
aaacatcaagcatgccaaaggcctt

SEQ ID NO: 5063473 - DNA, 25 bp, Homo sapien
ctttttgtccacagcccaagtgaat

SEQ ID NO: 5063474 - DNA, 25 bp, Homo sapien
ggcactgcagatccaaaacatcaag

SEQ ID NO: 5063475 - DNA, 25 bp, Homo sapien
cgaggacccaaagtgaaaatggcac

SEQ ID NO: 5063476 - DNA, 25 bp, Homo sapien
tctgaattccccagcattggttggc

SEQ ID NO: 5063477 - DNA, 25 bp, Homo sapien
cctttttcaggattgtagagatgta

SEQ ID NO: 5063478 - DNA, 25 bp, Homo sapien
tcctcttgagttcatccgctctggt

SEQ ID NO: 5063479 - DNA, 25 bp, Homo sapien
aaattatgtgtgtgattctcttttc

SEQ ID NO: 5063480 - DNA, 25 bp, Homo sapien
tggacaagctaagaggcactttaaa

SEQ ID NO: 5063481 - DNA, 25 bp, Homo sapien
ttatgagtaagcctagggctggtgc

SEQ ID NO: 5063482 - DNA, 25 bp, Homo sapien
cactgggcttggtcttatgagtaag

SEQ ID NO: 5063483 - DNA, 25 bp, Homo sapien
tgcggctggacaagctaagaggcac

SEQ ID NO: 5063484 - DNA, 25 bp, Homo sapien
tttctgattgccttacaatcatagg

SEQ ID NO: 5063485 - DNA, 25 bp, Homo sapien
caccgttttccaatatcatcatatc

SEQ ID NO: 5063486 - DNA, 25 bp, Homo sapien
tttgtttctgattgccttacaatca

SEQ ID NO: 5063487 - DNA, 25 bp, Homo sapien
cccaccgttttccaatatcatcata

SEQ ID NO: 5063488 - DNA, 25 bp, Homo sapien
cctcgaagaactgggcttgagacat

SEQ ID NO: 5063489 - DNA, 25 bp, Homo sapien
tttatgagctgtctccctactctca

SEQ ID NO: 5063490 - DNA, 25 bp, Homo sapien
cagctttcctcgaagaactgggctt

SEQ ID NO: 5063491 - DNA, 25 bp, Homo sapien
tctcaccatcatccccaatcacaaa

SEQ ID NO: 5063492 - DNA, 25 bp, Homo sapien
ccccgaagggcttagctatcccagt

SEQ ID NO: 5063493 - DNA, 25 bp, Homo sapien
tgtcttgggagtctttctcccacac

SEQ ID NO: 5063494 - DNA, 25 bp, Homo sapien
tgacccagggcataaatagatttcc

SEQ ID NO: 5063495 - DNA, 25 bp, Homo sapien
tcctgagaccttggccagccttaag

SEQ ID NO: 5063496 - DNA, 25 bp, Homo sapien
ctgccatgagtgttttggagatctg

SEQ ID NO: 5063497 - DNA, 25 bp, Homo sapien
tccaattctgccatgagtgttttgg

SEQ ID NO: 5063498 - DNA, 25 bp, Homo sapien
atgagtgttttggagatctggggga

SEQ ID NO: 5063499 - DNA, 25 bp, Homo sapien
agatctgggggattgccttcccatg

SEQ ID NO: 5063500 - DNA, 25 bp, Homo sapien
gcagtagggtccatcagtgcaggca

SEQ ID NO: 5063501 - DNA, 25 bp, Homo sapien
cagtgttacaaccaacttgagggag

SEQ ID NO: 5063502 - DNA, 25 bp, Homo sapien
caagtgatatgccaaccaggcagta

SEQ ID NO: 5063503 - DNA, 25 bp, Homo sapien
tccagttgctgtaaaccaagtgata

SEQ ID NO: 5063504 - DNA, 25 bp, Homo sapien
ccaaatactgaatgaaagggaggga

SEQ ID NO: 5063505 - DNA, 25 bp, Homo sapien
ctatggagtagatgggtgcagattc

SEQ ID NO: 5063506 - DNA, 25 bp, Homo sapien
tacacatgcactaataacctgggct

SEQ ID NO: 5063507 - DNA, 25 bp, Homo sapien
gaactcagcatgtagatcccaaata

SEQ ID NO: 5063508 - DNA, 25 bp, Homo sapien
acagtgcctataataggtaggtgct

SEQ ID NO: 5063509 - DNA, 25 bp, Homo sapien
cagtgcctataataggtaggtgctc

SEQ ID NO: 5063510 - DNA, 25 bp, Homo sapien
gaagagccatataaatcaccagctg

SEQ ID NO: 5063511 - DNA, 25 bp, Homo sapien
tctttgcattgctcttatggaacca

SEQ ID NO: 5063512 - DNA, 25 bp, Homo sapien
tctttatttagccagcagatgttgg

SEQ ID NO: 5063513 - DNA, 25 bp, Homo sapien
tcccaaaaggtgaagatcatgtctt

SEQ ID NO: 5063514 - DNA, 25 bp, Homo sapien
tgatgatatggaaattaatgggtct

SEQ ID NO: 5063515 - DNA, 25 bp, Homo sapien
gctgatttaagcatccataccttga

SEQ ID NO: 5063516 - DNA, 25 bp, Homo sapien
taggaatcttccctcttatgcagat

SEQ ID NO: 5063517 - DNA, 25 bp, Homo sapien
gcagtaacctggtcatgtaggaatc

SEQ ID NO: 5063518 - DNA, 25 bp, Homo sapien
agaagcttctgttatgaacaccaac

SEQ ID NO: 5063519 - DNA, 25 bp, Homo sapien
gagaagcttctgttatgaacaccaa

SEQ ID NO: 5063520 - DNA, 25 bp, Homo sapien
gaagcttctgttatgaacaccaact

SEQ ID NO: 5063521 - DNA, 25 bp, Homo sapien
agagaagcttctgttatgaacacca

SEQ ID NO: 5063522 - DNA, 25 bp, Homo sapien
gatatcacgtttggttggccacaca

SEQ ID NO: 5063523 - DNA, 25 bp, Homo sapien
gacttctagctggatatcacgtttg

SEQ ID NO: 5063524 - DNA, 25 bp, Homo sapien
tgccctgagacaagcataagtctcc

SEQ ID NO: 5063525 - DNA, 25 bp, Homo sapien
ttaatgctcagttagaataagctgg

SEQ ID NO: 5063526 - DNA, 25 bp, Homo sapien
catcctggggcaggtcgaagcaatt

SEQ ID NO: 5063527 - DNA, 25 bp, Homo sapien
gcaggtcgaagcaattggggcaaat

SEQ ID NO: 5063528 - DNA, 25 bp, Homo sapien
atcctggggcaggtcgaagcaattg

SEQ ID NO: 5063529 - DNA, 25 bp, Homo sapien
aagcaattggggcaaattctgccat

SEQ ID NO: 5063530 - DNA, 25 bp, Homo sapien
aatcttgggatgtttgtctgtcctt

SEQ ID NO: 5063531 - DNA, 25 bp, Homo sapien
tctgcactgttgtcaaggcttcttg

SEQ ID NO: 5063532 - DNA, 25 bp, Homo sapien
gcactgttgtcaaggcttcttgaca

SEQ ID NO: 5063533 - DNA, 25 bp, Homo sapien
ccctctctgcactgttgtcaaggct

SEQ ID NO: 5063534 - DNA, 25 bp, Homo sapien
tttcaccctctctgcactgttgtca

SEQ ID NO: 5063535 - DNA, 25 bp, Homo sapien
cttgcaataacaggaattatatgca

SEQ ID NO: 5063536 - DNA, 25 bp, Homo sapien
tatgcaattttctgataatgactcc

SEQ ID NO: 5063537 - DNA, 25 bp, Homo sapien
agccatattatcctgaggacttgca

SEQ ID NO: 5063538 - DNA, 25 bp, Homo sapien
taaatctcctagcagaacagccata

SEQ ID NO: 5063539 - DNA, 25 bp, Homo sapien
gtggacaggcgctgtccaggtttgc

SEQ ID NO: 5063540 - DNA, 25 bp, Homo sapien
gcgtggctgaatgtgtaatgggcct

SEQ ID NO: 5063541 - DNA, 25 bp, Homo sapien
aggtttgcgtggctgaatgtgtaat

SEQ ID NO: 5063542 - DNA, 25 bp, Homo sapien
caggcgctgtccaggtttgcgtggc

SEQ ID NO: 5063543 - DNA, 25 bp, Homo sapien
cctttgctaccatcagaggcatatc

SEQ ID NO: 5063544 - DNA, 25 bp, Homo sapien
taggctttgactgtgcgtccttaca

SEQ ID NO: 5063545 - DNA, 25 bp, Homo sapien
tatctacaagtcttcttaggctttg

SEQ ID NO: 5063546 - DNA, 25 bp, Homo sapien
tacatgaagcaattcaccgctgccc

SEQ ID NO: 5063547 - DNA, 25 bp, Homo sapien
gtctggccgcttatgcctctctcta

SEQ ID NO: 5063548 - DNA, 25 bp, Homo sapien
ccagccacgtgcactatttcctttt

SEQ ID NO: 5063549 - DNA, 25 bp, Homo sapien
cctgaggtcatcagcacttctggtc

SEQ ID NO: 5063550 - DNA, 25 bp, Homo sapien
catcagcacttctggtcacatagaa

SEQ ID NO: 5063551 - DNA, 25 bp, Homo sapien
gttgtcattcattgtactggattcc

SEQ ID NO: 5063552 - DNA, 25 bp, Homo sapien
taagagcatcacttttggcttgagc

SEQ ID NO: 5063553 - DNA, 25 bp, Homo sapien
aagagcatcacttttggcttgagct

SEQ ID NO: 5063554 - DNA, 25 bp, Homo sapien
gacttgatctccgaaatttttctcc

SEQ ID NO: 5063555 - DNA, 25 bp, Homo sapien
tttggtaagacttgatctccgaaat

SEQ ID NO: 5063556 - DNA, 25 bp, Homo sapien
tggtaagacttgatctccgaaattt

SEQ ID NO: 5063557 - DNA, 25 bp, Homo sapien
agacttgatctccgaaatttttctc

SEQ ID NO: 5063558 - DNA, 25 bp, Homo sapien
taagagtaagcctaagttgcttagc

SEQ ID NO: 5063559 - DNA, 25 bp, Homo sapien
taagcctaagttgcttagctatcac

SEQ ID NO: 5063560 - DNA, 25 bp, Homo sapien
agattttaagagtaagcctaagttg

SEQ ID NO: 5063561 - DNA, 25 bp, Homo sapien
gattttaagagtaagcctaagttgc

SEQ ID NO: 5063562 - DNA, 25 bp, Homo sapien
ggtgtttgctcactagtcacttgga

SEQ ID NO: 5063563 - DNA, 25 bp, Homo sapien
gcaaggttgggctaggaaaaccagc

SEQ ID NO: 5063564 - DNA, 25 bp, Homo sapien
accatgcattccaggccttgtgcct

SEQ ID NO: 5063565 - DNA, 25 bp, Homo sapien
gaagtttattcctacttgctcagca

SEQ ID NO: 5063566 - DNA, 25 bp, Homo sapien
ctacctgtgacttcaccatcaccat

SEQ ID NO: 5063567 - DNA, 25 bp, Homo sapien
tcacttctatatctgatcttgctct

SEQ ID NO: 5063568 - DNA, 25 bp, Homo sapien
caggataagggttcctagttgccaa

SEQ ID NO: 5063569 - DNA, 25 bp, Homo sapien
tagttgccaacttttcaggaataag

SEQ ID NO: 5063570 - DNA, 25 bp, Homo sapien
cttggcttacagcatatgttgggtc

SEQ ID NO: 5063571 - DNA, 25 bp, Homo sapien
cttcatttgggtcgagtgtaactcc

SEQ ID NO: 5063572 - DNA, 25 bp, Homo sapien
gatcctcaggccatgctgagtcctt

SEQ ID NO: 5063573 - DNA, 25 bp, Homo sapien
tgtcaatgccgaagtcaagtccaga

SEQ ID NO: 5063574 - DNA, 25 bp, Homo sapien
ctaggaccatactgcctttagggca

SEQ ID NO: 5063575 - DNA, 25 bp, Homo sapien
tgaactatccgtgcaggtttctgat

SEQ ID NO: 5063576 - DNA, 25 bp, Homo sapien
attgctctgctgaactatccgtgca

SEQ ID NO: 5063577 - DNA, 25 bp, Homo sapien
tgctctgctgaactatccgtgcagg

SEQ ID NO: 5063578 - DNA, 25 bp, Homo sapien
gctgaactatccgtgcaggtttctg

SEQ ID NO: 5063579 - DNA, 25 bp, Homo sapien
caggtagatagcatccatccaggaa

SEQ ID NO: 5063580 - DNA, 25 bp, Homo sapien
tcttggactccttccagggaatctg

SEQ ID NO: 5063581 - DNA, 25 bp, Homo sapien
gatgagagccatctagtctgctgca

SEQ ID NO: 5063582 - DNA, 25 bp, Homo sapien
gactgtagcaagttcctcactccag

SEQ ID NO: 5063583 - DNA, 25 bp, Homo sapien
catctaaagtccttgaaattatttt

SEQ ID NO: 5063584 - DNA, 25 bp, Homo sapien
tttgtattgaactgtggcaccctca

SEQ ID NO: 5063585 - DNA, 25 bp, Homo sapien
gcaccctcagccaacttgaaagaac

SEQ ID NO: 5063586 - DNA, 25 bp, Homo sapien
catggtaagtaagcataatggtttt

SEQ ID NO: 5063587 - DNA, 25 bp, Homo sapien
ctttgtagcatggtaagtaagcata

SEQ ID NO: 5063588 - DNA, 25 bp, Homo sapien
aaggtggatgtacaggtccctgcac

SEQ ID NO: 5063589 - DNA, 25 bp, Homo sapien
gagacaaggtggatgtacaggtccc

SEQ ID NO: 5063590 - DNA, 25 bp, Homo sapien
tgtctgggagacaaggtggatgtac

SEQ ID NO: 5063591 - DNA, 25 bp, Homo sapien
ggtggatgtacaggtccctgcacat

SEQ ID NO: 5063592 - DNA, 25 bp, Homo sapien
ctggatttcttacatgtccctgcat

SEQ ID NO: 5063593 - DNA, 25 bp, Homo sapien
actggatttcttacatgtccctgca

SEQ ID NO: 5063594 - DNA, 25 bp, Homo sapien
tactggatttcttacatgtccctgc

SEQ ID NO: 5063595 - DNA, 25 bp, Homo sapien
tgtcaactcagtgccgctaccattg

SEQ ID NO: 5063596 - DNA, 25 bp, Homo sapien
caactcagtgccgctaccattggac

SEQ ID NO: 5063597 - DNA, 25 bp, Homo sapien
ctgtcaactcagtgccgctaccatt

SEQ ID NO: 5063598 - DNA, 25 bp, Homo sapien
tcaactcagtgccgctaccattgga

SEQ ID NO: 5063599 - DNA, 25 bp, Homo sapien
cccgggtaaagagcgcagtatgatt

SEQ ID NO: 5063600 - DNA, 25 bp, Homo sapien
ctgcccgggtaaagagcgcagtatg

SEQ ID NO: 5063601 - DNA, 25 bp, Homo sapien
ggtaaagagcgcagtatgatttagg

SEQ ID NO: 5063602 - DNA, 25 bp, Homo sapien
gggtaaagagcgcagtatgatttag

SEQ ID NO: 5063603 - DNA, 25 bp, Homo sapien
tgtgcattggcagatggaatgggag

SEQ ID NO: 5063604 - DNA, 25 bp, Homo sapien
ctgtgcattggcagatggaatggga

SEQ ID NO: 5063605 - DNA, 25 bp, Homo sapien
gctaggctcttgatagacacaccag

SEQ ID NO: 5063606 - DNA, 25 bp, Homo sapien
gacacaccaggttcatcatcgttgc

SEQ ID NO: 5063607 - DNA, 25 bp, Homo sapien
aagaactgggttacaagctaggctc

SEQ ID NO: 5063608 - DNA, 25 bp, Homo sapien
catcgttgctattacatctagcatg

SEQ ID NO: 5063609 - DNA, 25 bp, Homo sapien
acatttaagacagccgtgattttcc

SEQ ID NO: 5063610 - DNA, 25 bp, Homo sapien
tttacatttaagacagccgtgattt

SEQ ID NO: 5063611 - DNA, 25 bp, Homo sapien
gatttgaagtggtgggtgtttatgg

SEQ ID NO: 5063612 - DNA, 25 bp, Homo sapien
tgggtgtttatggcttgggtaggga

SEQ ID NO: 5063613 - DNA, 25 bp, Homo sapien
ggccatgaataaggcttctggaggt

SEQ ID NO: 5063614 - DNA, 25 bp, Homo sapien
tgcccttgattgaaggccatgaata

SEQ ID NO: 5063615 - DNA, 25 bp, Homo sapien
ttgattgaaggccatgaataaggct

SEQ ID NO: 5063616 - DNA, 25 bp, Homo sapien
caggaacttgcccttgattgaaggc

SEQ ID NO: 5063617 - DNA, 25 bp, Homo sapien
tgctgaaatcctgaggggtctctat

SEQ ID NO: 5063618 - DNA, 25 bp, Homo sapien
ccggcagtagagagggcagtgctgc

SEQ ID NO: 5063619 - DNA, 25 bp, Homo sapien
tggaggagtcacagcctgtctcgtg

SEQ ID NO: 5063620 - DNA, 25 bp, Homo sapien
agtcacagcctgtctcgtggatgtc

SEQ ID NO: 5063621 - DNA, 25 bp, Homo sapien
ccagggatgatcatagattgactca

SEQ ID NO: 5063622 - DNA, 25 bp, Homo sapien
agtaactgcgttgtctccatatgcc

SEQ ID NO: 5063623 - DNA, 25 bp, Homo sapien
caaaagacggaattgctctctggcc

SEQ ID NO: 5063624 - DNA, 25 bp, Homo sapien
tgactcagaatgaacctcagaggcc

SEQ ID NO: 5063625 - DNA, 25 bp, Homo sapien
cagggacggaaataccagggcccat

SEQ ID NO: 5063626 - DNA, 25 bp, Homo sapien
acccatggataaaggacactctcac

SEQ ID NO: 5063627 - DNA, 25 bp, Homo sapien
tcaaattcattgatgacagcgacac

SEQ ID NO: 5063628 - DNA, 25 bp, Homo sapien
tcaggcagaagtatgatcaaattca

SEQ ID NO: 5063629 - DNA, 25 bp, Homo sapien
ttgtttgctagtatactttgctttg

SEQ ID NO: 5063630 - DNA, 25 bp, Homo sapien
cacatatttgtttgctagtatactt

SEQ ID NO: 5063631 - DNA, 25 bp, Homo sapien
tcctaaagggtaaacatctttcaca

SEQ ID NO: 5063632 - DNA, 25 bp, Homo sapien
agggtaaacatctttcacatatttg

SEQ ID NO: 5063633 - DNA, 25 bp, Homo sapien
tagaactcgaatttcatactttccc

SEQ ID NO: 5063634 - DNA, 25 bp, Homo sapien
gaacgaaaggatctgactttagtca

SEQ ID NO: 5063635 - DNA, 25 bp, Homo sapien
tagtcagatctatggttagaactcg

SEQ ID NO: 5063636 - DNA, 25 bp, Homo sapien
ttggtacatttctaagagcctcagt

SEQ ID NO: 5063637 - DNA, 25 bp, Homo sapien
taattgctccacattccagaatatt

SEQ ID NO: 5063638 - DNA, 25 bp, Homo sapien
ctggttctaaatcttgttgtaatag

SEQ ID NO: 5063639 - DNA, 25 bp, Homo sapien
tgtaatagatgatacaacactgact

SEQ ID NO: 5063640 - DNA, 25 bp, Homo sapien
gaatatttgatttgtgcattgttga

SEQ ID NO: 5063641 - DNA, 25 bp, Homo sapien
cgtgaggcagccttctaatggaggc

SEQ ID NO: 5063642 - DNA, 25 bp, Homo sapien
gcccaaggtaatggtcttgctggcc

SEQ ID NO: 5063643 - DNA, 25 bp, Homo sapien
ctggcctaagtgtgctaaaagcttg

SEQ ID NO: 5063644 - DNA, 25 bp, Homo sapien
gaatttgaatgggcccaaggtaatg

SEQ ID NO: 5063645 - DNA, 25 bp, Homo sapien
gactcaatgttatattgcagaaaag

SEQ ID NO: 5063646 - DNA, 25 bp, Homo sapien
ggcagagactcaatgttatattgca

SEQ ID NO: 5063647 - DNA, 25 bp, Homo sapien
ggctgtgaggactctttcaattggc

SEQ ID NO: 5063648 - DNA, 25 bp, Homo sapien
gactctttcaattggcagagactca

SEQ ID NO: 5063649 - DNA, 25 bp, Homo sapien
cagcatctaaagctgtgttccattt

SEQ ID NO: 5063650 - DNA, 25 bp, Homo sapien
acagcatctaaagctgtgttccatt

SEQ ID NO: 5063651 - DNA, 25 bp, Homo sapien
gagagagatctcctccagattgtga

SEQ ID NO: 5063652 - DNA, 25 bp, Homo sapien
gatcaggagtaagagctaagttaga

SEQ ID NO: 5063653 - DNA, 25 bp, Homo sapien
ttagaggttgctaatgatacagagt

SEQ ID NO: 5063654 - DNA, 25 bp, Homo sapien
tacagagtcttgatggcccatatgg

SEQ ID NO: 5063655 - DNA, 25 bp, Homo sapien
cattaaggagatccaagctggcctt

SEQ ID NO: 5063656 - DNA, 25 bp, Homo sapien
catgactgaggttgggtaccgcaac

SEQ ID NO: 5063657 - DNA, 25 bp, Homo sapien
cagctcgagagcctgcaagggatgt

SEQ ID NO: 5063658 - DNA, 25 bp, Homo sapien
caagggatgttgtggattctggttc

SEQ ID NO: 5063659 - DNA, 25 bp, Homo sapien
actgattgcatatgttaccaaggaa

SEQ ID NO: 5063660 - DNA, 25 bp, Homo sapien
tattgggatgtcaaatggcagtgtc

SEQ ID NO: 5063661 - DNA, 25 bp, Homo sapien
ggctgggttgtgaactgattgcata

SEQ ID NO: 5063662 - DNA, 25 bp, Homo sapien
gcatatgttaccaaggaaattattg

SEQ ID NO: 5063663 - DNA, 25 bp, Homo sapien
catcccagatgtaacatgagttctg

SEQ ID NO: 5063664 - DNA, 25 bp, Homo sapien
tcccagatgtaacatgagttctgat

SEQ ID NO: 5063665 - DNA, 25 bp, Homo sapien
tggcatcccagatgtaacatgagtt

SEQ ID NO: 5063666 - DNA, 25 bp, Homo sapien
ggcatcccagatgtaacatgagttc

SEQ ID NO: 5063667 - DNA, 25 bp, Homo sapien
ttcaattttagcagaggctgaaaca

SEQ ID NO: 5063668 - DNA, 25 bp, Homo sapien
gattgattgatttaacttccaaaca

SEQ ID NO: 5063669 - DNA, 25 bp, Homo sapien
cttccaaacatacttcaattttagc

SEQ ID NO: 5063670 - DNA, 25 bp, Homo sapien
ctttgacaaagttggattgattgat

SEQ ID NO: 5063671 - DNA, 25 bp, Homo sapien
caactgcatgtagagccttggctta

SEQ ID NO: 5063672 - DNA, 25 bp, Homo sapien
gaatgatctctgtgtaagtagtgca

SEQ ID NO: 5063673 - DNA, 25 bp, Homo sapien
tagaaacaagattaggtccaacgac

SEQ ID NO: 5063674 - DNA, 25 bp, Homo sapien
ggtaaatttctgctagagggcactt

SEQ ID NO: 5063675 - DNA, 25 bp, Homo sapien
tagtcttaggagttactaaggcacc

SEQ ID NO: 5063676 - DNA, 25 bp, Homo sapien
tagatagtcttaggagttactaagg

SEQ ID NO: 5063677 - DNA, 25 bp, Homo sapien
actaaggcacctgactgtgccggct

SEQ ID NO: 5063678 - DNA, 25 bp, Homo sapien
aggcacctgactgtgccggctttgg

SEQ ID NO: 5063679 - DNA, 25 bp, Homo sapien
acagcattctgcagtaaggtttggg

SEQ ID NO: 5063680 - DNA, 25 bp, Homo sapien
gagagcttcataattaagcgtgtgg

SEQ ID NO: 5063681 - DNA, 25 bp, Homo sapien
taagcgtgtggtagacaatatggta

SEQ ID NO: 5063682 - DNA, 25 bp, Homo sapien
gacaatatggtagtggctctctgtt

SEQ ID NO: 5063683 - DNA, 25 bp, Homo sapien
ttgacctagtgcataacggtgggag

SEQ ID NO: 5063684 - DNA, 25 bp, Homo sapien
catatacccttaacggaagaacaat

SEQ ID NO: 5063685 - DNA, 25 bp, Homo sapien
tgtccactttgacctagtgcataac

SEQ ID NO: 5063686 - DNA, 25 bp, Homo sapien
tgacagatatggcagccagttcact

SEQ ID NO: 5063687 - DNA, 25 bp, Homo sapien
gcctctccttattggaaataacaat

SEQ ID NO: 5063688 - DNA, 25 bp, Homo sapien
tccttattggaaataacaatcttct

SEQ ID NO: 5063689 - DNA, 25 bp, Homo sapien
cttattggaaataacaatcttcttg

SEQ ID NO: 5063690 - DNA, 25 bp, Homo sapien
ggaaataacaatcttcttgaagctg

SEQ ID NO: 5063691 - DNA, 25 bp, Homo sapien
ctgcttgcagaagggtgaactgacc

SEQ ID NO: 5063692 - DNA, 25 bp, Homo sapien
gaactgaccacacgaaggtcaacag

SEQ ID NO: 5063693 - DNA, 25 bp, Homo sapien
caacagtgagcgtgttacagtggcc

SEQ ID NO: 5063694 - DNA, 25 bp, Homo sapien
gagcgtgttacagtggcctgacttc

SEQ ID NO: 5063695 - DNA, 25 bp, Homo sapien
aggtgttctggtgtgtacctcctgc

SEQ ID NO: 5063696 - DNA, 25 bp, Homo sapien
cgtcccgtgagtgcttgactgtttc

SEQ ID NO: 5063697 - DNA, 25 bp, Homo sapien
agcaggtgttctggtgtgtacctcc

SEQ ID NO: 5063698 - DNA, 25 bp, Homo sapien
acacagatgtttccgtcccgtgagt

SEQ ID NO: 5063699 - DNA, 25 bp, Homo sapien
actgtcagttctaccatgtgctagg

SEQ ID NO: 5063700 - DNA, 25 bp, Homo sapien
gaagaaaggcacactctccgaggta

SEQ ID NO: 5063701 - DNA, 25 bp, Homo sapien
aattacagctggttgattggcatcc

SEQ ID NO: 5063702 - DNA, 25 bp, Homo sapien
taattactgtgggagcaagaagcca

SEQ ID NO: 5063703 - DNA, 25 bp, Homo sapien
tggaaggtgtgctgaatagcatgtc

SEQ ID NO: 5063704 - DNA, 25 bp, Homo sapien
cgtggctgttatagttgatgtctgg

SEQ ID NO: 5063705 - DNA, 25 bp, Homo sapien
ctggaaggtgtgctgaatagcatgt

SEQ ID NO: 5063706 - DNA, 25 bp, Homo sapien
gtcttgttggactgcaagggcattc

SEQ ID NO: 5063707 - DNA, 25 bp, Homo sapien
gaggtcttgttggactgcaagggca

SEQ ID NO: 5063708 - DNA, 25 bp, Homo sapien
aggaggtcttgttggactgcaaggg

SEQ ID NO: 5063709 - DNA, 25 bp, Homo sapien
ggtcttgttggactgcaagggcatt

SEQ ID NO: 5063710 - DNA, 25 bp, Homo sapien
agatccttgacaattccctgcgcac

SEQ ID NO: 5063711 - DNA, 25 bp, Homo sapien
cgcacccttagccacgaaaccacct

SEQ ID NO: 5063712 - DNA, 25 bp, Homo sapien
tgagtaatttctggctggccatgag

SEQ ID NO: 5063713 - DNA, 25 bp, Homo sapien
tcagggatggagcagtgggctgacc

SEQ ID NO: 5063714 - DNA, 25 bp, Homo sapien
taatgggtttatgcatttcttgacc

SEQ ID NO: 5063715 - DNA, 25 bp, Homo sapien
tattaaagtaatgggtttatgcatt

SEQ ID NO: 5063716 - DNA, 25 bp, Homo sapien
gtattttcagcaaacttcctcctcc

SEQ ID NO: 5063717 - DNA, 25 bp, Homo sapien
ggtattttcagcaaacttcctcctc

SEQ ID NO: 5063718 - DNA, 25 bp, Homo sapien
tggagccacggaagattctacgcgg

SEQ ID NO: 5063719 - DNA, 25 bp, Homo sapien
gcatttgtgcgtaacaatcgggagt

SEQ ID NO: 5063720 - DNA, 25 bp, Homo sapien
caagctggattgtggtaggattttc

SEQ ID NO: 5063721 - DNA, 25 bp, Homo sapien
gctgtaagaggatcatagccgtggt

SEQ ID NO: 5063722 - DNA, 25 bp, Homo sapien
ccagtaatgagagtgccgagtgagc

SEQ ID NO: 5063723 - DNA, 25 bp, Homo sapien
gcagcaggacaacttgtgcccggga

SEQ ID NO: 5063724 - DNA, 25 bp, Homo sapien
caggcagcagcgattgcaggctcat

SEQ ID NO: 5063725 - DNA, 25 bp, Homo sapien
gagcagacctttccccgacagtgct

SEQ ID NO: 5063726 - DNA, 25 bp, Homo sapien
taatatctccgtgttgttgcagttg

SEQ ID NO: 5063727 - DNA, 25 bp, Homo sapien
ttgttaatatctccgtgttgttgca

SEQ ID NO: 5063728 - DNA, 25 bp, Homo sapien
gcctttactttatctgctaaatccc

SEQ ID NO: 5063729 - DNA, 25 bp, Homo sapien
acctgcctttgttaatatctccgtg

SEQ ID NO: 5063730 - DNA, 25 bp, Homo sapien
gagtcatctcctggtcatggccacc

SEQ ID NO: 5063731 - DNA, 25 bp, Homo sapien
agagtcatctcctggtcatggccac

SEQ ID NO: 5063732 - DNA, 25 bp, Homo sapien
ctctgccttgccagagtcatctcct

SEQ ID NO: 5063733 - DNA, 25 bp, Homo sapien
tctgagtctgaaagtcatcacacgg

SEQ ID NO: 5063734 - DNA, 25 bp, Homo sapien
agctgatgcagcatgacattggtgc

SEQ ID NO: 5063735 - DNA, 25 bp, Homo sapien
agtccgttgatggtatttatctgag

SEQ ID NO: 5063736 - DNA, 25 bp, Homo sapien
cccatcatcctgaagtccgttgatg

SEQ ID NO: 5063737 - DNA, 25 bp, Homo sapien
ggcttttaaagctaattgtctttga

SEQ ID NO: 5063738 - DNA, 25 bp, Homo sapien
taaagctaattgtctttgaactcat

SEQ ID NO: 5063739 - DNA, 25 bp, Homo sapien
tttaaagctaattgtctttgaactc

SEQ ID NO: 5063740 - DNA, 25 bp, Homo sapien
gcttttaaagctaattgtctttgaa

SEQ ID NO: 5063741 - DNA, 25 bp, Homo sapien
tccctaagtacttgaaattcatcat

SEQ ID NO: 5063742 - DNA, 25 bp, Homo sapien
tttccctaagtacttgaaattcatc

SEQ ID NO: 5063743 - DNA, 25 bp, Homo sapien
cctaagtacttgaaattcatcatcc

SEQ ID NO: 5063744 - DNA, 25 bp, Homo sapien
taagtacttgaaattcatcatccat

SEQ ID NO: 5063745 - DNA, 25 bp, Homo sapien
ctatagacttgctatgtgggttcat

SEQ ID NO: 5063746 - DNA, 25 bp, Homo sapien
gctatagacttgctatgtgggttca

SEQ ID NO: 5063747 - DNA, 25 bp, Homo sapien
agctatagacttgctatgtgggttc

SEQ ID NO: 5063748 - DNA, 25 bp, Homo sapien
gttaggagacaacacagtaaacaca

SEQ ID NO: 5063749 - DNA, 25 bp, Homo sapien
aaagtgaagcttgtaaaaatctgca

SEQ ID NO: 5063750 - DNA, 25 bp, Homo sapien
ggagccggaatgagtctgaatataa

SEQ ID NO: 5063751 - DNA, 25 bp, Homo sapien
taaacgtcgggatatggagccggaa

SEQ ID NO: 5063752 - DNA, 25 bp, Homo sapien
aagccttctagtccctctcctagtg

SEQ ID NO: 5063753 - DNA, 25 bp, Homo sapien
ggcagctacaggcaagatgtgtttt

SEQ ID NO: 5063754 - DNA, 25 bp, Homo sapien
tctcctagtgttggagccagttctt

SEQ ID NO: 5063755 - DNA, 25 bp, Homo sapien
tgtgatgggctccactagtctggca

SEQ ID NO: 5063756 - DNA, 25 bp, Homo sapien
tgagcctgcccctagcatggaaatg

SEQ ID NO: 5063757 - DNA, 25 bp, Homo sapien
ctgtgtactcgctgaatgaactgaa

SEQ ID NO: 5063758 - DNA, 25 bp, Homo sapien
tggtggacattgaagacggtgcctt

SEQ ID NO: 5063759 - DNA, 25 bp, Homo sapien
tgtagatccttgagggcgctgagcc

SEQ ID NO: 5063760 - DNA, 25 bp, Homo sapien
gctgaactgtgatgcgttcctgcat

SEQ ID NO: 5063761 - DNA, 25 bp, Homo sapien
tctgtccatttttatgtaatcgagg

SEQ ID NO: 5063762 - DNA, 25 bp, Homo sapien
tgtccatttttatgtaatcgaggtc

SEQ ID NO: 5063763 - DNA, 25 bp, Homo sapien
tccatttttatgtaatcgaggtcca

SEQ ID NO: 5063764 - DNA, 25 bp, Homo sapien
ccatttttatgtaatcgaggtccat

SEQ ID NO: 5063765 - DNA, 25 bp, Homo sapien
tctataatgaagtatggagcagaaa

SEQ ID NO: 5063766 - DNA, 25 bp, Homo sapien
ctataatgaagtatggagcagaaac

SEQ ID NO: 5063767 - DNA, 25 bp, Homo sapien
tgttcttaggagctctgatggtgga

SEQ ID NO: 5063768 - DNA, 25 bp, Homo sapien
tctgcatatccatttgcctggcctg

SEQ ID NO: 5063769 - DNA, 25 bp, Homo sapien
gccagtctctcatgaacaaagtctt

SEQ ID NO: 5063770 - DNA, 25 bp, Homo sapien
cagaaacattctgatacctggccag

SEQ ID NO: 5063771 - DNA, 25 bp, Homo sapien
gcagacggcaagatcagcacaggta

SEQ ID NO: 5063772 - DNA, 25 bp, Homo sapien
tcatcagccactcttaggcagacgg

SEQ ID NO: 5063773 - DNA, 25 bp, Homo sapien
ctggacaattgaggaatcaccctca

SEQ ID NO: 5063774 - DNA, 25 bp, Homo sapien
aggtaaatcctggtattgtctggcc

SEQ ID NO: 5063775 - DNA, 25 bp, Homo sapien
tcggggagaacgaggacagggccag

SEQ ID NO: 5063776 - DNA, 25 bp, Homo sapien
gcccaaccccagtaacatagggcat

SEQ ID NO: 5063777 - DNA, 25 bp, Homo sapien
gcatcctgtgctgggagatgtcctg

SEQ ID NO: 5063778 - DNA, 25 bp, Homo sapien
ccccagtaacatagggcatggctgg

SEQ ID NO: 5063779 - DNA, 25 bp, Homo sapien
catagcattgtgtaatgcttttgat

SEQ ID NO: 5063780 - DNA, 25 bp, Homo sapien
atctctacgtaagtgcaaaacattc

SEQ ID NO: 5063781 - DNA, 25 bp, Homo sapien
tcccatcactccagggtgaaatgtc

SEQ ID NO: 5063782 - DNA, 25 bp, Homo sapien
catccacgatgttgtgcaatctcat

SEQ ID NO: 5063783 - DNA, 25 bp, Homo sapien
ctcccgatatgcatgggaatggctg

SEQ ID NO: 5063784 - DNA, 25 bp, Homo sapien
cgatatgcatgggaatggctgagca

SEQ ID NO: 5063785 - DNA, 25 bp, Homo sapien
cccgatatgcatgggaatggctgag

SEQ ID NO: 5063786 - DNA, 25 bp, Homo sapien
tcccgatatgcatgggaatggctga

SEQ ID NO: 5063787 - DNA, 25 bp, Homo sapien
gaaggcccatgttttgtcccagcac

SEQ ID NO: 5063788 - DNA, 25 bp, Homo sapien
ctggagctgccaagagtgttttcga

SEQ ID NO: 5063789 - DNA, 25 bp, Homo sapien
catgacctgaccgtagacgtggcct

SEQ ID NO: 5063790 - DNA, 25 bp, Homo sapien
gaaatgcgtcttggctgaaggccca

SEQ ID NO: 5063791 - DNA, 25 bp, Homo sapien
tttaagctatctgagaatataagca

SEQ ID NO: 5063792 - DNA, 25 bp, Homo sapien
ctatctgagaatataagcaagctgg

SEQ ID NO: 5063793 - DNA, 25 bp, Homo sapien
ctaggtatttaagctatctgagaat

SEQ ID NO: 5063794 - DNA, 25 bp, Homo sapien
agaatataagcaagctggcaaaagg

SEQ ID NO: 5063795 - DNA, 25 bp, Homo sapien
gaggaggggtctgtgacgagaaggg

SEQ ID NO: 5063796 - DNA, 25 bp, Homo sapien
tctgtgacgagaaggggccgctgtt

SEQ ID NO: 5063797 - DNA, 25 bp, Homo sapien
gggtctgtgacgagaaggggccgct

SEQ ID NO: 5063798 - DNA, 25 bp, Homo sapien
gaggggtctgtgacgagaaggggcc

SEQ ID NO: 5063799 - DNA, 25 bp, Homo sapien
cgaccacatgataagtgtacaggtg

SEQ ID NO: 5063800 - DNA, 25 bp, Homo sapien
tacaggtgagtaaaacttgggcagt

SEQ ID NO: 5063801 - DNA, 25 bp, Homo sapien
gtttatctagacgaatggctggtaa

SEQ ID NO: 5063802 - DNA, 25 bp, Homo sapien
gagggaaagtttatctagacgaatg

SEQ ID NO: 5063803 - DNA, 25 bp, Homo sapien
catccgtggatctggttctgccggc

SEQ ID NO: 5063804 - DNA, 25 bp, Homo sapien
tggatctggttctgccggccttgcc

SEQ ID NO: 5063805 - DNA, 25 bp, Homo sapien
ttcccagtgagcctcgactcctcca

SEQ ID NO: 5063806 - DNA, 25 bp, Homo sapien
ttcatccgtggatctggttctgccg

SEQ ID NO: 5063807 - DNA, 25 bp, Homo sapien
cagttacactggtgaagaagcccca

SEQ ID NO: 5063808 - DNA, 25 bp, Homo sapien
tcttcagcttgttgcagcctggcag

SEQ ID NO: 5063809 - DNA, 25 bp, Homo sapien
ctgttcctgaaagacctagcaggga

SEQ ID NO: 5063810 - DNA, 25 bp, Homo sapien
gctttgaaggcattaggtgtcccga

SEQ ID NO: 5063811 - DNA, 25 bp, Homo sapien
tcctaagccagaaccttctggtggt

SEQ ID NO: 5063812 - DNA, 25 bp, Homo sapien
aagccagaaccttctggtggtctcc

SEQ ID NO: 5063813 - DNA, 25 bp, Homo sapien
ctaagccagaaccttctggtggtct

SEQ ID NO: 5063814 - DNA, 25 bp, Homo sapien
cactcctaagccagaaccttctggt

SEQ ID NO: 5063815 - DNA, 25 bp, Homo sapien
aaagctgaattagcatctgagaacc

SEQ ID NO: 5063816 - DNA, 25 bp, Homo sapien
gatccttagacaagcaaagctgaat

SEQ ID NO: 5063817 - DNA, 25 bp, Homo sapien
tgctgttgacaacatccggtcaggg

SEQ ID NO: 5063818 - DNA, 25 bp, Homo sapien
cagctgacctctggaagatgggcaa

SEQ ID NO: 5063819 - DNA, 25 bp, Homo sapien
gcaactcctgttgggatttggagta

SEQ ID NO: 5063820 - DNA, 25 bp, Homo sapien
gctgatacagtgatgcgtttgccaa

SEQ ID NO: 5063821 - DNA, 25 bp, Homo sapien
tctcaaaacagatgtaccctgggtc

SEQ ID NO: 5063822 - DNA, 25 bp, Homo sapien
cagatgtaactaggagattctctca

SEQ ID NO: 5063823 - DNA, 25 bp, Homo sapien
ggtggtcgctgtgtccacagttact

SEQ ID NO: 5063824 - DNA, 25 bp, Homo sapien
tagtagagggtgtgaaaccctggca

SEQ ID NO: 5063825 - DNA, 25 bp, Homo sapien
accctggcatgttcatagccacagg

SEQ ID NO: 5063826 - DNA, 25 bp, Homo sapien
ttctctgagggatcaaggctgctga

SEQ ID NO: 5063827 - DNA, 25 bp, Homo sapien
gaattccactcaagagcttcctttg

SEQ ID NO: 5063828 - DNA, 25 bp, Homo sapien
ttgctgtttgctctagacaatgtcc

SEQ ID NO: 5063829 - DNA, 25 bp, Homo sapien
tggaggagcgagagctgtggtatct

SEQ ID NO: 5063830 - DNA, 25 bp, Homo sapien
gaggagcgagagctgtggtatctgg

SEQ ID NO: 5063831 - DNA, 25 bp, Homo sapien
tgcacactgctatttcccctaggtg

SEQ ID NO: 5063832 - DNA, 25 bp, Homo sapien
cacaagtgagatctcggagggtagc

SEQ ID NO: 5063833 - DNA, 25 bp, Homo sapien
tgaactggagatgtgcttgcacact

SEQ ID NO: 5063834 - DNA, 25 bp, Homo sapien
gcaccataagaacctcacaagtgag

SEQ ID NO: 5063835 - DNA, 25 bp, Homo sapien
ggaggaccacccctcagagccaggc

SEQ ID NO: 5063836 - DNA, 25 bp, Homo sapien
tctgtgagtgccccagcaggctgag

SEQ ID NO: 5063837 - DNA, 25 bp, Homo sapien
gctggacatacatgaccttctctct

SEQ ID NO: 5063838 - DNA, 25 bp, Homo sapien
gggtgctcagctgccttgcagcacc

SEQ ID NO: 5063839 - DNA, 25 bp, Homo sapien
gccttgcagcaccttttttgttctc

SEQ ID NO: 5063840 - DNA, 25 bp, Homo sapien
ttctggatagatgggatataatgga

SEQ ID NO: 5063841 - DNA, 25 bp, Homo sapien
ggatggttgaggatgcttgagttct

SEQ ID NO: 5063842 - DNA, 25 bp, Homo sapien
tattcatagtgcacgggcttccaca

SEQ ID NO: 5063843 - DNA, 25 bp, Homo sapien
caaattccgcacacaacagatggcc

SEQ ID NO: 5063844 - DNA, 25 bp, Homo sapien
aaaccttgccttccattcttgctct

SEQ ID NO: 5063845 - DNA, 25 bp, Homo sapien
gcatcctccattgctactgtattca

SEQ ID NO: 5063846 - DNA, 25 bp, Homo sapien
tcataatggattagaggttcacccc

SEQ ID NO: 5063847 - DNA, 25 bp, Homo sapien
ggagaacttccatgccgctcaaagg

SEQ ID NO: 5063848 - DNA, 25 bp, Homo sapien
tgtcaaagtgtggacctgccgctac

SEQ ID NO: 5063849 - DNA, 25 bp, Homo sapien
tcctagaaacgggagcctgtgactt

SEQ ID NO: 5063850 - DNA, 25 bp, Homo sapien
tcttaatccctcgtaaatcctgtgc

SEQ ID NO: 5063851 - DNA, 25 bp, Homo sapien
agaggtaatctggagagtttcagaa

SEQ ID NO: 5063852 - DNA, 25 bp, Homo sapien
tacttcatttgctggagaagctttt

SEQ ID NO: 5063853 - DNA, 25 bp, Homo sapien
ccctagagatgttgataaatctcca

SEQ ID NO: 5063854 - DNA, 25 bp, Homo sapien
aagcatgtcacaccccacacgggga

SEQ ID NO: 5063855 - DNA, 25 bp, Homo sapien
tcacggtttcaggctctgggataaa

SEQ ID NO: 5063856 - DNA, 25 bp, Homo sapien
cattgagagcattcaagcatgtcac

SEQ ID NO: 5063857 - DNA, 25 bp, Homo sapien
agctgctccattgagagcattcaag

SEQ ID NO: 5063858 - DNA, 25 bp, Homo sapien
gaatagtgacattcaggttctgaac

SEQ ID NO: 5063859 - DNA, 25 bp, Homo sapien
ttctgaacatcagaaacagccaggt

SEQ ID NO: 5063860 - DNA, 25 bp, Homo sapien
caagacactcaatatgaatagtgac

SEQ ID NO: 5063861 - DNA, 25 bp, Homo sapien
ggttctgaacatcagaaacagccag

SEQ ID NO: 5063862 - DNA, 25 bp, Homo sapien
tgcttactgagacagtgtgcctcct

SEQ ID NO: 5063863 - DNA, 25 bp, Homo sapien
cagatgcaacacagatcgttctgtt

SEQ ID NO: 5063864 - DNA, 25 bp, Homo sapien
tgcacacaccaaatttgagatgggc

SEQ ID NO: 5063865 - DNA, 25 bp, Homo sapien
tgagatgggctatcattaaccaaat

SEQ ID NO: 5063866 - DNA, 25 bp, Homo sapien
gaccactgagcagattccagaacat

SEQ ID NO: 5063867 - DNA, 25 bp, Homo sapien
tggaattgcgtgaccactgagcaga

SEQ ID NO: 5063868 - DNA, 25 bp, Homo sapien
tgcttcagccattggaattgcgtga

SEQ ID NO: 5063869 - DNA, 25 bp, Homo sapien
tccacacatgtgactgcttcagcca

SEQ ID NO: 5063870 - DNA, 25 bp, Homo sapien
gaaatgtttcattgccacactgcat

SEQ ID NO: 5063871 - DNA, 25 bp, Homo sapien
agtctctcctctcgtacttcagtct

SEQ ID NO: 5063872 - DNA, 25 bp, Homo sapien
cgtacttcagtctcagatgcatcat

SEQ ID NO: 5063873 - DNA, 25 bp, Homo sapien
gtctcagatgcatcattgtgcctct

SEQ ID NO: 5063874 - DNA, 25 bp, Homo sapien
gagtaggggcattgacacttctctt

SEQ ID NO: 5063875 - DNA, 25 bp, Homo sapien
gtcctttgagtaggggcattgacac

SEQ ID NO: 5063876 - DNA, 25 bp, Homo sapien
tttgagtaggggcattgacacttct

SEQ ID NO: 5063877 - DNA, 25 bp, Homo sapien
ggtcctttgagtaggggcattgaca

SEQ ID NO: 5063878 - DNA, 25 bp, Homo sapien
taaggccccatcttataaggaggaa

SEQ ID NO: 5063879 - DNA, 25 bp, Homo sapien
gatctgttattgtacatttgcacag

SEQ ID NO: 5063880 - DNA, 25 bp, Homo sapien
gtcttgcattaaataaggccccatc

SEQ ID NO: 5063881 - DNA, 25 bp, Homo sapien
caaagttcagagtggtcacagagct

SEQ ID NO: 5063882 - DNA, 25 bp, Homo sapien
tgactttagcttgcttatttcggaa

SEQ ID NO: 5063883 - DNA, 25 bp, Homo sapien
gactttagcttgcttatttcggaaa

SEQ ID NO: 5063884 - DNA, 25 bp, Homo sapien
gcttgcttatttcggaaagaaggag

SEQ ID NO: 5063885 - DNA, 25 bp, Homo sapien
tttagcttgcttatttcggaaagaa

SEQ ID NO: 5063886 - DNA, 25 bp, Homo sapien
tctttttgagtatgcattgagtatc

SEQ ID NO: 5063887 - DNA, 25 bp, Homo sapien
caatgtttatgtggagtttggaaag

SEQ ID NO: 5063888 - DNA, 25 bp, Homo sapien
gcaaataatccaagagtgaggtcag

SEQ ID NO: 5063889 - DNA, 25 bp, Homo sapien
cagggttggtgagatttgacctctt

SEQ ID NO: 5063890 - DNA, 25 bp, Homo sapien
attctggtttctgccaaagttgaac

SEQ ID NO: 5063891 - DNA, 25 bp, Homo sapien
gggctcctgcctatccagtgaacat

SEQ ID NO: 5063892 - DNA, 25 bp, Homo sapien
tgctgttgaacaacccacaggcagg

SEQ ID NO: 5063893 - DNA, 25 bp, Homo sapien
ccaggtgctgttgaacaacccacag

SEQ ID NO: 5063894 - DNA, 25 bp, Homo sapien
tcaaaagcctctgatgtggatccat

SEQ ID NO: 5063895 - DNA, 25 bp, Homo sapien
gcctctgagttgtagcatttcccca

SEQ ID NO: 5063896 - DNA, 25 bp, Homo sapien
cctggtaagatgtagaccttggcta

SEQ ID NO: 5063897 - DNA, 25 bp, Homo sapien
tttgggagacattctgaggatccct

SEQ ID NO: 5063898 - DNA, 25 bp, Homo sapien
cgattaaagttgataagtctgtcca

SEQ ID NO: 5063899 - DNA, 25 bp, Homo sapien
tgaccaccccattccaactgttaaa

SEQ ID NO: 5063900 - DNA, 25 bp, Homo sapien
caggctccgatgctctaatggtcga

SEQ ID NO: 5063901 - DNA, 25 bp, Homo sapien
tcttcaggacctgactgagaatctc

SEQ ID NO: 5063902 - DNA, 25 bp, Homo sapien
gaaggctgtggaaaacgtgtgcctt

SEQ ID NO: 5063903 - DNA, 25 bp, Homo sapien
aatcgtatcaactaggccctggaca

SEQ ID NO: 5063904 - DNA, 25 bp, Homo sapien
cgtgtgccttctaactaaatccaaa

SEQ ID NO: 5063905 - DNA, 25 bp, Homo sapien
caaaagcaaaatcgtatcaactagg

SEQ ID NO: 5063906 - DNA, 25 bp, Homo sapien
tgactaaagatagccccctctttgc

SEQ ID NO: 5063907 - DNA, 25 bp, Homo sapien
cctctttgcatgtctccagccgcag

SEQ ID NO: 5063908 - DNA, 25 bp, Homo sapien
ccctggctgtaagaatccttgtacc

SEQ ID NO: 5063909 - DNA, 25 bp, Homo sapien
tcaagtcctcacatctagggctatt

SEQ ID NO: 5063910 - DNA, 25 bp, Homo sapien
tgcaaataagattcaaagggaacat

SEQ ID NO: 5063911 - DNA, 25 bp, Homo sapien
gcattgactgcaaataagattcaaa

SEQ ID NO: 5063912 - DNA, 25 bp, Homo sapien
ctgcaaataagattcaaagggaaca

SEQ ID NO: 5063913 - DNA, 25 bp, Homo sapien
ggcattgactgcaaataagattcaa

SEQ ID NO: 5063914 - DNA, 25 bp, Homo sapien
ggaacaattaatcaaggcctgcagg

SEQ ID NO: 5063915 - DNA, 25 bp, Homo sapien
tctgtaaaatcgaggcatctagtca

SEQ ID NO: 5063916 - DNA, 25 bp, Homo sapien
caggactcccaactcaaatgatttg

SEQ ID NO: 5063917 - DNA, 25 bp, Homo sapien
gatgatggcagatgtcactacccca

SEQ ID NO: 5063918 - DNA, 25 bp, Homo sapien
cacttgggcacggcttctaaactca

SEQ ID NO: 5063919 - DNA, 25 bp, Homo sapien
tcacttgggcacggcttctaaactc

SEQ ID NO: 5063920 - DNA, 25 bp, Homo sapien
acttgggcacggcttctaaactcat

SEQ ID NO: 5063921 - DNA, 25 bp, Homo sapien
cagtccttccgagtctagaaccaag

SEQ ID NO: 5063922 - DNA, 25 bp, Homo sapien
gctgcaggagcaatttcagaccaca

SEQ ID NO: 5063923 - DNA, 25 bp, Homo sapien
cagaccacagtccttccgagtctag

SEQ ID NO: 5063924 - DNA, 25 bp, Homo sapien
tggcctctagagcaccttctttctt

SEQ ID NO: 5063925 - DNA, 25 bp, Homo sapien
cggatctcaattccaaaccaccaag

SEQ ID NO: 5063926 - DNA, 25 bp, Homo sapien
tgctttctgcggatctcaattccaa

SEQ ID NO: 5063927 - DNA, 25 bp, Homo sapien
tgctgctttctgcggatctcaattc

SEQ ID NO: 5063928 - DNA, 25 bp, Homo sapien
tctgcggatctcaattccaaaccac

SEQ ID NO: 5063929 - DNA, 25 bp, Homo sapien
gaccttctgatctttctgtgctctt

SEQ ID NO: 5063930 - DNA, 25 bp, Homo sapien
cactggtgagtcctatatgcccctc

SEQ ID NO: 5063931 - DNA, 25 bp, Homo sapien
ctcctacctcaacagcactggtgag

SEQ ID NO: 5063932 - DNA, 25 bp, Homo sapien
gtgccagagccctcatactgtgccc

SEQ ID NO: 5063933 - DNA, 25 bp, Homo sapien
gagattatagaggaccttggccact

SEQ ID NO: 5063934 - DNA, 25 bp, Homo sapien
agaggactgcggttgtgcccttgtt

SEQ ID NO: 5063935 - DNA, 25 bp, Homo sapien
gagtagggcataatctatctctgct

SEQ ID NO: 5063936 - DNA, 25 bp, Homo sapien
gctttcttgtctaaggtgcccttga

SEQ ID NO: 5063937 - DNA, 25 bp, Homo sapien
tgtccatccccacatgatcttctcc

SEQ ID NO: 5063938 - DNA, 25 bp, Homo sapien
catgtggccctcccttgcctgtcca

SEQ ID NO: 5063939 - DNA, 25 bp, Homo sapien
gtggccctcccttgcctgtccatcc

SEQ ID NO: 5063940 - DNA, 25 bp, Homo sapien
ctgtccatccccacatgatcttctc

SEQ ID NO: 5063941 - DNA, 25 bp, Homo sapien
tcctccaaggatgggaatattggca

SEQ ID NO: 5063942 - DNA, 25 bp, Homo sapien
gcaaattgaatctcgcttctcccct

SEQ ID NO: 5063943 - DNA, 25 bp, Homo sapien
taagcccaggtttgaagcatctggt

SEQ ID NO: 5063944 - DNA, 25 bp, Homo sapien
tcaaactgagactgtctaagcccag

SEQ ID NO: 5063945 - DNA, 25 bp, Homo sapien
gtacgtggcttaggctctaacaggg

SEQ ID NO: 5063946 - DNA, 25 bp, Homo sapien
tctaacagggttaggctctgcaatt

SEQ ID NO: 5063947 - DNA, 25 bp, Homo sapien
tggcaatcagccagtgtacgtggct

SEQ ID NO: 5063948 - DNA, 25 bp, Homo sapien
caccctgcttgggagtgaggccttg

SEQ ID NO: 5063949 - DNA, 25 bp, Homo sapien
tgtcaggaatcctggtctcagggag

SEQ ID NO: 5063950 - DNA, 25 bp, Homo sapien
tctcagtgggagattcatcaacaac

SEQ ID NO: 5063951 - DNA, 25 bp, Homo sapien
caaagagttatcacagagggagatc

SEQ ID NO: 5063952 - DNA, 25 bp, Homo sapien
gctcagtttccgtttgggtgatgaa

SEQ ID NO: 5063953 - DNA, 25 bp, Homo sapien
ctgatgctcgttgcaaacagcaggc

SEQ ID NO: 5063954 - DNA, 25 bp, Homo sapien
cattatttgtctgatgctcgttgca

SEQ ID NO: 5063955 - DNA, 25 bp, Homo sapien
ttgtctgatgctcgttgcaaacagc

SEQ ID NO: 5063956 - DNA, 25 bp, Homo sapien
ggcctccttctaatatctttatcca

SEQ ID NO: 5063957 - DNA, 25 bp, Homo sapien
gagacagccagtgtcatgggattca

SEQ ID NO: 5063958 - DNA, 25 bp, Homo sapien
agacagccagtgtcatgggattcat

SEQ ID NO: 5063959 - DNA, 25 bp, Homo sapien
ctgagacagccagtgtcatgggatt

SEQ ID NO: 5063960 - DNA, 25 bp, Homo sapien
tgagacagccagtgtcatgggattc

SEQ ID NO: 5063961 - DNA, 25 bp, Homo sapien
tgggaggacttggttgttgatgttt

SEQ ID NO: 5063962 - DNA, 25 bp, Homo sapien
ttgggaggacttggttgttgatgtt

SEQ ID NO: 5063963 - DNA, 25 bp, Homo sapien
cttgggaggacttggttgttgatgt

SEQ ID NO: 5063964 - DNA, 25 bp, Homo sapien
agcagcggggtttccacacagacca

SEQ ID NO: 5063965 - DNA, 25 bp, Homo sapien
tggagccaagcagcggggtttccac

SEQ ID NO: 5063966 - DNA, 25 bp, Homo sapien
ccaagcagcggggtttccacacaga

SEQ ID NO: 5063967 - DNA, 25 bp, Homo sapien
cagcggggtttccacacagaccaga

SEQ ID NO: 5063968 - DNA, 25 bp, Homo sapien
gtacctgagtccagtgaacggcaag

SEQ ID NO: 5063969 - DNA, 25 bp, Homo sapien
cttgaggctgcagaccataggatcc

SEQ ID NO: 5063970 - DNA, 25 bp, Homo sapien
aatgtccccaggtaacacactgtgg

SEQ ID NO: 5063971 - DNA, 25 bp, Homo sapien
gaagcttcagtggtgcagccgtcct

SEQ ID NO: 5063972 - DNA, 25 bp, Homo sapien
gttcttgtcctctcaaatatgtggc

SEQ ID NO: 5063973 - DNA, 25 bp, Homo sapien
tcagagttggggtgtccctcatccc

SEQ ID NO: 5063974 - DNA, 25 bp, Homo sapien
gagttggggtgtccctcatcccatg

SEQ ID NO: 5063975 - DNA, 25 bp, Homo sapien
ttgtcctctcaaatatgtggccaat

SEQ ID NO: 5063976 - DNA, 25 bp, Homo sapien
tgcaatgcgtctcagtgtgttgcac

SEQ ID NO: 5063977 - DNA, 25 bp, Homo sapien
tgcacttagagagggcctcatgtgc

SEQ ID NO: 5063978 - DNA, 25 bp, Homo sapien
ctgcaatgcgtctcagtgtgttgca

SEQ ID NO: 5063979 - DNA, 25 bp, Homo sapien
tgtgttgcacttagagagggcctca

SEQ ID NO: 5063980 - DNA, 25 bp, Homo sapien
aggtcctcggctgcgatgtgttggt

SEQ ID NO: 5063981 - DNA, 25 bp, Homo sapien
ctcggctgcgatgtgttggtccagt

SEQ ID NO: 5063982 - DNA, 25 bp, Homo sapien
gctgcgatgtgttggtccagtttga

SEQ ID NO: 5063983 - DNA, 25 bp, Homo sapien
tatttctagcttcccactggacgtt

SEQ ID NO: 5063984 - DNA, 25 bp, Homo sapien
tcaactctctctgggctagctgctc

SEQ ID NO: 5063985 - DNA, 25 bp, Homo sapien
tatcgtgtgacaagtctcttagtgc

SEQ ID NO: 5063986 - DNA, 25 bp, Homo sapien
tctccagagctggtatcatcgctta

SEQ ID NO: 5063987 - DNA, 25 bp, Homo sapien
ccacaggtagacgaagagggtccag

SEQ ID NO: 5063988 - DNA, 25 bp, Homo sapien
ctagtgcacccttgctgggtcctca

SEQ ID NO: 5063989 - DNA, 25 bp, Homo sapien
ggtcctcagcaagtctatcttgctc

SEQ ID NO: 5063990 - DNA, 25 bp, Homo sapien
ctgggtcctcagcaagtctatcttg

SEQ ID NO: 5063991 - DNA, 25 bp, Homo sapien
tcctcagcaagtctatcttgctcac

SEQ ID NO: 5063992 - DNA, 25 bp, Homo sapien
atctgaaataaaaacttgagtggat

SEQ ID NO: 5063993 - DNA, 25 bp, Homo sapien
ataaaaacttgagtggattttcctg

SEQ ID NO: 5063994 - DNA, 25 bp, Homo sapien
ttttcctgttgatctagaattggtc

SEQ ID NO: 5063995 - DNA, 25 bp, Homo sapien
tcctgttgatctagaattggtcact

SEQ ID NO: 5063996 - DNA, 25 bp, Homo sapien
gcaggctggcaggtgatcacatttt

SEQ ID NO: 5063997 - DNA, 25 bp, Homo sapien
agataaaactccatttttgcctcca

SEQ ID NO: 5063998 - DNA, 25 bp, Homo sapien
tcagcaatggttggatgatcaataa

SEQ ID NO: 5063999 - DNA, 25 bp, Homo sapien
aattcccagcattactttgcctttg

SEQ ID NO: 5064000 - DNA, 25 bp, Homo sapien
cttaaagaatgctgatcgtaaatca

SEQ ID NO: 5064001 - DNA, 25 bp, Homo sapien
ctgaaccaaagagtaatgaggtccc

SEQ ID NO: 5064002 - DNA, 25 bp, Homo sapien
gtaatgaggtcccctgtatagctga

SEQ ID NO: 5064003 - DNA, 25 bp, Homo sapien
aagagtaatgaggtcccctgtatag

SEQ ID NO: 5064004 - DNA, 25 bp, Homo sapien
ccaaagagtaatgaggtcccctgta

SEQ ID NO: 5064005 - DNA, 25 bp, Homo sapien
taaggggcctatctcccattatctt

SEQ ID NO: 5064006 - DNA, 25 bp, Homo sapien
ggtctgtggttaaggggcctatctc

SEQ ID NO: 5064007 - DNA, 25 bp, Homo sapien
tggttaaggggcctatctcccatta

SEQ ID NO: 5064008 - DNA, 25 bp, Homo sapien
tgacttgggtctgtggttaaggggc

SEQ ID NO: 5064009 - DNA, 25 bp, Homo sapien
ttatcaaatgactaagctttcgacc

SEQ ID NO: 5064010 - DNA, 25 bp, Homo sapien
cagctgtacctttgcttgaggtgaa

SEQ ID NO: 5064011 - DNA, 25 bp, Homo sapien
gctttcgaccttcacacagcttcag

SEQ ID NO: 5064012 - DNA, 25 bp, Homo sapien
gaggtgaatggtaaagtactgcaca

SEQ ID NO: 5064013 - DNA, 25 bp, Homo sapien
tcaacccagtgggttttctcggtga

SEQ ID NO: 5064014 - DNA, 25 bp, Homo sapien
gttttctcggtgatggaatagagcc

SEQ ID NO: 5064015 - DNA, 25 bp, Homo sapien
aatagagccatagggctgagcaggt

SEQ ID NO: 5064016 - DNA, 25 bp, Homo sapien
gcaggtgtggactggaccacctctt

SEQ ID NO: 5064017 - DNA, 25 bp, Homo sapien
ccttggaaactcagcatagacgtgc

SEQ ID NO: 5064018 - DNA, 25 bp, Homo sapien
tggagccaggctgttaagaccttga

SEQ ID NO: 5064019 - DNA, 25 bp, Homo sapien
cgtgcacagacaagctttggagcca

SEQ ID NO: 5064020 - DNA, 25 bp, Homo sapien
tcagcatagacgtgcacagacaagc

SEQ ID NO: 5064021 - DNA, 25 bp, Homo sapien
cgcctcgtccaagtgacagctccat

SEQ ID NO: 5064022 - DNA, 25 bp, Homo sapien
atgctgcccgcctcgtccaagtgac

SEQ ID NO: 5064023 - DNA, 25 bp, Homo sapien
tgcccgcctcgtccaagtgacagct

SEQ ID NO: 5064024 - DNA, 25 bp, Homo sapien
gctgcccgcctcgtccaagtgacag

SEQ ID NO: 5064025 - DNA, 25 bp, Homo sapien
ctgcagtcccaccctcaccacatac

SEQ ID NO: 5064026 - DNA, 25 bp, Homo sapien
tctagcaccagggtacacaggatgg

SEQ ID NO: 5064027 - DNA, 25 bp, Homo sapien
cctttcatggtgcaatggatgcggt

SEQ ID NO: 5064028 - DNA, 25 bp, Homo sapien
gctgtgctggcttcgatggtgtctt

SEQ ID NO: 5064029 - DNA, 25 bp, Homo sapien
cctttcacgggatgcaaatgcctct

SEQ ID NO: 5064030 - DNA, 25 bp, Homo sapien
catttgcagagaacgatggtgcctc

SEQ ID NO: 5064031 - DNA, 25 bp, Homo sapien
caccccgagacttgcagactgattg

SEQ ID NO: 5064032 - DNA, 25 bp, Homo sapien
taattggattctttcgcacttggaa

SEQ ID NO: 5064033 - DNA, 25 bp, Homo sapien
catgaggtcagtggtgttattacct

SEQ ID NO: 5064034 - DNA, 25 bp, Homo sapien
tctgtttttgagtccaaccatctgg

SEQ ID NO: 5064035 - DNA, 25 bp, Homo sapien
gttctgtttttgagtccaaccatct

SEQ ID NO: 5064036 - DNA, 25 bp, Homo sapien
ttctgtttttgagtccaaccatctg

SEQ ID NO: 5064037 - DNA, 25 bp, Homo sapien
ccagagggtggctcgtgcggggacg

SEQ ID NO: 5064038 - DNA, 25 bp, Homo sapien
cggcaagtctcaggtggcacattcc

SEQ ID NO: 5064039 - DNA, 25 bp, Homo sapien
aaagagagcagggccgtccccagag

SEQ ID NO: 5064040 - DNA, 25 bp, Homo sapien
cattccttatcattgctctccaggc

SEQ ID NO: 5064041 - DNA, 25 bp, Homo sapien
cccagggaaccccctagctctgcag

SEQ ID NO: 5064042 - DNA, 25 bp, Homo sapien
tctgctattggcccatcaagccgct

SEQ ID NO: 5064043 - DNA, 25 bp, Homo sapien
tctcctgtctcaaaggagcatgtgg

SEQ ID NO: 5064044 - DNA, 25 bp, Homo sapien
tgctattggcccatcaagccgctct

SEQ ID NO: 5064045 - DNA, 25 bp, Homo sapien
ccagaccactgagacaacagcacag

SEQ ID NO: 5064046 - DNA, 25 bp, Homo sapien
tcccagaccactgagacaacagcac

SEQ ID NO: 5064047 - DNA, 25 bp, Homo sapien
cagaccactgagacaacagcacagt

SEQ ID NO: 5064048 - DNA, 25 bp, Homo sapien
actcctctctttacgtaacttcatg

SEQ ID NO: 5064049 - DNA, 25 bp, Homo sapien
catgcttagagctgctaagcgaact

SEQ ID NO: 5064050 - DNA, 25 bp, Homo sapien
gctgctaagcgaactttcacaaaca

SEQ ID NO: 5064051 - DNA, 25 bp, Homo sapien
tacgtaacttcatgcttagagctgc

SEQ ID NO: 5064052 - DNA, 25 bp, Homo sapien
atgtagagggttatgtttattttgc

SEQ ID NO: 5064053 - DNA, 25 bp, Homo sapien
tgagataatgtccatgatcgtgttt

SEQ ID NO: 5064054 - DNA, 25 bp, Homo sapien
tgtaaaatgcagagggctgtacaat

SEQ ID NO: 5064055 - DNA, 25 bp, Homo sapien
tccatgatcgtgttttgtaaaatgc

SEQ ID NO: 5064056 - DNA, 25 bp, Homo sapien
aatctaatttcatattgaagaagac

SEQ ID NO: 5064057 - DNA, 25 bp, Homo sapien
aatttcatattgaagaagacaatgt

SEQ ID NO: 5064058 - DNA, 25 bp, Homo sapien
ttcatattgaagaagacaatgttat

SEQ ID NO: 5064059 - DNA, 25 bp, Homo sapien
caatctaatttcatattgaagaaga

SEQ ID NO: 5064060 - DNA, 25 bp, Homo sapien
gcagggggaagcatgctttcctctc

SEQ ID NO: 5064061 - DNA, 25 bp, Homo sapien
gagcagggggaagcatgctttcctc

SEQ ID NO: 5064062 - DNA, 25 bp, Homo sapien
agcagggggaagcatgctttcctct

SEQ ID NO: 5064063 - DNA, 25 bp, Homo sapien
ctgagcagggggaagcatgctttcc

SEQ ID NO: 5064064 - DNA, 25 bp, Homo sapien
gatactgacttgaatgccatgggcc

SEQ ID NO: 5064065 - DNA, 25 bp, Homo sapien
tatcattggctcatcatctccaggc

SEQ ID NO: 5064066 - DNA, 25 bp, Homo sapien
ccctctgcgattgctcggatactga

SEQ ID NO: 5064067 - DNA, 25 bp, Homo sapien
catgggcctagatagctggtttcca

SEQ ID NO: 5064068 - DNA, 25 bp, Homo sapien
taggtaacccaagggctagccatgg

SEQ ID NO: 5064069 - DNA, 25 bp, Homo sapien
tcctctgtcctgtcgaagactaggg

SEQ ID NO: 5064070 - DNA, 25 bp, Homo sapien
caaaccctgagcagtggtgacggtc

SEQ ID NO: 5064071 - DNA, 25 bp, Homo sapien
ccggcttaaaggtgtgcacatgact

SEQ ID NO: 5064072 - DNA, 25 bp, Homo sapien
cgaggactctactgcggtcaactgc

SEQ ID NO: 5064073 - DNA, 25 bp, Homo sapien
ctctactgcggtcaactgctggaca

SEQ ID NO: 5064074 - DNA, 25 bp, Homo sapien
cagatgagtctatggagctcacagg

SEQ ID NO: 5064075 - DNA, 25 bp, Homo sapien
cacatgaagaaggtacggagggact

SEQ ID NO: 5064076 - DNA, 25 bp, Homo sapien
cagagccctctctgagtgggtcatg

SEQ ID NO: 5064077 - DNA, 25 bp, Homo sapien
gccctctctgagtgggtcatgccct

SEQ ID NO: 5064078 - DNA, 25 bp, Homo sapien
ccctctctgagtgggtcatgccctt

SEQ ID NO: 5064079 - DNA, 25 bp, Homo sapien
gagccctctctgagtgggtcatgcc

SEQ ID NO: 5064080 - DNA, 25 bp, Homo sapien
tcggcccctgggagttaatgatggt

SEQ ID NO: 5064081 - DNA, 25 bp, Homo sapien
caaagtctctgggttcgtgggcaag

SEQ ID NO: 5064082 - DNA, 25 bp, Homo sapien
taggacctagtcatccgctcatcgg

SEQ ID NO: 5064083 - DNA, 25 bp, Homo sapien
tggtaaaggcttctgcagggactga

SEQ ID NO: 5064084 - DNA, 25 bp, Homo sapien
tatttactgtgtcctccttgagaac

SEQ ID NO: 5064085 - DNA, 25 bp, Homo sapien
tgtgcgagcctcatacctggtactt

SEQ ID NO: 5064086 - DNA, 25 bp, Homo sapien
tagctctgtcgtagcacattccatg

SEQ ID NO: 5064087 - DNA, 25 bp, Homo sapien
cattccatgctgtatggtgaggttc

SEQ ID NO: 5064088 - DNA, 25 bp, Homo sapien
actgcaatgagatacgtgtagctat

SEQ ID NO: 5064089 - DNA, 25 bp, Homo sapien
gatacgtgtagctatttagataaaa

SEQ ID NO: 5064090 - DNA, 25 bp, Homo sapien
caatgagatacgtgtagctatttag

SEQ ID NO: 5064091 - DNA, 25 bp, Homo sapien
cactaaatcactagtaggacaggat

SEQ ID NO: 5064092 - DNA, 25 bp, Homo sapien
catcagggtgagaacatgtggccgt

SEQ ID NO: 5064093 - DNA, 25 bp, Homo sapien
gacatacctgagcagtgcagactca

SEQ ID NO: 5064094 - DNA, 25 bp, Homo sapien
tggccgtggacttagggagcccaca

SEQ ID NO: 5064095 - DNA, 25 bp, Homo sapien
tgtcccctcattttgggaagaggag

SEQ ID NO: 5064096 - DNA, 25 bp, Homo sapien
tattgcttggactttatgactccct

SEQ ID NO: 5064097 - DNA, 25 bp, Homo sapien
gcttggactttatgactcccttgtt

SEQ ID NO: 5064098 - DNA, 25 bp, Homo sapien
ctccattattgcttggactttatga

SEQ ID NO: 5064099 - DNA, 25 bp, Homo sapien
cattattgcttggactttatgactc

SEQ ID NO: 5064100 - DNA, 25 bp, Homo sapien
ggtcgctgccgtgggatgttgtcac

SEQ ID NO: 5064101 - DNA, 25 bp, Homo sapien
caggtcgctgccgtgggatgttgtc

SEQ ID NO: 5064102 - DNA, 25 bp, Homo sapien
tgtgcaggtcgctgccgtgggatgt

SEQ ID NO: 5064103 - DNA, 25 bp, Homo sapien
gtgcaggtcgctgccgtgggatgtt

SEQ ID NO: 5064104 - DNA, 25 bp, Homo sapien
gaaggtgagagtcgggatgggaagg

SEQ ID NO: 5064105 - DNA, 25 bp, Homo sapien
gaggaggcgaaagctaattgttcag

SEQ ID NO: 5064106 - DNA, 25 bp, Homo sapien
tgaatctactggagagcgaaggtga

SEQ ID NO: 5064107 - DNA, 25 bp, Homo sapien
attgttcaggtgaatctactggaga

SEQ ID NO: 5064108 - DNA, 25 bp, Homo sapien
aaatgtggctgaatgatagacagga

SEQ ID NO: 5064109 - DNA, 25 bp, Homo sapien
tgtgcccggattcagcatgcagagc

SEQ ID NO: 5064110 - DNA, 25 bp, Homo sapien
ggctttccacagcagtggtattctt

SEQ ID NO: 5064111 - DNA, 25 bp, Homo sapien
agcaaaggccatttcctgcaagagc

SEQ ID NO: 5064112 - DNA, 25 bp, Homo sapien
gggttgtgtctattctgcttggcta

SEQ ID NO: 5064113 - DNA, 25 bp, Homo sapien
tctccaaagcctgccagttcagtgc

SEQ ID NO: 5064114 - DNA, 25 bp, Homo sapien
agttcagtgcccctccagcatgaaa

SEQ ID NO: 5064115 - DNA, 25 bp, Homo sapien
gatcgaacgcttaatcccagttttc

SEQ ID NO: 5064116 - DNA, 25 bp, Homo sapien
catccttgtatgtaacctgtggcca

SEQ ID NO: 5064117 - DNA, 25 bp, Homo sapien
agtggtttccagtgggatttattca

SEQ ID NO: 5064118 - DNA, 25 bp, Homo sapien
atcatattacccattgaaagtggtt

SEQ ID NO: 5064119 - DNA, 25 bp, Homo sapien
cattgaaagtggtttccagtgggat

SEQ ID NO: 5064120 - DNA, 25 bp, Homo sapien
tacccattgaaagtggtttccagtg

SEQ ID NO: 5064121 - DNA, 25 bp, Homo sapien
gacttgtgaattgatccctgaggtc

SEQ ID NO: 5064122 - DNA, 25 bp, Homo sapien
actggttttacatcccaaattctgt

SEQ ID NO: 5064123 - DNA, 25 bp, Homo sapien
ctgacttgtgaattgatccctgagg

SEQ ID NO: 5064124 - DNA, 25 bp, Homo sapien
gatccctgaggtctagagatatctt

SEQ ID NO: 5064125 - DNA, 25 bp, Homo sapien
caatctcgctgaagggcaggtgcct

SEQ ID NO: 5064126 - DNA, 25 bp, Homo sapien
gaaatccaggtctgactctgcaaag

SEQ ID NO: 5064127 - DNA, 25 bp, Homo sapien
caaagtcacagtggtcctggatgga

SEQ ID NO: 5064128 - DNA, 25 bp, Homo sapien
gagatgtcctgaatacccctgggct

SEQ ID NO: 5064129 - DNA, 25 bp, Homo sapien
cagtcctgggcgtcagaaaacccca

SEQ ID NO: 5064130 - DNA, 25 bp, Homo sapien
aagccagtcctgggcgtcagaaaac

SEQ ID NO: 5064131 - DNA, 25 bp, Homo sapien
tgggcgtcagaaaaccccagcaagg

SEQ ID NO: 5064132 - DNA, 25 bp, Homo sapien
ccagcaaggaggactgggttcctgt

SEQ ID NO: 5064133 - DNA, 25 bp, Homo sapien
cccatggccttgtgtctgaacccaa

SEQ ID NO: 5064134 - DNA, 25 bp, Homo sapien
tggccttgtgtctgaacccaagttt

SEQ ID NO: 5064135 - DNA, 25 bp, Homo sapien
ctttggccactttgactactatcga

SEQ ID NO: 5064136 - DNA, 25 bp, Homo sapien
actttgactactatcgactctccct

SEQ ID NO: 5064137 - DNA, 25 bp, Homo sapien
tccaaatgtcttgccattgcatgac

SEQ ID NO: 5064138 - DNA, 25 bp, Homo sapien
tttctggcattgtgcacaccgcttg

SEQ ID NO: 5064139 - DNA, 25 bp, Homo sapien
tttccaacctctgattgtctattgc

SEQ ID NO: 5064140 - DNA, 25 bp, Homo sapien
ctagtagtggcagaggacggttcca

SEQ ID NO: 5064141 - DNA, 25 bp, Homo sapien
tccttcaatccaggggcgcctaata

SEQ ID NO: 5064142 - DNA, 25 bp, Homo sapien
tcagcgtcgtcgtgaatttccacct

SEQ ID NO: 5064143 - DNA, 25 bp, Homo sapien
ttagctgtcagcgtcgtcgtgaatt

SEQ ID NO: 5064144 - DNA, 25 bp, Homo sapien
gctgtcagcgtcgtcgtgaatttcc

SEQ ID NO: 5064145 - DNA, 25 bp, Homo sapien
tgcccgcggtgctgatttagctgtg

SEQ ID NO: 5064146 - DNA, 25 bp, Homo sapien
gctttcctgcccgcggtgctgattt

SEQ ID NO: 5064147 - DNA, 25 bp, Homo sapien
agccttggccaatggccgctttcct

SEQ ID NO: 5064148 - DNA, 25 bp, Homo sapien
caggggtccgcactatccagtttgt

SEQ ID NO: 5064149 - DNA, 25 bp, Homo sapien
ctgacctttctatcaccattcctct

SEQ ID NO: 5064150 - DNA, 25 bp, Homo sapien
gacctttctatcaccattcctctgt

SEQ ID NO: 5064151 - DNA, 25 bp, Homo sapien
tttctatcaccattcctctgttcat

SEQ ID NO: 5064152 - DNA, 25 bp, Homo sapien
tggttttagaaggtgttccatcttc

SEQ ID NO: 5064153 - DNA, 25 bp, Homo sapien
ttgggagatctccaagcattctgca

SEQ ID NO: 5064154 - DNA, 25 bp, Homo sapien
ccaaagagacaacgaagacccagag

SEQ ID NO: 5064155 - DNA, 25 bp, Homo sapien
tctgatttctccaggcaatagccca

SEQ ID NO: 5064156 - DNA, 25 bp, Homo sapien
ttctccaggcaatagcccaagcagc

SEQ ID NO: 5064157 - DNA, 25 bp, Homo sapien
agaaacgccctcctttcctctgatc

SEQ ID NO: 5064158 - DNA, 25 bp, Homo sapien
aagaaacgccctcctttcctctgat

SEQ ID NO: 5064159 - DNA, 25 bp, Homo sapien
ggttgagaaaccaggcagtcgacgt

SEQ ID NO: 5064160 - DNA, 25 bp, Homo sapien
cagtcgacgtgttccgacgccgttt

SEQ ID NO: 5064161 - DNA, 25 bp, Homo sapien
tattcctcgtgtttgcattgcagga

SEQ ID NO: 5064162 - DNA, 25 bp, Homo sapien
cagttcggccattttcccggttgag

SEQ ID NO: 5064163 - DNA, 25 bp, Homo sapien
tgactgccggttttgcattgctaat

SEQ ID NO: 5064164 - DNA, 25 bp, Homo sapien
tttgggtctgtcttgactgccggtt

SEQ ID NO: 5064165 - DNA, 25 bp, Homo sapien
gcattgctaatattggtggaaggag

SEQ ID NO: 5064166 - DNA, 25 bp, Homo sapien
tttgcattgctaatattggtggaag

SEQ ID NO: 5064167 - DNA, 25 bp, Homo sapien
gtggggagcaggctttgtcctgggt

SEQ ID NO: 5064168 - DNA, 25 bp, Homo sapien
ctgtggggagcaggctttgtcctgg

SEQ ID NO: 5064169 - DNA, 25 bp, Homo sapien
ggggagcaggctttgtcctgggtcc

SEQ ID NO: 5064170 - DNA, 25 bp, Homo sapien
tggggagcaggctttgtcctgggtc

SEQ ID NO: 5064171 - DNA, 25 bp, Homo sapien
ggtggccacctcgactgtcccagat

SEQ ID NO: 5064172 - DNA, 25 bp, Homo sapien
gaattcggtacgcatgtttatccaa

SEQ ID NO: 5064173 - DNA, 25 bp, Homo sapien
ttatccaaataagggtggcctctca

SEQ ID NO: 5064174 - DNA, 25 bp, Homo sapien
tggtattagtgcctcttgaattcgg

SEQ ID NO: 5064175 - DNA, 25 bp, Homo sapien
tttggcaccttcctctgtccccttg

SEQ ID NO: 5064176 - DNA, 25 bp, Homo sapien
ctgccctctgttttggcaccttcct

SEQ ID NO: 5064177 - DNA, 25 bp, Homo sapien
ccctctgttttggcaccttcctctg

SEQ ID NO: 5064178 - DNA, 25 bp, Homo sapien
tctgttttggcaccttcctctgtcc

SEQ ID NO: 5064179 - DNA, 25 bp, Homo sapien
cctctttggtactggacttctctgc

SEQ ID NO: 5064180 - DNA, 25 bp, Homo sapien
agtcctctccgcacatagccgtgat

SEQ ID NO: 5064181 - DNA, 25 bp, Homo sapien
tctctgctggttggtgtgatatggc

SEQ ID NO: 5064182 - DNA, 25 bp, Homo sapien
gaatctatgcttgctcagaggtctt

SEQ ID NO: 5064183 - DNA, 25 bp, Homo sapien
gtgatgcattgcctgttcccggcca

SEQ ID NO: 5064184 - DNA, 25 bp, Homo sapien
tgtgatgcattgcctgttcccggcc

SEQ ID NO: 5064185 - DNA, 25 bp, Homo sapien
tgatgcattgcctgttcccggccat

SEQ ID NO: 5064186 - DNA, 25 bp, Homo sapien
ctgtgatgcattgcctgttcccggc

SEQ ID NO: 5064187 - DNA, 25 bp, Homo sapien
gaaggcggaggtgatgcaatcctgg

SEQ ID NO: 5064188 - DNA, 25 bp, Homo sapien
cctggcacagtcacagtctgctgag

SEQ ID NO: 5064189 - DNA, 25 bp, Homo sapien
ccgtgttaatggcaagagagaaggc

SEQ ID NO: 5064190 - DNA, 25 bp, Homo sapien
aggtggtcccaaacgacatgctgaa

SEQ ID NO: 5064191 - DNA, 25 bp, Homo sapien
gatttctcagaagaagctggaccta

SEQ ID NO: 5064192 - DNA, 25 bp, Homo sapien
gcagaatttgcggagcctgttccag

SEQ ID NO: 5064193 - DNA, 25 bp, Homo sapien
acgtttgccgctagagggagtgcca

SEQ ID NO: 5064194 - DNA, 25 bp, Homo sapien
gaataagaacgatcaggctggcagg

SEQ ID NO: 5064195 - DNA, 25 bp, Homo sapien
gccactaggactcttgaatcttctt

SEQ ID NO: 5064196 - DNA, 25 bp, Homo sapien
tgggccactaggactcttgaatctt

SEQ ID NO: 5064197 - DNA, 25 bp, Homo sapien
gtgggccactaggactcttgaatct

SEQ ID NO: 5064198 - DNA, 25 bp, Homo sapien
gggccactaggactcttgaatcttc

SEQ ID NO: 5064199 - DNA, 25 bp, Homo sapien
acaggatgacctcgtggtgacttgg

SEQ ID NO: 5064200 - DNA, 25 bp, Homo sapien
caggatgacctcgtggtgacttggc

SEQ ID NO: 5064201 - DNA, 25 bp, Homo sapien
aggatgacctcgtggtgacttggca

SEQ ID NO: 5064202 - DNA, 25 bp, Homo sapien
cagcctgagaggggacccagtccac

SEQ ID NO: 5064203 - DNA, 25 bp, Homo sapien
tctgccttgaccgtccccaggacag

SEQ ID NO: 5064204 - DNA, 25 bp, Homo sapien
cctgagaggggacccagtccacatg

SEQ ID NO: 5064205 - DNA, 25 bp, Homo sapien
ctgccttgaccgtccccaggacagg

SEQ ID NO: 5064206 - DNA, 25 bp, Homo sapien
tccaaaaagtgatcgaggtttccta

SEQ ID NO: 5064207 - DNA, 25 bp, Homo sapien
gacaagggttaagataacagcagtt

SEQ ID NO: 5064208 - DNA, 25 bp, Homo sapien
tcttgttcttgacaagggttaagat

SEQ ID NO: 5064209 - DNA, 25 bp, Homo sapien
ctaatacaatacttggctcttgttc

SEQ ID NO: 5064210 - DNA, 25 bp, Homo sapien
ctgcatatgagttccatttcagagt

SEQ ID NO: 5064211 - DNA, 25 bp, Homo sapien
atttcagagtgctgttgttcacatg

SEQ ID NO: 5064212 - DNA, 25 bp, Homo sapien
tttcagagtgctgttgttcacatga

SEQ ID NO: 5064213 - DNA, 25 bp, Homo sapien
atatgagttccatttcagagtgctg

SEQ ID NO: 5064214 - DNA, 25 bp, Homo sapien
gaaaagctgtgtgaattagactccc

SEQ ID NO: 5064215 - DNA, 25 bp, Homo sapien
cagccatttatgaagggtctgcgct

SEQ ID NO: 5064216 - DNA, 25 bp, Homo sapien
caaggcttcctcgtcattgatgctc

SEQ ID NO: 5064217 - DNA, 25 bp, Homo sapien
agtgggcttgtctaccctgtcctca

SEQ ID NO: 5064218 - DNA, 25 bp, Homo sapien
tcagggctgaagtttggtaacagct

SEQ ID NO: 5064219 - DNA, 25 bp, Homo sapien
tggttctggggcaccgcaaactctt

SEQ ID NO: 5064220 - DNA, 25 bp, Homo sapien
ggggcaccgcaaactcttcagggct

SEQ ID NO: 5064221 - DNA, 25 bp, Homo sapien
tcgggccatggtggtgcgaagggcg

SEQ ID NO: 5064222 - DNA, 25 bp, Homo sapien
ggagttggggtgctgtaggtagtgt

SEQ ID NO: 5064223 - DNA, 25 bp, Homo sapien
ttggggtgctgtaggtagtgtgggg

SEQ ID NO: 5064224 - DNA, 25 bp, Homo sapien
gagttggggtgctgtaggtagtgtg

SEQ ID NO: 5064225 - DNA, 25 bp, Homo sapien
agttggggtgctgtaggtagtgtgg

SEQ ID NO: 5064226 - DNA, 25 bp, Homo sapien
cctgtctgaatgtaaaggcctgagg

SEQ ID NO: 5064227 - DNA, 25 bp, Homo sapien
tctgaatgtaaaggcctgagggccc

SEQ ID NO: 5064228 - DNA, 25 bp, Homo sapien
gtctgaatgtaaaggcctgagggcc

SEQ ID NO: 5064229 - DNA, 25 bp, Homo sapien
acccctgtctgaatgtaaaggcctg

SEQ ID NO: 5064230 - DNA, 25 bp, Homo sapien
tgagtttcagaggaaatatctgtac

SEQ ID NO: 5064231 - DNA, 25 bp, Homo sapien
ttgagtttcagaggaaatatctgta

SEQ ID NO: 5064232 - DNA, 25 bp, Homo sapien
ctggttttgagtttcagaggaaata

SEQ ID NO: 5064233 - DNA, 25 bp, Homo sapien
gttttgagtttcagaggaaatatct

SEQ ID NO: 5064234 - DNA, 25 bp, Homo sapien
tcccttctggctcgctccgctccgg

SEQ ID NO: 5064235 - DNA, 25 bp, Homo sapien
gctcgctccgctccgggtaccgtct

SEQ ID NO: 5064236 - DNA, 25 bp, Homo sapien
tcaagcgcggcgaccgccggggctg

SEQ ID NO: 5064237 - DNA, 25 bp, Homo sapien
ggagctgcggcgagatccgcggtgg

SEQ ID NO: 5064238 - DNA, 25 bp, Homo sapien
atgagcggtgcggcgcggctctcat

SEQ ID NO: 5064239 - DNA, 25 bp, Homo sapien
cggcgcggctctcatcgaggcggcg

SEQ ID NO: 5064240 - DNA, 25 bp, Homo sapien
ctatgagcggtgcggcgcggctctc

SEQ ID NO: 5064241 - DNA, 25 bp, Homo sapien
ggtgcggcgcggctctcatcgaggc

SEQ ID NO: 5064242 - DNA, 25 bp, Homo sapien
tcctcgcgttcctgctctccgcctt

SEQ ID NO: 5064243 - DNA, 25 bp, Homo sapien
ggtgggcgcaggagggctgatggag

SEQ ID NO: 5064244 - DNA, 25 bp, Homo sapien
gagagggaagtcggtcctcctgcct

SEQ ID NO: 5064245 - DNA, 25 bp, Homo sapien
acagcgccggcgggtagcggtggct

SEQ ID NO: 5064246 - DNA, 25 bp, Homo sapien
gcgcgcggctccggccccggcccga

SEQ ID NO: 5064247 - DNA, 25 bp, Homo sapien
tccggcgcgcggctccggccccggc

SEQ ID NO: 5064248 - DNA, 25 bp, Homo sapien
ctccggcgcgcggctccggccccgg

SEQ ID NO: 5064249 - DNA, 25 bp, Homo sapien
cgaacaccgtgacagtggccccagg

SEQ ID NO: 5064250 - DNA, 25 bp, Homo sapien
ccggtgcatacacacccgggggcag

SEQ ID NO: 5064251 - DNA, 25 bp, Homo sapien
ctccgaacaccgtgacagtggcccc

SEQ ID NO: 5064252 - DNA, 25 bp, Homo sapien
caggcagccccggtgcatacacacc

SEQ ID NO: 5064253 - DNA, 25 bp, Homo sapien
tcccgacggttttcgagctcatcta

SEQ ID NO: 5064254 - DNA, 25 bp, Homo sapien
gcacccacaaggtgtcaagggaagt

SEQ ID NO: 5064255 - DNA, 25 bp, Homo sapien
acaacacgctggcacccacaaggtg

SEQ ID NO: 5064256 - DNA, 25 bp, Homo sapien
caataaggtctgtgcgggttccctc

SEQ ID NO: 5064257 - DNA, 25 bp, Homo sapien
tccgagacggctggccgcaggcagg

SEQ ID NO: 5064258 - DNA, 25 bp, Homo sapien
cacagcccagggacgacaactggct

SEQ ID NO: 5064259 - DNA, 25 bp, Homo sapien
aggcatccgagactcgcgcgtggcc

SEQ ID NO: 5064260 - DNA, 25 bp, Homo sapien
aacggaccgcgtctgccgcttggtt

SEQ ID NO: 5064261 - DNA, 25 bp, Homo sapien
agcgggccgggatgccgctgagctg

SEQ ID NO: 5064262 - DNA, 25 bp, Homo sapien
ccgaggtctcgcctaatgctacata

SEQ ID NO: 5064263 - DNA, 25 bp, Homo sapien
cgaagtggaagtttcgcaggcagca

SEQ ID NO: 5064264 - DNA, 25 bp, Homo sapien
gaggtctcgcctaatgctacataaa

SEQ ID NO: 5064265 - DNA, 25 bp, Homo sapien
tgtcattgcaagaggagtccgaatc

SEQ ID NO: 5064266 - DNA, 25 bp, Homo sapien
tcccagcgttgctggactggagaga

SEQ ID NO: 5064267 - DNA, 25 bp, Homo sapien
agaggagtccgaatcccagcgttgc

SEQ ID NO: 5064268 - DNA, 25 bp, Homo sapien
aatcccagcgttgctggactggaga

SEQ ID NO: 5064269 - DNA, 25 bp, Homo sapien
ggactggaccactcatttccatgga

SEQ ID NO: 5064270 - DNA, 25 bp, Homo sapien
caatgtaggtggttaggcagaaccc

SEQ ID NO: 5064271 - DNA, 25 bp, Homo sapien
tctcgggaaattcctggactggacc

SEQ ID NO: 5064272 - DNA, 25 bp, Homo sapien
tcctggtgagatgtggtgccctgtc

SEQ ID NO: 5064273 - DNA, 25 bp, Homo sapien
cctttggcaaatcgaggcttcggca

SEQ ID NO: 5064274 - DNA, 25 bp, Homo sapien
tcctctagaaggatcggcctgacaa

SEQ ID NO: 5064275 - DNA, 25 bp, Homo sapien
tgaaccgaagagattacagcaggct

SEQ ID NO: 5064276 - DNA, 25 bp, Homo sapien
aataggctacccaaatctcaagagg

SEQ ID NO: 5064277 - DNA, 25 bp, Homo sapien
acggcagggttgaccacggctgaca

SEQ ID NO: 5064278 - DNA, 25 bp, Homo sapien
acacggcagggttgaccacggctga

SEQ ID NO: 5064279 - DNA, 25 bp, Homo sapien
aagaacacggcagggttgaccacgg

SEQ ID NO: 5064280 - DNA, 25 bp, Homo sapien
gaacacggcagggttgaccacggct

SEQ ID NO: 5064281 - DNA, 25 bp, Homo sapien
gaaagcatgaaagttcagagcatga

SEQ ID NO: 5064282 - DNA, 25 bp, Homo sapien
cataaaaccctggaatatttctgtg

SEQ ID NO: 5064283 - DNA, 25 bp, Homo sapien
taaccaaatccgttctctccatgaa

SEQ ID NO: 5064284 - DNA, 25 bp, Homo sapien
cgttctctccatgaaagcatgaaag

SEQ ID NO: 5064285 - DNA, 25 bp, Homo sapien
aaactgggagccattcatgttgggt

SEQ ID NO: 5064286 - DNA, 25 bp, Homo sapien
actgggagccattcatgttgggtcc

SEQ ID NO: 5064287 - DNA, 25 bp, Homo sapien
tgggagccattcatgttgggtccag

SEQ ID NO: 5064288 - DNA, 25 bp, Homo sapien
gagccattcatgttgggtccagcat

SEQ ID NO: 5064289 - DNA, 25 bp, Homo sapien
gctatcacagctcagggacgtcaac

SEQ ID NO: 5064290 - DNA, 25 bp, Homo sapien
gcattaggcctcaccatgtcatgag

SEQ ID NO: 5064291 - DNA, 25 bp, Homo sapien
gacgtcaacctgttaaggccatctg

SEQ ID NO: 5064292 - DNA, 25 bp, Homo sapien
tgtggctaaagagcatctcaaccag

SEQ ID NO: 5064293 - DNA, 25 bp, Homo sapien
gcacagtcatttcacaccccggtga

SEQ ID NO: 5064294 - DNA, 25 bp, Homo sapien
cactgggctcttagatgacccctca

SEQ ID NO: 5064295 - DNA, 25 bp, Homo sapien
gagggtgaaaatccacagggtttgc

SEQ ID NO: 5064296 - DNA, 25 bp, Homo sapien
tccacccgggacagtgtgaaacagc

SEQ ID NO: 5064297 - DNA, 25 bp, Homo sapien
aactggtgccaacattgttggtcct

SEQ ID NO: 5064298 - DNA, 25 bp, Homo sapien
aaaccatgtgctcaaagtaaagcct

SEQ ID NO: 5064299 - DNA, 25 bp, Homo sapien
tactaccaaaacctgttccacatta

SEQ ID NO: 5064300 - DNA, 25 bp, Homo sapien
gtgtatatcacccactataatccta

SEQ ID NO: 5064301 - DNA, 25 bp, Homo sapien
ctggatttgcccagcccattctgct

SEQ ID NO: 5064302 - DNA, 25 bp, Homo sapien
caagcatggaaaccacctcacattc

SEQ ID NO: 5064303 - DNA, 25 bp, Homo sapien
ccgacatactccaagcatggaaacc

SEQ ID NO: 5064304 - DNA, 25 bp, Homo sapien
tactccaagcatggaaaccacctca

SEQ ID NO: 5064305 - DNA, 25 bp, Homo sapien
tcacattcccacaacacttcctctg

SEQ ID NO: 5064306 - DNA, 25 bp, Homo sapien
gcatttgcagcacccacttttggaa

SEQ ID NO: 5064307 - DNA, 25 bp, Homo sapien
cagaaactggtgacccataggagtg

SEQ ID NO: 5064308 - DNA, 25 bp, Homo sapien
aggacgcaccgacacacactttata

SEQ ID NO: 5064309 - DNA, 25 bp, Homo sapien
tttatatcagaaactggtgacccat

SEQ ID NO: 5064310 - DNA, 25 bp, Homo sapien
ccaggcttttctgttcgcagggaaa

SEQ ID NO: 5064311 - DNA, 25 bp, Homo sapien
gccaaccccactgtccacgctgagg

SEQ ID NO: 5064312 - DNA, 25 bp, Homo sapien
taagcggatgagtgaaaaacacttc

SEQ ID NO: 5064313 - DNA, 25 bp, Homo sapien
aaaaaagaacagtaagcggatgagt

SEQ ID NO: 5064314 - DNA, 25 bp, Homo sapien
catgcggcaggtgctctgtcattaa

SEQ ID NO: 5064315 - DNA, 25 bp, Homo sapien
gaaatgagttttcacgcatgctgat

SEQ ID NO: 5064316 - DNA, 25 bp, Homo sapien
taatccgttagcagtgatagcctgc

SEQ ID NO: 5064317 - DNA, 25 bp, Homo sapien
gctccatcagggtgtgacatatttc

SEQ ID NO: 5064318 - DNA, 25 bp, Homo sapien
gcggacacggtccaaactctgttct

SEQ ID NO: 5064319 - DNA, 25 bp, Homo sapien
cacttgccgcagagtgactcagctc

SEQ ID NO: 5064320 - DNA, 25 bp, Homo sapien
ggacagcggaagacacagccacttg

SEQ ID NO: 5064321 - DNA, 25 bp, Homo sapien
agattcctagacctgcccacgtcaa

SEQ ID NO: 5064322 - DNA, 25 bp, Homo sapien
tgaacatatgtacccaagtgcaggc

SEQ ID NO: 5064323 - DNA, 25 bp, Homo sapien
aacagatcttagaggccctggctca

SEQ ID NO: 5064324 - DNA, 25 bp, Homo sapien
cacgagaagagggacattgttcacc

SEQ ID NO: 5064325 - DNA, 25 bp, Homo sapien
tgacgacctgtatgatgcactctgg

SEQ ID NO: 5064326 - DNA, 25 bp, Homo sapien
ctggcgggactttgcaggagcagaa

SEQ ID NO: 5064327 - DNA, 25 bp, Homo sapien
gaaatccaccctcttagaggctggc

SEQ ID NO: 5064328 - DNA, 25 bp, Homo sapien
gccagacggcaggaggtgctcccct

SEQ ID NO: 5064329 - DNA, 25 bp, Homo sapien
aggagcagaaaagcgctcgctgacc

SEQ ID NO: 5064330 - DNA, 25 bp, Homo sapien
aaatccatttgcctacataacgtag

SEQ ID NO: 5064331 - DNA, 25 bp, Homo sapien
taacgtaggcagcacccttctctta

SEQ ID NO: 5064332 - DNA, 25 bp, Homo sapien
tgctgtggggatgtactttgtcccc

SEQ ID NO: 5064333 - DNA, 25 bp, Homo sapien
tgtcaagacaccatcattgctttgt

SEQ ID NO: 5064334 - DNA, 25 bp, Homo sapien
tgtactgctaacgacaagagccgcc

SEQ ID NO: 5064335 - DNA, 25 bp, Homo sapien
tgagaccctcagaatcgtcagggct

SEQ ID NO: 5064336 - DNA, 25 bp, Homo sapien
gcgctgaatgcgcacctgtggcttt

SEQ ID NO: 5064337 - DNA, 25 bp, Homo sapien
gactcatctgcttttatctgtgcag

SEQ ID NO: 5064338 - DNA, 25 bp, Homo sapien
tcagcagtctaacaagagtctcact

SEQ ID NO: 5064339 - DNA, 25 bp, Homo sapien
ggctctaaagcctgcatggattcct

SEQ ID NO: 5064340 - DNA, 25 bp, Homo sapien
tacctcatggttctggaaatcagca

SEQ ID NO: 5064341 - DNA, 25 bp, Homo sapien
ttcacttgtaaggaccttgggctgg

SEQ ID NO: 5064342 - DNA, 25 bp, Homo sapien
cttgaacagaaagactgtaaggcat

SEQ ID NO: 5064343 - DNA, 25 bp, Homo sapien
gctacaatttcaacttggaaccagt

SEQ ID NO: 5064344 - DNA, 25 bp, Homo sapien
aagggcctgaagtggtatcacattc

SEQ ID NO: 5064345 - DNA, 25 bp, Homo sapien
tcacattcagcgtggcagctacaat

SEQ ID NO: 5064346 - DNA, 25 bp, Homo sapien
gaagcatagataatggaacatccac

SEQ ID NO: 5064347 - DNA, 25 bp, Homo sapien
ggtgcagcaaaaggcatgccaactc

SEQ ID NO: 5064348 - DNA, 25 bp, Homo sapien
tgtgctgaaaagcagattgcaggtg

SEQ ID NO: 5064349 - DNA, 25 bp, Homo sapien
caggtgtgctgaaaagcagattgca

SEQ ID NO: 5064350 - DNA, 25 bp, Homo sapien
caggtgcagcaaaaggcatgccaac

SEQ ID NO: 5064351 - DNA, 25 bp, Homo sapien
tttccccggtatttgtcacattgag

SEQ ID NO: 5064352 - DNA, 25 bp, Homo sapien
gagcttgccgcttgagatgtcaaaa

SEQ ID NO: 5064353 - DNA, 25 bp, Homo sapien
ccggtgctgccgtcatgatgaactt

SEQ ID NO: 5064354 - DNA, 25 bp, Homo sapien
tgagctttttaattggcgatcgagc

SEQ ID NO: 5064355 - DNA, 25 bp, Homo sapien
tgagagcttgcaaggcgcatgcaca

SEQ ID NO: 5064356 - DNA, 25 bp, Homo sapien
aggctctagacttgggtgagagctt

SEQ ID NO: 5064357 - DNA, 25 bp, Homo sapien
ccaggtgcaattcatatgggaagag

SEQ ID NO: 5064358 - DNA, 25 bp, Homo sapien
tatgggaagagctgtccacactgcc

SEQ ID NO: 5064359 - DNA, 25 bp, Homo sapien
agtgaacctggcagtcaccctccag

SEQ ID NO: 5064360 - DNA, 25 bp, Homo sapien
tagaaagaagaccaacagggacagt

SEQ ID NO: 5064361 - DNA, 25 bp, Homo sapien
gacgttcccagaactatttcagagg

SEQ ID NO: 5064362 - DNA, 25 bp, Homo sapien
caacgagggctgtgattatgctcag

SEQ ID NO: 5064363 - DNA, 25 bp, Homo sapien
tctttattttatctggtggcctttc

SEQ ID NO: 5064364 - DNA, 25 bp, Homo sapien
gtatgtcagcgttgagggatacatt

SEQ ID NO: 5064365 - DNA, 25 bp, Homo sapien
cagtaagtatgtcagcgttgaggga

SEQ ID NO: 5064366 - DNA, 25 bp, Homo sapien
aaatgcactgctgtatatcagtata

SEQ ID NO: 5064367 - DNA, 25 bp, Homo sapien
ctttagaagtttacggtctctcagg

SEQ ID NO: 5064368 - DNA, 25 bp, Homo sapien
cagtcccagcataaaggaagtggtt

SEQ ID NO: 5064369 - DNA, 25 bp, Homo sapien
aacccagacccagacatggaaaaga

SEQ ID NO: 5064370 - DNA, 25 bp, Homo sapien
cctataaaaggagacaacacagttc

SEQ ID NO: 5064371 - DNA, 25 bp, Homo sapien
tgaaaagcctcaatgtgggagatgc

SEQ ID NO: 5064372 - DNA, 25 bp, Homo sapien
caaggttgttccttcaaggtgagct

SEQ ID NO: 5064373 - DNA, 25 bp, Homo sapien
tttcaatcgcatttctgaaaagcct

SEQ ID NO: 5064374 - DNA, 25 bp, Homo sapien
ccttggctggcaaccgctgcatttt

SEQ ID NO: 5064375 - DNA, 25 bp, Homo sapien
gtatgaagtagcaggttccaattat

SEQ ID NO: 5064376 - DNA, 25 bp, Homo sapien
tttgaacctctcagggcttcacccg

SEQ ID NO: 5064377 - DNA, 25 bp, Homo sapien
gcttcacccgctacattacttttca

SEQ ID NO: 5064378 - DNA, 25 bp, Homo sapien
tttcaaagtatgaagtagcaggttc

SEQ ID NO: 5064379 - DNA, 25 bp, Homo sapien
aaactcgcacccaggaaagaggcca

SEQ ID NO: 5064380 - DNA, 25 bp, Homo sapien
cctgggaccaggctataacatttaa

SEQ ID NO: 5064381 - DNA, 25 bp, Homo sapien
gtcttttgcctggtgatcagccctg

SEQ ID NO: 5064382 - DNA, 25 bp, Homo sapien
acctcaagtctggacgccgtaagca

SEQ ID NO: 5064383 - DNA, 25 bp, Homo sapien
tctggaagatgttcacaccataggt

SEQ ID NO: 5064384 - DNA, 25 bp, Homo sapien
tacagattcgcccatcactggaagc

SEQ ID NO: 5064385 - DNA, 25 bp, Homo sapien
gcttttcataaggatgcttcgcctc

SEQ ID NO: 5064386 - DNA, 25 bp, Homo sapien
acagcagcactgaagatgtcggcag

SEQ ID NO: 5064387 - DNA, 25 bp, Homo sapien
tccgagtggcagatatgaggcatcc

SEQ ID NO: 5064388 - DNA, 25 bp, Homo sapien
cacaggctgtgcacaaactctgcca

SEQ ID NO: 5064389 - DNA, 25 bp, Homo sapien
tcacacaatgggcaagaagaccttg

SEQ ID NO: 5064390 - DNA, 25 bp, Homo sapien
caaactaagaaactccagcaatggg

SEQ ID NO: 5064391 - DNA, 25 bp, Homo sapien
gatggccgccaacacttagcaaagc

SEQ ID NO: 5064392 - DNA, 25 bp, Homo sapien
acttagcaaagcgtgagcatcacca

SEQ ID NO: 5064393 - DNA, 25 bp, Homo sapien
cgtctctggcaagctcaggattcgt

SEQ ID NO: 5064394 - DNA, 25 bp, Homo sapien
ggatgcgaaaaccacgatggccgcc

SEQ ID NO: 5064395 - DNA, 25 bp, Homo sapien
gaaagcaggtacagtcagaagacaa

SEQ ID NO: 5064396 - DNA, 25 bp, Homo sapien
agcagagtgtctgtgtcggccggag

SEQ ID NO: 5064397 - DNA, 25 bp, Homo sapien
gaagtaaggctgtccatggcacgag

SEQ ID NO: 5064398 - DNA, 25 bp, Homo sapien
tccttgaggtggacaccacggaggc

SEQ ID NO: 5064399 - DNA, 25 bp, Homo sapien
gagagaaaactaggtgacggtcacc

SEQ ID NO: 5064400 - DNA, 25 bp, Homo sapien
tcgcttcatcaagaccaggatactg

SEQ ID NO: 5064401 - DNA, 25 bp, Homo sapien
tgtgagctgcacgacagatacgctg

SEQ ID NO: 5064402 - DNA, 25 bp, Homo sapien
gatactgcaatagtgcaaggccagt

SEQ ID NO: 5064403 - DNA, 25 bp, Homo sapien
ccaaaaagcatggcatgggcaccag

SEQ ID NO: 5064404 - DNA, 25 bp, Homo sapien
aaagcatggcatgggcaccaggatt

SEQ ID NO: 5064405 - DNA, 25 bp, Homo sapien
aaaaagcatggcatgggcaccagga

SEQ ID NO: 5064406 - DNA, 25 bp, Homo sapien
ctcaccaaaaagcatggcatgggca

SEQ ID NO: 5064407 - DNA, 25 bp, Homo sapien
cagtgccaacaaggtaggcgtccac

SEQ ID NO: 5064408 - DNA, 25 bp, Homo sapien
ctggccctgacacgatgccaggagg

SEQ ID NO: 5064409 - DNA, 25 bp, Homo sapien
ccaggaggggccgtcactctcgctg

SEQ ID NO: 5064410 - DNA, 25 bp, Homo sapien
ggagcctgttctggggtgtcaaccc

SEQ ID NO: 5064411 - DNA, 25 bp, Homo sapien
gacagttcatctgaggtcatgccat

SEQ ID NO: 5064412 - DNA, 25 bp, Homo sapien
tggccaattcggcagcaactccagg

SEQ ID NO: 5064413 - DNA, 25 bp, Homo sapien
agccggagtcctctttggaacccag

SEQ ID NO: 5064414 - DNA, 25 bp, Homo sapien
cacgggtggccatgttgaaaagaca

SEQ ID NO: 5064415 - DNA, 25 bp, Homo sapien
accagtgtttgacacgaacgcacca

SEQ ID NO: 5064416 - DNA, 25 bp, Homo sapien
tgtttgacacgaacgcaccactgtg

SEQ ID NO: 5064417 - DNA, 25 bp, Homo sapien
actgtctgaatatcctgctgttccc

SEQ ID NO: 5064418 - DNA, 25 bp, Homo sapien
tgtccttccttgctaaggcactgtc

SEQ ID NO: 5064419 - DNA, 25 bp, Homo sapien
gctgacacaggctcttcaacctgaa

SEQ ID NO: 5064420 - DNA, 25 bp, Homo sapien
tcaacctgaacatcgatgatcgggc

SEQ ID NO: 5064421 - DNA, 25 bp, Homo sapien
gaacatcgatgatcgggctgagtga

SEQ ID NO: 5064422 - DNA, 25 bp, Homo sapien
tgactccaaagtcctgtcctcgatg

SEQ ID NO: 5064423 - DNA, 25 bp, Homo sapien
taaacaaagacggcaatgtgtgcag

SEQ ID NO: 5064424 - DNA, 25 bp, Homo sapien
agctgctgccggtcagggtcacaga

SEQ ID NO: 5064425 - DNA, 25 bp, Homo sapien
ccctattttatccatgggggcctgg

SEQ ID NO: 5064426 - DNA, 25 bp, Homo sapien
gactgtgtggactagaggtctggcg

SEQ ID NO: 5064427 - DNA, 25 bp, Homo sapien
ttcccgggtgcctgaagcatctgct

SEQ ID NO: 5064428 - DNA, 25 bp, Homo sapien
cacacacagagtaaggcaagggaag

SEQ ID NO: 5064429 - DNA, 25 bp, Homo sapien
tgtggaggcagaaataacccggtat

SEQ ID NO: 5064430 - DNA, 25 bp, Homo sapien
ggaagggtagactctccacacagca

SEQ ID NO: 5064431 - DNA, 25 bp, Homo sapien
ggcactttttggtctgcgccctcca

SEQ ID NO: 5064432 - DNA, 25 bp, Homo sapien
tccaagctcctgaggcactttttgg

SEQ ID NO: 5064433 - DNA, 25 bp, Homo sapien
cttctccaagctcctgaggcacttt

SEQ ID NO: 5064434 - DNA, 25 bp, Homo sapien
ttggtctgcgccctccaactgggca

SEQ ID NO: 5064435 - DNA, 25 bp, Homo sapien
gcgcatcctcgatcctaatgcccag

SEQ ID NO: 5064436 - DNA, 25 bp, Homo sapien
gaggaggagactcgtaaccagctga

SEQ ID NO: 5064437 - DNA, 25 bp, Homo sapien
gtttttaggccctcttgccagagtc

SEQ ID NO: 5064438 - DNA, 25 bp, Homo sapien
tcctgtcctctgagtgacgtgggaa

SEQ ID NO: 5064439 - DNA, 25 bp, Homo sapien
gtgtcctccgtgtgagccgtgtcta

SEQ ID NO: 5064440 - DNA, 25 bp, Homo sapien
tctgggagcccatgttaaggagcct

SEQ ID NO: 5064441 - DNA, 25 bp, Homo sapien
ccgtgtctagggtctgggagcccat

SEQ ID NO: 5064442 - DNA, 25 bp, Homo sapien
ccatgttaaggagcctggtttcaga

SEQ ID NO: 5064443 - DNA, 25 bp, Homo sapien
ttttgctgggcaacacccacgaggg

SEQ ID NO: 5064444 - DNA, 25 bp, Homo sapien
tttgctgggcaacacccacgagggc

SEQ ID NO: 5064445 - DNA, 25 bp, Homo sapien
ttgctgggcaacacccacgagggcc

SEQ ID NO: 5064446 - DNA, 25 bp, Homo sapien
tgctctgggctccacagtctctgag

SEQ ID NO: 5064447 - DNA, 25 bp, Homo sapien
gcagaagggatgctgcagacagcat

SEQ ID NO: 5064448 - DNA, 25 bp, Homo sapien
cagtctctgagcaggcagaagggat

SEQ ID NO: 5064449 - DNA, 25 bp, Homo sapien
ccaggaaagggcagtccttccctgc

SEQ ID NO: 5064450 - DNA, 25 bp, Homo sapien
agcctctaagttctgctcacagctt

SEQ ID NO: 5064451 - DNA, 25 bp, Homo sapien
ttctaagcaggcaagcctctccacc

SEQ ID NO: 5064452 - DNA, 25 bp, Homo sapien
cttcaatgcagaaagctgactcggg

SEQ ID NO: 5064453 - DNA, 25 bp, Homo sapien
agctgactcggggtttagggctcca

SEQ ID NO: 5064454 - DNA, 25 bp, Homo sapien
cagaaagctgactcggggtttaggg

SEQ ID NO: 5064455 - DNA, 25 bp, Homo sapien
gtttagggctccaggaatcaagatc

SEQ ID NO: 5064456 - DNA, 25 bp, Homo sapien
ctgctcctgatgtctacgtttggtt

SEQ ID NO: 5064457 - DNA, 25 bp, Homo sapien
aacagtgtattcacagccgccatta

SEQ ID NO: 5064458 - DNA, 25 bp, Homo sapien
gatgtctacgtttggttgggatgaa

SEQ ID NO: 5064459 - DNA, 25 bp, Homo sapien
gcaacagtgtattcacagccgccat

SEQ ID NO: 5064460 - DNA, 25 bp, Homo sapien
tactgcaacgggcaagcctttgtca

SEQ ID NO: 5064461 - DNA, 25 bp, Homo sapien
cactttggtgagtgacaagccgtgg

SEQ ID NO: 5064462 - DNA, 25 bp, Homo sapien
tgagactcagtcctcgatactgcaa

SEQ ID NO: 5064463 - DNA, 25 bp, Homo sapien
agtgacaagccgtggcctctcagga

SEQ ID NO: 5064464 - DNA, 25 bp, Homo sapien
gaataggcccagtggaaaggctgct

SEQ ID NO: 5064465 - DNA, 25 bp, Homo sapien
tggtcaagggccgtcgaggcttcca

SEQ ID NO: 5064466 - DNA, 25 bp, Homo sapien
tcgtcccgttgaggtcccttactga

SEQ ID NO: 5064467 - DNA, 25 bp, Homo sapien
tcgtggcgacttggttctttcaggt

SEQ ID NO: 5064468 - DNA, 25 bp, Homo sapien
taattaatggacacctgagttgctt

SEQ ID NO: 5064469 - DNA, 25 bp, Homo sapien
tcatctatgttgtagtaggtatcca

SEQ ID NO: 5064470 - DNA, 25 bp, Homo sapien
ggactcataccatatttatcctttc

SEQ ID NO: 5064471 - DNA, 25 bp, Homo sapien
taggtatccatgactatagcattcc

SEQ ID NO: 5064472 - DNA, 25 bp, Homo sapien
cattttgattctcagaccagaaacc

SEQ ID NO: 5064473 - DNA, 25 bp, Homo sapien
gaaaccacatcctctgctaagcagt

SEQ ID NO: 5064474 - DNA, 25 bp, Homo sapien
ttgtcttgacaaaaggacctggcat

SEQ ID NO: 5064475 - DNA, 25 bp, Homo sapien
gtcgctctgaaagggcctggcagtc

SEQ ID NO: 5064476 - DNA, 25 bp, Homo sapien
ctgctgcgacaagtacccgggtatc

SEQ ID NO: 5064477 - DNA, 25 bp, Homo sapien
cattctgaattacaggccaggagcc

SEQ ID NO: 5064478 - DNA, 25 bp, Homo sapien
cacacagcgtactctaatttccgca

SEQ ID NO: 5064479 - DNA, 25 bp, Homo sapien
tctaatttccgcagcttggagcccc

SEQ ID NO: 5064480 - DNA, 25 bp, Homo sapien
tatgttccagtgtaccctcagagaa

SEQ ID NO: 5064481 - DNA, 25 bp, Homo sapien
gagttgtgcctctccattacaagag

SEQ ID NO: 5064482 - DNA, 25 bp, Homo sapien
catgagtgactgaatctggctgtgc

SEQ ID NO: 5064483 - DNA, 25 bp, Homo sapien
gacgaggtccaacagtacatgagtg

SEQ ID NO: 5064484 - DNA, 25 bp, Homo sapien
acttgagaaagaacggtgaatgcac

SEQ ID NO: 5064485 - DNA, 25 bp, Homo sapien
tgtgtccgagaccagcaatctggga

SEQ ID NO: 5064486 - DNA, 25 bp, Homo sapien
aaaatcctgttttcgattgcgaggg

SEQ ID NO: 5064487 - DNA, 25 bp, Homo sapien
gtctggcagggctgaaccaatcctc

SEQ ID NO: 5064488 - DNA, 25 bp, Homo sapien
ggagcatttacggagcaccgacagc

SEQ ID NO: 5064489 - DNA, 25 bp, Homo sapien
gcagggagcatttacggagcaccga

SEQ ID NO: 5064490 - DNA, 25 bp, Homo sapien
agcatttacggagcaccgacagcat

SEQ ID NO: 5064491 - DNA, 25 bp, Homo sapien
agggagcatttacggagcaccgaca

SEQ ID NO: 5064492 - DNA, 25 bp, Homo sapien
tcggaatcgggtaatgagaatggca

SEQ ID NO: 5064493 - DNA, 25 bp, Homo sapien
agaatggcagcatcgcccttctctg

SEQ ID NO: 5064494 - DNA, 25 bp, Homo sapien
ccaggctcggaatcgggtaatgaga

SEQ ID NO: 5064495 - DNA, 25 bp, Homo sapien
gagaatggcagcatcgcccttctct

SEQ ID NO: 5064496 - DNA, 25 bp, Homo sapien
tgcaaaaccgacagccacttcagtg

SEQ ID NO: 5064497 - DNA, 25 bp, Homo sapien
gaaacattagggaacggctgtcaca

SEQ ID NO: 5064498 - DNA, 25 bp, Homo sapien
ccctgtccggagtgaatgcaaaacc

SEQ ID NO: 5064499 - DNA, 25 bp, Homo sapien
caggaaaccatgacgtagcccactt

SEQ ID NO: 5064500 - DNA, 25 bp, Homo sapien
taaatattttctgctgggcaccgag

SEQ ID NO: 5064501 - DNA, 25 bp, Homo sapien
caaagacactaggactcgaacctgg

SEQ ID NO: 5064502 - DNA, 25 bp, Homo sapien
cggtttaccctgagtgagacggcac

SEQ ID NO: 5064503 - DNA, 25 bp, Homo sapien
gcatacatgtgtgcccagagcggtg

SEQ ID NO: 5064504 - DNA, 25 bp, Homo sapien
ttctgggcacaaggaggaactctcc

SEQ ID NO: 5064505 - DNA, 25 bp, Homo sapien
tatctgcatgtcgaggtcagctggg

SEQ ID NO: 5064506 - DNA, 25 bp, Homo sapien
tgttacctaagcacagcctagcctg

SEQ ID NO: 5064507 - DNA, 25 bp, Homo sapien
taaatcagacctcgaaccttgaagg

SEQ ID NO: 5064508 - DNA, 25 bp, Homo sapien
tgtcatggagacctggacacaccat

SEQ ID NO: 5064509 - DNA, 25 bp, Homo sapien
ttgtcatggagacctggacacacca

SEQ ID NO: 5064510 - DNA, 25 bp, Homo sapien
gttgtcatggagacctggacacacc

SEQ ID NO: 5064511 - DNA, 25 bp, Homo sapien
agcctctgagcataaggcccttcca

SEQ ID NO: 5064512 - DNA, 25 bp, Homo sapien
gttaaccagactatctcccacacag

SEQ ID NO: 5064513 - DNA, 25 bp, Homo sapien
cctgagcctctgagcataaggccct

SEQ ID NO: 5064514 - DNA, 25 bp, Homo sapien
cctggcctctgttaaccagactatc

SEQ ID NO: 5064515 - DNA, 25 bp, Homo sapien
ccacccggtaatctctttcgaagcg

SEQ ID NO: 5064516 - DNA, 25 bp, Homo sapien
ccgttgacgctccattcgcggcggt

SEQ ID NO: 5064517 - DNA, 25 bp, Homo sapien
aagcggctatggtgccgggacatct

SEQ ID NO: 5064518 - DNA, 25 bp, Homo sapien
acactgcagatgctggtggtcccat

SEQ ID NO: 5064519 - DNA, 25 bp, Homo sapien
tgaaagaaacgggaatgacctggcg

SEQ ID NO: 5064520 - DNA, 25 bp, Homo sapien
aatgacctggcgctgacatccctga

SEQ ID NO: 5064521 - DNA, 25 bp, Homo sapien
aacgggaatgacctggcgctgacat

SEQ ID NO: 5064522 - DNA, 25 bp, Homo sapien
gacctggcgctgacatccctgaagc

SEQ ID NO: 5064523 - DNA, 25 bp, Homo sapien
cattccattcagcaacacaggttgg

SEQ ID NO: 5064524 - DNA, 25 bp, Homo sapien
acgatggaggacgagctcagcccaa

SEQ ID NO: 5064525 - DNA, 25 bp, Homo sapien
agcaagagccttggcaacactgttt

SEQ ID NO: 5064526 - DNA, 25 bp, Homo sapien
cagccagcacgatggaggacgagct

SEQ ID NO: 5064527 - DNA, 25 bp, Homo sapien
cccgagcagtcggttccagcggctg

SEQ ID NO: 5064528 - DNA, 25 bp, Homo sapien
gcagtcggttccagcggctgccatt

SEQ ID NO: 5064529 - DNA, 25 bp, Homo sapien
ccattctccatatggccaacagctg

SEQ ID NO: 5064530 - DNA, 25 bp, Homo sapien
cattctccatatggccaacagctgg

SEQ ID NO: 5064531 - DNA, 25 bp, Homo sapien
gaccagggcttaatccggggaatca

SEQ ID NO: 5064532 - DNA, 25 bp, Homo sapien
gcttaatccggggaatcaaacaagc

SEQ ID NO: 5064533 - DNA, 25 bp, Homo sapien
gtccccacactctggtgagctcgga

SEQ ID NO: 5064534 - DNA, 25 bp, Homo sapien
caggaagcccggtggatacattcca

SEQ ID NO: 5064535 - DNA, 25 bp, Homo sapien
cagttgctgagtttccgagggtggc

SEQ ID NO: 5064536 - DNA, 25 bp, Homo sapien
cagctgtttccacaatgggctttcc

SEQ ID NO: 5064537 - DNA, 25 bp, Homo sapien
ctccagagggatctggccatccatg

SEQ ID NO: 5064538 - DNA, 25 bp, Homo sapien
ggccatccatgaagctggactcatg

SEQ ID NO: 5064539 - DNA, 25 bp, Homo sapien
gagaagcatcacactgggcggccct

SEQ ID NO: 5064540 - DNA, 25 bp, Homo sapien
tggcccgaatgctggaagagctggg

SEQ ID NO: 5064541 - DNA, 25 bp, Homo sapien
gcttggcagtaaacttgcggccggc

SEQ ID NO: 5064542 - DNA, 25 bp, Homo sapien
tgtgcttggcagtaaacttgcggcc

SEQ ID NO: 5064543 - DNA, 25 bp, Homo sapien
tgcttggcagtaaacttgcggccgg

SEQ ID NO: 5064544 - DNA, 25 bp, Homo sapien
gtgcttggcagtaaacttgcggccg

SEQ ID NO: 5064545 - DNA, 25 bp, Homo sapien
cggccccaacctcatgcaattgtga

SEQ ID NO: 5064546 - DNA, 25 bp, Homo sapien
tcacaggcaaaaacacttggagccg

SEQ ID NO: 5064547 - DNA, 25 bp, Homo sapien
taatgaggatagttacggccccaac

SEQ ID NO: 5064548 - DNA, 25 bp, Homo sapien
gggcatgataccacctcccaaggtt

SEQ ID NO: 5064549 - DNA, 25 bp, Homo sapien
gtgagccactgggcgcggcccccct

SEQ ID NO: 5064550 - DNA, 25 bp, Homo sapien
gcgtgagccactgggcgcggccccc

SEQ ID NO: 5064551 - DNA, 25 bp, Homo sapien
cccaaggtgttgggactccaggcgt

SEQ ID NO: 5064552 - DNA, 25 bp, Homo sapien
gagccactgggcgcggcccccctca

SEQ ID NO: 5064553 - DNA, 25 bp, Homo sapien
tgctcttggggtctggtactacggt

SEQ ID NO: 5064554 - DNA, 25 bp, Homo sapien
gctcttggggtctggtactacggtc

SEQ ID NO: 5064555 - DNA, 25 bp, Homo sapien
ctggtactacggtctgtgtcttctg

SEQ ID NO: 5064556 - DNA, 25 bp, Homo sapien
gattaggccgacagagcctgttcat

SEQ ID NO: 5064557 - DNA, 25 bp, Homo sapien
ctttacaggtgtggtttcttggcga

SEQ ID NO: 5064558 - DNA, 25 bp, Homo sapien
gtttcttggcgagcagtcacttgca

SEQ ID NO: 5064559 - DNA, 25 bp, Homo sapien
cagtcacttgcagattaggccgaca

SEQ ID NO: 5064560 - DNA, 25 bp, Homo sapien
ggaccaggcctgactgttaacactg

SEQ ID NO: 5064561 - DNA, 25 bp, Homo sapien
cacagcgcagttagaattctgccag

SEQ ID NO: 5064562 - DNA, 25 bp, Homo sapien
tgggcgccaagcactgtcatctgtc

SEQ ID NO: 5064563 - DNA, 25 bp, Homo sapien
actgcaactggttccctccaatgga

SEQ ID NO: 5064564 - DNA, 25 bp, Homo sapien
ttcttcggagtttccatttcatgtg

SEQ ID NO: 5064565 - DNA, 25 bp, Homo sapien
ccagcgcactgccttcttcggagtt

SEQ ID NO: 5064566 - DNA, 25 bp, Homo sapien
tgtgctctagatctggctgtcccag

SEQ ID NO: 5064567 - DNA, 25 bp, Homo sapien
tattaatagaccagctgccagcgca

SEQ ID NO: 5064568 - DNA, 25 bp, Homo sapien
tctaggtggcctggacttcagaagc

SEQ ID NO: 5064569 - DNA, 25 bp, Homo sapien
ggatggatccgcagcctctgtgtgt

SEQ ID NO: 5064570 - DNA, 25 bp, Homo sapien
ccttgcttgggtcctgggccatgta

SEQ ID NO: 5064571 - DNA, 25 bp, Homo sapien
gagctagggaccctggttctaggtg

SEQ ID NO: 5064572 - DNA, 25 bp, Homo sapien
catgtggctcaggagcacagagagg

SEQ ID NO: 5064573 - DNA, 25 bp, Homo sapien
tcatgtggctcaggagcacagagag

SEQ ID NO: 5064574 - DNA, 25 bp, Homo sapien
ctgaagtgctgtggacgcccaaggc

SEQ ID NO: 5064575 - DNA, 25 bp, Homo sapien
aagtgctgtggacgcccaaggctct

SEQ ID NO: 5064576 - DNA, 25 bp, Homo sapien
gggccaggagatggtctgtttgctt

SEQ ID NO: 5064577 - DNA, 25 bp, Homo sapien
gctgtccctgagaaggagcaaggtc

SEQ ID NO: 5064578 - DNA, 25 bp, Homo sapien
gaggggtctgacgtccttccatcac

SEQ ID NO: 5064579 - DNA, 25 bp, Homo sapien
gggagacccatacacattctgctgt

SEQ ID NO: 5064580 - DNA, 25 bp, Homo sapien
cccgaggggtctgacgtccttccat

SEQ ID NO: 5064581 - DNA, 25 bp, Homo sapien
cttccatcacttctcctccgcacca

SEQ ID NO: 5064582 - DNA, 25 bp, Homo sapien
ctggaggctgggacattaatttcct

SEQ ID NO: 5064583 - DNA, 25 bp, Homo sapien
ccatctaatgctttgtggagcctgg

SEQ ID NO: 5064584 - DNA, 25 bp, Homo sapien
ggctgggacattaatttcctgcttt

SEQ ID NO: 5064585 - DNA, 25 bp, Homo sapien
tactttaattccatctaatgctttg

SEQ ID NO: 5064586 - DNA, 25 bp, Homo sapien
ctgcagaaccaagtgttccctggat

SEQ ID NO: 5064587 - DNA, 25 bp, Homo sapien
agccctgcagaaccaagtgttccct

SEQ ID NO: 5064588 - DNA, 25 bp, Homo sapien
gggccttactcctggcaccagctcc

SEQ ID NO: 5064589 - DNA, 25 bp, Homo sapien
gaagggggccttactcctggcacca

SEQ ID NO: 5064590 - DNA, 25 bp, Homo sapien
cagggagcaagcttctggttagtgt

SEQ ID NO: 5064591 - DNA, 25 bp, Homo sapien
gcgtatctcctgcacgtgtgtatgc

SEQ ID NO: 5064592 - DNA, 25 bp, Homo sapien
ttctggttagtgtggcgtatctcct

SEQ ID NO: 5064593 - DNA, 25 bp, Homo sapien
atttaaacagggagcaagcttctgg

SEQ ID NO: 5064594 - DNA, 25 bp, Homo sapien
ttctagctaacatatgcggatacat

SEQ ID NO: 5064595 - DNA, 25 bp, Homo sapien
tactgcagtgtcaccaacctccagc

SEQ ID NO: 5064596 - DNA, 25 bp, Homo sapien
tgcattctagctaacatatgcggat

SEQ ID NO: 5064597 - DNA, 25 bp, Homo sapien
ggctgcattctagctaacatatgcg

SEQ ID NO: 5064598 - DNA, 25 bp, Homo sapien
cgacgctgacgtgcaggaaggctgg

SEQ ID NO: 5064599 - DNA, 25 bp, Homo sapien
acagcgacgctgacgtgcaggaagg

SEQ ID NO: 5064600 - DNA, 25 bp, Homo sapien
gaaggctggcgcagctgaacaaggt

SEQ ID NO: 5064601 - DNA, 25 bp, Homo sapien
ggctggcgcagctgaacaaggtcat

SEQ ID NO: 5064602 - DNA, 25 bp, Homo sapien
tttattcagcagaataggatgcggg

SEQ ID NO: 5064603 - DNA, 25 bp, Homo sapien
gaacccgttcgctcatttccagaaa

SEQ ID NO: 5064604 - DNA, 25 bp, Homo sapien
taagatctctcttacagttcatggg

SEQ ID NO: 5064605 - DNA, 25 bp, Homo sapien
cccaggttctggcaaggaatcggcc

SEQ ID NO: 5064606 - DNA, 25 bp, Homo sapien
aaacacgctgcgatacggcggtcac

SEQ ID NO: 5064607 - DNA, 25 bp, Homo sapien
ggcaaacacgctgcgatacggcggt

SEQ ID NO: 5064608 - DNA, 25 bp, Homo sapien
caaacacgctgcgatacggcggtca

SEQ ID NO: 5064609 - DNA, 25 bp, Homo sapien
aacacgctgcgatacggcggtcacg

SEQ ID NO: 5064610 - DNA, 25 bp, Homo sapien
cagagggatggctacttgcattgtt

SEQ ID NO: 5064611 - DNA, 25 bp, Homo sapien
agagcctcgtcaaagccagctggac

SEQ ID NO: 5064612 - DNA, 25 bp, Homo sapien
taagtaggagcgcttcacagtgacc

SEQ ID NO: 5064613 - DNA, 25 bp, Homo sapien
ctgcctggtgatcccaagagggcct

SEQ ID NO: 5064614 - DNA, 25 bp, Homo sapien
tgtttgcctaatgcccttttatata

SEQ ID NO: 5064615 - DNA, 25 bp, Homo sapien
tttgcctaatgcccttttatataac

SEQ ID NO: 5064616 - DNA, 25 bp, Homo sapien
gtgtttgcctaatgcccttttatat

SEQ ID NO: 5064617 - DNA, 25 bp, Homo sapien
gtttgcctaatgcccttttatataa

SEQ ID NO: 5064618 - DNA, 25 bp, Homo sapien
tactatccagactgcgggctgatga

SEQ ID NO: 5064619 - DNA, 25 bp, Homo sapien
tgatgaggacggtaactgcagccaa

SEQ ID NO: 5064620 - DNA, 25 bp, Homo sapien
tttcctgttgctgatactatccaga

SEQ ID NO: 5064621 - DNA, 25 bp, Homo sapien
caattcgtattctgcgtggctgccg

SEQ ID NO: 5064622 - DNA, 25 bp, Homo sapien
agaagcaatacatcacaggaaaagc

SEQ ID NO: 5064623 - DNA, 25 bp, Homo sapien
gaagcaatacatcacaggaaaagct

SEQ ID NO: 5064624 - DNA, 25 bp, Homo sapien
ggccttcctacgctgctacgttgtg

SEQ ID NO: 5064625 - DNA, 25 bp, Homo sapien
aaaatgacaacggacgccgtcttcg

SEQ ID NO: 5064626 - DNA, 25 bp, Homo sapien
ggacgccgtcttcggtgcttccaac

SEQ ID NO: 5064627 - DNA, 25 bp, Homo sapien
tacgttgtgcattacccacaacagc

SEQ ID NO: 5064628 - DNA, 25 bp, Homo sapien
tggctgccaggcctgtatctgtgct

SEQ ID NO: 5064629 - DNA, 25 bp, Homo sapien
gctgcctttccctgggccgaggggc

SEQ ID NO: 5064630 - DNA, 25 bp, Homo sapien
ctttccctgggccgaggggcctgtg

SEQ ID NO: 5064631 - DNA, 25 bp, Homo sapien
ctctggatggggaccctgttcctgc

SEQ ID NO: 5064632 - DNA, 25 bp, Homo sapien
ccactcgacgcttccacttggatgt

SEQ ID NO: 5064633 - DNA, 25 bp, Homo sapien
tctgctgtatgctctgtcccagagc

SEQ ID NO: 5064634 - DNA, 25 bp, Homo sapien
cactctgtgtgtcccggactggcct

SEQ ID NO: 5064635 - DNA, 25 bp, Homo sapien
aatgatgtttatccgggttctggaa

SEQ ID NO: 5064636 - DNA, 25 bp, Homo sapien
cgggttctggaacgttcttctcctg

SEQ ID NO: 5064637 - DNA, 25 bp, Homo sapien
tgatgtttatccgggttctggaacg

SEQ ID NO: 5064638 - DNA, 25 bp, Homo sapien
tcaatgatgtttatccgggttctgg

SEQ ID NO: 5064639 - DNA, 25 bp, Homo sapien
ccttcacgctcccagggatatgtgg

SEQ ID NO: 5064640 - DNA, 25 bp, Homo sapien
tacacacaagctgtcatactggtgg

SEQ ID NO: 5064641 - DNA, 25 bp, Homo sapien
tagctgcccctatttggacgcctgg

SEQ ID NO: 5064642 - DNA, 25 bp, Homo sapien
ttggtgcccacttgatgccagtgca

SEQ ID NO: 5064643 - DNA, 25 bp, Homo sapien
gccttttggaccagactttctctct

SEQ ID NO: 5064644 - DNA, 25 bp, Homo sapien
tctctctcacgtgtcctgttcttac

SEQ ID NO: 5064645 - DNA, 25 bp, Homo sapien
tgccttttggaccagactttctctc

SEQ ID NO: 5064646 - DNA, 25 bp, Homo sapien
cagactttctctctcacgtgtcctg

SEQ ID NO: 5064647 - DNA, 25 bp, Homo sapien
catgagtcgggtccgttggaacctg

SEQ ID NO: 5064648 - DNA, 25 bp, Homo sapien
cccagggctcatcgccattgcaggg

SEQ ID NO: 5064649 - DNA, 25 bp, Homo sapien
atgctgggcaccatgagtcgggtcc

SEQ ID NO: 5064650 - DNA, 25 bp, Homo sapien
cactgtagggtccatgagggatgct

SEQ ID NO: 5064651 - DNA, 25 bp, Homo sapien
tgagaggcaatcctgttctggagac

SEQ ID NO: 5064652 - DNA, 25 bp, Homo sapien
gacacagatatcaatagtttctggc

SEQ ID NO: 5064653 - DNA, 25 bp, Homo sapien
gttctggagacacagatatcaatag

SEQ ID NO: 5064654 - DNA, 25 bp, Homo sapien
agaggcaatcctgttctggagacac

SEQ ID NO: 5064655 - DNA, 25 bp, Homo sapien
gactgagagctcgactcttgacgcc

SEQ ID NO: 5064656 - DNA, 25 bp, Homo sapien
gacacgacatcctcagcgaccttat

SEQ ID NO: 5064657 - DNA, 25 bp, Homo sapien
tcttgacgccacacaacaatcctga

SEQ ID NO: 5064658 - DNA, 25 bp, Homo sapien
actcccagagcatggagtcgactga

SEQ ID NO: 5064659 - DNA, 25 bp, Homo sapien
cagctctacattgtaaaacctctgc

SEQ ID NO: 5064660 - DNA, 25 bp, Homo sapien
gtaaaacctctgctgtgtgactcac

SEQ ID NO: 5064661 - DNA, 25 bp, Homo sapien
aaagggaacagctctacattgtaaa

SEQ ID NO: 5064662 - DNA, 25 bp, Homo sapien
tgtaaaacctctgctgtgtgactca

SEQ ID NO: 5064663 - DNA, 25 bp, Homo sapien
ggccgttccccagtgttcctggcca

SEQ ID NO: 5064664 - DNA, 25 bp, Homo sapien
ctttggccgttccccagtgttcctg

SEQ ID NO: 5064665 - DNA, 25 bp, Homo sapien
gccgttccccagtgttcctggccat

SEQ ID NO: 5064666 - DNA, 25 bp, Homo sapien
ttggccgttccccagtgttcctggc

SEQ ID NO: 5064667 - DNA, 25 bp, Homo sapien
taactctttcctcccatggttcaga

SEQ ID NO: 5064668 - DNA, 25 bp, Homo sapien
agccactggtgatgtgcgtcagcgc

SEQ ID NO: 5064669 - DNA, 25 bp, Homo sapien
tggttcagaatgtctgcaagcccag

SEQ ID NO: 5064670 - DNA, 25 bp, Homo sapien
gttccaggccctcagtaaacccatg

SEQ ID NO: 5064671 - DNA, 25 bp, Homo sapien
gctacaaccggcctgctgtttggct

SEQ ID NO: 5064672 - DNA, 25 bp, Homo sapien
tgagcaggcgaagtgggctacaacc

SEQ ID NO: 5064673 - DNA, 25 bp, Homo sapien
tcaggagttccaacggtcaccctaa

SEQ ID NO: 5064674 - DNA, 25 bp, Homo sapien
tatgaacagctcgagggaaagaagc

SEQ ID NO: 5064675 - DNA, 25 bp, Homo sapien
tgtgaatgctaagatcccagcctcc

SEQ ID NO: 5064676 - DNA, 25 bp, Homo sapien
ttcctggacagtacagaagcccctc

SEQ ID NO: 5064677 - DNA, 25 bp, Homo sapien
gaaggatctatccactccacagcct

SEQ ID NO: 5064678 - DNA, 25 bp, Homo sapien
ggaaattgctttcctcggaatcaga

SEQ ID NO: 5064679 - DNA, 25 bp, Homo sapien
caagcttccttatcagagggcctgc

SEQ ID NO: 5064680 - DNA, 25 bp, Homo sapien
tcctgagaaaagaacaattcaaggg

SEQ ID NO: 5064681 - DNA, 25 bp, Homo sapien
gagggcctgccccatttctatctgt

SEQ ID NO: 5064682 - DNA, 25 bp, Homo sapien
gggacttagccgcactcactaatag

SEQ ID NO: 5064683 - DNA, 25 bp, Homo sapien
tgtgggctgcgctcagctaattgca

SEQ ID NO: 5064684 - DNA, 25 bp, Homo sapien
gtgggctgcgctcagctaattgcat

SEQ ID NO: 5064685 - DNA, 25 bp, Homo sapien
gggcttcgacgcatagtgcagacga

SEQ ID NO: 5064686 - DNA, 25 bp, Homo sapien
agtgcagacgacacacagcgcctat

SEQ ID NO: 5064687 - DNA, 25 bp, Homo sapien
agcgcctatgtaagggcctgctgga

SEQ ID NO: 5064688 - DNA, 25 bp, Homo sapien
gacacacagcgcctatgtaagggcc

SEQ ID NO: 5064689 - DNA, 25 bp, Homo sapien
cacggtgacttctgatgaaacttga

SEQ ID NO: 5064690 - DNA, 25 bp, Homo sapien
tgaggggtggatacggatgcctgcc

SEQ ID NO: 5064691 - DNA, 25 bp, Homo sapien
tggtcctcacggtgacttctgatga

SEQ ID NO: 5064692 - DNA, 25 bp, Homo sapien
atgaaacttgacccaggaacccagc

SEQ ID NO: 5064693 - DNA, 25 bp, Homo sapien
tgggataggatacctgggatatgca

SEQ ID NO: 5064694 - DNA, 25 bp, Homo sapien
aaaaaaatcctggatacatgctggc

SEQ ID NO: 5064695 - DNA, 25 bp, Homo sapien
gtgtgggtgtcagtagaggtggccc

SEQ ID NO: 5064696 - DNA, 25 bp, Homo sapien
gccccgggaagagtcagcacagctc

SEQ ID NO: 5064697 - DNA, 25 bp, Homo sapien
ggactgattgataggcgtctgcccc

SEQ ID NO: 5064698 - DNA, 25 bp, Homo sapien
accggatgctggtcgccagtccctg

SEQ ID NO: 5064699 - DNA, 25 bp, Homo sapien
tgtggactgattgataggcgtctgc

SEQ ID NO: 5064700 - DNA, 25 bp, Homo sapien
gtcccagggtgtggactgattgata

SEQ ID NO: 5064701 - DNA, 25 bp, Homo sapien
gatggaagaaacgtcatctgccggt

SEQ ID NO: 5064702 - DNA, 25 bp, Homo sapien
agatggaagaaacgtcatctgccgg

SEQ ID NO: 5064703 - DNA, 25 bp, Homo sapien
gggagatggaagaaacgtcatctgc

SEQ ID NO: 5064704 - DNA, 25 bp, Homo sapien
gagatggaagaaacgtcatctgccg

SEQ ID NO: 5064705 - DNA, 25 bp, Homo sapien
gcctggacgttcacagccgggctga

SEQ ID NO: 5064706 - DNA, 25 bp, Homo sapien
tcacagccgggctgaaggtgggagg

SEQ ID NO: 5064707 - DNA, 25 bp, Homo sapien
gctgggccactccataggagtgtgc

SEQ ID NO: 5064708 - DNA, 25 bp, Homo sapien
tcagggtgggctggttcccggcggc

SEQ ID NO: 5064709 - DNA, 25 bp, Homo sapien
gccccacgtggggaggcagtgaggg

SEQ ID NO: 5064710 - DNA, 25 bp, Homo sapien
gagctggggccccacgtggggaggc

SEQ ID NO: 5064711 - DNA, 25 bp, Homo sapien
gcagtgagggggtcaccccaatgac

SEQ ID NO: 5064712 - DNA, 25 bp, Homo sapien
ggaggcagtgagggggtcaccccaa

SEQ ID NO: 5064713 - DNA, 25 bp, Homo sapien
acgccaatggtccgcagcatctgca

SEQ ID NO: 5064714 - DNA, 25 bp, Homo sapien
aggcatgttgaccaccacgctgctc

SEQ ID NO: 5064715 - DNA, 25 bp, Homo sapien
catgtggccgttgcccacagcggtg

SEQ ID NO: 5064716 - DNA, 25 bp, Homo sapien
tgagggagcgagtagtggcctggca

SEQ ID NO: 5064717 - DNA, 25 bp, Homo sapien
ccctgtcccggtggtgttgcagtga

SEQ ID NO: 5064718 - DNA, 25 bp, Homo sapien
ggaggcacgtggcagcaggacttac

SEQ ID NO: 5064719 - DNA, 25 bp, Homo sapien
ggtgttgcagtgaccgcgcagggag

SEQ ID NO: 5064720 - DNA, 25 bp, Homo sapien
gaaggagctggcatgaagcaccccc

SEQ ID NO: 5064721 - DNA, 25 bp, Homo sapien
cactttgtttgtcccgccctccaca

SEQ ID NO: 5064722 - DNA, 25 bp, Homo sapien
ccggcgcattttcccactttgtttg

SEQ ID NO: 5064723 - DNA, 25 bp, Homo sapien
aggccagttgtcttgggcaggtgga

SEQ ID NO: 5064724 - DNA, 25 bp, Homo sapien
ccatctcaggccagttgtcttgggc

SEQ ID NO: 5064725 - DNA, 25 bp, Homo sapien
tcatccgatggcacgacagagagtg

SEQ ID NO: 5064726 - DNA, 25 bp, Homo sapien
gacacagtacatgctctgaatgtcc

SEQ ID NO: 5064727 - DNA, 25 bp, Homo sapien
tgccctgagaggagtggatgactct

SEQ ID NO: 5064728 - DNA, 25 bp, Homo sapien
ctcacccttttgcagcttggcctgg

SEQ ID NO: 5064729 - DNA, 25 bp, Homo sapien
ggaagagggttaactgaaggctgag

SEQ ID NO: 5064730 - DNA, 25 bp, Homo sapien
ggaggtgctctttcccaaggtctca

SEQ ID NO: 5064731 - DNA, 25 bp, Homo sapien
gccacccctggatccttgaaatgaa

SEQ ID NO: 5064732 - DNA, 25 bp, Homo sapien
tgcctcaagatggtctaggaatgtc

SEQ ID NO: 5064733 - DNA, 25 bp, Homo sapien
gttctgaaggatctaccttcgagtt

SEQ ID NO: 5064734 - DNA, 25 bp, Homo sapien
tctaccttcgagttccctggaatga

SEQ ID NO: 5064735 - DNA, 25 bp, Homo sapien
caactaggaccatgtctagcacgca

SEQ ID NO: 5064736 - DNA, 25 bp, Homo sapien
catccttcccgaggctctgttctga

SEQ ID NO: 5064737 - DNA, 25 bp, Homo sapien
cagcaagcctcatatgtgtgccctg

SEQ ID NO: 5064738 - DNA, 25 bp, Homo sapien
ctaggcaaacctatagcagaggaat

SEQ ID NO: 5064739 - DNA, 25 bp, Homo sapien
gcctcatatgtgtgccctggtcctc

SEQ ID NO: 5064740 - DNA, 25 bp, Homo sapien
aacctatagcagaggaatccagcaa

SEQ ID NO: 5064741 - DNA, 25 bp, Homo sapien
tccagcaggagcagggacttggctt

SEQ ID NO: 5064742 - DNA, 25 bp, Homo sapien
gacttggcttgtctggggcactaag

SEQ ID NO: 5064743 - DNA, 25 bp, Homo sapien
agcagccttccccactgcatccagc

SEQ ID NO: 5064744 - DNA, 25 bp, Homo sapien
actgcctgtacctggcagtggccca

SEQ ID NO: 5064745 - DNA, 25 bp, Homo sapien
gacaatgtttagctgcctgcaccca

SEQ ID NO: 5064746 - DNA, 25 bp, Homo sapien
gatgcatactttctgggaccgtcta

SEQ ID NO: 5064747 - DNA, 25 bp, Homo sapien
agagatgtagacaccccgttgggcc

SEQ ID NO: 5064748 - DNA, 25 bp, Homo sapien
caagatcttgcattagcccagaggg

SEQ ID NO: 5064749 - DNA, 25 bp, Homo sapien
gcattcatagcctgtgctctgtcat

SEQ ID NO: 5064750 - DNA, 25 bp, Homo sapien
gggtagaaatagctgcattcatagc

SEQ ID NO: 5064751 - DNA, 25 bp, Homo sapien
aaatagctgcattcatagcctgtgc

SEQ ID NO: 5064752 - DNA, 25 bp, Homo sapien
ttaaaaggtccccatacatcctctg

SEQ ID NO: 5064753 - DNA, 25 bp, Homo sapien
ggttgacacgggctttgctttctgg

SEQ ID NO: 5064754 - DNA, 25 bp, Homo sapien
ccttctctgctgaactctctagacc

SEQ ID NO: 5064755 - DNA, 25 bp, Homo sapien
gacaagcatgggcttcttccatctc

SEQ ID NO: 5064756 - DNA, 25 bp, Homo sapien
ccccatccctaagttaaatggcttg

SEQ ID NO: 5064757 - DNA, 25 bp, Homo sapien
cctaagttaaatggcttgaccaggg

SEQ ID NO: 5064758 - DNA, 25 bp, Homo sapien
ctggaaagtcagggcaagggtggga

SEQ ID NO: 5064759 - DNA, 25 bp, Homo sapien
gctggaaagtcagggcaagggtggg

SEQ ID NO: 5064760 - DNA, 25 bp, Homo sapien
tggaaagtcagggcaagggtgggat

SEQ ID NO: 5064761 - DNA, 25 bp, Homo sapien
gacgaagaaccttgtgcagatggag

SEQ ID NO: 5064762 - DNA, 25 bp, Homo sapien
tactgatgaacaagccccatgagga

SEQ ID NO: 5064763 - DNA, 25 bp, Homo sapien
gatggagtttcgaattccacgggct

SEQ ID NO: 5064764 - DNA, 25 bp, Homo sapien
tacagctcaggcgaggacgaagaac

SEQ ID NO: 5064765 - DNA, 25 bp, Homo sapien
atccctgggtggtccagcggcctct

SEQ ID NO: 5064766 - DNA, 25 bp, Homo sapien
tgacaccatccctgggtggtccagc

SEQ ID NO: 5064767 - DNA, 25 bp, Homo sapien
accatccctgggtggtccagcggcc

SEQ ID NO: 5064768 - DNA, 25 bp, Homo sapien
cctgggtggtccagcggcctctgcg

SEQ ID NO: 5064769 - DNA, 25 bp, Homo sapien
ctgctgagcaggctggggcagccag

SEQ ID NO: 5064770 - DNA, 25 bp, Homo sapien
ctgagcaggctggggcagccagggg

SEQ ID NO: 5064771 - DNA, 25 bp, Homo sapien
agcaggctggggcagccaggggtca

SEQ ID NO: 5064772 - DNA, 25 bp, Homo sapien
gcaggctggggcagccaggggtcac

SEQ ID NO: 5064773 - DNA, 25 bp, Homo sapien
gggctgaaggcccatatgctcccgc

SEQ ID NO: 5064774 - DNA, 25 bp, Homo sapien
ttgaagatgctcagcggagatttgg

SEQ ID NO: 5064775 - DNA, 25 bp, Homo sapien
agagagggtccagggtggttctctc

SEQ ID NO: 5064776 - DNA, 25 bp, Homo sapien
tcccgcagccccgtggagagagggt

SEQ ID NO: 5064777 - DNA, 25 bp, Homo sapien
ctggggccagagcagggcttctgac

SEQ ID NO: 5064778 - DNA, 25 bp, Homo sapien
gcagctggcttcctgccacgggtca

SEQ ID NO: 5064779 - DNA, 25 bp, Homo sapien
ccacccttggctctcgtctgaacag

SEQ ID NO: 5064780 - DNA, 25 bp, Homo sapien
tctcatccccatcggcagcgggacc

SEQ ID NO: 5064781 - DNA, 25 bp, Homo sapien
ttggctctcgtctgaacagccctct

SEQ ID NO: 5064782 - DNA, 25 bp, Homo sapien
tctacagtgtgatgctcaagaccaa

SEQ ID NO: 5064783 - DNA, 25 bp, Homo sapien
tcaagaccaaggaggtgacaatccc

SEQ ID NO: 5064784 - DNA, 25 bp, Homo sapien
caccggcattgtgtgtagaccttgg

SEQ ID NO: 5064785 - DNA, 25 bp, Homo sapien
tgtttgcaagccaagaatcgaggcc

SEQ ID NO: 5064786 - DNA, 25 bp, Homo sapien
gcccagtgcggcccatgcagatgct

SEQ ID NO: 5064787 - DNA, 25 bp, Homo sapien
agaggcttaagagctggcccagtgc

SEQ ID NO: 5064788 - DNA, 25 bp, Homo sapien
catgggcaagcttggagaggcttaa

SEQ ID NO: 5064789 - DNA, 25 bp, Homo sapien
ctggcagcgtgcaccacatgggcaa

SEQ ID NO: 5064790 - DNA, 25 bp, Homo sapien
ccaggatataagagtcgtttttgaa

SEQ ID NO: 5064791 - DNA, 25 bp, Homo sapien
ggaaatctgcccaggagagtttgcc

SEQ ID NO: 5064792 - DNA, 25 bp, Homo sapien
gccgaagctgggcaatttaaccagg

SEQ ID NO: 5064793 - DNA, 25 bp, Homo sapien
gggctcccatattctcgagtcagag

SEQ ID NO: 5064794 - DNA, 25 bp, Homo sapien
cagacatgcctagtgaccacacagg

SEQ ID NO: 5064795 - DNA, 25 bp, Homo sapien
gaatgactctcacgttaccagctat

SEQ ID NO: 5064796 - DNA, 25 bp, Homo sapien
tctcagggcagatgcaaggaataca

SEQ ID NO: 5064797 - DNA, 25 bp, Homo sapien
attaaggtgtgggagacgcagcaac

SEQ ID NO: 5064798 - DNA, 25 bp, Homo sapien
gcatctctgctaactgatcctgagg

SEQ ID NO: 5064799 - DNA, 25 bp, Homo sapien
caaggagccgtaggccatgctagat

SEQ ID NO: 5064800 - DNA, 25 bp, Homo sapien
cagaggcccatggatcatcggtatc

SEQ ID NO: 5064801 - DNA, 25 bp, Homo sapien
gcacggaattggctccttcatagga

SEQ ID NO: 5064802 - DNA, 25 bp, Homo sapien
ctactggagcccggggaccaccctg

SEQ ID NO: 5064803 - DNA, 25 bp, Homo sapien
accctgcaccagttccacctgtgca

SEQ ID NO: 5064804 - DNA, 25 bp, Homo sapien
gggaccaccctgcaccagttccacc

SEQ ID NO: 5064805 - DNA, 25 bp, Homo sapien
gcaccagttccacctgtgcagtggc

SEQ ID NO: 5064806 - DNA, 25 bp, Homo sapien
ctgtgggcaaaacaagtgccacttt

SEQ ID NO: 5064807 - DNA, 25 bp, Homo sapien
aagtgccactttgtgctcttaagca

SEQ ID NO: 5064808 - DNA, 25 bp, Homo sapien
agtgccactttgtgctcttaagcaa

SEQ ID NO: 5064809 - DNA, 25 bp, Homo sapien
gggcaaaacaagtgccactttgtgc

SEQ ID NO: 5064810 - DNA, 25 bp, Homo sapien
tccccttggcgggtaggcactattc

SEQ ID NO: 5064811 - DNA, 25 bp, Homo sapien
aagctggctttcatctgccggcgac

SEQ ID NO: 5064812 - DNA, 25 bp, Homo sapien
tataacacggccagtcttttgaagt

SEQ ID NO: 5064813 - DNA, 25 bp, Homo sapien
aatagttccctgaagtcgacgctga

SEQ ID NO: 5064814 - DNA, 25 bp, Homo sapien
ggccagcatctcccatcgcatggcc

SEQ ID NO: 5064815 - DNA, 25 bp, Homo sapien
gccagcatctcccatcgcatggcct

SEQ ID NO: 5064816 - DNA, 25 bp, Homo sapien
ccagcatctcccatcgcatggcctc

SEQ ID NO: 5064817 - DNA, 25 bp, Homo sapien
caaaccgatgaaacaccgtgcaggc

SEQ ID NO: 5064818 - DNA, 25 bp, Homo sapien
tcttaagcgggcatcacagacagac

SEQ ID NO: 5064819 - DNA, 25 bp, Homo sapien
acatgatatctgactctgcgtggca

SEQ ID NO: 5064820 - DNA, 25 bp, Homo sapien
cggacacctgtgcagtctggaagaa

SEQ ID NO: 5064821 - DNA, 25 bp, Homo sapien
cttgaggggctgagacgcacagcca

SEQ ID NO: 5064822 - DNA, 25 bp, Homo sapien
gagcttgaggggctgagacgcacag

SEQ ID NO: 5064823 - DNA, 25 bp, Homo sapien
cagctggctccacgaactgccccgt

SEQ ID NO: 5064824 - DNA, 25 bp, Homo sapien
tgccccgtggctccgcaaagcccat

SEQ ID NO: 5064825 - DNA, 25 bp, Homo sapien
ccagcaatttgagcggcgcaaggca

SEQ ID NO: 5064826 - DNA, 25 bp, Homo sapien
cctttcctctgcgtcagcatgtcag

SEQ ID NO: 5064827 - DNA, 25 bp, Homo sapien
gtcagtgtgagttcctctgcctctg

SEQ ID NO: 5064828 - DNA, 25 bp, Homo sapien
gcccagcaatttgagcggcgcaagg

SEQ ID NO: 5064829 - DNA, 25 bp, Homo sapien
cagaaaaccgggatgtcacagatac

SEQ ID NO: 5064830 - DNA, 25 bp, Homo sapien
gaaaaccgggatgtcacagatactc

SEQ ID NO: 5064831 - DNA, 25 bp, Homo sapien
atgtcacagatactctgggcctcac

SEQ ID NO: 5064832 - DNA, 25 bp, Homo sapien
ggatgtcacagatactctgggcctc

SEQ ID NO: 5064833 - DNA, 25 bp, Homo sapien
acatagccagatccgggactcggcg

SEQ ID NO: 5064834 - DNA, 25 bp, Homo sapien
tcacatagccagatccgggactcgg

SEQ ID NO: 5064835 - DNA, 25 bp, Homo sapien
caagcactcacatagccagatccgg

SEQ ID NO: 5064836 - DNA, 25 bp, Homo sapien
cactcacatagccagatccgggact

SEQ ID NO: 5064837 - DNA, 25 bp, Homo sapien
agaagagacctgtctgccctaggct

SEQ ID NO: 5064838 - DNA, 25 bp, Homo sapien
gtgtgatgtcagcatactgtctttc

SEQ ID NO: 5064839 - DNA, 25 bp, Homo sapien
ggtgtgatgtcagcatactgtcttt

SEQ ID NO: 5064840 - DNA, 25 bp, Homo sapien
ttgtccctttttggctatgagaacc

SEQ ID NO: 5064841 - DNA, 25 bp, Homo sapien
tatgagaaccaactcttgttgggac

SEQ ID NO: 5064842 - DNA, 25 bp, Homo sapien
ggaaccctgataagcccacacttga

SEQ ID NO: 5064843 - DNA, 25 bp, Homo sapien
gagtgttccccttcctggaattctc

SEQ ID NO: 5064844 - DNA, 25 bp, Homo sapien
gggaacccctggagcttccatgtgg

SEQ ID NO: 5064845 - DNA, 25 bp, Homo sapien
aacccctggagcttccatgtgggcc

SEQ ID NO: 5064846 - DNA, 25 bp, Homo sapien
cctggagcttccatgtgggccccaa

SEQ ID NO: 5064847 - DNA, 25 bp, Homo sapien
gagcttccatgtgggccccaactgc

SEQ ID NO: 5064848 - DNA, 25 bp, Homo sapien
cggctcaggcaatacttccacttca

SEQ ID NO: 5064849 - DNA, 25 bp, Homo sapien
gtgtgagacacaatgcctggcttct

SEQ ID NO: 5064850 - DNA, 25 bp, Homo sapien
ctcggctcaggcaatacttccactt

SEQ ID NO: 5064851 - DNA, 25 bp, Homo sapien
accatacccagctaaatgtttaagt

SEQ ID NO: 5064852 - DNA, 25 bp, Homo sapien
gcactgtgggggcacctctactcgg

SEQ ID NO: 5064853 - DNA, 25 bp, Homo sapien
ggccacgagtaaagccatgtccttc

SEQ ID NO: 5064854 - DNA, 25 bp, Homo sapien
gggcacctctactcggccacgagta

SEQ ID NO: 5064855 - DNA, 25 bp, Homo sapien
tctactcggccacgagtaaagccat

SEQ ID NO: 5064856 - DNA, 25 bp, Homo sapien
agatgttctcgagcatgcatttggg

SEQ ID NO: 5064857 - DNA, 25 bp, Homo sapien
gcaaatagcttttcagggcctcaag

SEQ ID NO: 5064858 - DNA, 25 bp, Homo sapien
cagggtctcctcctatacaagggca

SEQ ID NO: 5064859 - DNA, 25 bp, Homo sapien
gggcagccatagagagatgttctcg

SEQ ID NO: 5064860 - DNA, 25 bp, Homo sapien
aggtaaagcccaagtccaaggagca

SEQ ID NO: 5064861 - DNA, 25 bp, Homo sapien
aagtccaaggagcaccatagacagt

SEQ ID NO: 5064862 - DNA, 25 bp, Homo sapien
ggcagtcaggctcggggcccaggaa

SEQ ID NO: 5064863 - DNA, 25 bp, Homo sapien
ccttccccaggcagtcaggctcggg

SEQ ID NO: 5064864 - DNA, 25 bp, Homo sapien
tgccctcctctttgtggaaaactgg

SEQ ID NO: 5064865 - DNA, 25 bp, Homo sapien
tatggctcccgtcactctgtggttg

SEQ ID NO: 5064866 - DNA, 25 bp, Homo sapien
tggtggttggccctgccaatgagtc

SEQ ID NO: 5064867 - DNA, 25 bp, Homo sapien
gctgtcttgaaggactggccctcac

SEQ ID NO: 5064868 - DNA, 25 bp, Homo sapien
aaaagcctgcaagcctcagtgcctg

SEQ ID NO: 5064869 - DNA, 25 bp, Homo sapien
gggaaagcaaaagcctgcaagcctc

SEQ ID NO: 5064870 - DNA, 25 bp, Homo sapien
aagcctgcaagcctcagtgcctggc

SEQ ID NO: 5064871 - DNA, 25 bp, Homo sapien
agcaaaagcctgcaagcctcagtgc

SEQ ID NO: 5064872 - DNA, 25 bp, Homo sapien
aaatccagtgttcttcttccctcgg

SEQ ID NO: 5064873 - DNA, 25 bp, Homo sapien
agaaatccagtgttcttcttccctc

SEQ ID NO: 5064874 - DNA, 25 bp, Homo sapien
caacaactgaactgaagtgctttag

SEQ ID NO: 5064875 - DNA, 25 bp, Homo sapien
aacaactgaactgaagtgctttagg

SEQ ID NO: 5064876 - DNA, 25 bp, Homo sapien
gctgtgccacttccgggctctctgg

SEQ ID NO: 5064877 - DNA, 25 bp, Homo sapien
ggtgatgaataacgctgcccctgct

SEQ ID NO: 5064878 - DNA, 25 bp, Homo sapien
gctcagcctcggtgatgaataacgc

SEQ ID NO: 5064879 - DNA, 25 bp, Homo sapien
gcctcggtgatgaataacgctgccc

SEQ ID NO: 5064880 - DNA, 25 bp, Homo sapien
tacgtgaacacaaacgctgagaagg

SEQ ID NO: 5064881 - DNA, 25 bp, Homo sapien
agtctccccaacaggctgtgtccag

SEQ ID NO: 5064882 - DNA, 25 bp, Homo sapien
ctgagaaggaccagtctccccaaca

SEQ ID NO: 5064883 - DNA, 25 bp, Homo sapien
cagaggggggaccatcccctacgtg

SEQ ID NO: 5064884 - DNA, 25 bp, Homo sapien
caagagttgctgtcctgcgctggcg

SEQ ID NO: 5064885 - DNA, 25 bp, Homo sapien
caaatccaatggacacagttaccca

SEQ ID NO: 5064886 - DNA, 25 bp, Homo sapien
aggcctgtgtactcggctgcagccc

SEQ ID NO: 5064887 - DNA, 25 bp, Homo sapien
gattctgtgataataccacggccct

SEQ ID NO: 5064888 - DNA, 25 bp, Homo sapien
gcactcactgggctccacgtgacga

SEQ ID NO: 5064889 - DNA, 25 bp, Homo sapien
tgggctccacgtgacgatctacacg

SEQ ID NO: 5064890 - DNA, 25 bp, Homo sapien
tcactgggctccacgtgacgatcta

SEQ ID NO: 5064891 - DNA, 25 bp, Homo sapien
cccgatattcccagagccctgtgca

SEQ ID NO: 5064892 - DNA, 25 bp, Homo sapien
gtcggcgagtccagtcgtgccccag

SEQ ID NO: 5064893 - DNA, 25 bp, Homo sapien
cccctgtgtagcaggcacggtgccc

SEQ ID NO: 5064894 - DNA, 25 bp, Homo sapien
catcacaccggtcggcgagtccagt

SEQ ID NO: 5064895 - DNA, 25 bp, Homo sapien
tcctgccaagggtggaacactgctt

SEQ ID NO: 5064896 - DNA, 25 bp, Homo sapien
tatttgtcagagactaatgggctcg

SEQ ID NO: 5064897 - DNA, 25 bp, Homo sapien
tctggctggcctataagggctgtat

SEQ ID NO: 5064898 - DNA, 25 bp, Homo sapien
gcagcagagaagtccattaaatcag

SEQ ID NO: 5064899 - DNA, 25 bp, Homo sapien
tttcagagctcaagtaagaacccag

SEQ ID NO: 5064900 - DNA, 25 bp, Homo sapien
tggacgcttgggttgctgccaccat

SEQ ID NO: 5064901 - DNA, 25 bp, Homo sapien
gcacttatttagactgtgactctgg

SEQ ID NO: 5064902 - DNA, 25 bp, Homo sapien
cacccacatggtagcatgcatcagg

SEQ ID NO: 5064903 - DNA, 25 bp, Homo sapien
ggcagtttgggctacactcagcaga

SEQ ID NO: 5064904 - DNA, 25 bp, Homo sapien
ctgtgcccggtgtcttggacctggg

SEQ ID NO: 5064905 - DNA, 25 bp, Homo sapien
gacctggggatgtcagaagcttctc

SEQ ID NO: 5064906 - DNA, 25 bp, Homo sapien
tggcacagacagtgcccgggcccat

SEQ ID NO: 5064907 - DNA, 25 bp, Homo sapien
agcttctcccagacccaccccaagg

SEQ ID NO: 5064908 - DNA, 25 bp, Homo sapien
gagagattcccatactgacgattgg

SEQ ID NO: 5064909 - DNA, 25 bp, Homo sapien
gcgtcccttatgttagacactcaca

SEQ ID NO: 5064910 - DNA, 25 bp, Homo sapien
tattggagaccaagtcaagcatggc

SEQ ID NO: 5064911 - DNA, 25 bp, Homo sapien
tccaaatgccaatgggtgccgatgt

SEQ ID NO: 5064912 - DNA, 25 bp, Homo sapien
tgcgttgctggttcaattccttcaa

SEQ ID NO: 5064913 - DNA, 25 bp, Homo sapien
ttttcaggtctgtaaacgctttcgc

SEQ ID NO: 5064914 - DNA, 25 bp, Homo sapien
gaacattttggtggacttcaaactc

SEQ ID NO: 5064915 - DNA, 25 bp, Homo sapien
gaatcaggtccttgaaatacaagct

SEQ ID NO: 5064916 - DNA, 25 bp, Homo sapien
cgaccacagctggaaggaaggcaaa

SEQ ID NO: 5064917 - DNA, 25 bp, Homo sapien
ccgaccacagctggaaggaaggcaa

SEQ ID NO: 5064918 - DNA, 25 bp, Homo sapien
gaccacagctggaaggaaggcaaac

SEQ ID NO: 5064919 - DNA, 25 bp, Homo sapien
gcaagtccaaacacggcattgggaa

SEQ ID NO: 5064920 - DNA, 25 bp, Homo sapien
ctgccccttcctgcgaggctgaggg

SEQ ID NO: 5064921 - DNA, 25 bp, Homo sapien
ctctatgtgaaaggccggatcggag

SEQ ID NO: 5064922 - DNA, 25 bp, Homo sapien
tgagatgggaagtcccaaagagcct

SEQ ID NO: 5064923 - DNA, 25 bp, Homo sapien
ggtgcttgcctttccgtcctggtcc

SEQ ID NO: 5064924 - DNA, 25 bp, Homo sapien
ccatcccccggaggtgtcagagctg

SEQ ID NO: 5064925 - DNA, 25 bp, Homo sapien
gaaccaatttcctgatttatagatg

SEQ ID NO: 5064926 - DNA, 25 bp, Homo sapien
ccgtgacctctgatgcccgtgacac

SEQ ID NO: 5064927 - DNA, 25 bp, Homo sapien
aggtcatgatgtggctttggaggga

SEQ ID NO: 5064928 - DNA, 25 bp, Homo sapien
caggtcatgatgtggctttggaggg

SEQ ID NO: 5064929 - DNA, 25 bp, Homo sapien
tgctccttaggcctcttctctctga

SEQ ID NO: 5064930 - DNA, 25 bp, Homo sapien
acacacacggttctcatccacacag

SEQ ID NO: 5064931 - DNA, 25 bp, Homo sapien
agactgtcttgggactggaccccag

SEQ ID NO: 5064932 - DNA, 25 bp, Homo sapien
tgatgggtgaccctggtcgctgacg

SEQ ID NO: 5064933 - DNA, 25 bp, Homo sapien
ccagagggcgagggctgtgcctctt

SEQ ID NO: 5064934 - DNA, 25 bp, Homo sapien
ctgagttcaaagaggaggcgaggcc

SEQ ID NO: 5064935 - DNA, 25 bp, Homo sapien
agttcaaagaggaggcgaggcccca

SEQ ID NO: 5064936 - DNA, 25 bp, Homo sapien
agagggcgagggctgtgcctcttac

SEQ ID NO: 5064937 - DNA, 25 bp, Homo sapien
ctgcagggaaaggccgcagaggcac

SEQ ID NO: 5064938 - DNA, 25 bp, Homo sapien
agggaaaggccgcagaggcacaggg

SEQ ID NO: 5064939 - DNA, 25 bp, Homo sapien
gaatgtgatgggggctctttcagaa

SEQ ID NO: 5064940 - DNA, 25 bp, Homo sapien
cacaggggaatgtgatgggggctct

SEQ ID NO: 5064941 - DNA, 25 bp, Homo sapien
tggagggggccgctgggcagatgat

SEQ ID NO: 5064942 - DNA, 25 bp, Homo sapien
gtggagggggccgctgggcagatga

SEQ ID NO: 5064943 - DNA, 25 bp, Homo sapien
ctgtggggtggagggggccgctggg

SEQ ID NO: 5064944 - DNA, 25 bp, Homo sapien
ggggtggagggggccgctgggcaga

SEQ ID NO: 5064945 - DNA, 25 bp, Homo sapien
tgtctagactgaggaggacccctgg

SEQ ID NO: 5064946 - DNA, 25 bp, Homo sapien
aggtgccgtggagcatcgcaggtgc

SEQ ID NO: 5064947 - DNA, 25 bp, Homo sapien
tcgcaggtgctgtctagactgagga

SEQ ID NO: 5064948 - DNA, 25 bp, Homo sapien
gtgctgtctagactgaggaggaccc

SEQ ID NO: 5064949 - DNA, 25 bp, Homo sapien
catatgcactgaccctaagagccgt

SEQ ID NO: 5064950 - DNA, 25 bp, Homo sapien
cgagactcttccctacgtggcagta

SEQ ID NO: 5064951 - DNA, 25 bp, Homo sapien
gatggatttccatacctcggtggct

SEQ ID NO: 5064952 - DNA, 25 bp, Homo sapien
ctgtcgaggtgtccagcaagcgagc

SEQ ID NO: 5064953 - DNA, 25 bp, Homo sapien
ggcaagatgcttgtgacgggtccct

SEQ ID NO: 5064954 - DNA, 25 bp, Homo sapien
ggtccactcactcgcttctcaggag

SEQ ID NO: 5064955 - DNA, 25 bp, Homo sapien
gtcccttgcgcgcacctgcggctgg

SEQ ID NO: 5064956 - DNA, 25 bp, Homo sapien
cttgcgcgcacctgcggctggcggt

SEQ ID NO: 5064957 - DNA, 25 bp, Homo sapien
agattctccaacgtgacccaggctt

SEQ ID NO: 5064958 - DNA, 25 bp, Homo sapien
ctgaacctaatgctgtgacacggga

SEQ ID NO: 5064959 - DNA, 25 bp, Homo sapien
agagatatcctctgatcgccccagg

SEQ ID NO: 5064960 - DNA, 25 bp, Homo sapien
ggaaacaatacggttcagcccactg

SEQ ID NO: 5064961 - DNA, 25 bp, Homo sapien
cgagaaaggacacgcagactttgca

SEQ ID NO: 5064962 - DNA, 25 bp, Homo sapien
accagggagcccgtgtagacaaact

SEQ ID NO: 5064963 - DNA, 25 bp, Homo sapien
tgtggaactggaacttgctggccgc

SEQ ID NO: 5064964 - DNA, 25 bp, Homo sapien
ctgcaggttcgacaggacgagctcc

SEQ ID NO: 5064965 - DNA, 25 bp, Homo sapien
ggaagatctgcagcgcgaaggcctt

SEQ ID NO: 5064966 - DNA, 25 bp, Homo sapien
gggtccttcttgatccacttgatga

SEQ ID NO: 5064967 - DNA, 25 bp, Homo sapien
gatgactgtctcgtacaccagctcc

SEQ ID NO: 5064968 - DNA, 25 bp, Homo sapien
gagacgtaggcgatgaagtcgtcct

SEQ ID NO: 5064969 - DNA, 25 bp, Homo sapien
tgcggctcttggccgacttgggtct

SEQ ID NO: 5064970 - DNA, 25 bp, Homo sapien
catttggtccattgcgggctgtcca

SEQ ID NO: 5064971 - DNA, 25 bp, Homo sapien
cagagcaggtatgggctcctccagc

SEQ ID NO: 5064972 - DNA, 25 bp, Homo sapien
ccctcaacaatcagagcaggtatgg

SEQ ID NO: 5064973 - DNA, 25 bp, Homo sapien
tagcgtttggcctcgttcaccaggt

SEQ ID NO: 5064974 - DNA, 25 bp, Homo sapien
caggtcccggcaggcttctgatgac

SEQ ID NO: 5064975 - DNA, 25 bp, Homo sapien
gatcagctcttcattgtcaaccaca

SEQ ID NO: 5064976 - DNA, 25 bp, Homo sapien
ggcttctgatgacttgatcagctct

SEQ ID NO: 5064977 - DNA, 25 bp, Homo sapien
tgggacacactctaagactgtcggc

SEQ ID NO: 5064978 - DNA, 25 bp, Homo sapien
actctaagactgtcggcatctgtgc

SEQ ID NO: 5064979 - DNA, 25 bp, Homo sapien
cagggacatggatgggcgcccttgg

SEQ ID NO: 5064980 - DNA, 25 bp, Homo sapien
atgggcgcccttgggacacactcta

SEQ ID NO: 5064981 - DNA, 25 bp, Homo sapien
agatgttgtcccctgcactcactac

SEQ ID NO: 5064982 - DNA, 25 bp, Homo sapien
ctgggtcatccccaccatctgacgg

SEQ ID NO: 5064983 - DNA, 25 bp, Homo sapien
gaactcgcggtcatagaagggcagc

SEQ ID NO: 5064984 - DNA, 25 bp, Homo sapien
aaggggtaccacttgttgttctgcg

SEQ ID NO: 5064985 - DNA, 25 bp, Homo sapien
tctggagacgaggttccagttatca

SEQ ID NO: 5064986 - DNA, 25 bp, Homo sapien
tagacgaggctattgtgccgacagc

SEQ ID NO: 5064987 - DNA, 25 bp, Homo sapien
taaatcttcccatcgtagacgaggc

SEQ ID NO: 5064988 - DNA, 25 bp, Homo sapien
tatcaagcagggacatgtagcacca

SEQ ID NO: 5064989 - DNA, 25 bp, Homo sapien
gagcatgcccctgtcctgaccgtgg

SEQ ID NO: 5064990 - DNA, 25 bp, Homo sapien
tggtgagcaaagagcatgcccctgt

SEQ ID NO: 5064991 - DNA, 25 bp, Homo sapien
tgagcaaagagcatgcccctgtcct

SEQ ID NO: 5064992 - DNA, 25 bp, Homo sapien
cttggtgagcaaagagcatgcccct

SEQ ID NO: 5064993 - DNA, 25 bp, Homo sapien
ttgggaggtacagtgagtgacgtga

SEQ ID NO: 5064994 - DNA, 25 bp, Homo sapien
tgggaggtacagtgagtgacgtgat

SEQ ID NO: 5064995 - DNA, 25 bp, Homo sapien
gtgttgggaggtacagtgagtgacg

SEQ ID NO: 5064996 - DNA, 25 bp, Homo sapien
tgttgggaggtacagtgagtgacgt

SEQ ID NO: 5064997 - DNA, 25 bp, Homo sapien
tgactgcccatatgaatggtccagg

SEQ ID NO: 5064998 - DNA, 25 bp, Homo sapien
cccatatgaatggtccaggctctgc

SEQ ID NO: 5064999 - DNA, 25 bp, Homo sapien
tgcccccggtgctgtgactgaagag

SEQ ID NO: 5065000 - DNA, 25 bp, Homo sapien
gggatgactgcccatatgaatggtc

SEQ ID NO: 5065001 - DNA, 25 bp, Homo sapien
ctaaatgggttgtcgggacagaagc

SEQ ID NO: 5065002 - DNA, 25 bp, Homo sapien
tgtcatcccatctgcttgtatccca

SEQ ID NO: 5065003 - DNA, 25 bp, Homo sapien
gatgtcatcccatctgcttgtatcc

SEQ ID NO: 5065004 - DNA, 25 bp, Homo sapien
gcttgtctgacacctaaatgggttg

SEQ ID NO: 5065005 - DNA, 25 bp, Homo sapien
cctggctcaagggaaaaggattttg

SEQ ID NO: 5065006 - DNA, 25 bp, Homo sapien
tgtattacgaacagatgtcctggtg

SEQ ID NO: 5065007 - DNA, 25 bp, Homo sapien
tagagggttggcaagaatgttctcc

SEQ ID NO: 5065008 - DNA, 25 bp, Homo sapien
gagggcaggttcacacgtggtcctt

SEQ ID NO: 5065009 - DNA, 25 bp, Homo sapien
aaagcaggactaagcctccgttctg

SEQ ID NO: 5065010 - DNA, 25 bp, Homo sapien
ccaaaagcaggactaagcctccgtt

SEQ ID NO: 5065011 - DNA, 25 bp, Homo sapien
gcaggactaagcctccgttctgctg

SEQ ID NO: 5065012 - DNA, 25 bp, Homo sapien
caggactaagcctccgttctgctgc

SEQ ID NO: 5065013 - DNA, 25 bp, Homo sapien
ggatgacaaatgatcggaagccgat

SEQ ID NO: 5065014 - DNA, 25 bp, Homo sapien
tcattttcacgtggcaatgcccatg

SEQ ID NO: 5065015 - DNA, 25 bp, Homo sapien
tgctttctggtgacacatggcggtg

SEQ ID NO: 5065016 - DNA, 25 bp, Homo sapien
catttgtcaagtgtccaattagcca

SEQ ID NO: 5065017 - DNA, 25 bp, Homo sapien
tttactcctacagagaaaatgtctc

SEQ ID NO: 5065018 - DNA, 25 bp, Homo sapien
gaaggcccatacaggcaacccctgg

SEQ ID NO: 5065019 - DNA, 25 bp, Homo sapien
ccatgctgaactttcacagccagaa

SEQ ID NO: 5065020 - DNA, 25 bp, Homo sapien
cagggaaggcccatacaggcaaccc

SEQ ID NO: 5065021 - DNA, 25 bp, Homo sapien
gcccatgctgaactttcacagccag

SEQ ID NO: 5065022 - DNA, 25 bp, Homo sapien
catgctgctcactgttcggtgagtg

SEQ ID NO: 5065023 - DNA, 25 bp, Homo sapien
tgctgctcactgttcggtgagtgcc

SEQ ID NO: 5065024 - DNA, 25 bp, Homo sapien
ttcggtgagtgcctggacgcaatgc

SEQ ID NO: 5065025 - DNA, 25 bp, Homo sapien
tggacgcaatgcgaggcctgggcat

SEQ ID NO: 5065026 - DNA, 25 bp, Homo sapien
cgcctcccattggttggtgatggtg

SEQ ID NO: 5065027 - DNA, 25 bp, Homo sapien
ccattggttggtgatggtgtcgtac

SEQ ID NO: 5065028 - DNA, 25 bp, Homo sapien
cccattggttggtgatggtgtcgta

SEQ ID NO: 5065029 - DNA, 25 bp, Homo sapien
ctcccattggttggtgatggtgtcg

SEQ ID NO: 5065030 - DNA, 25 bp, Homo sapien
ttggtctgaggaacgtaagactgga

SEQ ID NO: 5065031 - DNA, 25 bp, Homo sapien
gggactcgatgaagctccacgtgtt

SEQ ID NO: 5065032 - DNA, 25 bp, Homo sapien
aaacacgtagatcttgccgccacac

SEQ ID NO: 5065033 - DNA, 25 bp, Homo sapien
cgttcaccccaccaaacacgtagat

SEQ ID NO: 5065034 - DNA, 25 bp, Homo sapien
tggttcatgtttgggcccgccttaa

SEQ ID NO: 5065035 - DNA, 25 bp, Homo sapien
cctttctcagggtcgtagatggtgg

SEQ ID NO: 5065036 - DNA, 25 bp, Homo sapien
ggtggtagctctggcataagccccg

SEQ ID NO: 5065037 - DNA, 25 bp, Homo sapien
acgaagccattgagcgtgacagcgg

SEQ ID NO: 5065038 - DNA, 25 bp, Homo sapien
ctccagttgcataaatcttgccatc

SEQ ID NO: 5065039 - DNA, 25 bp, Homo sapien
tccagttgcataaatcttgccatca

SEQ ID NO: 5065040 - DNA, 25 bp, Homo sapien
gaggagggtccatgtgttggttgtg

SEQ ID NO: 5065041 - DNA, 25 bp, Homo sapien
tgtgttggttgtgggctcgtaggcc

SEQ ID NO: 5065042 - DNA, 25 bp, Homo sapien
ggaggagggtccatgtgttggttgt

SEQ ID NO: 5065043 - DNA, 25 bp, Homo sapien
ttggttgtgggctcgtaggcctcca

SEQ ID NO: 5065044 - DNA, 25 bp, Homo sapien
cgcagccgtgtctgaacacagggca

SEQ ID NO: 5065045 - DNA, 25 bp, Homo sapien
acgcagccgtgtctgaacacagggc

SEQ ID NO: 5065046 - DNA, 25 bp, Homo sapien
gacgcagccgtgtctgaacacaggg

SEQ ID NO: 5065047 - DNA, 25 bp, Homo sapien
cagccgctttgaatatatttcttta

SEQ ID NO: 5065048 - DNA, 25 bp, Homo sapien
tcagccgctttgaatatatttcttt

SEQ ID NO: 5065049 - DNA, 25 bp, Homo sapien
cgctttgaatatatttctttatcac

SEQ ID NO: 5065050 - DNA, 25 bp, Homo sapien
gccgctttgaatatatttctttatc

SEQ ID NO: 5065051 - DNA, 25 bp, Homo sapien
tacgtgaaactctattgcacctggc

SEQ ID NO: 5065052 - DNA, 25 bp, Homo sapien
cccatggcgggatcgtggttcctgc

SEQ ID NO: 5065053 - DNA, 25 bp, Homo sapien
gtggcacttgcctcaccagacttgt

SEQ ID NO: 5065054 - DNA, 25 bp, Homo sapien
gcggtgcctccgtttcatccaaagg

SEQ ID NO: 5065055 - DNA, 25 bp, Homo sapien
taagagaaagctagcgcaatcactg

SEQ ID NO: 5065056 - DNA, 25 bp, Homo sapien
tgtgatgcacagtattgtccctcgt

SEQ ID NO: 5065057 - DNA, 25 bp, Homo sapien
tgtgaaggacagaccgctgtccctg

SEQ ID NO: 5065058 - DNA, 25 bp, Homo sapien
tggctccgcgtgggcagctgggctt

SEQ ID NO: 5065059 - DNA, 25 bp, Homo sapien
tggcactacctacaaagagctttgg

SEQ ID NO: 5065060 - DNA, 25 bp, Homo sapien
tatcaagaaaatgcctcagaaatct

SEQ ID NO: 5065061 - DNA, 25 bp, Homo sapien
gagagatcctctattctgcacatag

SEQ ID NO: 5065062 - DNA, 25 bp, Homo sapien
attatccctcttgtggcctgctcct

SEQ ID NO: 5065063 - DNA, 25 bp, Homo sapien
ttgggcacagcttttatggggctgt

SEQ ID NO: 5065064 - DNA, 25 bp, Homo sapien
gagccagaaccgggctccttctaga

SEQ ID NO: 5065065 - DNA, 25 bp, Homo sapien
agccagaaccgggctccttctagag

SEQ ID NO: 5065066 - DNA, 25 bp, Homo sapien
taaaaactgcataacgaagctcggt

SEQ ID NO: 5065067 - DNA, 25 bp, Homo sapien
tactgaacgatggaaagcgtgtcct

SEQ ID NO: 5065068 - DNA, 25 bp, Homo sapien
cttcaactcaacagcgcagtggcgg

SEQ ID NO: 5065069 - DNA, 25 bp, Homo sapien
gttgatgcccaacgttagaactgga

SEQ ID NO: 5065070 - DNA, 25 bp, Homo sapien
ttgagtctcgctgacaactagaacc

SEQ ID NO: 5065071 - DNA, 25 bp, Homo sapien
gagagaaacgaatttcaatgtcatc

SEQ ID NO: 5065072 - DNA, 25 bp, Homo sapien
tttgctccagtgtgatagatgagga

SEQ ID NO: 5065073 - DNA, 25 bp, Homo sapien
cacagaaatagccagttttgctcca

SEQ ID NO: 5065074 - DNA, 25 bp, Homo sapien
tataacaagaacttaacagtaaaca

SEQ ID NO: 5065075 - DNA, 25 bp, Homo sapien
cagtaaacatatactatgtacaata

SEQ ID NO: 5065076 - DNA, 25 bp, Homo sapien
caagaacttaacagtaaacatatac

SEQ ID NO: 5065077 - DNA, 25 bp, Homo sapien
taaacatatactatgtacaatacca

SEQ ID NO: 5065078 - DNA, 25 bp, Homo sapien
gcaggacgatggcacacaaagatta

SEQ ID NO: 5065079 - DNA, 25 bp, Homo sapien
gatggcacacaaagattacgttggc

SEQ ID NO: 5065080 - DNA, 25 bp, Homo sapien
cgatggcacacaaagattacgttgg

SEQ ID NO: 5065081 - DNA, 25 bp, Homo sapien
ctgtggcaggacgatggcacacaaa

SEQ ID NO: 5065082 - DNA, 25 bp, Homo sapien
gaagctttcagttgcacaagtgtaa

SEQ ID NO: 5065083 - DNA, 25 bp, Homo sapien
catgagctggacttgccatgtggct

SEQ ID NO: 5065084 - DNA, 25 bp, Homo sapien
cagtgccagcgtgtttgcaagtccc

SEQ ID NO: 5065085 - DNA, 25 bp, Homo sapien
tgataccagtgggaagctaacagct

SEQ ID NO: 5065086 - DNA, 25 bp, Homo sapien
tggatgctcccctttgtctcatgga

SEQ ID NO: 5065087 - DNA, 25 bp, Homo sapien
tacacagactcttcgtagacccaga

SEQ ID NO: 5065088 - DNA, 25 bp, Homo sapien
catggactcctgatatagtggacac

SEQ ID NO: 5065089 - DNA, 25 bp, Homo sapien
tagcaaggtaggtctatacagcagc

SEQ ID NO: 5065090 - DNA, 25 bp, Homo sapien
gcctcactgctctctaaaagcgttg

SEQ ID NO: 5065091 - DNA, 25 bp, Homo sapien
gctcagagtggattcaccaggtcag

SEQ ID NO: 5065092 - DNA, 25 bp, Homo sapien
caggtgtgaatacttctgtggctcc

SEQ ID NO: 5065093 - DNA, 25 bp, Homo sapien
tcctcatgagcagttggagtccctc

SEQ ID NO: 5065094 - DNA, 25 bp, Homo sapien
tggctggtgctgcacatcagggtga

SEQ ID NO: 5065095 - DNA, 25 bp, Homo sapien
gagttggggtaatctggctggtgct

SEQ ID NO: 5065096 - DNA, 25 bp, Homo sapien
tcatgtgctgttgccagtggagttg

SEQ ID NO: 5065097 - DNA, 25 bp, Homo sapien
tgcacatcagggtgaggcggcccat

SEQ ID NO: 5065098 - DNA, 25 bp, Homo sapien
ctgtataggaccacttgcgtcataa

SEQ ID NO: 5065099 - DNA, 25 bp, Homo sapien
taggaccacttgcgtcataagacat

SEQ ID NO: 5065100 - DNA, 25 bp, Homo sapien
tataggaccacttgcgtcataagac

SEQ ID NO: 5065101 - DNA, 25 bp, Homo sapien
gtataggaccacttgcgtcataaga

SEQ ID NO: 5065102 - DNA, 25 bp, Homo sapien
cctttccttgacttaatgccaactg

SEQ ID NO: 5065103 - DNA, 25 bp, Homo sapien
gttttcctgacagcacctcttgttc

SEQ ID NO: 5065104 - DNA, 25 bp, Homo sapien
aagattttgcacagatggtcccctc

SEQ ID NO: 5065105 - DNA, 25 bp, Homo sapien
agagttaccttcagagtgcttggag

SEQ ID NO: 5065106 - DNA, 25 bp, Homo sapien
tattcagatcttggcctttctacag

SEQ ID NO: 5065107 - DNA, 25 bp, Homo sapien
taggcctctctactctggaaaatca

SEQ ID NO: 5065108 - DNA, 25 bp, Homo sapien
tatatcctgtattgctgctgagaag

SEQ ID NO: 5065109 - DNA, 25 bp, Homo sapien
ctggaatttcacagacctgtctggg

SEQ ID NO: 5065110 - DNA, 25 bp, Homo sapien
tacttatccataagatgggccacag

SEQ ID NO: 5065111 - DNA, 25 bp, Homo sapien
ccttcttggctatgcaacatgtgac

SEQ ID NO: 5065112 - DNA, 25 bp, Homo sapien
catggtggttactgcaatgattaca

SEQ ID NO: 5065113 - DNA, 25 bp, Homo sapien
aggtaatagtatgcggctggagtca

SEQ ID NO: 5065114 - DNA, 25 bp, Homo sapien
tttgtaatcacattgtaagcttgaa

SEQ ID NO: 5065115 - DNA, 25 bp, Homo sapien
taggtatcttcagtgtcaggtcccg

SEQ ID NO: 5065116 - DNA, 25 bp, Homo sapien
cttgaatttgggcttgtacctgcat

SEQ ID NO: 5065117 - DNA, 25 bp, Homo sapien
ggtcccgtagctgaatgccattgtt

SEQ ID NO: 5065118 - DNA, 25 bp, Homo sapien
gagagaacactctggctatctccag

SEQ ID NO: 5065119 - DNA, 25 bp, Homo sapien
tactggttagtgcatatgtgtgaga

SEQ ID NO: 5065120 - DNA, 25 bp, Homo sapien
tctccaggaggtcctaccctagtgt

SEQ ID NO: 5065121 - DNA, 25 bp, Homo sapien
tgcagggcagattaccagaaagaag

SEQ ID NO: 5065122 - DNA, 25 bp, Homo sapien
tgttgggatagaagatacactttat

SEQ ID NO: 5065123 - DNA, 25 bp, Homo sapien
tcctactttggattgttgcacaact

SEQ ID NO: 5065124 - DNA, 25 bp, Homo sapien
tcaagccgaggtagaaagccagtgg

SEQ ID NO: 5065125 - DNA, 25 bp, Homo sapien
ttttagagacaatatgccagatcca

SEQ ID NO: 5065126 - DNA, 25 bp, Homo sapien
agaggtatttaattgggatatggtg

SEQ ID NO: 5065127 - DNA, 25 bp, Homo sapien
tatggtggggcgcatcactgtaatt

SEQ ID NO: 5065128 - DNA, 25 bp, Homo sapien
gttgatggatgctggttatgaaaga

SEQ ID NO: 5065129 - DNA, 25 bp, Homo sapien
tatattaaggtagaagatatcctgg

SEQ ID NO: 5065130 - DNA, 25 bp, Homo sapien
tcagccaagtgggaaccttgcagtg

SEQ ID NO: 5065131 - DNA, 25 bp, Homo sapien
tcccaggagtgcacatgcgactcat

SEQ ID NO: 5065132 - DNA, 25 bp, Homo sapien
gcagagccgattgagacaggccctt

SEQ ID NO: 5065133 - DNA, 25 bp, Homo sapien
agggcagagccgattgagacaggcc

SEQ ID NO: 5065134 - DNA, 25 bp, Homo sapien
catgctttcgaatagcaactgcttg

SEQ ID NO: 5065135 - DNA, 25 bp, Homo sapien
taattaaacagtagagatcctcagg

SEQ ID NO: 5065136 - DNA, 25 bp, Homo sapien
acttgagtacgtagacaaacttatg

SEQ ID NO: 5065137 - DNA, 25 bp, Homo sapien
taataatattgagccagtcggtgaa

SEQ ID NO: 5065138 - DNA, 25 bp, Homo sapien
ctcactgtaatctgtgtgcttcctg

SEQ ID NO: 5065139 - DNA, 25 bp, Homo sapien
cagctcactgtaatctgtgtgcttc

SEQ ID NO: 5065140 - DNA, 25 bp, Homo sapien
ctcagctcactgtaatctgtgtgct

SEQ ID NO: 5065141 - DNA, 25 bp, Homo sapien
gacctcagctcactgtaatctgtgt

SEQ ID NO: 5065142 - DNA, 25 bp, Homo sapien
ggagtacttaaagacaccctctatg

SEQ ID NO: 5065143 - DNA, 25 bp, Homo sapien
tttcgcagacccttatttttgtaga

SEQ ID NO: 5065144 - DNA, 25 bp, Homo sapien
tcctgtttgtaattgaggagtttct

SEQ ID NO: 5065145 - DNA, 25 bp, Homo sapien
catttgccagtgtctgtaaagtctc

SEQ ID NO: 5065146 - DNA, 25 bp, Homo sapien
gaacgatctgctgtccgtgtccttg

SEQ ID NO: 5065147 - DNA, 25 bp, Homo sapien
agaagggccgcgacgctggcccctt

SEQ ID NO: 5065148 - DNA, 25 bp, Homo sapien
gcttttcaagctggcccggctcttt

SEQ ID NO: 5065149 - DNA, 25 bp, Homo sapien
ttttgtgtgaagaacagcccttgag

SEQ ID NO: 5065150 - DNA, 25 bp, Homo sapien
tcccgagtccggaggctcggaagtg

SEQ ID NO: 5065151 - DNA, 25 bp, Homo sapien
ggccagggtaagagcgcggcgtccc

SEQ ID NO: 5065152 - DNA, 25 bp, Homo sapien
gcagccatttcatctcctctcggac

SEQ ID NO: 5065153 - DNA, 25 bp, Homo sapien
cgccggcgtcactctggatgaggcc

SEQ ID NO: 5065154 - DNA, 25 bp, Homo sapien
catggtgaacacccggaagagctct

SEQ ID NO: 5065155 - DNA, 25 bp, Homo sapien
ggccggccttgctcggctctcccgg

SEQ ID NO: 5065156 - DNA, 25 bp, Homo sapien
gccttctcgggtccaagtctcctgg

SEQ ID NO: 5065157 - DNA, 25 bp, Homo sapien
tgaacacccggaagagctctctccg

SEQ ID NO: 5065158 - DNA, 25 bp, Homo sapien
tctctcttgtgctcgtctgcgctcc

SEQ ID NO: 5065159 - DNA, 25 bp, Homo sapien
gctcggctccgctggccctgactga

SEQ ID NO: 5065160 - DNA, 25 bp, Homo sapien
ggagtgtctgtgctgccggtctgca

SEQ ID NO: 5065161 - DNA, 25 bp, Homo sapien
tcgtctctcattgcccggctcggct

SEQ ID NO: 5065162 - DNA, 25 bp, Homo sapien
gggtagaaatggcggctccgctcgg

SEQ ID NO: 5065163 - DNA, 25 bp, Homo sapien
aggggtagaaatggcggctccgctc

SEQ ID NO: 5065164 - DNA, 25 bp, Homo sapien
aaggggtagaaatggcggctccgct

SEQ ID NO: 5065165 - DNA, 25 bp, Homo sapien
ggggtagaaatggcggctccgctcg

SEQ ID NO: 5065166 - DNA, 25 bp, Homo sapien
agttcagtgtcttgcctcgggtagc

SEQ ID NO: 5065167 - DNA, 25 bp, Homo sapien
aagttccagataccgcccagatgaa

SEQ ID NO: 5065168 - DNA, 25 bp, Homo sapien
tctacaggcatgaaaagtgcgactc

SEQ ID NO: 5065169 - DNA, 25 bp, Homo sapien
gcccgaactcgtcctgattagtctg

SEQ ID NO: 5065170 - DNA, 25 bp, Homo sapien
tattcttaattcttcagcgggccgg

SEQ ID NO: 5065171 - DNA, 25 bp, Homo sapien
tagaggcggctcttacagggtactc

SEQ ID NO: 5065172 - DNA, 25 bp, Homo sapien
gggatagaaaacgaccctgcctcgc

SEQ ID NO: 5065173 - DNA, 25 bp, Homo sapien
cagagttctagcatggtgtttcccc

SEQ ID NO: 5065174 - DNA, 25 bp, Homo sapien
gaatgattgggagcttagatggcca

SEQ ID NO: 5065175 - DNA, 25 bp, Homo sapien
tccaggagaggatgtggtatgcaaa

SEQ ID NO: 5065176 - DNA, 25 bp, Homo sapien
ggttccattatgaggaatcccaccc

SEQ ID NO: 5065177 - DNA, 25 bp, Homo sapien
ccagaatgctctaagtttgatgcca

SEQ ID NO: 5065178 - DNA, 25 bp, Homo sapien
tggagcccttgcttacttgttctgg

SEQ ID NO: 5065179 - DNA, 25 bp, Homo sapien
tagcctccgaatatctgcgattaca

SEQ ID NO: 5065180 - DNA, 25 bp, Homo sapien
tgtactgtagaaaacaggcaactct

SEQ ID NO: 5065181 - DNA, 25 bp, Homo sapien
cagagaaaaggtcaaattcactggg

SEQ ID NO: 5065182 - DNA, 25 bp, Homo sapien
gccttactactgtcttttgcatttc

SEQ ID NO: 5065183 - DNA, 25 bp, Homo sapien
tttaggccttactactgtcttttgc

SEQ ID NO: 5065184 - DNA, 25 bp, Homo sapien
atatttagcagattttaggccttac

SEQ ID NO: 5065185 - DNA, 25 bp, Homo sapien
taggccttactactgtcttttgcat

SEQ ID NO: 5065186 - DNA, 25 bp, Homo sapien
tagcccgggagcaaggctatgccat

SEQ ID NO: 5065187 - DNA, 25 bp, Homo sapien
tgatgttcacacaacgacgaattca

SEQ ID NO: 5065188 - DNA, 25 bp, Homo sapien
gcactacatgaccatacttagacct

SEQ ID NO: 5065189 - DNA, 25 bp, Homo sapien
gacgaattcacttacacgacacatt

SEQ ID NO: 5065190 - DNA, 25 bp, Homo sapien
ttggccgcgggctccgtttggctgg

SEQ ID NO: 5065191 - DNA, 25 bp, Homo sapien
gagcccttcagagccggagcgccgc

SEQ ID NO: 5065192 - DNA, 25 bp, Homo sapien
ctcaggcaccgcaggcaccgtttgg

SEQ ID NO: 5065193 - DNA, 25 bp, Homo sapien
tctctcggtcttcgccaggcgccca

SEQ ID NO: 5065194 - DNA, 25 bp, Homo sapien
gcataactgtaagtttcggaacgcc

SEQ ID NO: 5065195 - DNA, 25 bp, Homo sapien
tatcactggactgcgatcgtgcagc

SEQ ID NO: 5065196 - DNA, 25 bp, Homo sapien
gaaacattgtgttgcgcataactgt

SEQ ID NO: 5065197 - DNA, 25 bp, Homo sapien
tgcagcgttcgcctttgaaaataga

SEQ ID NO: 5065198 - DNA, 25 bp, Homo sapien
ctcggaggcaatgaccactccaaca

SEQ ID NO: 5065199 - DNA, 25 bp, Homo sapien
tcggaggcaatgaccactccaacat

SEQ ID NO: 5065200 - DNA, 25 bp, Homo sapien
gacatcgacataggaagacaccaac

SEQ ID NO: 5065201 - DNA, 25 bp, Homo sapien
cataggaagacaccaactctagata

SEQ ID NO: 5065202 - DNA, 25 bp, Homo sapien
cagatggacatcgacataggaagac

SEQ ID NO: 5065203 - DNA, 25 bp, Homo sapien
taggaagacaccaactctagatagt

SEQ ID NO: 5065204 - DNA, 25 bp, Homo sapien
tcagttcttcacacagctgccagcc

SEQ ID NO: 5065205 - DNA, 25 bp, Homo sapien
ctcagttcttcacacagctgccagc

SEQ ID NO: 5065206 - DNA, 25 bp, Homo sapien
tgtttccaatatcccaggaaggagg

SEQ ID NO: 5065207 - DNA, 25 bp, Homo sapien
ggcattgtttccaatatcccaggaa

SEQ ID NO: 5065208 - DNA, 25 bp, Homo sapien
cattgtttccaatatcccaggaagg

SEQ ID NO: 5065209 - DNA, 25 bp, Homo sapien
ttccaatatcccaggaaggaggagc

SEQ ID NO: 5065210 - DNA, 25 bp, Homo sapien
cttttgaggttatctacgtctttca

SEQ ID NO: 5065211 - DNA, 25 bp, Homo sapien
ttttgaggttatctacgtctttcat

SEQ ID NO: 5065212 - DNA, 25 bp, Homo sapien
gagcttcctcaaaaaggctatcaac

SEQ ID NO: 5065213 - DNA, 25 bp, Homo sapien
gattatcagatcctgtttcacaaac

SEQ ID NO: 5065214 - DNA, 25 bp, Homo sapien
ttcttctgttcagcgggagacacac

SEQ ID NO: 5065215 - DNA, 25 bp, Homo sapien
tctgttcagcgggagacacacattt

SEQ ID NO: 5065216 - DNA, 25 bp, Homo sapien
gtttcttctgttcagcgggagacac

SEQ ID NO: 5065217 - DNA, 25 bp, Homo sapien
gttcagcgggagacacacatttgga

SEQ ID NO: 5065218 - DNA, 25 bp, Homo sapien
aggttgcagtgggctaagatcgagc

SEQ ID NO: 5065219 - DNA, 25 bp, Homo sapien
cagtgggctaagatcgagccactgc

SEQ ID NO: 5065220 - DNA, 25 bp, Homo sapien
tgcagtgggctaagatcgagccact

SEQ ID NO: 5065221 - DNA, 25 bp, Homo sapien
gccactgcactccagtctgggtgac

SEQ ID NO: 5065222 - DNA, 25 bp, Homo sapien
gaaatcgtcgttgacggtgaatccg

SEQ ID NO: 5065223 - DNA, 25 bp, Homo sapien
tggcaccatcggaataacttctgaa

SEQ ID NO: 5065224 - DNA, 25 bp, Homo sapien
actgctgactggcaccatcggaata

SEQ ID NO: 5065225 - DNA, 25 bp, Homo sapien
aataacttctgaaatcgtcgttgac

SEQ ID NO: 5065226 - DNA, 25 bp, Homo sapien
cacagcctgccaaagttttgggttt

SEQ ID NO: 5065227 - DNA, 25 bp, Homo sapien
ggtttaattcctgggatcaaatgat

SEQ ID NO: 5065228 - DNA, 25 bp, Homo sapien
tgtacctttgtgtatataagccata

SEQ ID NO: 5065229 - DNA, 25 bp, Homo sapien
tacacctggcctacctggcctgtac

SEQ ID NO: 5065230 - DNA, 25 bp, Homo sapien
cggactggtttaattcctgggatca

SEQ ID NO: 5065231 - DNA, 25 bp, Homo sapien
aaaagactggatatctctgttaaat

SEQ ID NO: 5065232 - DNA, 25 bp, Homo sapien
aagactggatatctctgttaaataa

SEQ ID NO: 5065233 - DNA, 25 bp, Homo sapien
aaagactggatatctctgttaaata

SEQ ID NO: 5065234 - DNA, 25 bp, Homo sapien
agactggatatctctgttaaataaa

SEQ ID NO: 5065235 - DNA, 25 bp, Homo sapien
caggcttcgtagacaaacatatttc

SEQ ID NO: 5065236 - DNA, 25 bp, Homo sapien
ttaacgtccacctcttctttatcaa

SEQ ID NO: 5065237 - DNA, 25 bp, Homo sapien
ttcctagtctgtgaccctgtcctga

SEQ ID NO: 5065238 - DNA, 25 bp, Homo sapien
ggcttcgtagacaaacatatttcat

SEQ ID NO: 5065239 - DNA, 25 bp, Homo sapien
caaccagatctgtatattagtaatg

SEQ ID NO: 5065240 - DNA, 25 bp, Homo sapien
tgctttagaaacaatttttggtgtg

SEQ ID NO: 5065241 - DNA, 25 bp, Homo sapien
ttcagtggaacagcagacaaattat

SEQ ID NO: 5065242 - DNA, 25 bp, Homo sapien
taatgggttccaagttgttcagtgg

SEQ ID NO: 5065243 - DNA, 25 bp, Homo sapien
gaaaacggaggacttctttgagatc

SEQ ID NO: 5065244 - DNA, 25 bp, Homo sapien
ttcttccagtgtgagtgtctcatct

SEQ ID NO: 5065245 - DNA, 25 bp, Homo sapien
tcttccagtgtgagtgtctcatcta

SEQ ID NO: 5065246 - DNA, 25 bp, Homo sapien
gagagagttcaatagtactcgaacc

SEQ ID NO: 5065247 - DNA, 25 bp, Homo sapien
ggtttgcatgtccacttacaaccat

SEQ ID NO: 5065248 - DNA, 25 bp, Homo sapien
tcgaaccaaaagtctagtgagtctg

SEQ ID NO: 5065249 - DNA, 25 bp, Homo sapien
tgacttctccaatccccaattttgg

SEQ ID NO: 5065250 - DNA, 25 bp, Homo sapien
tcttgatactatactgagctacaca

SEQ ID NO: 5065251 - DNA, 25 bp, Homo sapien
cactgtacccggtcgtattagctat

SEQ ID NO: 5065252 - DNA, 25 bp, Homo sapien
tgtctgggaatgatgtctgaatgaa

SEQ ID NO: 5065253 - DNA, 25 bp, Homo sapien
gaaatgtgagtaggcagattaatct

SEQ ID NO: 5065254 - DNA, 25 bp, Homo sapien
tggtggcaaatgaatggctaatccc

SEQ ID NO: 5065255 - DNA, 25 bp, Homo sapien
tactagtaatgtgacacacaccggc

SEQ ID NO: 5065256 - DNA, 25 bp, Homo sapien
tagcaggcatctcgcaccctatgaa

SEQ ID NO: 5065257 - DNA, 25 bp, Homo sapien
cattatattctaagtgagtggtggc

SEQ ID NO: 5065258 - DNA, 25 bp, Homo sapien
tctttccaagagcaaactgggtgac

SEQ ID NO: 5065259 - DNA, 25 bp, Homo sapien
tggagattcccaagacccattcagg

SEQ ID NO: 5065260 - DNA, 25 bp, Homo sapien
tcaaagtgtgcctgagggatccctg

SEQ ID NO: 5065261 - DNA, 25 bp, Homo sapien
tggagtctcccaccgtccatggtga

SEQ ID NO: 5065262 - DNA, 25 bp, Homo sapien
tcttcaactgtcagcaaaagattgc

SEQ ID NO: 5065263 - DNA, 25 bp, Homo sapien
tccataggacccttactgggatgta

SEQ ID NO: 5065264 - DNA, 25 bp, Homo sapien
tgcttaggtcaaattgtatgcccca

SEQ ID NO: 5065265 - DNA, 25 bp, Homo sapien
ggtacatacaaaagaacctcccatg

SEQ ID NO: 5065266 - DNA, 25 bp, Homo sapien
acctgaccgactggcagagcacact

SEQ ID NO: 5065267 - DNA, 25 bp, Homo sapien
tgcagacacctgaccgactggcaga

SEQ ID NO: 5065268 - DNA, 25 bp, Homo sapien
tggtagtcccccgttccagtgagat

SEQ ID NO: 5065269 - DNA, 25 bp, Homo sapien
actactgatcagcattcgttcttgc

SEQ ID NO: 5065270 - DNA, 25 bp, Homo sapien
ggtgtatacaccctacagaaatgaa

SEQ ID NO: 5065271 - DNA, 25 bp, Homo sapien
ggaaactagtgacagtcctttggaa

SEQ ID NO: 5065272 - DNA, 25 bp, Homo sapien
ccacagggtggctgtaattaaaatg

SEQ ID NO: 5065273 - DNA, 25 bp, Homo sapien
gacacaagccaatgtccatcaggtt

SEQ ID NO: 5065274 - DNA, 25 bp, Homo sapien
ccgccattgccaccgcagcgccgcc

SEQ ID NO: 5065275 - DNA, 25 bp, Homo sapien
ggaccccttggcggctggtgcaggg

SEQ ID NO: 5065276 - DNA, 25 bp, Homo sapien
atcgcccttgggaggggcggttctg

SEQ ID NO: 5065277 - DNA, 25 bp, Homo sapien
cctcgcttggcgctccccgggccgg

SEQ ID NO: 5065278 - DNA, 25 bp, Homo sapien
cctgagctggcaggtttgggccgag

SEQ ID NO: 5065279 - DNA, 25 bp, Homo sapien
gggctgcgaggcgacgccctggagc

SEQ ID NO: 5065280 - DNA, 25 bp, Homo sapien
agccgtgtaaccccgcgagggcagc

SEQ ID NO: 5065281 - DNA, 25 bp, Homo sapien
tgggccgagcccctccgggctgccc

SEQ ID NO: 5065282 - DNA, 25 bp, Homo sapien
cctcccttcttgtcggagcccatgg

SEQ ID NO: 5065283 - DNA, 25 bp, Homo sapien
ctcctcccttcttgtcggagcccat

SEQ ID NO: 5065284 - DNA, 25 bp, Homo sapien
tcctcccttcttgtcggagcccatg

SEQ ID NO: 5065285 - DNA, 25 bp, Homo sapien
ctcccttcttgtcggagcccatggc

SEQ ID NO: 5065286 - DNA, 25 bp, Homo sapien
gctcccaggtgcctcgtaggaagcc

SEQ ID NO: 5065287 - DNA, 25 bp, Homo sapien
tttcttgtgggatgcaatcctgtgc

SEQ ID NO: 5065288 - DNA, 25 bp, Homo sapien
ggtgcctcgtaggaagccctgaaca

SEQ ID NO: 5065289 - DNA, 25 bp, Homo sapien
tcttgtgggatgcaatcctgtgctc

SEQ ID NO: 5065290 - DNA, 25 bp, Homo sapien
tgccacccctcggagagtcgtaaga

SEQ ID NO: 5065291 - DNA, 25 bp, Homo sapien
tctccttggagtgaccggggctgcc

SEQ ID NO: 5065292 - DNA, 25 bp, Homo sapien
taagaggattccacgccggaacttc

SEQ ID NO: 5065293 - DNA, 25 bp, Homo sapien
cagcaatgcgagtgtttccctcttg

SEQ ID NO: 5065294 - DNA, 25 bp, Homo sapien
tatgatcccatcttgccgtcttgag

SEQ ID NO: 5065295 - DNA, 25 bp, Homo sapien
ccgtcttgaggatgacagttttacc

SEQ ID NO: 5065296 - DNA, 25 bp, Homo sapien
gaaagtcataaaagcccggtacagc

SEQ ID NO: 5065297 - DNA, 25 bp, Homo sapien
caagtgaagccagggatatgatccc

SEQ ID NO: 5065298 - DNA, 25 bp, Homo sapien
ccccagataagggtttatcacactt

SEQ ID NO: 5065299 - DNA, 25 bp, Homo sapien
taagggtttatcacactttgcacac

SEQ ID NO: 5065300 - DNA, 25 bp, Homo sapien
cagataagggtttatcacactttgc

SEQ ID NO: 5065301 - DNA, 25 bp, Homo sapien
ggtctccccagataagggtttatca

SEQ ID NO: 5065302 - DNA, 25 bp, Homo sapien
tatcatggtgtttccagtacctaga

SEQ ID NO: 5065303 - DNA, 25 bp, Homo sapien
tctgagagcatgaactccacctttt

SEQ ID NO: 5065304 - DNA, 25 bp, Homo sapien
tatatccgttgaagcaataaatggc

SEQ ID NO: 5065305 - DNA, 25 bp, Homo sapien
tccctacaggaatgtaagctctctg

SEQ ID NO: 5065306 - DNA, 25 bp, Homo sapien
tgtcacctacccctctatgtgacct

SEQ ID NO: 5065307 - DNA, 25 bp, Homo sapien
gaccttgaataaatcacatcatctc

SEQ ID NO: 5065308 - DNA, 25 bp, Homo sapien
tgcctttgtcacctacccctctatg

SEQ ID NO: 5065309 - DNA, 25 bp, Homo sapien
gcctttgtcacctacccctctatgt

SEQ ID NO: 5065310 - DNA, 25 bp, Homo sapien
tcatttactgagtcagcacggccgt

SEQ ID NO: 5065311 - DNA, 25 bp, Homo sapien
tgctgaagccgccatcatttactga

SEQ ID NO: 5065312 - DNA, 25 bp, Homo sapien
gccgccatcatttactgagtcagca

SEQ ID NO: 5065313 - DNA, 25 bp, Homo sapien
tactgagtcagcacggccgtgtaag

SEQ ID NO: 5065314 - DNA, 25 bp, Homo sapien
tgctatatcaagcaggaaaagctgc

SEQ ID NO: 5065315 - DNA, 25 bp, Homo sapien
tggcgctggaggctatctggttggg

SEQ ID NO: 5065316 - DNA, 25 bp, Homo sapien
gtaaaaggctgtggcgctggaggct

SEQ ID NO: 5065317 - DNA, 25 bp, Homo sapien
ggttggggaccccaccaatgccata

SEQ ID NO: 5065318 - DNA, 25 bp, Homo sapien
tctggctcctgttgatgaagaaccc

SEQ ID NO: 5065319 - DNA, 25 bp, Homo sapien
agaacaagtgacacctgggcggcag

SEQ ID NO: 5065320 - DNA, 25 bp, Homo sapien
aaggcatgagccgtccagaccctgt

SEQ ID NO: 5065321 - DNA, 25 bp, Homo sapien
agcagccgccccagacacttttccc

SEQ ID NO: 5065322 - DNA, 25 bp, Homo sapien
tctgctaggaaatagggctgtgaca

SEQ ID NO: 5065323 - DNA, 25 bp, Homo sapien
gagtcttggaggcttcatccagccc

SEQ ID NO: 5065324 - DNA, 25 bp, Homo sapien
gccccttgagaatccctaggctggg

SEQ ID NO: 5065325 - DNA, 25 bp, Homo sapien
ggacattgggacactgagctgtact

SEQ ID NO: 5065326 - DNA, 25 bp, Homo sapien
taccagaggcctcgcaggctggtga

SEQ ID NO: 5065327 - DNA, 25 bp, Homo sapien
cagtagaaagtcgtgtaccagaggc

SEQ ID NO: 5065328 - DNA, 25 bp, Homo sapien
caggaaccacaggaagaagtaggcc

SEQ ID NO: 5065329 - DNA, 25 bp, Homo sapien
cctggaacaggcagtagaaagtcgt

SEQ ID NO: 5065330 - DNA, 25 bp, Homo sapien
ttcgccagagcacaggcccaggaag

SEQ ID NO: 5065331 - DNA, 25 bp, Homo sapien
gggcttcgccagagcacaggcccag

SEQ ID NO: 5065332 - DNA, 25 bp, Homo sapien
caggcccaggaaggggccctgctta

SEQ ID NO: 5065333 - DNA, 25 bp, Homo sapien
gcttcgccagagcacaggcccagga

SEQ ID NO: 5065334 - DNA, 25 bp, Homo sapien
gcatggtgagcgctgtgtagggcac

SEQ ID NO: 5065335 - DNA, 25 bp, Homo sapien
agcagcatggtgagcgctgtgtagg

SEQ ID NO: 5065336 - DNA, 25 bp, Homo sapien
gcagcatggtgagcgctgtgtaggg

SEQ ID NO: 5065337 - DNA, 25 bp, Homo sapien
agcatggtgagcgctgtgtagggca

SEQ ID NO: 5065338 - DNA, 25 bp, Homo sapien
gaacccgaaacccacggctgcactc

SEQ ID NO: 5065339 - DNA, 25 bp, Homo sapien
gccacttaaggtgactgagagggag

SEQ ID NO: 5065340 - DNA, 25 bp, Homo sapien
ctggaacccgaaacccacggctgca

SEQ ID NO: 5065341 - DNA, 25 bp, Homo sapien
acttaaggtgactgagagggagtgg

SEQ ID NO: 5065342 - DNA, 25 bp, Homo sapien
cggacacgatgagcccgtggacagt

SEQ ID NO: 5065343 - DNA, 25 bp, Homo sapien
ggcgccggacacgatgagcccgtgg

SEQ ID NO: 5065344 - DNA, 25 bp, Homo sapien
tgggcgccggacacgatgagcccgt

SEQ ID NO: 5065345 - DNA, 25 bp, Homo sapien
cgccggacacgatgagcccgtggac

SEQ ID NO: 5065346 - DNA, 25 bp, Homo sapien
gccccggggtcgcagtggcctcgca

SEQ ID NO: 5065347 - DNA, 25 bp, Homo sapien
gaggatgaacattgctcaaactcct

SEQ ID NO: 5065348 - DNA, 25 bp, Homo sapien
aaagggcacctgaccgcacagggag

SEQ ID NO: 5065349 - DNA, 25 bp, Homo sapien
ggatgccgtgtaagaggcggaggca

SEQ ID NO: 5065350 - DNA, 25 bp, Homo sapien
actcctttcaaagggcacctgaccg

SEQ ID NO: 5065351 - DNA, 25 bp, Homo sapien
ggaggcatgtgtacagaacagggcc

SEQ ID NO: 5065352 - DNA, 25 bp, Homo sapien
tgggaggcatgtgtacagaacaggg

SEQ ID NO: 5065353 - DNA, 25 bp, Homo sapien
ggcatgtgtacagaacagggccagg

SEQ ID NO: 5065354 - DNA, 25 bp, Homo sapien
gaggcatgtgtacagaacagggcca

SEQ ID NO: 5065355 - DNA, 25 bp, Homo sapien
tagcaccaggtcctggacgtggtcg

SEQ ID NO: 5065356 - DNA, 25 bp, Homo sapien
caggacagctagcaccaggtcctgg

SEQ ID NO: 5065357 - DNA, 25 bp, Homo sapien
caccaggtcctggacgtggtcgtgt

SEQ ID NO: 5065358 - DNA, 25 bp, Homo sapien
accaggtcctggacgtggtcgtgta

SEQ ID NO: 5065359 - DNA, 25 bp, Homo sapien
cagccgcaatgcagtagagatgggc

SEQ ID NO: 5065360 - DNA, 25 bp, Homo sapien
gctccttcacccctaggcacagtaa

SEQ ID NO: 5065361 - DNA, 25 bp, Homo sapien
ggcacagtaaactgatgcacacggg

SEQ ID NO: 5065362 - DNA, 25 bp, Homo sapien
tgcacacggggtaagtcactacaac

SEQ ID NO: 5065363 - DNA, 25 bp, Homo sapien
agaagcgtgtcaccttggcttcgca

SEQ ID NO: 5065364 - DNA, 25 bp, Homo sapien
cttggcttcgcagagttcaaaagca

SEQ ID NO: 5065365 - DNA, 25 bp, Homo sapien
gcgtgtcaccttggcttcgcagagt

SEQ ID NO: 5065366 - DNA, 25 bp, Homo sapien
tcaccttggcttcgcagagttcaaa

SEQ ID NO: 5065367 - DNA, 25 bp, Homo sapien
accagcttcaggtagggtgggtgcc

SEQ ID NO: 5065368 - DNA, 25 bp, Homo sapien
tcaccagcttcaggtagggtgggtg

SEQ ID NO: 5065369 - DNA, 25 bp, Homo sapien
cagcttcaggtagggtgggtgccgg

SEQ ID NO: 5065370 - DNA, 25 bp, Homo sapien
ggtgggtgccgggtagtgaggctca

SEQ ID NO: 5065371 - DNA, 25 bp, Homo sapien
tgaacctatgcaaggtcagcatggc

SEQ ID NO: 5065372 - DNA, 25 bp, Homo sapien
ttctccctataaaactcaagccaag

SEQ ID NO: 5065373 - DNA, 25 bp, Homo sapien
agccatgtgccagccgcaggtttct

SEQ ID NO: 5065374 - DNA, 25 bp, Homo sapien
agccaagactgcaccctgaacctat

SEQ ID NO: 5065375 - DNA, 25 bp, Homo sapien
ggcatgtgtacagaacaggaccagg

SEQ ID NO: 5065376 - DNA, 25 bp, Homo sapien
tgggaggcatgtgtacagaacagga

SEQ ID NO: 5065377 - DNA, 25 bp, Homo sapien
gcatgtgtacagaacaggaccaggt

SEQ ID NO: 5065378 - DNA, 25 bp, Homo sapien
gaggcatgtgtacagaacaggacca

SEQ ID NO: 5065379 - DNA, 25 bp, Homo sapien
tcccaaaggctgacgtcttcttccc

SEQ ID NO: 5065380 - DNA, 25 bp, Homo sapien
gatcccaaaggctgacgtcttcttc

SEQ ID NO: 5065381 - DNA, 25 bp, Homo sapien
atcccaaaggctgacgtcttcttcc

SEQ ID NO: 5065382 - DNA, 25 bp, Homo sapien
cccaaaggctgacgtcttcttccca

SEQ ID NO: 5065383 - DNA, 25 bp, Homo sapien
tccggccacccccaatccttgattc

SEQ ID NO: 5065384 - DNA, 25 bp, Homo sapien
ccccaatccttgattcccgcctcac

SEQ ID NO: 5065385 - DNA, 25 bp, Homo sapien
gccacccccaatccttgattcccgc

SEQ ID NO: 5065386 - DNA, 25 bp, Homo sapien
caatccttgattcccgcctcactca

SEQ ID NO: 5065387 - DNA, 25 bp, Homo sapien
tgctccttcacacacgactcgactg

SEQ ID NO: 5065388 - DNA, 25 bp, Homo sapien
ttcacacacgactcgactgacgacc

SEQ ID NO: 5065389 - DNA, 25 bp, Homo sapien
ctcgactgacgacccccatgccttg

SEQ ID NO: 5065390 - DNA, 25 bp, Homo sapien
ctgcttcttcgtggggcctgctcct

SEQ ID NO: 5065391 - DNA, 25 bp, Homo sapien
gcaaggacacagcaatgctcacgcc

SEQ ID NO: 5065392 - DNA, 25 bp, Homo sapien
caatgctcacgccagatacaaaggc

SEQ ID NO: 5065393 - DNA, 25 bp, Homo sapien
cacgacatatgccacaggtgctgtg

SEQ ID NO: 5065394 - DNA, 25 bp, Homo sapien
gcaagatcgcaaagggcaccatcgc

SEQ ID NO: 5065395 - DNA, 25 bp, Homo sapien
gggtgtggagttagccctcctagcc

SEQ ID NO: 5065396 - DNA, 25 bp, Homo sapien
gcagatggcctgtgtgctcgtaccc

SEQ ID NO: 5065397 - DNA, 25 bp, Homo sapien
gaattctctggggacggaggccaaa

SEQ ID NO: 5065398 - DNA, 25 bp, Homo sapien
caggtttacatgaaggaggtgacac

SEQ ID NO: 5065399 - DNA, 25 bp, Homo sapien
tccaggcctggcccgtgacggtgct

SEQ ID NO: 5065400 - DNA, 25 bp, Homo sapien
aagaagacgtaggaggagtagaaga

SEQ ID NO: 5065401 - DNA, 25 bp, Homo sapien
cctggcccgtgacggtgctgcagct

SEQ ID NO: 5065402 - DNA, 25 bp, Homo sapien
catgcgccagacagcttggtgaaga

SEQ ID NO: 5065403 - DNA, 25 bp, Homo sapien
cagcaaggatcatgcaggtgggcac

SEQ ID NO: 5065404 - DNA, 25 bp, Homo sapien
ctccgaaggctcagccggctggagg

SEQ ID NO: 5065405 - DNA, 25 bp, Homo sapien
tgaggactttgagggtgaccaccac

SEQ ID NO: 5065406 - DNA, 25 bp, Homo sapien
ggcgtcccgactgggtgtctttgga

SEQ ID NO: 5065407 - DNA, 25 bp, Homo sapien
catgatatgtgcatgctcgtggacc

SEQ ID NO: 5065408 - DNA, 25 bp, Homo sapien
ggagtggctgatgacaaggccaccc

SEQ ID NO: 5065409 - DNA, 25 bp, Homo sapien
tcccgcgtgggcctgcatgatatgt

SEQ ID NO: 5065410 - DNA, 25 bp, Homo sapien
tgtgaacattgggtgcttgtgcacg

SEQ ID NO: 5065411 - DNA, 25 bp, Homo sapien
gaaaggtcacatactaaactgccag

SEQ ID NO: 5065412 - DNA, 25 bp, Homo sapien
gacaagtgctactgggctagtcagg

SEQ ID NO: 5065413 - DNA, 25 bp, Homo sapien
cctcccggtaggaagataaggctga

SEQ ID NO: 5065414 - DNA, 25 bp, Homo sapien
gagccggctgtaacgttttcttgaa

SEQ ID NO: 5065415 - DNA, 25 bp, Homo sapien
agtattttctttgcgattattgctg

SEQ ID NO: 5065416 - DNA, 25 bp, Homo sapien
ctgttttggatgttttggtagtatt

SEQ ID NO: 5065417 - DNA, 25 bp, Homo sapien
aaatactgtgaataagtcttcaata

SEQ ID NO: 5065418 - DNA, 25 bp, Homo sapien
tttggtagtattttctttgcgatta

SEQ ID NO: 5065419 - DNA, 25 bp, Homo sapien
gttgtattctaggagagccagttcc

SEQ ID NO: 5065420 - DNA, 25 bp, Homo sapien
catccttttagtgttattagttgta

SEQ ID NO: 5065421 - DNA, 25 bp, Homo sapien
agtgttattagttgtattctaggag

SEQ ID NO: 5065422 - DNA, 25 bp, Homo sapien
ttattagttgtattctaggagagcc

SEQ ID NO: 5065423 - DNA, 25 bp, Homo sapien
tcacaaatttgcaagtcatccctgt

SEQ ID NO: 5065424 - DNA, 25 bp, Homo sapien
caaatttgcaagtcatccctgtgca

SEQ ID NO: 5065425 - DNA, 25 bp, Homo sapien
catgctacgctctgtatcatttcag

SEQ ID NO: 5065426 - DNA, 25 bp, Homo sapien
catttcagtcttagtatatgtgctg

SEQ ID NO: 5065427 - DNA, 25 bp, Homo sapien
cggcggcgtgatgttgggcggccac

SEQ ID NO: 5065428 - DNA, 25 bp, Homo sapien
tgcccagaacttcttatgtgcggcg

SEQ ID NO: 5065429 - DNA, 25 bp, Homo sapien
cccagaacttcttatgtgcggcggc

SEQ ID NO: 5065430 - DNA, 25 bp, Homo sapien
gccacagagagattggtgtttttgt

SEQ ID NO: 5065431 - DNA, 25 bp, Homo sapien
tccaaaaattgatgtgaggccaagt

SEQ ID NO: 5065432 - DNA, 25 bp, Homo sapien
tatcaatttttggaacaatggctca

SEQ ID NO: 5065433 - DNA, 25 bp, Homo sapien
gtgaggccaagtatatcaatttttg

SEQ ID NO: 5065434 - DNA, 25 bp, Homo sapien
aaattgatgtgaggccaagtatatc

SEQ ID NO: 5065435 - DNA, 25 bp, Homo sapien
ccaccaaaaaatacattcaggaatc

SEQ ID NO: 5065436 - DNA, 25 bp, Homo sapien
caaaaaatacattcaggaatctaga

SEQ ID NO: 5065437 - DNA, 25 bp, Homo sapien
aatacattcaggaatctagaaaaat

SEQ ID NO: 5065438 - DNA, 25 bp, Homo sapien
tgagttcctcctccaccaaaaaata

SEQ ID NO: 5065439 - DNA, 25 bp, Homo sapien
gaggacaccagtaattgctgactct

SEQ ID NO: 5065440 - DNA, 25 bp, Homo sapien
gttctccatctcgtgtagttctgct

SEQ ID NO: 5065441 - DNA, 25 bp, Homo sapien
gagggaggacaccagtaattgctga

SEQ ID NO: 5065442 - DNA, 25 bp, Homo sapien
tctcgtgtagttctgctcgacgcac

SEQ ID NO: 5065443 - DNA, 25 bp, Homo sapien
gcgtcctggatctgtaggagcagag

SEQ ID NO: 5065444 - DNA, 25 bp, Homo sapien
cctcgctaggcgtcctggatctgta

SEQ ID NO: 5065445 - DNA, 25 bp, Homo sapien
taggcgtcctggatctgtaggagca

SEQ ID NO: 5065446 - DNA, 25 bp, Homo sapien
ctcgctaggcgtcctggatctgtag

SEQ ID NO: 5065447 - DNA, 25 bp, Homo sapien
tgctatctaatgaaaccatcacttt

SEQ ID NO: 5065448 - DNA, 25 bp, Homo sapien
gtgcagttcagagcgttgcggaagc

SEQ ID NO: 5065449 - DNA, 25 bp, Homo sapien
tttaattagatgcgctcagtgccgt

SEQ ID NO: 5065450 - DNA, 25 bp, Homo sapien
gatgcgctcagtgccgtgcagttca

SEQ ID NO: 5065451 - DNA, 25 bp, Homo sapien
gcgtggtaagcacaaccacatcctc

SEQ ID NO: 5065452 - DNA, 25 bp, Homo sapien
cagggagcgtggtaagcacaaccac

SEQ ID NO: 5065453 - DNA, 25 bp, Homo sapien
gggagcgtggtaagcacaaccacat

SEQ ID NO: 5065454 - DNA, 25 bp, Homo sapien
tggtaagcacaaccacatcctccat

SEQ ID NO: 5065455 - DNA, 25 bp, Homo sapien
gccggaggaggtgcggctggagtcg

SEQ ID NO: 5065456 - DNA, 25 bp, Homo sapien
gagccggaggaggtgcggctggagt

SEQ ID NO: 5065457 - DNA, 25 bp, Homo sapien
ctgcagagccggaggaggtgcggct

SEQ ID NO: 5065458 - DNA, 25 bp, Homo sapien
cagagccggaggaggtgcggctgga

SEQ ID NO: 5065459 - DNA, 25 bp, Homo sapien
tgctgctgcccgaccccggctcggc

SEQ ID NO: 5065460 - DNA, 25 bp, Homo sapien
tccctgctgctgcccgaccccggct

SEQ ID NO: 5065461 - DNA, 25 bp, Homo sapien
cctgctgctgcccgaccccggctcg

SEQ ID NO: 5065462 - DNA, 25 bp, Homo sapien
ctgctgctgcccgaccccggctcgg

SEQ ID NO: 5065463 - DNA, 25 bp, Homo sapien
tctccgggggagatggtctcgatct

SEQ ID NO: 5065464 - DNA, 25 bp, Homo sapien
cgtctccgggggagatggtctcgat

SEQ ID NO: 5065465 - DNA, 25 bp, Homo sapien
gtctccgggggagatggtctcgatc

SEQ ID NO: 5065466 - DNA, 25 bp, Homo sapien
ggtcctgctttccagagctcgccga

SEQ ID NO: 5065467 - DNA, 25 bp, Homo sapien
ctttccagagctcgccgagtagggc

SEQ ID NO: 5065468 - DNA, 25 bp, Homo sapien
cagggaaagcgaagccgaaacccag

SEQ ID NO: 5065469 - DNA, 25 bp, Homo sapien
cggcccgcagggaagcgaccgaggg

SEQ ID NO: 5065470 - DNA, 25 bp, Homo sapien
atgggagtggacagggtggccaggg

SEQ ID NO: 5065471 - DNA, 25 bp, Homo sapien
cctgggacgtccagggagaggttcg

SEQ ID NO: 5065472 - DNA, 25 bp, Homo sapien
gccgtaggtcgcagggctgggctta

SEQ ID NO: 5065473 - DNA, 25 bp, Homo sapien
agaggttcggccgtaggtcgcaggg

SEQ ID NO: 5065474 - DNA, 25 bp, Homo sapien
gcagatgaaggagtaggatattgga

SEQ ID NO: 5065475 - DNA, 25 bp, Homo sapien
gagggcagatgaaggagtaggatat

SEQ ID NO: 5065476 - DNA, 25 bp, Homo sapien
gaaggagtaggatattggaaaaaca

SEQ ID NO: 5065477 - DNA, 25 bp, Homo sapien
gatgaaggagtaggatattggaaaa

SEQ ID NO: 5065478 - DNA, 25 bp, Homo sapien
ctgtgtagtgcaccacacacgtttg

SEQ ID NO: 5065479 - DNA, 25 bp, Homo sapien
accacacacgtttggcccttcttgg

SEQ ID NO: 5065480 - DNA, 25 bp, Homo sapien
tgtagtgcaccacacacgtttggcc

SEQ ID NO: 5065481 - DNA, 25 bp, Homo sapien
tagtgcaccacacacgtttggccct

SEQ ID NO: 5065482 - DNA, 25 bp, Homo sapien
tgggggctgagggggtgagacttac

SEQ ID NO: 5065483 - DNA, 25 bp, Homo sapien
gtgggggctgagggggtgagactta

SEQ ID NO: 5065484 - DNA, 25 bp, Homo sapien
tgggctttagccctgatccagaggc

SEQ ID NO: 5065485 - DNA, 25 bp, Homo sapien
aggcaggcacctctggagagaagct

SEQ ID NO: 5065486 - DNA, 25 bp, Homo sapien
gccttgggctttagccctgatccag

SEQ ID NO: 5065487 - DNA, 25 bp, Homo sapien
gaggagtagaggatggctggtcaca

SEQ ID NO: 5065488 - DNA, 25 bp, Homo sapien
ggcccttgctggtagaagagggaaa

SEQ ID NO: 5065489 - DNA, 25 bp, Homo sapien
gctggcaccatggatggcccttgct

SEQ ID NO: 5065490 - DNA, 25 bp, Homo sapien
tggcaccatggatggcccttgctgg

SEQ ID NO: 5065491 - DNA, 25 bp, Homo sapien
gcaccatggatggcccttgctggta

SEQ ID NO: 5065492 - DNA, 25 bp, Homo sapien
ctgcaacagaaggaaggggactgaa

SEQ ID NO: 5065493 - DNA, 25 bp, Homo sapien
cagaaggaaggggactgaaggtgtt

SEQ ID NO: 5065494 - DNA, 25 bp, Homo sapien
aggggactgaaggtgtttgactcac

SEQ ID NO: 5065495 - DNA, 25 bp, Homo sapien
gaaggggactgaaggtgtttgactc

SEQ ID NO: 5065496 - DNA, 25 bp, Homo sapien
taggagggatttccaaatatcagac

SEQ ID NO: 5065497 - DNA, 25 bp, Homo sapien
gggagctctaggagggatttccaaa

SEQ ID NO: 5065498 - DNA, 25 bp, Homo sapien
gagggatttccaaatatcagacaga

SEQ ID NO: 5065499 - DNA, 25 bp, Homo sapien
gctctaggagggatttccaaatatc

SEQ ID NO: 5065500 - DNA, 25 bp, Homo sapien
tgcagataaagagcatccaactggg

SEQ ID NO: 5065501 - DNA, 25 bp, Homo sapien
tctgggctccctcagtacccagaga

SEQ ID NO: 5065502 - DNA, 25 bp, Homo sapien
actgggatcagtcccgctctgggct

SEQ ID NO: 5065503 - DNA, 25 bp, Homo sapien
catcggagcctctgggtgacttgtc

SEQ ID NO: 5065504 - DNA, 25 bp, Homo sapien
caaacacctgctcatgatcttcctg

SEQ ID NO: 5065505 - DNA, 25 bp, Homo sapien
gccactttaggaagcaggtcacaag

SEQ ID NO: 5065506 - DNA, 25 bp, Homo sapien
ggctgtcatcgagtttgccacttta

SEQ ID NO: 5065507 - DNA, 25 bp, Homo sapien
ggcttgctgtctgctaagtggctgt

SEQ ID NO: 5065508 - DNA, 25 bp, Homo sapien
gctgtctgctaagtggctgtcatcg

SEQ ID NO: 5065509 - DNA, 25 bp, Homo sapien
gagtcctcgcataaggttcctaagg

SEQ ID NO: 5065510 - DNA, 25 bp, Homo sapien
tgcatacaggcacttcacaatccgg

SEQ ID NO: 5065511 - DNA, 25 bp, Homo sapien
catatttaacataggaagcagggcc

SEQ ID NO: 5065512 - DNA, 25 bp, Homo sapien
taactcattgtgtgagactgggcaa

SEQ ID NO: 5065513 - DNA, 25 bp, Homo sapien
ttcctgtttgccaattctgaacttg

SEQ ID NO: 5065514 - DNA, 25 bp, Homo sapien
cttcctgtttgccaattctgaactt

SEQ ID NO: 5065515 - DNA, 25 bp, Homo sapien
caggcaactggtagacctcagctag

SEQ ID NO: 5065516 - DNA, 25 bp, Homo sapien
gggagcatcataggacttcacagac

SEQ ID NO: 5065517 - DNA, 25 bp, Homo sapien
caagacctatcgtaagggagcatca

SEQ ID NO: 5065518 - DNA, 25 bp, Homo sapien
atcacagcagttgttgagaacccac

SEQ ID NO: 5065519 - DNA, 25 bp, Homo sapien
gttagatgactatggcattttccca

SEQ ID NO: 5065520 - DNA, 25 bp, Homo sapien
ggtctcaaattcatgcatctgacaa

SEQ ID NO: 5065521 - DNA, 25 bp, Homo sapien
agctttaacaaacgcagattctgcc

SEQ ID NO: 5065522 - DNA, 25 bp, Homo sapien
tacatgggatacattgaaatcgtgc

SEQ ID NO: 5065523 - DNA, 25 bp, Homo sapien
agatggggagaggagaaagaggacc

SEQ ID NO: 5065524 - DNA, 25 bp, Homo sapien
gcagatggggagaggagaaagagga

SEQ ID NO: 5065525 - DNA, 25 bp, Homo sapien
tggggagaggagaaagaggacccag

SEQ ID NO: 5065526 - DNA, 25 bp, Homo sapien
ctagcagggatgggggcagatgggg

SEQ ID NO: 5065527 - DNA, 25 bp, Homo sapien
ccacatcaggggtgcaggtcagctt

SEQ ID NO: 5065528 - DNA, 25 bp, Homo sapien
catcaggggtgcaggtcagcttcgc

SEQ ID NO: 5065529 - DNA, 25 bp, Homo sapien
ctccatatgccacatcaggggtgca

SEQ ID NO: 5065530 - DNA, 25 bp, Homo sapien
tatgccacatcaggggtgcaggtca

SEQ ID NO: 5065531 - DNA, 25 bp, Homo sapien
gctccacgtcaaagatgagggtggc

SEQ ID NO: 5065532 - DNA, 25 bp, Homo sapien
cacgtcaaagatgagggtggcattg

SEQ ID NO: 5065533 - DNA, 25 bp, Homo sapien
tccacgtcaaagatgagggtggcat

SEQ ID NO: 5065534 - DNA, 25 bp, Homo sapien
cagctccacgtcaaagatgagggtg

SEQ ID NO: 5065535 - DNA, 25 bp, Homo sapien
gcaagaattcgcatgaacactgacg

SEQ ID NO: 5065536 - DNA, 25 bp, Homo sapien
tcaggaaaggctactacatgcatca

SEQ ID NO: 5065537 - DNA, 25 bp, Homo sapien
aagtccctctgtgtacggtacgcca

SEQ ID NO: 5065538 - DNA, 25 bp, Homo sapien
gacgaacacatacagagcaacttgg

SEQ ID NO: 5065539 - DNA, 25 bp, Homo sapien
gccctctccacccgggttcctctgc

SEQ ID NO: 5065540 - DNA, 25 bp, Homo sapien
cctctccacccgggttcctctgctc

SEQ ID NO: 5065541 - DNA, 25 bp, Homo sapien
ctctccacccgggttcctctgctca

SEQ ID NO: 5065542 - DNA, 25 bp, Homo sapien
cgccctctccacccgggttcctctg

SEQ ID NO: 5065543 - DNA, 25 bp, Homo sapien
tcctcctcaggccccgccttcgccc

SEQ ID NO: 5065544 - DNA, 25 bp, Homo sapien
ccacctctcgccaccctcctcaggc

SEQ ID NO: 5065545 - DNA, 25 bp, Homo sapien
gccttcgcccgctactcacctgggc

SEQ ID NO: 5065546 - DNA, 25 bp, Homo sapien
ccgccttcgcccgctactcacctgg

SEQ ID NO: 5065547 - DNA, 25 bp, Homo sapien
tggctcccagaagaagcttcaaatg

SEQ ID NO: 5065548 - DNA, 25 bp, Homo sapien
ggagctattcctctggtcacagctg

SEQ ID NO: 5065549 - DNA, 25 bp, Homo sapien
caaatggcagaaaagcttggagcag

SEQ ID NO: 5065550 - DNA, 25 bp, Homo sapien
ccggatggctggagctattcctctg

SEQ ID NO: 5065551 - DNA, 25 bp, Homo sapien
gcctataattccagtactttacagg

SEQ ID NO: 5065552 - DNA, 25 bp, Homo sapien
ataattccagtactttacaggctga

SEQ ID NO: 5065553 - DNA, 25 bp, Homo sapien
tgcctataattccagtactttacag

SEQ ID NO: 5065554 - DNA, 25 bp, Homo sapien
ctataattccagtactttacaggct

SEQ ID NO: 5065555 - DNA, 25 bp, Homo sapien
tataatctatttccccatatctggg

SEQ ID NO: 5065556 - DNA, 25 bp, Homo sapien
atatctgggaaaccacactgtttct

SEQ ID NO: 5065557 - DNA, 25 bp, Homo sapien
tcttgtttcccagctgtaactcaca

SEQ ID NO: 5065558 - DNA, 25 bp, Homo sapien
cagtctttcagaccttggctatttc

SEQ ID NO: 5065559 - DNA, 25 bp, Homo sapien
ctctgattaaacaaacgcttcacag

SEQ ID NO: 5065560 - DNA, 25 bp, Homo sapien
cacagaaatcccttgatgtcaactg

SEQ ID NO: 5065561 - DNA, 25 bp, Homo sapien
gcagccattcccttagtgatgggat

SEQ ID NO: 5065562 - DNA, 25 bp, Homo sapien
gatcaaggctgaaataaacatctct

SEQ ID NO: 5065563 - DNA, 25 bp, Homo sapien
gactggagctgttccggttgttaaa

SEQ ID NO: 5065564 - DNA, 25 bp, Homo sapien
tcaaacaccgtgctgagagaaccaa

SEQ ID NO: 5065565 - DNA, 25 bp, Homo sapien
gccggtggctaagatcttgggaaaa

SEQ ID NO: 5065566 - DNA, 25 bp, Homo sapien
agcttcgtcccagagaggcaggtgc

SEQ ID NO: 5065567 - DNA, 25 bp, Homo sapien
cttgtctgccggtggctaagatctt

SEQ ID NO: 5065568 - DNA, 25 bp, Homo sapien
tcctgtaaccttgtcttatttgctt

SEQ ID NO: 5065569 - DNA, 25 bp, Homo sapien
cctgtaaccttgtcttatttgcttt

SEQ ID NO: 5065570 - DNA, 25 bp, Homo sapien
tttcctgtaaccttgtcttatttgc

SEQ ID NO: 5065571 - DNA, 25 bp, Homo sapien
ttcctgtaaccttgtcttatttgct

SEQ ID NO: 5065572 - DNA, 25 bp, Homo sapien
actatgttgcgtaggagtggaatcc

SEQ ID NO: 5065573 - DNA, 25 bp, Homo sapien
gagtggaatccttgtcttatgccag

SEQ ID NO: 5065574 - DNA, 25 bp, Homo sapien
tggctgggggttgtcataaatagct

SEQ ID NO: 5065575 - DNA, 25 bp, Homo sapien
tttgagatacactccatgaatattt

SEQ ID NO: 5065576 - DNA, 25 bp, Homo sapien
ctgtccttgtgataacttactgaga

SEQ ID NO: 5065577 - DNA, 25 bp, Homo sapien
tcttgtaatgctatccctccaccag

SEQ ID NO: 5065578 - DNA, 25 bp, Homo sapien
tgtccttgtgataacttactgagaa

SEQ ID NO: 5065579 - DNA, 25 bp, Homo sapien
atttcttgtaatgctatccctccac

SEQ ID NO: 5065580 - DNA, 25 bp, Homo sapien
caaggtgcctctaagtgaaaaaata

SEQ ID NO: 5065581 - DNA, 25 bp, Homo sapien
gaaactgagaacttgagtgacactt

SEQ ID NO: 5065582 - DNA, 25 bp, Homo sapien
tacttcccgaatctttcctgagcat

SEQ ID NO: 5065583 - DNA, 25 bp, Homo sapien
gagcatatcaattgaaacaaggtgc

SEQ ID NO: 5065584 - DNA, 25 bp, Homo sapien
gccaggagctctagcagttgttacc

SEQ ID NO: 5065585 - DNA, 25 bp, Homo sapien
catttgggtgcttcctatgacaaca

SEQ ID NO: 5065586 - DNA, 25 bp, Homo sapien
tactctgctgttcgggtgtttccca

SEQ ID NO: 5065587 - DNA, 25 bp, Homo sapien
gttgttacccaactggctaccagtg

SEQ ID NO: 5065588 - DNA, 25 bp, Homo sapien
caggaggctgcgtcccttgacaaat

SEQ ID NO: 5065589 - DNA, 25 bp, Homo sapien
ggaaacacgaggttgtccctgcctg

SEQ ID NO: 5065590 - DNA, 25 bp, Homo sapien
tgttggtgggaatgccttctctggt

SEQ ID NO: 5065591 - DNA, 25 bp, Homo sapien
gcagaatcaggaccactggattgga

SEQ ID NO: 5065592 - DNA, 25 bp, Homo sapien
tctttcaaagaaccgatttctggat

SEQ ID NO: 5065593 - DNA, 25 bp, Homo sapien
gaggtattcaaagtagtctctaaag

SEQ ID NO: 5065594 - DNA, 25 bp, Homo sapien
gcattcctaggtcttctagttgtaa

SEQ ID NO: 5065595 - DNA, 25 bp, Homo sapien
ggttcagtcttaggaagctgtatgt

SEQ ID NO: 5065596 - DNA, 25 bp, Homo sapien
tagggttgccttagctattcgagct

SEQ ID NO: 5065597 - DNA, 25 bp, Homo sapien
agggttgccttagctattcgagctc

SEQ ID NO: 5065598 - DNA, 25 bp, Homo sapien
ttagggttgccttagctattcgagc

SEQ ID NO: 5065599 - DNA, 25 bp, Homo sapien
gcttagggttgccttagctattcga

SEQ ID NO: 5065600 - DNA, 25 bp, Homo sapien
tgggaaccaagcatgtggacagtgc

SEQ ID NO: 5065601 - DNA, 25 bp, Homo sapien
gagcttgtgtgtagcatcaccaggt

SEQ ID NO: 5065602 - DNA, 25 bp, Homo sapien
gatggaccaccgttttcaccctgta

SEQ ID NO: 5065603 - DNA, 25 bp, Homo sapien
ttgcagagcttattgttagacaccc

SEQ ID NO: 5065604 - DNA, 25 bp, Homo sapien
tctaggtggcgggtcttggtttgcg

SEQ ID NO: 5065605 - DNA, 25 bp, Homo sapien
tgcgccgcgggttccacagcgagtc

SEQ ID NO: 5065606 - DNA, 25 bp, Homo sapien
gctggagtcgctgcttctcggtgac

SEQ ID NO: 5065607 - DNA, 25 bp, Homo sapien
cgcgtctgcggaacgcgcgaatgtt

SEQ ID NO: 5065608 - DNA, 25 bp, Homo sapien
cggggaggtcgccggccgcgacagg

SEQ ID NO: 5065609 - DNA, 25 bp, Homo sapien
gggaggtcgccggccgcgacaggca

SEQ ID NO: 5065610 - DNA, 25 bp, Homo sapien
ggggaggtcgccggccgcgacaggc

SEQ ID NO: 5065611 - DNA, 25 bp, Homo sapien
ggaggtcgccggccgcgacaggcac

SEQ ID NO: 5065612 - DNA, 25 bp, Homo sapien
gattttgaacactaaccatccagtt

SEQ ID NO: 5065613 - DNA, 25 bp, Homo sapien
tgtccttgcacacacgcaaaatgga

SEQ ID NO: 5065614 - DNA, 25 bp, Homo sapien
gtattgaacatttcacagtcatctg

SEQ ID NO: 5065615 - DNA, 25 bp, Homo sapien
ctaacaagaggccttcactacagac

SEQ ID NO: 5065616 - DNA, 25 bp, Homo sapien
gtcacaaataacaatgcccctggaa

SEQ ID NO: 5065617 - DNA, 25 bp, Homo sapien
cacaaataacaatgcccctggaaaa

SEQ ID NO: 5065618 - DNA, 25 bp, Homo sapien
gtggtcacaaataacaatgcccctg

SEQ ID NO: 5065619 - DNA, 25 bp, Homo sapien
tggtcacaaataacaatgcccctgg

SEQ ID NO: 5065620 - DNA, 25 bp, Homo sapien
ctccaaccattcttttgagctcttg

SEQ ID NO: 5065621 - DNA, 25 bp, Homo sapien
ggctccaaccattcttttgagctct

SEQ ID NO: 5065622 - DNA, 25 bp, Homo sapien
ttgggctccaaccattcttttgagc

SEQ ID NO: 5065623 - DNA, 25 bp, Homo sapien
tgggctccaaccattcttttgagct

SEQ ID NO: 5065624 - DNA, 25 bp, Homo sapien
tacatacagttgtatttcccaaaag

SEQ ID NO: 5065625 - DNA, 25 bp, Homo sapien
tcccaaaagatggagggaatagaaa

SEQ ID NO: 5065626 - DNA, 25 bp, Homo sapien
gaagaaaattaccagaatatcagtg

SEQ ID NO: 5065627 - DNA, 25 bp, Homo sapien
ccagaatatcagtgagctacaggac

SEQ ID NO: 5065628 - DNA, 25 bp, Homo sapien
acaacacacatcagggccagtcgag

SEQ ID NO: 5065629 - DNA, 25 bp, Homo sapien
gacaggttgatagcaaaccaccatg

SEQ ID NO: 5065630 - DNA, 25 bp, Homo sapien
aattatattgacatgaaaatctgaa

SEQ ID NO: 5065631 - DNA, 25 bp, Homo sapien
cacacatcagggccagtcgagggct

SEQ ID NO: 5065632 - DNA, 25 bp, Homo sapien
tgtataatattgattgaatagctgc

SEQ ID NO: 5065633 - DNA, 25 bp, Homo sapien
ataatattgattgaatagctgcctc

SEQ ID NO: 5065634 - DNA, 25 bp, Homo sapien
tttgtataatattgattgaatagct

SEQ ID NO: 5065635 - DNA, 25 bp, Homo sapien
tataatattgattgaatagctgcct

SEQ ID NO: 5065636 - DNA, 25 bp, Homo sapien
gatgttgtaaatacttatctagttc

SEQ ID NO: 5065637 - DNA, 25 bp, Homo sapien
acacagtcaacccatcttttatata

SEQ ID NO: 5065638 - DNA, 25 bp, Homo sapien
ccacacagtcaacccatcttttata

SEQ ID NO: 5065639 - DNA, 25 bp, Homo sapien
tgccacacagtcaacccatctttta

SEQ ID NO: 5065640 - DNA, 25 bp, Homo sapien
gctcatataaaagggatcatactct

SEQ ID NO: 5065641 - DNA, 25 bp, Homo sapien
cttcttgctcatataaaagggatca

SEQ ID NO: 5065642 - DNA, 25 bp, Homo sapien
aaagggatcatactcttttggatca

SEQ ID NO: 5065643 - DNA, 25 bp, Homo sapien
tactcttttggatcataatgttcta

SEQ ID NO: 5065644 - DNA, 25 bp, Homo sapien
agagcctacccgagacgctctcagg

SEQ ID NO: 5065645 - DNA, 25 bp, Homo sapien
gacgctctcaggtggagtctctgcc

SEQ ID NO: 5065646 - DNA, 25 bp, Homo sapien
agtctctgccagacatgggcaagga

SEQ ID NO: 5065647 - DNA, 25 bp, Homo sapien
agtgccaggtccataaagagtacag

SEQ ID NO: 5065648 - DNA, 25 bp, Homo sapien
caaagggtcatgaaatggtgggatg

SEQ ID NO: 5065649 - DNA, 25 bp, Homo sapien
tttcaaagggtcatgaaatggtggg

SEQ ID NO: 5065650 - DNA, 25 bp, Homo sapien
gggtcatgaaatggtgggatggtaa

SEQ ID NO: 5065651 - DNA, 25 bp, Homo sapien
ggtcatgaaatggtgggatggtaac

SEQ ID NO: 5065652 - DNA, 25 bp, Homo sapien
cacataacaattaggaactaagtac

SEQ ID NO: 5065653 - DNA, 25 bp, Homo sapien
aatgcatctgccattgctcttgggc

SEQ ID NO: 5065654 - DNA, 25 bp, Homo sapien
gctatgaaatcacataacaattagg

SEQ ID NO: 5065655 - DNA, 25 bp, Homo sapien
tctaaattaacatccttaaatgcat

SEQ ID NO: 5065656 - DNA, 25 bp, Homo sapien
cactttctatgtatcttgtaggcag

SEQ ID NO: 5065657 - DNA, 25 bp, Homo sapien
gcagtttcagccactcgtttggagt

SEQ ID NO: 5065658 - DNA, 25 bp, Homo sapien
tataaagtgccttgaattagaaatt

SEQ ID NO: 5065659 - DNA, 25 bp, Homo sapien
aattcactttctatgtatcttgtag

SEQ ID NO: 5065660 - DNA, 25 bp, Homo sapien
taatttctagtatattaaccattac

SEQ ID NO: 5065661 - DNA, 25 bp, Homo sapien
gaaaagataagccataggctgagag

SEQ ID NO: 5065662 - DNA, 25 bp, Homo sapien
aaagataagccataggctgagagaa

SEQ ID NO: 5065663 - DNA, 25 bp, Homo sapien
cattcaaaatatacgaaggattctt

SEQ ID NO: 5065664 - DNA, 25 bp, Homo sapien
agataagccataggctgagagaaat

SEQ ID NO: 5065665 - DNA, 25 bp, Homo sapien
gagaaccaaggatcagctaagcaaa

SEQ ID NO: 5065666 - DNA, 25 bp, Homo sapien
gatggagattgatttactgtttact

SEQ ID NO: 5065667 - DNA, 25 bp, Homo sapien
gagtttctgaaaccatgatggagat

SEQ ID NO: 5065668 - DNA, 25 bp, Homo sapien
tattccaactggtatacattcttgg

SEQ ID NO: 5065669 - DNA, 25 bp, Homo sapien
caaaagataaggagctcttgccaaa

SEQ ID NO: 5065670 - DNA, 25 bp, Homo sapien
ttccaaaagataaggagctcttgcc

SEQ ID NO: 5065671 - DNA, 25 bp, Homo sapien
tgggattccaaaagataaggagctc

SEQ ID NO: 5065672 - DNA, 25 bp, Homo sapien
tcttcctgggattccaaaagataag

SEQ ID NO: 5065673 - DNA, 25 bp, Homo sapien
tagcacagcggttctctttctagaa

SEQ ID NO: 5065674 - DNA, 25 bp, Homo sapien
tccctcctgatagcacagcggttct

SEQ ID NO: 5065675 - DNA, 25 bp, Homo sapien
tcctgatagcacagcggttctcttt

SEQ ID NO: 5065676 - DNA, 25 bp, Homo sapien
gcacttggattatttccctcctgat

SEQ ID NO: 5065677 - DNA, 25 bp, Homo sapien
aatctctcaatatgggggctttcac

SEQ ID NO: 5065678 - DNA, 25 bp, Homo sapien
gctggcaatctctcaatatgggggc

SEQ ID NO: 5065679 - DNA, 25 bp, Homo sapien
ctaatgcaatccaggagtcacaagg

SEQ ID NO: 5065680 - DNA, 25 bp, Homo sapien
cacaaggtgccgagtgaggaagcgt

SEQ ID NO: 5065681 - DNA, 25 bp, Homo sapien
ggtccacagagaacaagccctcact

SEQ ID NO: 5065682 - DNA, 25 bp, Homo sapien
ttcccgggatcctttccaccagtca

SEQ ID NO: 5065683 - DNA, 25 bp, Homo sapien
agtcacagggcctactccagggtcc

SEQ ID NO: 5065684 - DNA, 25 bp, Homo sapien
gggatcctttccaccagtcacaggg

SEQ ID NO: 5065685 - DNA, 25 bp, Homo sapien
aggagttggagggatgatcacatct

SEQ ID NO: 5065686 - DNA, 25 bp, Homo sapien
ctaggagttggagggatgatcacat

SEQ ID NO: 5065687 - DNA, 25 bp, Homo sapien
taggagttggagggatgatcacatc

SEQ ID NO: 5065688 - DNA, 25 bp, Homo sapien
tgaggatccttggagatcacgtagg

SEQ ID NO: 5065689 - DNA, 25 bp, Homo sapien
gatcacgtaggggactgacagcaga

SEQ ID NO: 5065690 - DNA, 25 bp, Homo sapien
gacctgaggatccttggagatcacg

SEQ ID NO: 5065691 - DNA, 25 bp, Homo sapien
tcccatctgggacctgaggatcctt

SEQ ID NO: 5065692 - DNA, 25 bp, Homo sapien
cagcagacaacaggcatgcagctga

SEQ ID NO: 5065693 - DNA, 25 bp, Homo sapien
gagacaacagcagacaacaggcatg

SEQ ID NO: 5065694 - DNA, 25 bp, Homo sapien
aacagcagacaacaggcatgcagct

SEQ ID NO: 5065695 - DNA, 25 bp, Homo sapien
tgcagagacaacagcagacaacagg

SEQ ID NO: 5065696 - DNA, 25 bp, Homo sapien
catggcccaacacctaatatttcta

SEQ ID NO: 5065697 - DNA, 25 bp, Homo sapien
acatggcccaacacctaatatttct

SEQ ID NO: 5065698 - DNA, 25 bp, Homo sapien
tcagcagttgcttatgcggcagcca

SEQ ID NO: 5065699 - DNA, 25 bp, Homo sapien
tccacgctaacaagggagctctgcc

SEQ ID NO: 5065700 - DNA, 25 bp, Homo sapien
taatgattgcaatggaatcagcccc

SEQ ID NO: 5065701 - DNA, 25 bp, Homo sapien
gtttattatctgagaatgcccaggg

SEQ ID NO: 5065702 - DNA, 25 bp, Homo sapien
agcagccccaaacgcggggagggag

SEQ ID NO: 5065703 - DNA, 25 bp, Homo sapien
tcagcagccccaaacgcggggaggg

SEQ ID NO: 5065704 - DNA, 25 bp, Homo sapien
gcttcagcagccccaaacgcgggga

SEQ ID NO: 5065705 - DNA, 25 bp, Homo sapien
ttcagcagccccaaacgcggggagg

SEQ ID NO: 5065706 - DNA, 25 bp, Homo sapien
gaaagcgttccccagctaagctgag

SEQ ID NO: 5065707 - DNA, 25 bp, Homo sapien
cactgagagattcagggacatggtc

SEQ ID NO: 5065708 - DNA, 25 bp, Homo sapien
tcagcctttcctcgcgctgtctgga

SEQ ID NO: 5065709 - DNA, 25 bp, Homo sapien
tgccagagccgagtgactcatctct

SEQ ID NO: 5065710 - DNA, 25 bp, Homo sapien
caattcttgagtgccgtccttggcc

SEQ ID NO: 5065711 - DNA, 25 bp, Homo sapien
accctgattcctgtgagcagatgac

SEQ ID NO: 5065712 - DNA, 25 bp, Homo sapien
tttcaccaatcaaggatcagggtgt

SEQ ID NO: 5065713 - DNA, 25 bp, Homo sapien
attaaaggaagttcgttgcagatgc

SEQ ID NO: 5065714 - DNA, 25 bp, Homo sapien
gcaagccatgcttgtatccactcca

SEQ ID NO: 5065715 - DNA, 25 bp, Homo sapien
gccatgcttgtatccactccagctg

SEQ ID NO: 5065716 - DNA, 25 bp, Homo sapien
ccatgcttgtatccactccagctgg

SEQ ID NO: 5065717 - DNA, 25 bp, Homo sapien
taactttagggcagagagcctatgt

SEQ ID NO: 5065718 - DNA, 25 bp, Homo sapien
aatcaaaaagtctaggccagtcatg

SEQ ID NO: 5065719 - DNA, 25 bp, Homo sapien
gatgttccctggcaatgtcgccttt

SEQ ID NO: 5065720 - DNA, 25 bp, Homo sapien
tgaagacttgtctaccaggagagca

SEQ ID NO: 5065721 - DNA, 25 bp, Homo sapien
gatgtgaagaaaccgacttcaaaac

SEQ ID NO: 5065722 - DNA, 25 bp, Homo sapien
aggtggacctggtttggattctgat

SEQ ID NO: 5065723 - DNA, 25 bp, Homo sapien
cacaggtggacctggtttggattct

SEQ ID NO: 5065724 - DNA, 25 bp, Homo sapien
tgtgaagaaaccgacttcaaaacat

SEQ ID NO: 5065725 - DNA, 25 bp, Homo sapien
tggttttaagtgacgcgtccggctc

SEQ ID NO: 5065726 - DNA, 25 bp, Homo sapien
ttgagggtgacaacgtaagaggaat

SEQ ID NO: 5065727 - DNA, 25 bp, Homo sapien
atggttttaagtgacgcgtccggct

SEQ ID NO: 5065728 - DNA, 25 bp, Homo sapien
gtaagattgagggtgacaacgtaag

SEQ ID NO: 5065729 - DNA, 25 bp, Homo sapien
ccagctccgggggaagtcgcaggcc

SEQ ID NO: 5065730 - DNA, 25 bp, Homo sapien
tcctggagcggcgacggagaaagga

SEQ ID NO: 5065731 - DNA, 25 bp, Homo sapien
ccgcgtcctggagcggcgacggaga

SEQ ID NO: 5065732 - DNA, 25 bp, Homo sapien
gcgacggagaaaggagcccgcgggc

SEQ ID NO: 5065733 - DNA, 25 bp, Homo sapien
ataactcgcagttttggtggcagcc

SEQ ID NO: 5065734 - DNA, 25 bp, Homo sapien
gaaatgttcatcataactcgcagtt

SEQ ID NO: 5065735 - DNA, 25 bp, Homo sapien
atcataactcgcagttttggtggca

SEQ ID NO: 5065736 - DNA, 25 bp, Homo sapien
tgttcatcataactcgcagttttgg

SEQ ID NO: 5065737 - DNA, 25 bp, Homo sapien
ctccggccattctcttaacttttct

SEQ ID NO: 5065738 - DNA, 25 bp, Homo sapien
gctccggccattctcttaacttttc

SEQ ID NO: 5065739 - DNA, 25 bp, Homo sapien
cgggctccggccattctcttaactt

SEQ ID NO: 5065740 - DNA, 25 bp, Homo sapien
actcgggctccggccattctcttaa

SEQ ID NO: 5065741 - DNA, 25 bp, Homo sapien
cccaggctggcgactggaaacactc

SEQ ID NO: 5065742 - DNA, 25 bp, Homo sapien
cttcaacgcctgctttaaagcaggc

SEQ ID NO: 5065743 - DNA, 25 bp, Homo sapien
aaatctgagcccgaacattcccctt

SEQ ID NO: 5065744 - DNA, 25 bp, Homo sapien
tggcgactggaaacactcttggcca

SEQ ID NO: 5065745 - DNA, 25 bp, Homo sapien
cagacgctgaagtatgcagaattga

SEQ ID NO: 5065746 - DNA, 25 bp, Homo sapien
tatgcagaattgactggcaagccca

SEQ ID NO: 5065747 - DNA, 25 bp, Homo sapien
gaagtatgcagaattgactggcaag

SEQ ID NO: 5065748 - DNA, 25 bp, Homo sapien
gctgaagtatgcagaattgactggc

SEQ ID NO: 5065749 - DNA, 25 bp, Homo sapien
taatattgcacatactgcttcatca

SEQ ID NO: 5065750 - DNA, 25 bp, Homo sapien
tgcacatactgcttcatcaatgtct

SEQ ID NO: 5065751 - DNA, 25 bp, Homo sapien
ttaaataatattgcacatactgctt

SEQ ID NO: 5065752 - DNA, 25 bp, Homo sapien
catcaatgtcttctctagctaatac

SEQ ID NO: 5065753 - DNA, 25 bp, Homo sapien
tttccttaaaagtatccacatgctg

SEQ ID NO: 5065754 - DNA, 25 bp, Homo sapien
atccacatgctgaaaatacatatcc

SEQ ID NO: 5065755 - DNA, 25 bp, Homo sapien
gtatccacatgctgaaaatacatat

SEQ ID NO: 5065756 - DNA, 25 bp, Homo sapien
ttcaacccattttttatgtaacatc

SEQ ID NO: 5065757 - DNA, 25 bp, Homo sapien
acactgaagaccagttctcctctct

SEQ ID NO: 5065758 - DNA, 25 bp, Homo sapien
tcacactgaagaccagttctcctct

SEQ ID NO: 5065759 - DNA, 25 bp, Homo sapien
tctcacactgaagaccagttctcct

SEQ ID NO: 5065760 - DNA, 25 bp, Homo sapien
ctgtctcacactgaagaccagttct

SEQ ID NO: 5065761 - DNA, 25 bp, Homo sapien
tgagaaatcactggacaattagcag

SEQ ID NO: 5065762 - DNA, 25 bp, Homo sapien
ccagttgctcttgaaggagtgagaa

SEQ ID NO: 5065763 - DNA, 25 bp, Homo sapien
gataaaaaatcgaaatcaacactct

SEQ ID NO: 5065764 - DNA, 25 bp, Homo sapien
acaggaagataaaaaatcgaaatca

SEQ ID NO: 5065765 - DNA, 25 bp, Homo sapien
ggctcttgcagaggctttatgccac

SEQ ID NO: 5065766 - DNA, 25 bp, Homo sapien
tcaagttcttttatggaatgtcgtt

SEQ ID NO: 5065767 - DNA, 25 bp, Homo sapien
tgcagcctggccttctctatttctt

SEQ ID NO: 5065768 - DNA, 25 bp, Homo sapien
gtaagttttactcctggctcttgca

SEQ ID NO: 5065769 - DNA, 25 bp, Homo sapien
caagagcttcagtaggaaataaagt

SEQ ID NO: 5065770 - DNA, 25 bp, Homo sapien
cataatacaaaggtgatgataataa

SEQ ID NO: 5065771 - DNA, 25 bp, Homo sapien
agtaagttgcaagttaaacaaatat

SEQ ID NO: 5065772 - DNA, 25 bp, Homo sapien
aagacaaaagtgtgactagttacaa

SEQ ID NO: 5065773 - DNA, 25 bp, Homo sapien
tcaaatagccacacgaggcatcctc

SEQ ID NO: 5065774 - DNA, 25 bp, Homo sapien
acgaggcatcctctgggtgtgtcct

SEQ ID NO: 5065775 - DNA, 25 bp, Homo sapien
tgtcctcccggaggaatttcaccag

SEQ ID NO: 5065776 - DNA, 25 bp, Homo sapien
tctgggtgtgtcctcccggaggaat

SEQ ID NO: 5065777 - DNA, 25 bp, Homo sapien
aacgcagcctgacttaggtcggccg

SEQ ID NO: 5065778 - DNA, 25 bp, Homo sapien
gcagcctgacttaggtcggccgtct

SEQ ID NO: 5065779 - DNA, 25 bp, Homo sapien
ttcaaacgcagcctgacttaggtcg

SEQ ID NO: 5065780 - DNA, 25 bp, Homo sapien
agcctgacttaggtcggccgtcttt

SEQ ID NO: 5065781 - DNA, 25 bp, Homo sapien
ccagtatgtgctgctcgtgggtgct

SEQ ID NO: 5065782 - DNA, 25 bp, Homo sapien
tgctcgtgggtgctgcaaagccctg

SEQ ID NO: 5065783 - DNA, 25 bp, Homo sapien
ttctggaaccagtatgtgctgctcg

SEQ ID NO: 5065784 - DNA, 25 bp, Homo sapien
tgctgctcgtgggtgctgcaaagcc

SEQ ID NO: 5065785 - DNA, 25 bp, Homo sapien
gggcgaaggcgctgaagaaatctca

SEQ ID NO: 5065786 - DNA, 25 bp, Homo sapien
gagtttcttcatgcaaggcttcccc

SEQ ID NO: 5065787 - DNA, 25 bp, Homo sapien
ccctcacctcggaaggacaggatgt

SEQ ID NO: 5065788 - DNA, 25 bp, Homo sapien
ggactaaggagaacaccatctttgg

SEQ ID NO: 5065789 - DNA, 25 bp, Homo sapien
cacagacggagaatcccttactccc

SEQ ID NO: 5065790 - DNA, 25 bp, Homo sapien
cagacggagaatcccttactccctg

SEQ ID NO: 5065791 - DNA, 25 bp, Homo sapien
acagacggagaatcccttactccct

SEQ ID NO: 5065792 - DNA, 25 bp, Homo sapien
cctggagagaccggggacagcgatg

SEQ ID NO: 5065793 - DNA, 25 bp, Homo sapien
aatgtgagctggtgggtatgtcaac

SEQ ID NO: 5065794 - DNA, 25 bp, Homo sapien
aaaatacatggaatgaggagctccc

SEQ ID NO: 5065795 - DNA, 25 bp, Homo sapien
tctcaccacacacacgaaaacagta

SEQ ID NO: 5065796 - DNA, 25 bp, Homo sapien
gtatgtcaacaagcttgactgtggc

SEQ ID NO: 5065797 - DNA, 25 bp, Homo sapien
cccttgtatgggactgttagataag

SEQ ID NO: 5065798 - DNA, 25 bp, Homo sapien
ccctagaaatgtacagatggtcaac

SEQ ID NO: 5065799 - DNA, 25 bp, Homo sapien
tactttcaaacttcctcgtaaagca

SEQ ID NO: 5065800 - DNA, 25 bp, Homo sapien
agtcgaaagataacaagccttccct

SEQ ID NO: 5065801 - DNA, 25 bp, Homo sapien
atcactctttttcccacaggctggg

SEQ ID NO: 5065802 - DNA, 25 bp, Homo sapien
aacggggtctctgctgtctggttcc

SEQ ID NO: 5065803 - DNA, 25 bp, Homo sapien
gggacccctgtgctgttggctgtcc

SEQ ID NO: 5065804 - DNA, 25 bp, Homo sapien
agcagcccaggaacggggtctctgc

SEQ ID NO: 5065805 - DNA, 25 bp, Homo sapien
agggaggccaggtgctgccccagca

SEQ ID NO: 5065806 - DNA, 25 bp, Homo sapien
ctgcagggaggccaggtgctgcccc

SEQ ID NO: 5065807 - DNA, 25 bp, Homo sapien
cttctgcagggaggccaggtgctgc

SEQ ID NO: 5065808 - DNA, 25 bp, Homo sapien
gcagggaggccaggtgctgccccag

SEQ ID NO: 5065809 - DNA, 25 bp, Homo sapien
agtccacgaagcttcagtaccaagg

SEQ ID NO: 5065810 - DNA, 25 bp, Homo sapien
cacgaagcttcagtaccaagggtgg

SEQ ID NO: 5065811 - DNA, 25 bp, Homo sapien
caagtccacgaagcttcagtaccaa

SEQ ID NO: 5065812 - DNA, 25 bp, Homo sapien
tccacgaagcttcagtaccaagggt

SEQ ID NO: 5065813 - DNA, 25 bp, Homo sapien
ttactgggaacgagagctacggaac

SEQ ID NO: 5065814 - DNA, 25 bp, Homo sapien
cagggctgcggggaccgtaatcctc

SEQ ID NO: 5065815 - DNA, 25 bp, Homo sapien
gaccgtaatcctcactgtggcgagt

SEQ ID NO: 5065816 - DNA, 25 bp, Homo sapien
cgagagctacggaaccgtcctgtgt

SEQ ID NO: 5065817 - DNA, 25 bp, Homo sapien
ctgccctgatgactcaaaaccagct

SEQ ID NO: 5065818 - DNA, 25 bp, Homo sapien
tatcattgcccatatgtacagaaag

SEQ ID NO: 5065819 - DNA, 25 bp, Homo sapien
ggatggaacttcgtcaaagtctgac

SEQ ID NO: 5065820 - DNA, 25 bp, Homo sapien
cagatgaaaggctcttaaaaggtac

SEQ ID NO: 5065821 - DNA, 25 bp, Homo sapien
gtgactttggtgaatctacctcgtg

SEQ ID NO: 5065822 - DNA, 25 bp, Homo sapien
tcagtcctgaccatgtgtggcctgc

SEQ ID NO: 5065823 - DNA, 25 bp, Homo sapien
tagaagaccttagacgctagacccc

SEQ ID NO: 5065824 - DNA, 25 bp, Homo sapien
cattgatcgggtctacaccctccga

SEQ ID NO: 5065825 - DNA, 25 bp, Homo sapien
gaactctctctggacataggcgggt

SEQ ID NO: 5065826 - DNA, 25 bp, Homo sapien
aaaggagctgggttcacttgatgga

SEQ ID NO: 5065827 - DNA, 25 bp, Homo sapien
cccaaaaaggagctgggttcacttg

SEQ ID NO: 5065828 - DNA, 25 bp, Homo sapien
caaaaaggagctgggttcacttgat

SEQ ID NO: 5065829 - DNA, 25 bp, Homo sapien
aggagctgggttcacttgatggatt

SEQ ID NO: 5065830 - DNA, 25 bp, Homo sapien
tggccgctgagctgtcccacatgca

SEQ ID NO: 5065831 - DNA, 25 bp, Homo sapien
cgagaagatgccggtgcagatgatt

SEQ ID NO: 5065832 - DNA, 25 bp, Homo sapien
catgcaggcttacatcaggttctgc

SEQ ID NO: 5065833 - DNA, 25 bp, Homo sapien
ggctttgcgggtgcggaagaagacc

SEQ ID NO: 5065834 - DNA, 25 bp, Homo sapien
ctgccggataatgcttgagattgaa

SEQ ID NO: 5065835 - DNA, 25 bp, Homo sapien
cgggagaacaagagggcattcgcat

SEQ ID NO: 5065836 - DNA, 25 bp, Homo sapien
agggcattcgcatggcttcgttgga

SEQ ID NO: 5065837 - DNA, 25 bp, Homo sapien
aaagtctctaatgagctctttcccc

SEQ ID NO: 5065838 - DNA, 25 bp, Homo sapien
tcacaaatagtgacggaagctctca

SEQ ID NO: 5065839 - DNA, 25 bp, Homo sapien
tccacgcagagtcaaagcaaggcat

SEQ ID NO: 5065840 - DNA, 25 bp, Homo sapien
cttcagctcgtcgtcgaggtgagga

SEQ ID NO: 5065841 - DNA, 25 bp, Homo sapien
catgagagatggtgggcatcagact

SEQ ID NO: 5065842 - DNA, 25 bp, Homo sapien
tgtgagtgccggctcattaatgcca

SEQ ID NO: 5065843 - DNA, 25 bp, Homo sapien
gacattgctgatttgccactttgga

SEQ ID NO: 5065844 - DNA, 25 bp, Homo sapien
tccacagggtgtgctgatctgcaaa

SEQ ID NO: 5065845 - DNA, 25 bp, Homo sapien
tgagctgattcagaccgaagagcgg

SEQ ID NO: 5065846 - DNA, 25 bp, Homo sapien
agtggtctgaagcatctgattcatt

SEQ ID NO: 5065847 - DNA, 25 bp, Homo sapien
tcttgaggtggtgagattcttcaca

SEQ ID NO: 5065848 - DNA, 25 bp, Homo sapien
catttcagtaacttcgaaaaatgtc

SEQ ID NO: 5065849 - DNA, 25 bp, Homo sapien
tgacccactaatggctcatgacctg

SEQ ID NO: 5065850 - DNA, 25 bp, Homo sapien
ttacatttcgaatacatacataact

SEQ ID NO: 5065851 - DNA, 25 bp, Homo sapien
tttacatttcgaatacatacataac

SEQ ID NO: 5065852 - DNA, 25 bp, Homo sapien
attttacatttcgaatacatacata

SEQ ID NO: 5065853 - DNA, 25 bp, Homo sapien
tccacaaaagcctcgtcaagcagac

SEQ ID NO: 5065854 - DNA, 25 bp, Homo sapien
cagacatttggattagcctcagtga

SEQ ID NO: 5065855 - DNA, 25 bp, Homo sapien
caccactggatcatatcaggatcag

SEQ ID NO: 5065856 - DNA, 25 bp, Homo sapien
caggatcagtgccatttcgccaggt

SEQ ID NO: 5065857 - DNA, 25 bp, Homo sapien
gaagaagatcagacctcctagaaga

SEQ ID NO: 5065858 - DNA, 25 bp, Homo sapien
tccaagtggaacctgctagtaagcg

SEQ ID NO: 5065859 - DNA, 25 bp, Homo sapien
taatgaaattttggctctgcaacca

SEQ ID NO: 5065860 - DNA, 25 bp, Homo sapien
caagtccatgctgttagcctctaca

SEQ ID NO: 5065861 - DNA, 25 bp, Homo sapien
taaattgttgcaaagtgctgttttt

SEQ ID NO: 5065862 - DNA, 25 bp, Homo sapien
aaatataaattactgggaatgacct

SEQ ID NO: 5065863 - DNA, 25 bp, Homo sapien
aatataaattactgggaatgacctt

SEQ ID NO: 5065864 - DNA, 25 bp, Homo sapien
atataaattactgggaatgaccttc

SEQ ID NO: 5065865 - DNA, 25 bp, Homo sapien
gattttaccatcagacttctctaat

SEQ ID NO: 5065866 - DNA, 25 bp, Homo sapien
gaggctctaagattgattttaccat

SEQ ID NO: 5065867 - DNA, 25 bp, Homo sapien
tgattttaccatcagacttctctaa

SEQ ID NO: 5065868 - DNA, 25 bp, Homo sapien
ttgattttaccatcagacttctcta

SEQ ID NO: 5065869 - DNA, 25 bp, Homo sapien
atgtgctgcagcgtgtgtattcttt

SEQ ID NO: 5065870 - DNA, 25 bp, Homo sapien
ctaatgaaggtactgcatcatgtgc

SEQ ID NO: 5065871 - DNA, 25 bp, Homo sapien
tgtgctgcagcgtgtgtattctttt

SEQ ID NO: 5065872 - DNA, 25 bp, Homo sapien
tgaaggtactgcatcatgtgctgca

SEQ ID NO: 5065873 - DNA, 25 bp, Homo sapien
gcagatattccctgtgtggacacat

SEQ ID NO: 5065874 - DNA, 25 bp, Homo sapien
cgttataggttagttgcaacatgga

SEQ ID NO: 5065875 - DNA, 25 bp, Homo sapien
tttacccgtgcatgatgtgataaca

SEQ ID NO: 5065876 - DNA, 25 bp, Homo sapien
tctgaagccctatcggtgaacagtt

SEQ ID NO: 5065877 - DNA, 25 bp, Homo sapien
agccatagcagctctggtttaggag

SEQ ID NO: 5065878 - DNA, 25 bp, Homo sapien
ttttagaacaccattttatgggagc

SEQ ID NO: 5065879 - DNA, 25 bp, Homo sapien
tatgggagctacattactgtgacat

SEQ ID NO: 5065880 - DNA, 25 bp, Homo sapien
tagtcttaaactagatttacaggat

SEQ ID NO: 5065881 - DNA, 25 bp, Homo sapien
gattattagaagcatcctaggacca

SEQ ID NO: 5065882 - DNA, 25 bp, Homo sapien
ggtctccgagccatgatattgaaca

SEQ ID NO: 5065883 - DNA, 25 bp, Homo sapien
cttatttggttgtgaggcagctcca

SEQ ID NO: 5065884 - DNA, 25 bp, Homo sapien
cactaactgaatccatggaagggct

SEQ ID NO: 5065885 - DNA, 25 bp, Homo sapien
ccccgtctgttttagcatctccatt

SEQ ID NO: 5065886 - DNA, 25 bp, Homo sapien
actctgcttcctgtataacaccact

SEQ ID NO: 5065887 - DNA, 25 bp, Homo sapien
ttcctgtataacaccactttccctg

SEQ ID NO: 5065888 - DNA, 25 bp, Homo sapien
cctgtataacaccactttccctggg

SEQ ID NO: 5065889 - DNA, 25 bp, Homo sapien
tgcttcctgtataacaccactttcc

SEQ ID NO: 5065890 - DNA, 25 bp, Homo sapien
ggacagtgggcggatgcttggcgtc

SEQ ID NO: 5065891 - DNA, 25 bp, Homo sapien
acagtgggcggatgcttggcgtcta

SEQ ID NO: 5065892 - DNA, 25 bp, Homo sapien
agtgggcggatgcttggcgtctacc

SEQ ID NO: 5065893 - DNA, 25 bp, Homo sapien
gagaggacagtgggcggatgcttgg

SEQ ID NO: 5065894 - DNA, 25 bp, Homo sapien
cccccggcttcctgcggaggccgcg

SEQ ID NO: 5065895 - DNA, 25 bp, Homo sapien
cagagaggagcgcttcggacccgac

SEQ ID NO: 5065896 - DNA, 25 bp, Homo sapien
tcggacccgaccgactcggagcaga

SEQ ID NO: 5065897 - DNA, 25 bp, Homo sapien
ttcagggttcaatgccccggaactc

SEQ ID NO: 5065898 - DNA, 25 bp, Homo sapien
gagcagaccttcagggttcaatgcc

SEQ ID NO: 5065899 - DNA, 25 bp, Homo sapien
tgggtctgtgcaactccaggaaggg

SEQ ID NO: 5065900 - DNA, 25 bp, Homo sapien
gtctgtgcaactccaggaagggctg

SEQ ID NO: 5065901 - DNA, 25 bp, Homo sapien
aggtgggtctgtgcaactccaggaa

SEQ ID NO: 5065902 - DNA, 25 bp, Homo sapien
ggaggaggagccaggtgggtctgtg

SEQ ID NO: 5065903 - DNA, 25 bp, Homo sapien
aggaaaagcaccacccaagctcagc

SEQ ID NO: 5065904 - DNA, 25 bp, Homo sapien
cagagaattcgttcccccagatcag

SEQ ID NO: 5065905 - DNA, 25 bp, Homo sapien
accccggcgtctgccgtggcaggaa

SEQ ID NO: 5065906 - DNA, 25 bp, Homo sapien
acttcggcgagtgagaaggttccag

SEQ ID NO: 5065907 - DNA, 25 bp, Homo sapien
tcttggtcaggttctaatcgaagag

SEQ ID NO: 5065908 - DNA, 25 bp, Homo sapien
tgtctgtcaggtcttggtcaggttc

SEQ ID NO: 5065909 - DNA, 25 bp, Homo sapien
ctgtctgtcaggtcttggtcaggtt

SEQ ID NO: 5065910 - DNA, 25 bp, Homo sapien
tctaatcgaagagttaggaaaaaca

SEQ ID NO: 5065911 - DNA, 25 bp, Homo sapien
gctacgaatgtcaagatctgtgcct

SEQ ID NO: 5065912 - DNA, 25 bp, Homo sapien
ctgtgcctgcattggctccacccag

SEQ ID NO: 5065913 - DNA, 25 bp, Homo sapien
tgaatatttgctacgaatgtcaaga

SEQ ID NO: 5065914 - DNA, 25 bp, Homo sapien
attcccatctgaatatttgctacga

SEQ ID NO: 5065915 - DNA, 25 bp, Homo sapien
gattggattccctttcgctgagcta

SEQ ID NO: 5065916 - DNA, 25 bp, Homo sapien
tggcctaggcccaagtctcggctaa

SEQ ID NO: 5065917 - DNA, 25 bp, Homo sapien
tgaatgaacacgtcctgtccaggga

SEQ ID NO: 5065918 - DNA, 25 bp, Homo sapien
cgatgaaataagcagacagctgggc

SEQ ID NO: 5065919 - DNA, 25 bp, Homo sapien
ggcatttggcatacggcctggcaca

SEQ ID NO: 5065920 - DNA, 25 bp, Homo sapien
gacccggtgagggtaaaatcatgaa

SEQ ID NO: 5065921 - DNA, 25 bp, Homo sapien
tataccaggtgccttgatgagctac

SEQ ID NO: 5065922 - DNA, 25 bp, Homo sapien
gaagatcaggctgtttataccaggt

SEQ ID NO: 5065923 - DNA, 25 bp, Homo sapien
ggacttgggaccaaatttcgtctgc

SEQ ID NO: 5065924 - DNA, 25 bp, Homo sapien
tagcttcaatgcgtggtttttctgt

SEQ ID NO: 5065925 - DNA, 25 bp, Homo sapien
ccaaatttcgtctgcattagtgttt

SEQ ID NO: 5065926 - DNA, 25 bp, Homo sapien
gcttcaatgcgtggtttttctgtgt

SEQ ID NO: 5065927 - DNA, 25 bp, Homo sapien
aaagctcttgatcctgggttctcag

SEQ ID NO: 5065928 - DNA, 25 bp, Homo sapien
tgggatattcgaagggtaatgtctt

SEQ ID NO: 5065929 - DNA, 25 bp, Homo sapien
cctaatagatggcttgggatattcg

SEQ ID NO: 5065930 - DNA, 25 bp, Homo sapien
gcaaagctcttgatcctgggttctc

SEQ ID NO: 5065931 - DNA, 25 bp, Homo sapien
tgccccgctttttgccggctgcttg

SEQ ID NO: 5065932 - DNA, 25 bp, Homo sapien
caactggctgtttcccgatggaatc

SEQ ID NO: 5065933 - DNA, 25 bp, Homo sapien
agctgccccgctttttgccggctgc

SEQ ID NO: 5065934 - DNA, 25 bp, Homo sapien
tgtttcccgatggaatccactttct

SEQ ID NO: 5065935 - DNA, 25 bp, Homo sapien
tggctttcggcaggattgttctccc

SEQ ID NO: 5065936 - DNA, 25 bp, Homo sapien
cattgaactcaatctcgtgccgaaa

SEQ ID NO: 5065937 - DNA, 25 bp, Homo sapien
tgctctgaaacgtaaagccccattg

SEQ ID NO: 5065938 - DNA, 25 bp, Homo sapien
gagaaaaggagtcgcctacattgaa

SEQ ID NO: 5065939 - DNA, 25 bp, Homo sapien
tgcagagggaacctgacgcaggctc

SEQ ID NO: 5065940 - DNA, 25 bp, Homo sapien
ggaggccctcaaggccgcgaggcag

SEQ ID NO: 5065941 - DNA, 25 bp, Homo sapien
cagccgtcggaggacagagctcagc

SEQ ID NO: 5065942 - DNA, 25 bp, Homo sapien
cagagctcagcaaatcgcgtcagac

SEQ ID NO: 5065943 - DNA, 25 bp, Homo sapien
ctccgcggccgcgcggctcgtgaca

SEQ ID NO: 5065944 - DNA, 25 bp, Homo sapien
tagggcctccgcggccgcgcggctc

SEQ ID NO: 5065945 - DNA, 25 bp, Homo sapien
ggcctccgcggccgcgcggctcgtg

SEQ ID NO: 5065946 - DNA, 25 bp, Homo sapien
ctagggcctccgcggccgcgcggct

SEQ ID NO: 5065947 - DNA, 25 bp, Homo sapien
aacccaagcgccgtcgagggctgcg

SEQ ID NO: 5065948 - DNA, 25 bp, Homo sapien
cgagattccgagaggtgagcgggcc

SEQ ID NO: 5065949 - DNA, 25 bp, Homo sapien
cggccaaggtcacggcgtcgtcggg

SEQ ID NO: 5065950 - DNA, 25 bp, Homo sapien
ccatttcgcggtcccggcaggcgag

SEQ ID NO: 5065951 - DNA, 25 bp, Homo sapien
tctaacgtcgtcagactgggcagtg

SEQ ID NO: 5065952 - DNA, 25 bp, Homo sapien
tcatataatctacgcttcacggcag

SEQ ID NO: 5065953 - DNA, 25 bp, Homo sapien
tctacaagaaacgaggagggccaag

SEQ ID NO: 5065954 - DNA, 25 bp, Homo sapien
tacaacatcataggaggcccctctg

SEQ ID NO: 5065955 - DNA, 25 bp, Homo sapien
cacaatcctacaggttttctgagag

SEQ ID NO: 5065956 - DNA, 25 bp, Homo sapien
tgttcttataagcagcagtcctcta

SEQ ID NO: 5065957 - DNA, 25 bp, Homo sapien
gaagagatcaagtgtaagctacgta

SEQ ID NO: 5065958 - DNA, 25 bp, Homo sapien
cactgttcccaaagcatagagtctg

SEQ ID NO: 5065959 - DNA, 25 bp, Homo sapien
gaatcactgttaagaacttacccta

SEQ ID NO: 5065960 - DNA, 25 bp, Homo sapien
cagatgggctcaaaatcactaaaca

SEQ ID NO: 5065961 - DNA, 25 bp, Homo sapien
tataaactaatcagatggtattgcc

SEQ ID NO: 5065962 - DNA, 25 bp, Homo sapien
gatggcaatcagttgttcttataaa

SEQ ID NO: 5065963 - DNA, 25 bp, Homo sapien
tacccagcagggatacttgaagcga

SEQ ID NO: 5065964 - DNA, 25 bp, Homo sapien
gagaaaagagcctacaaaacttgca

SEQ ID NO: 5065965 - DNA, 25 bp, Homo sapien
gaagcgaagtgaattgaaactgggc

SEQ ID NO: 5065966 - DNA, 25 bp, Homo sapien
gataggtcaaaagcacaactgtgaa

SEQ ID NO: 5065967 - DNA, 25 bp, Homo sapien
aagtgagccaagaaagtaacgagcc

SEQ ID NO: 5065968 - DNA, 25 bp, Homo sapien
gctatagagcatccaactgagacat

SEQ ID NO: 5065969 - DNA, 25 bp, Homo sapien
gatgtctaagtaggctgccaaccca

SEQ ID NO: 5065970 - DNA, 25 bp, Homo sapien
gagtgaagctatgccatactgccaa

SEQ ID NO: 5065971 - DNA, 25 bp, Homo sapien
ccaggagtcctatttgtacaaagca

SEQ ID NO: 5065972 - DNA, 25 bp, Homo sapien
tcatgaatggtcatcccagcgtact

SEQ ID NO: 5065973 - DNA, 25 bp, Homo sapien
tacaggatatagagagggcagagca

SEQ ID NO: 5065974 - DNA, 25 bp, Homo sapien
cattctcaagtggtcacaccaggag

SEQ ID NO: 5065975 - DNA, 25 bp, Homo sapien
actgctaacaggcacggaatttctt

SEQ ID NO: 5065976 - DNA, 25 bp, Homo sapien
gaatggggagacactgctaacaggc

SEQ ID NO: 5065977 - DNA, 25 bp, Homo sapien
agacagcaaatagattagtgggtgc

SEQ ID NO: 5065978 - DNA, 25 bp, Homo sapien
aacaggcacggaatttctttctgag

SEQ ID NO: 5065979 - DNA, 25 bp, Homo sapien
ttaggaacgccatacaaaacatgtt

SEQ ID NO: 5065980 - DNA, 25 bp, Homo sapien
gagtccaagcaaaggtcacagattg

SEQ ID NO: 5065981 - DNA, 25 bp, Homo sapien
ttattccaatgcctggagtccaagc

SEQ ID NO: 5065982 - DNA, 25 bp, Homo sapien
caatgaatccgtaccatctctgtct

SEQ ID NO: 5065983 - DNA, 25 bp, Homo sapien
atatgctccatttatcaggttaagg

SEQ ID NO: 5065984 - DNA, 25 bp, Homo sapien
catcatacagattagaacctccagt

SEQ ID NO: 5065985 - DNA, 25 bp, Homo sapien
aagagatatacttcccttgtctgtg

SEQ ID NO: 5065986 - DNA, 25 bp, Homo sapien
tctaagtacttcatagtgctcgatg

SEQ ID NO: 5065987 - DNA, 25 bp, Homo sapien
accataatgtgagcgttccagttgc

SEQ ID NO: 5065988 - DNA, 25 bp, Homo sapien
cagtcagtccttttaatgttagcca

SEQ ID NO: 5065989 - DNA, 25 bp, Homo sapien
ccagttgccaacacttagtacagtc

SEQ ID NO: 5065990 - DNA, 25 bp, Homo sapien
ttgaaacccataccaccctattgtg

SEQ ID NO: 5065991 - DNA, 25 bp, Homo sapien
cagtttctaacaatggtacccatga

SEQ ID NO: 5065992 - DNA, 25 bp, Homo sapien
gaggaccgaaggacacagtccatga

SEQ ID NO: 5065993 - DNA, 25 bp, Homo sapien
ttttctgaaatgcatggataacccc

SEQ ID NO: 5065994 - DNA, 25 bp, Homo sapien
agaaagacatcaagggaggaccgaa

SEQ ID NO: 5065995 - DNA, 25 bp, Homo sapien
ttcaacctaatctttaactccacca

SEQ ID NO: 5065996 - DNA, 25 bp, Homo sapien
gctgcccaatttaccatagttctct

SEQ ID NO: 5065997 - DNA, 25 bp, Homo sapien
ctgcctaaagtaccatccctagtaa

SEQ ID NO: 5065998 - DNA, 25 bp, Homo sapien
gcaagtaagtgagaggtcattagat

SEQ ID NO: 5065999 - DNA, 25 bp, Homo sapien
tatttctgcccctaaatccatggct

SEQ ID NO: 5066000 - DNA, 25 bp, Homo sapien
gcaaacttggatcactgtaatcaca

SEQ ID NO: 5066001 - DNA, 25 bp, Homo sapien
aacctataggtttacatgatcaaag

SEQ ID NO: 5066002 - DNA, 25 bp, Homo sapien
aatccatggctcatgttactacacc

SEQ ID NO: 5066003 - DNA, 25 bp, Homo sapien
aggagacccactcacgtgcagagac

SEQ ID NO: 5066004 - DNA, 25 bp, Homo sapien
aaattataaagaccagcaatgctat

SEQ ID NO: 5066005 - DNA, 25 bp, Homo sapien
atgccaaattataaagaccagcaat

SEQ ID NO: 5066006 - DNA, 25 bp, Homo sapien
attataaagaccagcaatgctatga

SEQ ID NO: 5066007 - DNA, 25 bp, Homo sapien
aacctgcttttatatcaagtgacca

SEQ ID NO: 5066008 - DNA, 25 bp, Homo sapien
ccataagtgtgggattaccaggaag

SEQ ID NO: 5066009 - DNA, 25 bp, Homo sapien
gctactagtgcccaaaccagggatg

SEQ ID NO: 5066010 - DNA, 25 bp, Homo sapien
ggattgtccccttcttagacacaaa

SEQ ID NO: 5066011 - DNA, 25 bp, Homo sapien
taagcccctagatggagcactaagc

SEQ ID NO: 5066012 - DNA, 25 bp, Homo sapien
tgtcattgtatcctcagagactagc

SEQ ID NO: 5066013 - DNA, 25 bp, Homo sapien
tccactgtgttttgacccagcacct

SEQ ID NO: 5066014 - DNA, 25 bp, Homo sapien
ttaaaacttgatcccctaggtggca

SEQ ID NO: 5066015 - DNA, 25 bp, Homo sapien
ccatgtggaggcatacaaaagtgtc

SEQ ID NO: 5066016 - DNA, 25 bp, Homo sapien
agaagaatcccctatctgagccctg

SEQ ID NO: 5066017 - DNA, 25 bp, Homo sapien
tgagtaagtgatcccaaccgatgcc

SEQ ID NO: 5066018 - DNA, 25 bp, Homo sapien
gcccacaccagttaccagctgagta

SEQ ID NO: 5066019 - DNA, 25 bp, Homo sapien
aaaatatggacacgtcagtaagccc

SEQ ID NO: 5066020 - DNA, 25 bp, Homo sapien
tgtatctctgtactcatgaagcaga

SEQ ID NO: 5066021 - DNA, 25 bp, Homo sapien
gcccctcactgattatgcatttgca

SEQ ID NO: 5066022 - DNA, 25 bp, Homo sapien
gcaatattttgccatacaatgctgt

SEQ ID NO: 5066023 - DNA, 25 bp, Homo sapien
tagcaaaaagattggtggcatgttg

SEQ ID NO: 5066024 - DNA, 25 bp, Homo sapien
aaatctgcacaagtaatgaagagcc

SEQ ID NO: 5066025 - DNA, 25 bp, Homo sapien
caagtaatgaagagccgaatgttaa

SEQ ID NO: 5066026 - DNA, 25 bp, Homo sapien
aaactttgtagagacttgttgtatg

SEQ ID NO: 5066027 - DNA, 25 bp, Homo sapien
acaagtgatggtgaacaggaatttc

SEQ ID NO: 5066028 - DNA, 25 bp, Homo sapien
ccttcccttgtttactaggcattca

SEQ ID NO: 5066029 - DNA, 25 bp, Homo sapien
tactaggcattcatagatattctat

SEQ ID NO: 5066030 - DNA, 25 bp, Homo sapien
acccagcctatcagagcatttttaa

SEQ ID NO: 5066031 - DNA, 25 bp, Homo sapien
tcctttcctatccacgattgccgta

SEQ ID NO: 5066032 - DNA, 25 bp, Homo sapien
cagcatgaaatgcttacattacaaa

SEQ ID NO: 5066033 - DNA, 25 bp, Homo sapien
caaacaaaaaatcagggatactact

SEQ ID NO: 5066034 - DNA, 25 bp, Homo sapien
gtttttagaaacttacagcatgaaa

SEQ ID NO: 5066035 - DNA, 25 bp, Homo sapien
gatttggctctaaactgacctgcat

SEQ ID NO: 5066036 - DNA, 25 bp, Homo sapien
tatcagattccaagggtattcctgg

SEQ ID NO: 5066037 - DNA, 25 bp, Homo sapien
gcccataaggttggtctctgagcta

SEQ ID NO: 5066038 - DNA, 25 bp, Homo sapien
catgagtaagaaatggctgccttgc

SEQ ID NO: 5066039 - DNA, 25 bp, Homo sapien
tcaaccactgggctaaatctggctt

SEQ ID NO: 5066040 - DNA, 25 bp, Homo sapien
ctgggctaaatctggctttcgaaaa

SEQ ID NO: 5066041 - DNA, 25 bp, Homo sapien
ctaaatctggctttcgaaaataatg

SEQ ID NO: 5066042 - DNA, 25 bp, Homo sapien
accactgggctaaatctggctttcg

SEQ ID NO: 5066043 - DNA, 25 bp, Homo sapien
cagtagcctgagtatccagtttcag

SEQ ID NO: 5066044 - DNA, 25 bp, Homo sapien
cccagcagcagtagcctgagtatcc

SEQ ID NO: 5066045 - DNA, 25 bp, Homo sapien
tcagatccccaaaggaggcatgaaa

SEQ ID NO: 5066046 - DNA, 25 bp, Homo sapien
gcatgaaatcaattggggcttgcct

SEQ ID NO: 5066047 - DNA, 25 bp, Homo sapien
tactgcatgatcttgcttgatggtc

SEQ ID NO: 5066048 - DNA, 25 bp, Homo sapien
ccagttacatttccattagtatgga

SEQ ID NO: 5066049 - DNA, 25 bp, Homo sapien
aagttgcctactgcatgatcttgct

SEQ ID NO: 5066050 - DNA, 25 bp, Homo sapien
gcttgatggtccttgattttatcat

SEQ ID NO: 5066051 - DNA, 25 bp, Homo sapien
tgtgagtcctacatttgcctgacct

SEQ ID NO: 5066052 - DNA, 25 bp, Homo sapien
tcacacccttgaagcaatttacagg

SEQ ID NO: 5066053 - DNA, 25 bp, Homo sapien
gatattagataccagtcagagcagg

SEQ ID NO: 5066054 - DNA, 25 bp, Homo sapien
tttggaccacagacaactagggact

SEQ ID NO: 5066055 - DNA, 25 bp, Homo sapien
ccaagcaagggcaattaaaggcagt

SEQ ID NO: 5066056 - DNA, 25 bp, Homo sapien
caaagtactatcacccaagtgctgg

SEQ ID NO: 5066057 - DNA, 25 bp, Homo sapien
caagtgctggatatcaatctgtcaa

SEQ ID NO: 5066058 - DNA, 25 bp, Homo sapien
gactgaaccgtgtcaaagcactgaa

SEQ ID NO: 5066059 - DNA, 25 bp, Homo sapien
ctgaattcattaagatatgcataat

SEQ ID NO: 5066060 - DNA, 25 bp, Homo sapien
tctacttggatcaatcacatgaaat

SEQ ID NO: 5066061 - DNA, 25 bp, Homo sapien
aatcaattggatctacttggatcaa

SEQ ID NO: 5066062 - DNA, 25 bp, Homo sapien
tataaactacactgggacatttctc

SEQ ID NO: 5066063 - DNA, 25 bp, Homo sapien
gcccctcagagtagtatttagtgat

SEQ ID NO: 5066064 - DNA, 25 bp, Homo sapien
tttctaagcccctcagagtagtatt

SEQ ID NO: 5066065 - DNA, 25 bp, Homo sapien
tctctgatatagctgtaactggaac

SEQ ID NO: 5066066 - DNA, 25 bp, Homo sapien
actcattctctgatatagctgtaac

SEQ ID NO: 5066067 - DNA, 25 bp, Homo sapien
tgaaaggactaggaaaagaggctcc

SEQ ID NO: 5066068 - DNA, 25 bp, Homo sapien
gacagcataaggaaagtctctgaga

SEQ ID NO: 5066069 - DNA, 25 bp, Homo sapien
cataaagaagtatagcaagctggcc

SEQ ID NO: 5066070 - DNA, 25 bp, Homo sapien
ctgaggtggaagagctatggaggca

SEQ ID NO: 5066071 - DNA, 25 bp, Homo sapien
cacagcaagcgggaagccaactgca

SEQ ID NO: 5066072 - DNA, 25 bp, Homo sapien
agcaagcgggaagccaactgcagag

SEQ ID NO: 5066073 - DNA, 25 bp, Homo sapien
cgggaagccaactgcagagtcccat

SEQ ID NO: 5066074 - DNA, 25 bp, Homo sapien
aagcgggaagccaactgcagagtcc

SEQ ID NO: 5066075 - DNA, 25 bp, Homo sapien
tgtgctctaaagtagtacgggaaag

SEQ ID NO: 5066076 - DNA, 25 bp, Homo sapien
gattgacgactttgccagagggata

SEQ ID NO: 5066077 - DNA, 25 bp, Homo sapien
ttctgtgtgctctaaagtagtacgg

SEQ ID NO: 5066078 - DNA, 25 bp, Homo sapien
ggtaacttaagatacagattgacga

SEQ ID NO: 5066079 - DNA, 25 bp, Homo sapien
gtacatttccttcacataaattaca

SEQ ID NO: 5066080 - DNA, 25 bp, Homo sapien
attgtacatttccttcacataaatt

SEQ ID NO: 5066081 - DNA, 25 bp, Homo sapien
tttacttgaataattgtacatttcc

SEQ ID NO: 5066082 - DNA, 25 bp, Homo sapien
cgtgtttacttgaataattgtacat

SEQ ID NO: 5066083 - DNA, 25 bp, Homo sapien
gataagccctcatgtctcacaattg

SEQ ID NO: 5066084 - DNA, 25 bp, Homo sapien
ggttttccagataaccattggccaa

SEQ ID NO: 5066085 - DNA, 25 bp, Homo sapien
ctgtgtgctacattctgaggattca

SEQ ID NO: 5066086 - DNA, 25 bp, Homo sapien
ctatagaggatccaagataagccct

SEQ ID NO: 5066087 - DNA, 25 bp, Homo sapien
tcctggccatagcaatgaatgtttc

SEQ ID NO: 5066088 - DNA, 25 bp, Homo sapien
tctcataaggcctgtggtactctac

SEQ ID NO: 5066089 - DNA, 25 bp, Homo sapien
tctgccaactccatatatgcacagc

SEQ ID NO: 5066090 - DNA, 25 bp, Homo sapien
atgtatatgcaacgctctttgccag

SEQ ID NO: 5066091 - DNA, 25 bp, Homo sapien
ccaagaaaagtatactggttgtcct

SEQ ID NO: 5066092 - DNA, 25 bp, Homo sapien
tccaagaaaagtatactggttgtcc

SEQ ID NO: 5066093 - DNA, 25 bp, Homo sapien
ttccaagaaaagtatactggttgtc

SEQ ID NO: 5066094 - DNA, 25 bp, Homo sapien
caagaaaagtatactggttgtcctc

SEQ ID NO: 5066095 - DNA, 25 bp, Homo sapien
atgaagtcctaagggtggagcccca

SEQ ID NO: 5066096 - DNA, 25 bp, Homo sapien
gacacaggaagatggcggccaaata

SEQ ID NO: 5066097 - DNA, 25 bp, Homo sapien
tgtggactccatgaaaaggtcttag

SEQ ID NO: 5066098 - DNA, 25 bp, Homo sapien
cctcggtttatgagaaggcaccaat

SEQ ID NO: 5066099 - DNA, 25 bp, Homo sapien
gaatccactatcctgacattgagaa

SEQ ID NO: 5066100 - DNA, 25 bp, Homo sapien
gagaacgtccctctgtacacacaag

SEQ ID NO: 5066101 - DNA, 25 bp, Homo sapien
gcagcaaggcctatgcaacagttca

SEQ ID NO: 5066102 - DNA, 25 bp, Homo sapien
tagagttaacaataggcagcaaggc

SEQ ID NO: 5066103 - DNA, 25 bp, Homo sapien
cccagttaggatgatagctattatc

SEQ ID NO: 5066104 - DNA, 25 bp, Homo sapien
accccagttaggatgatagctatta

SEQ ID NO: 5066105 - DNA, 25 bp, Homo sapien
ccccagttaggatgatagctattat

SEQ ID NO: 5066106 - DNA, 25 bp, Homo sapien
cagttaggatgatagctattatcaa

SEQ ID NO: 5066107 - DNA, 25 bp, Homo sapien
cacagatcatacaaatatagtgttc

SEQ ID NO: 5066108 - DNA, 25 bp, Homo sapien
cacgctcagcctatactctgcttat

SEQ ID NO: 5066109 - DNA, 25 bp, Homo sapien
agaaatatgagggatgtcaccacag

SEQ ID NO: 5066110 - DNA, 25 bp, Homo sapien
aaactttagcaagattgatcaagaa

SEQ ID NO: 5066111 - DNA, 25 bp, Homo sapien
gctccatggtacagttgtgccacag

SEQ ID NO: 5066112 - DNA, 25 bp, Homo sapien
tccagatcaggagaaaaggtagtca

SEQ ID NO: 5066113 - DNA, 25 bp, Homo sapien
tagtcaacagtaacacaccacaaga

SEQ ID NO: 5066114 - DNA, 25 bp, Homo sapien
ggtagaaaatgtaactccagatcag

SEQ ID NO: 5066115 - DNA, 25 bp, Homo sapien
cctcaaaacagatatggtcaaatct

SEQ ID NO: 5066116 - DNA, 25 bp, Homo sapien
ccagagatggctctagtctcttcac

SEQ ID NO: 5066117 - DNA, 25 bp, Homo sapien
taatgaatcctcaaaacagatatgg

SEQ ID NO: 5066118 - DNA, 25 bp, Homo sapien
tcactctcacctcatttaaggccaa

SEQ ID NO: 5066119 - DNA, 25 bp, Homo sapien
caaactcattgttaattccaaacac

SEQ ID NO: 5066120 - DNA, 25 bp, Homo sapien
ctcattgttaattccaaacacaggc

SEQ ID NO: 5066121 - DNA, 25 bp, Homo sapien
cattgttaattccaaacacaggcat

SEQ ID NO: 5066122 - DNA, 25 bp, Homo sapien
aactcattgttaattccaaacacag

SEQ ID NO: 5066123 - DNA, 25 bp, Homo sapien
ttggaacaagtgaaactcaaattcc

SEQ ID NO: 5066124 - DNA, 25 bp, Homo sapien
tggaacaagtgaaactcaaattcca

SEQ ID NO: 5066125 - DNA, 25 bp, Homo sapien
ggaacaagtgaaactcaaattccat

SEQ ID NO: 5066126 - DNA, 25 bp, Homo sapien
gtcggatgaactgtccccgaggcca

SEQ ID NO: 5066127 - DNA, 25 bp, Homo sapien
ttagcagggtcggatgaactgtccc

SEQ ID NO: 5066128 - DNA, 25 bp, Homo sapien
cagtgtgtcacatggcgatcctttc

SEQ ID NO: 5066129 - DNA, 25 bp, Homo sapien
tcctcttatgtgagtctgggttagc

SEQ ID NO: 5066130 - DNA, 25 bp, Homo sapien
tgaatggaggaacttgatctaacag

SEQ ID NO: 5066131 - DNA, 25 bp, Homo sapien
taatgactaagctggcatctgaagg

SEQ ID NO: 5066132 - DNA, 25 bp, Homo sapien
aaagaaagccactgaacttggagta

SEQ ID NO: 5066133 - DNA, 25 bp, Homo sapien
tggatcatggctataaaaacatctg

SEQ ID NO: 5066134 - DNA, 25 bp, Homo sapien
agaacaagatacatgaactcagtgg

SEQ ID NO: 5066135 - DNA, 25 bp, Homo sapien
tatgccagataaccatgtactactg

SEQ ID NO: 5066136 - DNA, 25 bp, Homo sapien
tagatgtagctctcaattagtcaga

SEQ ID NO: 5066137 - DNA, 25 bp, Homo sapien
tactactgtgtctagaggatccaag

SEQ ID NO: 5066138 - DNA, 25 bp, Homo sapien
tagagacgaaggtacagtgaacaat

SEQ ID NO: 5066139 - DNA, 25 bp, Homo sapien
tatttagccaagtcatcagacaact

SEQ ID NO: 5066140 - DNA, 25 bp, Homo sapien
tgagaacaaggtgcatacaggtagc

SEQ ID NO: 5066141 - DNA, 25 bp, Homo sapien
gaagtggtcacaagtagctctttgt

SEQ ID NO: 5066142 - DNA, 25 bp, Homo sapien
tagaaaacaattctggctaaaatat

SEQ ID NO: 5066143 - DNA, 25 bp, Homo sapien
taaagtaaattgactgctataacag

SEQ ID NO: 5066144 - DNA, 25 bp, Homo sapien
cagttagtgtacatttgtatcacca

SEQ ID NO: 5066145 - DNA, 25 bp, Homo sapien
tccttctctgatcaagtatctatgc

SEQ ID NO: 5066146 - DNA, 25 bp, Homo sapien
ttggcagacagtaactcagctagtt

SEQ ID NO: 5066147 - DNA, 25 bp, Homo sapien
caatgtcactaatgttggcagacag

SEQ ID NO: 5066148 - DNA, 25 bp, Homo sapien
cattagctgtatctgatcgactgtt

SEQ ID NO: 5066149 - DNA, 25 bp, Homo sapien
tgtctggttttacactcaagctgtc

SEQ ID NO: 5066150 - DNA, 25 bp, Homo sapien
aagaactctatgctagggcctcagg

SEQ ID NO: 5066151 - DNA, 25 bp, Homo sapien
tgctgggcactacatgagggctttc

SEQ ID NO: 5066152 - DNA, 25 bp, Homo sapien
caatttagggagtaggagccaggct

SEQ ID NO: 5066153 - DNA, 25 bp, Homo sapien
aaacaaaatcgcttgccctcgtgga

SEQ ID NO: 5066154 - DNA, 25 bp, Homo sapien
gtctgatttctgtacatcgtcatca

SEQ ID NO: 5066155 - DNA, 25 bp, Homo sapien
gatgtctgatttctgtacatcgtca

SEQ ID NO: 5066156 - DNA, 25 bp, Homo sapien
cttttctatcactccttgactactt

SEQ ID NO: 5066157 - DNA, 25 bp, Homo sapien
tttctatcactccttgactacttga

SEQ ID NO: 5066158 - DNA, 25 bp, Homo sapien
gaaatacttcacaaatttatgtgtc

SEQ ID NO: 5066159 - DNA, 25 bp, Homo sapien
atgaaatacttcacaaatttatgtg

SEQ ID NO: 5066160 - DNA, 25 bp, Homo sapien
catctttgtgcagaggccatgataa

SEQ ID NO: 5066161 - DNA, 25 bp, Homo sapien
atatgaaatacttcacaaatttatg

SEQ ID NO: 5066162 - DNA, 25 bp, Homo sapien
gctcgtattcattaattcctcctga

SEQ ID NO: 5066163 - DNA, 25 bp, Homo sapien
tacaattctcccttcacagttcaca

SEQ ID NO: 5066164 - DNA, 25 bp, Homo sapien
tcctgattgtaacctaagtagctgg

SEQ ID NO: 5066165 - DNA, 25 bp, Homo sapien
cagtatgctgtagacgctcgtattc

SEQ ID NO: 5066166 - DNA, 25 bp, Homo sapien
aaaggataaatgcccctgataatgt

SEQ ID NO: 5066167 - DNA, 25 bp, Homo sapien
ggataaatgcccctgataatgttta

SEQ ID NO: 5066168 - DNA, 25 bp, Homo sapien
gataaatgcccctgataatgtttaa

SEQ ID NO: 5066169 - DNA, 25 bp, Homo sapien
taaatgcccctgataatgtttaaaa

SEQ ID NO: 5066170 - DNA, 25 bp, Homo sapien
ctggccaaggctgcttttttactgt

SEQ ID NO: 5066171 - DNA, 25 bp, Homo sapien
gattatgtgcttgcgaatatggtga

SEQ ID NO: 5066172 - DNA, 25 bp, Homo sapien
gaaaaattgattatgtgcttgcgaa

SEQ ID NO: 5066173 - DNA, 25 bp, Homo sapien
ttatgtgcttgcgaatatggtgaaa

SEQ ID NO: 5066174 - DNA, 25 bp, Homo sapien
attgattatgtgcttgcgaatatgg

SEQ ID NO: 5066175 - DNA, 25 bp, Homo sapien
catcctgcagttaaaggtatggcta

SEQ ID NO: 5066176 - DNA, 25 bp, Homo sapien
aggtatggctatttcgtcgtgttgc

SEQ ID NO: 5066177 - DNA, 25 bp, Homo sapien
tgaattagcatcctgcagttaaagg

SEQ ID NO: 5066178 - DNA, 25 bp, Homo sapien
cagttaaaggtatggctatttcgtc

SEQ ID NO: 5066179 - DNA, 25 bp, Homo sapien
cattacttcataacgctggcaagct

SEQ ID NO: 5066180 - DNA, 25 bp, Homo sapien
gattttggctgtgacacagtgaaac

SEQ ID NO: 5066181 - DNA, 25 bp, Homo sapien
gcttcttggttctcggtccctggct

SEQ ID NO: 5066182 - DNA, 25 bp, Homo sapien
tcataacgctggcaagcttcttggt

SEQ ID NO: 5066183 - DNA, 25 bp, Homo sapien
taatcgccgtgcaatacaaatcaga

SEQ ID NO: 5066184 - DNA, 25 bp, Homo sapien
gaggccgaggtaatcgccgtgcaat

SEQ ID NO: 5066185 - DNA, 25 bp, Homo sapien
gattctacacccgtaatagctggag

SEQ ID NO: 5066186 - DNA, 25 bp, Homo sapien
ctgtagtatcttgcttggtcataaa

SEQ ID NO: 5066187 - DNA, 25 bp, Homo sapien
gataattactatccttagatgccat

SEQ ID NO: 5066188 - DNA, 25 bp, Homo sapien
ccatactagttctttagtaagagca

SEQ ID NO: 5066189 - DNA, 25 bp, Homo sapien
gaaaggaacataatacatggtagac

SEQ ID NO: 5066190 - DNA, 25 bp, Homo sapien
catggtagactcaaaaacagaatga

SEQ ID NO: 5066191 - DNA, 25 bp, Homo sapien
ttaaatttttccagtgttgttcatg

SEQ ID NO: 5066192 - DNA, 25 bp, Homo sapien
atttttccagtgttgttcatggtag

SEQ ID NO: 5066193 - DNA, 25 bp, Homo sapien
tttccagtgttgttcatggtagaga

SEQ ID NO: 5066194 - DNA, 25 bp, Homo sapien
taaatttttccagtgttgttcatgg

SEQ ID NO: 5066195 - DNA, 25 bp, Homo sapien
gacaaacctacatatccatagtacg

SEQ ID NO: 5066196 - DNA, 25 bp, Homo sapien
tgttttcattctgctatctcacaaa

SEQ ID NO: 5066197 - DNA, 25 bp, Homo sapien
ttttttctgtgacctgacaataacc

SEQ ID NO: 5066198 - DNA, 25 bp, Homo sapien
taaattagcctcataacttttaggc

SEQ ID NO: 5066199 - DNA, 25 bp, Homo sapien
aaaagcataaatgcacttcctcact

SEQ ID NO: 5066200 - DNA, 25 bp, Homo sapien
gcagctctcagggaactagtatcaa

SEQ ID NO: 5066201 - DNA, 25 bp, Homo sapien
gcataaatgcacttcctcactaaat

SEQ ID NO: 5066202 - DNA, 25 bp, Homo sapien
ctagtatcaatagagatgattttac

SEQ ID NO: 5066203 - DNA, 25 bp, Homo sapien
cagctgtctggcataagatggttct

SEQ ID NO: 5066204 - DNA, 25 bp, Homo sapien
gctgtctggcataagatggttctct

SEQ ID NO: 5066205 - DNA, 25 bp, Homo sapien
gtctggcataagatggttctctgcc

SEQ ID NO: 5066206 - DNA, 25 bp, Homo sapien
ctgtctggcataagatggttctctg

SEQ ID NO: 5066207 - DNA, 25 bp, Homo sapien
gtacgaagctgttccagaaatacct

SEQ ID NO: 5066208 - DNA, 25 bp, Homo sapien
tctgtacgaagctgttccagaaata

SEQ ID NO: 5066209 - DNA, 25 bp, Homo sapien
agtctgtacgaagctgttccagaaa

SEQ ID NO: 5066210 - DNA, 25 bp, Homo sapien
ctagtctgtacgaagctgttccaga

SEQ ID NO: 5066211 - DNA, 25 bp, Homo sapien
ctccaatcttgatggaccaatgatt

SEQ ID NO: 5066212 - DNA, 25 bp, Homo sapien
ttatactgtccctaagtgaaaaggc

SEQ ID NO: 5066213 - DNA, 25 bp, Homo sapien
gattgtcaaacttaagcattattac

SEQ ID NO: 5066214 - DNA, 25 bp, Homo sapien
tactgtccctaagtgaaaaggcagc

SEQ ID NO: 5066215 - DNA, 25 bp, Homo sapien
gaccatacctgtgtgccacgcctag

SEQ ID NO: 5066216 - DNA, 25 bp, Homo sapien
ctgggaccatacctgtgtgccacgc

SEQ ID NO: 5066217 - DNA, 25 bp, Homo sapien
gactagctgggaccatacctgtgtg

SEQ ID NO: 5066218 - DNA, 25 bp, Homo sapien
taacaatatgtcatggatatttcaa

SEQ ID NO: 5066219 - DNA, 25 bp, Homo sapien
cccatcattcaatatgaatctatag

SEQ ID NO: 5066220 - DNA, 25 bp, Homo sapien
gtcccatcattcaatatgaatctat

SEQ ID NO: 5066221 - DNA, 25 bp, Homo sapien
catcattcaatatgaatctatagga

SEQ ID NO: 5066222 - DNA, 25 bp, Homo sapien
cattcaatatgaatctataggaggg

SEQ ID NO: 5066223 - DNA, 25 bp, Homo sapien
ccatgatgaaaggttgcatgtctgg

SEQ ID NO: 5066224 - DNA, 25 bp, Homo sapien
gatgatatgaattcccatgatgaaa

SEQ ID NO: 5066225 - DNA, 25 bp, Homo sapien
ctgtcgatgatatgaattcccatga

SEQ ID NO: 5066226 - DNA, 25 bp, Homo sapien
gatatgaattcccatgatgaaaggt

SEQ ID NO: 5066227 - DNA, 25 bp, Homo sapien
ttagtgtcatcttgaggagaaagcc

SEQ ID NO: 5066228 - DNA, 25 bp, Homo sapien
tccagaattagtgtcatcttgagga

SEQ ID NO: 5066229 - DNA, 25 bp, Homo sapien
gaattagtgtcatcttgaggagaaa

SEQ ID NO: 5066230 - DNA, 25 bp, Homo sapien
cagaattagtgtcatcttgaggaga

SEQ ID NO: 5066231 - DNA, 25 bp, Homo sapien
tacaatctgacttccgggtgagcat

SEQ ID NO: 5066232 - DNA, 25 bp, Homo sapien
caccatgagctggagagatactagg

SEQ ID NO: 5066233 - DNA, 25 bp, Homo sapien
tactaggattgaccgagggatttac

SEQ ID NO: 5066234 - DNA, 25 bp, Homo sapien
gggtgagcatccgaaacttccttgg

SEQ ID NO: 5066235 - DNA, 25 bp, Homo sapien
cactacttgtcatgccaacgggaga

SEQ ID NO: 5066236 - DNA, 25 bp, Homo sapien
gttgccaatccagaagtaacctgtc

SEQ ID NO: 5066237 - DNA, 25 bp, Homo sapien
tctccttggagacatgaactgtgct

SEQ ID NO: 5066238 - DNA, 25 bp, Homo sapien
aaggaattgtttggcatcctgggcc

SEQ ID NO: 5066239 - DNA, 25 bp, Homo sapien
tgtgtctatatcagcatgccgtaac

SEQ ID NO: 5066240 - DNA, 25 bp, Homo sapien
gaatccagaggtttgccatcactag

SEQ ID NO: 5066241 - DNA, 25 bp, Homo sapien
taccctcctgtaagagccggtgtag

SEQ ID NO: 5066242 - DNA, 25 bp, Homo sapien
tatcaggctcgacagacaaagtggt

SEQ ID NO: 5066243 - DNA, 25 bp, Homo sapien
taactgatcaaactggtcaaggtca

SEQ ID NO: 5066244 - DNA, 25 bp, Homo sapien
tgtctgtctcacataagcctggcaa

SEQ ID NO: 5066245 - DNA, 25 bp, Homo sapien
tgaagctggcaggatctccgatttg

SEQ ID NO: 5066246 - DNA, 25 bp, Homo sapien
ctccagcgtgggcagtaactgatca

SEQ ID NO: 5066247 - DNA, 25 bp, Homo sapien
ttcactcttaagcaaaggatctgtg

SEQ ID NO: 5066248 - DNA, 25 bp, Homo sapien
gatgaatgatgttcacatgcctaaa

SEQ ID NO: 5066249 - DNA, 25 bp, Homo sapien
tggaaacaatctgacccaatactgt

SEQ ID NO: 5066250 - DNA, 25 bp, Homo sapien
ttaaaatgaggtgttgtccccagaa

SEQ ID NO: 5066251 - DNA, 25 bp, Homo sapien
tagaactaacgttgaaaatccagac

SEQ ID NO: 5066252 - DNA, 25 bp, Homo sapien
aagattattcttcgcagctgtctga

SEQ ID NO: 5066253 - DNA, 25 bp, Homo sapien
tccagactaattttgaaagtgggct

SEQ ID NO: 5066254 - DNA, 25 bp, Homo sapien
gaagtcccacatatgataccatcag

SEQ ID NO: 5066255 - DNA, 25 bp, Homo sapien
ttttgaccaatacagaatgacagga

SEQ ID NO: 5066256 - DNA, 25 bp, Homo sapien
tggcttgatcgcttccaagttttgg

SEQ ID NO: 5066257 - DNA, 25 bp, Homo sapien
cctttgcccagtgtttagattggac

SEQ ID NO: 5066258 - DNA, 25 bp, Homo sapien
tgtagcgagcggcaatcatgccatt

SEQ ID NO: 5066259 - DNA, 25 bp, Homo sapien
ctttatggacgtggactttcatttc

SEQ ID NO: 5066260 - DNA, 25 bp, Homo sapien
cctgagtagccgcccggctgatttg

SEQ ID NO: 5066261 - DNA, 25 bp, Homo sapien
aactgtatggatatttgtagtcaag

SEQ ID NO: 5066262 - DNA, 25 bp, Homo sapien
tgtagtcaagtatctttatggacgt

SEQ ID NO: 5066263 - DNA, 25 bp, Homo sapien
tctacagccgaaggaaaggcagaag

SEQ ID NO: 5066264 - DNA, 25 bp, Homo sapien
tcatttgtaaacgaacccaaggaga

SEQ ID NO: 5066265 - DNA, 25 bp, Homo sapien
ccaaggagacttgtggttcaatgtg

SEQ ID NO: 5066266 - DNA, 25 bp, Homo sapien
aggaacaggccatgggcaattgctg

SEQ ID NO: 5066267 - DNA, 25 bp, Homo sapien
cacttattccagtgatgtcaatgct

SEQ ID NO: 5066268 - DNA, 25 bp, Homo sapien
ttaggtactgaaaatgttgcatacg

SEQ ID NO: 5066269 - DNA, 25 bp, Homo sapien
ttatcccagaatgtttatgttcaca

SEQ ID NO: 5066270 - DNA, 25 bp, Homo sapien
gaactatctcaaccagtccacaggt

SEQ ID NO: 5066271 - DNA, 25 bp, Homo sapien
tactctgatttatagctgtcactgt

SEQ ID NO: 5066272 - DNA, 25 bp, Homo sapien
tccatggaatctgatcgcctgttcc

SEQ ID NO: 5066273 - DNA, 25 bp, Homo sapien
tcctggttgtccaaattggttatca

SEQ ID NO: 5066274 - DNA, 25 bp, Homo sapien
attgcttccaattccagctcaggta

SEQ ID NO: 5066275 - DNA, 25 bp, Homo sapien
aagtttgtcaattcccagagctctg

SEQ ID NO: 5066276 - DNA, 25 bp, Homo sapien
cagagctctgtctagttcagctagc

SEQ ID NO: 5066277 - DNA, 25 bp, Homo sapien
tctttgccactaaggaaggatacca

SEQ ID NO: 5066278 - DNA, 25 bp, Homo sapien
ccttctactgttgtgggtggacaga

SEQ ID NO: 5066279 - DNA, 25 bp, Homo sapien
aatctctctgataatacatctaatc

SEQ ID NO: 5066280 - DNA, 25 bp, Homo sapien
tctgataatacatctaatccacccc

SEQ ID NO: 5066281 - DNA, 25 bp, Homo sapien
gcttgttgtggtggaaatctctctg

SEQ ID NO: 5066282 - DNA, 25 bp, Homo sapien
tcaaaggtggcgttgcttgttgtgg

SEQ ID NO: 5066283 - DNA, 25 bp, Homo sapien
ctagggagattggcagtaggagaag

SEQ ID NO: 5066284 - DNA, 25 bp, Homo sapien
aggtttttgcctgaccatgccttgg

SEQ ID NO: 5066285 - DNA, 25 bp, Homo sapien
tttttgcctgaccatgccttggaaa

SEQ ID NO: 5066286 - DNA, 25 bp, Homo sapien
ttgcctgaccatgccttggaaaggg

SEQ ID NO: 5066287 - DNA, 25 bp, Homo sapien
cagtgaaggtttttgcctgaccatg

SEQ ID NO: 5066288 - DNA, 25 bp, Homo sapien
gggctgcatgcccatgccaggtgaa

SEQ ID NO: 5066289 - DNA, 25 bp, Homo sapien
tcgaagctggttaggtgcagccgga

SEQ ID NO: 5066290 - DNA, 25 bp, Homo sapien
tgctgttgtccctgtaatcgctgct

SEQ ID NO: 5066291 - DNA, 25 bp, Homo sapien
gccggaggtctgtttagagtttgcc

SEQ ID NO: 5066292 - DNA, 25 bp, Homo sapien
tggaactgggacttgaaactagaac

SEQ ID NO: 5066293 - DNA, 25 bp, Homo sapien
ggtcttgtagtcaaaaagccaagca

SEQ ID NO: 5066294 - DNA, 25 bp, Homo sapien
cattcatgaacctgacctagaccct

SEQ ID NO: 5066295 - DNA, 25 bp, Homo sapien
tattccatacaaccaccagtgaggg

SEQ ID NO: 5066296 - DNA, 25 bp, Homo sapien
gaagctgagcgacctagtgctgaaa

SEQ ID NO: 5066297 - DNA, 25 bp, Homo sapien
taaaactcctagtacttgcagtgca

SEQ ID NO: 5066298 - DNA, 25 bp, Homo sapien
tgactgagaaccttggccagacctg

SEQ ID NO: 5066299 - DNA, 25 bp, Homo sapien
ccgatatgtggctcgttaggtagca

SEQ ID NO: 5066300 - DNA, 25 bp, Homo sapien
tgctgaactactctatttgttctaa

SEQ ID NO: 5066301 - DNA, 25 bp, Homo sapien
caaaagcacattgtggatcgccaag

SEQ ID NO: 5066302 - DNA, 25 bp, Homo sapien
tctagaccaggattagggttccagg

SEQ ID NO: 5066303 - DNA, 25 bp, Homo sapien
tcccaaattggtatgctaaagaaca

SEQ ID NO: 5066304 - DNA, 25 bp, Homo sapien
catgccttaacagtatctggtaaca

SEQ ID NO: 5066305 - DNA, 25 bp, Homo sapien
tagcttgccgattttggtgtatcaa

SEQ ID NO: 5066306 - DNA, 25 bp, Homo sapien
gatctcatattgatgccaacaggag

SEQ ID NO: 5066307 - DNA, 25 bp, Homo sapien
caacaggagcagttgctgcaaactg

SEQ ID NO: 5066308 - DNA, 25 bp, Homo sapien
gtaatttgctgttgcatgcctgatc

SEQ ID NO: 5066309 - DNA, 25 bp, Homo sapien
gttgcggttggccaaggatgcttca

SEQ ID NO: 5066310 - DNA, 25 bp, Homo sapien
tacagttcccgctgacgttgtgcca

SEQ ID NO: 5066311 - DNA, 25 bp, Homo sapien
ggaggttgttcccaaagctttgctg

SEQ ID NO: 5066312 - DNA, 25 bp, Homo sapien
tattagctgcctctgtcggtgctgt

SEQ ID NO: 5066313 - DNA, 25 bp, Homo sapien
gaagacttgaatgggaccctctgca

SEQ ID NO: 5066314 - DNA, 25 bp, Homo sapien
ggaactggccctgtatgaactttga

SEQ ID NO: 5066315 - DNA, 25 bp, Homo sapien
tcagatgggaaagtaactctggtcc

SEQ ID NO: 5066316 - DNA, 25 bp, Homo sapien
tattgtgccctgctacctctaggtg

SEQ ID NO: 5066317 - DNA, 25 bp, Homo sapien
gattggcatcggcaccatggagctc

SEQ ID NO: 5066318 - DNA, 25 bp, Homo sapien
tggagcaaagttggcctcaccttgg

SEQ ID NO: 5066319 - DNA, 25 bp, Homo sapien
attggcatcggcaccatggagctcc

SEQ ID NO: 5066320 - DNA, 25 bp, Homo sapien
gcttagagatggagcaaagttggcc

SEQ ID NO: 5066321 - DNA, 25 bp, Homo sapien
tctggtgactgatacccggaggcag

SEQ ID NO: 5066322 - DNA, 25 bp, Homo sapien
tgttgtttcctatcgctccttgctg

SEQ ID NO: 5066323 - DNA, 25 bp, Homo sapien
tcatgtctggtgactgatacccgga

SEQ ID NO: 5066324 - DNA, 25 bp, Homo sapien
ccaggccttcatgtctggtgactga

SEQ ID NO: 5066325 - DNA, 25 bp, Homo sapien
tagactcttcgttatttggcagcag

SEQ ID NO: 5066326 - DNA, 25 bp, Homo sapien
caactagactcttcgttatttggca

SEQ ID NO: 5066327 - DNA, 25 bp, Homo sapien
gactcttcgttatttggcagcaggg

SEQ ID NO: 5066328 - DNA, 25 bp, Homo sapien
actagactcttcgttatttggcagc

SEQ ID NO: 5066329 - DNA, 25 bp, Homo sapien
gcaggcgtgggctggttctggacag

SEQ ID NO: 5066330 - DNA, 25 bp, Homo sapien
caggcgtgggctggttctggacagc

SEQ ID NO: 5066331 - DNA, 25 bp, Homo sapien
ggctggttctggacagcttgactga

SEQ ID NO: 5066332 - DNA, 25 bp, Homo sapien
aggcgtgggctggttctggacagct

SEQ ID NO: 5066333 - DNA, 25 bp, Homo sapien
ctgccatggaaacggtgatgctcat

SEQ ID NO: 5066334 - DNA, 25 bp, Homo sapien
cacacagtgttcattcctggcatct

SEQ ID NO: 5066335 - DNA, 25 bp, Homo sapien
gggcacacagtgttcattcctggca

SEQ ID NO: 5066336 - DNA, 25 bp, Homo sapien
tgggttcatgttctgaacattcgta

SEQ ID NO: 5066337 - DNA, 25 bp, Homo sapien
atctgggccatcattgggttcatgt

SEQ ID NO: 5066338 - DNA, 25 bp, Homo sapien
gttttgagaaggtcagtggatgaga

SEQ ID NO: 5066339 - DNA, 25 bp, Homo sapien
tcagtggatgagagctggttgcagt

SEQ ID NO: 5066340 - DNA, 25 bp, Homo sapien
gaaggtcagtggatgagagctggtt

SEQ ID NO: 5066341 - DNA, 25 bp, Homo sapien
tgagaaggtcagtggatgagagctg

SEQ ID NO: 5066342 - DNA, 25 bp, Homo sapien
caaggtcaggctcttaatgatgcta

SEQ ID NO: 5066343 - DNA, 25 bp, Homo sapien
taagcactgagttaagccatctgaa

SEQ ID NO: 5066344 - DNA, 25 bp, Homo sapien
aggaaagctccataacatgcccagg

SEQ ID NO: 5066345 - DNA, 25 bp, Homo sapien
tgcccaggacgacacagctaagaag

SEQ ID NO: 5066346 - DNA, 25 bp, Homo sapien
gattacagatgagtttttagcactg

SEQ ID NO: 5066347 - DNA, 25 bp, Homo sapien
tttgtgctgttttgaaacatacttc

SEQ ID NO: 5066348 - DNA, 25 bp, Homo sapien
aatataggaaagtggccaccttgct

SEQ ID NO: 5066349 - DNA, 25 bp, Homo sapien
gaggtgaagtatacagcaggtactc

SEQ ID NO: 5066350 - DNA, 25 bp, Homo sapien
cttcttaggaggtgaagtatacagc

SEQ ID NO: 5066351 - DNA, 25 bp, Homo sapien
tgtggcataatccctgggttaaaaa

SEQ ID NO: 5066352 - DNA, 25 bp, Homo sapien
tgccatctgtggcataatccctggg

SEQ ID NO: 5066353 - DNA, 25 bp, Homo sapien
atatcttatgtgtcttcctactgcc

SEQ ID NO: 5066354 - DNA, 25 bp, Homo sapien
atcttatgtgtcttcctactgccat

SEQ ID NO: 5066355 - DNA, 25 bp, Homo sapien
ggtacatgtagttaaacctcctcat

SEQ ID NO: 5066356 - DNA, 25 bp, Homo sapien
gaatactacctcgttcatagggtta

SEQ ID NO: 5066357 - DNA, 25 bp, Homo sapien
atgcatacagtgcatagcacagtgc

SEQ ID NO: 5066358 - DNA, 25 bp, Homo sapien
catagggttatagtgaggcttaaat

SEQ ID NO: 5066359 - DNA, 25 bp, Homo sapien
caggaacagtgtggactctggcggt

SEQ ID NO: 5066360 - DNA, 25 bp, Homo sapien
ggcaggaacagtgtggactctggcg

SEQ ID NO: 5066361 - DNA, 25 bp, Homo sapien
cagtgtggactctggcggtagaaag

SEQ ID NO: 5066362 - DNA, 25 bp, Homo sapien
gaacagtgtggactctggcggtaga

SEQ ID NO: 5066363 - DNA, 25 bp, Homo sapien
tggttcattaattgtaacataaatt

SEQ ID NO: 5066364 - DNA, 25 bp, Homo sapien
gaatgcttatggttcattaattgta

SEQ ID NO: 5066365 - DNA, 25 bp, Homo sapien
ttgccttctttggttttatgacagt

SEQ ID NO: 5066366 - DNA, 25 bp, Homo sapien
cttctttggttttatgacagtttag

SEQ ID NO: 5066367 - DNA, 25 bp, Homo sapien
aatgccttctctttaccttgagagg

SEQ ID NO: 5066368 - DNA, 25 bp, Homo sapien
attacaggtgtaagccaaaatgcct

SEQ ID NO: 5066369 - DNA, 25 bp, Homo sapien
acaggtgtaagccaaaatgccttct

SEQ ID NO: 5066370 - DNA, 25 bp, Homo sapien
aaatgccttctctttaccttgagag

SEQ ID NO: 5066371 - DNA, 25 bp, Homo sapien
caccgcacccggctccccagtctta

SEQ ID NO: 5066372 - DNA, 25 bp, Homo sapien
ccaccgcacccggctccccagtctt

SEQ ID NO: 5066373 - DNA, 25 bp, Homo sapien
taaaagatagtctaggataggcatg

SEQ ID NO: 5066374 - DNA, 25 bp, Homo sapien
actggagcaagattcatgattggcc

SEQ ID NO: 5066375 - DNA, 25 bp, Homo sapien
cagctgccgtctggtaaatacaaaa

SEQ ID NO: 5066376 - DNA, 25 bp, Homo sapien
ggcagagcataagatgtttttgtcc

SEQ ID NO: 5066377 - DNA, 25 bp, Homo sapien
tcctagtgcctaaggaatcaaatct

SEQ ID NO: 5066378 - DNA, 25 bp, Homo sapien
gtatgcatcaaatttggacaccagt

SEQ ID NO: 5066379 - DNA, 25 bp, Homo sapien
tctatcctaatcgagtaaaagttgt

SEQ ID NO: 5066380 - DNA, 25 bp, Homo sapien
gtctcctatcctcttaatccgttta

SEQ ID NO: 5066381 - DNA, 25 bp, Homo sapien
tcccctgatagacaatccatttaaa

SEQ ID NO: 5066382 - DNA, 25 bp, Homo sapien
gctctttcacatattggctttagaa

SEQ ID NO: 5066383 - DNA, 25 bp, Homo sapien
tacagcaaattatcattagaacaat

SEQ ID NO: 5066384 - DNA, 25 bp, Homo sapien
tatattattacacagctctttcaca

SEQ ID NO: 5066385 - DNA, 25 bp, Homo sapien
tcaaaattggaatggtcacgcctcc

SEQ ID NO: 5066386 - DNA, 25 bp, Homo sapien
gcactcattttgctcagggttctgg

SEQ ID NO: 5066387 - DNA, 25 bp, Homo sapien
ggttgccatcaatactgaaagtgag

SEQ ID NO: 5066388 - DNA, 25 bp, Homo sapien
cagtttcagagtctgggtatccagt

SEQ ID NO: 5066389 - DNA, 25 bp, Homo sapien
agtcaccacagagaagaactcttct

SEQ ID NO: 5066390 - DNA, 25 bp, Homo sapien
tgtagtcaccacagagaagaactct

SEQ ID NO: 5066391 - DNA, 25 bp, Homo sapien
agaagaactcttctgtcttcttgtc

SEQ ID NO: 5066392 - DNA, 25 bp, Homo sapien
ctagtctgtagtcaccacagagaag

SEQ ID NO: 5066393 - DNA, 25 bp, Homo sapien
ccccggcttatgagtgggtactact

SEQ ID NO: 5066394 - DNA, 25 bp, Homo sapien
ttatgagtgggtactacttgaagtg

SEQ ID NO: 5066395 - DNA, 25 bp, Homo sapien
tgcccccccggcttatgagtgggta

SEQ ID NO: 5066396 - DNA, 25 bp, Homo sapien
ccggcttatgagtgggtactacttg

SEQ ID NO: 5066397 - DNA, 25 bp, Homo sapien
cagattcactgtacactggacgtca

SEQ ID NO: 5066398 - DNA, 25 bp, Homo sapien
tcactgtacactggacgtcagcaaa

SEQ ID NO: 5066399 - DNA, 25 bp, Homo sapien
tgtacactggacgtcagcaaacacc

SEQ ID NO: 5066400 - DNA, 25 bp, Homo sapien
tacactggacgtcagcaaacacctg

SEQ ID NO: 5066401 - DNA, 25 bp, Homo sapien
tctgtggtcctgacgtgggcttttg

SEQ ID NO: 5066402 - DNA, 25 bp, Homo sapien
tcagtcagtagctgctgaaggaggc

SEQ ID NO: 5066403 - DNA, 25 bp, Homo sapien
ggcttttgagttcccagtggaccag

SEQ ID NO: 5066404 - DNA, 25 bp, Homo sapien
cagtagctgctgaaggaggctcttc

SEQ ID NO: 5066405 - DNA, 25 bp, Homo sapien
caaatgctacgacctgaagaatggc

SEQ ID NO: 5066406 - DNA, 25 bp, Homo sapien
gaagctgattgtacacacaagctgc

SEQ ID NO: 5066407 - DNA, 25 bp, Homo sapien
ggctgctgatttcgagacacatgac

SEQ ID NO: 5066408 - DNA, 25 bp, Homo sapien
tcttgaagccaacagatacagagtt

SEQ ID NO: 5066409 - DNA, 25 bp, Homo sapien
ctgtgaatatactcatttcgtcctc

SEQ ID NO: 5066410 - DNA, 25 bp, Homo sapien
gaatatactcatttcgtcctctttc

SEQ ID NO: 5066411 - DNA, 25 bp, Homo sapien
atactcatttcgtcctctttcctgg

SEQ ID NO: 5066412 - DNA, 25 bp, Homo sapien
actcatttcgtcctctttcctggag

SEQ ID NO: 5066413 - DNA, 25 bp, Homo sapien
aattgtatctacaataattgacaca

SEQ ID NO: 5066414 - DNA, 25 bp, Homo sapien
gaaaattgtatctacaataattgac

SEQ ID NO: 5066415 - DNA, 25 bp, Homo sapien
aaattgtatctacaataattgacac

SEQ ID NO: 5066416 - DNA, 25 bp, Homo sapien
agaaaattgtatctacaataattga

SEQ ID NO: 5066417 - DNA, 25 bp, Homo sapien
tttagctacctcagctgttaataca

SEQ ID NO: 5066418 - DNA, 25 bp, Homo sapien
gctacctcagctgttaatacaataa

SEQ ID NO: 5066419 - DNA, 25 bp, Homo sapien
aactttagctacctcagctgttaat

SEQ ID NO: 5066420 - DNA, 25 bp, Homo sapien
acctcagctgttaatacaataaaag

SEQ ID NO: 5066421 - DNA, 25 bp, Homo sapien
cagtgacattttgatttgaacccca

SEQ ID NO: 5066422 - DNA, 25 bp, Homo sapien
gatcccagggacactctagggcagt

SEQ ID NO: 5066423 - DNA, 25 bp, Homo sapien
tagcctgtgcacttctgttcagatg

SEQ ID NO: 5066424 - DNA, 25 bp, Homo sapien
agtaaatccatacatgacatcacag

SEQ ID NO: 5066425 - DNA, 25 bp, Homo sapien
tatggtaccaattagcctcagagca

SEQ ID NO: 5066426 - DNA, 25 bp, Homo sapien
catagttgctaaccacatgagccct

SEQ ID NO: 5066427 - DNA, 25 bp, Homo sapien
gaagtctgcgcgtctaaatatcaca

SEQ ID NO: 5066428 - DNA, 25 bp, Homo sapien
tcctggccttgcagcggaacttcta

SEQ ID NO: 5066429 - DNA, 25 bp, Homo sapien
tcctcaaatgtagcaataattttaa

SEQ ID NO: 5066430 - DNA, 25 bp, Homo sapien
ttcctcaaatgtagcaataatttta

SEQ ID NO: 5066431 - DNA, 25 bp, Homo sapien
cctcaaatgtagcaataattttaat

SEQ ID NO: 5066432 - DNA, 25 bp, Homo sapien
ggcaatttctgcagatgtacatttc

SEQ ID NO: 5066433 - DNA, 25 bp, Homo sapien
tcttccctgtaaatgaagaggcaac

SEQ ID NO: 5066434 - DNA, 25 bp, Homo sapien
ggcttcagggatgctttattatcct

SEQ ID NO: 5066435 - DNA, 25 bp, Homo sapien
tactcgttaatttgggctttggcaa

SEQ ID NO: 5066436 - DNA, 25 bp, Homo sapien
gcaggccatctagtctcagagttta

SEQ ID NO: 5066437 - DNA, 25 bp, Homo sapien
gacaattgttgtgatgcaggccatc

SEQ ID NO: 5066438 - DNA, 25 bp, Homo sapien
ggctcagtggcctgacatcatcatg

SEQ ID NO: 5066439 - DNA, 25 bp, Homo sapien
gacttgccaagatcaaagacaatgg

SEQ ID NO: 5066440 - DNA, 25 bp, Homo sapien
tgggtgtggtcttcggtccgaaggc

SEQ ID NO: 5066441 - DNA, 25 bp, Homo sapien
cagccgcttacctccaagagctggg

SEQ ID NO: 5066442 - DNA, 25 bp, Homo sapien
caaagtggtcctcgaggtgaggcac

SEQ ID NO: 5066443 - DNA, 25 bp, Homo sapien
tgctgagacatcgagggcggaagtg

SEQ ID NO: 5066444 - DNA, 25 bp, Homo sapien
gtacaaaagcatggcggcgctcagg

SEQ ID NO: 5066445 - DNA, 25 bp, Homo sapien
ggccagaagcgagaattcccgccat

SEQ ID NO: 5066446 - DNA, 25 bp, Homo sapien
gcaggtcctggtacaatacttggtg

SEQ ID NO: 5066447 - DNA, 25 bp, Homo sapien
cgtgctttgcgatcctgccgtacaa

SEQ ID NO: 5066448 - DNA, 25 bp, Homo sapien
cacggtccggtccgacaatgggtct

SEQ ID NO: 5066449 - DNA, 25 bp, Homo sapien
acggctactctggtccagcgggctt

SEQ ID NO: 5066450 - DNA, 25 bp, Homo sapien
tttaagaaggccgttcagcccgcca

SEQ ID NO: 5066451 - DNA, 25 bp, Homo sapien
ctggccacggtccggtccgacaatg

SEQ ID NO: 5066452 - DNA, 25 bp, Homo sapien
agcagagtccatgcccacccccgcg

SEQ ID NO: 5066453 - DNA, 25 bp, Homo sapien
gccagcagagtccatgcccaccccc

SEQ ID NO: 5066454 - DNA, 25 bp, Homo sapien
cagagtccatgcccacccccgcgcc

SEQ ID NO: 5066455 - DNA, 25 bp, Homo sapien
ccagcagagtccatgcccacccccg

SEQ ID NO: 5066456 - DNA, 25 bp, Homo sapien
caaccggtgatagggactccaatgt

SEQ ID NO: 5066457 - DNA, 25 bp, Homo sapien
tcagattcccaagggccttcccatg

SEQ ID NO: 5066458 - DNA, 25 bp, Homo sapien
tcccatgaagttgtctaggcaaccg

SEQ ID NO: 5066459 - DNA, 25 bp, Homo sapien
ttgtctaggcaaccggtgataggga

SEQ ID NO: 5066460 - DNA, 25 bp, Homo sapien
tggactcgccatctggacgtaaagg

SEQ ID NO: 5066461 - DNA, 25 bp, Homo sapien
gccatctggacgtaaagggttcgcc

SEQ ID NO: 5066462 - DNA, 25 bp, Homo sapien
ggacgtaaagggttcgcctgctcca

SEQ ID NO: 5066463 - DNA, 25 bp, Homo sapien
ctcctttggactcgccatctggacg

SEQ ID NO: 5066464 - DNA, 25 bp, Homo sapien
ggtgggagcctagaaacgaagccat

SEQ ID NO: 5066465 - DNA, 25 bp, Homo sapien
ccctggctagaaccgcagttcagaa

SEQ ID NO: 5066466 - DNA, 25 bp, Homo sapien
aaggaggcggcgaccctctgaatac

SEQ ID NO: 5066467 - DNA, 25 bp, Homo sapien
tcctcctcgaataatcttggctgcc

SEQ ID NO: 5066468 - DNA, 25 bp, Homo sapien
cttggaagttatgattgcatctcat

SEQ ID NO: 5066469 - DNA, 25 bp, Homo sapien
gtttatcgcaaatccacatctctag

SEQ ID NO: 5066470 - DNA, 25 bp, Homo sapien
tatcacacgctgattaggcagcagt

SEQ ID NO: 5066471 - DNA, 25 bp, Homo sapien
gattctctagctttaccacaggccg

SEQ ID NO: 5066472 - DNA, 25 bp, Homo sapien
cagcccgagagaggatatgaactat

SEQ ID NO: 5066473 - DNA, 25 bp, Homo sapien
tgggtctctagcctttccaagtgag

SEQ ID NO: 5066474 - DNA, 25 bp, Homo sapien
gcagctcttcagactgtttacggga

SEQ ID NO: 5066475 - DNA, 25 bp, Homo sapien
tcgcagacgccttagtttatgaatc

SEQ ID NO: 5066476 - DNA, 25 bp, Homo sapien
tacgggatctgctcacttgggtctc

SEQ ID NO: 5066477 - DNA, 25 bp, Homo sapien
taaagcacactttgcaacagaagat

SEQ ID NO: 5066478 - DNA, 25 bp, Homo sapien
cacaaaggccttgaataaagcacac

SEQ ID NO: 5066479 - DNA, 25 bp, Homo sapien
caaatgttcaatacagggattcacc

SEQ ID NO: 5066480 - DNA, 25 bp, Homo sapien
tggaatttaacactattgctgggaa

SEQ ID NO: 5066481 - DNA, 25 bp, Homo sapien
tctacattggcaatacatgctttca

SEQ ID NO: 5066482 - DNA, 25 bp, Homo sapien
ccaatgcttcttgctcattgatctc

SEQ ID NO: 5066483 - DNA, 25 bp, Homo sapien
gcttcttgctcattgatctccactg

SEQ ID NO: 5066484 - DNA, 25 bp, Homo sapien
atctccactgtttggttgggttcta

SEQ ID NO: 5066485 - DNA, 25 bp, Homo sapien
aacacatctagcaaactaactcact

SEQ ID NO: 5066486 - DNA, 25 bp, Homo sapien
tagcaaactaactcactagaggcag

SEQ ID NO: 5066487 - DNA, 25 bp, Homo sapien
tagaggcagacccagactaaattag

SEQ ID NO: 5066488 - DNA, 25 bp, Homo sapien
taactcactagaggcagacccagac

SEQ ID NO: 5066489 - DNA, 25 bp, Homo sapien
taggtgaagataggcctacaaatag

SEQ ID NO: 5066490 - DNA, 25 bp, Homo sapien
tcttgtaggtgaagataggcctaca

SEQ ID NO: 5066491 - DNA, 25 bp, Homo sapien
gtgaagataggcctacaaatagcac

SEQ ID NO: 5066492 - DNA, 25 bp, Homo sapien
tgtaggtgaagataggcctacaaat

SEQ ID NO: 5066493 - DNA, 25 bp, Homo sapien
acgaactgttaagatgagtggaata

SEQ ID NO: 5066494 - DNA, 25 bp, Homo sapien
cgaactgttaagatgagtggaataa

SEQ ID NO: 5066495 - DNA, 25 bp, Homo sapien
gacgaactgttaagatgagtggaat

SEQ ID NO: 5066496 - DNA, 25 bp, Homo sapien
taggaatccaataggttcccctcaa

SEQ ID NO: 5066497 - DNA, 25 bp, Homo sapien
tcggctggtcagtttaccactgagg

SEQ ID NO: 5066498 - DNA, 25 bp, Homo sapien
tatgacaaggtccacaaaataggaa

SEQ ID NO: 5066499 - DNA, 25 bp, Homo sapien
ctcaaaagcagtactgatgcagaca

SEQ ID NO: 5066500 - DNA, 25 bp, Homo sapien
gtaagcattcaggtactcgcagaga

SEQ ID NO: 5066501 - DNA, 25 bp, Homo sapien
ctcgcagagactgaacaggaagtgc

SEQ ID NO: 5066502 - DNA, 25 bp, Homo sapien
ggtacttcctcccagagtaagcatt

SEQ ID NO: 5066503 - DNA, 25 bp, Homo sapien
tattttgcagctatctcttccaggg

SEQ ID NO: 5066504 - DNA, 25 bp, Homo sapien
gaggcatataacatcccagagagat

SEQ ID NO: 5066505 - DNA, 25 bp, Homo sapien
cttttaagttgatcttgggcccacg

SEQ ID NO: 5066506 - DNA, 25 bp, Homo sapien
caagcatcggaaaggtaacggtcaa

SEQ ID NO: 5066507 - DNA, 25 bp, Homo sapien
tcaacgccatccagagtttcaaaag

SEQ ID NO: 5066508 - DNA, 25 bp, Homo sapien
ctgcaagggcccagtcaggagggct

SEQ ID NO: 5066509 - DNA, 25 bp, Homo sapien
cagtcaggagggctgcaaagtcact

SEQ ID NO: 5066510 - DNA, 25 bp, Homo sapien
tgcaagggcccagtcaggagggctg

SEQ ID NO: 5066511 - DNA, 25 bp, Homo sapien
gcccagtcaggagggctgcaaagtc

SEQ ID NO: 5066512 - DNA, 25 bp, Homo sapien
atgacagcaagttacacagtgggtt

SEQ ID NO: 5066513 - DNA, 25 bp, Homo sapien
gacagcaagttacacagtgggtttc

SEQ ID NO: 5066514 - DNA, 25 bp, Homo sapien
ctggatccagtttgtaagtaaatga

SEQ ID NO: 5066515 - DNA, 25 bp, Homo sapien
ggatccagtttgtaagtaaatgaca

SEQ ID NO: 5066516 - DNA, 25 bp, Homo sapien
ctagcacagaacgggaaggactgac

SEQ ID NO: 5066517 - DNA, 25 bp, Homo sapien
gcacagaacgggaaggactgacccc

SEQ ID NO: 5066518 - DNA, 25 bp, Homo sapien
tagcacagaacgggaaggactgacc

SEQ ID NO: 5066519 - DNA, 25 bp, Homo sapien
agcacagaacgggaaggactgaccc

SEQ ID NO: 5066520 - DNA, 25 bp, Homo sapien
cttgacatgtcacggtgacgtcagt

SEQ ID NO: 5066521 - DNA, 25 bp, Homo sapien
agttgctgtgaggtccttatacagc

SEQ ID NO: 5066522 - DNA, 25 bp, Homo sapien
tgctgtgaggtccttatacagcaat

SEQ ID NO: 5066523 - DNA, 25 bp, Homo sapien
ggtgacgtcagtgggaagagttgct

SEQ ID NO: 5066524 - DNA, 25 bp, Homo sapien
aaatcataggctgcgagaacactgc

SEQ ID NO: 5066525 - DNA, 25 bp, Homo sapien
aaggctgccccttactggaccaatg

SEQ ID NO: 5066526 - DNA, 25 bp, Homo sapien
gactggaatctaactgcgcagagaa

SEQ ID NO: 5066527 - DNA, 25 bp, Homo sapien
catttagagactgctccgtagggag

SEQ ID NO: 5066528 - DNA, 25 bp, Homo sapien
gctcctcccatgaagtggataatac

SEQ ID NO: 5066529 - DNA, 25 bp, Homo sapien
caaacacttgatgcaagggcttcgt

SEQ ID NO: 5066530 - DNA, 25 bp, Homo sapien
gggcttcgtacagaacagagtttca

SEQ ID NO: 5066531 - DNA, 25 bp, Homo sapien
cagagtttcatgagatgctcgttgc

SEQ ID NO: 5066532 - DNA, 25 bp, Homo sapien
gatgtgctcccagtgcagtgaaaac

SEQ ID NO: 5066533 - DNA, 25 bp, Homo sapien
ctctgatgtgctcccagtgcagtga

SEQ ID NO: 5066534 - DNA, 25 bp, Homo sapien
tgtgctcccagtgcagtgaaaacaa

SEQ ID NO: 5066535 - DNA, 25 bp, Homo sapien
gctcccagtgcagtgaaaacaatct

SEQ ID NO: 5066536 - DNA, 25 bp, Homo sapien
gggtgatgtacccttcatcagacag

SEQ ID NO: 5066537 - DNA, 25 bp, Homo sapien
catcagacagtactacccacctggt

SEQ ID NO: 5066538 - DNA, 25 bp, Homo sapien
ccaggtgatcatgggaattgttcaa

SEQ ID NO: 5066539 - DNA, 25 bp, Homo sapien
catcttgagcattttaagaagggac

SEQ ID NO: 5066540 - DNA, 25 bp, Homo sapien
gggacttcctagtacattcacagct

SEQ ID NO: 5066541 - DNA, 25 bp, Homo sapien
tgcgcctaaccaaacaaacactgaa

SEQ ID NO: 5066542 - DNA, 25 bp, Homo sapien
tggcctagaatacactgcgcctaac

SEQ ID NO: 5066543 - DNA, 25 bp, Homo sapien
taatgggcagatttctaactaacta

SEQ ID NO: 5066544 - DNA, 25 bp, Homo sapien
tcatgactcctatctgtgcctgggc

SEQ ID NO: 5066545 - DNA, 25 bp, Homo sapien
tcagaggcccgtggttacggcaaat

SEQ ID NO: 5066546 - DNA, 25 bp, Homo sapien
cggaggttacttcgtggccattgca

SEQ ID NO: 5066547 - DNA, 25 bp, Homo sapien
ttctaaagggtactccaagctggct

SEQ ID NO: 5066548 - DNA, 25 bp, Homo sapien
tagggctgaacagtccttccagagc

SEQ ID NO: 5066549 - DNA, 25 bp, Homo sapien
tctccatgtggtccgagtgaggtga

SEQ ID NO: 5066550 - DNA, 25 bp, Homo sapien
gaagtcccgaccttcctggattgaa

SEQ ID NO: 5066551 - DNA, 25 bp, Homo sapien
tgagggtggccctgctattcctgtg

SEQ ID NO: 5066552 - DNA, 25 bp, Homo sapien
tcatgctgcgcataggtgagcaccc

SEQ ID NO: 5066553 - DNA, 25 bp, Homo sapien
taccctaggcatgaacaaaggcggg

SEQ ID NO: 5066554 - DNA, 25 bp, Homo sapien
tcacagtggcaagtcagagctagcg

SEQ ID NO: 5066555 - DNA, 25 bp, Homo sapien
tctgaggcccataacaaggtgtggc

SEQ ID NO: 5066556 - DNA, 25 bp, Homo sapien
cattggcagcacgtatatggcggct

SEQ ID NO: 5066557 - DNA, 25 bp, Homo sapien
cctggacaatcccaagttccgggtg

SEQ ID NO: 5066558 - DNA, 25 bp, Homo sapien
ccaaggcaagagattggcagcccag

SEQ ID NO: 5066559 - DNA, 25 bp, Homo sapien
gaagttctcccaggatcatgtggca

SEQ ID NO: 5066560 - DNA, 25 bp, Homo sapien
caaagtggcactgttcgtaatagac

SEQ ID NO: 5066561 - DNA, 25 bp, Homo sapien
ccgacttgatgtgaaagggcctaag

SEQ ID NO: 5066562 - DNA, 25 bp, Homo sapien
tggcgctgagggacattaacacaac

SEQ ID NO: 5066563 - DNA, 25 bp, Homo sapien
tgtgatcagtcaggcaatgcagtgt

SEQ ID NO: 5066564 - DNA, 25 bp, Homo sapien
gaccacaagcgttttcgggagcacg

SEQ ID NO: 5066565 - DNA, 25 bp, Homo sapien
gaatccagaaggcagtgaacatccc

SEQ ID NO: 5066566 - DNA, 25 bp, Homo sapien
ctagaatgacatggcgggaatcgcg

SEQ ID NO: 5066567 - DNA, 25 bp, Homo sapien
gacgtatcactgtttggctaggacc

SEQ ID NO: 5066568 - DNA, 25 bp, Homo sapien
tcaacttggattgaccggacccgct

SEQ ID NO: 5066569 - DNA, 25 bp, Homo sapien
ctcctgggactggaatacgggacca

SEQ ID NO: 5066570 - DNA, 25 bp, Homo sapien
gaaccactgggcacgtattgagcac

SEQ ID NO: 5066571 - DNA, 25 bp, Homo sapien
cataaatctgacaggtggctcgcca

SEQ ID NO: 5066572 - DNA, 25 bp, Homo sapien
tctgaggccgggctttgccacgtgg

SEQ ID NO: 5066573 - DNA, 25 bp, Homo sapien
gaggccgggctttgccacgtgggcc

SEQ ID NO: 5066574 - DNA, 25 bp, Homo sapien
gctttgccacgtgggcccctcctct

SEQ ID NO: 5066575 - DNA, 25 bp, Homo sapien
gctctgaggccgggctttgccacgt

SEQ ID NO: 5066576 - DNA, 25 bp, Homo sapien
caggtgtgcctcacggtccgtggct

SEQ ID NO: 5066577 - DNA, 25 bp, Homo sapien
cagtgacgagggcaacccaagtttc

SEQ ID NO: 5066578 - DNA, 25 bp, Homo sapien
ccctgatgagcacgggtgatgctga

SEQ ID NO: 5066579 - DNA, 25 bp, Homo sapien
gtactttctgagtacacggtggcca

SEQ ID NO: 5066580 - DNA, 25 bp, Homo sapien
agggaagaaccgcccattgaccaca

SEQ ID NO: 5066581 - DNA, 25 bp, Homo sapien
ttgaccacaagcgtcaggcccctct

SEQ ID NO: 5066582 - DNA, 25 bp, Homo sapien
gcttgggacactgggaggctgccat

SEQ ID NO: 5066583 - DNA, 25 bp, Homo sapien
cccggagcttgggacactgggaggc

SEQ ID NO: 5066584 - DNA, 25 bp, Homo sapien
tccaagatgccgtcacgctggcccc

SEQ ID NO: 5066585 - DNA, 25 bp, Homo sapien
aagatgccgtcacgctggcccccag

SEQ ID NO: 5066586 - DNA, 25 bp, Homo sapien
ctccaagatgccgtcacgctggccc

SEQ ID NO: 5066587 - DNA, 25 bp, Homo sapien
caagatgccgtcacgctggccccca

SEQ ID NO: 5066588 - DNA, 25 bp, Homo sapien
gctcgtcttcgtgtttcagagagac

SEQ ID NO: 5066589 - DNA, 25 bp, Homo sapien
tgagctcgtcttcgtgtttcagaga

SEQ ID NO: 5066590 - DNA, 25 bp, Homo sapien
ccagtgtggtgtctgagctcgtctt

SEQ ID NO: 5066591 - DNA, 25 bp, Homo sapien
tggtgtctgagctcgtcttcgtgtt

SEQ ID NO: 5066592 - DNA, 25 bp, Homo sapien
taatgacgagtttcccgtgcggctg

SEQ ID NO: 5066593 - DNA, 25 bp, Homo sapien
acgagtttcccgtgcggctggcctc

SEQ ID NO: 5066594 - DNA, 25 bp, Homo sapien
ggcctccagccgcagaacgtcatag

SEQ ID NO: 5066595 - DNA, 25 bp, Homo sapien
ataggtctctgtgggcgacacggac

SEQ ID NO: 5066596 - DNA, 25 bp, Homo sapien
cccagggcaggctcatccgagtgag

SEQ ID NO: 5066597 - DNA, 25 bp, Homo sapien
caggctcatccgagtgagtgagagc

SEQ ID NO: 5066598 - DNA, 25 bp, Homo sapien
tcatccgagtgagtgagagcagtga

SEQ ID NO: 5066599 - DNA, 25 bp, Homo sapien
ccagggcaggctcatccgagtgagt

SEQ ID NO: 5066600 - DNA, 25 bp, Homo sapien
ccgaagcgggtataggagagagagg

SEQ ID NO: 5066601 - DNA, 25 bp, Homo sapien
ggagagagagggattcgttcagcca

SEQ ID NO: 5066602 - DNA, 25 bp, Homo sapien
ctgagccaccgaagcgggtatagga

SEQ ID NO: 5066603 - DNA, 25 bp, Homo sapien
agagagggattcgttcagccagcat

SEQ ID NO: 5066604 - DNA, 25 bp, Homo sapien
ttcaggaagatgattctggcagcga

SEQ ID NO: 5066605 - DNA, 25 bp, Homo sapien
caggaagatgattctggcagcgaac

SEQ ID NO: 5066606 - DNA, 25 bp, Homo sapien
tcaggaagatgattctggcagcgaa

SEQ ID NO: 5066607 - DNA, 25 bp, Homo sapien
aggaagatgattctggcagcgaacg

SEQ ID NO: 5066608 - DNA, 25 bp, Homo sapien
cctctgtggcgcacgaactgggaga

SEQ ID NO: 5066609 - DNA, 25 bp, Homo sapien
tgtgtgaagtacacgaagcccctct

SEQ ID NO: 5066610 - DNA, 25 bp, Homo sapien
cgtgaagggcacgttggatttcgat

SEQ ID NO: 5066611 - DNA, 25 bp, Homo sapien
ccacggtgatggaaaggcggtcctc

SEQ ID NO: 5066612 - DNA, 25 bp, Homo sapien
tcgagttgcatttagggaagaaagg

SEQ ID NO: 5066613 - DNA, 25 bp, Homo sapien
ctcggcagggttagtgacgcacaac

SEQ ID NO: 5066614 - DNA, 25 bp, Homo sapien
tttagaatcttcgtcctcggcaggg

SEQ ID NO: 5066615 - DNA, 25 bp, Homo sapien
cacctgaggcttcgagttgcattta

SEQ ID NO: 5066616 - DNA, 25 bp, Homo sapien
ggcatttcctatcccttccattgtg

SEQ ID NO: 5066617 - DNA, 25 bp, Homo sapien
cctatcccttccattgtgtctcaga

SEQ ID NO: 5066618 - DNA, 25 bp, Homo sapien
caggtggcatttcctatcccttcca

SEQ ID NO: 5066619 - DNA, 25 bp, Homo sapien
tcccttccattgtgtctcagacctg

SEQ ID NO: 5066620 - DNA, 25 bp, Homo sapien
gttgggcttgtagttgttaatatca

SEQ ID NO: 5066621 - DNA, 25 bp, Homo sapien
ccagggacaaatttgggatattcac

SEQ ID NO: 5066622 - DNA, 25 bp, Homo sapien
gaacacacattcctcctgtagttgg

SEQ ID NO: 5066623 - DNA, 25 bp, Homo sapien
gcactgagtgctctggaacacacat

SEQ ID NO: 5066624 - DNA, 25 bp, Homo sapien
ggaccagaacaatgatgacgtgcgt

SEQ ID NO: 5066625 - DNA, 25 bp, Homo sapien
tccctccgtggagagtatgcagatg

SEQ ID NO: 5066626 - DNA, 25 bp, Homo sapien
gacgggaaagaagccgtcatccctc

SEQ ID NO: 5066627 - DNA, 25 bp, Homo sapien
cagatgggcatcagtggagggtcca

SEQ ID NO: 5066628 - DNA, 25 bp, Homo sapien
ttatccccccatgcccatgcgcagc

SEQ ID NO: 5066629 - DNA, 25 bp, Homo sapien
tatccccccatgcccatgcgcagct

SEQ ID NO: 5066630 - DNA, 25 bp, Homo sapien
ccgttgcctcctgggatgtgggccc

SEQ ID NO: 5066631 - DNA, 25 bp, Homo sapien
gatgtgggccccatcaaggatcggg

SEQ ID NO: 5066632 - DNA, 25 bp, Homo sapien
tgctgccgttgcctcctgggatgtg

SEQ ID NO: 5066633 - DNA, 25 bp, Homo sapien
ctcctgggatgtgggccccatcaag

SEQ ID NO: 5066634 - DNA, 25 bp, Homo sapien
aaaaaggagctgtgccccattgaac

SEQ ID NO: 5066635 - DNA, 25 bp, Homo sapien
gatagccagagtaagtaagcagcca

SEQ ID NO: 5066636 - DNA, 25 bp, Homo sapien
tgcctttgacagtgacagtgcgcgt

SEQ ID NO: 5066637 - DNA, 25 bp, Homo sapien
cagtgcgcgtcttacaactaattcc

SEQ ID NO: 5066638 - DNA, 25 bp, Homo sapien
gttcatgtattaggactggcactcc

SEQ ID NO: 5066639 - DNA, 25 bp, Homo sapien
gctgcaaccacactaattcacattt

SEQ ID NO: 5066640 - DNA, 25 bp, Homo sapien
tacgtcgtcattcttgttacatcac

SEQ ID NO: 5066641 - DNA, 25 bp, Homo sapien
ctccttacggtgcttatagaactag

SEQ ID NO: 5066642 - DNA, 25 bp, Homo sapien
ctgggagccggcggaacgttatggg

SEQ ID NO: 5066643 - DNA, 25 bp, Homo sapien
agccggcggaacgttatggggtgcg

SEQ ID NO: 5066644 - DNA, 25 bp, Homo sapien
gcctgggagccggcggaacgttatg

SEQ ID NO: 5066645 - DNA, 25 bp, Homo sapien
gatggaggatgaaagtttagttccc

SEQ ID NO: 5066646 - DNA, 25 bp, Homo sapien
tccgacgtcactcttccggagatgg

SEQ ID NO: 5066647 - DNA, 25 bp, Homo sapien
catgaggggccgtcggcctagatac

SEQ ID NO: 5066648 - DNA, 25 bp, Homo sapien
ggtggcctctaagccttgaatgtac

SEQ ID NO: 5066649 - DNA, 25 bp, Homo sapien
tcgtcctccgacgtcactcttccgg

SEQ ID NO: 5066650 - DNA, 25 bp, Homo sapien
cgccgccttcccgtcaggggacgag

SEQ ID NO: 5066651 - DNA, 25 bp, Homo sapien
tcccgtcaggggacgaggccttaga

SEQ ID NO: 5066652 - DNA, 25 bp, Homo sapien
tgcgaaagcaacaaacgcctcccgt

SEQ ID NO: 5066653 - DNA, 25 bp, Homo sapien
ggcgtccctgaaaacaaggacgcgc

SEQ ID NO: 5066654 - DNA, 25 bp, Homo sapien
tccctgaaaacaaggacgcgctcac

SEQ ID NO: 5066655 - DNA, 25 bp, Homo sapien
atttccaccactcggctgcgaaagc

SEQ ID NO: 5066656 - DNA, 25 bp, Homo sapien
aaaaaacaataggaaccagattcag

SEQ ID NO: 5066657 - DNA, 25 bp, Homo sapien
tgactccaaatagacaactccattt

SEQ ID NO: 5066658 - DNA, 25 bp, Homo sapien
gactaaacactcttgccttgactcc

SEQ ID NO: 5066659 - DNA, 25 bp, Homo sapien
taataggagggccaagactaaacac

SEQ ID NO: 5066660 - DNA, 25 bp, Homo sapien
gaggtcacgttcgaagcgaacagcg

SEQ ID NO: 5066661 - DNA, 25 bp, Homo sapien
cacctgcagtagaccaagcctttct

SEQ ID NO: 5066662 - DNA, 25 bp, Homo sapien
cccacagaggagtcaacaaatccat

SEQ ID NO: 5066663 - DNA, 25 bp, Homo sapien
gcctggcttagcgttaacacctgca

SEQ ID NO: 5066664 - DNA, 25 bp, Homo sapien
cgtgggcaccctcgggagaatttca

SEQ ID NO: 5066665 - DNA, 25 bp, Homo sapien
caaacttaacaaagccaggcacgtg

SEQ ID NO: 5066666 - DNA, 25 bp, Homo sapien
ggtctgttcctctgtcgcatgcgca

SEQ ID NO: 5066667 - DNA, 25 bp, Homo sapien
tagggattcataagctctgagcaag

SEQ ID NO: 5066668 - DNA, 25 bp, Homo sapien
tcacctagcctacttctgtctattc

SEQ ID NO: 5066669 - DNA, 25 bp, Homo sapien
tctattcttgataccactcccaaat

SEQ ID NO: 5066670 - DNA, 25 bp, Homo sapien
ctcacctagcctacttctgtctatt

SEQ ID NO: 5066671 - DNA, 25 bp, Homo sapien
tgataccactcccaaattagtattt

SEQ ID NO: 5066672 - DNA, 25 bp, Homo sapien
tcattgcccttggtctcagcaaaaa

SEQ ID NO: 5066673 - DNA, 25 bp, Homo sapien
aaattctggaggtgcatcggctgtg

SEQ ID NO: 5066674 - DNA, 25 bp, Homo sapien
tgcacagcctccgtcaatgtccagt

SEQ ID NO: 5066675 - DNA, 25 bp, Homo sapien
gtcaatgtccagtactgattctcct

SEQ ID NO: 5066676 - DNA, 25 bp, Homo sapien
ccttttcaacaggacaggtgtcccg

SEQ ID NO: 5066677 - DNA, 25 bp, Homo sapien
acaggtgtcccggttctcacacgga

SEQ ID NO: 5066678 - DNA, 25 bp, Homo sapien
caaggaagccatatccttccgggca

SEQ ID NO: 5066679 - DNA, 25 bp, Homo sapien
tacacgtcccgcagttcaaggaagc

SEQ ID NO: 5066680 - DNA, 25 bp, Homo sapien
gaacaatgacgggagatgaagaaga

SEQ ID NO: 5066681 - DNA, 25 bp, Homo sapien
aacaatgacgggagatgaagaagaa

SEQ ID NO: 5066682 - DNA, 25 bp, Homo sapien
cagaacaatgacgggagatgaagaa

SEQ ID NO: 5066683 - DNA, 25 bp, Homo sapien
tcagaacaatgacgggagatgaaga

SEQ ID NO: 5066684 - DNA, 25 bp, Homo sapien
agagtcctccctggtacttctgatg

SEQ ID NO: 5066685 - DNA, 25 bp, Homo sapien
tcagagtcctccctggtacttctga

SEQ ID NO: 5066686 - DNA, 25 bp, Homo sapien
cagagtcctccctggtacttctgat

SEQ ID NO: 5066687 - DNA, 25 bp, Homo sapien
gagtcctccctggtacttctgatgg

SEQ ID NO: 5066688 - DNA, 25 bp, Homo sapien
ggaagatggtgtgttgctctagcat

SEQ ID NO: 5066689 - DNA, 25 bp, Homo sapien
gtccaatgggataaaaagacaatca

SEQ ID NO: 5066690 - DNA, 25 bp, Homo sapien
catccagagacagatgataatgttg

SEQ ID NO: 5066691 - DNA, 25 bp, Homo sapien
gtagactatcacgatgtccaatggg

SEQ ID NO: 5066692 - DNA, 25 bp, Homo sapien
aggattgcttgcgtccagttcgaga

SEQ ID NO: 5066693 - DNA, 25 bp, Homo sapien
ggattgcttgcgtccagttcgagac

SEQ ID NO: 5066694 - DNA, 25 bp, Homo sapien
ggaggattgcttgcgtccagttcga

SEQ ID NO: 5066695 - DNA, 25 bp, Homo sapien
tctgaaggacgtgaaggtccatggc

SEQ ID NO: 5066696 - DNA, 25 bp, Homo sapien
tgaaggacgtgaaggtccatggcgt

SEQ ID NO: 5066697 - DNA, 25 bp, Homo sapien
aaggacgtgaaggtccatggcgttg

SEQ ID NO: 5066698 - DNA, 25 bp, Homo sapien
actctgaaggacgtgaaggtccatg

SEQ ID NO: 5066699 - DNA, 25 bp, Homo sapien
ctctagtctagaccaaggaaattct

SEQ ID NO: 5066700 - DNA, 25 bp, Homo sapien
ccatcctgggtgatacttgctctca

SEQ ID NO: 5066701 - DNA, 25 bp, Homo sapien
tcttacccgaagctcaaatccatgt

SEQ ID NO: 5066702 - DNA, 25 bp, Homo sapien
ccacttgcttctggtcaaaagctca

SEQ ID NO: 5066703 - DNA, 25 bp, Homo sapien
tgccgcgggacaggtttcgcaacta

SEQ ID NO: 5066704 - DNA, 25 bp, Homo sapien
taccacggtgtgagcagtgtttgag

SEQ ID NO: 5066705 - DNA, 25 bp, Homo sapien
ttcgcaactagattttaccacggtg

SEQ ID NO: 5066706 - DNA, 25 bp, Homo sapien
atggccttgaattgatcctgcgttc

SEQ ID NO: 5066707 - DNA, 25 bp, Homo sapien
ggcctctcccatgaccttgactgga

SEQ ID NO: 5066708 - DNA, 25 bp, Homo sapien
tttggtcaggccagaggaactaagc

SEQ ID NO: 5066709 - DNA, 25 bp, Homo sapien
gactgaatttccctgcgtgtcacag

SEQ ID NO: 5066710 - DNA, 25 bp, Homo sapien
tctttggccaaagtgcaccctggta

SEQ ID NO: 5066711 - DNA, 25 bp, Homo sapien
tatagttcggaattcttgacccgca

SEQ ID NO: 5066712 - DNA, 25 bp, Homo sapien
tactgagtgccctaatgtgatatgc

SEQ ID NO: 5066713 - DNA, 25 bp, Homo sapien
ggaattctctcagcacccgtgcaag

SEQ ID NO: 5066714 - DNA, 25 bp, Homo sapien
tacatgggcaagcagagattcaaac

SEQ ID NO: 5066715 - DNA, 25 bp, Homo sapien
tgacatgctagacactgtggaaggt

SEQ ID NO: 5066716 - DNA, 25 bp, Homo sapien
tgtccgcttgggtttttatgaaagc

SEQ ID NO: 5066717 - DNA, 25 bp, Homo sapien
tataatgactatggaggcacataca

SEQ ID NO: 5066718 - DNA, 25 bp, Homo sapien
ctcgatgtgttcagttatcccaaag

SEQ ID NO: 5066719 - DNA, 25 bp, Homo sapien
tcccacaattctgctcaacacaaaa

SEQ ID NO: 5066720 - DNA, 25 bp, Homo sapien
caggccaggtggctttaagattgac

SEQ ID NO: 5066721 - DNA, 25 bp, Homo sapien
taagattgactgagagtcagacttg

SEQ ID NO: 5066722 - DNA, 25 bp, Homo sapien
agcttgatatgatcacccagagaca

SEQ ID NO: 5066723 - DNA, 25 bp, Homo sapien
tcctctccctgatttatatgtgtaa

SEQ ID NO: 5066724 - DNA, 25 bp, Homo sapien
tatatgtgtaattcgcaagctttgc

SEQ ID NO: 5066725 - DNA, 25 bp, Homo sapien
ttcgcaagctttgccgccaggatcc

SEQ ID NO: 5066726 - DNA, 25 bp, Homo sapien
ccagcgccgacttgaattccagctc

SEQ ID NO: 5066727 - DNA, 25 bp, Homo sapien
gccgcgggcaggacggagccgggcg

SEQ ID NO: 5066728 - DNA, 25 bp, Homo sapien
gggagcagacgcgggggccggccgc

SEQ ID NO: 5066729 - DNA, 25 bp, Homo sapien
tcacagtcggggcggggactggcgg

SEQ ID NO: 5066730 - DNA, 25 bp, Homo sapien
gccggccgcgggcaggacggagccg

SEQ ID NO: 5066731 - DNA, 25 bp, Homo sapien
gggcgcgcgcctctcgagaggccgg

SEQ ID NO: 5066732 - DNA, 25 bp, Homo sapien
gcgttcccagccagccctcggcggc

SEQ ID NO: 5066733 - DNA, 25 bp, Homo sapien
ggcgttcccagccagccctcggcgg

SEQ ID NO: 5066734 - DNA, 25 bp, Homo sapien
tctcgagaggccggcgtcgctgcgg

SEQ ID NO: 5066735 - DNA, 25 bp, Homo sapien
cgcaaatgctgccacacgaccacct

SEQ ID NO: 5066736 - DNA, 25 bp, Homo sapien
cgcttttgttaattccgcaaatgct

SEQ ID NO: 5066737 - DNA, 25 bp, Homo sapien
gcatctttgtcctcgcagcgcagac

SEQ ID NO: 5066738 - DNA, 25 bp, Homo sapien
tcccggtctgctcggctccgggaga

SEQ ID NO: 5066739 - DNA, 25 bp, Homo sapien
tgtgggacccaacgcgctctctctt

SEQ ID NO: 5066740 - DNA, 25 bp, Homo sapien
gctgcaatgtgggacccaacgcgct

SEQ ID NO: 5066741 - DNA, 25 bp, Homo sapien
caatgtgggacccaacgcgctctct

SEQ ID NO: 5066742 - DNA, 25 bp, Homo sapien
tcagagctgcaatgtgggacccaac

SEQ ID NO: 5066743 - DNA, 25 bp, Homo sapien
tggatcagaaatgcaaacgtatttc

SEQ ID NO: 5066744 - DNA, 25 bp, Homo sapien
gaaatgcaaacgtatttctgagcaa

SEQ ID NO: 5066745 - DNA, 25 bp, Homo sapien
tcagaaatgcaaacgtatttctgag

SEQ ID NO: 5066746 - DNA, 25 bp, Homo sapien
ggatcagaaatgcaaacgtatttct

SEQ ID NO: 5066747 - DNA, 25 bp, Homo sapien
caaggtgagcgtatcagtgtgaggt

SEQ ID NO: 5066748 - DNA, 25 bp, Homo sapien
cagtactgttcttaatcttatggaa

SEQ ID NO: 5066749 - DNA, 25 bp, Homo sapien
aggccaaggtgagcgtatcagtgtg

SEQ ID NO: 5066750 - DNA, 25 bp, Homo sapien
tgtttgatagaaggaacggtatcac

SEQ ID NO: 5066751 - DNA, 25 bp, Homo sapien
ggcagcacctacattccctctggga

SEQ ID NO: 5066752 - DNA, 25 bp, Homo sapien
gaattatccctgtcttaccaatgag

SEQ ID NO: 5066753 - DNA, 25 bp, Homo sapien
tacataaagaacctgagatggcagc

SEQ ID NO: 5066754 - DNA, 25 bp, Homo sapien
tgtagcaccagcacttgaaagggac

SEQ ID NO: 5066755 - DNA, 25 bp, Homo sapien
caaaggctcaatctcactactaatc

SEQ ID NO: 5066756 - DNA, 25 bp, Homo sapien
attcaaaggctcaatctcactacta

SEQ ID NO: 5066757 - DNA, 25 bp, Homo sapien
tcaaaggctcaatctcactactaat

SEQ ID NO: 5066758 - DNA, 25 bp, Homo sapien
ttcaaaggctcaatctcactactaa

SEQ ID NO: 5066759 - DNA, 25 bp, Homo sapien
tcacggtgccaaagagaaatttcag

SEQ ID NO: 5066760 - DNA, 25 bp, Homo sapien
gagagactgttgcagcatgcacgca

SEQ ID NO: 5066761 - DNA, 25 bp, Homo sapien
agagcctccgaaacgtagagccagg

SEQ ID NO: 5066762 - DNA, 25 bp, Homo sapien
gcaaaacaagtactaggttgagccc

SEQ ID NO: 5066763 - DNA, 25 bp, Homo sapien
ctccaggagccgccaccacacaggg

SEQ ID NO: 5066764 - DNA, 25 bp, Homo sapien
ggagccgccaccacacagggcccat

SEQ ID NO: 5066765 - DNA, 25 bp, Homo sapien
gaggcctccaggagccgccaccaca

SEQ ID NO: 5066766 - DNA, 25 bp, Homo sapien
agaggcctccaggagccgccaccac

SEQ ID NO: 5066767 - DNA, 25 bp, Homo sapien
agcaaagcctcctggtcgggcccag

SEQ ID NO: 5066768 - DNA, 25 bp, Homo sapien
gcaaagcctcctggtcgggcccagg

SEQ ID NO: 5066769 - DNA, 25 bp, Homo sapien
agggcaccacagcagccacacacac

SEQ ID NO: 5066770 - DNA, 25 bp, Homo sapien
gtagggcaccacagcagccacacac

SEQ ID NO: 5066771 - DNA, 25 bp, Homo sapien
ctggggcgtagggcaccacagcagc

SEQ ID NO: 5066772 - DNA, 25 bp, Homo sapien
gcgtagggcaccacagcagccacac

SEQ ID NO: 5066773 - DNA, 25 bp, Homo sapien
ctcagggaagatgttgtcaaccagc

SEQ ID NO: 5066774 - DNA, 25 bp, Homo sapien
tcagggaagatgttgtcaaccagcc

SEQ ID NO: 5066775 - DNA, 25 bp, Homo sapien
cttctgcagatccaaatgccctcat

SEQ ID NO: 5066776 - DNA, 25 bp, Homo sapien
tgccttctgcagatccaaatgccct

SEQ ID NO: 5066777 - DNA, 25 bp, Homo sapien
gctgccttctgcagatccaaatgcc

SEQ ID NO: 5066778 - DNA, 25 bp, Homo sapien
agatccaaatgccctcatccttcat

SEQ ID NO: 5066779 - DNA, 25 bp, Homo sapien
gctcactatggccacactatggcta

SEQ ID NO: 5066780 - DNA, 25 bp, Homo sapien
cacactatggctagacgagttcaag

SEQ ID NO: 5066781 - DNA, 25 bp, Homo sapien
gccacactatggctagacgagttca

SEQ ID NO: 5066782 - DNA, 25 bp, Homo sapien
tatggccacactatggctagacgag

SEQ ID NO: 5066783 - DNA, 25 bp, Homo sapien
atatcgatggcgacccacgtcacgg

SEQ ID NO: 5066784 - DNA, 25 bp, Homo sapien
tgagcctctcagagaggtaggcgcc

SEQ ID NO: 5066785 - DNA, 25 bp, Homo sapien
agaggtaggcgccaatacgatcaag

SEQ ID NO: 5066786 - DNA, 25 bp, Homo sapien
atggcgacccacgtcacggatgagc

SEQ ID NO: 5066787 - DNA, 25 bp, Homo sapien
ctaacaatatagttcctgacaatct

SEQ ID NO: 5066788 - DNA, 25 bp, Homo sapien
caatatagttcctgacaatctctct

SEQ ID NO: 5066789 - DNA, 25 bp, Homo sapien
ggaccctatgtttagcctaacaata

SEQ ID NO: 5066790 - DNA, 25 bp, Homo sapien
aggaccctatgtttagcctaacaat

SEQ ID NO: 5066791 - DNA, 25 bp, Homo sapien
gggatttactcgcattggagttgaa

SEQ ID NO: 5066792 - DNA, 25 bp, Homo sapien
tcgtttctaggggatttactcgcat

SEQ ID NO: 5066793 - DNA, 25 bp, Homo sapien
tgctctcccttcgtttctaggggat

SEQ ID NO: 5066794 - DNA, 25 bp, Homo sapien
tctaggggatttactcgcattggag

SEQ ID NO: 5066795 - DNA, 25 bp, Homo sapien
tttcaaggctacaactcaaggctcc

SEQ ID NO: 5066796 - DNA, 25 bp, Homo sapien
gggcccacccacatatggatcaagg

SEQ ID NO: 5066797 - DNA, 25 bp, Homo sapien
agacccagtcccagcatgtttcagg

SEQ ID NO: 5066798 - DNA, 25 bp, Homo sapien
tcaaatagttgtctctgggcccacc

SEQ ID NO: 5066799 - DNA, 25 bp, Homo sapien
ggggagggcagcacatgccgtcact

SEQ ID NO: 5066800 - DNA, 25 bp, Homo sapien
agggcagcacatgccgtcactggcc

SEQ ID NO: 5066801 - DNA, 25 bp, Homo sapien
gagggcagcacatgccgtcactggc

SEQ ID NO: 5066802 - DNA, 25 bp, Homo sapien
ggagggcagcacatgccgtcactgg

SEQ ID NO: 5066803 - DNA, 25 bp, Homo sapien
agcctccatagcaatgcacacgtac

SEQ ID NO: 5066804 - DNA, 25 bp, Homo sapien
aagcctccatagcaatgcacacgta

SEQ ID NO: 5066805 - DNA, 25 bp, Homo sapien
agaggttgatgctctggcagtggca

SEQ ID NO: 5066806 - DNA, 25 bp, Homo sapien
acgaagaggttgatgctctggcagt

SEQ ID NO: 5066807 - DNA, 25 bp, Homo sapien
gacaacttcatccttggggtaatca

SEQ ID NO: 5066808 - DNA, 25 bp, Homo sapien
tactgtacaggagtggtattagcta

SEQ ID NO: 5066809 - DNA, 25 bp, Homo sapien
tggattttgtgacaagtctctggac

SEQ ID NO: 5066810 - DNA, 25 bp, Homo sapien
gggtaatcaagcacaagctgtatga

SEQ ID NO: 5066811 - DNA, 25 bp, Homo sapien
cgtttaatgcatgccttgttctgtt

SEQ ID NO: 5066812 - DNA, 25 bp, Homo sapien
tatttgctttcgtttaatgcatgcc

SEQ ID NO: 5066813 - DNA, 25 bp, Homo sapien
ggaagccttcaaaatatccgaaaga

SEQ ID NO: 5066814 - DNA, 25 bp, Homo sapien
tatggttgtagtaaagcttatttgc

SEQ ID NO: 5066815 - DNA, 25 bp, Homo sapien
cacttaaaaaacagcacgccattct

SEQ ID NO: 5066816 - DNA, 25 bp, Homo sapien
tcttaacatgcctgggactccactc

SEQ ID NO: 5066817 - DNA, 25 bp, Homo sapien
aaacagcacgccattcttaacatgc

SEQ ID NO: 5066818 - DNA, 25 bp, Homo sapien
gcacgccattcttaacatgcctggg

SEQ ID NO: 5066819 - DNA, 25 bp, Homo sapien
tttgggtgcatcactgcccttagcc

SEQ ID NO: 5066820 - DNA, 25 bp, Homo sapien
gaagccacgtttggctgaagttaag

SEQ ID NO: 5066821 - DNA, 25 bp, Homo sapien
caaggctggaacagacttgaggtgc

SEQ ID NO: 5066822 - DNA, 25 bp, Homo sapien
ccagaaagaaggctgaagtcggcct

SEQ ID NO: 5066823 - DNA, 25 bp, Homo sapien
gctcgcctctcctgttgcacaataa

SEQ ID NO: 5066824 - DNA, 25 bp, Homo sapien
gagatgagttcccaatcccgctcgc

SEQ ID NO: 5066825 - DNA, 25 bp, Homo sapien
gaaacacacgagagaggtgacccac

SEQ ID NO: 5066826 - DNA, 25 bp, Homo sapien
ccaccatgcttctcactgctgggca

SEQ ID NO: 5066827 - DNA, 25 bp, Homo sapien
taggacggggtgtcctcctcgatgt

SEQ ID NO: 5066828 - DNA, 25 bp, Homo sapien
ggacacaaagaagtcatagctccgg

SEQ ID NO: 5066829 - DNA, 25 bp, Homo sapien
gaagtcatagctccggtgataggac

SEQ ID NO: 5066830 - DNA, 25 bp, Homo sapien
caaagaagtcatagctccggtgata

SEQ ID NO: 5066831 - DNA, 25 bp, Homo sapien
gatttctaagtcatcatggctcgag

SEQ ID NO: 5066832 - DNA, 25 bp, Homo sapien
aagtcatcatggctcgagtggcaca

SEQ ID NO: 5066833 - DNA, 25 bp, Homo sapien
tttctaagtcatcatggctcgagtg

SEQ ID NO: 5066834 - DNA, 25 bp, Homo sapien
tctaagtcatcatggctcgagtggc

SEQ ID NO: 5066835 - DNA, 25 bp, Homo sapien
tgtaagctgaaccaactacccttgc

SEQ ID NO: 5066836 - DNA, 25 bp, Homo sapien
agaaaccacatgtagggagctgggt

SEQ ID NO: 5066837 - DNA, 25 bp, Homo sapien
gcagacacgcaatggcaggttggaa

SEQ ID NO: 5066838 - DNA, 25 bp, Homo sapien
tggaagttatctacaggacccaccg

SEQ ID NO: 5066839 - DNA, 25 bp, Homo sapien
gctgcagagtccacacctggcttat

SEQ ID NO: 5066840 - DNA, 25 bp, Homo sapien
cagagtccacacctggcttatgaga

SEQ ID NO: 5066841 - DNA, 25 bp, Homo sapien
tgcagagtccacacctggcttatga

SEQ ID NO: 5066842 - DNA, 25 bp, Homo sapien
gcagagtccacacctggcttatgag

SEQ ID NO: 5066843 - DNA, 25 bp, Homo sapien
caggccttcctgtcatgggtgacca

SEQ ID NO: 5066844 - DNA, 25 bp, Homo sapien
ccttcctgtcatgggtgaccagcgc

SEQ ID NO: 5066845 - DNA, 25 bp, Homo sapien
ccacaggccttcctgtcatgggtga

SEQ ID NO: 5066846 - DNA, 25 bp, Homo sapien
ttcctgtcatgggtgaccagcgcca

SEQ ID NO: 5066847 - DNA, 25 bp, Homo sapien
ggaactgtggctggaggtggcagca

SEQ ID NO: 5066848 - DNA, 25 bp, Homo sapien
cgaggaactgtggctggaggtggca

SEQ ID NO: 5066849 - DNA, 25 bp, Homo sapien
aactgtggctggaggtggcagcagc

SEQ ID NO: 5066850 - DNA, 25 bp, Homo sapien
gaggaactgtggctggaggtggcag

SEQ ID NO: 5066851 - DNA, 25 bp, Homo sapien
ctacatgctgtagattgaaaagcag

SEQ ID NO: 5066852 - DNA, 25 bp, Homo sapien
agttcatcattcaccgtcttcctca

SEQ ID NO: 5066853 - DNA, 25 bp, Homo sapien
tgtgggtcccagatattggcctgca

SEQ ID NO: 5066854 - DNA, 25 bp, Homo sapien
tgatggaacgatcttatccatgtgc

SEQ ID NO: 5066855 - DNA, 25 bp, Homo sapien
agaacaggcttgatggcgtttttga

SEQ ID NO: 5066856 - DNA, 25 bp, Homo sapien
tgatgattttaaagcaacggatggc

SEQ ID NO: 5066857 - DNA, 25 bp, Homo sapien
caacggatggcaaacaccttgggtt

SEQ ID NO: 5066858 - DNA, 25 bp, Homo sapien
ccaaagagaatggttatccagatgg

SEQ ID NO: 5066859 - DNA, 25 bp, Homo sapien
ggttcccaaagagaatggttatcca

SEQ ID NO: 5066860 - DNA, 25 bp, Homo sapien
agcgctgcggctgttggcgtccagg

SEQ ID NO: 5066861 - DNA, 25 bp, Homo sapien
tggcagcgatgaccgcggcttccga

SEQ ID NO: 5066862 - DNA, 25 bp, Homo sapien
cggcttccgacaagacttccacgat

SEQ ID NO: 5066863 - DNA, 25 bp, Homo sapien
gatgcccgcgcgcaccgtcgcagcg

SEQ ID NO: 5066864 - DNA, 25 bp, Homo sapien
tcctggaacatgcgctcctcgtgct

SEQ ID NO: 5066865 - DNA, 25 bp, Homo sapien
gtcttgatgacggcctcctggaaca

SEQ ID NO: 5066866 - DNA, 25 bp, Homo sapien
tcgtagctcccggtcagcgcgtagt

SEQ ID NO: 5066867 - DNA, 25 bp, Homo sapien
gcgtagtcgatgctgagccgcagct

SEQ ID NO: 5066868 - DNA, 25 bp, Homo sapien
ggtgggcagcgtgctggcaaaggag

SEQ ID NO: 5066869 - DNA, 25 bp, Homo sapien
gtaggtgggcagcgtgctggcaaag

SEQ ID NO: 5066870 - DNA, 25 bp, Homo sapien
tggtaggtgggcagcgtgctggcaa

SEQ ID NO: 5066871 - DNA, 25 bp, Homo sapien
ctggtaggtgggcagcgtgctggca

SEQ ID NO: 5066872 - DNA, 25 bp, Homo sapien
ggccgcgggaccttgctcatgatga

SEQ ID NO: 5066873 - DNA, 25 bp, Homo sapien
ctcatgatgaagaggatcacctcgg

SEQ ID NO: 5066874 - DNA, 25 bp, Homo sapien
tgatgaagaggatcacctcggagcg

SEQ ID NO: 5066875 - DNA, 25 bp, Homo sapien
tgtgtccaccgcctggtgcagggat

SEQ ID NO: 5066876 - DNA, 25 bp, Homo sapien
ggagggattttagcagcataatctg

SEQ ID NO: 5066877 - DNA, 25 bp, Homo sapien
gcagcataatctgggtcagacggtt

SEQ ID NO: 5066878 - DNA, 25 bp, Homo sapien
ctgggtcagacggttcctattctcc

SEQ ID NO: 5066879 - DNA, 25 bp, Homo sapien
gattttagcagcataatctgggtca

SEQ ID NO: 5066880 - DNA, 25 bp, Homo sapien
gaaactgatgagaatctctagaaca

SEQ ID NO: 5066881 - DNA, 25 bp, Homo sapien
gccatgacgatcaatgaaactgatg

SEQ ID NO: 5066882 - DNA, 25 bp, Homo sapien
caaagagtcgaatttctgcatcctc

SEQ ID NO: 5066883 - DNA, 25 bp, Homo sapien
gaacttgtggcggttgccatgacga

SEQ ID NO: 5066884 - DNA, 25 bp, Homo sapien
ggtgatcaactcctggtgagtctca

SEQ ID NO: 5066885 - DNA, 25 bp, Homo sapien
ctgaattgtgggatactcagatccc

SEQ ID NO: 5066886 - DNA, 25 bp, Homo sapien
gaccccagggtcaacgttggtgatc

SEQ ID NO: 5066887 - DNA, 25 bp, Homo sapien
gagtctcactgagtatctgaattgt

SEQ ID NO: 5066888 - DNA, 25 bp, Homo sapien
ttcaggacagagatgtcactgaggg

SEQ ID NO: 5066889 - DNA, 25 bp, Homo sapien
tcaggacagagatgtcactgagggt

SEQ ID NO: 5066890 - DNA, 25 bp, Homo sapien
caggacagagatgtcactgagggta

SEQ ID NO: 5066891 - DNA, 25 bp, Homo sapien
cttcaggacagagatgtcactgagg

SEQ ID NO: 5066892 - DNA, 25 bp, Homo sapien
tgaagacggtgtcctgtcgagagca

SEQ ID NO: 5066893 - DNA, 25 bp, Homo sapien
cttcttcatgaagacggtgtcctgt

SEQ ID NO: 5066894 - DNA, 25 bp, Homo sapien
gtcgagagcacttgtccactttcag

SEQ ID NO: 5066895 - DNA, 25 bp, Homo sapien
tgtcctgtcgagagcacttgtccac

SEQ ID NO: 5066896 - DNA, 25 bp, Homo sapien
tgcacgtttgtttcctccttgcagc

SEQ ID NO: 5066897 - DNA, 25 bp, Homo sapien
tgagggccagcaagccatagagcgc

SEQ ID NO: 5066898 - DNA, 25 bp, Homo sapien
gccagcaccagacggatgaggtcca

SEQ ID NO: 5066899 - DNA, 25 bp, Homo sapien
gcctcgtagtgtttctgcacgtttg

SEQ ID NO: 5066900 - DNA, 25 bp, Homo sapien
gctgcgcccagagcatagagggcac

SEQ ID NO: 5066901 - DNA, 25 bp, Homo sapien
gcactgttgtgagctgactgatgag

SEQ ID NO: 5066902 - DNA, 25 bp, Homo sapien
tgtagacaggcaagttctcctcatt

SEQ ID NO: 5066903 - DNA, 25 bp, Homo sapien
gcacagcggttgtagacaggcaagt

SEQ ID NO: 5066904 - DNA, 25 bp, Homo sapien
ctctccacaaacacatcctcgggga

SEQ ID NO: 5066905 - DNA, 25 bp, Homo sapien
tctccacaaacacatcctcggggag

SEQ ID NO: 5066906 - DNA, 25 bp, Homo sapien
cctctccacaaacacatcctcgggg

SEQ ID NO: 5066907 - DNA, 25 bp, Homo sapien
caggcagagccggtccgagttgtag

SEQ ID NO: 5066908 - DNA, 25 bp, Homo sapien
cactgatcttgctctggcggaagag

SEQ ID NO: 5066909 - DNA, 25 bp, Homo sapien
ttcactgatcttgctctggcggaag

SEQ ID NO: 5066910 - DNA, 25 bp, Homo sapien
ggtccgagttgtagccactgcctcc

SEQ ID NO: 5066911 - DNA, 25 bp, Homo sapien
ctcctcttggataaacgatcctcat

SEQ ID NO: 5066912 - DNA, 25 bp, Homo sapien
tcctcctcttggataaacgatcctc

SEQ ID NO: 5066913 - DNA, 25 bp, Homo sapien
tccttctccggactgttcctcgatt

SEQ ID NO: 5066914 - DNA, 25 bp, Homo sapien
ggactgttcctcgattctacctcca

SEQ ID NO: 5066915 - DNA, 25 bp, Homo sapien
ttctggataagctttgagggccctg

SEQ ID NO: 5066916 - DNA, 25 bp, Homo sapien
cagaatgtacaacgctgagggcgaa

SEQ ID NO: 5066917 - DNA, 25 bp, Homo sapien
aaggaactgatactggtggcccagg

SEQ ID NO: 5066918 - DNA, 25 bp, Homo sapien
gagtccagcgtccaatctacaggag

SEQ ID NO: 5066919 - DNA, 25 bp, Homo sapien
gagcaacattggatattcacctgca

SEQ ID NO: 5066920 - DNA, 25 bp, Homo sapien
gggtgctagggaactgtgtggtggc

SEQ ID NO: 5066921 - DNA, 25 bp, Homo sapien
tgtgtggtggcaacagtcaaagaaa

SEQ ID NO: 5066922 - DNA, 25 bp, Homo sapien
actgtcagcaccgagcaacattgga

SEQ ID NO: 5066923 - DNA, 25 bp, Homo sapien
tacatgcaagagagagctatgctcg

SEQ ID NO: 5066924 - DNA, 25 bp, Homo sapien
cagaagtaacgcaactcaggctggg

SEQ ID NO: 5066925 - DNA, 25 bp, Homo sapien
tatgctcggctttaactcgctctga

SEQ ID NO: 5066926 - DNA, 25 bp, Homo sapien
ttaagtgagcaccaactacatgcag

SEQ ID NO: 5066927 - DNA, 25 bp, Homo sapien
tcataggtgatctcctcggcaggca

SEQ ID NO: 5066928 - DNA, 25 bp, Homo sapien
aggtgatctcctcggcaggcactcg

SEQ ID NO: 5066929 - DNA, 25 bp, Homo sapien
tctcataggtgatctcctcggcagg

SEQ ID NO: 5066930 - DNA, 25 bp, Homo sapien
ataggtgatctcctcggcaggcact

SEQ ID NO: 5066931 - DNA, 25 bp, Homo sapien
gcagcaatctcctcgaagggtgcct

SEQ ID NO: 5066932 - DNA, 25 bp, Homo sapien
tgctcctccactgctacgctgtcca

SEQ ID NO: 5066933 - DNA, 25 bp, Homo sapien
tgtgcagcaatctcctcgaagggtg

SEQ ID NO: 5066934 - DNA, 25 bp, Homo sapien
aatctcctcgaagggtgccttctgg

SEQ ID NO: 5066935 - DNA, 25 bp, Homo sapien
tcaaagatctgattgagtttgctct

SEQ ID NO: 5066936 - DNA, 25 bp, Homo sapien
cggatggtgatttcaaagatctgat

SEQ ID NO: 5066937 - DNA, 25 bp, Homo sapien
atctgattgagtttgctctggagca

SEQ ID NO: 5066938 - DNA, 25 bp, Homo sapien
tggtgatttcaaagatctgattgag

SEQ ID NO: 5066939 - DNA, 25 bp, Homo sapien
gctgaccgtaggctgcagtgatggt

SEQ ID NO: 5066940 - DNA, 25 bp, Homo sapien
agtgatggttcctgatgggcttggt

SEQ ID NO: 5066941 - DNA, 25 bp, Homo sapien
gttctgcggctgaccgtaggctgca

SEQ ID NO: 5066942 - DNA, 25 bp, Homo sapien
cttcatttcatagacggggatggag

SEQ ID NO: 5066943 - DNA, 25 bp, Homo sapien
acaccaagtaggagcttctcagccc

SEQ ID NO: 5066944 - DNA, 25 bp, Homo sapien
gaggacatgcccttcactcaaaaca

SEQ ID NO: 5066945 - DNA, 25 bp, Homo sapien
gagtctccaccttggcttagcctgg

SEQ ID NO: 5066946 - DNA, 25 bp, Homo sapien
gaggcgctgccatctaaggtgatgt

SEQ ID NO: 5066947 - DNA, 25 bp, Homo sapien
gaggagagagccatccccatctcag

SEQ ID NO: 5066948 - DNA, 25 bp, Homo sapien
gctggggaggagagagccatcccca

SEQ ID NO: 5066949 - DNA, 25 bp, Homo sapien
tggggaggagagagccatccccatc

SEQ ID NO: 5066950 - DNA, 25 bp, Homo sapien
atctcagcttccttccccaggggag

SEQ ID NO: 5066951 - DNA, 25 bp, Homo sapien
gctgggagccttttccataggaggt

SEQ ID NO: 5066952 - DNA, 25 bp, Homo sapien
cagctcctgttataagggctcagca

SEQ ID NO: 5066953 - DNA, 25 bp, Homo sapien
cccaggtgaggttctgtcagtggca

SEQ ID NO: 5066954 - DNA, 25 bp, Homo sapien
ggaacaccttgggaccctcagaaga

SEQ ID NO: 5066955 - DNA, 25 bp, Homo sapien
tgggaatgagggtcaaatagcccct

SEQ ID NO: 5066956 - DNA, 25 bp, Homo sapien
tattaatgggaaatgctcgtgttca

SEQ ID NO: 5066957 - DNA, 25 bp, Homo sapien
ggtgaccacaaggaagagcttcatt

SEQ ID NO: 5066958 - DNA, 25 bp, Homo sapien
gtgttcagtccctccccgattctgg

SEQ ID NO: 5066959 - DNA, 25 bp, Homo sapien
gggtctctcatccaagctgggtgca

SEQ ID NO: 5066960 - DNA, 25 bp, Homo sapien
tcactgatgctagaccaagggccag

SEQ ID NO: 5066961 - DNA, 25 bp, Homo sapien
tgtgatctagaacacccagggcaaa

SEQ ID NO: 5066962 - DNA, 25 bp, Homo sapien
taagccagaggccataaagcacagc

SEQ ID NO: 5066963 - DNA, 25 bp, Homo sapien
gatgggcccatcatgactatcctgc

SEQ ID NO: 5066964 - DNA, 25 bp, Homo sapien
cacattacgagatatgggctacagc

SEQ ID NO: 5066965 - DNA, 25 bp, Homo sapien
gctcactgggagatcgcgactaata

SEQ ID NO: 5066966 - DNA, 25 bp, Homo sapien
aaaatagactcacttctgcagggca

SEQ ID NO: 5066967 - DNA, 25 bp, Homo sapien
cgcccctggtgacgctgttcaaaaa

SEQ ID NO: 5066968 - DNA, 25 bp, Homo sapien
ggcggtttcatgacctccgagaaga

SEQ ID NO: 5066969 - DNA, 25 bp, Homo sapien
caaggacaagcgctacggcggtttc

SEQ ID NO: 5066970 - DNA, 25 bp, Homo sapien
cagtgaaggtgtaccctaacggcgc

SEQ ID NO: 5066971 - DNA, 25 bp, Homo sapien
caggcacttgctggattctccaaaa

SEQ ID NO: 5066972 - DNA, 25 bp, Homo sapien
tctccaaaagtatctgcagtggctg

SEQ ID NO: 5066973 - DNA, 25 bp, Homo sapien
cttctgcccacaggcacttgctgga

SEQ ID NO: 5066974 - DNA, 25 bp, Homo sapien
tgtcccctggtgtcttgacctcagc

SEQ ID NO: 5066975 - DNA, 25 bp, Homo sapien
aatccaaaatgattgtagggttggc

SEQ ID NO: 5066976 - DNA, 25 bp, Homo sapien
gaaatttggcagtgcgagggtagtg

SEQ ID NO: 5066977 - DNA, 25 bp, Homo sapien
gtgagctgatctccggcctcgaggt

SEQ ID NO: 5066978 - DNA, 25 bp, Homo sapien
cacctggttaagggaaatttggcag

SEQ ID NO: 5066979 - DNA, 25 bp, Homo sapien
gccatcttggccaggaatgtctcca

SEQ ID NO: 5066980 - DNA, 25 bp, Homo sapien
aactcagcctcccagagtgctggga

SEQ ID NO: 5066981 - DNA, 25 bp, Homo sapien
tttcgccatcttggccaggaatgtc

SEQ ID NO: 5066982 - DNA, 25 bp, Homo sapien
caactcagcctcccagagtgctggg

SEQ ID NO: 5066983 - DNA, 25 bp, Homo sapien
cacgcccgcagccaggtgcaggtgc

SEQ ID NO: 5066984 - DNA, 25 bp, Homo sapien
ggcacgcccgcagccaggtgcaggt

SEQ ID NO: 5066985 - DNA, 25 bp, Homo sapien
ctggcacgcccgcagccaggtgcag

SEQ ID NO: 5066986 - DNA, 25 bp, Homo sapien
cgcccgcagccaggtgcaggtgcat

SEQ ID NO: 5066987 - DNA, 25 bp, Homo sapien
aaccgaaggctggtgaagtagccca

SEQ ID NO: 5066988 - DNA, 25 bp, Homo sapien
cttgaggtcaaaccgaaggctggtg

SEQ ID NO: 5066989 - DNA, 25 bp, Homo sapien
cctctttgcccttgaggtcaaaccg

SEQ ID NO: 5066990 - DNA, 25 bp, Homo sapien
gctggtgaagtagcccagctgcagt

SEQ ID NO: 5066991 - DNA, 25 bp, Homo sapien
ccgctgagtcagaatggtggccgct

SEQ ID NO: 5066992 - DNA, 25 bp, Homo sapien
tatacccaggtgtaataagctcagg

SEQ ID NO: 5066993 - DNA, 25 bp, Homo sapien
cagcagggacgtcatctagcagagc

SEQ ID NO: 5066994 - DNA, 25 bp, Homo sapien
tacttggattgcagaggcgcaagcc

SEQ ID NO: 5066995 - DNA, 25 bp, Homo sapien
ttgccttgttttcccgggatgctga

SEQ ID NO: 5066996 - DNA, 25 bp, Homo sapien
cttgccttgttttcccgggatgctg

SEQ ID NO: 5066997 - DNA, 25 bp, Homo sapien
tagaaggcaccggattcggcctaat

SEQ ID NO: 5066998 - DNA, 25 bp, Homo sapien
ggcgaggccgctgcgtccctcggag

SEQ ID NO: 5066999 - DNA, 25 bp, Homo sapien
gctgcaggaggccatttctagaagg

SEQ ID NO: 5067000 - DNA, 25 bp, Homo sapien
ggctcgcgggcgattgccgcccgtg

SEQ ID NO: 5067001 - DNA, 25 bp, Homo sapien
tagcggtgaacacttcagagctggc

SEQ ID NO: 5067002 - DNA, 25 bp, Homo sapien
gaactcctgaccatctactgacaag

SEQ ID NO: 5067003 - DNA, 25 bp, Homo sapien
cctgttcaaatctgtgctgggttgg

SEQ ID NO: 5067004 - DNA, 25 bp, Homo sapien
tgacaagggaacacttctagcggtg

SEQ ID NO: 5067005 - DNA, 25 bp, Homo sapien
gggacaggtattgggtcaccttcca

SEQ ID NO: 5067006 - DNA, 25 bp, Homo sapien
gctttgggattgtgccaacttggcc

SEQ ID NO: 5067007 - DNA, 25 bp, Homo sapien
tatgcttaatccacctcaacgctgg

SEQ ID NO: 5067008 - DNA, 25 bp, Homo sapien
ccccttgcagggacgagagttaaca

SEQ ID NO: 5067009 - DNA, 25 bp, Homo sapien
gatcagaactaatccagagtgtggg

SEQ ID NO: 5067010 - DNA, 25 bp, Homo sapien
cagagggtacggagtcttcaggccc

SEQ ID NO: 5067011 - DNA, 25 bp, Homo sapien
aaaggagactccctcggcaagatgg

SEQ ID NO: 5067012 - DNA, 25 bp, Homo sapien
aaaacagaacccagttagcagcagg

SEQ ID NO: 5067013 - DNA, 25 bp, Homo sapien
gctcactgcttaggaccctccaaag

SEQ ID NO: 5067014 - DNA, 25 bp, Homo sapien
aagaggaagcccatccgggtgctgt

SEQ ID NO: 5067015 - DNA, 25 bp, Homo sapien
tctttgatggaatcgctacaggtga

SEQ ID NO: 5067016 - DNA, 25 bp, Homo sapien
ttgggacaccgctgggcctgcatct

SEQ ID NO: 5067017 - DNA, 25 bp, Homo sapien
gggctgcggtccatccgagtgtgga

SEQ ID NO: 5067018 - DNA, 25 bp, Homo sapien
gctgggaagatggcttcgcagcggg

SEQ ID NO: 5067019 - DNA, 25 bp, Homo sapien
aagatggcttcgcagcggggctctt

SEQ ID NO: 5067020 - DNA, 25 bp, Homo sapien
gccgggtgggagtcgggctgtctct

SEQ ID NO: 5067021 - DNA, 25 bp, Homo sapien
agatggcagagagggccgcttcctc

SEQ ID NO: 5067022 - DNA, 25 bp, Homo sapien
ctgtatggtggccttgtgacatgca

SEQ ID NO: 5067023 - DNA, 25 bp, Homo sapien
ggtggccttgtgacatgcagccaca

SEQ ID NO: 5067024 - DNA, 25 bp, Homo sapien
cctctgtgagggccgtacatgatgg

SEQ ID NO: 5067025 - DNA, 25 bp, Homo sapien
atcatcaccgtctgagaatctttgg

SEQ ID NO: 5067026 - DNA, 25 bp, Homo sapien
ctgcggcgagcatcatcaccgtctg

SEQ ID NO: 5067027 - DNA, 25 bp, Homo sapien
gatgtcaagctgtccagcctttccg

SEQ ID NO: 5067028 - DNA, 25 bp, Homo sapien
tccgtcactctccattcagaggcag

SEQ ID NO: 5067029 - DNA, 25 bp, Homo sapien
cccagcccaactggtggtggcctga

SEQ ID NO: 5067030 - DNA, 25 bp, Homo sapien
gcaacaatgtggtgcttgttgccat

SEQ ID NO: 5067031 - DNA, 25 bp, Homo sapien
caatgtggtgcttgttgccatccac

SEQ ID NO: 5067032 - DNA, 25 bp, Homo sapien
gctggtggttcccagcccaactggt

SEQ ID NO: 5067033 - DNA, 25 bp, Homo sapien
atctgcacagtgaaggacgaggcct

SEQ ID NO: 5067034 - DNA, 25 bp, Homo sapien
ggccggtgcagacgtgtccttgaaa

SEQ ID NO: 5067035 - DNA, 25 bp, Homo sapien
ggagacctcgagcttcggagccgca

SEQ ID NO: 5067036 - DNA, 25 bp, Homo sapien
gccaaactgcttttcgctttcctga

SEQ ID NO: 5067037 - DNA, 25 bp, Homo sapien
cccggagctcggctacgactcgagg

SEQ ID NO: 5067038 - DNA, 25 bp, Homo sapien
cgaggcccggagctcggctacgact

SEQ ID NO: 5067039 - DNA, 25 bp, Homo sapien
cggcgaggcccggagctcggctacg

SEQ ID NO: 5067040 - DNA, 25 bp, Homo sapien
aggcccggagctcggctacgactcg

SEQ ID NO: 5067041 - DNA, 25 bp, Homo sapien
gagcagagtggcctctactccgcgg

SEQ ID NO: 5067042 - DNA, 25 bp, Homo sapien
atgcggggacccagcgcagaagcag

SEQ ID NO: 5067043 - DNA, 25 bp, Homo sapien
tctggcggaggtcgggagaactgca

SEQ ID NO: 5067044 - DNA, 25 bp, Homo sapien
gttgggccagcgctgctgtccccag

SEQ ID NO: 5067045 - DNA, 25 bp, Homo sapien
gttacagatgaagaacctacggtga

SEQ ID NO: 5067046 - DNA, 25 bp, Homo sapien
aaggcgggtagaaggatccccatgt

SEQ ID NO: 5067047 - DNA, 25 bp, Homo sapien
tagaaggatccccatgtgttacaga

SEQ ID NO: 5067048 - DNA, 25 bp, Homo sapien
aagaacctacggtgatgaggtccag

SEQ ID NO: 5067049 - DNA, 25 bp, Homo sapien
ctgaggttgtaaggaagtgacattg

SEQ ID NO: 5067050 - DNA, 25 bp, Homo sapien
tgaggttgtaaggaagtgacattgc

SEQ ID NO: 5067051 - DNA, 25 bp, Homo sapien
gaggttgtaaggaagtgacattgca

SEQ ID NO: 5067052 - DNA, 25 bp, Homo sapien
gcattcccaggaagtgagctggctg

SEQ ID NO: 5067053 - DNA, 25 bp, Homo sapien
gaataaaatacggtgaacgggcaca

SEQ ID NO: 5067054 - DNA, 25 bp, Homo sapien
ggcgcatgcgcaatgatctactcag

SEQ ID NO: 5067055 - DNA, 25 bp, Homo sapien
atttgatgttcgcaatgtctacggg

SEQ ID NO: 5067056 - DNA, 25 bp, Homo sapien
tgtggctcacctgcgtgattcttgg

SEQ ID NO: 5067057 - DNA, 25 bp, Homo sapien
gattcttggccatgtctccagcagg

SEQ ID NO: 5067058 - DNA, 25 bp, Homo sapien
gggtcctggcctatagaggaatgaa

SEQ ID NO: 5067059 - DNA, 25 bp, Homo sapien
cttctttcagcatgggattgtttcc

SEQ ID NO: 5067060 - DNA, 25 bp, Homo sapien
ctttcattctgtgtgagatcaccat

SEQ ID NO: 5067061 - DNA, 25 bp, Homo sapien
caccattgcacccaggtctgtagac

SEQ ID NO: 5067062 - DNA, 25 bp, Homo sapien
acccaggtctgtagactgtgtggga

SEQ ID NO: 5067063 - DNA, 25 bp, Homo sapien
aggtctttctcaccattgcacccag

SEQ ID NO: 5067064 - DNA, 25 bp, Homo sapien
ctctccctttcgtaattcctttgct

SEQ ID NO: 5067065 - DNA, 25 bp, Homo sapien
acagtcatggaggtaaaggagtctc

SEQ ID NO: 5067066 - DNA, 25 bp, Homo sapien
ggagtctcatgttaatgccatctgc

SEQ ID NO: 5067067 - DNA, 25 bp, Homo sapien
gagaactgacggtgtgattccgaat

SEQ ID NO: 5067068 - DNA, 25 bp, Homo sapien
accaggagaactgacggtgtgattc

SEQ ID NO: 5067069 - DNA, 25 bp, Homo sapien
gacttgctcagcgtctcataactgg

SEQ ID NO: 5067070 - DNA, 25 bp, Homo sapien
gataggcttctcgtcttggataggc

SEQ ID NO: 5067071 - DNA, 25 bp, Homo sapien
ttgctgaaggtaagagcccgtggcc

SEQ ID NO: 5067072 - DNA, 25 bp, Homo sapien
aactggagcagaggatgtcggccct

SEQ ID NO: 5067073 - DNA, 25 bp, Homo sapien
aaaatgatacctatatacttgaaca

SEQ ID NO: 5067074 - DNA, 25 bp, Homo sapien
tggatgtaggaccaagcccattcac

SEQ ID NO: 5067075 - DNA, 25 bp, Homo sapien
taacctagtttgagtatatggaaat

SEQ ID NO: 5067076 - DNA, 25 bp, Homo sapien
ctgagtgtaggtcctctggagctcc

SEQ ID NO: 5067077 - DNA, 25 bp, Homo sapien
ctgagctccttgagaaatggcccca

SEQ ID NO: 5067078 - DNA, 25 bp, Homo sapien
taaggctactttaggacagcccatg

SEQ ID NO: 5067079 - DNA, 25 bp, Homo sapien
cactgccctaacacacgatactgag

SEQ ID NO: 5067080 - DNA, 25 bp, Homo sapien
taaagcaatccaagggcctagaagc

SEQ ID NO: 5067081 - DNA, 25 bp, Homo sapien
tcagacccagtggaggagcagctga

SEQ ID NO: 5067082 - DNA, 25 bp, Homo sapien
ctaccttcaaactcagacccagtgg

SEQ ID NO: 5067083 - DNA, 25 bp, Homo sapien
atactaccttcaaactcagacccag

SEQ ID NO: 5067084 - DNA, 25 bp, Homo sapien
caaactcagacccagtggaggagca

SEQ ID NO: 5067085 - DNA, 25 bp, Homo sapien
tgggcagaccgccagttttcagctg

SEQ ID NO: 5067086 - DNA, 25 bp, Homo sapien
tgcttctgggttgggattagattcc

SEQ ID NO: 5067087 - DNA, 25 bp, Homo sapien
cataatcttagagaactgcagggtc

SEQ ID NO: 5067088 - DNA, 25 bp, Homo sapien
tgttggcaggtgtccagagcctgtc

SEQ ID NO: 5067089 - DNA, 25 bp, Homo sapien
cttgtgtcctggattgcgttgctgt

SEQ ID NO: 5067090 - DNA, 25 bp, Homo sapien
tggattagaaaaacgcaaggaagga

SEQ ID NO: 5067091 - DNA, 25 bp, Homo sapien
tggattgcgttgctgtccatccttg

SEQ ID NO: 5067092 - DNA, 25 bp, Homo sapien
atgtgagggaccatgcccgttagac

SEQ ID NO: 5067093 - DNA, 25 bp, Homo sapien
cttgtagagaagacccttcgtcatg

SEQ ID NO: 5067094 - DNA, 25 bp, Homo sapien
gaagacccttcgtcatgtgattgtt

SEQ ID NO: 5067095 - DNA, 25 bp, Homo sapien
cccttcgtcatgtgattgttctgtt

SEQ ID NO: 5067096 - DNA, 25 bp, Homo sapien
gtagagaagacccttcgtcatgtga

SEQ ID NO: 5067097 - DNA, 25 bp, Homo sapien
atgagttgtcctcttgagcctcctc

SEQ ID NO: 5067098 - DNA, 25 bp, Homo sapien
aatgagttgtcctcttgagcctcct

SEQ ID NO: 5067099 - DNA, 25 bp, Homo sapien
gtttgccttctaatgagttgtcctc

SEQ ID NO: 5067100 - DNA, 25 bp, Homo sapien
gtgtttgccttctaatgagttgtcc

SEQ ID NO: 5067101 - DNA, 25 bp, Homo sapien
gtttgcattgagtcctgtatagggc

SEQ ID NO: 5067102 - DNA, 25 bp, Homo sapien
ttgcattgagtcctgtatagggcac

SEQ ID NO: 5067103 - DNA, 25 bp, Homo sapien
tgcattgagtcctgtatagggcaca

SEQ ID NO: 5067104 - DNA, 25 bp, Homo sapien
cattgagtcctgtatagggcacagt

SEQ ID NO: 5067105 - DNA, 25 bp, Homo sapien
attttgctgggatgaatttgaaaac

SEQ ID NO: 5067106 - DNA, 25 bp, Homo sapien
agaaccagggcaggcgagcattgct

SEQ ID NO: 5067107 - DNA, 25 bp, Homo sapien
tctgtgaaaagtagatgagatctgt

SEQ ID NO: 5067108 - DNA, 25 bp, Homo sapien
gggatagtgtcgtcagtgttcttgc

SEQ ID NO: 5067109 - DNA, 25 bp, Homo sapien
cattgctgctaatgatggggatagt

SEQ ID NO: 5067110 - DNA, 25 bp, Homo sapien
ctgtatatcctttaattagctcagg

SEQ ID NO: 5067111 - DNA, 25 bp, Homo sapien
ttttctgattctccgagtggtttga

SEQ ID NO: 5067112 - DNA, 25 bp, Homo sapien
tctccgagtggtttgatgtgtctct

SEQ ID NO: 5067113 - DNA, 25 bp, Homo sapien
agctcaggtatcactactttttctg

SEQ ID NO: 5067114 - DNA, 25 bp, Homo sapien
catgtccaggttacaatcacggaac

SEQ ID NO: 5067115 - DNA, 25 bp, Homo sapien
tgagaacagttacttgggagagacc

SEQ ID NO: 5067116 - DNA, 25 bp, Homo sapien
cacattaagaaagtggtgggactga

SEQ ID NO: 5067117 - DNA, 25 bp, Homo sapien
gggtgtgcttttggcttcgccccag

SEQ ID NO: 5067118 - DNA, 25 bp, Homo sapien
gctacatatgataatcggactggta

SEQ ID NO: 5067119 - DNA, 25 bp, Homo sapien
gaaatttgtggttggcagcatccac

SEQ ID NO: 5067120 - DNA, 25 bp, Homo sapien
aagttgaagtttgtttccgtgtgag

SEQ ID NO: 5067121 - DNA, 25 bp, Homo sapien
gagagatgctcttattacgtttagc

SEQ ID NO: 5067122 - DNA, 25 bp, Homo sapien
tggggagcccaccaggtgacagtca

SEQ ID NO: 5067123 - DNA, 25 bp, Homo sapien
cttgccacagaagccgtcattattc

SEQ ID NO: 5067124 - DNA, 25 bp, Homo sapien
catctgctcgaatgtgggacacagc

SEQ ID NO: 5067125 - DNA, 25 bp, Homo sapien
cgtcattattctgccgggccactgg

SEQ ID NO: 5067126 - DNA, 25 bp, Homo sapien
ctctcggtacccaagaattcccctg

SEQ ID NO: 5067127 - DNA, 25 bp, Homo sapien
cgtacccaacatcattgtagtacta

SEQ ID NO: 5067128 - DNA, 25 bp, Homo sapien
caacatcattgtagtactaaccttc

SEQ ID NO: 5067129 - DNA, 25 bp, Homo sapien
ggtacccaagaattcccctgcattg

SEQ ID NO: 5067130 - DNA, 25 bp, Homo sapien
ggtgatacactggcctgccaagatg

SEQ ID NO: 5067131 - DNA, 25 bp, Homo sapien
tgatacactggcctgccaagatgca

SEQ ID NO: 5067132 - DNA, 25 bp, Homo sapien
tctgtgtactcataaccttcatgtc

SEQ ID NO: 5067133 - DNA, 25 bp, Homo sapien
aatctgtgtactcataaccttcatg

SEQ ID NO: 5067134 - DNA, 25 bp, Homo sapien
cctctgctttgtccaaaatctgatt

SEQ ID NO: 5067135 - DNA, 25 bp, Homo sapien
catgtgtgccctgaaccccattact

SEQ ID NO: 5067136 - DNA, 25 bp, Homo sapien
cacatgtgtgccctgaaccccatta

SEQ ID NO: 5067137 - DNA, 25 bp, Homo sapien
tccaaaatctgattgccctgctgca

SEQ ID NO: 5067138 - DNA, 25 bp, Homo sapien
tagctgtaagtgctttgacctattt

SEQ ID NO: 5067139 - DNA, 25 bp, Homo sapien
gctgtaagtgctttgacctattttt

SEQ ID NO: 5067140 - DNA, 25 bp, Homo sapien
acttagctgtaagtgctttgaccta

SEQ ID NO: 5067141 - DNA, 25 bp, Homo sapien
gtcttaattctgtgactgcattgca

SEQ ID NO: 5067142 - DNA, 25 bp, Homo sapien
gaaagcagtgcattaaatgttacca

SEQ ID NO: 5067143 - DNA, 25 bp, Homo sapien
gaccaacttgagtcaatacttttat

SEQ ID NO: 5067144 - DNA, 25 bp, Homo sapien
taggattcaaattagcccaattaga

SEQ ID NO: 5067145 - DNA, 25 bp, Homo sapien
gcacctccatctgttaagtgaaatg

SEQ ID NO: 5067146 - DNA, 25 bp, Homo sapien
tatggtatgtttgatgtaggacctc

SEQ ID NO: 5067147 - DNA, 25 bp, Homo sapien
tacagagaagttggtgtcaacacca

SEQ ID NO: 5067148 - DNA, 25 bp, Homo sapien
gtaggacctcactgttaaggcacaa

SEQ ID NO: 5067149 - DNA, 25 bp, Homo sapien
tgtacagactggtttggtaaatgct

SEQ ID NO: 5067150 - DNA, 25 bp, Homo sapien
tccagcttcagccagaacgatatgt

SEQ ID NO: 5067151 - DNA, 25 bp, Homo sapien
tattcagtaccttgggcaatccagg

SEQ ID NO: 5067152 - DNA, 25 bp, Homo sapien
cttgacccaggctcttatagatagg

SEQ ID NO: 5067153 - DNA, 25 bp, Homo sapien
taaagagacctgttgctgcatagaa

SEQ ID NO: 5067154 - DNA, 25 bp, Homo sapien
tgagctcaaagcaggtcctagtaag

SEQ ID NO: 5067155 - DNA, 25 bp, Homo sapien
tagttgcagacaggagaaagcacct

SEQ ID NO: 5067156 - DNA, 25 bp, Homo sapien
cagctgatggcacagttgagctcaa

SEQ ID NO: 5067157 - DNA, 25 bp, Homo sapien
tccacaagggcccagtagttgcaga

SEQ ID NO: 5067158 - DNA, 25 bp, Homo sapien
cgaggcaggtatatcacaagaggtc

SEQ ID NO: 5067159 - DNA, 25 bp, Homo sapien
ccgaggcaggtatatcacaagaggt

SEQ ID NO: 5067160 - DNA, 25 bp, Homo sapien
tttaacatgcaagcaagtgactgct

SEQ ID NO: 5067161 - DNA, 25 bp, Homo sapien
ttatgaacaacaacttggaacactg

SEQ ID NO: 5067162 - DNA, 25 bp, Homo sapien
caacaacttggaacactgtatatat

SEQ ID NO: 5067163 - DNA, 25 bp, Homo sapien
ctgctgtacctatagtcatgtgatc

SEQ ID NO: 5067164 - DNA, 25 bp, Homo sapien
gaaaagtcgtataccaaagaatagc

SEQ ID NO: 5067165 - DNA, 25 bp, Homo sapien
tacagatatttttgggcagagaccc

SEQ ID NO: 5067166 - DNA, 25 bp, Homo sapien
tacatttgtaaggaacgcattagga

SEQ ID NO: 5067167 - DNA, 25 bp, Homo sapien
gacataagtaaaaccactggctgaa

SEQ ID NO: 5067168 - DNA, 25 bp, Homo sapien
gatcttagccaaaaggccaagaagc

SEQ ID NO: 5067169 - DNA, 25 bp, Homo sapien
cttagccaaaaggccaagaagcgag

SEQ ID NO: 5067170 - DNA, 25 bp, Homo sapien
ttaaattgataagaacagatactac

SEQ ID NO: 5067171 - DNA, 25 bp, Homo sapien
acttgatcttagccaaaaggccaag

SEQ ID NO: 5067172 - DNA, 25 bp, Homo sapien
ggccctctggcgtcgactgctgcta

SEQ ID NO: 5067173 - DNA, 25 bp, Homo sapien
ccctctggcgtcgactgctgctagg

SEQ ID NO: 5067174 - DNA, 25 bp, Homo sapien
gactctgcgttttctcccggtcgcg

SEQ ID NO: 5067175 - DNA, 25 bp, Homo sapien
acttctctccggtgacgactctgcg

SEQ ID NO: 5067176 - DNA, 25 bp, Homo sapien
cccttcgatagtaccactttgcaga

SEQ ID NO: 5067177 - DNA, 25 bp, Homo sapien
agacatagtcccttcgatagtacca

SEQ ID NO: 5067178 - DNA, 25 bp, Homo sapien
tgtgttcacagaattcagtgaagac

SEQ ID NO: 5067179 - DNA, 25 bp, Homo sapien
tcacagaattcagtgaagacatagt

SEQ ID NO: 5067180 - DNA, 25 bp, Homo sapien
ttagctaagatacatgtgaatactg

SEQ ID NO: 5067181 - DNA, 25 bp, Homo sapien
tgtttccaattactgaagtccacac

SEQ ID NO: 5067182 - DNA, 25 bp, Homo sapien
ttcctctgagacaactgaatgttaa

SEQ ID NO: 5067183 - DNA, 25 bp, Homo sapien
tacttctggtcaatctgcatcctct

SEQ ID NO: 5067184 - DNA, 25 bp, Homo sapien
ctttcttcatcttccgtgctaagag

SEQ ID NO: 5067185 - DNA, 25 bp, Homo sapien
tcatcttccgtgctaagagatgtaa

SEQ ID NO: 5067186 - DNA, 25 bp, Homo sapien
tcttcatcttccgtgctaagagatg

SEQ ID NO: 5067187 - DNA, 25 bp, Homo sapien
caacaatgtacagctttcttcatct

SEQ ID NO: 5067188 - DNA, 25 bp, Homo sapien
aaacgtttttcactcatttgccata

SEQ ID NO: 5067189 - DNA, 25 bp, Homo sapien
aagaaatccaatactgtattaaacg

SEQ ID NO: 5067190 - DNA, 25 bp, Homo sapien
aaatctggtctaaatgtacagactc

SEQ ID NO: 5067191 - DNA, 25 bp, Homo sapien
ttgccatactgacagtgcagataca

SEQ ID NO: 5067192 - DNA, 25 bp, Homo sapien
aaatccccactgtcatgaacataaa

SEQ ID NO: 5067193 - DNA, 25 bp, Homo sapien
aaaatccccactgtcatgaacataa

SEQ ID NO: 5067194 - DNA, 25 bp, Homo sapien
aaaaatccccactgtcatgaacata

SEQ ID NO: 5067195 - DNA, 25 bp, Homo sapien
gaggacccctttgaccagaatgact

SEQ ID NO: 5067196 - DNA, 25 bp, Homo sapien
tgaaggtcaaccagatcggctcggt

SEQ ID NO: 5067197 - DNA, 25 bp, Homo sapien
tatgcaaactggctcactctaacgg

SEQ ID NO: 5067198 - DNA, 25 bp, Homo sapien
cccttggagcgtctggcgaaataca

SEQ ID NO: 5067199 - DNA, 25 bp, Homo sapien
aatatacccggtttgtgatggagag

SEQ ID NO: 5067200 - DNA, 25 bp, Homo sapien
tttaggcagagaccaagggaaatat

SEQ ID NO: 5067201 - DNA, 25 bp, Homo sapien
tggagtaaaggaaggcaccaaacta

SEQ ID NO: 5067202 - DNA, 25 bp, Homo sapien
cgcttagggtaggatcaatttgcaa

SEQ ID NO: 5067203 - DNA, 25 bp, Homo sapien
ttaaggtcacctgccactaaaagtc

SEQ ID NO: 5067204 - DNA, 25 bp, Homo sapien
taagtaaaagattaccctgtgccca

SEQ ID NO: 5067205 - DNA, 25 bp, Homo sapien
taacctggtacagtgtgacccctga

SEQ ID NO: 5067206 - DNA, 25 bp, Homo sapien
ccttagttgctgtagtttgcgaaac

SEQ ID NO: 5067207 - DNA, 25 bp, Homo sapien
cattggatgcagataggagaaggct

SEQ ID NO: 5067208 - DNA, 25 bp, Homo sapien
gagaaggcttgtgcgtgcatccagc

SEQ ID NO: 5067209 - DNA, 25 bp, Homo sapien
ttacccgttacagcggacgtgcctg

SEQ ID NO: 5067210 - DNA, 25 bp, Homo sapien
cgctggagctggatagaatttaccc

SEQ ID NO: 5067211 - DNA, 25 bp, Homo sapien
agcggcggtagcagtggcaacggca

SEQ ID NO: 5067212 - DNA, 25 bp, Homo sapien
acagtaagaacccaatatggcagcg

SEQ ID NO: 5067213 - DNA, 25 bp, Homo sapien
ctgtacagtaagaacccaatatggc

SEQ ID NO: 5067214 - DNA, 25 bp, Homo sapien
aacggcagcaagaggaccggccgcc

SEQ ID NO: 5067215 - DNA, 25 bp, Homo sapien
tccttggcgcgcatgctcctgcgga

SEQ ID NO: 5067216 - DNA, 25 bp, Homo sapien
gagcggtcacatgaccgtagcggca

SEQ ID NO: 5067217 - DNA, 25 bp, Homo sapien
ctcgatagctcagcggccgggcttg

SEQ ID NO: 5067218 - DNA, 25 bp, Homo sapien
ctgcgtacagtagtgacggccgcgc

SEQ ID NO: 5067219 - DNA, 25 bp, Homo sapien
gtgcccggccaactacacactttta

SEQ ID NO: 5067220 - DNA, 25 bp, Homo sapien
tgtgcccggccaactacacactttt

SEQ ID NO: 5067221 - DNA, 25 bp, Homo sapien
gctggtcccagatcactcctgacct

SEQ ID NO: 5067222 - DNA, 25 bp, Homo sapien
gccaggctggtcccagatcactcct

SEQ ID NO: 5067223 - DNA, 25 bp, Homo sapien
ttaatttgtccataacatccagaag

SEQ ID NO: 5067224 - DNA, 25 bp, Homo sapien
tccagaagtttgtggaccactgtgc

SEQ ID NO: 5067225 - DNA, 25 bp, Homo sapien
actgtgccaggtattcttcactgac

SEQ ID NO: 5067226 - DNA, 25 bp, Homo sapien
tgtccataacatccagaagtttgtg

SEQ ID NO: 5067227 - DNA, 25 bp, Homo sapien
tcactagttacgcaaattggttcct

SEQ ID NO: 5067228 - DNA, 25 bp, Homo sapien
ggatactccttaccttcctttgtga

SEQ ID NO: 5067229 - DNA, 25 bp, Homo sapien
tgcctgttacccctgtttctgaatt

SEQ ID NO: 5067230 - DNA, 25 bp, Homo sapien
cattgactggctttttaagtgtata

SEQ ID NO: 5067231 - DNA, 25 bp, Homo sapien
tttattaaaggattctaatgctctc

SEQ ID NO: 5067232 - DNA, 25 bp, Homo sapien
attaaaggattctaatgctctctgc

SEQ ID NO: 5067233 - DNA, 25 bp, Homo sapien
aaaggattctaatgctctctgctct

SEQ ID NO: 5067234 - DNA, 25 bp, Homo sapien
ctctttattaaaggattctaatgct

SEQ ID NO: 5067235 - DNA, 25 bp, Homo sapien
ctgaacttacgggcttaagcgatcc

SEQ ID NO: 5067236 - DNA, 25 bp, Homo sapien
gccctgaacttacgggcttaagcga

SEQ ID NO: 5067237 - DNA, 25 bp, Homo sapien
atagctgggattacagcttgagcca

SEQ ID NO: 5067238 - DNA, 25 bp, Homo sapien
tcctacctcagcctcctgaatagct

SEQ ID NO: 5067239 - DNA, 25 bp, Homo sapien
tattgtttttaattatccaggtgtg

SEQ ID NO: 5067240 - DNA, 25 bp, Homo sapien
attcgggaggctaaggcaggaggat

SEQ ID NO: 5067241 - DNA, 25 bp, Homo sapien
agcttgagctcaggagtttgaggct

SEQ ID NO: 5067242 - DNA, 25 bp, Homo sapien
gtggcatgcaactgtagtcccagct

SEQ ID NO: 5067243 - DNA, 25 bp, Homo sapien
gactcggtcagcatctttcgctcgt

SEQ ID NO: 5067244 - DNA, 25 bp, Homo sapien
tgcggcacctaatccacttcaggat

SEQ ID NO: 5067245 - DNA, 25 bp, Homo sapien
cctgatgtagaaacactaattcccc

SEQ ID NO: 5067246 - DNA, 25 bp, Homo sapien
tcctccttaggatctccagactcgg

SEQ ID NO: 5067247 - DNA, 25 bp, Homo sapien
gcagcgaagaaggacccctaagtcg

SEQ ID NO: 5067248 - DNA, 25 bp, Homo sapien
tgcctgagacgcacgcaagggcgta

SEQ ID NO: 5067249 - DNA, 25 bp, Homo sapien
ccgaagtggcgagtggaatgctcct

SEQ ID NO: 5067250 - DNA, 25 bp, Homo sapien
taagtcgacgagctcagttacatag

SEQ ID NO: 5067251 - DNA, 25 bp, Homo sapien
gagtcggtcgggacaaaatggcctc

SEQ ID NO: 5067252 - DNA, 25 bp, Homo sapien
ccgggacgctcccacgggcgagcaa

SEQ ID NO: 5067253 - DNA, 25 bp, Homo sapien
ctcagggcttctcggccgggacgct

SEQ ID NO: 5067254 - DNA, 25 bp, Homo sapien
gctcccacgggcgagcaagcctgct

SEQ ID NO: 5067255 - DNA, 25 bp, Homo sapien
gacagtggcggcgtccagtgcctcc

SEQ ID NO: 5067256 - DNA, 25 bp, Homo sapien
agggatcggtccctctcactacggc

SEQ ID NO: 5067257 - DNA, 25 bp, Homo sapien
tcactcgggcgttctcaggccggag

SEQ ID NO: 5067258 - DNA, 25 bp, Homo sapien
gcgggcgacctacgaacagctttga

SEQ ID NO: 5067259 - DNA, 25 bp, Homo sapien
ctccggaatccccgatcaggagcag

SEQ ID NO: 5067260 - DNA, 25 bp, Homo sapien
gcttgaaaagcaggtcgtacgtctt

SEQ ID NO: 5067261 - DNA, 25 bp, Homo sapien
gcatcatccgaaaaacgaaaaagga

SEQ ID NO: 5067262 - DNA, 25 bp, Homo sapien
aaataaaggtagtattgaaggcatc

SEQ ID NO: 5067263 - DNA, 25 bp, Homo sapien
aataaacggtatgcagctaccgaga

SEQ ID NO: 5067264 - DNA, 25 bp, Homo sapien
gtacaccgtcctcccacaggtctta

SEQ ID NO: 5067265 - DNA, 25 bp, Homo sapien
ggtatgcagctaccgagaccgtaca

SEQ ID NO: 5067266 - DNA, 25 bp, Homo sapien
aagatgtctggagtaaaataaacgg

SEQ ID NO: 5067267 - DNA, 25 bp, Homo sapien
gatggaaatcatgggaagaccccgc

SEQ ID NO: 5067268 - DNA, 25 bp, Homo sapien
tgggagactcgaaagcaaaagaccg

SEQ ID NO: 5067269 - DNA, 25 bp, Homo sapien
tattgcggagcggatgggtttcaca

SEQ ID NO: 5067270 - DNA, 25 bp, Homo sapien
gaagagcctccgattgtttgacaca

SEQ ID NO: 5067271 - DNA, 25 bp, Homo sapien
acccacaagttagagaacaagctct

SEQ ID NO: 5067272 - DNA, 25 bp, Homo sapien
gagaacaagctctaagtttcatgaa

SEQ ID NO: 5067273 - DNA, 25 bp, Homo sapien
gttagagaacaagctctaagtttca

SEQ ID NO: 5067274 - DNA, 25 bp, Homo sapien
cacaagttagagaacaagctctaag

SEQ ID NO: 5067275 - DNA, 25 bp, Homo sapien
tagccagctacagctaaaagtggag

SEQ ID NO: 5067276 - DNA, 25 bp, Homo sapien
agcaaacagtgctagggaagtgcta

SEQ ID NO: 5067277 - DNA, 25 bp, Homo sapien
tatctcaccggaatgctcctcaagg

SEQ ID NO: 5067278 - DNA, 25 bp, Homo sapien
taagcctactcaaactcctcacgat

SEQ ID NO: 5067279 - DNA, 25 bp, Homo sapien
tattcctattagtccttcagacttc

SEQ ID NO: 5067280 - DNA, 25 bp, Homo sapien
ctgactctattcctattagtccttc

SEQ ID NO: 5067281 - DNA, 25 bp, Homo sapien
tatcctacccctctgactctattcc

SEQ ID NO: 5067282 - DNA, 25 bp, Homo sapien
agaaaggccctatcctacccctctg

SEQ ID NO: 5067283 - DNA, 25 bp, Homo sapien
ttcctactccacactgttcctaagg

SEQ ID NO: 5067284 - DNA, 25 bp, Homo sapien
ggggcatgcaccctttacaaaaaga

SEQ ID NO: 5067285 - DNA, 25 bp, Homo sapien
acagctagtaacctgtggaaacaag

SEQ ID NO: 5067286 - DNA, 25 bp, Homo sapien
agcagacttgatccaaaatcatcac

SEQ ID NO: 5067287 - DNA, 25 bp, Homo sapien
tccaacccagcagacttgatccaaa

SEQ ID NO: 5067288 - DNA, 25 bp, Homo sapien
gtaacctgtggaaacaagattccaa

SEQ ID NO: 5067289 - DNA, 25 bp, Homo sapien
cacggtgtgcaggatgttcaatcca

SEQ ID NO: 5067290 - DNA, 25 bp, Homo sapien
actgtgctcctacaaagtgcctggt

SEQ ID NO: 5067291 - DNA, 25 bp, Homo sapien
caaatacttgggtaccacggtgtgc

SEQ ID NO: 5067292 - DNA, 25 bp, Homo sapien
ttagtggagcaccaacaaatacttg

SEQ ID NO: 5067293 - DNA, 25 bp, Homo sapien
cctgtgcacagagctaatacatgta

SEQ ID NO: 5067294 - DNA, 25 bp, Homo sapien
tgtgttcaagctgtactcagaatca

SEQ ID NO: 5067295 - DNA, 25 bp, Homo sapien
catttttacctgaaagtatgaaaat

SEQ ID NO: 5067296 - DNA, 25 bp, Homo sapien
cactattcaacatcttatatgtgaa

SEQ ID NO: 5067297 - DNA, 25 bp, Homo sapien
caacttatattctggtgcccttgga

SEQ ID NO: 5067298 - DNA, 25 bp, Homo sapien
taagaaacttaaatgactgcacctg

SEQ ID NO: 5067299 - DNA, 25 bp, Homo sapien
taaatgcaggtacccttccaggtgt

SEQ ID NO: 5067300 - DNA, 25 bp, Homo sapien
gatcctgattgtaccacctgtctgc

SEQ ID NO: 5067301 - DNA, 25 bp, Homo sapien
tatacctctcttagggacaagagcc

SEQ ID NO: 5067302 - DNA, 25 bp, Homo sapien
gatttcttacatggagccgagagac

SEQ ID NO: 5067303 - DNA, 25 bp, Homo sapien
taataagtaacgcattcctgagctc

SEQ ID NO: 5067304 - DNA, 25 bp, Homo sapien
tagcacatccagtatagaagcagcc

SEQ ID NO: 5067305 - DNA, 25 bp, Homo sapien
tagtatatatgctaccgagacaagc

SEQ ID NO: 5067306 - DNA, 25 bp, Homo sapien
aatttcccaaaactgctaccattgg

SEQ ID NO: 5067307 - DNA, 25 bp, Homo sapien
gtttctgggtcgtatgtgaaacaca

SEQ ID NO: 5067308 - DNA, 25 bp, Homo sapien
caatcacttatgcttgcaacccaaa

SEQ ID NO: 5067309 - DNA, 25 bp, Homo sapien
tatgatgtactttttgggtctccag

SEQ ID NO: 5067310 - DNA, 25 bp, Homo sapien
gtctcaaacaactcacccacctagg

SEQ ID NO: 5067311 - DNA, 25 bp, Homo sapien
atccaattagaaaattggcaaccac

SEQ ID NO: 5067312 - DNA, 25 bp, Homo sapien
caattagaaaattggcaaccacatg

SEQ ID NO: 5067313 - DNA, 25 bp, Homo sapien
agtctcaaacaactcacccacctag

SEQ ID NO: 5067314 - DNA, 25 bp, Homo sapien
tgaatgtgcagtctgaaatcaacaa

SEQ ID NO: 5067315 - DNA, 25 bp, Homo sapien
caatcatttgaggaaggcttccaaa

SEQ ID NO: 5067316 - DNA, 25 bp, Homo sapien
cattcttaattatgaatgtgcagtc

SEQ ID NO: 5067317 - DNA, 25 bp, Homo sapien
aaatcaacaatcatttgaggaaggc

SEQ ID NO: 5067318 - DNA, 25 bp, Homo sapien
caaatgtagcaaaatgctgacaact

SEQ ID NO: 5067319 - DNA, 25 bp, Homo sapien
gattcatcgtaatgagtgttctaac

SEQ ID NO: 5067320 - DNA, 25 bp, Homo sapien
gtgaatctggaagatctaaggggat

SEQ ID NO: 5067321 - DNA, 25 bp, Homo sapien
tctaaggggattcatcgtaatgagt

SEQ ID NO: 5067322 - DNA, 25 bp, Homo sapien
ggaggtacatcaacaataactatgt

SEQ ID NO: 5067323 - DNA, 25 bp, Homo sapien
tctggaggtacatcaacaataacta

SEQ ID NO: 5067324 - DNA, 25 bp, Homo sapien
tggaggtacatcaacaataactatg

SEQ ID NO: 5067325 - DNA, 25 bp, Homo sapien
ctggaggtacatcaacaataactat

SEQ ID NO: 5067326 - DNA, 25 bp, Homo sapien
ctagcctagacaacatagagagatc

SEQ ID NO: 5067327 - DNA, 25 bp, Homo sapien
gcctagacaacatagagagatctca

SEQ ID NO: 5067328 - DNA, 25 bp, Homo sapien
ctagacaacatagagagatctcatc

SEQ ID NO: 5067329 - DNA, 25 bp, Homo sapien
gactagcctagacaacatagagaga

SEQ ID NO: 5067330 - DNA, 25 bp, Homo sapien
tagagctaatgctgccactcacgac

SEQ ID NO: 5067331 - DNA, 25 bp, Homo sapien
acacagtttttagggccaggctcag

SEQ ID NO: 5067332 - DNA, 25 bp, Homo sapien
taggcgcaactgtgcacaatgcaac

SEQ ID NO: 5067333 - DNA, 25 bp, Homo sapien
tgtcacagggtggaatatcatgcct

SEQ ID NO: 5067334 - DNA, 25 bp, Homo sapien
ggacagttaagttgtctccacctct

SEQ ID NO: 5067335 - DNA, 25 bp, Homo sapien
tagtgctgttataacatgggtatgc

SEQ ID NO: 5067336 - DNA, 25 bp, Homo sapien
tatgcaaagatctcaaaaccttgct

SEQ ID NO: 5067337 - DNA, 25 bp, Homo sapien
cagctcctgataaccaccgatggac

SEQ ID NO: 5067338 - DNA, 25 bp, Homo sapien
gaagtggcaattctttagaaggtta

SEQ ID NO: 5067339 - DNA, 25 bp, Homo sapien
cacctggccaagataacttagattc

SEQ ID NO: 5067340 - DNA, 25 bp, Homo sapien
tagattcttgaggttgctcaacaaa

SEQ ID NO: 5067341 - DNA, 25 bp, Homo sapien
caaactaaccctagaagtggcaatt

SEQ ID NO: 5067342 - DNA, 25 bp, Homo sapien
caatgtaacgactggatctgttcta

SEQ ID NO: 5067343 - DNA, 25 bp, Homo sapien
gacatcttaccagaaccaccacttg

SEQ ID NO: 5067344 - DNA, 25 bp, Homo sapien
gaagggtatatgttcaattgcacaa

SEQ ID NO: 5067345 - DNA, 25 bp, Homo sapien
tattaagactcatcgaaaaatgtca

SEQ ID NO: 5067346 - DNA, 25 bp, Homo sapien
catatctgcctgtagcaagttctca

SEQ ID NO: 5067347 - DNA, 25 bp, Homo sapien
agcatatctgcctgtagcaagttct

SEQ ID NO: 5067348 - DNA, 25 bp, Homo sapien
atttccttttgagctctcaagcata

SEQ ID NO: 5067349 - DNA, 25 bp, Homo sapien
tccttttgagctctcaagcatatct

SEQ ID NO: 5067350 - DNA, 25 bp, Homo sapien
aacaaatactgtcacttcattcatt

SEQ ID NO: 5067351 - DNA, 25 bp, Homo sapien
caacaaatactgtcacttcattcat

SEQ ID NO: 5067352 - DNA, 25 bp, Homo sapien
acaaatactgtcacttcattcattc

SEQ ID NO: 5067353 - DNA, 25 bp, Homo sapien
tatcccaaacaccatgactctcagg

SEQ ID NO: 5067354 - DNA, 25 bp, Homo sapien
ggcctgggtacataaacagccctca

SEQ ID NO: 5067355 - DNA, 25 bp, Homo sapien
tgagatcatgtgtaggaagcctagg

SEQ ID NO: 5067356 - DNA, 25 bp, Homo sapien
ttcagaaaaacatggtctctggctc

SEQ ID NO: 5067357 - DNA, 25 bp, Homo sapien
tgaattccacagtaccagctaatgg

SEQ ID NO: 5067358 - DNA, 25 bp, Homo sapien
ggtgagtgccacaacatccaactaa

SEQ ID NO: 5067359 - DNA, 25 bp, Homo sapien
cagactttaagcagggtagcaattc

SEQ ID NO: 5067360 - DNA, 25 bp, Homo sapien
tcctaagatgtatatccagaggtgg

SEQ ID NO: 5067361 - DNA, 25 bp, Homo sapien
cccaagtacgtcaatcagaaacagg

SEQ ID NO: 5067362 - DNA, 25 bp, Homo sapien
taaactacaaacctaattcgccaga

SEQ ID NO: 5067363 - DNA, 25 bp, Homo sapien
cattggtgcaattaactaaactaca

SEQ ID NO: 5067364 - DNA, 25 bp, Homo sapien
tactccattgtcttgcggcttacat

SEQ ID NO: 5067365 - DNA, 25 bp, Homo sapien
cttaaggtaagggaacaggccatgt

SEQ ID NO: 5067366 - DNA, 25 bp, Homo sapien
gagctatcttatatgaggtggtcaa

SEQ ID NO: 5067367 - DNA, 25 bp, Homo sapien
gacgcactgagagatatttgagcaa

SEQ ID NO: 5067368 - DNA, 25 bp, Homo sapien
acggtatagctctctttatttgggc

SEQ ID NO: 5067369 - DNA, 25 bp, Homo sapien
ggatataacgactgaaactgaaggg

SEQ ID NO: 5067370 - DNA, 25 bp, Homo sapien
tcctctgggacatactgctgcaatc

SEQ ID NO: 5067371 - DNA, 25 bp, Homo sapien
ccaatggcaaggctgagggatgaat

SEQ ID NO: 5067372 - DNA, 25 bp, Homo sapien
tgaaggtaactcgatgaaaagggat

SEQ ID NO: 5067373 - DNA, 25 bp, Homo sapien
tggaagaagttccttgatactgaaa

SEQ ID NO: 5067374 - DNA, 25 bp, Homo sapien
caagtagccagaataccaggcgcgc

SEQ ID NO: 5067375 - DNA, 25 bp, Homo sapien
gatttctgaaatgggttgagatgga

SEQ ID NO: 5067376 - DNA, 25 bp, Homo sapien
tcactttaatatgccctttgatgca

SEQ ID NO: 5067377 - DNA, 25 bp, Homo sapien
gcaacgagagcgaaaattcgtcata

SEQ ID NO: 5067378 - DNA, 25 bp, Homo sapien
taaggtccgtccgtattatgcagca

SEQ ID NO: 5067379 - DNA, 25 bp, Homo sapien
taaagttgcaggattaacagatggc

SEQ ID NO: 5067380 - DNA, 25 bp, Homo sapien
taatagtaacaccaacaacagcagc

SEQ ID NO: 5067381 - DNA, 25 bp, Homo sapien
tctaggcaaatgtaacaacgaactg

SEQ ID NO: 5067382 - DNA, 25 bp, Homo sapien
aagagacagtgccttgaaatctagg

SEQ ID NO: 5067383 - DNA, 25 bp, Homo sapien
tagagagcaaccagttcagaacaga

SEQ ID NO: 5067384 - DNA, 25 bp, Homo sapien
caggtgcatacagggcaagaatttg

SEQ ID NO: 5067385 - DNA, 25 bp, Homo sapien
cagtgcccagagcggctgggactat

SEQ ID NO: 5067386 - DNA, 25 bp, Homo sapien
tttgcccaagcttgaatgcggtggc

SEQ ID NO: 5067387 - DNA, 25 bp, Homo sapien
tgcagtgcccagagcggctgggact

SEQ ID NO: 5067388 - DNA, 25 bp, Homo sapien
tgcccagagcggctgggactatagg

SEQ ID NO: 5067389 - DNA, 25 bp, Homo sapien
gtcttcagtctacatgacatccctg

SEQ ID NO: 5067390 - DNA, 25 bp, Homo sapien
gcctcttagtatcaaagtcttcagt

SEQ ID NO: 5067391 - DNA, 25 bp, Homo sapien
tattgagattacagccagggtaagt

SEQ ID NO: 5067392 - DNA, 25 bp, Homo sapien
gcatatgctacttcgtaaatcctct

SEQ ID NO: 5067393 - DNA, 25 bp, Homo sapien
gtaactgtggctttacatttggcta

SEQ ID NO: 5067394 - DNA, 25 bp, Homo sapien
aactgtaactgtggctttacatttg

SEQ ID NO: 5067395 - DNA, 25 bp, Homo sapien
ggtaaactgtaactgtggctttaca

SEQ ID NO: 5067396 - DNA, 25 bp, Homo sapien
aactgtggctttacatttggctata

SEQ ID NO: 5067397 - DNA, 25 bp, Homo sapien
catatctgtagcttgatcttctttc

SEQ ID NO: 5067398 - DNA, 25 bp, Homo sapien
caactgttttgatcttgaagtctat

SEQ ID NO: 5067399 - DNA, 25 bp, Homo sapien
tctgtagcttgatcttctttccttg

SEQ ID NO: 5067400 - DNA, 25 bp, Homo sapien
ccttgtaattcaactgttttgatct

SEQ ID NO: 5067401 - DNA, 25 bp, Homo sapien
ggatttgacctgctggactggatta

SEQ ID NO: 5067402 - DNA, 25 bp, Homo sapien
ttgcttattggatttgacctgctgg

SEQ ID NO: 5067403 - DNA, 25 bp, Homo sapien
tggattagacttgggcatatgtgtg

SEQ ID NO: 5067404 - DNA, 25 bp, Homo sapien
actggattagacttgggcatatgtg

SEQ ID NO: 5067405 - DNA, 25 bp, Homo sapien
aaagagacctatgctggccagtgga

SEQ ID NO: 5067406 - DNA, 25 bp, Homo sapien
ggtgggttacctgatcaaagacatg

SEQ ID NO: 5067407 - DNA, 25 bp, Homo sapien
caaagacatgacgagttcctggagg

SEQ ID NO: 5067408 - DNA, 25 bp, Homo sapien
gattatgcccatgcaaaaagagacc

SEQ ID NO: 5067409 - DNA, 25 bp, Homo sapien
tagctggacgtggtgacaggcacct

SEQ ID NO: 5067410 - DNA, 25 bp, Homo sapien
aggagaatggcatgaactcaggagg

SEQ ID NO: 5067411 - DNA, 25 bp, Homo sapien
tcccagctgctcaggaggctgaggc

SEQ ID NO: 5067412 - DNA, 25 bp, Homo sapien
gaggcagagcttgcagtgagccgag

SEQ ID NO: 5067413 - DNA, 25 bp, Homo sapien
cctggatgccaaacccaatagctat

SEQ ID NO: 5067414 - DNA, 25 bp, Homo sapien
ttgtgcacacatcatagagcgtact

SEQ ID NO: 5067415 - DNA, 25 bp, Homo sapien
tatcatccacctattaatgacaggg

SEQ ID NO: 5067416 - DNA, 25 bp, Homo sapien
gattagagcctacaacatacctgca

SEQ ID NO: 5067417 - DNA, 25 bp, Homo sapien
ttattaaaccgatggtacattttga

SEQ ID NO: 5067418 - DNA, 25 bp, Homo sapien
ctattgctcaagcaccatttgcttg

SEQ ID NO: 5067419 - DNA, 25 bp, Homo sapien
tcctattgctcaagcaccatttgct

SEQ ID NO: 5067420 - DNA, 25 bp, Homo sapien
taaaccgatggtacattttgagtta

SEQ ID NO: 5067421 - DNA, 25 bp, Homo sapien
ttacagatcatgtgtttagtgttat

SEQ ID NO: 5067422 - DNA, 25 bp, Homo sapien
tctaagaattcttcacctagtcttt

SEQ ID NO: 5067423 - DNA, 25 bp, Homo sapien
tcttttacagatcatgtgtttagtg

SEQ ID NO: 5067424 - DNA, 25 bp, Homo sapien
tgttatgtctaagaattcttcacct

SEQ ID NO: 5067425 - DNA, 25 bp, Homo sapien
atggtgtgaaatcgctcctggcctg

SEQ ID NO: 5067426 - DNA, 25 bp, Homo sapien
tgtgatggtgtgaaatcgctcctgg

SEQ ID NO: 5067427 - DNA, 25 bp, Homo sapien
tgatggtgtgaaatcgctcctggcc

SEQ ID NO: 5067428 - DNA, 25 bp, Homo sapien
gtgtgaaatcgctcctggcctgctg

SEQ ID NO: 5067429 - DNA, 25 bp, Homo sapien
ttggtgatgtcatatactagcatga

SEQ ID NO: 5067430 - DNA, 25 bp, Homo sapien
ttcaaaacttttaccattggtgatg

SEQ ID NO: 5067431 - DNA, 25 bp, Homo sapien
attggtgatgtcatatactagcatg

SEQ ID NO: 5067432 - DNA, 25 bp, Homo sapien
aaaacttttaccattggtgatgtca

SEQ ID NO: 5067433 - DNA, 25 bp, Homo sapien
catggagtggcattgttggcatccc

SEQ ID NO: 5067434 - DNA, 25 bp, Homo sapien
aatctatagccagcttggacagaag

SEQ ID NO: 5067435 - DNA, 25 bp, Homo sapien
gggacccaggacttgcaaatggcat

SEQ ID NO: 5067436 - DNA, 25 bp, Homo sapien
gaatagcaggacaccagttcatgtg

SEQ ID NO: 5067437 - DNA, 25 bp, Homo sapien
atatattaggtctttgttcccagtt

SEQ ID NO: 5067438 - DNA, 25 bp, Homo sapien
gatacctgggttgtatgtttctcag

SEQ ID NO: 5067439 - DNA, 25 bp, Homo sapien
aacaaaccatccagtctaccatgtc

SEQ ID NO: 5067440 - DNA, 25 bp, Homo sapien
tccagtctaccatgtcagatgttta

SEQ ID NO: 5067441 - DNA, 25 bp, Homo sapien
tgcccattgaattgtctagccatct

SEQ ID NO: 5067442 - DNA, 25 bp, Homo sapien
gtatggtatgaagtaggtgtctaac

SEQ ID NO: 5067443 - DNA, 25 bp, Homo sapien
ggtgtctaactttcattcttccaca

SEQ ID NO: 5067444 - DNA, 25 bp, Homo sapien
ttccacacaaggatagccagttttc

SEQ ID NO: 5067445 - DNA, 25 bp, Homo sapien
agaaaaattataccgcatgtggtgg

SEQ ID NO: 5067446 - DNA, 25 bp, Homo sapien
ctcttttgttgcaaggacgataccc

SEQ ID NO: 5067447 - DNA, 25 bp, Homo sapien
gacgatacccttagtagaatcacaa

SEQ ID NO: 5067448 - DNA, 25 bp, Homo sapien
taagtgaacctgcagttcaagggtc

SEQ ID NO: 5067449 - DNA, 25 bp, Homo sapien
gagaaggaagaatcacttgacccct

SEQ ID NO: 5067450 - DNA, 25 bp, Homo sapien
ctgagaaggaagaatcacttgaccc

SEQ ID NO: 5067451 - DNA, 25 bp, Homo sapien
ctgggcaacactgcgagtccccatc

SEQ ID NO: 5067452 - DNA, 25 bp, Homo sapien
gaaggaagaatcacttgacccctgg

SEQ ID NO: 5067453 - DNA, 25 bp, Homo sapien
catcttcagcggtgtaattcctcca

SEQ ID NO: 5067454 - DNA, 25 bp, Homo sapien
tgccaccccgagaataggacacttt

SEQ ID NO: 5067455 - DNA, 25 bp, Homo sapien
catttgcacagaacagtagttagcc

SEQ ID NO: 5067456 - DNA, 25 bp, Homo sapien
ctttatacgtaagggcagtcagtcc

SEQ ID NO: 5067457 - DNA, 25 bp, Homo sapien
tcatcctcaatgtcttcaaattgag

SEQ ID NO: 5067458 - DNA, 25 bp, Homo sapien
cttcatcctcaatgtcttcaaattg

SEQ ID NO: 5067459 - DNA, 25 bp, Homo sapien
cctcaatgtcttcaaattgagtagg

SEQ ID NO: 5067460 - DNA, 25 bp, Homo sapien
atcctcaatgtcttcaaattgagta

SEQ ID NO: 5067461 - DNA, 25 bp, Homo sapien
tgacggttgcacaacagtagaatgt

SEQ ID NO: 5067462 - DNA, 25 bp, Homo sapien
aaaacaacaataggctgagcacggg

SEQ ID NO: 5067463 - DNA, 25 bp, Homo sapien
aaacaacaataggctgagcacgggg

SEQ ID NO: 5067464 - DNA, 25 bp, Homo sapien
aaaaacaacaataggctgagcacgg

SEQ ID NO: 5067465 - DNA, 25 bp, Homo sapien
tacacgcagaagaatttaaagcagg

SEQ ID NO: 5067466 - DNA, 25 bp, Homo sapien
aaaacacatattggcgaggatgtgg

SEQ ID NO: 5067467 - DNA, 25 bp, Homo sapien
tgtggagaaaccgacacctttgtgt

SEQ ID NO: 5067468 - DNA, 25 bp, Homo sapien
ttccactcatgggtatacacgcaga

SEQ ID NO: 5067469 - DNA, 25 bp, Homo sapien
ttaggtacaactcttttgtcgtcca

SEQ ID NO: 5067470 - DNA, 25 bp, Homo sapien
ttttgtcgtccatatcacacttgtt

SEQ ID NO: 5067471 - DNA, 25 bp, Homo sapien
caactcttttgtcgtccatatcaca

SEQ ID NO: 5067472 - DNA, 25 bp, Homo sapien
cacacttgtttcctagtaacattct

SEQ ID NO: 5067473 - DNA, 25 bp, Homo sapien
taattagcttagtgtgttcgatcac

SEQ ID NO: 5067474 - DNA, 25 bp, Homo sapien
acaaagacagagcagagtatcagtt

SEQ ID NO: 5067475 - DNA, 25 bp, Homo sapien
caaaagtagcattacctttacaaag

SEQ ID NO: 5067476 - DNA, 25 bp, Homo sapien
gcagagtatcagtttaattcagatt

SEQ ID NO: 5067477 - DNA, 25 bp, Homo sapien
tcagcaagtcaagctctttcataaa

SEQ ID NO: 5067478 - DNA, 25 bp, Homo sapien
gaaggcagtggtcccaactagaata

SEQ ID NO: 5067479 - DNA, 25 bp, Homo sapien
tctaagtcagatacttcacactggg

SEQ ID NO: 5067480 - DNA, 25 bp, Homo sapien
aatattaatcttattctgaaggcag

SEQ ID NO: 5067481 - DNA, 25 bp, Homo sapien
ttgcactagtctcaaaaaacctaat

SEQ ID NO: 5067482 - DNA, 25 bp, Homo sapien
atttgcttttgcactagtctcaaaa

SEQ ID NO: 5067483 - DNA, 25 bp, Homo sapien
gaggaacgccttttcgatgtttata

SEQ ID NO: 5067484 - DNA, 25 bp, Homo sapien
aggatatcttcagctaacgtgagga

SEQ ID NO: 5067485 - DNA, 25 bp, Homo sapien
tgaactagggactagacagtgactg

SEQ ID NO: 5067486 - DNA, 25 bp, Homo sapien
taatggttaccactgactagatcct

SEQ ID NO: 5067487 - DNA, 25 bp, Homo sapien
gcattatacctattcactcgaggga

SEQ ID NO: 5067488 - DNA, 25 bp, Homo sapien
tgtacacgccctttatttgcctgag

SEQ ID NO: 5067489 - DNA, 25 bp, Homo sapien
gctactagtgtatcactggaggcca

SEQ ID NO: 5067490 - DNA, 25 bp, Homo sapien
ggaatttgaggctatggccagcatg

SEQ ID NO: 5067491 - DNA, 25 bp, Homo sapien
gatggtgatgtgtcctcgtggtcct

SEQ ID NO: 5067492 - DNA, 25 bp, Homo sapien
gatgtgtcctcgtggtcctagctac

SEQ ID NO: 5067493 - DNA, 25 bp, Homo sapien
tatattgtcaaactaccagatcagg

SEQ ID NO: 5067494 - DNA, 25 bp, Homo sapien
tcctgccagtactgctctcttcaag

SEQ ID NO: 5067495 - DNA, 25 bp, Homo sapien
taatactcccaagaaggctcccttg

SEQ ID NO: 5067496 - DNA, 25 bp, Homo sapien
cattttgaaagctaggacgtacctg

SEQ ID NO: 5067497 - DNA, 25 bp, Homo sapien
ttcactgttgggctcttttacaggg

SEQ ID NO: 5067498 - DNA, 25 bp, Homo sapien
atttgctcttccagcctgtcacgcc

SEQ ID NO: 5067499 - DNA, 25 bp, Homo sapien
cctccactgctgatatctacatttt

SEQ ID NO: 5067500 - DNA, 25 bp, Homo sapien
ctcttccagcctgtcacgcctcctc

SEQ ID NO: 5067501 - DNA, 25 bp, Homo sapien
tggcaactgatggaacaggagaatg

SEQ ID NO: 5067502 - DNA, 25 bp, Homo sapien
agagaaaacggggtagtggatggca

SEQ ID NO: 5067503 - DNA, 25 bp, Homo sapien
ggcaactgatggaacaggagaatgc

SEQ ID NO: 5067504 - DNA, 25 bp, Homo sapien
aaacggggtagtggatggcaactga

SEQ ID NO: 5067505 - DNA, 25 bp, Homo sapien
taagaactggactataatacaactg

SEQ ID NO: 5067506 - DNA, 25 bp, Homo sapien
taatgttgataagaactggactata

SEQ ID NO: 5067507 - DNA, 25 bp, Homo sapien
taggtggcttggatagttaagatga

SEQ ID NO: 5067508 - DNA, 25 bp, Homo sapien
aattatgataaagtcagcaagcagt

SEQ ID NO: 5067509 - DNA, 25 bp, Homo sapien
tattcttatacaatttgcagaatag

SEQ ID NO: 5067510 - DNA, 25 bp, Homo sapien
attcttatacaatttgcagaataga

SEQ ID NO: 5067511 - DNA, 25 bp, Homo sapien
ttcttatacaatttgcagaatagat

SEQ ID NO: 5067512 - DNA, 25 bp, Homo sapien
gtctatagattatagggactcaagc

SEQ ID NO: 5067513 - DNA, 25 bp, Homo sapien
acagaaaattccactgttgtacaaa

SEQ ID NO: 5067514 - DNA, 25 bp, Homo sapien
cagaaaattccactgttgtacaaaa

SEQ ID NO: 5067515 - DNA, 25 bp, Homo sapien
tagattatagggactcaagcacatt

SEQ ID NO: 5067516 - DNA, 25 bp, Homo sapien
ctttccacataaggcacaggacaaa

SEQ ID NO: 5067517 - DNA, 25 bp, Homo sapien
agaagttcctttccacataaggcac

SEQ ID NO: 5067518 - DNA, 25 bp, Homo sapien
ggcacaggacaaaattaatcccatt

SEQ ID NO: 5067519 - DNA, 25 bp, Homo sapien
tattcaaggcgaaaatgagtgtttt

SEQ ID NO: 5067520 - DNA, 25 bp, Homo sapien
caagctgctagaggagttgccaaaa

SEQ ID NO: 5067521 - DNA, 25 bp, Homo sapien
gattttcatagcagatacgtcccta

SEQ ID NO: 5067522 - DNA, 25 bp, Homo sapien
aaaccgaatttgtagctagtaccag

SEQ ID NO: 5067523 - DNA, 25 bp, Homo sapien
tcaatggatagacaggaagggaaca

SEQ ID NO: 5067524 - DNA, 25 bp, Homo sapien
catccaactagtgtaagccaggtgt

SEQ ID NO: 5067525 - DNA, 25 bp, Homo sapien
gatgattccgctttaggatcccaga

SEQ ID NO: 5067526 - DNA, 25 bp, Homo sapien
ggtgacctcagctgtagtggcctta

SEQ ID NO: 5067527 - DNA, 25 bp, Homo sapien
gatttaccctccagtatgaggagcc

SEQ ID NO: 5067528 - DNA, 25 bp, Homo sapien
ccagcaaaggcagaattgtaggtcc

SEQ ID NO: 5067529 - DNA, 25 bp, Homo sapien
caaaggcagaattgtaggtcccaac

SEQ ID NO: 5067530 - DNA, 25 bp, Homo sapien
aaaacactccatgtgattcttaaaa

SEQ ID NO: 5067531 - DNA, 25 bp, Homo sapien
aaaaacactccatgtgattcttaaa

SEQ ID NO: 5067532 - DNA, 25 bp, Homo sapien
ggagctcccagaccaatcagatgcc

SEQ ID NO: 5067533 - DNA, 25 bp, Homo sapien
tttcttctgcgcgagatgctgaggg

SEQ ID NO: 5067534 - DNA, 25 bp, Homo sapien
caagtacctgctggctatctggagc

SEQ ID NO: 5067535 - DNA, 25 bp, Homo sapien
tattggtagtgtgcacaccccttcc

SEQ ID NO: 5067536 - DNA, 25 bp, Homo sapien
tccacattcagacaaccattttgta

SEQ ID NO: 5067537 - DNA, 25 bp, Homo sapien
gcatgatgtacctgataactgagga

SEQ ID NO: 5067538 - DNA, 25 bp, Homo sapien
agcagcatgatgtacctgataactg

SEQ ID NO: 5067539 - DNA, 25 bp, Homo sapien
aagccgaatagagttccagagctgg

SEQ ID NO: 5067540 - DNA, 25 bp, Homo sapien
tgataactgaggaagccgaatagag

SEQ ID NO: 5067541 - DNA, 25 bp, Homo sapien
gcagctatggctactcctacatcct

SEQ ID NO: 5067542 - DNA, 25 bp, Homo sapien
tcctggcgtgggtggccttcgcctt

SEQ ID NO: 5067543 - DNA, 25 bp, Homo sapien
tactcctacatcctggcgtgggtgg

SEQ ID NO: 5067544 - DNA, 25 bp, Homo sapien
aagaaggcagctatggctactccta

SEQ ID NO: 5067545 - DNA, 25 bp, Homo sapien
taggaaatgagttttttgcagatgt

SEQ ID NO: 5067546 - DNA, 25 bp, Homo sapien
gtgggtaggaaatgagttttttgca

SEQ ID NO: 5067547 - DNA, 25 bp, Homo sapien
gggtaggaaatgagttttttgcaga

SEQ ID NO: 5067548 - DNA, 25 bp, Homo sapien
ggtaggaaatgagttttttgcagat

SEQ ID NO: 5067549 - DNA, 25 bp, Homo sapien
ccacatcacctctgcggccttgctg

SEQ ID NO: 5067550 - DNA, 25 bp, Homo sapien
tcacctctgcggccttgctgttcat

SEQ ID NO: 5067551 - DNA, 25 bp, Homo sapien
tctgcggccttgctgttcatcgcca

SEQ ID NO: 5067552 - DNA, 25 bp, Homo sapien
tttcaccgtcgccttccacatcacc

SEQ ID NO: 5067553 - DNA, 25 bp, Homo sapien
gaagctgaaggaacgtcaccggttc

SEQ ID NO: 5067554 - DNA, 25 bp, Homo sapien
gctgcatcccctgcttgaatgtgat

SEQ ID NO: 5067555 - DNA, 25 bp, Homo sapien
tcggcttactaatacctatctcagg

SEQ ID NO: 5067556 - DNA, 25 bp, Homo sapien
caagatgggactgtgaatgtatgga

SEQ ID NO: 5067557 - DNA, 25 bp, Homo sapien
tgggagttggggcataagatggtct

SEQ ID NO: 5067558 - DNA, 25 bp, Homo sapien
ggagttggggcataagatggtcttt

SEQ ID NO: 5067559 - DNA, 25 bp, Homo sapien
gtgggagttggggcataagatggtc

SEQ ID NO: 5067560 - DNA, 25 bp, Homo sapien
gggtgggagttggggcataagatgg

SEQ ID NO: 5067561 - DNA, 25 bp, Homo sapien
aaaggacgctgggacccggctattg

SEQ ID NO: 5067562 - DNA, 25 bp, Homo sapien
attggtgcctgggttgcctcccagc

SEQ ID NO: 5067563 - DNA, 25 bp, Homo sapien
ggaatcataataccaaaggacgctg

SEQ ID NO: 5067564 - DNA, 25 bp, Homo sapien
cccggctattggtgcctgggttgcc

SEQ ID NO: 5067565 - DNA, 25 bp, Homo sapien
gatctccccacatgccatcaataag

SEQ ID NO: 5067566 - DNA, 25 bp, Homo sapien
tcagcaagctgaatgctcacgtcag

SEQ ID NO: 5067567 - DNA, 25 bp, Homo sapien
gttcgtgtggaattagaggtcttca

SEQ ID NO: 5067568 - DNA, 25 bp, Homo sapien
ctctcttcatgcgagactgcctctg

SEQ ID NO: 5067569 - DNA, 25 bp, Homo sapien
aaacgggcggtgtccgtatgctcca

SEQ ID NO: 5067570 - DNA, 25 bp, Homo sapien
ggaaacgggcggtgtccgtatgctc

SEQ ID NO: 5067571 - DNA, 25 bp, Homo sapien
gaaacgggcggtgtccgtatgctcc

SEQ ID NO: 5067572 - DNA, 25 bp, Homo sapien
aacgggcggtgtccgtatgctccat

SEQ ID NO: 5067573 - DNA, 25 bp, Homo sapien
acctgtcgcttgaggacctgcatgc

SEQ ID NO: 5067574 - DNA, 25 bp, Homo sapien
tcttcttctgatgccgttcctctat

SEQ ID NO: 5067575 - DNA, 25 bp, Homo sapien
aggatttcactgatgcggccatgat

SEQ ID NO: 5067576 - DNA, 25 bp, Homo sapien
cactgttaaatgaagccgtgctttc

SEQ ID NO: 5067577 - DNA, 25 bp, Homo sapien
cactgttccgttggctcttcttcag

SEQ ID NO: 5067578 - DNA, 25 bp, Homo sapien
tgtctcccttggaaggttcgtgtcg

SEQ ID NO: 5067579 - DNA, 25 bp, Homo sapien
tcctcgcctttgttgcccgcttgct

SEQ ID NO: 5067580 - DNA, 25 bp, Homo sapien
tcttcttcagagtgtgtctcctctg

SEQ ID NO: 5067581 - DNA, 25 bp, Homo sapien
tggctgttactctccaagccagtgt

SEQ ID NO: 5067582 - DNA, 25 bp, Homo sapien
tctcgtctcttggtatgggatctgt

SEQ ID NO: 5067583 - DNA, 25 bp, Homo sapien
cttctctgccatacagtcgacccct

SEQ ID NO: 5067584 - DNA, 25 bp, Homo sapien
ttttctcgtctcttggtatgggatc

SEQ ID NO: 5067585 - DNA, 25 bp, Homo sapien
caagtaaacactgggtggctgccag

SEQ ID NO: 5067586 - DNA, 25 bp, Homo sapien
gctgccaggagtctggaggaagtgc

SEQ ID NO: 5067587 - DNA, 25 bp, Homo sapien
ctggtctccaagtaaacactgggtg

SEQ ID NO: 5067588 - DNA, 25 bp, Homo sapien
tctccaagtaaacactgggtggctg

SEQ ID NO: 5067589 - DNA, 25 bp, Homo sapien
tacagctccggtacaattattccca

SEQ ID NO: 5067590 - DNA, 25 bp, Homo sapien
gcttccgatacagctccggtacaat

SEQ ID NO: 5067591 - DNA, 25 bp, Homo sapien
tccgatacagctccggtacaattat

SEQ ID NO: 5067592 - DNA, 25 bp, Homo sapien
agcatgcttccgatacagctccggt

SEQ ID NO: 5067593 - DNA, 25 bp, Homo sapien
tcatgaaatcctcgatgattctgtg

SEQ ID NO: 5067594 - DNA, 25 bp, Homo sapien
ttttggatcatgaaatcctcgatga

SEQ ID NO: 5067595 - DNA, 25 bp, Homo sapien
tggatcatgaaatcctcgatgattc

SEQ ID NO: 5067596 - DNA, 25 bp, Homo sapien
gatcatgaaatcctcgatgattctg

SEQ ID NO: 5067597 - DNA, 25 bp, Homo sapien
tgcgagaattccaggccccgtgaat

SEQ ID NO: 5067598 - DNA, 25 bp, Homo sapien
ccgtgaatttcaagtctggatgcag

SEQ ID NO: 5067599 - DNA, 25 bp, Homo sapien
aatttcaagtctggatgcagctcat

SEQ ID NO: 5067600 - DNA, 25 bp, Homo sapien
gcgagaattccaggccccgtgaatt

SEQ ID NO: 5067601 - DNA, 25 bp, Homo sapien
gatcttcacagcgttcacggggcgg

SEQ ID NO: 5067602 - DNA, 25 bp, Homo sapien
tcacagcgttcacggggcggtcctg

SEQ ID NO: 5067603 - DNA, 25 bp, Homo sapien
tgtgtttgctgtcgatccactgggt

SEQ ID NO: 5067604 - DNA, 25 bp, Homo sapien
tgtttgctgtcgatccactgggtgg

SEQ ID NO: 5067605 - DNA, 25 bp, Homo sapien
ggtttgtagttacaataccatggca

SEQ ID NO: 5067606 - DNA, 25 bp, Homo sapien
gtagttacaataccatggcagttgc

SEQ ID NO: 5067607 - DNA, 25 bp, Homo sapien
gctgtcagctgatgtcctcgggttg

SEQ ID NO: 5067608 - DNA, 25 bp, Homo sapien
gtcagctgatgtcctcgggttggca

SEQ ID NO: 5067609 - DNA, 25 bp, Homo sapien
gcggcccaggctctcgcgcccgccg

SEQ ID NO: 5067610 - DNA, 25 bp, Homo sapien
gccccgacggtcagtcccgcgcggc

SEQ ID NO: 5067611 - DNA, 25 bp, Homo sapien
cggcccaggctctcgcgcccgccgc

SEQ ID NO: 5067612 - DNA, 25 bp, Homo sapien
cgcggcccaggctctcgcgcccgcc

SEQ ID NO: 5067613 - DNA, 25 bp, Homo sapien
acgatgaggtcgagcgggaaggcgc

SEQ ID NO: 5067614 - DNA, 25 bp, Homo sapien
ggcgagcgtgggcaggcggcagcgg

SEQ ID NO: 5067615 - DNA, 25 bp, Homo sapien
gggaaggcgcccatgctccagcgca

SEQ ID NO: 5067616 - DNA, 25 bp, Homo sapien
gcggcagcggctgacgatgaggtcg

SEQ ID NO: 5067617 - DNA, 25 bp, Homo sapien
ccggtccccatctccagcgaccccg

SEQ ID NO: 5067618 - DNA, 25 bp, Homo sapien
cggaccccggtccccatctccagcg

SEQ ID NO: 5067619 - DNA, 25 bp, Homo sapien
gaccccggtccccatctccagcgac

SEQ ID NO: 5067620 - DNA, 25 bp, Homo sapien
gtccccatctccagcgaccccggta

SEQ ID NO: 5067621 - DNA, 25 bp, Homo sapien
atcttgggcccgatgacatagtggc

SEQ ID NO: 5067622 - DNA, 25 bp, Homo sapien
cctccagggtatgagctgtcaccgt

SEQ ID NO: 5067623 - DNA, 25 bp, Homo sapien
tgtcaccgttgtccactgccggcag

SEQ ID NO: 5067624 - DNA, 25 bp, Homo sapien
cactgccggcaggagtggatgagca

SEQ ID NO: 5067625 - DNA, 25 bp, Homo sapien
tgacatctgtcctggctggacacac

SEQ ID NO: 5067626 - DNA, 25 bp, Homo sapien
tttatgacatctgtcctggctggac

SEQ ID NO: 5067627 - DNA, 25 bp, Homo sapien
ctttatgacatctgtcctggctgga

SEQ ID NO: 5067628 - DNA, 25 bp, Homo sapien
aggctttatgacatctgtcctggct

SEQ ID NO: 5067629 - DNA, 25 bp, Homo sapien
tgctgatccgcatggaggtggcact

SEQ ID NO: 5067630 - DNA, 25 bp, Homo sapien
tacaagacggctaggtaggcaaaac

SEQ ID NO: 5067631 - DNA, 25 bp, Homo sapien
tgtacaacatgagacccactggagt

SEQ ID NO: 5067632 - DNA, 25 bp, Homo sapien
tgagacgatgagtacccaatggtgg

SEQ ID NO: 5067633 - DNA, 25 bp, Homo sapien
acaaaagttgctggagtgggcctgc

SEQ ID NO: 5067634 - DNA, 25 bp, Homo sapien
tgggagtctagcctgcgtcccaaga

SEQ ID NO: 5067635 - DNA, 25 bp, Homo sapien
ctgctgggagtctagcctgcgtccc

SEQ ID NO: 5067636 - DNA, 25 bp, Homo sapien
tgcatagtgggtgacaaaagttgct

SEQ ID NO: 5067637 - DNA, 25 bp, Homo sapien
acgctgctgaagtacctcactggct

SEQ ID NO: 5067638 - DNA, 25 bp, Homo sapien
aggtgatggcttccatcacgaagat

SEQ ID NO: 5067639 - DNA, 25 bp, Homo sapien
tgctgaagtacctcactggctcccg

SEQ ID NO: 5067640 - DNA, 25 bp, Homo sapien
tccatcacgaagatgcggtcaggga

SEQ ID NO: 5067641 - DNA, 25 bp, Homo sapien
gcaaccttccaaccagagtcagggt

SEQ ID NO: 5067642 - DNA, 25 bp, Homo sapien
tgagggcaaccttccaaccagagtc

SEQ ID NO: 5067643 - DNA, 25 bp, Homo sapien
cttcttggatcctgagggcaacctt

SEQ ID NO: 5067644 - DNA, 25 bp, Homo sapien
gggcaaccttccaaccagagtcagg

SEQ ID NO: 5067645 - DNA, 25 bp, Homo sapien
cgcatgcagcgtgaagttgtacacc

SEQ ID NO: 5067646 - DNA, 25 bp, Homo sapien
ataagagtgagctcgtcgcccgcat

SEQ ID NO: 5067647 - DNA, 25 bp, Homo sapien
ggatctccgcctggcccataagagt

SEQ ID NO: 5067648 - DNA, 25 bp, Homo sapien
gtacacctcgctgtcctcgctgaac

SEQ ID NO: 5067649 - DNA, 25 bp, Homo sapien
ttcgcaggagggtggtgaagcgcga

SEQ ID NO: 5067650 - DNA, 25 bp, Homo sapien
gcccggcccagctttcgcaggaggg

SEQ ID NO: 5067651 - DNA, 25 bp, Homo sapien
agcgcgagcgctccttggtggtctt

SEQ ID NO: 5067652 - DNA, 25 bp, Homo sapien
gagggtggtgaagcgcgagcgctcc

SEQ ID NO: 5067653 - DNA, 25 bp, Homo sapien
gaggcagggcatcttgcctttgacc

SEQ ID NO: 5067654 - DNA, 25 bp, Homo sapien
gcagggcatcttgcctttgaccggc

SEQ ID NO: 5067655 - DNA, 25 bp, Homo sapien
gatgaggcagggcatcttgcctttg

SEQ ID NO: 5067656 - DNA, 25 bp, Homo sapien
tgcggtggttcatgcagatgaggca

SEQ ID NO: 5067657 - DNA, 25 bp, Homo sapien
gtgctgaagcggccctggcactgaa

SEQ ID NO: 5067658 - DNA, 25 bp, Homo sapien
gggcaccagcacgttcaccggcagc

SEQ ID NO: 5067659 - DNA, 25 bp, Homo sapien
atgatggcgcgcaccgtgtgctcgc

SEQ ID NO: 5067660 - DNA, 25 bp, Homo sapien
ggcagcctcacgcgctcgatgatgg

SEQ ID NO: 5067661 - DNA, 25 bp, Homo sapien
agcaggaagtgcagcggcgccgggc

SEQ ID NO: 5067662 - DNA, 25 bp, Homo sapien
accaccgtcttggagatgatgctaa

SEQ ID NO: 5067663 - DNA, 25 bp, Homo sapien
aagcgcggcgtgtccgtgagcagca

SEQ ID NO: 5067664 - DNA, 25 bp, Homo sapien
cagcaccaccgtcttggagatgatg

SEQ ID NO: 5067665 - DNA, 25 bp, Homo sapien
tactcgtcggggtcgaagcgctcgc

SEQ ID NO: 5067666 - DNA, 25 bp, Homo sapien
aagcgctcgcggcagtaggaggcgc

SEQ ID NO: 5067667 - DNA, 25 bp, Homo sapien
gccgtggagtactcgtcggggtcga

SEQ ID NO: 5067668 - DNA, 25 bp, Homo sapien
gggtcgaagcgctcgcggcagtagg

SEQ ID NO: 5067669 - DNA, 25 bp, Homo sapien
gcagtcttcggcgagctccgctggc

SEQ ID NO: 5067670 - DNA, 25 bp, Homo sapien
gagccggcgctagcgggccgggggc

SEQ ID NO: 5067671 - DNA, 25 bp, Homo sapien
cgcgggctggcgcagtcttcggcga

SEQ ID NO: 5067672 - DNA, 25 bp, Homo sapien
gctggcgcagtcttcggcgagctcc

SEQ ID NO: 5067673 - DNA, 25 bp, Homo sapien
ggcgcggctgcccagtcggggctca

SEQ ID NO: 5067674 - DNA, 25 bp, Homo sapien
cggctgcccagtcggggctcacgta

SEQ ID NO: 5067675 - DNA, 25 bp, Homo sapien
ggcgggctcgggcgcggctgcccag

SEQ ID NO: 5067676 - DNA, 25 bp, Homo sapien
gctcgggcgcggctgcccagtcggg

SEQ ID NO: 5067677 - DNA, 25 bp, Homo sapien
agatgagatcgagccctgggggcgg

SEQ ID NO: 5067678 - DNA, 25 bp, Homo sapien
ggccccgaaggagatgagatcgagc

SEQ ID NO: 5067679 - DNA, 25 bp, Homo sapien
ccgcggccccgaaggagatgagatc

SEQ ID NO: 5067680 - DNA, 25 bp, Homo sapien
gcggcggcgcttccggctcccgacg

SEQ ID NO: 5067681 - DNA, 25 bp, Homo sapien
gcctttaatctaccaatgctctgtg

SEQ ID NO: 5067682 - DNA, 25 bp, Homo sapien
tctaagcttacttcgccaaggaacc

SEQ ID NO: 5067683 - DNA, 25 bp, Homo sapien
tctgtgactccaatatgaggaggga

SEQ ID NO: 5067684 - DNA, 25 bp, Homo sapien
taccttctgggtaacagtgcttcgg

SEQ ID NO: 5067685 - DNA, 25 bp, Homo sapien
tggaggccagaggagtagtaggaga

SEQ ID NO: 5067686 - DNA, 25 bp, Homo sapien
cggccgctgccattgccaccccggg

SEQ ID NO: 5067687 - DNA, 25 bp, Homo sapien
attgagcaggcggcactcctccttc

SEQ ID NO: 5067688 - DNA, 25 bp, Homo sapien
gggaatgtaccggctgcagcttggg

SEQ ID NO: 5067689 - DNA, 25 bp, Homo sapien
gtgtccggcgatggggagccactgc

SEQ ID NO: 5067690 - DNA, 25 bp, Homo sapien
ccccaggtgcatgggtagcaataga

SEQ ID NO: 5067691 - DNA, 25 bp, Homo sapien
tagcaatagagggagtaggtgtccg

SEQ ID NO: 5067692 - DNA, 25 bp, Homo sapien
caatagagggagtaggtgtccggcg

SEQ ID NO: 5067693 - DNA, 25 bp, Homo sapien
tccaaacggagcaaagcgcttctgg

SEQ ID NO: 5067694 - DNA, 25 bp, Homo sapien
gggagcagctgaataggcctggcct

SEQ ID NO: 5067695 - DNA, 25 bp, Homo sapien
gtagccacaggacccgaggtggttc

SEQ ID NO: 5067696 - DNA, 25 bp, Homo sapien
cggctcgaccgctcagaggctctgt

SEQ ID NO: 5067697 - DNA, 25 bp, Homo sapien
cagctcaaagggatcgaagggctcc

SEQ ID NO: 5067698 - DNA, 25 bp, Homo sapien
gctcaaagggatcgaagggctccag

SEQ ID NO: 5067699 - DNA, 25 bp, Homo sapien
caaagggatcgaagggctccaggac

SEQ ID NO: 5067700 - DNA, 25 bp, Homo sapien
gccccagctcaaagggatcgaaggg

SEQ ID NO: 5067701 - DNA, 25 bp, Homo sapien
caggaggaggcatctcggactccaa

SEQ ID NO: 5067702 - DNA, 25 bp, Homo sapien
ctcccgcctcgggtccctgcagagc

SEQ ID NO: 5067703 - DNA, 25 bp, Homo sapien
cctcccgcctcgggtccctgcagag

SEQ ID NO: 5067704 - DNA, 25 bp, Homo sapien
gatgctaccatcgatgcgttctcgg

SEQ ID NO: 5067705 - DNA, 25 bp, Homo sapien
tctgagagcccgatgaaacgcagac

SEQ ID NO: 5067706 - DNA, 25 bp, Homo sapien
cgttctcgggcaaagaagctcacca

SEQ ID NO: 5067707 - DNA, 25 bp, Homo sapien
tgggcctccagcctttgatgaactg

SEQ ID NO: 5067708 - DNA, 25 bp, Homo sapien
caaaggcaagatgtcccgtgcaggg

SEQ ID NO: 5067709 - DNA, 25 bp, Homo sapien
gcaaatgccttactgggcccaggta

SEQ ID NO: 5067710 - DNA, 25 bp, Homo sapien
tgaaggccagcttttgaccccgttg

SEQ ID NO: 5067711 - DNA, 25 bp, Homo sapien
catgggttaggcttgtacacgactc

SEQ ID NO: 5067712 - DNA, 25 bp, Homo sapien
gaagttctaccagtgagcaggcctc

SEQ ID NO: 5067713 - DNA, 25 bp, Homo sapien
cagaagatagtggaccggctcaaga

SEQ ID NO: 5067714 - DNA, 25 bp, Homo sapien
tataagccccgaggcctagagtggc

SEQ ID NO: 5067715 - DNA, 25 bp, Homo sapien
gagaagacaaactccggcactgggt

SEQ ID NO: 5067716 - DNA, 25 bp, Homo sapien
tccaagggcttcctaggtgagtagc

SEQ ID NO: 5067717 - DNA, 25 bp, Homo sapien
gggctctagcatcacctggtccaag

SEQ ID NO: 5067718 - DNA, 25 bp, Homo sapien
tatgagtcaggtgcggtagcaacca

SEQ ID NO: 5067719 - DNA, 25 bp, Homo sapien
gaagcaagctctgcatccgggcttt

SEQ ID NO: 5067720 - DNA, 25 bp, Homo sapien
cgcattctccgatctgttggctttt

SEQ ID NO: 5067721 - DNA, 25 bp, Homo sapien
tccccttgccaggtgattggcatgc

SEQ ID NO: 5067722 - DNA, 25 bp, Homo sapien
gttccccttgccaggtgattggcat

SEQ ID NO: 5067723 - DNA, 25 bp, Homo sapien
gcattctccgatctgttggcttttg

SEQ ID NO: 5067724 - DNA, 25 bp, Homo sapien
tgagaatgtgcaggcctaacgctcc

SEQ ID NO: 5067725 - DNA, 25 bp, Homo sapien
taaatctagtttggcctcgagctgt

SEQ ID NO: 5067726 - DNA, 25 bp, Homo sapien
cctagtatcctggtggtgagaccca

SEQ ID NO: 5067727 - DNA, 25 bp, Homo sapien
taatggcattggagatagacagacc

SEQ ID NO: 5067728 - DNA, 25 bp, Homo sapien
tctaccccgggacatgaaagggctg

SEQ ID NO: 5067729 - DNA, 25 bp, Homo sapien
taaccagaaccagccgaaggtaggc

SEQ ID NO: 5067730 - DNA, 25 bp, Homo sapien
tctaaaatcagtacaggcgatgccg

SEQ ID NO: 5067731 - DNA, 25 bp, Homo sapien
gatgcgggtggttcctaaacactgg

SEQ ID NO: 5067732 - DNA, 25 bp, Homo sapien
ttcccctgcaggtgattccagatca

SEQ ID NO: 5067733 - DNA, 25 bp, Homo sapien
tttcccctgcaggtgattccagatc

SEQ ID NO: 5067734 - DNA, 25 bp, Homo sapien
tgggcccaggtgtcactcattagct

SEQ ID NO: 5067735 - DNA, 25 bp, Homo sapien
taggtgatccgtcaatgtctgggtg

SEQ ID NO: 5067736 - DNA, 25 bp, Homo sapien
gaacaaggtcaacatattccccgac

SEQ ID NO: 5067737 - DNA, 25 bp, Homo sapien
tattgacccaactgctgagatgtag

SEQ ID NO: 5067738 - DNA, 25 bp, Homo sapien
attttgtactcagcttttcagtgtg

SEQ ID NO: 5067739 - DNA, 25 bp, Homo sapien
tcctccttgattctcatctctgtta

SEQ ID NO: 5067740 - DNA, 25 bp, Homo sapien
tttcagtgtgttgaatgtgtcttcc

SEQ ID NO: 5067741 - DNA, 25 bp, Homo sapien
gattctgcctgttccagatttgcac

SEQ ID NO: 5067742 - DNA, 25 bp, Homo sapien
tgtgctagatagcagcagtgccctg

SEQ ID NO: 5067743 - DNA, 25 bp, Homo sapien
tattgctgccataatgctaaccagg

SEQ ID NO: 5067744 - DNA, 25 bp, Homo sapien
catttaatggacaagctggctgcac

SEQ ID NO: 5067745 - DNA, 25 bp, Homo sapien
tcttgaatagtgtcctgggttcccc

SEQ ID NO: 5067746 - DNA, 25 bp, Homo sapien
gctagaccgaggacagcaacaagtg

SEQ ID NO: 5067747 - DNA, 25 bp, Homo sapien
tagatactccgtagtgaagccaagt

SEQ ID NO: 5067748 - DNA, 25 bp, Homo sapien
gttcaaagggtaagcctgctctctc

SEQ ID NO: 5067749 - DNA, 25 bp, Homo sapien
caggcatctggctattcttggtgca

SEQ ID NO: 5067750 - DNA, 25 bp, Homo sapien
cagaggaggcaacaattaccatgag

SEQ ID NO: 5067751 - DNA, 25 bp, Homo sapien
tgaccccaaccctgaaagctgggtg

SEQ ID NO: 5067752 - DNA, 25 bp, Homo sapien
caggcttgccaaagagaggttatga

SEQ ID NO: 5067753 - DNA, 25 bp, Homo sapien
gcttgagctttgaataaggccctga

SEQ ID NO: 5067754 - DNA, 25 bp, Homo sapien
gcatagcaagctgtaaggactcata

SEQ ID NO: 5067755 - DNA, 25 bp, Homo sapien
gtgtcaggcactaaccaaaaagtag

SEQ ID NO: 5067756 - DNA, 25 bp, Homo sapien
tcacaaagccattagagtgtcaggc

SEQ ID NO: 5067757 - DNA, 25 bp, Homo sapien
tgtcagtacctaaaatccctcaagg

SEQ ID NO: 5067758 - DNA, 25 bp, Homo sapien
cataaagtcagccttaggtaggaga

SEQ ID NO: 5067759 - DNA, 25 bp, Homo sapien
ttttacagaattgacagcgtatgcc

SEQ ID NO: 5067760 - DNA, 25 bp, Homo sapien
cataaactaacaagggaatctaggc

SEQ ID NO: 5067761 - DNA, 25 bp, Homo sapien
tataaacactcatgtacccaaggcc

SEQ ID NO: 5067762 - DNA, 25 bp, Homo sapien
cttggctgacgtccgcgaggactcc

SEQ ID NO: 5067763 - DNA, 25 bp, Homo sapien
caaggttcaggtccaagtaccaagg

SEQ ID NO: 5067764 - DNA, 25 bp, Homo sapien
cgaggactccctctcggagcaaggt

SEQ ID NO: 5067765 - DNA, 25 bp, Homo sapien
taccaaggctctgcgggaccaaggg

SEQ ID NO: 5067766 - DNA, 25 bp, Homo sapien
ttgggaaagcccgggcggagagctg

SEQ ID NO: 5067767 - DNA, 25 bp, Homo sapien
gcggagagctgagggctcgccgtct

SEQ ID NO: 5067768 - DNA, 25 bp, Homo sapien
gagagctgagggctcgccgtctcac

SEQ ID NO: 5067769 - DNA, 25 bp, Homo sapien
ggcggagagctgagggctcgccgtc

SEQ ID NO: 5067770 - DNA, 25 bp, Homo sapien
aaatcgggcaaacccatggcgccgt

SEQ ID NO: 5067771 - DNA, 25 bp, Homo sapien
tacagcagaaatcgggcaaacccat

SEQ ID NO: 5067772 - DNA, 25 bp, Homo sapien
gcagaaatcgggcaaacccatggcg

SEQ ID NO: 5067773 - DNA, 25 bp, Homo sapien
ttacagcagaaatcgggcaaaccca

SEQ ID NO: 5067774 - DNA, 25 bp, Homo sapien
gatactgcagcatctgtcgtggtct

SEQ ID NO: 5067775 - DNA, 25 bp, Homo sapien
gacagccaccttatgggaaactcag

SEQ ID NO: 5067776 - DNA, 25 bp, Homo sapien
tcacccactatgagagaagccaggt

SEQ ID NO: 5067777 - DNA, 25 bp, Homo sapien
gctaaagtgcccttgattcctgacc

SEQ ID NO: 5067778 - DNA, 25 bp, Homo sapien
taaaggggtaagtcaagatagtcat

SEQ ID NO: 5067779 - DNA, 25 bp, Homo sapien
ttaaaggggtaagtcaagatagtca

SEQ ID NO: 5067780 - DNA, 25 bp, Homo sapien
cccattttgatgcagtgggaagatt

SEQ ID NO: 5067781 - DNA, 25 bp, Homo sapien
ggcccattttgatgcagtgggaaga

SEQ ID NO: 5067782 - DNA, 25 bp, Homo sapien
gggcagctcgtagctgggaggaaca

SEQ ID NO: 5067783 - DNA, 25 bp, Homo sapien
tggggcagctcgtagctgggaggaa

SEQ ID NO: 5067784 - DNA, 25 bp, Homo sapien
ggcagctcgtagctgggaggaacag

SEQ ID NO: 5067785 - DNA, 25 bp, Homo sapien
ctggggcagctcgtagctgggagga

SEQ ID NO: 5067786 - DNA, 25 bp, Homo sapien
gcaaagcaaagacctgggtcaacat

SEQ ID NO: 5067787 - DNA, 25 bp, Homo sapien
gtgactttgcaaagcaaagacctgg

SEQ ID NO: 5067788 - DNA, 25 bp, Homo sapien
tttgcaaagcaaagacctgggtcaa

SEQ ID NO: 5067789 - DNA, 25 bp, Homo sapien
gactttgcaaagcaaagacctgggt

SEQ ID NO: 5067790 - DNA, 25 bp, Homo sapien
gacaggtcgaatggtacaccatcat

SEQ ID NO: 5067791 - DNA, 25 bp, Homo sapien
gtgacaggtcgaatggtacaccatc

SEQ ID NO: 5067792 - DNA, 25 bp, Homo sapien
cttgcaggtgacaggtcgaatggta

SEQ ID NO: 5067793 - DNA, 25 bp, Homo sapien
caggtgacaggtcgaatggtacacc

SEQ ID NO: 5067794 - DNA, 25 bp, Homo sapien
cataccatgtggtgtgtgagacaaa

SEQ ID NO: 5067795 - DNA, 25 bp, Homo sapien
gaacagtacacaagatcaaaggcag

SEQ ID NO: 5067796 - DNA, 25 bp, Homo sapien
gatgtcattcgtaagccagagtttg

SEQ ID NO: 5067797 - DNA, 25 bp, Homo sapien
tgagacaaagtagctggcccctaga

SEQ ID NO: 5067798 - DNA, 25 bp, Homo sapien
caagtgatcaactgtgttggtcaga

SEQ ID NO: 5067799 - DNA, 25 bp, Homo sapien
catataggagccaaccagaaaccag

SEQ ID NO: 5067800 - DNA, 25 bp, Homo sapien
aaccagtgtcatctacctacaagtg

SEQ ID NO: 5067801 - DNA, 25 bp, Homo sapien
ccatataggagccaaccagaaacca

SEQ ID NO: 5067802 - DNA, 25 bp, Homo sapien
ggagttgccctgcttacagtccctg

SEQ ID NO: 5067803 - DNA, 25 bp, Homo sapien
cacagttagctagaagatgcaaagc

SEQ ID NO: 5067804 - DNA, 25 bp, Homo sapien
gttgttttggacatcccacaggccc

SEQ ID NO: 5067805 - DNA, 25 bp, Homo sapien
gattcagagtaggtactggactcac

SEQ ID NO: 5067806 - DNA, 25 bp, Homo sapien
aggcacacgacaccacacctggcta

SEQ ID NO: 5067807 - DNA, 25 bp, Homo sapien
ggcacacgacaccacacctggctag

SEQ ID NO: 5067808 - DNA, 25 bp, Homo sapien
caaaaatggagtgcgaacaccatcc

SEQ ID NO: 5067809 - DNA, 25 bp, Homo sapien
gacagcaaaaatggagtgcgaacac

SEQ ID NO: 5067810 - DNA, 25 bp, Homo sapien
aatggagtgcgaacaccatccacca

SEQ ID NO: 5067811 - DNA, 25 bp, Homo sapien
cagcaaaaatggagtgcgaacacca

SEQ ID NO: 5067812 - DNA, 25 bp, Homo sapien
agcgctgctctagccaaatcatgtg

SEQ ID NO: 5067813 - DNA, 25 bp, Homo sapien
gtaagcgctgctctagccaaatcat

SEQ ID NO: 5067814 - DNA, 25 bp, Homo sapien
aatcatgtggcatcaggtctttata

SEQ ID NO: 5067815 - DNA, 25 bp, Homo sapien
gctgctctagccaaatcatgtggca

SEQ ID NO: 5067816 - DNA, 25 bp, Homo sapien
tttaagctagagaagaatcggccgg

SEQ ID NO: 5067817 - DNA, 25 bp, Homo sapien
taagctagagaagaatcggccgggc

SEQ ID NO: 5067818 - DNA, 25 bp, Homo sapien
ttaagctagagaagaatcggccggg

SEQ ID NO: 5067819 - DNA, 25 bp, Homo sapien
ttagggacactggtccgatgcaaca

SEQ ID NO: 5067820 - DNA, 25 bp, Homo sapien
agggacactggtccgatgcaacaaa

SEQ ID NO: 5067821 - DNA, 25 bp, Homo sapien
tagggacactggtccgatgcaacaa

SEQ ID NO: 5067822 - DNA, 25 bp, Homo sapien
ccttagggacactggtccgatgcaa

SEQ ID NO: 5067823 - DNA, 25 bp, Homo sapien
cagttgacagtgatactgaacccaa

SEQ ID NO: 5067824 - DNA, 25 bp, Homo sapien
cagttagtttcgtaggcttcagtca

SEQ ID NO: 5067825 - DNA, 25 bp, Homo sapien
ttcagtcatgccaggcctttggcag

SEQ ID NO: 5067826 - DNA, 25 bp, Homo sapien
caacaatatggcaagcacagaccag

SEQ ID NO: 5067827 - DNA, 25 bp, Homo sapien
tgaaatgatcactataagggaaggg

SEQ ID NO: 5067828 - DNA, 25 bp, Homo sapien
tgatcactataagggaagggcatca

SEQ ID NO: 5067829 - DNA, 25 bp, Homo sapien
cactataagggaagggcatcatgta

SEQ ID NO: 5067830 - DNA, 25 bp, Homo sapien
taagggaagggcatcatgtaaatga

SEQ ID NO: 5067831 - DNA, 25 bp, Homo sapien
ctgtggtcatggcttggttggcaga

SEQ ID NO: 5067832 - DNA, 25 bp, Homo sapien
tggtcatggcttggttggcagagat

SEQ ID NO: 5067833 - DNA, 25 bp, Homo sapien
gtggtcatggcttggttggcagaga

SEQ ID NO: 5067834 - DNA, 25 bp, Homo sapien
tgtggtcatggcttggttggcagag

SEQ ID NO: 5067835 - DNA, 25 bp, Homo sapien
taagagtactttttgggatgagcat

SEQ ID NO: 5067836 - DNA, 25 bp, Homo sapien
ttgggatcctaaggcaggatgatct

SEQ ID NO: 5067837 - DNA, 25 bp, Homo sapien
tctgttaagagtactttttgggatg

SEQ ID NO: 5067838 - DNA, 25 bp, Homo sapien
cttgggatcctaaggcaggatgatc

SEQ ID NO: 5067839 - DNA, 25 bp, Homo sapien
tagggacatcggacatcaactcaac

SEQ ID NO: 5067840 - DNA, 25 bp, Homo sapien
caggtgctaggaaattaaatcggaa

SEQ ID NO: 5067841 - DNA, 25 bp, Homo sapien
atcggaatttagagattaaagacag

SEQ ID NO: 5067842 - DNA, 25 bp, Homo sapien
gtcgctggcccatagatttggcctt

SEQ ID NO: 5067843 - DNA, 25 bp, Homo sapien
tgctaacacctaggattgttctgtg

SEQ ID NO: 5067844 - DNA, 25 bp, Homo sapien
gaaaggagatatccaaggagcaggt

SEQ ID NO: 5067845 - DNA, 25 bp, Homo sapien
gcaggtacactgttaaccggtgtta

SEQ ID NO: 5067846 - DNA, 25 bp, Homo sapien
caatcaagtccaagacaagcagagg

SEQ ID NO: 5067847 - DNA, 25 bp, Homo sapien
aaaggcagcggccagtcggtctgca

SEQ ID NO: 5067848 - DNA, 25 bp, Homo sapien
tcttggctagactgtgagagcgcag

SEQ ID NO: 5067849 - DNA, 25 bp, Homo sapien
gccttcttggctagactgtgagagc

SEQ ID NO: 5067850 - DNA, 25 bp, Homo sapien
tagactgtgagagcgcagtgcatat

SEQ ID NO: 5067851 - DNA, 25 bp, Homo sapien
taggacaccctattttcttaagaca

SEQ ID NO: 5067852 - DNA, 25 bp, Homo sapien
catacttatggaaaaatcactcggg

SEQ ID NO: 5067853 - DNA, 25 bp, Homo sapien
tatacagaagtcagacgattcagga

SEQ ID NO: 5067854 - DNA, 25 bp, Homo sapien
tgctcagatcttaaaaggacactct

SEQ ID NO: 5067855 - DNA, 25 bp, Homo sapien
tccagtgaggaaggacggatgccat

SEQ ID NO: 5067856 - DNA, 25 bp, Homo sapien
cagtgaggaaggacggatgccatta

SEQ ID NO: 5067857 - DNA, 25 bp, Homo sapien
tgtgccgtagggcttgatgaatgca

SEQ ID NO: 5067858 - DNA, 25 bp, Homo sapien
cgtagggcttgatgaatgcaggttt

SEQ ID NO: 5067859 - DNA, 25 bp, Homo sapien
aaatacaaataacattgacagttac

SEQ ID NO: 5067860 - DNA, 25 bp, Homo sapien
ctaaatacaaataacattgacagtt

SEQ ID NO: 5067861 - DNA, 25 bp, Homo sapien
taaatacaaataacattgacagtta

SEQ ID NO: 5067862 - DNA, 25 bp, Homo sapien
cacacaaaaagttatattaggcttt

SEQ ID NO: 5067863 - DNA, 25 bp, Homo sapien
agttatattaggcttttctacagag

SEQ ID NO: 5067864 - DNA, 25 bp, Homo sapien
tctacagagagtacagaaatagaaa

SEQ ID NO: 5067865 - DNA, 25 bp, Homo sapien
aggcttttctacagagagtacagaa

SEQ ID NO: 5067866 - DNA, 25 bp, Homo sapien
attaacattgcagatgcaccatcag

SEQ ID NO: 5067867 - DNA, 25 bp, Homo sapien
gattaacattgcagatgcaccatca

SEQ ID NO: 5067868 - DNA, 25 bp, Homo sapien
ttaacattgcagatgcaccatcagt

SEQ ID NO: 5067869 - DNA, 25 bp, Homo sapien
ctcaaatatgccttcggcttataac

SEQ ID NO: 5067870 - DNA, 25 bp, Homo sapien
ccaagtaatagttgatcttttggat

SEQ ID NO: 5067871 - DNA, 25 bp, Homo sapien
aatcctgccttttctagaacttttg

SEQ ID NO: 5067872 - DNA, 25 bp, Homo sapien
gaacttttggagtagcatatgttgg

SEQ ID NO: 5067873 - DNA, 25 bp, Homo sapien
agcatcaatatcattcatggtcaat

SEQ ID NO: 5067874 - DNA, 25 bp, Homo sapien
catcaatatcattcatggtcaatcc

SEQ ID NO: 5067875 - DNA, 25 bp, Homo sapien
tttttctacccatgtagttttctgc

SEQ ID NO: 5067876 - DNA, 25 bp, Homo sapien
ctacccatgtagttttctgcaaacc

SEQ ID NO: 5067877 - DNA, 25 bp, Homo sapien
tttctacccatgtagttttctgcaa

SEQ ID NO: 5067878 - DNA, 25 bp, Homo sapien
gttttctgcaaaccaatcagaatcc

SEQ ID NO: 5067879 - DNA, 25 bp, Homo sapien
acagagatccaccccagttattaaa

SEQ ID NO: 5067880 - DNA, 25 bp, Homo sapien
cagagatccaccccagttattaaac

SEQ ID NO: 5067881 - DNA, 25 bp, Homo sapien
gacagagatccaccccagttattaa

SEQ ID NO: 5067882 - DNA, 25 bp, Homo sapien
agagatccaccccagttattaaact

SEQ ID NO: 5067883 - DNA, 25 bp, Homo sapien
cacacgcagccactaagccatactg

SEQ ID NO: 5067884 - DNA, 25 bp, Homo sapien
gcacacgcagccactaagccatact

SEQ ID NO: 5067885 - DNA, 25 bp, Homo sapien
tgcacacgcagccactaagccatac

SEQ ID NO: 5067886 - DNA, 25 bp, Homo sapien
ggcacaagcagacaaaaaaagagca

SEQ ID NO: 5067887 - DNA, 25 bp, Homo sapien
tgaaagaattcataataaggtagac

SEQ ID NO: 5067888 - DNA, 25 bp, Homo sapien
tttgactgacttgggggttgtcctg

SEQ ID NO: 5067889 - DNA, 25 bp, Homo sapien
tcataataaggtagactactcctct

SEQ ID NO: 5067890 - DNA, 25 bp, Homo sapien
cataaacatgatacagcaaatacca

SEQ ID NO: 5067891 - DNA, 25 bp, Homo sapien
caaagctattaaggtaacagggcca

SEQ ID NO: 5067892 - DNA, 25 bp, Homo sapien
tcttcactattctacacaggttaag

SEQ ID NO: 5067893 - DNA, 25 bp, Homo sapien
gactcacccaaatcacaaagctatt

SEQ ID NO: 5067894 - DNA, 25 bp, Homo sapien
tatgcatcaggctctgtctagtaca

SEQ ID NO: 5067895 - DNA, 25 bp, Homo sapien
tttgtgggcatcacataacatacag

SEQ ID NO: 5067896 - DNA, 25 bp, Homo sapien
gcaatgaatggtgatgaatccacct

SEQ ID NO: 5067897 - DNA, 25 bp, Homo sapien
gaatccacctagtacagggacagca

SEQ ID NO: 5067898 - DNA, 25 bp, Homo sapien
gataagcttccactatcatagcatg

SEQ ID NO: 5067899 - DNA, 25 bp, Homo sapien
taagcttccactatcatagcatggc

SEQ ID NO: 5067900 - DNA, 25 bp, Homo sapien
aagcttccactatcatagcatggcc

SEQ ID NO: 5067901 - DNA, 25 bp, Homo sapien
ttggataagcttccactatcatagc

SEQ ID NO: 5067902 - DNA, 25 bp, Homo sapien
aatgcattgaaatggcattgcctag

SEQ ID NO: 5067903 - DNA, 25 bp, Homo sapien
caaatgtcatttagtaatgcattga

SEQ ID NO: 5067904 - DNA, 25 bp, Homo sapien
tgaaatggcattgcctagtgtgagt

SEQ ID NO: 5067905 - DNA, 25 bp, Homo sapien
tagaaggccacaagaactgttttcc

SEQ ID NO: 5067906 - DNA, 25 bp, Homo sapien
actttattaacgctgaccaccatat

SEQ ID NO: 5067907 - DNA, 25 bp, Homo sapien
cataattaattaggcacgttggttt

SEQ ID NO: 5067908 - DNA, 25 bp, Homo sapien
tatagagaacacatctttaggacac

SEQ ID NO: 5067909 - DNA, 25 bp, Homo sapien
ccacacatctcatgtgagattctgg

SEQ ID NO: 5067910 - DNA, 25 bp, Homo sapien
ttttaccatcctttagcctttggca

SEQ ID NO: 5067911 - DNA, 25 bp, Homo sapien
atgacttatggacccggaattgtgg

SEQ ID NO: 5067912 - DNA, 25 bp, Homo sapien
cataaggaaatttccaagctgccag

SEQ ID NO: 5067913 - DNA, 25 bp, Homo sapien
aatttttggttgatgggaaagctca

SEQ ID NO: 5067914 - DNA, 25 bp, Homo sapien
gtttctccgcatacatagcataagg

SEQ ID NO: 5067915 - DNA, 25 bp, Homo sapien
taattatttagatgcaccaaaccag

SEQ ID NO: 5067916 - DNA, 25 bp, Homo sapien
taatgccatcaactgcgtggcagtg

SEQ ID NO: 5067917 - DNA, 25 bp, Homo sapien
ggacacagccttgaacagagttaag

SEQ ID NO: 5067918 - DNA, 25 bp, Homo sapien
tgatttctatgacagctcggccgtt

SEQ ID NO: 5067919 - DNA, 25 bp, Homo sapien
acaggaacctctgatctttcaaaca

SEQ ID NO: 5067920 - DNA, 25 bp, Homo sapien
gacaggaacctctgatctttcaaac

SEQ ID NO: 5067921 - DNA, 25 bp, Homo sapien
gcagaagttgggctcagtatccact

SEQ ID NO: 5067922 - DNA, 25 bp, Homo sapien
tcacgccttgaagggattgccatgg

SEQ ID NO: 5067923 - DNA, 25 bp, Homo sapien
taattatcatgagagtcacgccttg

SEQ ID NO: 5067924 - DNA, 25 bp, Homo sapien
gacagatgcttcagagtgaaccaca

SEQ ID NO: 5067925 - DNA, 25 bp, Homo sapien
accatgctcagcccttaaaatgcat

SEQ ID NO: 5067926 - DNA, 25 bp, Homo sapien
ccatgctcagcccttaaaatgcatt

SEQ ID NO: 5067927 - DNA, 25 bp, Homo sapien
catgctcagcccttaaaatgcattt

SEQ ID NO: 5067928 - DNA, 25 bp, Homo sapien
atgctcagcccttaaaatgcatttt

SEQ ID NO: 5067929 - DNA, 25 bp, Homo sapien
tgacacacaagcaccacaccggctg

SEQ ID NO: 5067930 - DNA, 25 bp, Homo sapien
ggcagcgactcccggctacaaggct

SEQ ID NO: 5067931 - DNA, 25 bp, Homo sapien
accacaccggctgggcaaggatggc

SEQ ID NO: 5067932 - DNA, 25 bp, Homo sapien
agcgactcccggctacaaggctgtg

SEQ ID NO: 5067933 - DNA, 25 bp, Homo sapien
tgctccgggctcacgtattcgtagc

SEQ ID NO: 5067934 - DNA, 25 bp, Homo sapien
cgggctcacgtattcgtagccagcc

SEQ ID NO: 5067935 - DNA, 25 bp, Homo sapien
tccgggctcacgtattcgtagccag

SEQ ID NO: 5067936 - DNA, 25 bp, Homo sapien
ggctcacgtattcgtagccagccat

SEQ ID NO: 5067937 - DNA, 25 bp, Homo sapien
gaattccctcgctccatgatcactg

SEQ ID NO: 5067938 - DNA, 25 bp, Homo sapien
gcacaaggtgacacggaccgcgccg

SEQ ID NO: 5067939 - DNA, 25 bp, Homo sapien
ggagccacgcggcacaaggtgacac

SEQ ID NO: 5067940 - DNA, 25 bp, Homo sapien
ggcttaggatgctcccacgctcccc

SEQ ID NO: 5067941 - DNA, 25 bp, Homo sapien
tgcatgacaggcgagtggaaacttc

SEQ ID NO: 5067942 - DNA, 25 bp, Homo sapien
gaaggcgattgacacaacagaagga

SEQ ID NO: 5067943 - DNA, 25 bp, Homo sapien
tcctccgaagttgtatgcatgacag

SEQ ID NO: 5067944 - DNA, 25 bp, Homo sapien
cagcaggatggcatcggcaagtcgc

SEQ ID NO: 5067945 - DNA, 25 bp, Homo sapien
ttcatctggtggccctagcgccaca

SEQ ID NO: 5067946 - DNA, 25 bp, Homo sapien
catctggtggccctagcgccacaag

SEQ ID NO: 5067947 - DNA, 25 bp, Homo sapien
ccctttcatctggtggccctagcgc

SEQ ID NO: 5067948 - DNA, 25 bp, Homo sapien
ctttcatctggtggccctagcgcca

SEQ ID NO: 5067949 - DNA, 25 bp, Homo sapien
catacacaaaagagaggctgagcgg

SEQ ID NO: 5067950 - DNA, 25 bp, Homo sapien
gggtcctagtatgttgccaagcgct

SEQ ID NO: 5067951 - DNA, 25 bp, Homo sapien
tttgtatgtgctcgaaagcccgcgc

SEQ ID NO: 5067952 - DNA, 25 bp, Homo sapien
ggttaaaatgacgtgcccaagacga

SEQ ID NO: 5067953 - DNA, 25 bp, Homo sapien
gacacgctaaagcagcaattccata

SEQ ID NO: 5067954 - DNA, 25 bp, Homo sapien
cattatattctaatggcgagacacg

SEQ ID NO: 5067955 - DNA, 25 bp, Homo sapien
taatggcgagacacgctaaagcagc

SEQ ID NO: 5067956 - DNA, 25 bp, Homo sapien
aattccataaacgaacagagcgcac

SEQ ID NO: 5067957 - DNA, 25 bp, Homo sapien
aagacaagtcatcacctcggttcag

SEQ ID NO: 5067958 - DNA, 25 bp, Homo sapien
tggcccgagttaccaagaaggctct

SEQ ID NO: 5067959 - DNA, 25 bp, Homo sapien
tatggcacaatacggcttgaaagca

SEQ ID NO: 5067960 - DNA, 25 bp, Homo sapien
gaaagttgaaaagcactggcccgag

SEQ ID NO: 5067961 - DNA, 25 bp, Homo sapien
agtaaggaagaaaatgttttatatg

SEQ ID NO: 5067962 - DNA, 25 bp, Homo sapien
tatctgtcaggtttccaactgtagc

SEQ ID NO: 5067963 - DNA, 25 bp, Homo sapien
tggacgcttgctaaatcgacctttg

SEQ ID NO: 5067964 - DNA, 25 bp, Homo sapien
tgttcaagcaaaactgatcccatgg

SEQ ID NO: 5067965 - DNA, 25 bp, Homo sapien
caatagcgaatgcaagtgtcaatac

SEQ ID NO: 5067966 - DNA, 25 bp, Homo sapien
tgtctaaagaccttatctaacttct

SEQ ID NO: 5067967 - DNA, 25 bp, Homo sapien
gaggccttcatcactttacactcca

SEQ ID NO: 5067968 - DNA, 25 bp, Homo sapien
ttcccagaaaataccgaggccttca

SEQ ID NO: 5067969 - DNA, 25 bp, Homo sapien
aaagaccttatctaacttcttgtgg

SEQ ID NO: 5067970 - DNA, 25 bp, Homo sapien
caggcctttctcacgtggactgcaa

SEQ ID NO: 5067971 - DNA, 25 bp, Homo sapien
cacaaacatgtggtctagggcaaaa

SEQ ID NO: 5067972 - DNA, 25 bp, Homo sapien
ccgggacaactaaatcatactgcag

SEQ ID NO: 5067973 - DNA, 25 bp, Homo sapien
tcaagactgctattatggaccgggc

SEQ ID NO: 5067974 - DNA, 25 bp, Homo sapien
tcgccaagataatcactgactcatc

SEQ ID NO: 5067975 - DNA, 25 bp, Homo sapien
aaagatcaacccaaatcgcagagtt

SEQ ID NO: 5067976 - DNA, 25 bp, Homo sapien
taaatgaggcaaagactatcaagca

SEQ ID NO: 5067977 - DNA, 25 bp, Homo sapien
tctgagtagcaaaactggaatagca

SEQ ID NO: 5067978 - DNA, 25 bp, Homo sapien
tacagagaaagtggattggtatcca

SEQ ID NO: 5067979 - DNA, 25 bp, Homo sapien
gaaagtggattggtatccacagcac

SEQ ID NO: 5067980 - DNA, 25 bp, Homo sapien
ctttactatagtgttccagaatgga

SEQ ID NO: 5067981 - DNA, 25 bp, Homo sapien
actatagtgttccagaatggatgca

SEQ ID NO: 5067982 - DNA, 25 bp, Homo sapien
aaattgaatacgaccagcagaaagc

SEQ ID NO: 5067983 - DNA, 25 bp, Homo sapien
gaaaattgaatacgaccagcagaaa

SEQ ID NO: 5067984 - DNA, 25 bp, Homo sapien
cagaaaattgaatacgaccagcaga

SEQ ID NO: 5067985 - DNA, 25 bp, Homo sapien
attgaatacgaccagcagaaagcca

SEQ ID NO: 5067986 - DNA, 25 bp, Homo sapien
ctgaggcataaaagtcaggatcaaa

SEQ ID NO: 5067987 - DNA, 25 bp, Homo sapien
caaacccagtcaggcacgtgcttgt

SEQ ID NO: 5067988 - DNA, 25 bp, Homo sapien
tgaggatgcccactacaatccaaac

SEQ ID NO: 5067989 - DNA, 25 bp, Homo sapien
ctagagtgtaggctacgaagttgag

SEQ ID NO: 5067990 - DNA, 25 bp, Homo sapien
gtcaggcacgtgcttgtgacctggt

SEQ ID NO: 5067991 - DNA, 25 bp, Homo sapien
catgttcgttcaagactggtttgca

SEQ ID NO: 5067992 - DNA, 25 bp, Homo sapien
tccccagtaggacatagagcagcat

SEQ ID NO: 5067993 - DNA, 25 bp, Homo sapien
catgtcagaccagggtttttgccag

SEQ ID NO: 5067994 - DNA, 25 bp, Homo sapien
gcatcctgtgatcaaacatcttagt

SEQ ID NO: 5067995 - DNA, 25 bp, Homo sapien
cgtatgcaccaggatggagaaagtc

SEQ ID NO: 5067996 - DNA, 25 bp, Homo sapien
aacgtatgcaccaggatggagaaag

SEQ ID NO: 5067997 - DNA, 25 bp, Homo sapien
tatgcaccaggatggagaaagtctt

SEQ ID NO: 5067998 - DNA, 25 bp, Homo sapien
tcaacgtatgcaccaggatggagaa

SEQ ID NO: 5067999 - DNA, 25 bp, Homo sapien
aattggttctgcgagcttgctttcc

SEQ ID NO: 5068000 - DNA, 25 bp, Homo sapien
tatccaggccatgatcaaaaagctc

SEQ ID NO: 5068001 - DNA, 25 bp, Homo sapien
taaacacatgaccaactatccaggc

SEQ ID NO: 5068002 - DNA, 25 bp, Homo sapien
gctaatgtcatatccccatggcagg

SEQ ID NO: 5068003 - DNA, 25 bp, Homo sapien
ccaaaagtatcatggtaatactgaa

SEQ ID NO: 5068004 - DNA, 25 bp, Homo sapien
ctaagagcaataaataagcaatgac

SEQ ID NO: 5068005 - DNA, 25 bp, Homo sapien
catatcaattctaatcaaaaaagcc

SEQ ID NO: 5068006 - DNA, 25 bp, Homo sapien
ctcagcaatgggtacattagggtct

SEQ ID NO: 5068007 - DNA, 25 bp, Homo sapien
attaaacaggaaaggttcataccag

SEQ ID NO: 5068008 - DNA, 25 bp, Homo sapien
caataatcattgcagtgaataggtc

SEQ ID NO: 5068009 - DNA, 25 bp, Homo sapien
cacaactgcagtcactatgtagaca

SEQ ID NO: 5068010 - DNA, 25 bp, Homo sapien
gtgaataggtctctatataagaaat

SEQ ID NO: 5068011 - DNA, 25 bp, Homo sapien
tgaacagaagaatctcaacagagaa

SEQ ID NO: 5068012 - DNA, 25 bp, Homo sapien
tgttggactcagtagacagacttta

SEQ ID NO: 5068013 - DNA, 25 bp, Homo sapien
atgaacagaagaatctcaacagaga

SEQ ID NO: 5068014 - DNA, 25 bp, Homo sapien
cccagatgttggactcagtagacag

SEQ ID NO: 5068015 - DNA, 25 bp, Homo sapien
tagctacttccattcgcacactggt

SEQ ID NO: 5068016 - DNA, 25 bp, Homo sapien
tctcctacgtcaggcttctgagcag

SEQ ID NO: 5068017 - DNA, 25 bp, Homo sapien
gattacgggacttcaggcaaattgg

SEQ ID NO: 5068018 - DNA, 25 bp, Homo sapien
tgtaccaaccccacagagctttgag

SEQ ID NO: 5068019 - DNA, 25 bp, Homo sapien
ggaagagtcacacataatgcacaac

SEQ ID NO: 5068020 - DNA, 25 bp, Homo sapien
aataaactcattggaagagtcacac

SEQ ID NO: 5068021 - DNA, 25 bp, Homo sapien
aagtggagaagcacatagatcagag

SEQ ID NO: 5068022 - DNA, 25 bp, Homo sapien
aaaatatattcaggacacaataggc

SEQ ID NO: 5068023 - DNA, 25 bp, Homo sapien
tcagtgtggctgagcaaaagtggag

SEQ ID NO: 5068024 - DNA, 25 bp, Homo sapien
gagaaatgaaactccacctgagcat

SEQ ID NO: 5068025 - DNA, 25 bp, Homo sapien
caataatcttgtggcatagacagaa

SEQ ID NO: 5068026 - DNA, 25 bp, Homo sapien
agacaggctaagtgaggataagaga

SEQ ID NO: 5068027 - DNA, 25 bp, Homo sapien
caggctaagtgaggataagagaatt

SEQ ID NO: 5068028 - DNA, 25 bp, Homo sapien
tttatactcacaataatcttgtggc

SEQ ID NO: 5068029 - DNA, 25 bp, Homo sapien
tcatagactgaattgagtttcaagg

SEQ ID NO: 5068030 - DNA, 25 bp, Homo sapien
gactgaattgagtttcaaggtgtta

SEQ ID NO: 5068031 - DNA, 25 bp, Homo sapien
gagaaaataagggaaccatagcttc

SEQ ID NO: 5068032 - DNA, 25 bp, Homo sapien
gggaaccatagcttcatagactgaa

SEQ ID NO: 5068033 - DNA, 25 bp, Homo sapien
aaaatatctgaaggtgaccaaagga

SEQ ID NO: 5068034 - DNA, 25 bp, Homo sapien
taaaatatctgaaggtgaccaaagg

SEQ ID NO: 5068035 - DNA, 25 bp, Homo sapien
aatatctgaaggtgaccaaaggatc

SEQ ID NO: 5068036 - DNA, 25 bp, Homo sapien
tctaaaatatctgaaggtgaccaaa

SEQ ID NO: 5068037 - DNA, 25 bp, Homo sapien
tactgttggcaaaagctgttccaac

SEQ ID NO: 5068038 - DNA, 25 bp, Homo sapien
ttggcaaaagctgttccaaccataa

SEQ ID NO: 5068039 - DNA, 25 bp, Homo sapien
gcaaaagctgttccaaccataaagt

SEQ ID NO: 5068040 - DNA, 25 bp, Homo sapien
tgtactgttggcaaaagctgttcca

SEQ ID NO: 5068041 - DNA, 25 bp, Homo sapien
tcatttggcaaacaatcagctgaca

SEQ ID NO: 5068042 - DNA, 25 bp, Homo sapien
gaggaaccagcaaccaattcaaagt

SEQ ID NO: 5068043 - DNA, 25 bp, Homo sapien
ccagcaaccaattcaaagttggaca

SEQ ID NO: 5068044 - DNA, 25 bp, Homo sapien
aagttggacaccgggtactactcat

SEQ ID NO: 5068045 - DNA, 25 bp, Homo sapien
gatgtgggccagagtaaaagcagtt

SEQ ID NO: 5068046 - DNA, 25 bp, Homo sapien
ggagaatgctctcaacgtaagaggc

SEQ ID NO: 5068047 - DNA, 25 bp, Homo sapien
taagaggctactcctaggtttacca

SEQ ID NO: 5068048 - DNA, 25 bp, Homo sapien
taatgtatacaggagaatgctctca

SEQ ID NO: 5068049 - DNA, 25 bp, Homo sapien
cagggtttcacactgttacccaggg

SEQ ID NO: 5068050 - DNA, 25 bp, Homo sapien
ctcctgagctaaagcgatccacccg

SEQ ID NO: 5068051 - DNA, 25 bp, Homo sapien
ctcagcctctcaaagggctaggatt

SEQ ID NO: 5068052 - DNA, 25 bp, Homo sapien
aagggctaggattacaggcatgagc

SEQ ID NO: 5068053 - DNA, 25 bp, Homo sapien
tgagtttggtttcctcaatgagaag

SEQ ID NO: 5068054 - DNA, 25 bp, Homo sapien
atctgaaaatggctgctcagctgct

SEQ ID NO: 5068055 - DNA, 25 bp, Homo sapien
taaatctgaaaatggctgctcagct

SEQ ID NO: 5068056 - DNA, 25 bp, Homo sapien
caatgagaaggggtaaatctgaaaa

SEQ ID NO: 5068057 - DNA, 25 bp, Homo sapien
tgagatcccacgtctgtcaagcaga

SEQ ID NO: 5068058 - DNA, 25 bp, Homo sapien
tcccaatgggtgagcgataattaca

SEQ ID NO: 5068059 - DNA, 25 bp, Homo sapien
cattaccataggactgggactgtca

SEQ ID NO: 5068060 - DNA, 25 bp, Homo sapien
tatagaaccatgagttagtgccgtg

SEQ ID NO: 5068061 - DNA, 25 bp, Homo sapien
ttacctattcgtggaagaatgacac

SEQ ID NO: 5068062 - DNA, 25 bp, Homo sapien
gcattagcattctctatccaggtat

SEQ ID NO: 5068063 - DNA, 25 bp, Homo sapien
cactgtaaactgtggcaatgtcaaa

SEQ ID NO: 5068064 - DNA, 25 bp, Homo sapien
ggtattcactctgttacccttaaga

SEQ ID NO: 5068065 - DNA, 25 bp, Homo sapien
ggtagataagaggaaacccaggtga

SEQ ID NO: 5068066 - DNA, 25 bp, Homo sapien
tcaaagtctgttatggaagcaaggt

SEQ ID NO: 5068067 - DNA, 25 bp, Homo sapien
ggtaactctagacatacactcccct

SEQ ID NO: 5068068 - DNA, 25 bp, Homo sapien
caggctccaggtcataatcaatact

SEQ ID NO: 5068069 - DNA, 25 bp, Homo sapien
tggcacgttcccagtccttgactag

SEQ ID NO: 5068070 - DNA, 25 bp, Homo sapien
taaggccatcaaggagatgtgaatg

SEQ ID NO: 5068071 - DNA, 25 bp, Homo sapien
acgttcccagtccttgactagtcaa

SEQ ID NO: 5068072 - DNA, 25 bp, Homo sapien
gtcaagagatctaaggccatcaagg

SEQ ID NO: 5068073 - DNA, 25 bp, Homo sapien
tgtccagagcatcatacgttcaagt

SEQ ID NO: 5068074 - DNA, 25 bp, Homo sapien
gacttacaaagacacctcatgggac

SEQ ID NO: 5068075 - DNA, 25 bp, Homo sapien
ccagaactgaggtcaagataaggcc

SEQ ID NO: 5068076 - DNA, 25 bp, Homo sapien
gaagcatatcaccactttctctgga

SEQ ID NO: 5068077 - DNA, 25 bp, Homo sapien
cagcagggagtttacatgttggcaa

SEQ ID NO: 5068078 - DNA, 25 bp, Homo sapien
aaacatattccagttgctcaagcgg

SEQ ID NO: 5068079 - DNA, 25 bp, Homo sapien
gcttcagagtaagggccacatgcag

SEQ ID NO: 5068080 - DNA, 25 bp, Homo sapien
tcttgcagaattataacaggctcct

SEQ ID NO: 5068081 - DNA, 25 bp, Homo sapien
gagtccctggtccctaggcggctcc

SEQ ID NO: 5068082 - DNA, 25 bp, Homo sapien
gcaggagtccctggtccctaggcgg

SEQ ID NO: 5068083 - DNA, 25 bp, Homo sapien
aggagtccctggtccctaggcggct

SEQ ID NO: 5068084 - DNA, 25 bp, Homo sapien
ggagtccctggtccctaggcggctc

SEQ ID NO: 5068085 - DNA, 25 bp, Homo sapien
gaccgagggcgcgagaatctgggtg

SEQ ID NO: 5068086 - DNA, 25 bp, Homo sapien
ccgggcttctaagcgcgcagcgatg

SEQ ID NO: 5068087 - DNA, 25 bp, Homo sapien
atctgggtggacaagtgctcgtcca

SEQ ID NO: 5068088 - DNA, 25 bp, Homo sapien
ctcctgagagttgtcggagtggacc

SEQ ID NO: 5068089 - DNA, 25 bp, Homo sapien
ttcaactgagactgagaagcaggct

SEQ ID NO: 5068090 - DNA, 25 bp, Homo sapien
tcggacgaagtaagccaaggagtct

SEQ ID NO: 5068091 - DNA, 25 bp, Homo sapien
cattaggcttacatgtgcacggaac

SEQ ID NO: 5068092 - DNA, 25 bp, Homo sapien
ggagaaaactcattacgcacgtgca

SEQ ID NO: 5068093 - DNA, 25 bp, Homo sapien
tgtttgtagctcttgctttgatcct

SEQ ID NO: 5068094 - DNA, 25 bp, Homo sapien
gtttgtagctcttgctttgatcctc

SEQ ID NO: 5068095 - DNA, 25 bp, Homo sapien
ctctctgatatctatagccacctgg

SEQ ID NO: 5068096 - DNA, 25 bp, Homo sapien
tctgatatctatagccacctggata

SEQ ID NO: 5068097 - DNA, 25 bp, Homo sapien
atttgtcaccaactcggtgccacag

SEQ ID NO: 5068098 - DNA, 25 bp, Homo sapien
atatttgtcaccaactcggtgccac

SEQ ID NO: 5068099 - DNA, 25 bp, Homo sapien
ccacgtttactggtagggctgctaa

SEQ ID NO: 5068100 - DNA, 25 bp, Homo sapien
tattgttaaaatcgacccctgtgtg

SEQ ID NO: 5068101 - DNA, 25 bp, Homo sapien
gagggaactgcttatgctgaacaac

SEQ ID NO: 5068102 - DNA, 25 bp, Homo sapien
ctgctaaagttgctaaagagggaac

SEQ ID NO: 5068103 - DNA, 25 bp, Homo sapien
tgatttcatcgaatttgtcctggct

SEQ ID NO: 5068104 - DNA, 25 bp, Homo sapien
ccactttgaggtgatttcatcgaat

SEQ ID NO: 5068105 - DNA, 25 bp, Homo sapien
cccactttgaggtgatttcatcgaa

SEQ ID NO: 5068106 - DNA, 25 bp, Homo sapien
atttcatcgaatttgtcctggctgg

SEQ ID NO: 5068107 - DNA, 25 bp, Homo sapien
agtgcagctgttgggtattgagcat

SEQ ID NO: 5068108 - DNA, 25 bp, Homo sapien
tgagtttattcttatcttctaagag

SEQ ID NO: 5068109 - DNA, 25 bp, Homo sapien
gagtttattcttatcttctaagagt

SEQ ID NO: 5068110 - DNA, 25 bp, Homo sapien
aatcccaggcagatcccctgtggct

SEQ ID NO: 5068111 - DNA, 25 bp, Homo sapien
ctcacgaaaggttttcatcacattc

SEQ ID NO: 5068112 - DNA, 25 bp, Homo sapien
catactggtcatcctttgtttttaa

SEQ ID NO: 5068113 - DNA, 25 bp, Homo sapien
cttcaaatccttcacatactggtca

SEQ ID NO: 5068114 - DNA, 25 bp, Homo sapien
tgttatagagctcctcacgaaaggt

SEQ ID NO: 5068115 - DNA, 25 bp, Homo sapien
cagtcccgtggcttagtcaatatca

SEQ ID NO: 5068116 - DNA, 25 bp, Homo sapien
tatgaagacgatactccaaatgcgg

SEQ ID NO: 5068117 - DNA, 25 bp, Homo sapien
caaatgcggagaggagatgtgccaa

SEQ ID NO: 5068118 - DNA, 25 bp, Homo sapien
ccaaatggctatggaaggagctgca

SEQ ID NO: 5068119 - DNA, 25 bp, Homo sapien
gctcttggcgttccacctcaaatgc

SEQ ID NO: 5068120 - DNA, 25 bp, Homo sapien
ttcttcttattactggccagtagct

SEQ ID NO: 5068121 - DNA, 25 bp, Homo sapien
tgagcctgaagggcttgctcccatt

SEQ ID NO: 5068122 - DNA, 25 bp, Homo sapien
ttattactggccagtagctcttggc

SEQ ID NO: 5068123 - DNA, 25 bp, Homo sapien
cccagatcctctgcctgttcagctg

SEQ ID NO: 5068124 - DNA, 25 bp, Homo sapien
tcatgcggttgttaagatactccag

SEQ ID NO: 5068125 - DNA, 25 bp, Homo sapien
gatcttgatcatgttgtattcttcg

SEQ ID NO: 5068126 - DNA, 25 bp, Homo sapien
cctctactttcttcatgcggttgtt

SEQ ID NO: 5068127 - DNA, 25 bp, Homo sapien
ggagagactcacttgatggctgcca

SEQ ID NO: 5068128 - DNA, 25 bp, Homo sapien
ggaacgcccttctgaatattagaca

SEQ ID NO: 5068129 - DNA, 25 bp, Homo sapien
tggctgccattattaccagtagctg

SEQ ID NO: 5068130 - DNA, 25 bp, Homo sapien
gaatccagggtttatcgtgtactag

SEQ ID NO: 5068131 - DNA, 25 bp, Homo sapien
tggtttagctgataaattgctttcc

SEQ ID NO: 5068132 - DNA, 25 bp, Homo sapien
gtttagctgataaattgctttcctc

SEQ ID NO: 5068133 - DNA, 25 bp, Homo sapien
cttggtttagctgataaattgcttt

SEQ ID NO: 5068134 - DNA, 25 bp, Homo sapien
tagctgataaattgctttcctctgc

SEQ ID NO: 5068135 - DNA, 25 bp, Homo sapien
tctgtagctccttgaattgcatcac

SEQ ID NO: 5068136 - DNA, 25 bp, Homo sapien
agtccgaggttagagactggttctc

SEQ ID NO: 5068137 - DNA, 25 bp, Homo sapien
cacaagacgtttgtagtccgaggtt

SEQ ID NO: 5068138 - DNA, 25 bp, Homo sapien
cagattgttaagtatatcatgcagg

SEQ ID NO: 5068139 - DNA, 25 bp, Homo sapien
gctgctgagaaataggcccaacatt

SEQ ID NO: 5068140 - DNA, 25 bp, Homo sapien
aggctctggctattaggtccttcgc

SEQ ID NO: 5068141 - DNA, 25 bp, Homo sapien
tactatctgtgtggcggacttctgg

SEQ ID NO: 5068142 - DNA, 25 bp, Homo sapien
gcccaacattgttcaggaaccagaa

SEQ ID NO: 5068143 - DNA, 25 bp, Homo sapien
ggagcatcaggatcctcttggtagt

SEQ ID NO: 5068144 - DNA, 25 bp, Homo sapien
ttcggcaaatccaggtaggactctg

SEQ ID NO: 5068145 - DNA, 25 bp, Homo sapien
taggactctggttccgcggcggcct

SEQ ID NO: 5068146 - DNA, 25 bp, Homo sapien
cagaaatttgcttcggcaaatccag

SEQ ID NO: 5068147 - DNA, 25 bp, Homo sapien
gcttcacccatagtcttgtccccaa

SEQ ID NO: 5068148 - DNA, 25 bp, Homo sapien
ctgcttcacccatagtcttgtcccc

SEQ ID NO: 5068149 - DNA, 25 bp, Homo sapien
ttcacccatagtcttgtccccaaat

SEQ ID NO: 5068150 - DNA, 25 bp, Homo sapien
cacccatagtcttgtccccaaatat

SEQ ID NO: 5068151 - DNA, 25 bp, Homo sapien
gctcagcagcttgctctctatgagg

SEQ ID NO: 5068152 - DNA, 25 bp, Homo sapien
gcagcttgctctctatgaggaaccc

SEQ ID NO: 5068153 - DNA, 25 bp, Homo sapien
cctcagcagatagcattcattctgc

SEQ ID NO: 5068154 - DNA, 25 bp, Homo sapien
aggagaaggctcagcagcttgctct

SEQ ID NO: 5068155 - DNA, 25 bp, Homo sapien
gatatttaaggaagaagttcaccag

SEQ ID NO: 5068156 - DNA, 25 bp, Homo sapien
caccagtttatacaagtcatcctca

SEQ ID NO: 5068157 - DNA, 25 bp, Homo sapien
gctggaagataaacggtgagctcga

SEQ ID NO: 5068158 - DNA, 25 bp, Homo sapien
tcatcctcactttcaattccaaggg

SEQ ID NO: 5068159 - DNA, 25 bp, Homo sapien
gccttctccatgctcgcctgactgc

SEQ ID NO: 5068160 - DNA, 25 bp, Homo sapien
tctccatgctcgcctgactgcaggg

SEQ ID NO: 5068161 - DNA, 25 bp, Homo sapien
tccatgctcgcctgactgcagggct

SEQ ID NO: 5068162 - DNA, 25 bp, Homo sapien
ttctccatgctcgcctgactgcagg

SEQ ID NO: 5068163 - DNA, 25 bp, Homo sapien
ctccctccatctccgtctgctctgc

SEQ ID NO: 5068164 - DNA, 25 bp, Homo sapien
ccctccatctccgtctgctctgcca

SEQ ID NO: 5068165 - DNA, 25 bp, Homo sapien
cttctccccttccaccaggctttct

SEQ ID NO: 5068166 - DNA, 25 bp, Homo sapien
tccatctccgtctgctctgccagct

SEQ ID NO: 5068167 - DNA, 25 bp, Homo sapien
acatcattggggtggatgacccagg

SEQ ID NO: 5068168 - DNA, 25 bp, Homo sapien
tgaggacatcattggggtggatgac

SEQ ID NO: 5068169 - DNA, 25 bp, Homo sapien
cttgaggacatcattggggtggatg

SEQ ID NO: 5068170 - DNA, 25 bp, Homo sapien
aggacatcattggggtggatgaccc

SEQ ID NO: 5068171 - DNA, 25 bp, Homo sapien
tcttcagacccatgacgaaggcctc

SEQ ID NO: 5068172 - DNA, 25 bp, Homo sapien
gacccatgacgaaggcctccagaat

SEQ ID NO: 5068173 - DNA, 25 bp, Homo sapien
ttcagacccatgacgaaggcctcca

SEQ ID NO: 5068174 - DNA, 25 bp, Homo sapien
agacccatgacgaaggcctccagaa

SEQ ID NO: 5068175 - DNA, 25 bp, Homo sapien
agggcctgccagtactccgagtcct

SEQ ID NO: 5068176 - DNA, 25 bp, Homo sapien
cgagtccttggagttgtcacgcaca

SEQ ID NO: 5068177 - DNA, 25 bp, Homo sapien
tgtcacgcacattcttctgtaccct

SEQ ID NO: 5068178 - DNA, 25 bp, Homo sapien
gaagggatcactgtggtcagggcct

SEQ ID NO: 5068179 - DNA, 25 bp, Homo sapien
agttcagatactgctgcagtagcgc

SEQ ID NO: 5068180 - DNA, 25 bp, Homo sapien
tggagttcagatactgctgcagtag

SEQ ID NO: 5068181 - DNA, 25 bp, Homo sapien
gcagtagcgcctgcagctctgtgtt

SEQ ID NO: 5068182 - DNA, 25 bp, Homo sapien
gctgcagtagcgcctgcagctctgt

SEQ ID NO: 5068183 - DNA, 25 bp, Homo sapien
gtagcatctgtggaagcgggaacca

SEQ ID NO: 5068184 - DNA, 25 bp, Homo sapien
tgtggaagcgggaaccataccgtcc

SEQ ID NO: 5068185 - DNA, 25 bp, Homo sapien
ccataccgtccagaatgtctgggtc

SEQ ID NO: 5068186 - DNA, 25 bp, Homo sapien
gcgggaaccataccgtccagaatgt

SEQ ID NO: 5068187 - DNA, 25 bp, Homo sapien
tgccatccccaatctagcctgcccc

SEQ ID NO: 5068188 - DNA, 25 bp, Homo sapien
ccatgccatccccaatctagcctgc

SEQ ID NO: 5068189 - DNA, 25 bp, Homo sapien
atgccatccccaatctagcctgccc

SEQ ID NO: 5068190 - DNA, 25 bp, Homo sapien
ccatccccaatctagcctgccccac

SEQ ID NO: 5068191 - DNA, 25 bp, Homo sapien
tcattttgtgggtacccgcaacacc

SEQ ID NO: 5068192 - DNA, 25 bp, Homo sapien
tttgtgggtacccgcaacacctgag

SEQ ID NO: 5068193 - DNA, 25 bp, Homo sapien
cattttgtgggtacccgcaacacct

SEQ ID NO: 5068194 - DNA, 25 bp, Homo sapien
attttgtgggtacccgcaacacctg

SEQ ID NO: 5068195 - DNA, 25 bp, Homo sapien
ccagtgggtgatatgagctggctcc

SEQ ID NO: 5068196 - DNA, 25 bp, Homo sapien
gctataaagacagccctggaaaatc

SEQ ID NO: 5068197 - DNA, 25 bp, Homo sapien
cctctggctccttatttcgacaggc

SEQ ID NO: 5068198 - DNA, 25 bp, Homo sapien
aacacatcagcctttggcggtccag

SEQ ID NO: 5068199 - DNA, 25 bp, Homo sapien
ctgagtgggcctggctttttcctgc

SEQ ID NO: 5068200 - DNA, 25 bp, Homo sapien
gcaggggtgcttgggccctgcttcc

SEQ ID NO: 5068201 - DNA, 25 bp, Homo sapien
tgggcctggctttttcctgcacgca

SEQ ID NO: 5068202 - DNA, 25 bp, Homo sapien
gctttttcctgcacgcaggggtgct

SEQ ID NO: 5068203 - DNA, 25 bp, Homo sapien
caggccccttggctgctttcccagc

SEQ ID NO: 5068204 - DNA, 25 bp, Homo sapien
tggcaaacatggagacatcagggtg

SEQ ID NO: 5068205 - DNA, 25 bp, Homo sapien
gacctggcatagaagtgggagcaag

SEQ ID NO: 5068206 - DNA, 25 bp, Homo sapien
gcaaacatggagacatcagggtgga

SEQ ID NO: 5068207 - DNA, 25 bp, Homo sapien
gcgagtacagcgagcctggcgctcc

SEQ ID NO: 5068208 - DNA, 25 bp, Homo sapien
agtacagcgagcctggcgctccgct

SEQ ID NO: 5068209 - DNA, 25 bp, Homo sapien
gtgcgcgagtacagcgagcctggcg

SEQ ID NO: 5068210 - DNA, 25 bp, Homo sapien
ggtgggtgcgcgagtacagcgagcc

SEQ ID NO: 5068211 - DNA, 25 bp, Homo sapien
taggcggcattgaactcggtcagta

SEQ ID NO: 5068212 - DNA, 25 bp, Homo sapien
cggcattgaactcggtcagtagggt

SEQ ID NO: 5068213 - DNA, 25 bp, Homo sapien
tgaactcggtcagtagggtgcccgc

SEQ ID NO: 5068214 - DNA, 25 bp, Homo sapien
gcacgtaggcggcattgaactcggt

SEQ ID NO: 5068215 - DNA, 25 bp, Homo sapien
tgaatttcgatcaccgaggagggcg

SEQ ID NO: 5068216 - DNA, 25 bp, Homo sapien
ctgaatttcgatcaccgaggagggc

SEQ ID NO: 5068217 - DNA, 25 bp, Homo sapien
ggggctgaatttcgatcaccgagga

SEQ ID NO: 5068218 - DNA, 25 bp, Homo sapien
ggctgaatttcgatcaccgaggagg

SEQ ID NO: 5068219 - DNA, 25 bp, Homo sapien
ggacggaagggcctgattttctcgc

SEQ ID NO: 5068220 - DNA, 25 bp, Homo sapien
tgcgccggacggaagggcctgattt

SEQ ID NO: 5068221 - DNA, 25 bp, Homo sapien
gtgctggccctgtgcgccggacgga

SEQ ID NO: 5068222 - DNA, 25 bp, Homo sapien
gaagggcctgattttctcgcatttt

SEQ ID NO: 5068223 - DNA, 25 bp, Homo sapien
ggagaggcggtccagagtagaaaca

SEQ ID NO: 5068224 - DNA, 25 bp, Homo sapien
cctgggagaggcggtccagagtaga

SEQ ID NO: 5068225 - DNA, 25 bp, Homo sapien
gggagaggcggtccagagtagaaac

SEQ ID NO: 5068226 - DNA, 25 bp, Homo sapien
tgggagaggcggtccagagtagaaa

SEQ ID NO: 5068227 - DNA, 25 bp, Homo sapien
tttgctgatactgtacaggttgcct

SEQ ID NO: 5068228 - DNA, 25 bp, Homo sapien
cagtgcctgttctcagtacctatgc

SEQ ID NO: 5068229 - DNA, 25 bp, Homo sapien
gatactgtacaggttgcctctcaga

SEQ ID NO: 5068230 - DNA, 25 bp, Homo sapien
tatgctgactggtaggagggataaa

SEQ ID NO: 5068231 - DNA, 25 bp, Homo sapien
attctttagcactcagtgggcgcat

SEQ ID NO: 5068232 - DNA, 25 bp, Homo sapien
acattctttagcactcagtgggcgc

SEQ ID NO: 5068233 - DNA, 25 bp, Homo sapien
cattctttagcactcagtgggcgca

SEQ ID NO: 5068234 - DNA, 25 bp, Homo sapien
atgggcaggttcacattctttagca

SEQ ID NO: 5068235 - DNA, 25 bp, Homo sapien
tttaaatcagagtcaacccatggca

SEQ ID NO: 5068236 - DNA, 25 bp, Homo sapien
ctttaaatcagagtcaacccatggc

SEQ ID NO: 5068237 - DNA, 25 bp, Homo sapien
gacaccgtgaccctggcggtcctga

SEQ ID NO: 5068238 - DNA, 25 bp, Homo sapien
cgccgcccttgacaccgtgaccctg

SEQ ID NO: 5068239 - DNA, 25 bp, Homo sapien
atccctggatgccacagaggcgccg

SEQ ID NO: 5068240 - DNA, 25 bp, Homo sapien
gagttccccgcggaggccaggtctc

SEQ ID NO: 5068241 - DNA, 25 bp, Homo sapien
tggtggagccacagatcagtgaagg

SEQ ID NO: 5068242 - DNA, 25 bp, Homo sapien
ggtggtggagccacagatcagtgaa

SEQ ID NO: 5068243 - DNA, 25 bp, Homo sapien
agccacagatcagtgaagggcccca

SEQ ID NO: 5068244 - DNA, 25 bp, Homo sapien
tggagccacagatcagtgaagggcc

SEQ ID NO: 5068245 - DNA, 25 bp, Homo sapien
tggtggtgccgtagggagcgccaaa

SEQ ID NO: 5068246 - DNA, 25 bp, Homo sapien
ctgtccaggttgaagcgagtgtagc

SEQ ID NO: 5068247 - DNA, 25 bp, Homo sapien
tagaaattcgtaagctctgtggagc

SEQ ID NO: 5068248 - DNA, 25 bp, Homo sapien
ctctgttgcggtggtcctggaagta

SEQ ID NO: 5068249 - DNA, 25 bp, Homo sapien
ggccatcactcccttcccgtggtgg

SEQ ID NO: 5068250 - DNA, 25 bp, Homo sapien
gccatcactcccttcccgtggtggg

SEQ ID NO: 5068251 - DNA, 25 bp, Homo sapien
tcactcccttcccgtggtgggggca

SEQ ID NO: 5068252 - DNA, 25 bp, Homo sapien
tctgctggctcaggggctctgagaa

SEQ ID NO: 5068253 - DNA, 25 bp, Homo sapien
tggctcaggggctctgagaaaggaa

SEQ ID NO: 5068254 - DNA, 25 bp, Homo sapien
tgctggctcaggggctctgagaaag

SEQ ID NO: 5068255 - DNA, 25 bp, Homo sapien
aagcccaccatgctctctgctggct

SEQ ID NO: 5068256 - DNA, 25 bp, Homo sapien
gaaggtaagggcaggagcctagaga

SEQ ID NO: 5068257 - DNA, 25 bp, Homo sapien
gacaggtccctagagacccctagct

SEQ ID NO: 5068258 - DNA, 25 bp, Homo sapien
gacccctagctccactggcagtggg

SEQ ID NO: 5068259 - DNA, 25 bp, Homo sapien
gagcctagagacaggtccctagaga

SEQ ID NO: 5068260 - DNA, 25 bp, Homo sapien
accacatccagggaggctttaccag

SEQ ID NO: 5068261 - DNA, 25 bp, Homo sapien
tctctggggatgtgtctgaaccaca

SEQ ID NO: 5068262 - DNA, 25 bp, Homo sapien
gatgtgtctgaaccacatccaggga

SEQ ID NO: 5068263 - DNA, 25 bp, Homo sapien
gtctgaaccacatccagggaggctt

SEQ ID NO: 5068264 - DNA, 25 bp, Homo sapien
ttgatagtacttccgatgctgctgg

SEQ ID NO: 5068265 - DNA, 25 bp, Homo sapien
tgtgcccgtcttgtcttgatagtac

SEQ ID NO: 5068266 - DNA, 25 bp, Homo sapien
gggactcgaggcactgtgcccgtct

SEQ ID NO: 5068267 - DNA, 25 bp, Homo sapien
tccctcacgggcatcgcaaagtagg

SEQ ID NO: 5068268 - DNA, 25 bp, Homo sapien
atcagtccgcagattcaggcccact

SEQ ID NO: 5068269 - DNA, 25 bp, Homo sapien
tgccccatgggtgcgtttcttgact

SEQ ID NO: 5068270 - DNA, 25 bp, Homo sapien
taagcttacggagcttctcccaaac

SEQ ID NO: 5068271 - DNA, 25 bp, Homo sapien
cactgcacgttttagggcaagatcc

SEQ ID NO: 5068272 - DNA, 25 bp, Homo sapien
ggcagcagctccttactgcgctctg

SEQ ID NO: 5068273 - DNA, 25 bp, Homo sapien
gagattcctgctcggtgtagtgccc

SEQ ID NO: 5068274 - DNA, 25 bp, Homo sapien
ttagatggacagaaagtccttagga

SEQ ID NO: 5068275 - DNA, 25 bp, Homo sapien
tcggcgcccacgttaggactagtgt

SEQ ID NO: 5068276 - DNA, 25 bp, Homo sapien
tatactctagggatggactggctca

SEQ ID NO: 5068277 - DNA, 25 bp, Homo sapien
ggaacagagttgagatgtcccgctc

SEQ ID NO: 5068278 - DNA, 25 bp, Homo sapien
cacaagttccccaggcgatcaatga

SEQ ID NO: 5068279 - DNA, 25 bp, Homo sapien
ccattccaagattagagagagcccc

SEQ ID NO: 5068280 - DNA, 25 bp, Homo sapien
cctggttggccctttgcgttcgttg

SEQ ID NO: 5068281 - DNA, 25 bp, Homo sapien
gcgttcgttgtgaaactgtcagcag

SEQ ID NO: 5068282 - DNA, 25 bp, Homo sapien
caaccacctggttggccctttgcgt

SEQ ID NO: 5068283 - DNA, 25 bp, Homo sapien
tggccctttgcgttcgttgtgaaac

SEQ ID NO: 5068284 - DNA, 25 bp, Homo sapien
tcctaactcctgctagaagtgtgca

SEQ ID NO: 5068285 - DNA, 25 bp, Homo sapien
tctggacaaggagtaaacacacaac

SEQ ID NO: 5068286 - DNA, 25 bp, Homo sapien
taatgcatgtgaagctctggacaag

SEQ ID NO: 5068287 - DNA, 25 bp, Homo sapien
taagaatggcccagtggtggtatcc

SEQ ID NO: 5068288 - DNA, 25 bp, Homo sapien
tcaggttctcgggggctagtcttaa

SEQ ID NO: 5068289 - DNA, 25 bp, Homo sapien
taggtcttcaggttctcgggggcta

SEQ ID NO: 5068290 - DNA, 25 bp, Homo sapien
gtcttcaggttctcgggggctagtc

SEQ ID NO: 5068291 - DNA, 25 bp, Homo sapien
tcttcaggttctcgggggctagtct

SEQ ID NO: 5068292 - DNA, 25 bp, Homo sapien
tgaactcaaagtagcagtctctctt

SEQ ID NO: 5068293 - DNA, 25 bp, Homo sapien
tttccgctcctgtggagagaccctc

SEQ ID NO: 5068294 - DNA, 25 bp, Homo sapien
agtctctctttttccgctcctgtgg

SEQ ID NO: 5068295 - DNA, 25 bp, Homo sapien
tcatgctctgaactcaaagtagcag

SEQ ID NO: 5068296 - DNA, 25 bp, Homo sapien
ccaggctggtcacgacccaggatct

SEQ ID NO: 5068297 - DNA, 25 bp, Homo sapien
acgacccaggatctcaggcatcagg

SEQ ID NO: 5068298 - DNA, 25 bp, Homo sapien
gtcacgacccaggatctcaggcatc

SEQ ID NO: 5068299 - DNA, 25 bp, Homo sapien
ctggtcacgacccaggatctcaggc

SEQ ID NO: 5068300 - DNA, 25 bp, Homo sapien
tgaaggtccctagcaagatacatgt

SEQ ID NO: 5068301 - DNA, 25 bp, Homo sapien
tcctcagggactttgagacacagaa

SEQ ID NO: 5068302 - DNA, 25 bp, Homo sapien
aaatctcaacccatgtcatagcagg

SEQ ID NO: 5068303 - DNA, 25 bp, Homo sapien
cagtgtgccagcgatgtcaagcagg

SEQ ID NO: 5068304 - DNA, 25 bp, Homo sapien
acactcacctctagaatattgttta

SEQ ID NO: 5068305 - DNA, 25 bp, Homo sapien
gcccatcagatcatcgctttttaaa

SEQ ID NO: 5068306 - DNA, 25 bp, Homo sapien
cacactcacctctagaatattgttt

SEQ ID NO: 5068307 - DNA, 25 bp, Homo sapien
cccacactcacctctagaatattgt

SEQ ID NO: 5068308 - DNA, 25 bp, Homo sapien
aggagttccgtcagtctcggcctgc

SEQ ID NO: 5068309 - DNA, 25 bp, Homo sapien
gttccgtcagtctcggcctgccaaa

SEQ ID NO: 5068310 - DNA, 25 bp, Homo sapien
taagaattttagagggatccatttc

SEQ ID NO: 5068311 - DNA, 25 bp, Homo sapien
gacctcaggagttccgtcagtctcg

SEQ ID NO: 5068312 - DNA, 25 bp, Homo sapien
ctgatacactttcccccggtgactg

SEQ ID NO: 5068313 - DNA, 25 bp, Homo sapien
tggaatgggttccaccatccaccag

SEQ ID NO: 5068314 - DNA, 25 bp, Homo sapien
gtggaatgggttccaccatccacca

SEQ ID NO: 5068315 - DNA, 25 bp, Homo sapien
ctgtggcgtccaagtcaccgtgggt

SEQ ID NO: 5068316 - DNA, 25 bp, Homo sapien
tccaagtcaccgtgggtggtgataa

SEQ ID NO: 5068317 - DNA, 25 bp, Homo sapien
cgtgggtggtgataagctcttccat

SEQ ID NO: 5068318 - DNA, 25 bp, Homo sapien
agtcaccgtgggtggtgataagctc

SEQ ID NO: 5068319 - DNA, 25 bp, Homo sapien
taaaaccagcaaagcggtagaataa

SEQ ID NO: 5068320 - DNA, 25 bp, Homo sapien
tcattaccgtcgtaattcgataaaa

SEQ ID NO: 5068321 - DNA, 25 bp, Homo sapien
gtcgtaattcgataaaaccagcaaa

SEQ ID NO: 5068322 - DNA, 25 bp, Homo sapien
tttctcattaccgtcgtaattcgat

SEQ ID NO: 5068323 - DNA, 25 bp, Homo sapien
ttctgtgcatatgcagtgcctcgct

SEQ ID NO: 5068324 - DNA, 25 bp, Homo sapien
agggctcttgtggattgaggacagc

SEQ ID NO: 5068325 - DNA, 25 bp, Homo sapien
ttcaggaaagtcgtcacggggagca

SEQ ID NO: 5068326 - DNA, 25 bp, Homo sapien
tgcagtgcctcgcttggccagctgc

SEQ ID NO: 5068327 - DNA, 25 bp, Homo sapien
tcttcgggcctcctaatgaggtgct

SEQ ID NO: 5068328 - DNA, 25 bp, Homo sapien
ggcctcctaatgaggtgctggccaa

SEQ ID NO: 5068329 - DNA, 25 bp, Homo sapien
ccctcttcgggcctcctaatgaggt

SEQ ID NO: 5068330 - DNA, 25 bp, Homo sapien
tcgggcctcctaatgaggtgctggc

SEQ ID NO: 5068331 - DNA, 25 bp, Homo sapien
tgctgcattcggctgacctcaggcc

SEQ ID NO: 5068332 - DNA, 25 bp, Homo sapien
gcattcggctgacctcaggccagct

SEQ ID NO: 5068333 - DNA, 25 bp, Homo sapien
gctgcattcggctgacctcaggcca

SEQ ID NO: 5068334 - DNA, 25 bp, Homo sapien
ctgcattcggctgacctcaggccag

SEQ ID NO: 5068335 - DNA, 25 bp, Homo sapien
caccatgcaggtgacacgtgtgtgt

SEQ ID NO: 5068336 - DNA, 25 bp, Homo sapien
accatgcaggtgacacgtgtgtgtg

SEQ ID NO: 5068337 - DNA, 25 bp, Homo sapien
ccatgcaggtgacacgtgtgtgtgc

SEQ ID NO: 5068338 - DNA, 25 bp, Homo sapien
gcaatcgtttgagcctttgtccctg

SEQ ID NO: 5068339 - DNA, 25 bp, Homo sapien
cctgttatgaagaggccctgccctt

SEQ ID NO: 5068340 - DNA, 25 bp, Homo sapien
ttcccccaagacttctgtttgctct

SEQ ID NO: 5068341 - DNA, 25 bp, Homo sapien
tccaatcctttagaggcaatcgttt

SEQ ID NO: 5068342 - DNA, 25 bp, Homo sapien
ccaggggcttcacagcgctcagatt

SEQ ID NO: 5068343 - DNA, 25 bp, Homo sapien
ctcagattattgacccaagtgccca

SEQ ID NO: 5068344 - DNA, 25 bp, Homo sapien
ggggcccagatggtctcacccaggc

SEQ ID NO: 5068345 - DNA, 25 bp, Homo sapien
cacagcgctcagattattgacccaa

SEQ ID NO: 5068346 - DNA, 25 bp, Homo sapien
gggggccgatggggcttcttctcag

SEQ ID NO: 5068347 - DNA, 25 bp, Homo sapien
atgggggccgatggggcttcttctc

SEQ ID NO: 5068348 - DNA, 25 bp, Homo sapien
gggccgatggggcttcttctcaggg

SEQ ID NO: 5068349 - DNA, 25 bp, Homo sapien
tcatgggggccgatggggcttcttc

SEQ ID NO: 5068350 - DNA, 25 bp, Homo sapien
cccgggtttccttctgccaggctct

SEQ ID NO: 5068351 - DNA, 25 bp, Homo sapien
cgggtttccttctgccaggctctat

SEQ ID NO: 5068352 - DNA, 25 bp, Homo sapien
tgtctggtgagcagatgaaggaatg

SEQ ID NO: 5068353 - DNA, 25 bp, Homo sapien
ctgtgtctggtgagcagatgaagga

SEQ ID NO: 5068354 - DNA, 25 bp, Homo sapien
gcacgtatggctgtctaagggatgt

SEQ ID NO: 5068355 - DNA, 25 bp, Homo sapien
tgggtgcacatatgcgcgtctggat

SEQ ID NO: 5068356 - DNA, 25 bp, Homo sapien
tgctttccttcttccgcagcacgta

SEQ ID NO: 5068357 - DNA, 25 bp, Homo sapien
tcaggtctctgctccggtgcttcca

SEQ ID NO: 5068358 - DNA, 25 bp, Homo sapien
tccatggcatcccgtttgaccctag

SEQ ID NO: 5068359 - DNA, 25 bp, Homo sapien
atggcatcccgtttgaccctaggaa

SEQ ID NO: 5068360 - DNA, 25 bp, Homo sapien
catggcatcccgtttgaccctagga

SEQ ID NO: 5068361 - DNA, 25 bp, Homo sapien
gagtccatggcatcccgtttgaccc

SEQ ID NO: 5068362 - DNA, 25 bp, Homo sapien
ctccacgtgcttctcttccccagac

SEQ ID NO: 5068363 - DNA, 25 bp, Homo sapien
tccacgtgcttctcttccccagaca

SEQ ID NO: 5068364 - DNA, 25 bp, Homo sapien
ccacgtgcttctcttccccagacat

SEQ ID NO: 5068365 - DNA, 25 bp, Homo sapien
tctcttctagaggtgcttcagactc

SEQ ID NO: 5068366 - DNA, 25 bp, Homo sapien
ttcagactcagctcggtccgctgca

SEQ ID NO: 5068367 - DNA, 25 bp, Homo sapien
gggcgaacatcccaaacgtcatcag

SEQ ID NO: 5068368 - DNA, 25 bp, Homo sapien
caacgagctgagattcaggaaccct

SEQ ID NO: 5068369 - DNA, 25 bp, Homo sapien
tgccagatagtaggaagtttttgcc

SEQ ID NO: 5068370 - DNA, 25 bp, Homo sapien
tggatgttgttctgagaccacactg

SEQ ID NO: 5068371 - DNA, 25 bp, Homo sapien
gagtcactgatggagctgatgtctg

SEQ ID NO: 5068372 - DNA, 25 bp, Homo sapien
gatgtctgctacaatctggaagctg

SEQ ID NO: 5068373 - DNA, 25 bp, Homo sapien
cacccactgaggttcgccggtgtgg

SEQ ID NO: 5068374 - DNA, 25 bp, Homo sapien
tcagcatccgaggaaggtggcccag

SEQ ID NO: 5068375 - DNA, 25 bp, Homo sapien
gcccagcggctgtctgtaactgtgg

SEQ ID NO: 5068376 - DNA, 25 bp, Homo sapien
tgcctttgagagtgttctcagcacc

SEQ ID NO: 5068377 - DNA, 25 bp, Homo sapien
tgctctctggtctcggccacagaag

SEQ ID NO: 5068378 - DNA, 25 bp, Homo sapien
taccttgccaagtgcgagagaaagt

SEQ ID NO: 5068379 - DNA, 25 bp, Homo sapien
ccacccggaccagttgaataaggca

SEQ ID NO: 5068380 - DNA, 25 bp, Homo sapien
gctaaaagatgaaataccacccgga

SEQ ID NO: 5068381 - DNA, 25 bp, Homo sapien
ttcttctcctctgatggtcccatcc

SEQ ID NO: 5068382 - DNA, 25 bp, Homo sapien
tcttctcctctgatggtcccatccc

SEQ ID NO: 5068383 - DNA, 25 bp, Homo sapien
ctctgatggtcccatccccaggaag

SEQ ID NO: 5068384 - DNA, 25 bp, Homo sapien
tgatggtcccatccccaggaagtcc

SEQ ID NO: 5068385 - DNA, 25 bp, Homo sapien
ttttgctcttgggttggacaaacaa

SEQ ID NO: 5068386 - DNA, 25 bp, Homo sapien
ttgctcttgggttggacaaacaacc

SEQ ID NO: 5068387 - DNA, 25 bp, Homo sapien
tcagagcttattgtcctctctcagc

SEQ ID NO: 5068388 - DNA, 25 bp, Homo sapien
agagcttattgtcctctctcagctg

SEQ ID NO: 5068389 - DNA, 25 bp, Homo sapien
agcgctgcaccagggatcatggcct

SEQ ID NO: 5068390 - DNA, 25 bp, Homo sapien
cagaaggacattgctgacaccgagc

SEQ ID NO: 5068391 - DNA, 25 bp, Homo sapien
cagatttagggtgctttgggtatga

SEQ ID NO: 5068392 - DNA, 25 bp, Homo sapien
ggtcaatcagatttagggtgctttg

SEQ ID NO: 5068393 - DNA, 25 bp, Homo sapien
tggggcatggctgcgctcgccgctc

SEQ ID NO: 5068394 - DNA, 25 bp, Homo sapien
ggcatggctgcgctcgccgctctcc

SEQ ID NO: 5068395 - DNA, 25 bp, Homo sapien
ctggggcatggctgcgctcgccgct

SEQ ID NO: 5068396 - DNA, 25 bp, Homo sapien
catggctgcgctcgccgctctccgc

SEQ ID NO: 5068397 - DNA, 25 bp, Homo sapien
gctgccgctcgatcagctcgggctc

SEQ ID NO: 5068398 - DNA, 25 bp, Homo sapien
gcgtgcgcacgttctgccgcttcat

SEQ ID NO: 5068399 - DNA, 25 bp, Homo sapien
tggctgaggttgtagcgcgcccgca

SEQ ID NO: 5068400 - DNA, 25 bp, Homo sapien
ccttgtgcggcttgaggcgcagcac

SEQ ID NO: 5068401 - DNA, 25 bp, Homo sapien
ccccagggagccgtagattcttgga

SEQ ID NO: 5068402 - DNA, 25 bp, Homo sapien
acgacacagcatagctccccatggt

SEQ ID NO: 5068403 - DNA, 25 bp, Homo sapien
gaagaatccagaaacgacacagcat

SEQ ID NO: 5068404 - DNA, 25 bp, Homo sapien
agccgtagattcttggaacagtgtc

SEQ ID NO: 5068405 - DNA, 25 bp, Homo sapien
caaaatttgagataaggagcataga

SEQ ID NO: 5068406 - DNA, 25 bp, Homo sapien
ggtatggagatcctcaaaatttgag

SEQ ID NO: 5068407 - DNA, 25 bp, Homo sapien
agataaggagcatagaccagattcc

SEQ ID NO: 5068408 - DNA, 25 bp, Homo sapien
tcagacatagaggttggagccaggt

SEQ ID NO: 5068409 - DNA, 25 bp, Homo sapien
tgtgctgataagcaggacctcggcc

SEQ ID NO: 5068410 - DNA, 25 bp, Homo sapien
tattcttgggactagacacagagga

SEQ ID NO: 5068411 - DNA, 25 bp, Homo sapien
gacaaaagcgtaatcctgggtagca

SEQ ID NO: 5068412 - DNA, 25 bp, Homo sapien
tgcatgagcagaacacagctcccgg

SEQ ID NO: 5068413 - DNA, 25 bp, Homo sapien
gccttgcacatgacttcccactgga

SEQ ID NO: 5068414 - DNA, 25 bp, Homo sapien
caaggccttagaatcccaagggtca

SEQ ID NO: 5068415 - DNA, 25 bp, Homo sapien
tcttccagctgagaatcgggtgcca

SEQ ID NO: 5068416 - DNA, 25 bp, Homo sapien
ccaaattggcacaggcacctgggaa

SEQ ID NO: 5068417 - DNA, 25 bp, Homo sapien
tgtgctcagagagatattgagctga

SEQ ID NO: 5068418 - DNA, 25 bp, Homo sapien
aggagccatggatggctcctgagca

SEQ ID NO: 5068419 - DNA, 25 bp, Homo sapien
cagttgtcaagtgctcaggcctgag

SEQ ID NO: 5068420 - DNA, 25 bp, Homo sapien
tcttcgttttaaggcaatgaggagc

SEQ ID NO: 5068421 - DNA, 25 bp, Homo sapien
gagagaggagcagggactagcccaa

SEQ ID NO: 5068422 - DNA, 25 bp, Homo sapien
gccacggtgcccttccccccactca

SEQ ID NO: 5068423 - DNA, 25 bp, Homo sapien
tagcccaaggtcacagcaactcagt

SEQ ID NO: 5068424 - DNA, 25 bp, Homo sapien
cactcattttatagatgggtaaact

SEQ ID NO: 5068425 - DNA, 25 bp, Homo sapien
tcagacgcttctccaagtatccggc

SEQ ID NO: 5068426 - DNA, 25 bp, Homo sapien
cattgtcactgggtgaaagggcaag

SEQ ID NO: 5068427 - DNA, 25 bp, Homo sapien
catgtcgcgcttggctttatgaggc

SEQ ID NO: 5068428 - DNA, 25 bp, Homo sapien
gagtttggcaagacccgtctgcctg

SEQ ID NO: 5068429 - DNA, 25 bp, Homo sapien
ctctggaacatgacgagcgtgagcg

SEQ ID NO: 5068430 - DNA, 25 bp, Homo sapien
ccgtgaggcccgtaaggatgtagac

SEQ ID NO: 5068431 - DNA, 25 bp, Homo sapien
catgttggccatggacacgtcggcg

SEQ ID NO: 5068432 - DNA, 25 bp, Homo sapien
ctgatgcacgagaagaagccgatga

SEQ ID NO: 5068433 - DNA, 25 bp, Homo sapien
gcttctcgtcctcggcgttcatggt

SEQ ID NO: 5068434 - DNA, 25 bp, Homo sapien
tccgcgtagacgttgcggaagccgc

SEQ ID NO: 5068435 - DNA, 25 bp, Homo sapien
cgttcatggtcatgaagcgcagcac

SEQ ID NO: 5068436 - DNA, 25 bp, Homo sapien
tggaagtgcagcacctccgcgtaga

SEQ ID NO: 5068437 - DNA, 25 bp, Homo sapien
ttgtaccacaggcacgagcacatgg

SEQ ID NO: 5068438 - DNA, 25 bp, Homo sapien
tctgctccacgcacgtgtcggacgt

SEQ ID NO: 5068439 - DNA, 25 bp, Homo sapien
tcctgcgcttcatgaggccgcggaa

SEQ ID NO: 5068440 - DNA, 25 bp, Homo sapien
ggatggagtactgcagcttctcgcg

SEQ ID NO: 5068441 - DNA, 25 bp, Homo sapien
acatgaagtcccctccgaaggtggg

SEQ ID NO: 5068442 - DNA, 25 bp, Homo sapien
cacatttctcggaatttgcagggct

SEQ ID NO: 5068443 - DNA, 25 bp, Homo sapien
gtctgggtaccagcagggtctctga

SEQ ID NO: 5068444 - DNA, 25 bp, Homo sapien
tgcaagcaggcacagtcggagatgg

SEQ ID NO: 5068445 - DNA, 25 bp, Homo sapien
catgcaaaacaacacgaagggaggt

SEQ ID NO: 5068446 - DNA, 25 bp, Homo sapien
cctacctgctatgagaatgtggctg

SEQ ID NO: 5068447 - DNA, 25 bp, Homo sapien
tgttccagattctaagggcagtgtc

SEQ ID NO: 5068448 - DNA, 25 bp, Homo sapien
ttagcttgaacctccagtgcgacca

SEQ ID NO: 5068449 - DNA, 25 bp, Homo sapien
tagcaacaagcaggctgggctcttg

SEQ ID NO: 5068450 - DNA, 25 bp, Homo sapien
tttggctagcaacaagcaggctggg

SEQ ID NO: 5068451 - DNA, 25 bp, Homo sapien
gaacactttggctagcaacaagcag

SEQ ID NO: 5068452 - DNA, 25 bp, Homo sapien
aggaaagaacactttggctagcaac

SEQ ID NO: 5068453 - DNA, 25 bp, Homo sapien
tatcactagctacttgggacacagg

SEQ ID NO: 5068454 - DNA, 25 bp, Homo sapien
tgtggcagccacgacctttggagtc

SEQ ID NO: 5068455 - DNA, 25 bp, Homo sapien
tcattataccggctccagctgtggg

SEQ ID NO: 5068456 - DNA, 25 bp, Homo sapien
tgtttgtaagcatgcgccccagtga

SEQ ID NO: 5068457 - DNA, 25 bp, Homo sapien
agatatgtttgtagaccccggcagg

SEQ ID NO: 5068458 - DNA, 25 bp, Homo sapien
cacggcacccagcagctagatatgt

SEQ ID NO: 5068459 - DNA, 25 bp, Homo sapien
cagcagcaagggcatacgatgacag

SEQ ID NO: 5068460 - DNA, 25 bp, Homo sapien
gcagcaagggcatacgatgacagag

SEQ ID NO: 5068461 - DNA, 25 bp, Homo sapien
ggtctgtcgtaggttctgaggccca

SEQ ID NO: 5068462 - DNA, 25 bp, Homo sapien
tctgtcccaggcgataaagaaagga

SEQ ID NO: 5068463 - DNA, 25 bp, Homo sapien
tccacgaggcataccatgggacacg

SEQ ID NO: 5068464 - DNA, 25 bp, Homo sapien
aagatgccttgcgaagctccatgag

SEQ ID NO: 5068465 - DNA, 25 bp, Homo sapien
agtgctggattaagcaggggtaaac

SEQ ID NO: 5068466 - DNA, 25 bp, Homo sapien
ggcagtgctggattaagcaggggta

SEQ ID NO: 5068467 - DNA, 25 bp, Homo sapien
ggattaagcaggggtaaacagcatc

SEQ ID NO: 5068468 - DNA, 25 bp, Homo sapien
tggattaagcaggggtaaacagcat

SEQ ID NO: 5068469 - DNA, 25 bp, Homo sapien
ctgaatccagctttgggattgagag

SEQ ID NO: 5068470 - DNA, 25 bp, Homo sapien
gggccacagctttgtgctgctcaat

SEQ ID NO: 5068471 - DNA, 25 bp, Homo sapien
gctttgtgctgctcaatggaaatgg

SEQ ID NO: 5068472 - DNA, 25 bp, Homo sapien
tgtgctgctcaatggaaatggtgat

SEQ ID NO: 5068473 - DNA, 25 bp, Homo sapien
tagtggcctggtcacgtgtttcctc

SEQ ID NO: 5068474 - DNA, 25 bp, Homo sapien
tgtattccatagtcagtagtggcct

SEQ ID NO: 5068475 - DNA, 25 bp, Homo sapien
ggagtcagcccggtcaaaggcatga

SEQ ID NO: 5068476 - DNA, 25 bp, Homo sapien
aaagggcagaggtcattggctgaac

SEQ ID NO: 5068477 - DNA, 25 bp, Homo sapien
tgaagcagcatctgggatccccatt

SEQ ID NO: 5068478 - DNA, 25 bp, Homo sapien
gcagcatctgggatccccatttgct

SEQ ID NO: 5068479 - DNA, 25 bp, Homo sapien
atctgggatccccatttgctcaggg

SEQ ID NO: 5068480 - DNA, 25 bp, Homo sapien
gctgctgaagcagcatctgggatcc

SEQ ID NO: 5068481 - DNA, 25 bp, Homo sapien
tcaggaagggatgggctctggctta

SEQ ID NO: 5068482 - DNA, 25 bp, Homo sapien
caggaagggatgggctctggcttac

SEQ ID NO: 5068483 - DNA, 25 bp, Homo sapien
gctcccggattgttggtctcttatg

SEQ ID NO: 5068484 - DNA, 25 bp, Homo sapien
gttggtctcttatggcaactgaaag

SEQ ID NO: 5068485 - DNA, 25 bp, Homo sapien
tgtcccgatcgctcccggattgttg

SEQ ID NO: 5068486 - DNA, 25 bp, Homo sapien
ggcaactgaaagtacagatggtcat

SEQ ID NO: 5068487 - DNA, 25 bp, Homo sapien
tttatttggaaatggcgtcttgctc

SEQ ID NO: 5068488 - DNA, 25 bp, Homo sapien
gacagagagttgattagtgattgct

SEQ ID NO: 5068489 - DNA, 25 bp, Homo sapien
gaaccttgaagccattatgtgaagt

SEQ ID NO: 5068490 - DNA, 25 bp, Homo sapien
tttgcccggccagatgaaccttgaa

SEQ ID NO: 5068491 - DNA, 25 bp, Homo sapien
atacaatcgggctttacactgagat

SEQ ID NO: 5068492 - DNA, 25 bp, Homo sapien
tcgggctttacactgagatattcca

SEQ ID NO: 5068493 - DNA, 25 bp, Homo sapien
tacaatcgggctttacactgagata

SEQ ID NO: 5068494 - DNA, 25 bp, Homo sapien
caatcgggctttacactgagatatt

SEQ ID NO: 5068495 - DNA, 25 bp, Homo sapien
gccgaggacaccattttatagctga

SEQ ID NO: 5068496 - DNA, 25 bp, Homo sapien
gacagtaaattcagcgaagcagagt

SEQ ID NO: 5068497 - DNA, 25 bp, Homo sapien
gaggcatccaggcagaaagaccatc

SEQ ID NO: 5068498 - DNA, 25 bp, Homo sapien
catctagctccagttgccgaggaca

SEQ ID NO: 5068499 - DNA, 25 bp, Homo sapien
gacgctggggttcgctccagttagc

SEQ ID NO: 5068500 - DNA, 25 bp, Homo sapien
ttcgctccagttagcggcgccgggc

SEQ ID NO: 5068501 - DNA, 25 bp, Homo sapien
gggttcgctccagttagcggcgccg

SEQ ID NO: 5068502 - DNA, 25 bp, Homo sapien
tcggcggacgctggggttcgctcca

SEQ ID NO: 5068503 - DNA, 25 bp, Homo sapien
agcgtgttgatggagccggtaacaa

SEQ ID NO: 5068504 - DNA, 25 bp, Homo sapien
ttgatggagccggtaacaagcatga

SEQ ID NO: 5068505 - DNA, 25 bp, Homo sapien
tggagccggtaacaagcatgagccc

SEQ ID NO: 5068506 - DNA, 25 bp, Homo sapien
ccaggaacagctggtacttggtcca

SEQ ID NO: 5068507 - DNA, 25 bp, Homo sapien
gagcatggatgctagagccagacca

SEQ ID NO: 5068508 - DNA, 25 bp, Homo sapien
cctgagttcacacatgaaagggcag

SEQ ID NO: 5068509 - DNA, 25 bp, Homo sapien
catgctggctcaactataaactctg

SEQ ID NO: 5068510 - DNA, 25 bp, Homo sapien
cacaccctccagtggtggttaagag

SEQ ID NO: 5068511 - DNA, 25 bp, Homo sapien
aggaaggagggactctggggtatca

SEQ ID NO: 5068512 - DNA, 25 bp, Homo sapien
aaactcccaggaaggagggactctg

SEQ ID NO: 5068513 - DNA, 25 bp, Homo sapien
ctcccaggaaggagggactctgggg

SEQ ID NO: 5068514 - DNA, 25 bp, Homo sapien
ccaggaaggagggactctggggtat

SEQ ID NO: 5068515 - DNA, 25 bp, Homo sapien
ctaaagaagatgatcgacagaaggt

SEQ ID NO: 5068516 - DNA, 25 bp, Homo sapien
taaagaagatgatcgacagaaggtg

SEQ ID NO: 5068517 - DNA, 25 bp, Homo sapien
cctaaagaagatgatcgacagaagg

SEQ ID NO: 5068518 - DNA, 25 bp, Homo sapien
cagacactgtattctaggggagatg

SEQ ID NO: 5068519 - DNA, 25 bp, Homo sapien
agcccagtaggtgggcctgtcttct

SEQ ID NO: 5068520 - DNA, 25 bp, Homo sapien
gcccagtaggtgggcctgtcttctc

SEQ ID NO: 5068521 - DNA, 25 bp, Homo sapien
cagatgttgaaacagggccagtaca

SEQ ID NO: 5068522 - DNA, 25 bp, Homo sapien
cagtacactggaagctcagcaggca

SEQ ID NO: 5068523 - DNA, 25 bp, Homo sapien
cctccctgatgctctgaagctctcc

SEQ ID NO: 5068524 - DNA, 25 bp, Homo sapien
aagctcagcaggcagtcatgcgccc

SEQ ID NO: 5068525 - DNA, 25 bp, Homo sapien
cccagagttttgagtcccacaggct

SEQ ID NO: 5068526 - DNA, 25 bp, Homo sapien
gatatatacatgacctggcacatgg

SEQ ID NO: 5068527 - DNA, 25 bp, Homo sapien
cacaggctggacaagttacagggta

SEQ ID NO: 5068528 - DNA, 25 bp, Homo sapien
gaaaaacgtctggaacctgtcctgc

SEQ ID NO: 5068529 - DNA, 25 bp, Homo sapien
gagaagaggtcaagccttaccaagg

SEQ ID NO: 5068530 - DNA, 25 bp, Homo sapien
gacatggaacatgggtaagggccac

SEQ ID NO: 5068531 - DNA, 25 bp, Homo sapien
tgagaaggcctgcatgaggcaactg

SEQ ID NO: 5068532 - DNA, 25 bp, Homo sapien
tatgctgttggctcttggatccctg

SEQ ID NO: 5068533 - DNA, 25 bp, Homo sapien
ctcggccatgaaattgtccgcccat

SEQ ID NO: 5068534 - DNA, 25 bp, Homo sapien
agccctcggccatgaaattgtccgc

SEQ ID NO: 5068535 - DNA, 25 bp, Homo sapien
cctcggccatgaaattgtccgccca

SEQ ID NO: 5068536 - DNA, 25 bp, Homo sapien
cacagccctcggccatgaaattgtc

SEQ ID NO: 5068537 - DNA, 25 bp, Homo sapien
aggctggtccctgtcatgtcacaga

SEQ ID NO: 5068538 - DNA, 25 bp, Homo sapien
ctggagtctgattgccctgcagctc

SEQ ID NO: 5068539 - DNA, 25 bp, Homo sapien
gaggctggtccctgtcatgtcacag

SEQ ID NO: 5068540 - DNA, 25 bp, Homo sapien
gggtctacgctggagtctgattgcc

SEQ ID NO: 5068541 - DNA, 25 bp, Homo sapien
gccaccgagaacaggccagtgaata

SEQ ID NO: 5068542 - DNA, 25 bp, Homo sapien
cgatggtggctaggatgcccagcca

SEQ ID NO: 5068543 - DNA, 25 bp, Homo sapien
ctgtgatcacttcgctgagcttgtg

SEQ ID NO: 5068544 - DNA, 25 bp, Homo sapien
tgcttgctcaggaggtcagccaggc

SEQ ID NO: 5068545 - DNA, 25 bp, Homo sapien
cacattgtgtttgtagacgaacttc

SEQ ID NO: 5068546 - DNA, 25 bp, Homo sapien
gatgatctgggccatgatgatcaac

SEQ ID NO: 5068547 - DNA, 25 bp, Homo sapien
ggatggcaacgatgatctgggccat

SEQ ID NO: 5068548 - DNA, 25 bp, Homo sapien
tgcccgcagtgggtgcacattgtgt

SEQ ID NO: 5068549 - DNA, 25 bp, Homo sapien
tcagtgcccagatgacaacggtgcg

SEQ ID NO: 5068550 - DNA, 25 bp, Homo sapien
ggaagccaaggatctgcagtgcatg

SEQ ID NO: 5068551 - DNA, 25 bp, Homo sapien
caagctgtccaacaccatgcgggtg

SEQ ID NO: 5068552 - DNA, 25 bp, Homo sapien
gcagcggacggtgtagcccattgta

SEQ ID NO: 5068553 - DNA, 25 bp, Homo sapien
aggagcacccgggtggcagtagaag

SEQ ID NO: 5068554 - DNA, 25 bp, Homo sapien
gatagggcattcggggcccaccagc

SEQ ID NO: 5068555 - DNA, 25 bp, Homo sapien
ttgttatcttctgtggcagcagctg

SEQ ID NO: 5068556 - DNA, 25 bp, Homo sapien
cccgggtggcagtagaagcctccag

SEQ ID NO: 5068557 - DNA, 25 bp, Homo sapien
gaagaatcaaatctagcttatgact

SEQ ID NO: 5068558 - DNA, 25 bp, Homo sapien
cactacggtggtaaattcctacaat

SEQ ID NO: 5068559 - DNA, 25 bp, Homo sapien
gatttagctctagtgctgtaggagg

SEQ ID NO: 5068560 - DNA, 25 bp, Homo sapien
gaaaatataatgcttagttctggtt

SEQ ID NO: 5068561 - DNA, 25 bp, Homo sapien
agaggttgtagtgagccgccgagat

SEQ ID NO: 5068562 - DNA, 25 bp, Homo sapien
aggttgtagtgagccgccgagatcg

SEQ ID NO: 5068563 - DNA, 25 bp, Homo sapien
ggttgtagtgagccgccgagatcgt

SEQ ID NO: 5068564 - DNA, 25 bp, Homo sapien
gaggttgtagtgagccgccgagatc

SEQ ID NO: 5068565 - DNA, 25 bp, Homo sapien
tgtgctgggagctacaatgagtttg

SEQ ID NO: 5068566 - DNA, 25 bp, Homo sapien
ggctaaaacccatgtctccagacgg

SEQ ID NO: 5068567 - DNA, 25 bp, Homo sapien
aaagttacccaggtgtgttatgcac

SEQ ID NO: 5068568 - DNA, 25 bp, Homo sapien
tatttccagtggatgggctgttact

SEQ ID NO: 5068569 - DNA, 25 bp, Homo sapien
cacagtgagacccatctctgccaaa

SEQ ID NO: 5068570 - DNA, 25 bp, Homo sapien
gtgagacccatctctgccaaaaaaa

SEQ ID NO: 5068571 - DNA, 25 bp, Homo sapien
gagacccatctctgccaaaaaaata

SEQ ID NO: 5068572 - DNA, 25 bp, Homo sapien
caacacagtgagacccatctctgcc

SEQ ID NO: 5068573 - DNA, 25 bp, Homo sapien
actctgttgcccaggtgtggtggct

SEQ ID NO: 5068574 - DNA, 25 bp, Homo sapien
gaggctgagatgggaggatcgcttg

SEQ ID NO: 5068575 - DNA, 25 bp, Homo sapien
ctgagatgggaggatcgcttgaggc

SEQ ID NO: 5068576 - DNA, 25 bp, Homo sapien
caggtctgtaatcccagcactttgg

SEQ ID NO: 5068577 - DNA, 25 bp, Homo sapien
tgctggaatcccacacaacctgagg

SEQ ID NO: 5068578 - DNA, 25 bp, Homo sapien
ttaagcaacttaacgcaacgcccag

SEQ ID NO: 5068579 - DNA, 25 bp, Homo sapien
gacaacagtacatgaggcttccagc

SEQ ID NO: 5068580 - DNA, 25 bp, Homo sapien
aaagctggtggaatggaccctccct

SEQ ID NO: 5068581 - DNA, 25 bp, Homo sapien
gattaatacaattgccaattttcct

SEQ ID NO: 5068582 - DNA, 25 bp, Homo sapien
aatggattaatacaattgccaattt

SEQ ID NO: 5068583 - DNA, 25 bp, Homo sapien
tggattaatacaattgccaattttc

SEQ ID NO: 5068584 - DNA, 25 bp, Homo sapien
gaatggattaatacaattgccaatt

SEQ ID NO: 5068585 - DNA, 25 bp, Homo sapien
tacagttcccatgcttaacaatggg

SEQ ID NO: 5068586 - DNA, 25 bp, Homo sapien
gggatatgctctgcgaaatgtgttg

SEQ ID NO: 5068587 - DNA, 25 bp, Homo sapien
caaacctggatggtatagtgtatca

SEQ ID NO: 5068588 - DNA, 25 bp, Homo sapien
aaacattttgtggtgccatggtaac

SEQ ID NO: 5068589 - DNA, 25 bp, Homo sapien
tctcacacccatgttgatagcggca

SEQ ID NO: 5068590 - DNA, 25 bp, Homo sapien
gaggccaagttgttcggaaccactg

SEQ ID NO: 5068591 - DNA, 25 bp, Homo sapien
cactgagttcgagttcgagtccaac

SEQ ID NO: 5068592 - DNA, 25 bp, Homo sapien
ccagggacttgaacagatattctca

SEQ ID NO: 5068593 - DNA, 25 bp, Homo sapien
ccggtgcttggcagaagtccgcgcc

SEQ ID NO: 5068594 - DNA, 25 bp, Homo sapien
aagtccgcgccgctcgcgttcaaat

SEQ ID NO: 5068595 - DNA, 25 bp, Homo sapien
cgagcctcacatgagccggtgcttg

SEQ ID NO: 5068596 - DNA, 25 bp, Homo sapien
tgtgccgcgagcctcacatgagccg

SEQ ID NO: 5068597 - DNA, 25 bp, Homo sapien
ggcgcccggtcccacggctcctgct

SEQ ID NO: 5068598 - DNA, 25 bp, Homo sapien
ggtcccacggctcctgctcgggctg

SEQ ID NO: 5068599 - DNA, 25 bp, Homo sapien
tgctggcgcccggtcccacggctcc

SEQ ID NO: 5068600 - DNA, 25 bp, Homo sapien
tgccgggtccgggagcgaaaggctg

SEQ ID NO: 5068601 - DNA, 25 bp, Homo sapien
gcctcgggctttcggctccggcggc

SEQ ID NO: 5068602 - DNA, 25 bp, Homo sapien
cactagtcctaacaagaagacggcg

SEQ ID NO: 5068603 - DNA, 25 bp, Homo sapien
gagccaagtggctaagccggtccct

SEQ ID NO: 5068604 - DNA, 25 bp, Homo sapien
tgggcgctgggtaaccactagtcct

SEQ ID NO: 5068605 - DNA, 25 bp, Homo sapien
gactcgggagatccgggctccgcct

SEQ ID NO: 5068606 - DNA, 25 bp, Homo sapien
tctccgccgactgtgttgatgggag

SEQ ID NO: 5068607 - DNA, 25 bp, Homo sapien
tgtgctcttctgaagctttcggatc

SEQ ID NO: 5068608 - DNA, 25 bp, Homo sapien
agcttccttatcaagaggtgtgtgc

SEQ ID NO: 5068609 - DNA, 25 bp, Homo sapien
ttcggatctcctttagccaaccttg

SEQ ID NO: 5068610 - DNA, 25 bp, Homo sapien
gccaattgaagtccacaccacgagt

SEQ ID NO: 5068611 - DNA, 25 bp, Homo sapien
ccaattgaagtccacaccacgagtg

SEQ ID NO: 5068612 - DNA, 25 bp, Homo sapien
agagatgaactagaaatgcttctgc

SEQ ID NO: 5068613 - DNA, 25 bp, Homo sapien
aggagataggcgtcctcaaagagat

SEQ ID NO: 5068614 - DNA, 25 bp, Homo sapien
gagtaactcggcctgcatgtaaggt

SEQ ID NO: 5068615 - DNA, 25 bp, Homo sapien
tcaaggccccggatcctccgggcca

SEQ ID NO: 5068616 - DNA, 25 bp, Homo sapien
ccctggctgagcaggaaagactgac

SEQ ID NO: 5068617 - DNA, 25 bp, Homo sapien
tgacagaaacactgggtgcaggagc

SEQ ID NO: 5068618 - DNA, 25 bp, Homo sapien
ggctgagcaggaaagactgacagaa

SEQ ID NO: 5068619 - DNA, 25 bp, Homo sapien
gactgacagaaacactgggtgcagg

SEQ ID NO: 5068620 - DNA, 25 bp, Homo sapien
gctctggagagtccccggtatcatc

SEQ ID NO: 5068621 - DNA, 25 bp, Homo sapien
gaatccattggatctagtcatggct

SEQ ID NO: 5068622 - DNA, 25 bp, Homo sapien
aaagtccagacagcatcgcagaatc

SEQ ID NO: 5068623 - DNA, 25 bp, Homo sapien
tcatggctctggagagtccccggta

SEQ ID NO: 5068624 - DNA, 25 bp, Homo sapien
catgatgctgccactaatggtgagg

SEQ ID NO: 5068625 - DNA, 25 bp, Homo sapien
cagaggtctatatgatggaaatgcc

SEQ ID NO: 5068626 - DNA, 25 bp, Homo sapien
gaaaagctacacatccgttgacaag

SEQ ID NO: 5068627 - DNA, 25 bp, Homo sapien
gttgacaagcacagtccactcagtt

SEQ ID NO: 5068628 - DNA, 25 bp, Homo sapien
cagtataatctctatgctgtaacag

SEQ ID NO: 5068629 - DNA, 25 bp, Homo sapien
tctctatgctgtaacagtaagtcca

SEQ ID NO: 5068630 - DNA, 25 bp, Homo sapien
aaagtacagtataatctctatgctg

SEQ ID NO: 5068631 - DNA, 25 bp, Homo sapien
tataatctctatgctgtaacagtaa

SEQ ID NO: 5068632 - DNA, 25 bp, Homo sapien
cgcccctgcccggccaccccttctg

SEQ ID NO: 5068633 - DNA, 25 bp, Homo sapien
tagaacttggtgcatctctttaatc

SEQ ID NO: 5068634 - DNA, 25 bp, Homo sapien
gacacatcattattagtagtctgcc

SEQ ID NO: 5068635 - DNA, 25 bp, Homo sapien
tagtagtctgccctcactaatcatt

SEQ ID NO: 5068636 - DNA, 25 bp, Homo sapien
ttttcatcacatacagatctcatat

SEQ ID NO: 5068637 - DNA, 25 bp, Homo sapien
ggagcttcctgatctttgggcagca

SEQ ID NO: 5068638 - DNA, 25 bp, Homo sapien
cagttcaatgcaatggtggcagggc

SEQ ID NO: 5068639 - DNA, 25 bp, Homo sapien
ccagccgggcatgatacaatggtca

SEQ ID NO: 5068640 - DNA, 25 bp, Homo sapien
gctcagcggcagtggtacagttcaa

SEQ ID NO: 5068641 - DNA, 25 bp, Homo sapien
aaatcaaggtatcggcaggcctgtt

SEQ ID NO: 5068642 - DNA, 25 bp, Homo sapien
aagtctgacacaagtttcgctgggc

SEQ ID NO: 5068643 - DNA, 25 bp, Homo sapien
gacatgccaaatttacaggttctga

SEQ ID NO: 5068644 - DNA, 25 bp, Homo sapien
cgatttgactgtagcgaaaccagaa

SEQ ID NO: 5068645 - DNA, 25 bp, Homo sapien
ggtcttgtcacaaaatcctggcctc

SEQ ID NO: 5068646 - DNA, 25 bp, Homo sapien
acaggtgctcagtcggaatttttaa

SEQ ID NO: 5068647 - DNA, 25 bp, Homo sapien
gattacaggtgctcagtcggaattt

SEQ ID NO: 5068648 - DNA, 25 bp, Homo sapien
ttacaggtgctcagtcggaattttt

SEQ ID NO: 5068649 - DNA, 25 bp, Homo sapien
gcaggagaatcgcttgaacttggga

SEQ ID NO: 5068650 - DNA, 25 bp, Homo sapien
cttgggagttggaggttgcagtgag

SEQ ID NO: 5068651 - DNA, 25 bp, Homo sapien
ccgagatcgtgctgctgcactccag

SEQ ID NO: 5068652 - DNA, 25 bp, Homo sapien
aatagagacagggtccgagaggctg

SEQ ID NO: 5068653 - DNA, 25 bp, Homo sapien
acagttcttaaaagacgcgtatctg

SEQ ID NO: 5068654 - DNA, 25 bp, Homo sapien
gttcttaaaagacgcgtatctggag

SEQ ID NO: 5068655 - DNA, 25 bp, Homo sapien
cttaaaagacgcgtatctggagttt

SEQ ID NO: 5068656 - DNA, 25 bp, Homo sapien
ttaaaagacgcgtatctggagtttg

SEQ ID NO: 5068657 - DNA, 25 bp, Homo sapien
cgcagaatacggaaggttgtgtcca

SEQ ID NO: 5068658 - DNA, 25 bp, Homo sapien
gctagcgacatttctaggcccacca

SEQ ID NO: 5068659 - DNA, 25 bp, Homo sapien
tgtctcctaaagctcacccaacaag

SEQ ID NO: 5068660 - DNA, 25 bp, Homo sapien
ccagaacgggctggctaaggtgaca

SEQ ID NO: 5068661 - DNA, 25 bp, Homo sapien
taccaggagttgtagttggaccgag

SEQ ID NO: 5068662 - DNA, 25 bp, Homo sapien
gattcctcacaagatctgggtacct

SEQ ID NO: 5068663 - DNA, 25 bp, Homo sapien
tcttgacccaccaaacttgccaggt

SEQ ID NO: 5068664 - DNA, 25 bp, Homo sapien
cgaggtccctcaaatgagctttgga

SEQ ID NO: 5068665 - DNA, 25 bp, Homo sapien
aaagaccaccatgaaaggaggaggg

SEQ ID NO: 5068666 - DNA, 25 bp, Homo sapien
agcagttctgcataacactgggaga

SEQ ID NO: 5068667 - DNA, 25 bp, Homo sapien
ttgaaagtcaagtccctgaatgagg

SEQ ID NO: 5068668 - DNA, 25 bp, Homo sapien
gagggaggaaaatcgcactgtctga

SEQ ID NO: 5068669 - DNA, 25 bp, Homo sapien
gacaggcggcgtcccgcatccttgg

SEQ ID NO: 5068670 - DNA, 25 bp, Homo sapien
catggcgactcaggacaccacaaag

SEQ ID NO: 5068671 - DNA, 25 bp, Homo sapien
acaaagcctggacgcgctgaggcac

SEQ ID NO: 5068672 - DNA, 25 bp, Homo sapien
cccacctcagctagcaggttaaggg

SEQ ID NO: 5068673 - DNA, 25 bp, Homo sapien
tgcgcctcacgcagaaacagaaggg

SEQ ID NO: 5068674 - DNA, 25 bp, Homo sapien
ccttttgtgcgcctcacgcagaaac

SEQ ID NO: 5068675 - DNA, 25 bp, Homo sapien
cggctccccgcccttttgtgcgcct

SEQ ID NO: 5068676 - DNA, 25 bp, Homo sapien
tttgtgcgcctcacgcagaaacaga

SEQ ID NO: 5068677 - DNA, 25 bp, Homo sapien
cttagccccgatggccacctcccaa

SEQ ID NO: 5068678 - DNA, 25 bp, Homo sapien
ttagccccgatggccacctcccaac

SEQ ID NO: 5068679 - DNA, 25 bp, Homo sapien
tacacgctaccgctgagcctggatt

SEQ ID NO: 5068680 - DNA, 25 bp, Homo sapien
cgagggaacaagtacagaacagggc

SEQ ID NO: 5068681 - DNA, 25 bp, Homo sapien
agctcgggttcaatcaatggttaaa

SEQ ID NO: 5068682 - DNA, 25 bp, Homo sapien
gaaagtggccaaggtgaaatctgaa

SEQ ID NO: 5068683 - DNA, 25 bp, Homo sapien
tccccacactacctgtgcctgcact

SEQ ID NO: 5068684 - DNA, 25 bp, Homo sapien
gcttccccacactacctgtgcctgc

SEQ ID NO: 5068685 - DNA, 25 bp, Homo sapien
ttgcttccccacactacctgtgcct

SEQ ID NO: 5068686 - DNA, 25 bp, Homo sapien
gcttgcttccccacactacctgtgc

SEQ ID NO: 5068687 - DNA, 25 bp, Homo sapien
ttggaagatggcaactgaccccacc

SEQ ID NO: 5068688 - DNA, 25 bp, Homo sapien
gatttcaaaagggtacaaggcattc

SEQ ID NO: 5068689 - DNA, 25 bp, Homo sapien
aaaactgtgggttggaattcatgcc

SEQ ID NO: 5068690 - DNA, 25 bp, Homo sapien
ggtggtgcccacagaacagaaaagg

SEQ ID NO: 5068691 - DNA, 25 bp, Homo sapien
aagcatccacatctggaaaactgct

SEQ ID NO: 5068692 - DNA, 25 bp, Homo sapien
tccacatctggaaaactgctaccac

SEQ ID NO: 5068693 - DNA, 25 bp, Homo sapien
gcatccacatctggaaaactgctac

SEQ ID NO: 5068694 - DNA, 25 bp, Homo sapien
caccagatcatgaagcatccacatc

SEQ ID NO: 5068695 - DNA, 25 bp, Homo sapien
agaaagaagtataagctctccaggc

SEQ ID NO: 5068696 - DNA, 25 bp, Homo sapien
tccctacgctatgcaggttcttaag

SEQ ID NO: 5068697 - DNA, 25 bp, Homo sapien
tcttaagcaccataaagggactctc

SEQ ID NO: 5068698 - DNA, 25 bp, Homo sapien
caacaaagggaggacgttgctggtc

SEQ ID NO: 5068699 - DNA, 25 bp, Homo sapien
tggaatgggtaagactagctgcatg

SEQ ID NO: 5068700 - DNA, 25 bp, Homo sapien
agtgaacttgacagatactggtcta

SEQ ID NO: 5068701 - DNA, 25 bp, Homo sapien
tcttgcctaaagacctaacagtgaa

SEQ ID NO: 5068702 - DNA, 25 bp, Homo sapien
gaaactcagtctgcggagcaagaga

SEQ ID NO: 5068703 - DNA, 25 bp, Homo sapien
cctgaaagagcactgtgataatagc

SEQ ID NO: 5068704 - DNA, 25 bp, Homo sapien
tcgtaacacatgcttggaggttgga

SEQ ID NO: 5068705 - DNA, 25 bp, Homo sapien
ttgatgctagaatcgaaagccaagg

SEQ ID NO: 5068706 - DNA, 25 bp, Homo sapien
gcactgtgataatagcttactgaga

SEQ ID NO: 5068707 - DNA, 25 bp, Homo sapien
tcgtgggtgcagtcatcgttcacca

SEQ ID NO: 5068708 - DNA, 25 bp, Homo sapien
cttggtcccatggtagaagtcgtcc

SEQ ID NO: 5068709 - DNA, 25 bp, Homo sapien
atgtagacgtcagcctcgtgggtgc

SEQ ID NO: 5068710 - DNA, 25 bp, Homo sapien
gatgaggatcctcacgctggctgag

SEQ ID NO: 5068711 - DNA, 25 bp, Homo sapien
caaagaggaagccacctttggcaaa

SEQ ID NO: 5068712 - DNA, 25 bp, Homo sapien
cacctttggcaaacaggagcattac

SEQ ID NO: 5068713 - DNA, 25 bp, Homo sapien
gccctagaagcagaataaaaaagcc

SEQ ID NO: 5068714 - DNA, 25 bp, Homo sapien
tgagtctagtctggagcagccctag

SEQ ID NO: 5068715 - DNA, 25 bp, Homo sapien
cagctgtaaagagctgatggttctc

SEQ ID NO: 5068716 - DNA, 25 bp, Homo sapien
caccttgcataaagacacgtgtgca

SEQ ID NO: 5068717 - DNA, 25 bp, Homo sapien
gggaaaaccagtcgctcttggctaa

SEQ ID NO: 5068718 - DNA, 25 bp, Homo sapien
gacacgtgtgcagagctcttcatca

SEQ ID NO: 5068719 - DNA, 25 bp, Homo sapien
tgccaaatcaacaagcagacgctag

SEQ ID NO: 5068720 - DNA, 25 bp, Homo sapien
gtttagctctaaggcgctgacatca

SEQ ID NO: 5068721 - DNA, 25 bp, Homo sapien
tttagctctaaggcgctgacatcag

SEQ ID NO: 5068722 - DNA, 25 bp, Homo sapien
tgtttagctctaaggcgctgacatc

SEQ ID NO: 5068723 - DNA, 25 bp, Homo sapien
acttcatgaagccttcacagggctc

SEQ ID NO: 5068724 - DNA, 25 bp, Homo sapien
catgaagccttcacagggctcttta

SEQ ID NO: 5068725 - DNA, 25 bp, Homo sapien
cttcatgaagccttcacagggctct

SEQ ID NO: 5068726 - DNA, 25 bp, Homo sapien
gaagccttcacagggctctttacag

SEQ ID NO: 5068727 - DNA, 25 bp, Homo sapien
caaccagagaggcagtaacagggct

SEQ ID NO: 5068728 - DNA, 25 bp, Homo sapien
gtaatgggcccactctgaaccagga

SEQ ID NO: 5068729 - DNA, 25 bp, Homo sapien
catttggaaaatgcaccgcagagtc

SEQ ID NO: 5068730 - DNA, 25 bp, Homo sapien
aaatcaggagtgttggtctgagcca

SEQ ID NO: 5068731 - DNA, 25 bp, Homo sapien
aatacaaggaagcacatggtgtaca

SEQ ID NO: 5068732 - DNA, 25 bp, Homo sapien
aacaatacaaggaagcacatggtgt

SEQ ID NO: 5068733 - DNA, 25 bp, Homo sapien
caaacaatacaaggaagcacatggt

SEQ ID NO: 5068734 - DNA, 25 bp, Homo sapien
caatacaaggaagcacatggtgtac

SEQ ID NO: 5068735 - DNA, 25 bp, Homo sapien
gcttggcgcgctggaaaaaccacat

SEQ ID NO: 5068736 - DNA, 25 bp, Homo sapien
gcttcttcctccgccagggtttcag

SEQ ID NO: 5068737 - DNA, 25 bp, Homo sapien
agcttggcgcgctggaaaaaccaca

SEQ ID NO: 5068738 - DNA, 25 bp, Homo sapien
cttcttcctccgccagggtttcagc

SEQ ID NO: 5068739 - DNA, 25 bp, Homo sapien
tcatcatgaccacgggtccccaaac

SEQ ID NO: 5068740 - DNA, 25 bp, Homo sapien
cttcatcatgaccacgggtccccaa

SEQ ID NO: 5068741 - DNA, 25 bp, Homo sapien
ttcatcatgaccacgggtccccaaa

SEQ ID NO: 5068742 - DNA, 25 bp, Homo sapien
ctgtgaggaccaagggcagcgaggt

SEQ ID NO: 5068743 - DNA, 25 bp, Homo sapien
gccatgtggaggtgcgagagccagc

SEQ ID NO: 5068744 - DNA, 25 bp, Homo sapien
actgtaaagagccatgtggaggtgc

SEQ ID NO: 5068745 - DNA, 25 bp, Homo sapien
gcagcgaggtttgggaaactgtaaa

SEQ ID NO: 5068746 - DNA, 25 bp, Homo sapien
tcataagcgtccacaagggaggtct

SEQ ID NO: 5068747 - DNA, 25 bp, Homo sapien
gggcgtaatcacagcagaccttggg

SEQ ID NO: 5068748 - DNA, 25 bp, Homo sapien
agacctcggcacttctcataagcgt

SEQ ID NO: 5068749 - DNA, 25 bp, Homo sapien
tgatccccacgtggagggcgtaatc

SEQ ID NO: 5068750 - DNA, 25 bp, Homo sapien
tacaagaccacttgtgccttcttct

SEQ ID NO: 5068751 - DNA, 25 bp, Homo sapien
gccttcttctgggatcccaccagca

SEQ ID NO: 5068752 - DNA, 25 bp, Homo sapien
ttctgggatcccaccagcactgtta

SEQ ID NO: 5068753 - DNA, 25 bp, Homo sapien
ctacaagaccacttgtgccttcttc

SEQ ID NO: 5068754 - DNA, 25 bp, Homo sapien
tacaggtccttgtaggtcatgaaca

SEQ ID NO: 5068755 - DNA, 25 bp, Homo sapien
gcaagcgtgcaacacttggtacagc

SEQ ID NO: 5068756 - DNA, 25 bp, Homo sapien
gaacatctggaacgagttgacaccc

SEQ ID NO: 5068757 - DNA, 25 bp, Homo sapien
cattttcagcatggacgcgggcgat

SEQ ID NO: 5068758 - DNA, 25 bp, Homo sapien
ctggtgtccctccatccaatattct

SEQ ID NO: 5068759 - DNA, 25 bp, Homo sapien
ccatccaatattcttggctgcagac

SEQ ID NO: 5068760 - DNA, 25 bp, Homo sapien
cctccatccaatattcttggctgca

SEQ ID NO: 5068761 - DNA, 25 bp, Homo sapien
gtgtccctccatccaatattcttgg

SEQ ID NO: 5068762 - DNA, 25 bp, Homo sapien
gtgatccccaaatccagtgcctcct

SEQ ID NO: 5068763 - DNA, 25 bp, Homo sapien
cctctggacggctgatctcgattcc

SEQ ID NO: 5068764 - DNA, 25 bp, Homo sapien
gacggctgatctcgattccttctgg

SEQ ID NO: 5068765 - DNA, 25 bp, Homo sapien
tctggacggctgatctcgattcctt

SEQ ID NO: 5068766 - DNA, 25 bp, Homo sapien
cctgtttgcaatggtgataacacga

SEQ ID NO: 5068767 - DNA, 25 bp, Homo sapien
tttgcaatggtgataacacgatgag

SEQ ID NO: 5068768 - DNA, 25 bp, Homo sapien
caatggtgataacacgatgagtggc

SEQ ID NO: 5068769 - DNA, 25 bp, Homo sapien
ggtgataacacgatgagtggcttca

SEQ ID NO: 5068770 - DNA, 25 bp, Homo sapien
gccgagatactggacacgttgacca

SEQ ID NO: 5068771 - DNA, 25 bp, Homo sapien
tcaccagccgagatactggacacgt

SEQ ID NO: 5068772 - DNA, 25 bp, Homo sapien
tgcgataacgtcaccagccgagata

SEQ ID NO: 5068773 - DNA, 25 bp, Homo sapien
catcttagcagctgcgataacgtca

SEQ ID NO: 5068774 - DNA, 25 bp, Homo sapien
tcaagagaacggttgtggtaggaca

SEQ ID NO: 5068775 - DNA, 25 bp, Homo sapien
aacaggcatgcagggccacgaatgc

SEQ ID NO: 5068776 - DNA, 25 bp, Homo sapien
cagttgctgtgagcagcttcaagag

SEQ ID NO: 5068777 - DNA, 25 bp, Homo sapien
tgccacgctaaagagcagtctagac

SEQ ID NO: 5068778 - DNA, 25 bp, Homo sapien
gcactttgaggagtctggtttggcc

SEQ ID NO: 5068779 - DNA, 25 bp, Homo sapien
agcggcactttgaggagtctggttt

SEQ ID NO: 5068780 - DNA, 25 bp, Homo sapien
caagcggcactttgaggagtctggt

SEQ ID NO: 5068781 - DNA, 25 bp, Homo sapien
ggaccaagcggcactttgaggagtc

SEQ ID NO: 5068782 - DNA, 25 bp, Homo sapien
tgtaagcctgtcagcgtggcatgtg

SEQ ID NO: 5068783 - DNA, 25 bp, Homo sapien
agtcctggtggtagtagtgtaagcc

SEQ ID NO: 5068784 - DNA, 25 bp, Homo sapien
gtgcagtggtggtctccgccagcac

SEQ ID NO: 5068785 - DNA, 25 bp, Homo sapien
gaggcaccgtgacataggcagccgc

SEQ ID NO: 5068786 - DNA, 25 bp, Homo sapien
caaacccgtggtgaagatgcatcgc

SEQ ID NO: 5068787 - DNA, 25 bp, Homo sapien
catatattaaggctgtcctcgggcc

SEQ ID NO: 5068788 - DNA, 25 bp, Homo sapien
aaaatcctccgtgtgggaagcaggc

SEQ ID NO: 5068789 - DNA, 25 bp, Homo sapien
tagaccgagagtggtatgcaagcca

SEQ ID NO: 5068790 - DNA, 25 bp, Homo sapien
ctttgtggtgaaaggccggtgatct

SEQ ID NO: 5068791 - DNA, 25 bp, Homo sapien
gaagtcttccttgcccatagctttc

SEQ ID NO: 5068792 - DNA, 25 bp, Homo sapien
tgatgccacgatgttcagagtgtca

SEQ ID NO: 5068793 - DNA, 25 bp, Homo sapien
tgtgggatcttggtgaagtcttcct

SEQ ID NO: 5068794 - DNA, 25 bp, Homo sapien
aggttcagaagcttagctgcgttgg

SEQ ID NO: 5068795 - DNA, 25 bp, Homo sapien
tgcgttggaactggtaacggccaca

SEQ ID NO: 5068796 - DNA, 25 bp, Homo sapien
taacggccacaaaacggttctcatc

SEQ ID NO: 5068797 - DNA, 25 bp, Homo sapien
catcggctccgggaataatgcggcc

SEQ ID NO: 5068798 - DNA, 25 bp, Homo sapien
tggaccagcttcttgtagacagtgt

SEQ ID NO: 5068799 - DNA, 25 bp, Homo sapien
gtggcagcgcatgttctcatacagg

SEQ ID NO: 5068800 - DNA, 25 bp, Homo sapien
gaagacgccgttctcatacacgacg

SEQ ID NO: 5068801 - DNA, 25 bp, Homo sapien
ctcatacaggttgaagtctcctccc

SEQ ID NO: 5068802 - DNA, 25 bp, Homo sapien
gagtgcggtccactcctctaacctt

SEQ ID NO: 5068803 - DNA, 25 bp, Homo sapien
tcttttttcccagggtgcacgacaa

SEQ ID NO: 5068804 - DNA, 25 bp, Homo sapien
ggattcgtgaaggtccctcatgccc

SEQ ID NO: 5068805 - DNA, 25 bp, Homo sapien
ccccaggtagggagtgcggtccact

SEQ ID NO: 5068806 - DNA, 25 bp, Homo sapien
ccgagctgaagctcgctttggaaca

SEQ ID NO: 5068807 - DNA, 25 bp, Homo sapien
agcgaggatccgagctgaagctcgc

SEQ ID NO: 5068808 - DNA, 25 bp, Homo sapien
ggaacatggtcatcgatctgagagc

SEQ ID NO: 5068809 - DNA, 25 bp, Homo sapien
cctccgggaggagcgaggatccgag

SEQ ID NO: 5068810 - DNA, 25 bp, Homo sapien
cacacaggaggagcgctgagtctct

SEQ ID NO: 5068811 - DNA, 25 bp, Homo sapien
caagtgcagcgtctcctaaggacca

SEQ ID NO: 5068812 - DNA, 25 bp, Homo sapien
tttcccaaagccagcggaggcagga

SEQ ID NO: 5068813 - DNA, 25 bp, Homo sapien
tttgcagacatagggagggctccgt

SEQ ID NO: 5068814 - DNA, 25 bp, Homo sapien
gatgaggccatgagctggcaagggc

SEQ ID NO: 5068815 - DNA, 25 bp, Homo sapien
agaagatgaggccatgagctggcaa

SEQ ID NO: 5068816 - DNA, 25 bp, Homo sapien
gatggacaggggagaagatgaggcc

SEQ ID NO: 5068817 - DNA, 25 bp, Homo sapien
acaggggagaagatgaggccatgag

SEQ ID NO: 5068818 - DNA, 25 bp, Homo sapien
tgggtcacttcccagatcactggag

SEQ ID NO: 5068819 - DNA, 25 bp, Homo sapien
gactagtcttggctcaaacacagaa

SEQ ID NO: 5068820 - DNA, 25 bp, Homo sapien
ccaaggttgggagggtcatcacaga

SEQ ID NO: 5068821 - DNA, 25 bp, Homo sapien
taaactctcaggtgggatctacaat

SEQ ID NO: 5068822 - DNA, 25 bp, Homo sapien
tagagatggtgtgcactgcaccagg

SEQ ID NO: 5068823 - DNA, 25 bp, Homo sapien
agggctgacagggatagagatggtg

SEQ ID NO: 5068824 - DNA, 25 bp, Homo sapien
caggaggcggcgtcatggtttcccc

SEQ ID NO: 5068825 - DNA, 25 bp, Homo sapien
ggctctttgacatctgcccaaggcc

SEQ ID NO: 5068826 - DNA, 25 bp, Homo sapien
gatgaagcgcatggcctacagtgga

SEQ ID NO: 5068827 - DNA, 25 bp, Homo sapien
gcattcagtgcaaccagagaccctt

SEQ ID NO: 5068828 - DNA, 25 bp, Homo sapien
ttctatctagaagctcccgggcaag

SEQ ID NO: 5068829 - DNA, 25 bp, Homo sapien
tacagtggaccactccaagacgtgg

SEQ ID NO: 5068830 - DNA, 25 bp, Homo sapien
tagtttttgcctcaaacggtggcca

SEQ ID NO: 5068831 - DNA, 25 bp, Homo sapien
agaaaagccctcatcacgacatcgg

SEQ ID NO: 5068832 - DNA, 25 bp, Homo sapien
gacatcggcttgacagagacctact

SEQ ID NO: 5068833 - DNA, 25 bp, Homo sapien
ttaaccccacaaacctagagagcag

SEQ ID NO: 5068834 - DNA, 25 bp, Homo sapien
ctcacagcccccgaaacgccttgct

SEQ ID NO: 5068835 - DNA, 25 bp, Homo sapien
caaaccagacagagaccacgcagaa

SEQ ID NO: 5068836 - DNA, 25 bp, Homo sapien
gggaagatggatcttcctggcattt

SEQ ID NO: 5068837 - DNA, 25 bp, Homo sapien
aggggaagatggatcttcctggcat

SEQ ID NO: 5068838 - DNA, 25 bp, Homo sapien
accagacagagaccacgcagaagag

SEQ ID NO: 5068839 - DNA, 25 bp, Homo sapien
agtacagtggccacgggccatccca

SEQ ID NO: 5068840 - DNA, 25 bp, Homo sapien
aggtagtacagtggccacgggccat

SEQ ID NO: 5068841 - DNA, 25 bp, Homo sapien
ttacaggtagtacagtggccacggg

SEQ ID NO: 5068842 - DNA, 25 bp, Homo sapien
gtggccacgggccatcccacaagat

SEQ ID NO: 5068843 - DNA, 25 bp, Homo sapien
agcagcgaccactgatgagctgaaa

SEQ ID NO: 5068844 - DNA, 25 bp, Homo sapien
tatctgttcacatcgtaagccaaag

SEQ ID NO: 5068845 - DNA, 25 bp, Homo sapien
acatcgtaagccaaagcagcgacca

SEQ ID NO: 5068846 - DNA, 25 bp, Homo sapien
taagccaaagcagcgaccactgatg

SEQ ID NO: 5068847 - DNA, 25 bp, Homo sapien
taactagctccctctgacatgtcca

SEQ ID NO: 5068848 - DNA, 25 bp, Homo sapien
cagtccacttcctcataactagctc

SEQ ID NO: 5068849 - DNA, 25 bp, Homo sapien
tagctccctctgacatgtccattcg

SEQ ID NO: 5068850 - DNA, 25 bp, Homo sapien
ctcataactagctccctctgacatg

SEQ ID NO: 5068851 - DNA, 25 bp, Homo sapien
gggacgagggcactgcgcaggcgcg

SEQ ID NO: 5068852 - DNA, 25 bp, Homo sapien
ggccgccgctgtcagtccgagcggg

SEQ ID NO: 5068853 - DNA, 25 bp, Homo sapien
ggcttcaacgcacagagactgcggg

SEQ ID NO: 5068854 - DNA, 25 bp, Homo sapien
gcggtctccggcttcaacgcacaga

SEQ ID NO: 5068855 - DNA, 25 bp, Homo sapien
gtccgtcgcctcggcccggactcac

SEQ ID NO: 5068856 - DNA, 25 bp, Homo sapien
cgtccgtcgcctcggcccggactca

SEQ ID NO: 5068857 - DNA, 25 bp, Homo sapien
gcgtccgtcgcctcggcccggactc

SEQ ID NO: 5068858 - DNA, 25 bp, Homo sapien
aaggtaggctccatgatccagctcc

SEQ ID NO: 5068859 - DNA, 25 bp, Homo sapien
aggtaggctccatgatccagctcca

SEQ ID NO: 5068860 - DNA, 25 bp, Homo sapien
gacagggtcagagtcaaagtgaatg

SEQ ID NO: 5068861 - DNA, 25 bp, Homo sapien
cagggtcagagtcaaagtgaatgat

SEQ ID NO: 5068862 - DNA, 25 bp, Homo sapien
ttagacagggtcagagtcaaagtga

SEQ ID NO: 5068863 - DNA, 25 bp, Homo sapien
tagacagggtcagagtcaaagtgaa

SEQ ID NO: 5068864 - DNA, 25 bp, Homo sapien
taatttctctgctaatgggcttgtc

SEQ ID NO: 5068865 - DNA, 25 bp, Homo sapien
ttcacaacttgactttaatttctct

SEQ ID NO: 5068866 - DNA, 25 bp, Homo sapien
aatttctctgctaatgggcttgtct

SEQ ID NO: 5068867 - DNA, 25 bp, Homo sapien
ctttaatttctctgctaatgggctt

SEQ ID NO: 5068868 - DNA, 25 bp, Homo sapien
gcctccctgagagttaagagccacc

SEQ ID NO: 5068869 - DNA, 25 bp, Homo sapien
cagcctccctgagagttaagagcca

SEQ ID NO: 5068870 - DNA, 25 bp, Homo sapien
atagagaggccagtaacacaaaatg

SEQ ID NO: 5068871 - DNA, 25 bp, Homo sapien
ctgtctccaatagagaggccagtaa

SEQ ID NO: 5068872 - DNA, 25 bp, Homo sapien
gatgaccccaaagtttcttgcccaa

SEQ ID NO: 5068873 - DNA, 25 bp, Homo sapien
ggactgaggatttgctgcagagcac

SEQ ID NO: 5068874 - DNA, 25 bp, Homo sapien
tgagagtgcagtgaagaccacgagc

SEQ ID NO: 5068875 - DNA, 25 bp, Homo sapien
gaccacgagctcacttaagattatg

SEQ ID NO: 5068876 - DNA, 25 bp, Homo sapien
cagaaagtcggatgctgaagatgtc

SEQ ID NO: 5068877 - DNA, 25 bp, Homo sapien
ctttccaccagaaagtcggatgctg

SEQ ID NO: 5068878 - DNA, 25 bp, Homo sapien
gtgtttgttgaactctctgtgccct

SEQ ID NO: 5068879 - DNA, 25 bp, Homo sapien
gtcggatgctgaagatgtccaggac

SEQ ID NO: 5068880 - DNA, 25 bp, Homo sapien
aattgctacccctacccctgtgagt

SEQ ID NO: 5068881 - DNA, 25 bp, Homo sapien
agagccagccaacacgtttcccgtt

SEQ ID NO: 5068882 - DNA, 25 bp, Homo sapien
gctgaagtcacctgtttggaaaatc

SEQ ID NO: 5068883 - DNA, 25 bp, Homo sapien
tcccgttcctgaagtgggactatgc

SEQ ID NO: 5068884 - DNA, 25 bp, Homo sapien
cattgggggttgacttgggcctgga

SEQ ID NO: 5068885 - DNA, 25 bp, Homo sapien
tttgcattgggggttgacttgggcc

SEQ ID NO: 5068886 - DNA, 25 bp, Homo sapien
gaggtccaacttctgattggctttt

SEQ ID NO: 5068887 - DNA, 25 bp, Homo sapien
tggcttttgcattgggggttgactt

SEQ ID NO: 5068888 - DNA, 25 bp, Homo sapien
atggggcttctggggaagcaggtag

SEQ ID NO: 5068889 - DNA, 25 bp, Homo sapien
ctatggggcttctggggaagcaggt

SEQ ID NO: 5068890 - DNA, 25 bp, Homo sapien
gctgttacccactatggggcttctg

SEQ ID NO: 5068891 - DNA, 25 bp, Homo sapien
tgttacccactatggggcttctggg

SEQ ID NO: 5068892 - DNA, 25 bp, Homo sapien
ctttcaggacccagcaacgaatcat

SEQ ID NO: 5068893 - DNA, 25 bp, Homo sapien
tgaaggaagctggaaaaaatggctc

SEQ ID NO: 5068894 - DNA, 25 bp, Homo sapien
aatggctcctttcaggacccagcaa

SEQ ID NO: 5068895 - DNA, 25 bp, Homo sapien
ctcctttcaggacccagcaacgaat

SEQ ID NO: 5068896 - DNA, 25 bp, Homo sapien
ttcggtctgactctagggtcccatg

SEQ ID NO: 5068897 - DNA, 25 bp, Homo sapien
cttcggtctgactctagggtcccat

SEQ ID NO: 5068898 - DNA, 25 bp, Homo sapien
tctgactctagggtcccatgagtgg

SEQ ID NO: 5068899 - DNA, 25 bp, Homo sapien
actctagggtcccatgagtggcagc

SEQ ID NO: 5068900 - DNA, 25 bp, Homo sapien
gagagtaatgttgactgcacttgag

SEQ ID NO: 5068901 - DNA, 25 bp, Homo sapien
ttcctcctccacaacgtctctgcgc

SEQ ID NO: 5068902 - DNA, 25 bp, Homo sapien
aatttcagagctttccgagagtaat

SEQ ID NO: 5068903 - DNA, 25 bp, Homo sapien
gctttccgagagtaatgttgactgc

SEQ ID NO: 5068904 - DNA, 25 bp, Homo sapien
gtctggaatgccgtccccaccccaa

SEQ ID NO: 5068905 - DNA, 25 bp, Homo sapien
atgccgtccccaccccaaagttcat

SEQ ID NO: 5068906 - DNA, 25 bp, Homo sapien
cctctgtctggaatgccgtccccac

SEQ ID NO: 5068907 - DNA, 25 bp, Homo sapien
tccccaccccaaagttcattcattc

SEQ ID NO: 5068908 - DNA, 25 bp, Homo sapien
cagcactggggcctcatgtagctcc

SEQ ID NO: 5068909 - DNA, 25 bp, Homo sapien
actggggcctcatgtagctccttag

SEQ ID NO: 5068910 - DNA, 25 bp, Homo sapien
caagaagaaaggtgaggtcagcact

SEQ ID NO: 5068911 - DNA, 25 bp, Homo sapien
gcactggggcctcatgtagctcctt

SEQ ID NO: 5068912 - DNA, 25 bp, Homo sapien
tgcaagcatatcatggcgactcaga

SEQ ID NO: 5068913 - DNA, 25 bp, Homo sapien
gatgtggagtacacattgacggcca

SEQ ID NO: 5068914 - DNA, 25 bp, Homo sapien
tatcttggtatagttgaggtgcagg

SEQ ID NO: 5068915 - DNA, 25 bp, Homo sapien
tgcagggagtcgttgacccatgcaa

SEQ ID NO: 5068916 - DNA, 25 bp, Homo sapien
caagtgcacacagccggggaagagc

SEQ ID NO: 5068917 - DNA, 25 bp, Homo sapien
tcttgaaagctgcttgcagcacctt

SEQ ID NO: 5068918 - DNA, 25 bp, Homo sapien
gtgctctagtttggcctggaacttc

SEQ ID NO: 5068919 - DNA, 25 bp, Homo sapien
tgaagttgtggatgtattcgtgctc

SEQ ID NO: 5068920 - DNA, 25 bp, Homo sapien
cagggtcacactgctcctcagggcc

SEQ ID NO: 5068921 - DNA, 25 bp, Homo sapien
agcagccccagttgcctgggctggt

SEQ ID NO: 5068922 - DNA, 25 bp, Homo sapien
ctgggctggtgggtcctcttcttcc

SEQ ID NO: 5068923 - DNA, 25 bp, Homo sapien
agggccccccagagcgcaggcacct

SEQ ID NO: 5068924 - DNA, 25 bp, Homo sapien
gaacttcacaggagcggtgcacaga

SEQ ID NO: 5068925 - DNA, 25 bp, Homo sapien
gagacactttcttgggccctacaga

SEQ ID NO: 5068926 - DNA, 25 bp, Homo sapien
agagacagagagaggtggaacttca

SEQ ID NO: 5068927 - DNA, 25 bp, Homo sapien
ccttggctctactgcctgcgtgtgg

SEQ ID NO: 5068928 - DNA, 25 bp, Homo sapien
ccctagtgtcagatccagaggcatc

SEQ ID NO: 5068929 - DNA, 25 bp, Homo sapien
tgctgctgtaggaccgccttcctct

SEQ ID NO: 5068930 - DNA, 25 bp, Homo sapien
tagaccacataagcagagtacttta

SEQ ID NO: 5068931 - DNA, 25 bp, Homo sapien
cagagtactttagccacctgctgct

SEQ ID NO: 5068932 - DNA, 25 bp, Homo sapien
ttcactaatttctctacaggaatga

SEQ ID NO: 5068933 - DNA, 25 bp, Homo sapien
tcactaatttctctacaggaatgat

SEQ ID NO: 5068934 - DNA, 25 bp, Homo sapien
tccatcatagtttgcgtcaaagaat

SEQ ID NO: 5068935 - DNA, 25 bp, Homo sapien
cagcagagggttgtaatcctttcca

SEQ ID NO: 5068936 - DNA, 25 bp, Homo sapien
tgggttaggaggtggcgctacgtcc

SEQ ID NO: 5068937 - DNA, 25 bp, Homo sapien
agggttgtaatcctttccatcatag

SEQ ID NO: 5068938 - DNA, 25 bp, Homo sapien
ctgtgccaatgagtttcttggattt

SEQ ID NO: 5068939 - DNA, 25 bp, Homo sapien
ccaatgagtttcttggatttgttga

SEQ ID NO: 5068940 - DNA, 25 bp, Homo sapien
gtttcttggatttgttgaagatctg

SEQ ID NO: 5068941 - DNA, 25 bp, Homo sapien
gagtttcttggatttgttgaagatc

SEQ ID NO: 5068942 - DNA, 25 bp, Homo sapien
gcatgccgtggcgacttgctcacta

SEQ ID NO: 5068943 - DNA, 25 bp, Homo sapien
tccctagacagagcgggctgcttct

SEQ ID NO: 5068944 - DNA, 25 bp, Homo sapien
tagcgactgcacctccctagacaga

SEQ ID NO: 5068945 - DNA, 25 bp, Homo sapien
cagcgcagccagcatgccgtggcga

SEQ ID NO: 5068946 - DNA, 25 bp, Homo sapien
gggaccctctcgtactcatagctag

SEQ ID NO: 5068947 - DNA, 25 bp, Homo sapien
gccccgagtcttggccacatggaca

SEQ ID NO: 5068948 - DNA, 25 bp, Homo sapien
tatagggaactaaacaaggtgtgag

SEQ ID NO: 5068949 - DNA, 25 bp, Homo sapien
gaaaagagtcaggtaagtccacgtg

SEQ ID NO: 5068950 - DNA, 25 bp, Homo sapien
tcagccggccagaggtctgcatgtt

SEQ ID NO: 5068951 - DNA, 25 bp, Homo sapien
atggccgccatttcgggctgatgga

SEQ ID NO: 5068952 - DNA, 25 bp, Homo sapien
tggaggattcttccggagaatgcag

SEQ ID NO: 5068953 - DNA, 25 bp, Homo sapien
gttcaagaatttgggcatcagtctc

SEQ ID NO: 5068954 - DNA, 25 bp, Homo sapien
tggcatagaggatgccaatgatgcc

SEQ ID NO: 5068955 - DNA, 25 bp, Homo sapien
tgctgaagtagaagtcacgttcctt

SEQ ID NO: 5068956 - DNA, 25 bp, Homo sapien
ttcactttcatgctcctggcagatg

SEQ ID NO: 5068957 - DNA, 25 bp, Homo sapien
gctcgatgtcacgaagtttgctgaa

SEQ ID NO: 5068958 - DNA, 25 bp, Homo sapien
tcttgttgatgctcttcaatctcat

SEQ ID NO: 5068959 - DNA, 25 bp, Homo sapien
ctggtcttcttgttgatgctcttca

SEQ ID NO: 5068960 - DNA, 25 bp, Homo sapien
tcagtactcgtcctggtcttcttgt

SEQ ID NO: 5068961 - DNA, 25 bp, Homo sapien
cgtcctcagggggtgcgaatccttc

SEQ ID NO: 5068962 - DNA, 25 bp, Homo sapien
cagcagagagacaacggaaataaat

SEQ ID NO: 5068963 - DNA, 25 bp, Homo sapien
gagcccgtgctgtcagctctggaaa

SEQ ID NO: 5068964 - DNA, 25 bp, Homo sapien
aacacatatgcaggctggtgcccga

SEQ ID NO: 5068965 - DNA, 25 bp, Homo sapien
taaagtgcaaggagaatccagtaag

SEQ ID NO: 5068966 - DNA, 25 bp, Homo sapien
ctgtggctcagttgagggacacatg

SEQ ID NO: 5068967 - DNA, 25 bp, Homo sapien
gctcagttgagggacacatggcatg

SEQ ID NO: 5068968 - DNA, 25 bp, Homo sapien
ggactgtggctcagttgagggacac

SEQ ID NO: 5068969 - DNA, 25 bp, Homo sapien
gtggctcagttgagggacacatggc

SEQ ID NO: 5068970 - DNA, 25 bp, Homo sapien
tccggtagctctgagatacagtgcc

SEQ ID NO: 5068971 - DNA, 25 bp, Homo sapien
gctctgagatacagtgcctttgcca

SEQ ID NO: 5068972 - DNA, 25 bp, Homo sapien
cggtagctctgagatacagtgcctt

SEQ ID NO: 5068973 - DNA, 25 bp, Homo sapien
tttgcatccggtagctctgagatac

SEQ ID NO: 5068974 - DNA, 25 bp, Homo sapien
gcgagcgcgccgcactctgccacgt

SEQ ID NO: 5068975 - DNA, 25 bp, Homo sapien
gcactctgccacgtctcctcgcagg

SEQ ID NO: 5068976 - DNA, 25 bp, Homo sapien
tctgccacgtctcctcgcaggaccg

SEQ ID NO: 5068977 - DNA, 25 bp, Homo sapien
ggctttccggtccggcgcgagcgcg

SEQ ID NO: 5068978 - DNA, 25 bp, Homo sapien
ccacgcccgccgtcttggtcgccat

SEQ ID NO: 5068979 - DNA, 25 bp, Homo sapien
gccccacgcccgccgtcttggtcgc

SEQ ID NO: 5068980 - DNA, 25 bp, Homo sapien
cccacgcccgccgtcttggtcgcca

SEQ ID NO: 5068981 - DNA, 25 bp, Homo sapien
gccggcgccgaccccaggccgccga

SEQ ID NO: 5068982 - DNA, 25 bp, Homo sapien
ggcgccggcgccgaccccaggccgc

SEQ ID NO: 5068983 - DNA, 25 bp, Homo sapien
tcggccgccggcgccggcgccgacc

SEQ ID NO: 5068984 - DNA, 25 bp, Homo sapien
ccgccggcgccggcgccgaccccag

SEQ ID NO: 5068985 - DNA, 25 bp, Homo sapien
ggtcgtatttccacactccgtttgc

SEQ ID NO: 5068986 - DNA, 25 bp, Homo sapien
gtatttccacactccgtttgcttcc

SEQ ID NO: 5068987 - DNA, 25 bp, Homo sapien
gggtcaggtcgtatttccacactcc

SEQ ID NO: 5068988 - DNA, 25 bp, Homo sapien
ctccgtttgcttccccgagcgccct

SEQ ID NO: 5068989 - DNA, 25 bp, Homo sapien
tctcaaagccccgctcataaagggt

SEQ ID NO: 5068990 - DNA, 25 bp, Homo sapien
ggggtgggacctgctccttattctg

SEQ ID NO: 5068991 - DNA, 25 bp, Homo sapien
tattctcaaagccccgctcataaag

SEQ ID NO: 5068992 - DNA, 25 bp, Homo sapien
caaagccccgctcataaagggtgct

SEQ ID NO: 5068993 - DNA, 25 bp, Homo sapien
caggtccttcaaccatatggatggg

SEQ ID NO: 5068994 - DNA, 25 bp, Homo sapien
gttgagatagctggccaggtccttc

SEQ ID NO: 5068995 - DNA, 25 bp, Homo sapien
agtatgctggctcagcgtgggttca

SEQ ID NO: 5068996 - DNA, 25 bp, Homo sapien
cgtgggttcacttagaggagcttgt

SEQ ID NO: 5068997 - DNA, 25 bp, Homo sapien
gggcactgggatctgttataccacc

SEQ ID NO: 5068998 - DNA, 25 bp, Homo sapien
aggcccagaaacattcacagtcacg

SEQ ID NO: 5068999 - DNA, 25 bp, Homo sapien
tcacagtcacgatgatttgagacca

SEQ ID NO: 5069000 - DNA, 25 bp, Homo sapien
agcccaaatcacccatggaaatcag

SEQ ID NO: 5069001 - DNA, 25 bp, Homo sapien
gtgagtgctaggaccagacacccat

SEQ ID NO: 5069002 - DNA, 25 bp, Homo sapien
agtgctaggaccagacacccatcag

SEQ ID NO: 5069003 - DNA, 25 bp, Homo sapien
ctcaatgtgagtgctaggaccagac

SEQ ID NO: 5069004 - DNA, 25 bp, Homo sapien
taggaccagacacccatcagctctg

SEQ ID NO: 5069005 - DNA, 25 bp, Homo sapien
cggctcaccaggctgtagggataat

SEQ ID NO: 5069006 - DNA, 25 bp, Homo sapien
caacatggtgaacagacagtggtca

SEQ ID NO: 5069007 - DNA, 25 bp, Homo sapien
caaaaaagagctccagagaccctgc

SEQ ID NO: 5069008 - DNA, 25 bp, Homo sapien
ggtgtcttatccagctcttgcaaca

SEQ ID NO: 5069009 - DNA, 25 bp, Homo sapien
tgttaaggttagcacatttctctgc

SEQ ID NO: 5069010 - DNA, 25 bp, Homo sapien
gaaatctcccatttgtcagcggtga

SEQ ID NO: 5069011 - DNA, 25 bp, Homo sapien
aaccactgagtggtactggaagcag

SEQ ID NO: 5069012 - DNA, 25 bp, Homo sapien
ggagagatacacattctcacaccta

SEQ ID NO: 5069013 - DNA, 25 bp, Homo sapien
cttgcctaggtttgccgtggcaatc

SEQ ID NO: 5069014 - DNA, 25 bp, Homo sapien
gatgcggtaaccatgtagtgactcc

SEQ ID NO: 5069015 - DNA, 25 bp, Homo sapien
gcctggatacagatgcggtaaccat

SEQ ID NO: 5069016 - DNA, 25 bp, Homo sapien
ggcaatcttgggcttgtcttgcagg

SEQ ID NO: 5069017 - DNA, 25 bp, Homo sapien
acactttgctggtcggctctggtgg

SEQ ID NO: 5069018 - DNA, 25 bp, Homo sapien
tggtgggacctcagcagttccagga

SEQ ID NO: 5069019 - DNA, 25 bp, Homo sapien
gctctggtgggacctcagcagttcc

SEQ ID NO: 5069020 - DNA, 25 bp, Homo sapien
gagacactttgctggtcggctctgg

SEQ ID NO: 5069021 - DNA, 25 bp, Homo sapien
tgaggttggcaaaacctgcttgacc

SEQ ID NO: 5069022 - DNA, 25 bp, Homo sapien
ctttcagtccctcggtgaggttggc

SEQ ID NO: 5069023 - DNA, 25 bp, Homo sapien
tggcaaaacctgcttgacccagggc

SEQ ID NO: 5069024 - DNA, 25 bp, Homo sapien
ctcggtgaggttggcaaaacctgct

SEQ ID NO: 5069025 - DNA, 25 bp, Homo sapien
aggagcagccgatccaggtatgtga

SEQ ID NO: 5069026 - DNA, 25 bp, Homo sapien
ggagacagagacttgatgcccagca

SEQ ID NO: 5069027 - DNA, 25 bp, Homo sapien
gggagacagagacttgatgcccagc

SEQ ID NO: 5069028 - DNA, 25 bp, Homo sapien
cgatccaggtatgtgatggcaaagg

SEQ ID NO: 5069029 - DNA, 25 bp, Homo sapien
gattttcctcatatccatggagacc

SEQ ID NO: 5069030 - DNA, 25 bp, Homo sapien
taacagccacttgggacaccctgag

SEQ ID NO: 5069031 - DNA, 25 bp, Homo sapien
tgaagaaacaggctcgctggacacc

SEQ ID NO: 5069032 - DNA, 25 bp, Homo sapien
gccagctgttttggccatgacccca

SEQ ID NO: 5069033 - DNA, 25 bp, Homo sapien
tgttcggcatataggcaaagtccag

SEQ ID NO: 5069034 - DNA, 25 bp, Homo sapien
gtgtcagggagttgttcggcatata

SEQ ID NO: 5069035 - DNA, 25 bp, Homo sapien
catgccgaagcccttggtaaggttg

SEQ ID NO: 5069036 - DNA, 25 bp, Homo sapien
tccttggggccaatcatgccgaagc

SEQ ID NO: 5069037 - DNA, 25 bp, Homo sapien
tggaatccggctttgctccaaatgc

SEQ ID NO: 5069038 - DNA, 25 bp, Homo sapien
gccagcactttcagtcgggggtaga

SEQ ID NO: 5069039 - DNA, 25 bp, Homo sapien
agtaggtatgcagggtggaatccgg

SEQ ID NO: 5069040 - DNA, 25 bp, Homo sapien
ttcagtcgggggtagagctgacaca

SEQ ID NO: 5069041 - DNA, 25 bp, Homo sapien
cttcatctcagggggacagctaggg

SEQ ID NO: 5069042 - DNA, 25 bp, Homo sapien
tttcttcatctcagggggacagcta

SEQ ID NO: 5069043 - DNA, 25 bp, Homo sapien
ctcagggggacagctaggggtggct

SEQ ID NO: 5069044 - DNA, 25 bp, Homo sapien
ctctttcttcatctcagggggacag

SEQ ID NO: 5069045 - DNA, 25 bp, Homo sapien
tcagcagatagggaccgctacagct

SEQ ID NO: 5069046 - DNA, 25 bp, Homo sapien
ggcctttgtcagcagatagggaccg

SEQ ID NO: 5069047 - DNA, 25 bp, Homo sapien
tttgtcagcagatagggaccgctac

SEQ ID NO: 5069048 - DNA, 25 bp, Homo sapien
agatagggaccgctacagctgaccc

SEQ ID NO: 5069049 - DNA, 25 bp, Homo sapien
ctaaggaaaagcctcagaatgggct

SEQ ID NO: 5069050 - DNA, 25 bp, Homo sapien
tgagggtgaagctcgagtgagcggg

SEQ ID NO: 5069051 - DNA, 25 bp, Homo sapien
ttctgagggtgaagctcgagtgagc

SEQ ID NO: 5069052 - DNA, 25 bp, Homo sapien
gaagctcgagtgagcggggcaggca

SEQ ID NO: 5069053 - DNA, 25 bp, Homo sapien
tcttctgagggtgaagctcgagtga

SEQ ID NO: 5069054 - DNA, 25 bp, Homo sapien
ccttcccgtaagcaaggccatccag

SEQ ID NO: 5069055 - DNA, 25 bp, Homo sapien
gtgctaagaggtgatccccttcccg

SEQ ID NO: 5069056 - DNA, 25 bp, Homo sapien
aggtgatccccttcccgtaagcaag

SEQ ID NO: 5069057 - DNA, 25 bp, Homo sapien
tgcacagcacgacagagggagaggc

SEQ ID NO: 5069058 - DNA, 25 bp, Homo sapien
actgagggggtccaccgtcaggcac

SEQ ID NO: 5069059 - DNA, 25 bp, Homo sapien
ggtccaccgtcaggcactcagtcag

SEQ ID NO: 5069060 - DNA, 25 bp, Homo sapien
gactgtgacaggtgcttagggtaca

SEQ ID NO: 5069061 - DNA, 25 bp, Homo sapien
caggtgcttagggtacagctgcctc

SEQ ID NO: 5069062 - DNA, 25 bp, Homo sapien
ttcttgggaatctgctcccaggagc

SEQ ID NO: 5069063 - DNA, 25 bp, Homo sapien
cttcttgggaatctgctcccaggag

SEQ ID NO: 5069064 - DNA, 25 bp, Homo sapien
agctgagcaagtgctccagcagaag

SEQ ID NO: 5069065 - DNA, 25 bp, Homo sapien
cccaggagctgagcaagtgctccag

SEQ ID NO: 5069066 - DNA, 25 bp, Homo sapien
ggttgttactgctacccttcctcag

SEQ ID NO: 5069067 - DNA, 25 bp, Homo sapien
ctcctggttggtaagcttgagggac

SEQ ID NO: 5069068 - DNA, 25 bp, Homo sapien
taagcttgagggactgaatggtttc

SEQ ID NO: 5069069 - DNA, 25 bp, Homo sapien
catgtcacaggtgacgacatcctgg

SEQ ID NO: 5069070 - DNA, 25 bp, Homo sapien
agggcagccgaggaccctgaacctg

SEQ ID NO: 5069071 - DNA, 25 bp, Homo sapien
cctggaaggagctgtgtgaccggag

SEQ ID NO: 5069072 - DNA, 25 bp, Homo sapien
gcacaggaagcctacagcgaagacc

SEQ ID NO: 5069073 - DNA, 25 bp, Homo sapien
accggaggtcatggcacaggaagcc

SEQ ID NO: 5069074 - DNA, 25 bp, Homo sapien
ggagcctaggctcaggcttcaggaa

SEQ ID NO: 5069075 - DNA, 25 bp, Homo sapien
tctgagaccatttcctcaggagtta

SEQ ID NO: 5069076 - DNA, 25 bp, Homo sapien
gctatgacctaaagctaattgctac

SEQ ID NO: 5069077 - DNA, 25 bp, Homo sapien
gagggtctgcccttctacttactag

SEQ ID NO: 5069078 - DNA, 25 bp, Homo sapien
aagtaaagggggcctctggtgagct

SEQ ID NO: 5069079 - DNA, 25 bp, Homo sapien
gtaaagggggcctctggtgagctgg

SEQ ID NO: 5069080 - DNA, 25 bp, Homo sapien
aaagggggcctctggtgagctggga

SEQ ID NO: 5069081 - DNA, 25 bp, Homo sapien
ctaagtaaagggggcctctggtgag

SEQ ID NO: 5069082 - DNA, 25 bp, Homo sapien
ctgtagccttgcagactgtaggagt

SEQ ID NO: 5069083 - DNA, 25 bp, Homo sapien
gactgtaggagtagagcttggcaca

SEQ ID NO: 5069084 - DNA, 25 bp, Homo sapien
tggcacacgcttgttggctagcagg

SEQ ID NO: 5069085 - DNA, 25 bp, Homo sapien
agatgatcgaagcaaccggccagta

SEQ ID NO: 5069086 - DNA, 25 bp, Homo sapien
cttagctcccaagaaacagctgggg

SEQ ID NO: 5069087 - DNA, 25 bp, Homo sapien
aaggagaatcacaagcgcttcccac

SEQ ID NO: 5069088 - DNA, 25 bp, Homo sapien
cacttagctcccaagaaacagctgg

SEQ ID NO: 5069089 - DNA, 25 bp, Homo sapien
ggagaatcacaagcgcttcccactg

SEQ ID NO: 5069090 - DNA, 25 bp, Homo sapien
gagagactggtgagactgtcaccaa

SEQ ID NO: 5069091 - DNA, 25 bp, Homo sapien
caccaaaccacgcaaggtgagaggc

SEQ ID NO: 5069092 - DNA, 25 bp, Homo sapien
gagactgtcaccaaaccacgcaagg

SEQ ID NO: 5069093 - DNA, 25 bp, Homo sapien
aagctgggccgcaccacggtgagca

SEQ ID NO: 5069094 - DNA, 25 bp, Homo sapien
gggtcagagtatccagggaactgca

SEQ ID NO: 5069095 - DNA, 25 bp, Homo sapien
tttcccagaattctgctcctgggaa

SEQ ID NO: 5069096 - DNA, 25 bp, Homo sapien
tgctcctgggaaaaccagcccctta

SEQ ID NO: 5069097 - DNA, 25 bp, Homo sapien
gaactgcatcctggccctaaagact

SEQ ID NO: 5069098 - DNA, 25 bp, Homo sapien
tcaagcaagaggtgccacagtggca

SEQ ID NO: 5069099 - DNA, 25 bp, Homo sapien
gcagctctctcagatagcggagtag

SEQ ID NO: 5069100 - DNA, 25 bp, Homo sapien
agtggcagcagcacattctggtgga

SEQ ID NO: 5069101 - DNA, 25 bp, Homo sapien
gcggagtagctgattcacggaatcg

SEQ ID NO: 5069102 - DNA, 25 bp, Homo sapien
ctactgctgggatatcagggcaagt

SEQ ID NO: 5069103 - DNA, 25 bp, Homo sapien
aaagccactgtaatgtcctgtaggc

SEQ ID NO: 5069104 - DNA, 25 bp, Homo sapien
gccaggtccagtggacagcctcact

SEQ ID NO: 5069105 - DNA, 25 bp, Homo sapien
agtgcccagtccaagaaagccactg

SEQ ID NO: 5069106 - DNA, 25 bp, Homo sapien
tgccaccttctacccgctgcagtct

SEQ ID NO: 5069107 - DNA, 25 bp, Homo sapien
gatggtctacccatgcagaaatcag

SEQ ID NO: 5069108 - DNA, 25 bp, Homo sapien
gaactcaggcaccaagttaaaaaga

SEQ ID NO: 5069109 - DNA, 25 bp, Homo sapien
ctcaggcaccaagttaaaaagactc

SEQ ID NO: 5069110 - DNA, 25 bp, Homo sapien
cacctgctgggagttctatcttttt

SEQ ID NO: 5069111 - DNA, 25 bp, Homo sapien
cggagttgtgagaggctaccagcac

SEQ ID NO: 5069112 - DNA, 25 bp, Homo sapien
ggagaagcaggaatcatttgtcaga

SEQ ID NO: 5069113 - DNA, 25 bp, Homo sapien
tccccaccaaagatggaagaactga

SEQ ID NO: 5069114 - DNA, 25 bp, Homo sapien
tctgctgtggctagagctgtgacca

SEQ ID NO: 5069115 - DNA, 25 bp, Homo sapien
tgctgtggctagagctgtgaccaag

SEQ ID NO: 5069116 - DNA, 25 bp, Homo sapien
tgctgtttcccaatgcggtgctata

SEQ ID NO: 5069117 - DNA, 25 bp, Homo sapien
atgcggtgctatattcttctggaag

SEQ ID NO: 5069118 - DNA, 25 bp, Homo sapien
tgagaggcatttccatccagctccc

SEQ ID NO: 5069119 - DNA, 25 bp, Homo sapien
tggagagaagctgagccttgtgacc

SEQ ID NO: 5069120 - DNA, 25 bp, Homo sapien
ctacagatgataggagggatggaca

SEQ ID NO: 5069121 - DNA, 25 bp, Homo sapien
ttggaagaagtaggactacaaggga

SEQ ID NO: 5069122 - DNA, 25 bp, Homo sapien
ctgggcccaaggcacacaactgcct

SEQ ID NO: 5069123 - DNA, 25 bp, Homo sapien
aggcacacaactgcctgtgctctgc

SEQ ID NO: 5069124 - DNA, 25 bp, Homo sapien
ggcccaaggcacacaactgcctgtg

SEQ ID NO: 5069125 - DNA, 25 bp, Homo sapien
aaggcacacaactgcctgtgctctg

SEQ ID NO: 5069126 - DNA, 25 bp, Homo sapien
cctgtctcaggttgatggagggttc

SEQ ID NO: 5069127 - DNA, 25 bp, Homo sapien
ctgtctcaggttgatggagggttcc

SEQ ID NO: 5069128 - DNA, 25 bp, Homo sapien
aagaaccatatactgagtcctgtct

SEQ ID NO: 5069129 - DNA, 25 bp, Homo sapien
catatactgagtcctgtctcaggtt

SEQ ID NO: 5069130 - DNA, 25 bp, Homo sapien
ctttattccacctggtagggcatac

SEQ ID NO: 5069131 - DNA, 25 bp, Homo sapien
ctgtgtcctttattccacctggtag

SEQ ID NO: 5069132 - DNA, 25 bp, Homo sapien
aatctgtgtcctttattccacctgg

SEQ ID NO: 5069133 - DNA, 25 bp, Homo sapien
gtcctttattccacctggtagggca

SEQ ID NO: 5069134 - DNA, 25 bp, Homo sapien
tggccaagaattcccctaggagacg

SEQ ID NO: 5069135 - DNA, 25 bp, Homo sapien
caaggcaaatctgggacgtgaatca

SEQ ID NO: 5069136 - DNA, 25 bp, Homo sapien
acagccacggctacagtcttcagga

SEQ ID NO: 5069137 - DNA, 25 bp, Homo sapien
gataactggccatcatacctgctga

SEQ ID NO: 5069138 - DNA, 25 bp, Homo sapien
tttgggtcgatactttcctacatct

SEQ ID NO: 5069139 - DNA, 25 bp, Homo sapien
tgggtcgatactttcctacatctgc

SEQ ID NO: 5069140 - DNA, 25 bp, Homo sapien
tacatctgctactttatattcgaac

SEQ ID NO: 5069141 - DNA, 25 bp, Homo sapien
catctgctactttatattcgaacca

SEQ ID NO: 5069142 - DNA, 25 bp, Homo sapien
cgtagcgaacacgagatgctgttgt

SEQ ID NO: 5069143 - DNA, 25 bp, Homo sapien
gtgggctaattccagaggaaacgta

SEQ ID NO: 5069144 - DNA, 25 bp, Homo sapien
ttccagaggaaacgtagcgaacacg

SEQ ID NO: 5069145 - DNA, 25 bp, Homo sapien
gatgctgttgtattcatgacctcac

SEQ ID NO: 5069146 - DNA, 25 bp, Homo sapien
aagactttggccctttgccaggtag

SEQ ID NO: 5069147 - DNA, 25 bp, Homo sapien
ggaagatggtcatggttaattgcca

SEQ ID NO: 5069148 - DNA, 25 bp, Homo sapien
tcctgcccagcagtcctaagacttt

SEQ ID NO: 5069149 - DNA, 25 bp, Homo sapien
caggaagatggtcatggttaattgc

SEQ ID NO: 5069150 - DNA, 25 bp, Homo sapien
cggaagcgctcgcaagcctggggga

SEQ ID NO: 5069151 - DNA, 25 bp, Homo sapien
gggccgccctgggatcgcgggcctg

SEQ ID NO: 5069152 - DNA, 25 bp, Homo sapien
agagggctacgcgccaggagagggc

SEQ ID NO: 5069153 - DNA, 25 bp, Homo sapien
tacaggctttcctgccctcggaagc

SEQ ID NO: 5069154 - DNA, 25 bp, Homo sapien
gtgcaagagagacggcgaccgcggg

SEQ ID NO: 5069155 - DNA, 25 bp, Homo sapien
gagagacggcgaccgcggggtgctg

SEQ ID NO: 5069156 - DNA, 25 bp, Homo sapien
aagagagacggcgaccgcggggtgc

SEQ ID NO: 5069157 - DNA, 25 bp, Homo sapien
cagtgcaagagagacggcgaccgcg

SEQ ID NO: 5069158 - DNA, 25 bp, Homo sapien
cccttggcttctccggacgtgctct

SEQ ID NO: 5069159 - DNA, 25 bp, Homo sapien
gggctttgcgaccgcgacgcgcaaa

SEQ ID NO: 5069160 - DNA, 25 bp, Homo sapien
gcgacgcgcaaaccctgctcgagag

SEQ ID NO: 5069161 - DNA, 25 bp, Homo sapien
cgatgggccactttggctgctcctg

SEQ ID NO: 5069162 - DNA, 25 bp, Homo sapien
ccagccatgacccccgctttctcca

SEQ ID NO: 5069163 - DNA, 25 bp, Homo sapien
catgacccccgctttctccagctga

SEQ ID NO: 5069164 - DNA, 25 bp, Homo sapien
ccatgacccccgctttctccagctg

SEQ ID NO: 5069165 - DNA, 25 bp, Homo sapien
cagccatgacccccgctttctccag

SEQ ID NO: 5069166 - DNA, 25 bp, Homo sapien
taaggattgccacgccctatccact

SEQ ID NO: 5069167 - DNA, 25 bp, Homo sapien
acgccctatccactacagtcctccg

SEQ ID NO: 5069168 - DNA, 25 bp, Homo sapien
cctaaggattgccacgccctatcca

SEQ ID NO: 5069169 - DNA, 25 bp, Homo sapien
attgccacgccctatccactacagt

SEQ ID NO: 5069170 - DNA, 25 bp, Homo sapien
gatgcgggcatcgatcccgctacct

SEQ ID NO: 5069171 - DNA, 25 bp, Homo sapien
ggaggatgcgggcatcgatcccgct

SEQ ID NO: 5069172 - DNA, 25 bp, Homo sapien
ctctaccatttgagctaatcccccg

SEQ ID NO: 5069173 - DNA, 25 bp, Homo sapien
aggatgcgggcatcgatcccgctac

SEQ ID NO: 5069174 - DNA, 25 bp, Homo sapien
gggaggcgggaaagataaagcggca

SEQ ID NO: 5069175 - DNA, 25 bp, Homo sapien
ataaagcggcagaaactgggactca

SEQ ID NO: 5069176 - DNA, 25 bp, Homo sapien
aagataaagcggcagaaactgggac

SEQ ID NO: 5069177 - DNA, 25 bp, Homo sapien
ggcgggaaagataaagcggcagaaa

SEQ ID NO: 5069178 - DNA, 25 bp, Homo sapien
gccggagggttctagcagcgtcttc

SEQ ID NO: 5069179 - DNA, 25 bp, Homo sapien
caggagcggccggagggttctagca

SEQ ID NO: 5069180 - DNA, 25 bp, Homo sapien
acgatggcgggcaggagcggccgga

SEQ ID NO: 5069181 - DNA, 25 bp, Homo sapien
tagcagcgtcttccggaagacggtt

SEQ ID NO: 5069182 - DNA, 25 bp, Homo sapien
agctggcgacccgcccagtaaagct

SEQ ID NO: 5069183 - DNA, 25 bp, Homo sapien
gtaaagctcgctaccattggtcagc

SEQ ID NO: 5069184 - DNA, 25 bp, Homo sapien
cagtaaagctcgctaccattggtca

SEQ ID NO: 5069185 - DNA, 25 bp, Homo sapien
cgcccagtaaagctcgctaccattg

SEQ ID NO: 5069186 - DNA, 25 bp, Homo sapien
tcccgctagcgaggccgcaccttgg

SEQ ID NO: 5069187 - DNA, 25 bp, Homo sapien
tccctctcccgctagcgaggccgca

SEQ ID NO: 5069188 - DNA, 25 bp, Homo sapien
ctctccgggccggtgatcccgctcc

SEQ ID NO: 5069189 - DNA, 25 bp, Homo sapien
ccaaaaacacccgagcgccgcggtg

SEQ ID NO: 5069190 - DNA, 25 bp, Homo sapien
taccctagtagctgtggatgagtaa

SEQ ID NO: 5069191 - DNA, 25 bp, Homo sapien
ggaaccgtcacaccgagcgggcttg

SEQ ID NO: 5069192 - DNA, 25 bp, Homo sapien
tgcaccctgagaaagctaccctagt

SEQ ID NO: 5069193 - DNA, 25 bp, Homo sapien
gtgttctcagcacccctaaaagagg

SEQ ID NO: 5069194 - DNA, 25 bp, Homo sapien
tacatggccacctttagagatgggc

SEQ ID NO: 5069195 - DNA, 25 bp, Homo sapien
tctgtcctcacaagtactgagcgga

SEQ ID NO: 5069196 - DNA, 25 bp, Homo sapien
tgtaaatgggtagtcctctctccag

SEQ ID NO: 5069197 - DNA, 25 bp, Homo sapien
agatgggccgttctggatctctggc

SEQ ID NO: 5069198 - DNA, 25 bp, Homo sapien
tagggagtgccctatgaaacaaaag

SEQ ID NO: 5069199 - DNA, 25 bp, Homo sapien
gctttgcagcccaaagattagagaa

SEQ ID NO: 5069200 - DNA, 25 bp, Homo sapien
tagaagtggtcttccagcaaaggcc

SEQ ID NO: 5069201 - DNA, 25 bp, Homo sapien
cattctgtaccccaacactaagggt

SEQ ID NO: 5069202 - DNA, 25 bp, Homo sapien
gaatcaaagcgagaactgaacagca

SEQ ID NO: 5069203 - DNA, 25 bp, Homo sapien
tctccacgtgggctagattccctga

SEQ ID NO: 5069204 - DNA, 25 bp, Homo sapien
ggtcgggtccacacgttgaattcat

SEQ ID NO: 5069205 - DNA, 25 bp, Homo sapien
caaattccgtttcagcacagtctgg

SEQ ID NO: 5069206 - DNA, 25 bp, Homo sapien
gcatgggtttggagcctttttccac

SEQ ID NO: 5069207 - DNA, 25 bp, Homo sapien
tatgaacagataagtcagagggcta

SEQ ID NO: 5069208 - DNA, 25 bp, Homo sapien
cagagggctaactgaagcatgggtt

SEQ ID NO: 5069209 - DNA, 25 bp, Homo sapien
cagccaaactgggaaagggctattt

SEQ ID NO: 5069210 - DNA, 25 bp, Homo sapien
ttcctccccggacgctgaagtagaa

SEQ ID NO: 5069211 - DNA, 25 bp, Homo sapien
tccccggacgctgaagtagaaccat

SEQ ID NO: 5069212 - DNA, 25 bp, Homo sapien
tggcattcctccccggacgctgaag

SEQ ID NO: 5069213 - DNA, 25 bp, Homo sapien
ccggacgctgaagtagaaccatgac

SEQ ID NO: 5069214 - DNA, 25 bp, Homo sapien
aaaggtgggccggtctcgaatgcgt

SEQ ID NO: 5069215 - DNA, 25 bp, Homo sapien
gtctcgaatgcgttcccagcgtggc

SEQ ID NO: 5069216 - DNA, 25 bp, Homo sapien
gtgggccggtctcgaatgcgttccc

SEQ ID NO: 5069217 - DNA, 25 bp, Homo sapien
ccgggtgggcagtgtgcgcacaaag

SEQ ID NO: 5069218 - DNA, 25 bp, Homo sapien
tatatgaaaagtggctccttctagg

SEQ ID NO: 5069219 - DNA, 25 bp, Homo sapien
aaagtggctccttctaggcttcctg

SEQ ID NO: 5069220 - DNA, 25 bp, Homo sapien
ttccctccctgtgacactttctata

SEQ ID NO: 5069221 - DNA, 25 bp, Homo sapien
ctttctatatgaaaagtggctcctt

SEQ ID NO: 5069222 - DNA, 25 bp, Homo sapien
ggttctccggaaagcgctggtctag

SEQ ID NO: 5069223 - DNA, 25 bp, Homo sapien
gctggtctagctggtttagcagttc

SEQ ID NO: 5069224 - DNA, 25 bp, Homo sapien
acggccctccacgaaacgatgaaca

SEQ ID NO: 5069225 - DNA, 25 bp, Homo sapien
cagaaggcgaagaaggtggtggccc

SEQ ID NO: 5069226 - DNA, 25 bp, Homo sapien
ccatggcaggaagtgatcgtcagca

SEQ ID NO: 5069227 - DNA, 25 bp, Homo sapien
tccagagaatagcaaaggagctccc

SEQ ID NO: 5069228 - DNA, 25 bp, Homo sapien
gatctacacgaagtccatccagaga

SEQ ID NO: 5069229 - DNA, 25 bp, Homo sapien
ggagctcccgatggtaatagatggt

SEQ ID NO: 5069230 - DNA, 25 bp, Homo sapien
tcatcaggtcggaggatgaagtcca

SEQ ID NO: 5069231 - DNA, 25 bp, Homo sapien
cagcttaaagacgaagaggcgacgg

SEQ ID NO: 5069232 - DNA, 25 bp, Homo sapien
ggaccacaccatcggggttcaacat

SEQ ID NO: 5069233 - DNA, 25 bp, Homo sapien
gaagacaaagctagatggagtctcc

SEQ ID NO: 5069234 - DNA, 25 bp, Homo sapien
cctttattagggtgcaagaggactg

SEQ ID NO: 5069235 - DNA, 25 bp, Homo sapien
tggttcctttctgggagtgccacta

SEQ ID NO: 5069236 - DNA, 25 bp, Homo sapien
gaaatgggaacagtccagacaggct

SEQ ID NO: 5069237 - DNA, 25 bp, Homo sapien
tatgatctcatgctttctcaggaag

SEQ ID NO: 5069238 - DNA, 25 bp, Homo sapien
gcaggacggcatcaggcttcaggta

SEQ ID NO: 5069239 - DNA, 25 bp, Homo sapien
gagttcagacgagagtgcacatggt

SEQ ID NO: 5069240 - DNA, 25 bp, Homo sapien
tgtttccgtacatgaagcagcccct

SEQ ID NO: 5069241 - DNA, 25 bp, Homo sapien
tcaagccccgcagactgttgtggca

SEQ ID NO: 5069242 - DNA, 25 bp, Homo sapien
tcccagactctagcagactataatg

SEQ ID NO: 5069243 - DNA, 25 bp, Homo sapien
gaaaagtcaactcagaaggagagac

SEQ ID NO: 5069244 - DNA, 25 bp, Homo sapien
tcagaggtagtctacacaggccttc

SEQ ID NO: 5069245 - DNA, 25 bp, Homo sapien
gacaaggtgcaaggaagagatagca

SEQ ID NO: 5069246 - DNA, 25 bp, Homo sapien
tttgtagattgcaacacggccgctt

SEQ ID NO: 5069247 - DNA, 25 bp, Homo sapien
gactggccatctctacggtctcggg

SEQ ID NO: 5069248 - DNA, 25 bp, Homo sapien
acggccgcttccctctttagactgg

SEQ ID NO: 5069249 - DNA, 25 bp, Homo sapien
cctggaagtcgaagtgggctgaatt

SEQ ID NO: 5069250 - DNA, 25 bp, Homo sapien
ggtggtcaaaggaggcaatcacttg

SEQ ID NO: 5069251 - DNA, 25 bp, Homo sapien
catagcaactagcagctgaccttgg

SEQ ID NO: 5069252 - DNA, 25 bp, Homo sapien
agtgtcccgcctgaacagataccag

SEQ ID NO: 5069253 - DNA, 25 bp, Homo sapien
ggtactgtaccatatacccagagag

SEQ ID NO: 5069254 - DNA, 25 bp, Homo sapien
ctgagcgtccagtgttgtagttgca

SEQ ID NO: 5069255 - DNA, 25 bp, Homo sapien
ggatgctgtttactgagcgtccagt

SEQ ID NO: 5069256 - DNA, 25 bp, Homo sapien
gttgtagttgcattcaagtgtgtag

SEQ ID NO: 5069257 - DNA, 25 bp, Homo sapien
gggctggcacgcccattgtcatggc

SEQ ID NO: 5069258 - DNA, 25 bp, Homo sapien
ctgctcaaatagttccacagtgtat

SEQ ID NO: 5069259 - DNA, 25 bp, Homo sapien
ttacattccgccatgtccagggctg

SEQ ID NO: 5069260 - DNA, 25 bp, Homo sapien
catccaggcccgtagattagtaagg

SEQ ID NO: 5069261 - DNA, 25 bp, Homo sapien
cattcagagtgctgcttaggcctcg

SEQ ID NO: 5069262 - DNA, 25 bp, Homo sapien
taggcctcggctgttgcgtacatgt

SEQ ID NO: 5069263 - DNA, 25 bp, Homo sapien
aacttcgtgcccgactcaaggtgtt

SEQ ID NO: 5069264 - DNA, 25 bp, Homo sapien
aggccgactgccatgaaaaggaaag

SEQ ID NO: 5069265 - DNA, 25 bp, Homo sapien
tcaaggtgttttcggagcaggagac

SEQ ID NO: 5069266 - DNA, 25 bp, Homo sapien
cttgtgccggtgctaaaacttcgtg

SEQ ID NO: 5069267 - DNA, 25 bp, Homo sapien
agacaaccgaacacatgttgcaggg

SEQ ID NO: 5069268 - DNA, 25 bp, Homo sapien
agcaatgccccagacaaccgaacac

SEQ ID NO: 5069269 - DNA, 25 bp, Homo sapien
caaccgaacacatgttgcaggggct

SEQ ID NO: 5069270 - DNA, 25 bp, Homo sapien
ccagcaatgccccagacaaccgaac

SEQ ID NO: 5069271 - DNA, 25 bp, Homo sapien
tgggccaacagtatatcttcaagct

SEQ ID NO: 5069272 - DNA, 25 bp, Homo sapien
tggtcctgggccaacagtatatctt

SEQ ID NO: 5069273 - DNA, 25 bp, Homo sapien
ccccttggtcctgggccaacagtat

SEQ ID NO: 5069274 - DNA, 25 bp, Homo sapien
caacagtatatcttcaagctcttac

SEQ ID NO: 5069275 - DNA, 25 bp, Homo sapien
tcagcccataaagaccacagataag

SEQ ID NO: 5069276 - DNA, 25 bp, Homo sapien
aacaccaaggtcgtaggagaggcca

SEQ ID NO: 5069277 - DNA, 25 bp, Homo sapien
ggaaacttccctggctcctagcatg

SEQ ID NO: 5069278 - DNA, 25 bp, Homo sapien
aataccgctctggaatcatgccgca

SEQ ID NO: 5069279 - DNA, 25 bp, Homo sapien
cctaaaggcccatctgtttctggta

SEQ ID NO: 5069280 - DNA, 25 bp, Homo sapien
gggttactaatgcacagttaagcaa

SEQ ID NO: 5069281 - DNA, 25 bp, Homo sapien
ggcagggtctcatcaggcaaaacct

SEQ ID NO: 5069282 - DNA, 25 bp, Homo sapien
aagtggcactataacaatctctccc

SEQ ID NO: 5069283 - DNA, 25 bp, Homo sapien
acccagggggtggaaggttgcagtg

SEQ ID NO: 5069284 - DNA, 25 bp, Homo sapien
tgaaactctgtctcaaaaaaagaag

SEQ ID NO: 5069285 - DNA, 25 bp, Homo sapien
agctgagatcacaccacttcactcc

SEQ ID NO: 5069286 - DNA, 25 bp, Homo sapien
tcactccggcctgggtgaaagagtg

SEQ ID NO: 5069287 - DNA, 25 bp, Homo sapien
tcccaggaactatgagttaagagct

SEQ ID NO: 5069288 - DNA, 25 bp, Homo sapien
tgacaacctagaaaaagctctttac

SEQ ID NO: 5069289 - DNA, 25 bp, Homo sapien
aaggagaacttaggatgctgatgaa

SEQ ID NO: 5069290 - DNA, 25 bp, Homo sapien
cctttgtagtcaggaaaggagaact

SEQ ID NO: 5069291 - DNA, 25 bp, Homo sapien
aaaaaaggcctagatgggcacagtg

SEQ ID NO: 5069292 - DNA, 25 bp, Homo sapien
gaggcgggtgaatccgcctgaggtc

SEQ ID NO: 5069293 - DNA, 25 bp, Homo sapien
aaaggcctagatgggcacagtggtt

SEQ ID NO: 5069294 - DNA, 25 bp, Homo sapien
aaaaaaaaggcctagatgggcacag

SEQ ID NO: 5069295 - DNA, 25 bp, Homo sapien
cacacagttgttgccattgtctcag

SEQ ID NO: 5069296 - DNA, 25 bp, Homo sapien
taagtttcaagtcaatcaaccagga

SEQ ID NO: 5069297 - DNA, 25 bp, Homo sapien
ttggccttttgcatacccacctagg

SEQ ID NO: 5069298 - DNA, 25 bp, Homo sapien
agtagttccccaaaccctcaggatg

SEQ ID NO: 5069299 - DNA, 25 bp, Homo sapien
tggcaggcagaggactagatgctaa

SEQ ID NO: 5069300 - DNA, 25 bp, Homo sapien
tgctaagggcataagtagatgtgtt

SEQ ID NO: 5069301 - DNA, 25 bp, Homo sapien
gttcacttactaagtggcaggcaga

SEQ ID NO: 5069302 - DNA, 25 bp, Homo sapien
agatgtgttaggagacacttcctga

SEQ ID NO: 5069303 - DNA, 25 bp, Homo sapien
gagtgtggtggtgcgatcttggttc

SEQ ID NO: 5069304 - DNA, 25 bp, Homo sapien
gtgtggtggtgcgatcttggttcac

SEQ ID NO: 5069305 - DNA, 25 bp, Homo sapien
ggagtgtggtggtgcgatcttggtt

SEQ ID NO: 5069306 - DNA, 25 bp, Homo sapien
gatgggtagaaagacctactattta

SEQ ID NO: 5069307 - DNA, 25 bp, Homo sapien
aagatgggtagaaagacctactatt

SEQ ID NO: 5069308 - DNA, 25 bp, Homo sapien
agatgggtagaaagacctactattt

SEQ ID NO: 5069309 - DNA, 25 bp, Homo sapien
tcaagcttgtcatcagacccacatc

SEQ ID NO: 5069310 - DNA, 25 bp, Homo sapien
tttcaagcttgtcatcagacccaca

SEQ ID NO: 5069311 - DNA, 25 bp, Homo sapien
tccgtggtcaaaagatgccagtttt

SEQ ID NO: 5069312 - DNA, 25 bp, Homo sapien
ctgctggcttccgtggtcaaaagat

SEQ ID NO: 5069313 - DNA, 25 bp, Homo sapien
taagtggggcactatgaggcagcct

SEQ ID NO: 5069314 - DNA, 25 bp, Homo sapien
gatacaagcagataaaagggcaaat

SEQ ID NO: 5069315 - DNA, 25 bp, Homo sapien
ggcactatgaggcagccttcactga

SEQ ID NO: 5069316 - DNA, 25 bp, Homo sapien
ggaagagatacaagcagataaaagg

SEQ ID NO: 5069317 - DNA, 25 bp, Homo sapien
ttgaatgaatcaggcagtagacagg

SEQ ID NO: 5069318 - DNA, 25 bp, Homo sapien
gcccagcttgtgtgaggaggctggg

SEQ ID NO: 5069319 - DNA, 25 bp, Homo sapien
aggctgcctgcaggacgatggttca

SEQ ID NO: 5069320 - DNA, 25 bp, Homo sapien
ctggtatgttgaatgaatcaggcag

SEQ ID NO: 5069321 - DNA, 25 bp, Homo sapien
caaaggcaccagtgttagaggttta

SEQ ID NO: 5069322 - DNA, 25 bp, Homo sapien
tggtctcccaactaggcttaaagaa

SEQ ID NO: 5069323 - DNA, 25 bp, Homo sapien
gaggataagtgatgcccctggtctc

SEQ ID NO: 5069324 - DNA, 25 bp, Homo sapien
tggcaaacccagatttcagtggcag

SEQ ID NO: 5069325 - DNA, 25 bp, Homo sapien
tcccgattaccatgacagcctctgg

SEQ ID NO: 5069326 - DNA, 25 bp, Homo sapien
gtccctagcagacctttcccgatta

SEQ ID NO: 5069327 - DNA, 25 bp, Homo sapien
caatcgagtcttgatgcagggcatc

SEQ ID NO: 5069328 - DNA, 25 bp, Homo sapien
gaggacaagagtgagcaactgctcc

SEQ ID NO: 5069329 - DNA, 25 bp, Homo sapien
gaaagccaaagctagcaggctaagg

SEQ ID NO: 5069330 - DNA, 25 bp, Homo sapien
ccaaagctagcaggctaaggttggg

SEQ ID NO: 5069331 - DNA, 25 bp, Homo sapien
agggaaagccaaagctagcaggcta

SEQ ID NO: 5069332 - DNA, 25 bp, Homo sapien
aagccaaagctagcaggctaaggtt

SEQ ID NO: 5069333 - DNA, 25 bp, Homo sapien
tggcggaaactctcctcggacaggt

SEQ ID NO: 5069334 - DNA, 25 bp, Homo sapien
cctggcggaaactctcctcggacag

SEQ ID NO: 5069335 - DNA, 25 bp, Homo sapien
ctggcggaaactctcctcggacagg

SEQ ID NO: 5069336 - DNA, 25 bp, Homo sapien
tctggactgaatcggagttggtggc

SEQ ID NO: 5069337 - DNA, 25 bp, Homo sapien
ggactgaatcggagttggtggcagg

SEQ ID NO: 5069338 - DNA, 25 bp, Homo sapien
ggcagggctgttcctagcagcagca

SEQ ID NO: 5069339 - DNA, 25 bp, Homo sapien
gatctggactgaatcggagttggtg

SEQ ID NO: 5069340 - DNA, 25 bp, Homo sapien
gtacacttcacccatccagtcagcc

SEQ ID NO: 5069341 - DNA, 25 bp, Homo sapien
gagggttggtagacctctctcagag

SEQ ID NO: 5069342 - DNA, 25 bp, Homo sapien
cagcctctgcctatactcagcttta

SEQ ID NO: 5069343 - DNA, 25 bp, Homo sapien
tgtgtagaaagatagtggagggttg

SEQ ID NO: 5069344 - DNA, 25 bp, Homo sapien
ggatccagcatttaaccgccatggc

SEQ ID NO: 5069345 - DNA, 25 bp, Homo sapien
gggtggcaaacggatccagcattta

SEQ ID NO: 5069346 - DNA, 25 bp, Homo sapien
ccgccatggctacaccatgactaag

SEQ ID NO: 5069347 - DNA, 25 bp, Homo sapien
gcatttaaccgccatggctacacca

SEQ ID NO: 5069348 - DNA, 25 bp, Homo sapien
agtccatgactatgcactccaagtc

SEQ ID NO: 5069349 - DNA, 25 bp, Homo sapien
tccatgactatgcactccaagtcta

SEQ ID NO: 5069350 - DNA, 25 bp, Homo sapien
catgactatgcactccaagtctata

SEQ ID NO: 5069351 - DNA, 25 bp, Homo sapien
tcagtccatgactatgcactccaag

SEQ ID NO: 5069352 - DNA, 25 bp, Homo sapien
tgcgctaagaggctggattcttcca

SEQ ID NO: 5069353 - DNA, 25 bp, Homo sapien
tagtatagggatcagtagaggtact

SEQ ID NO: 5069354 - DNA, 25 bp, Homo sapien
gtttccatgcataagagtgttgtag

SEQ ID NO: 5069355 - DNA, 25 bp, Homo sapien
ggcaagataatagccagagaagtcc

SEQ ID NO: 5069356 - DNA, 25 bp, Homo sapien
tcatccctctgcgagtcggcggtga

SEQ ID NO: 5069357 - DNA, 25 bp, Homo sapien
tgtagcagagcaggatcccagctcc

SEQ ID NO: 5069358 - DNA, 25 bp, Homo sapien
tggtgtagcagagcaggatcccagc

SEQ ID NO: 5069359 - DNA, 25 bp, Homo sapien
cctggtgtagcagagcaggatccca

SEQ ID NO: 5069360 - DNA, 25 bp, Homo sapien
ctgctctccctggtccggggggtag

SEQ ID NO: 5069361 - DNA, 25 bp, Homo sapien
ttgtgctcaaaaggagtagggaagc

SEQ ID NO: 5069362 - DNA, 25 bp, Homo sapien
gctttggattgaagacttggccatg

SEQ ID NO: 5069363 - DNA, 25 bp, Homo sapien
gatgggcaagttggttactgcacag

SEQ ID NO: 5069364 - DNA, 25 bp, Homo sapien
agtggtttgacgctggaaccagcca

SEQ ID NO: 5069365 - DNA, 25 bp, Homo sapien
cattccaaggacttaacggctgtca

SEQ ID NO: 5069366 - DNA, 25 bp, Homo sapien
ccaaaatcttgtgctgcggagggag

SEQ ID NO: 5069367 - DNA, 25 bp, Homo sapien
tcacatggaatcagcggcctggagg

SEQ ID NO: 5069368 - DNA, 25 bp, Homo sapien
tgtaatgccttggacagcgtggctg

SEQ ID NO: 5069369 - DNA, 25 bp, Homo sapien
ttatttcctcagagtcttccttaat

SEQ ID NO: 5069370 - DNA, 25 bp, Homo sapien
tatttcctcagagtcttccttaatc

SEQ ID NO: 5069371 - DNA, 25 bp, Homo sapien
tccaaacaacttttatttcctcaga

SEQ ID NO: 5069372 - DNA, 25 bp, Homo sapien
aacaacttttatttcctcagagtct

SEQ ID NO: 5069373 - DNA, 25 bp, Homo sapien
tcacttcatcccttctacccatcac

SEQ ID NO: 5069374 - DNA, 25 bp, Homo sapien
ctagggttccaggacatagtctgag

SEQ ID NO: 5069375 - DNA, 25 bp, Homo sapien
gaggggccttcacacttcacttcat

SEQ ID NO: 5069376 - DNA, 25 bp, Homo sapien
tctacccatcacaacatacaaagca

SEQ ID NO: 5069377 - DNA, 25 bp, Homo sapien
gagccagccttaagtgtgggtcaca

SEQ ID NO: 5069378 - DNA, 25 bp, Homo sapien
ggctgctgacccaaactatagagaa

SEQ ID NO: 5069379 - DNA, 25 bp, Homo sapien
taaagggaacatggatgggcgttac

SEQ ID NO: 5069380 - DNA, 25 bp, Homo sapien
tgaaggattccccagaggaaagctg

SEQ ID NO: 5069381 - DNA, 25 bp, Homo sapien
catgatacagtccagaactgggccc

SEQ ID NO: 5069382 - DNA, 25 bp, Homo sapien
gcagggttcgaaacttacaatcaga

SEQ ID NO: 5069383 - DNA, 25 bp, Homo sapien
gccagggctagcagggttcgaaact

SEQ ID NO: 5069384 - DNA, 25 bp, Homo sapien
aaagtgtcgggccaagcatgataca

SEQ ID NO: 5069385 - DNA, 25 bp, Homo sapien
gagctggcgctacgaagttccggtc

SEQ ID NO: 5069386 - DNA, 25 bp, Homo sapien
gatgatcacggacgtgcagctcgcc

SEQ ID NO: 5069387 - DNA, 25 bp, Homo sapien
tctgacttcgggcttgttcgctggt

SEQ ID NO: 5069388 - DNA, 25 bp, Homo sapien
ggccgtcaacaatcccaagaagcag

SEQ ID NO: 5069389 - DNA, 25 bp, Homo sapien
cggttccttccgctctcctcttcac

SEQ ID NO: 5069390 - DNA, 25 bp, Homo sapien
ctttccctgatgaccggatcctggg

SEQ ID NO: 5069391 - DNA, 25 bp, Homo sapien
caggagctgcgtctcagaagttgcc

SEQ ID NO: 5069392 - DNA, 25 bp, Homo sapien
cccctgtggctgttcggaggcgcga

SEQ ID NO: 5069393 - DNA, 25 bp, Homo sapien
aggcagcagaggtagcagctccaga

SEQ ID NO: 5069394 - DNA, 25 bp, Homo sapien
aggagggtagctggcggcccctgca

SEQ ID NO: 5069395 - DNA, 25 bp, Homo sapien
tgcagctgccgtcagcaggcagcag

SEQ ID NO: 5069396 - DNA, 25 bp, Homo sapien
aacctgtgtagaggctgaaacctcg

SEQ ID NO: 5069397 - DNA, 25 bp, Homo sapien
caaggctggtacttgacatatgtct

SEQ ID NO: 5069398 - DNA, 25 bp, Homo sapien
agctcactgtccgggtcaccacgta

SEQ ID NO: 5069399 - DNA, 25 bp, Homo sapien
tggtacttgacatatgtctccactc

SEQ ID NO: 5069400 - DNA, 25 bp, Homo sapien
acacagctcactgtccgggtcacca

SEQ ID NO: 5069401 - DNA, 25 bp, Homo sapien
tgtggaagacgcaggccccagcgct

SEQ ID NO: 5069402 - DNA, 25 bp, Homo sapien
tcttgtaggccacacggtagcgagg

SEQ ID NO: 5069403 - DNA, 25 bp, Homo sapien
cccagcgctggagcgggactctcag

SEQ ID NO: 5069404 - DNA, 25 bp, Homo sapien
actccatgtcggtcactgtcttgta

SEQ ID NO: 5069405 - DNA, 25 bp, Homo sapien
tgctgcctcccgttgaaggccgtct

SEQ ID NO: 5069406 - DNA, 25 bp, Homo sapien
aggcgcccgctcagtccttgcagga

SEQ ID NO: 5069407 - DNA, 25 bp, Homo sapien
tgagggtttcatgcaccccagggcg

SEQ ID NO: 5069408 - DNA, 25 bp, Homo sapien
gtcgtgggtggagacgcgggtgtcc

SEQ ID NO: 5069409 - DNA, 25 bp, Homo sapien
tggggctggggccctgctgccccca

SEQ ID NO: 5069410 - DNA, 25 bp, Homo sapien
ctggggcccggaggggctgaggctg

SEQ ID NO: 5069411 - DNA, 25 bp, Homo sapien
tggggcccggaggggctgaggctgg

SEQ ID NO: 5069412 - DNA, 25 bp, Homo sapien
aggctggggctggggccctgctgcc

SEQ ID NO: 5069413 - DNA, 25 bp, Homo sapien
ctagcccggccaggcacacggagca

SEQ ID NO: 5069414 - DNA, 25 bp, Homo sapien
agcccggccaggcacacggagcagg

SEQ ID NO: 5069415 - DNA, 25 bp, Homo sapien
cggccaggcacacggagcaggactc

SEQ ID NO: 5069416 - DNA, 25 bp, Homo sapien
ccggccaggcacacggagcaggact

SEQ ID NO: 5069417 - DNA, 25 bp, Homo sapien
agccctgcgaggtgccgttgccgct

SEQ ID NO: 5069418 - DNA, 25 bp, Homo sapien
agcactgtcactgagccggccacga

SEQ ID NO: 5069419 - DNA, 25 bp, Homo sapien
ccagggtggagttgaagcggtcctc

SEQ ID NO: 5069420 - DNA, 25 bp, Homo sapien
aactgctctagtcggccccgggcag

SEQ ID NO: 5069421 - DNA, 25 bp, Homo sapien
cacagtggtctggagctcattcagt

SEQ ID NO: 5069422 - DNA, 25 bp, Homo sapien
acctcttgtaatccctccagcgtgg

SEQ ID NO: 5069423 - DNA, 25 bp, Homo sapien
tcagccgtagtgtgaactctgcagc

SEQ ID NO: 5069424 - DNA, 25 bp, Homo sapien
tccaaggcactgaggatctcgctga

SEQ ID NO: 5069425 - DNA, 25 bp, Homo sapien
gaaatgatacggtccttggttgccc

SEQ ID NO: 5069426 - DNA, 25 bp, Homo sapien
tcctctaggcctcggaagcgctctt

SEQ ID NO: 5069427 - DNA, 25 bp, Homo sapien
cagggagctgttaagggcacccagc

SEQ ID NO: 5069428 - DNA, 25 bp, Homo sapien
tggaaaggccctcgcgcaggccctg

SEQ ID NO: 5069429 - DNA, 25 bp, Homo sapien
tataacacctggaatactggctggg

SEQ ID NO: 5069430 - DNA, 25 bp, Homo sapien
cacaggcctagtgagcagccagagg

SEQ ID NO: 5069431 - DNA, 25 bp, Homo sapien
ctggggctgcaattcatgttgggaa

SEQ ID NO: 5069432 - DNA, 25 bp, Homo sapien
ggcgggagctaggaccttgcatcat

SEQ ID NO: 5069433 - DNA, 25 bp, Homo sapien
gatggggccctcttgcccgtccttg

SEQ ID NO: 5069434 - DNA, 25 bp, Homo sapien
gcccgatggggccctcttgcccgtc

SEQ ID NO: 5069435 - DNA, 25 bp, Homo sapien
cgatggggccctcttgcccgtcctt

SEQ ID NO: 5069436 - DNA, 25 bp, Homo sapien
ccgatggggccctcttgcccgtcct

SEQ ID NO: 5069437 - DNA, 25 bp, Homo sapien
tgtctctggatcataatagcctcca

SEQ ID NO: 5069438 - DNA, 25 bp, Homo sapien
cattgagcaggactctgtcgaaggg

SEQ ID NO: 5069439 - DNA, 25 bp, Homo sapien
taatagcctccatcattgagcagga

SEQ ID NO: 5069440 - DNA, 25 bp, Homo sapien
gactctgtcgaaggggaccgtgcct

SEQ ID NO: 5069441 - DNA, 25 bp, Homo sapien
tcgtagccaccggagtctacgcggg

SEQ ID NO: 5069442 - DNA, 25 bp, Homo sapien
tcggccaccggcttattctccaggc

SEQ ID NO: 5069443 - DNA, 25 bp, Homo sapien
gcgctcagcaagtagcgtccagcca

SEQ ID NO: 5069444 - DNA, 25 bp, Homo sapien
ccgctgaagatggtgagcggctcct

SEQ ID NO: 5069445 - DNA, 25 bp, Homo sapien
tcagccgacgtagacacgtcgggcg

SEQ ID NO: 5069446 - DNA, 25 bp, Homo sapien
gctaggtgccccgtctcaggcgaga

SEQ ID NO: 5069447 - DNA, 25 bp, Homo sapien
taggtgccccgtctcaggcgagacc

SEQ ID NO: 5069448 - DNA, 25 bp, Homo sapien
ccgctgtctcttcagccgacgtaga

SEQ ID NO: 5069449 - DNA, 25 bp, Homo sapien
tcctcgatcgtttagtatggcggtg

SEQ ID NO: 5069450 - DNA, 25 bp, Homo sapien
aaaagtctgcatgggcggccccgag

SEQ ID NO: 5069451 - DNA, 25 bp, Homo sapien
gggatcgcgccaggccaaaagtctg

SEQ ID NO: 5069452 - DNA, 25 bp, Homo sapien
gcggagggtgcgaggatcggctcct

SEQ ID NO: 5069453 - DNA, 25 bp, Homo sapien
tcctcgcttgtcagatggactcaca

SEQ ID NO: 5069454 - DNA, 25 bp, Homo sapien
tttaaagcgcggctaagcgatctcg

SEQ ID NO: 5069455 - DNA, 25 bp, Homo sapien
ggtcttcccgtagcaggttgcctgg

SEQ ID NO: 5069456 - DNA, 25 bp, Homo sapien
gagaaaatgcgctacttgccccgca

SEQ ID NO: 5069457 - DNA, 25 bp, Homo sapien
gcctctgcctcttatccaggaggat

SEQ ID NO: 5069458 - DNA, 25 bp, Homo sapien
ttatccaggaggatggtgtccccgc

SEQ ID NO: 5069459 - DNA, 25 bp, Homo sapien
tgcctcttatccaggaggatggtgt

SEQ ID NO: 5069460 - DNA, 25 bp, Homo sapien
tcctcctccgcgtgggagctcctcc

SEQ ID NO: 5069461 - DNA, 25 bp, Homo sapien
tcctccttagggtacttgtccacca

SEQ ID NO: 5069462 - DNA, 25 bp, Homo sapien
cttatctccgagtcctccttagggt

SEQ ID NO: 5069463 - DNA, 25 bp, Homo sapien
gagtcctccttagggtacttgtcca

SEQ ID NO: 5069464 - DNA, 25 bp, Homo sapien
ctccgagtcctccttagggtacttg

SEQ ID NO: 5069465 - DNA, 25 bp, Homo sapien
gggctccgagcagggagagaacggt

SEQ ID NO: 5069466 - DNA, 25 bp, Homo sapien
ccattgagcccatgaaggcacaggg

SEQ ID NO: 5069467 - DNA, 25 bp, Homo sapien
agttggacgcgttgcctccgcgctg

SEQ ID NO: 5069468 - DNA, 25 bp, Homo sapien
gagaacggtgcaggagttggacgcg

SEQ ID NO: 5069469 - DNA, 25 bp, Homo sapien
gtgcatgagccatttagggctatag

SEQ ID NO: 5069470 - DNA, 25 bp, Homo sapien
ggcgtgcatgagccatttagggcta

SEQ ID NO: 5069471 - DNA, 25 bp, Homo sapien
agtgcttgctgagtcggcagcgcca

SEQ ID NO: 5069472 - DNA, 25 bp, Homo sapien
gcagcgccaggggtcaaagggctct

SEQ ID NO: 5069473 - DNA, 25 bp, Homo sapien
cccaaagcattggaaatatggtttg

SEQ ID NO: 5069474 - DNA, 25 bp, Homo sapien
tgacttacaactcctttaaatagta

SEQ ID NO: 5069475 - DNA, 25 bp, Homo sapien
agataccaagtcagggcatcatccc

SEQ ID NO: 5069476 - DNA, 25 bp, Homo sapien
aataactttcgcaccccagtgcctg

SEQ ID NO: 5069477 - DNA, 25 bp, Homo sapien
gagcccgctttcagcaacaccaaag

SEQ ID NO: 5069478 - DNA, 25 bp, Homo sapien
agagcccgctttcagcaacaccaaa

SEQ ID NO: 5069479 - DNA, 25 bp, Homo sapien
ccagagcccgctttcagcaacacca

SEQ ID NO: 5069480 - DNA, 25 bp, Homo sapien
tggccagagcccgctttcagcaaca

SEQ ID NO: 5069481 - DNA, 25 bp, Homo sapien
gaacctgtacactgtttgaaccaag

SEQ ID NO: 5069482 - DNA, 25 bp, Homo sapien
ccagccctctatggacaggcattgt

SEQ ID NO: 5069483 - DNA, 25 bp, Homo sapien
tgatgccactcagtatgggcctggt

SEQ ID NO: 5069484 - DNA, 25 bp, Homo sapien
caagaactggcaattatgcccagca

SEQ ID NO: 5069485 - DNA, 25 bp, Homo sapien
cgaagggggtgcagttcgacaaggg

SEQ ID NO: 5069486 - DNA, 25 bp, Homo sapien
ccgaagggggtgcagttcgacaagg

SEQ ID NO: 5069487 - DNA, 25 bp, Homo sapien
tgcagttcgacaagggttttgggga

SEQ ID NO: 5069488 - DNA, 25 bp, Homo sapien
catagtataggatggtgcggctacc

SEQ ID NO: 5069489 - DNA, 25 bp, Homo sapien
tctgaaagactgtgtagcgtaggtc

SEQ ID NO: 5069490 - DNA, 25 bp, Homo sapien
gcggcggaggtcatccaggacaaaa

SEQ ID NO: 5069491 - DNA, 25 bp, Homo sapien
cctcgttgatgatgaccgtggcgat

SEQ ID NO: 5069492 - DNA, 25 bp, Homo sapien
taagagaagaagagtcctgttctgg

SEQ ID NO: 5069493 - DNA, 25 bp, Homo sapien
tgttctgggagttttggtggcggcg

SEQ ID NO: 5069494 - DNA, 25 bp, Homo sapien
ctggcaaggcacagacagttgtaca

SEQ ID NO: 5069495 - DNA, 25 bp, Homo sapien
agcctctaagagaagaagagtcctg

SEQ ID NO: 5069496 - DNA, 25 bp, Homo sapien
agagcctggaagtggtctggacctc

SEQ ID NO: 5069497 - DNA, 25 bp, Homo sapien
gagcctggaagtggtctggacctcc

SEQ ID NO: 5069498 - DNA, 25 bp, Homo sapien
tggaagtggtctggacctccaaaag

SEQ ID NO: 5069499 - DNA, 25 bp, Homo sapien
gcctggaagtggtctggacctccaa

SEQ ID NO: 5069500 - DNA, 25 bp, Homo sapien
gagcacaatggtacggttgccattg

SEQ ID NO: 5069501 - DNA, 25 bp, Homo sapien
gccgcctgaagtcggccaccaggaa

SEQ ID NO: 5069502 - DNA, 25 bp, Homo sapien
ttgccattggagttgttgatgatgc

SEQ ID NO: 5069503 - DNA, 25 bp, Homo sapien
cattggagttgttgatgatgcagca

SEQ ID NO: 5069504 - DNA, 25 bp, Homo sapien
gcgtttaatagctccccgttgcaac

SEQ ID NO: 5069505 - DNA, 25 bp, Homo sapien
agaatgcactgagagcgccaagcct

SEQ ID NO: 5069506 - DNA, 25 bp, Homo sapien
aattatctcggtaaactgaactgca

SEQ ID NO: 5069507 - DNA, 25 bp, Homo sapien
cgttgcaaccctgaggtcaaggtag

SEQ ID NO: 5069508 - DNA, 25 bp, Homo sapien
gggtcagatcaaccttctcaaagtc

SEQ ID NO: 5069509 - DNA, 25 bp, Homo sapien
agatcaaccttctcaaagtctgtag

SEQ ID NO: 5069510 - DNA, 25 bp, Homo sapien
tgaactgggtcagatcaaccttctc

SEQ ID NO: 5069511 - DNA, 25 bp, Homo sapien
aaccttctcaaagtctgtagcagac

SEQ ID NO: 5069512 - DNA, 25 bp, Homo sapien
cacgtctccgtagccaaacagctgg

SEQ ID NO: 5069513 - DNA, 25 bp, Homo sapien
tgtgtgcgtctatccgctgcagcat

SEQ ID NO: 5069514 - DNA, 25 bp, Homo sapien
gaagagctcctctcgtggcttctcc

SEQ ID NO: 5069515 - DNA, 25 bp, Homo sapien
acacccggatcttctgctctggagg

SEQ ID NO: 5069516 - DNA, 25 bp, Homo sapien
gtggaatctaccaccgccatgctgg

SEQ ID NO: 5069517 - DNA, 25 bp, Homo sapien
tgtcctctaggtatggtttcttcat

SEQ ID NO: 5069518 - DNA, 25 bp, Homo sapien
tggtttttcccacaactatgtcctc

SEQ ID NO: 5069519 - DNA, 25 bp, Homo sapien
gggtggaatctaccaccgccatgct

SEQ ID NO: 5069520 - DNA, 25 bp, Homo sapien
actcctggccccatatgatcttcct

SEQ ID NO: 5069521 - DNA, 25 bp, Homo sapien
ctggccccatatgatcttcctgcct

SEQ ID NO: 5069522 - DNA, 25 bp, Homo sapien
tttttgtgaagatggtctccctgag

SEQ ID NO: 5069523 - DNA, 25 bp, Homo sapien
tgaagatggtctccctgaggctggt

SEQ ID NO: 5069524 - DNA, 25 bp, Homo sapien
tgctgactggaaccccaagtgcttg

SEQ ID NO: 5069525 - DNA, 25 bp, Homo sapien
tttcctcacacgaccatacaagccc

SEQ ID NO: 5069526 - DNA, 25 bp, Homo sapien
tggccacatctttgctgacaaacac

SEQ ID NO: 5069527 - DNA, 25 bp, Homo sapien
ttcctctgctgactggaaccccaag

SEQ ID NO: 5069528 - DNA, 25 bp, Homo sapien
agtggagcaatttgccatcagggcc

SEQ ID NO: 5069529 - DNA, 25 bp, Homo sapien
tcccagtgtatccaccacgcggggt

SEQ ID NO: 5069530 - DNA, 25 bp, Homo sapien
gaggcattgaaggtgtctccagctc

SEQ ID NO: 5069531 - DNA, 25 bp, Homo sapien
agaggctgaagatgacggaggcatt

SEQ ID NO: 5069532 - DNA, 25 bp, Homo sapien
ccctgcaggccacacttcttgccgg

SEQ ID NO: 5069533 - DNA, 25 bp, Homo sapien
tggcacccgaatctcagtgcttcct

SEQ ID NO: 5069534 - DNA, 25 bp, Homo sapien
tgcaggccacacttcttgccggcca

SEQ ID NO: 5069535 - DNA, 25 bp, Homo sapien
ttgccggccacctggcacccgaatc

SEQ ID NO: 5069536 - DNA, 25 bp, Homo sapien
ggtgtgtgaggagccggcacctgct

SEQ ID NO: 5069537 - DNA, 25 bp, Homo sapien
aacagggcaacctggacgccaggct

SEQ ID NO: 5069538 - DNA, 25 bp, Homo sapien
gcagccgcaatggtagtctccatgg

SEQ ID NO: 5069539 - DNA, 25 bp, Homo sapien
aagatttatttgctctgaggctctg

SEQ ID NO: 5069540 - DNA, 25 bp, Homo sapien
ggtgtggactcccagcttctgagct

SEQ ID NO: 5069541 - DNA, 25 bp, Homo sapien
tgaggcacgcccttaattccaaggt

SEQ ID NO: 5069542 - DNA, 25 bp, Homo sapien
aatagagtctgcacaacgcagggcc

SEQ ID NO: 5069543 - DNA, 25 bp, Homo sapien
tgtgttccagatcggacctccctga

SEQ ID NO: 5069544 - DNA, 25 bp, Homo sapien
tgttgggggcttccgaccctcaggc

SEQ ID NO: 5069545 - DNA, 25 bp, Homo sapien
cagttggccggctgtaactcgcggt

SEQ ID NO: 5069546 - DNA, 25 bp, Homo sapien
gtccggtccccgctgcaggcagttt

SEQ ID NO: 5069547 - DNA, 25 bp, Homo sapien
tgcaggcagtttgcgctgctggccc

SEQ ID NO: 5069548 - DNA, 25 bp, Homo sapien
caagtagagggcaacggcaagagcc

SEQ ID NO: 5069549 - DNA, 25 bp, Homo sapien
ctgaagcacacatgcccagtagtag

SEQ ID NO: 5069550 - DNA, 25 bp, Homo sapien
tgaagcacacatgcccagtagtagc

SEQ ID NO: 5069551 - DNA, 25 bp, Homo sapien
cccaagtagagggcaacggcaagag

SEQ ID NO: 5069552 - DNA, 25 bp, Homo sapien
tccaaacaccgtatctagagggcct

SEQ ID NO: 5069553 - DNA, 25 bp, Homo sapien
tcaagtgaatgagagagcctagcca

SEQ ID NO: 5069554 - DNA, 25 bp, Homo sapien
taaaggactcgaaccagtaggtgtc

SEQ ID NO: 5069555 - DNA, 25 bp, Homo sapien
caaacggcccagtagtgtggaacaa

SEQ ID NO: 5069556 - DNA, 25 bp, Homo sapien
gcggcccagccaccagccgaggcct

SEQ ID NO: 5069557 - DNA, 25 bp, Homo sapien
ctgcggcccagccaccagccgaggc

SEQ ID NO: 5069558 - DNA, 25 bp, Homo sapien
tgcggcccagccaccagccgaggcc

SEQ ID NO: 5069559 - DNA, 25 bp, Homo sapien
ttggaagatgctttgtagtcgcccc

SEQ ID NO: 5069560 - DNA, 25 bp, Homo sapien
gatgctttgtagtcgcccctcaaaa

SEQ ID NO: 5069561 - DNA, 25 bp, Homo sapien
tcaaaacaccacagcgttgggtaga

SEQ ID NO: 5069562 - DNA, 25 bp, Homo sapien
aaagtctcggtggtgatggaacagt

SEQ ID NO: 5069563 - DNA, 25 bp, Homo sapien
cacttcccgtcagcatcatctgagg

SEQ ID NO: 5069564 - DNA, 25 bp, Homo sapien
gacctggtggccgtgcaattatata

SEQ ID NO: 5069565 - DNA, 25 bp, Homo sapien
tcatgtaaaacagtaaggcttgaca

SEQ ID NO: 5069566 - DNA, 25 bp, Homo sapien
catctgagggtgttcttcatgtaaa

SEQ ID NO: 5069567 - DNA, 25 bp, Homo sapien
ggaagaggcacacaaagatactatt

SEQ ID NO: 5069568 - DNA, 25 bp, Homo sapien
gaagaggcacacaaagatactatta

SEQ ID NO: 5069569 - DNA, 25 bp, Homo sapien
gcccagtctagcaggagctggcctc

SEQ ID NO: 5069570 - DNA, 25 bp, Homo sapien
tggtagccatccctcagagcttggt

SEQ ID NO: 5069571 - DNA, 25 bp, Homo sapien
ggtgcaagacgtatgtatcctggct

SEQ ID NO: 5069572 - DNA, 25 bp, Homo sapien
ggctactgccagtgatgccaggaag

SEQ ID NO: 5069573 - DNA, 25 bp, Homo sapien
ccctaatacacgttctcagatgcca

SEQ ID NO: 5069574 - DNA, 25 bp, Homo sapien
tcagaaagacccctgtccaaagact

SEQ ID NO: 5069575 - DNA, 25 bp, Homo sapien
cagtgtccggattgacttctcccta

SEQ ID NO: 5069576 - DNA, 25 bp, Homo sapien
acacacaggtacatcttagccagac

SEQ ID NO: 5069577 - DNA, 25 bp, Homo sapien
cagccccggttgttaaacacgacag

SEQ ID NO: 5069578 - DNA, 25 bp, Homo sapien
gcagccccggttgttaaacacgaca

SEQ ID NO: 5069579 - DNA, 25 bp, Homo sapien
aaggataggtaggaggtgagcccca

SEQ ID NO: 5069580 - DNA, 25 bp, Homo sapien
ataggtaggaggtgagccccagggc

SEQ ID NO: 5069581 - DNA, 25 bp, Homo sapien
aggtgagccccagggccaaggatct

SEQ ID NO: 5069582 - DNA, 25 bp, Homo sapien
ctgaggaaggataggtaggaggtga

SEQ ID NO: 5069583 - DNA, 25 bp, Homo sapien
gagaccgtggccagaaggtggaggg

SEQ ID NO: 5069584 - DNA, 25 bp, Homo sapien
ggagaccgtggccagaaggtggagg

SEQ ID NO: 5069585 - DNA, 25 bp, Homo sapien
tgagggcaaaccagatcattgggta

SEQ ID NO: 5069586 - DNA, 25 bp, Homo sapien
agggcaaaccagatcattgggtagg

SEQ ID NO: 5069587 - DNA, 25 bp, Homo sapien
tctagatcttcagtattgctggcac

SEQ ID NO: 5069588 - DNA, 25 bp, Homo sapien
gctttatgtggttcacgactgtctc

SEQ ID NO: 5069589 - DNA, 25 bp, Homo sapien
cacgactgtctctagatcttcagta

SEQ ID NO: 5069590 - DNA, 25 bp, Homo sapien
tattgctggcacaaaaagccctgtg

SEQ ID NO: 5069591 - DNA, 25 bp, Homo sapien
gggtttccagggagcgagtggtctc

SEQ ID NO: 5069592 - DNA, 25 bp, Homo sapien
tttccagggagcgagtggtctcaaa

SEQ ID NO: 5069593 - DNA, 25 bp, Homo sapien
ttccagggagcgagtggtctcaaag

SEQ ID NO: 5069594 - DNA, 25 bp, Homo sapien
tgccaggtgattcagcaccagtatc

SEQ ID NO: 5069595 - DNA, 25 bp, Homo sapien
tccacaagttggcagagcccagcag

SEQ ID NO: 5069596 - DNA, 25 bp, Homo sapien
cgttccacaagttggcagagcccag

SEQ ID NO: 5069597 - DNA, 25 bp, Homo sapien
cacaagttggcagagcccagcagtg

SEQ ID NO: 5069598 - DNA, 25 bp, Homo sapien
gttccacaagttggcagagcccagc

SEQ ID NO: 5069599 - DNA, 25 bp, Homo sapien
gtacaaagtctatgtccaccacctt

SEQ ID NO: 5069600 - DNA, 25 bp, Homo sapien
tgtagtacaaagtctatgtccacca

SEQ ID NO: 5069601 - DNA, 25 bp, Homo sapien
ctgtagtacaaagtctatgtccacc

SEQ ID NO: 5069602 - DNA, 25 bp, Homo sapien
tagtacaaagtctatgtccaccacc

SEQ ID NO: 5069603 - DNA, 25 bp, Homo sapien
aagaataggaagatagtggaagact

SEQ ID NO: 5069604 - DNA, 25 bp, Homo sapien
ccaggggcatggctgaatattatac

SEQ ID NO: 5069605 - DNA, 25 bp, Homo sapien
gaagatagtggaagactcatttggg

SEQ ID NO: 5069606 - DNA, 25 bp, Homo sapien
taggaagatagtggaagactcattt

SEQ ID NO: 5069607 - DNA, 25 bp, Homo sapien
tagtaggtaacacagtcttgatatc

SEQ ID NO: 5069608 - DNA, 25 bp, Homo sapien
gccacagatgtgtagcgctcatcaa

SEQ ID NO: 5069609 - DNA, 25 bp, Homo sapien
tggttctagggcttgctgctttgta

SEQ ID NO: 5069610 - DNA, 25 bp, Homo sapien
tccaaaggccacagatgtgtagcgc

SEQ ID NO: 5069611 - DNA, 25 bp, Homo sapien
tgagatagagcacagggatccggat

SEQ ID NO: 5069612 - DNA, 25 bp, Homo sapien
tagagcacagggatccggatggcat

SEQ ID NO: 5069613 - DNA, 25 bp, Homo sapien
gggtcatctgctgcactgagataga

SEQ ID NO: 5069614 - DNA, 25 bp, Homo sapien
gctgcactgagatagagcacaggga

SEQ ID NO: 5069615 - DNA, 25 bp, Homo sapien
tgttgggcggcctgtatgggaaggg

SEQ ID NO: 5069616 - DNA, 25 bp, Homo sapien
ggagtgttgggcggcctgtatggga

SEQ ID NO: 5069617 - DNA, 25 bp, Homo sapien
agggggagtgttgggcggcctgtat

SEQ ID NO: 5069618 - DNA, 25 bp, Homo sapien
ctgtgatgagcagcgcaacgtaggg

SEQ ID NO: 5069619 - DNA, 25 bp, Homo sapien
ctttggcgtactgatgcaagaggcg

SEQ ID NO: 5069620 - DNA, 25 bp, Homo sapien
cgtactgatgcaagaggcggctcat

SEQ ID NO: 5069621 - DNA, 25 bp, Homo sapien
ggcggctcatgtaccagtgctgcca

SEQ ID NO: 5069622 - DNA, 25 bp, Homo sapien
tggaagatggctttggcgtactgat

SEQ ID NO: 5069623 - DNA, 25 bp, Homo sapien
aataaacaaggaaagagtgaactga

SEQ ID NO: 5069624 - DNA, 25 bp, Homo sapien
tgatatttaataaacaaggaaagag

SEQ ID NO: 5069625 - DNA, 25 bp, Homo sapien
tatttaataaacaaggaaagagtga

SEQ ID NO: 5069626 - DNA, 25 bp, Homo sapien
ggcaggaaaagttgatatttaataa

SEQ ID NO: 5069627 - DNA, 25 bp, Homo sapien
gcaataagttcctaggtagtctacc

SEQ ID NO: 5069628 - DNA, 25 bp, Homo sapien
gatgggtagcactaagccagctggc

SEQ ID NO: 5069629 - DNA, 25 bp, Homo sapien
cctggtacttgctgttagggcagga

SEQ ID NO: 5069630 - DNA, 25 bp, Homo sapien
gccagctggcctaaagatgcaataa

SEQ ID NO: 5069631 - DNA, 25 bp, Homo sapien
tctggaagtagggttttggtagcaa

SEQ ID NO: 5069632 - DNA, 25 bp, Homo sapien
gattaatgggcgcttgagtgcctcc

SEQ ID NO: 5069633 - DNA, 25 bp, Homo sapien
gactcttccctaaacgtgctctctg

SEQ ID NO: 5069634 - DNA, 25 bp, Homo sapien
tgaacgagtaaggtcactcttggtg

SEQ ID NO: 5069635 - DNA, 25 bp, Homo sapien
agtagtcgaaggcccggcgcggcat

SEQ ID NO: 5069636 - DNA, 25 bp, Homo sapien
ggggcagtagtcgaaggcccggcgc

SEQ ID NO: 5069637 - DNA, 25 bp, Homo sapien
cagccgccggggcagtagtcgaagg

SEQ ID NO: 5069638 - DNA, 25 bp, Homo sapien
gcagtagtcgaaggcccggcgcggc

SEQ ID NO: 5069639 - DNA, 25 bp, Homo sapien
gcccaggagtgtgaagccttgagaa

SEQ ID NO: 5069640 - DNA, 25 bp, Homo sapien
cacccctgccaaaagtgggcgatag

SEQ ID NO: 5069641 - DNA, 25 bp, Homo sapien
tgacagacgtgtcctcatacgagga

SEQ ID NO: 5069642 - DNA, 25 bp, Homo sapien
gcgataggcgttaaggatgacagac

SEQ ID NO: 5069643 - DNA, 25 bp, Homo sapien
gctcccattggggtcggcgaacctg

SEQ ID NO: 5069644 - DNA, 25 bp, Homo sapien
ttctgctgctgggtataataaggta

SEQ ID NO: 5069645 - DNA, 25 bp, Homo sapien
tggtgccaccccttagacaaagtcc

SEQ ID NO: 5069646 - DNA, 25 bp, Homo sapien
caggggggaactgaactcagggaat

SEQ ID NO: 5069647 - DNA, 25 bp, Homo sapien
tccctcttggatcgctcactctggg

SEQ ID NO: 5069648 - DNA, 25 bp, Homo sapien
cctggctgtcggtttgagtgcaacc

SEQ ID NO: 5069649 - DNA, 25 bp, Homo sapien
tcttgaggatatccaagcagccctg

SEQ ID NO: 5069650 - DNA, 25 bp, Homo sapien
acttgccaaccgtgggagtgagcca

SEQ ID NO: 5069651 - DNA, 25 bp, Homo sapien
cgtgaagacttcaaatcccgcaggc

SEQ ID NO: 5069652 - DNA, 25 bp, Homo sapien
tcgtgaagacttcaaatcccgcagg

SEQ ID NO: 5069653 - DNA, 25 bp, Homo sapien
gtgaagacttcaaatcccgcaggcc

SEQ ID NO: 5069654 - DNA, 25 bp, Homo sapien
tgaagacttcaaatcccgcaggccc

SEQ ID NO: 5069655 - DNA, 25 bp, Homo sapien
gccaggaggtactgcccatccttca

SEQ ID NO: 5069656 - DNA, 25 bp, Homo sapien
ccaggaggtactgcccatccttcag

SEQ ID NO: 5069657 - DNA, 25 bp, Homo sapien
catccttcaggtctccgcctttcat

SEQ ID NO: 5069658 - DNA, 25 bp, Homo sapien
aggctgcctgcatacatccctgaaa

SEQ ID NO: 5069659 - DNA, 25 bp, Homo sapien
tccatggagaggacttgaacctcct

SEQ ID NO: 5069660 - DNA, 25 bp, Homo sapien
ccttgccaatgaacgtgaccttcca

SEQ ID NO: 5069661 - DNA, 25 bp, Homo sapien
tgaacctccttcgtctgtgccagaa

SEQ ID NO: 5069662 - DNA, 25 bp, Homo sapien
tggccctctggccttcctctgtgac

SEQ ID NO: 5069663 - DNA, 25 bp, Homo sapien
ccctggcatggctggtggccctctg

SEQ ID NO: 5069664 - DNA, 25 bp, Homo sapien
gccctctggccttcctctgtgacat

SEQ ID NO: 5069665 - DNA, 25 bp, Homo sapien
ggtggccctctggccttcctctgtg

SEQ ID NO: 5069666 - DNA, 25 bp, Homo sapien
tggcctgagtctggctatgccccac

SEQ ID NO: 5069667 - DNA, 25 bp, Homo sapien
tgccttgtcctgctgaggcggctcc

SEQ ID NO: 5069668 - DNA, 25 bp, Homo sapien
gcagcaaccgtgctttggcctgagt

SEQ ID NO: 5069669 - DNA, 25 bp, Homo sapien
agcgcctggcagcaaccgtgctttg

SEQ ID NO: 5069670 - DNA, 25 bp, Homo sapien
tggcgcagcgtcctgacccggctcc

SEQ ID NO: 5069671 - DNA, 25 bp, Homo sapien
tcccgcgcggcattctcaggactgg

SEQ ID NO: 5069672 - DNA, 25 bp, Homo sapien
cgcgcggcattctcaggactggcct

SEQ ID NO: 5069673 - DNA, 25 bp, Homo sapien
cggcattctcaggactggcctcgct

SEQ ID NO: 5069674 - DNA, 25 bp, Homo sapien
tgagagggtgcaagtagcggagtcc

SEQ ID NO: 5069675 - DNA, 25 bp, Homo sapien
gctatgtagctggcggcgagcacca

SEQ ID NO: 5069676 - DNA, 25 bp, Homo sapien
caagtagcggagtccacgcaggaag

SEQ ID NO: 5069677 - DNA, 25 bp, Homo sapien
ccaggcaactcgtggccgagtgtgc

SEQ ID NO: 5069678 - DNA, 25 bp, Homo sapien
ccaggcctccagcatagagacgaga

SEQ ID NO: 5069679 - DNA, 25 bp, Homo sapien
tggtggagtcaagatcggagtaccc

SEQ ID NO: 5069680 - DNA, 25 bp, Homo sapien
gtcaagatcggagtaccccaggcct

SEQ ID NO: 5069681 - DNA, 25 bp, Homo sapien
catagagacgagatcgcatcggcca

SEQ ID NO: 5069682 - DNA, 25 bp, Homo sapien
ggtgagagtggtgtggtggaaagga

SEQ ID NO: 5069683 - DNA, 25 bp, Homo sapien
ttatttgtcaccaagagctggtgag

SEQ ID NO: 5069684 - DNA, 25 bp, Homo sapien
atctgcctctccagggacttgggac

SEQ ID NO: 5069685 - DNA, 25 bp, Homo sapien
ttgtcaccaagagctggtgagagtg

SEQ ID NO: 5069686 - DNA, 25 bp, Homo sapien
aatccaggcccataagcatgagtca

SEQ ID NO: 5069687 - DNA, 25 bp, Homo sapien
caggcccataagcatgagtcacagt

SEQ ID NO: 5069688 - DNA, 25 bp, Homo sapien
gggctggtagaaaatccaggcccat

SEQ ID NO: 5069689 - DNA, 25 bp, Homo sapien
tcaagtctgatggctgagaatctgg

SEQ ID NO: 5069690 - DNA, 25 bp, Homo sapien
gaagaccaggtaggccaggccaatc

SEQ ID NO: 5069691 - DNA, 25 bp, Homo sapien
tgagccaggccaccctagtgtcatt

SEQ ID NO: 5069692 - DNA, 25 bp, Homo sapien
ccaatcccctatggagcagctgagc

SEQ ID NO: 5069693 - DNA, 25 bp, Homo sapien
tcccaatcccaagtcctggggatgg

SEQ ID NO: 5069694 - DNA, 25 bp, Homo sapien
tacttagaaatcactgggccagccg

SEQ ID NO: 5069695 - DNA, 25 bp, Homo sapien
catagtttgcctaccttgatctaga

SEQ ID NO: 5069696 - DNA, 25 bp, Homo sapien
gaaggctagatcctctacttctcta

SEQ ID NO: 5069697 - DNA, 25 bp, Homo sapien
ctgggtttagggctcatgccacaaa

SEQ ID NO: 5069698 - DNA, 25 bp, Homo sapien
gaaggtggcagttttttggaggcca

SEQ ID NO: 5069699 - DNA, 25 bp, Homo sapien
cagttttttggaggccacttgccag

SEQ ID NO: 5069700 - DNA, 25 bp, Homo sapien
aggtggcagttttttggaggccact

SEQ ID NO: 5069701 - DNA, 25 bp, Homo sapien
tggcagttttttggaggccacttgc

SEQ ID NO: 5069702 - DNA, 25 bp, Homo sapien
gagccctcgctctgtctgaattgtc

SEQ ID NO: 5069703 - DNA, 25 bp, Homo sapien
gggtccccaatatccaaagtatgga

SEQ ID NO: 5069704 - DNA, 25 bp, Homo sapien
ttttcctgaacgacgtgagtgccac

SEQ ID NO: 5069705 - DNA, 25 bp, Homo sapien
gatggtgcttatagtgagctcccct

SEQ ID NO: 5069706 - DNA, 25 bp, Homo sapien
gccatctatctacctgactcctgag

SEQ ID NO: 5069707 - DNA, 25 bp, Homo sapien
gtttcttctccacattatctttgtt

SEQ ID NO: 5069708 - DNA, 25 bp, Homo sapien
ctgtggagcagccatctatctacct

SEQ ID NO: 5069709 - DNA, 25 bp, Homo sapien
gtcatttctgtcatccgtgctctgt

SEQ ID NO: 5069710 - DNA, 25 bp, Homo sapien
gtccctggtcctctgggaatagaag

SEQ ID NO: 5069711 - DNA, 25 bp, Homo sapien
gattgtctgtgacactcaagcccct

SEQ ID NO: 5069712 - DNA, 25 bp, Homo sapien
gtcctctgggaatagaagatccatt

SEQ ID NO: 5069713 - DNA, 25 bp, Homo sapien
ctggtcctctgggaatagaagatcc

SEQ ID NO: 5069714 - DNA, 25 bp, Homo sapien
gcgccctagccctctttcggggata

SEQ ID NO: 5069715 - DNA, 25 bp, Homo sapien
ctcagcccggtgttccccgcgtccg

SEQ ID NO: 5069716 - DNA, 25 bp, Homo sapien
cgaggtcgcggcttcgcagaaactc

SEQ ID NO: 5069717 - DNA, 25 bp, Homo sapien
ggcttcccggagccgactgcagact

SEQ ID NO: 5069718 - DNA, 25 bp, Homo sapien
ttggtgctccgctgctcgcgcgacc

SEQ ID NO: 5069719 - DNA, 25 bp, Homo sapien
tttccgttcccttggtgctccgctg

SEQ ID NO: 5069720 - DNA, 25 bp, Homo sapien
gccccgcagcgcgtcaggccctctt

SEQ ID NO: 5069721 - DNA, 25 bp, Homo sapien
ggcgtggcctaagcggcccggtcca

SEQ ID NO: 5069722 - DNA, 25 bp, Homo sapien
gactacccgggtcgtgaggcgccat

SEQ ID NO: 5069723 - DNA, 25 bp, Homo sapien
tcgggtagcgccagagccctttcca

SEQ ID NO: 5069724 - DNA, 25 bp, Homo sapien
cagggcaccagggtcgtaagactac

SEQ ID NO: 5069725 - DNA, 25 bp, Homo sapien
taagactacccgggtcgtgaggcgc

SEQ ID NO: 5069726 - DNA, 25 bp, Homo sapien
agggacgaaatcagaaccgcaggcc

SEQ ID NO: 5069727 - DNA, 25 bp, Homo sapien
cttcagcccgacctcaaacttgctt

SEQ ID NO: 5069728 - DNA, 25 bp, Homo sapien
tggctgggcagggtcgggaagcgtc

SEQ ID NO: 5069729 - DNA, 25 bp, Homo sapien
ggctggccagcgaccctgcttcagc

SEQ ID NO: 5069730 - DNA, 25 bp, Homo sapien
taacaggctaggctaggagatgcca

SEQ ID NO: 5069731 - DNA, 25 bp, Homo sapien
cagtaccagatatcgcacagggaag

SEQ ID NO: 5069732 - DNA, 25 bp, Homo sapien
cgaccgcaggtacgtaaagaactca

SEQ ID NO: 5069733 - DNA, 25 bp, Homo sapien
taaatggataaacggctcgtgtccc

SEQ ID NO: 5069734 - DNA, 25 bp, Homo sapien
tagctctcgtgtcgttttacaataa

SEQ ID NO: 5069735 - DNA, 25 bp, Homo sapien
tttgacaaattttgcacgctccctg

SEQ ID NO: 5069736 - DNA, 25 bp, Homo sapien
cacgctccctggacattgggtgcat

SEQ ID NO: 5069737 - DNA, 25 bp, Homo sapien
tacaataaaaggccacttttgacaa

SEQ ID NO: 5069738 - DNA, 25 bp, Homo sapien
attcaggcagcaacgggcatgcagc

SEQ ID NO: 5069739 - DNA, 25 bp, Homo sapien
gcccttctgattcaggcagcaacgg

SEQ ID NO: 5069740 - DNA, 25 bp, Homo sapien
tctgattcaggcagcaacgggcatg

SEQ ID NO: 5069741 - DNA, 25 bp, Homo sapien
ccttctgattcaggcagcaacgggc

SEQ ID NO: 5069742 - DNA, 25 bp, Homo sapien
caggctaaggaatggcctgtatcca

SEQ ID NO: 5069743 - DNA, 25 bp, Homo sapien
taaggaatggcctgtatccagcatc

SEQ ID NO: 5069744 - DNA, 25 bp, Homo sapien
agccaggctaaggaatggcctgtat

SEQ ID NO: 5069745 - DNA, 25 bp, Homo sapien
aaagcagccaggctaaggaatggcc

SEQ ID NO: 5069746 - DNA, 25 bp, Homo sapien
catgtattttctaccacagattggt

SEQ ID NO: 5069747 - DNA, 25 bp, Homo sapien
caatgtagttagaggaacaagagca

SEQ ID NO: 5069748 - DNA, 25 bp, Homo sapien
cagattggttgtaaactgctggaca

SEQ ID NO: 5069749 - DNA, 25 bp, Homo sapien
gctggacattaaggatcatgccacg

SEQ ID NO: 5069750 - DNA, 25 bp, Homo sapien
tatgtgcctgatgaaagtttggacc

SEQ ID NO: 5069751 - DNA, 25 bp, Homo sapien
gatgaaagtttggaccagggtcctc

SEQ ID NO: 5069752 - DNA, 25 bp, Homo sapien
tggtatgtgcctgatgaaagtttgg

SEQ ID NO: 5069753 - DNA, 25 bp, Homo sapien
tgcctgatgaaagtttggaccaggg

SEQ ID NO: 5069754 - DNA, 25 bp, Homo sapien
ctgagtaaagccacggaaggtgttg

SEQ ID NO: 5069755 - DNA, 25 bp, Homo sapien
caagtcacctttgagggggtttgct

SEQ ID NO: 5069756 - DNA, 25 bp, Homo sapien
agctgagtaaagccacggaaggtgt

SEQ ID NO: 5069757 - DNA, 25 bp, Homo sapien
tttgagggggtttgcttgcaggtct

SEQ ID NO: 5069758 - DNA, 25 bp, Homo sapien
ctatataagaggtgatagtattcca

SEQ ID NO: 5069759 - DNA, 25 bp, Homo sapien
ttcctccaggacagttgacatgttg

SEQ ID NO: 5069760 - DNA, 25 bp, Homo sapien
cagatttggttgtctatataagagg

SEQ ID NO: 5069761 - DNA, 25 bp, Homo sapien
ctgggtccccagtgttattgcaaag

SEQ ID NO: 5069762 - DNA, 25 bp, Homo sapien
tctctcaatcattgctaggataaag

SEQ ID NO: 5069763 - DNA, 25 bp, Homo sapien
gggttatagccccagaactctgaat

SEQ ID NO: 5069764 - DNA, 25 bp, Homo sapien
ggtggtctctttacacggacacacg

SEQ ID NO: 5069765 - DNA, 25 bp, Homo sapien
aacagtaacaataatgtcaggcctc

SEQ ID NO: 5069766 - DNA, 25 bp, Homo sapien
gacctggaccatcaggtacacaaga

SEQ ID NO: 5069767 - DNA, 25 bp, Homo sapien
gaccatcaggtacacaagatccatt

SEQ ID NO: 5069768 - DNA, 25 bp, Homo sapien
ctggcgcatacacttgtatccatgg

SEQ ID NO: 5069769 - DNA, 25 bp, Homo sapien
catacacttgtatccatggaaacca

SEQ ID NO: 5069770 - DNA, 25 bp, Homo sapien
gctcctggtcttgtggctctccttt

SEQ ID NO: 5069771 - DNA, 25 bp, Homo sapien
gagaagacttgctctatgcattcct

SEQ ID NO: 5069772 - DNA, 25 bp, Homo sapien
tacaacgttacacggagggccacat

SEQ ID NO: 5069773 - DNA, 25 bp, Homo sapien
tccttgtatccctagttagacggcc

SEQ ID NO: 5069774 - DNA, 25 bp, Homo sapien
tgaagtcttggcttttcggcgctgg

SEQ ID NO: 5069775 - DNA, 25 bp, Homo sapien
acggatagagtggtggctcccagaa

SEQ ID NO: 5069776 - DNA, 25 bp, Homo sapien
gaatcccgaagaacataagcagtga

SEQ ID NO: 5069777 - DNA, 25 bp, Homo sapien
gctgggtcgcccaaagcagaatgga

SEQ ID NO: 5069778 - DNA, 25 bp, Homo sapien
tgatcttaggtcaatggtaagacct

SEQ ID NO: 5069779 - DNA, 25 bp, Homo sapien
tcagattgatcttaggtcaatggta

SEQ ID NO: 5069780 - DNA, 25 bp, Homo sapien
taggtcaatggtaagacctatgtag

SEQ ID NO: 5069781 - DNA, 25 bp, Homo sapien
tcttaggtcaatggtaagacctatg

SEQ ID NO: 5069782 - DNA, 25 bp, Homo sapien
gatgcctttctaggaagcagagctc

SEQ ID NO: 5069783 - DNA, 25 bp, Homo sapien
tatttgtctacaccaagggagtgca

SEQ ID NO: 5069784 - DNA, 25 bp, Homo sapien
tccaatggcggcctcaaccttgagg

SEQ ID NO: 5069785 - DNA, 25 bp, Homo sapien
aaccttgaggcgaatccactggcga

SEQ ID NO: 5069786 - DNA, 25 bp, Homo sapien
agccgggcgcggcagcgtaggagcc

SEQ ID NO: 5069787 - DNA, 25 bp, Homo sapien
ggcgcggggcgctggagagaagccg

SEQ ID NO: 5069788 - DNA, 25 bp, Homo sapien
aagccgggcgcggcagcgtaggagc

SEQ ID NO: 5069789 - DNA, 25 bp, Homo sapien
gggcgctggagagaagccgggcgcg

SEQ ID NO: 5069790 - DNA, 25 bp, Homo sapien
ctggaaccacgtgaggacggcgcgc

SEQ ID NO: 5069791 - DNA, 25 bp, Homo sapien
gacggcgcgccggagtcggtccacg

SEQ ID NO: 5069792 - DNA, 25 bp, Homo sapien
accacgtgaggacggcgcgccggag

SEQ ID NO: 5069793 - DNA, 25 bp, Homo sapien
ggcgcgccggagtcggtccacgtgg

SEQ ID NO: 5069794 - DNA, 25 bp, Homo sapien
gagaagcgggaaggactgcaaactc

SEQ ID NO: 5069795 - DNA, 25 bp, Homo sapien
aggcgggggcgagtacggagaagcg

SEQ ID NO: 5069796 - DNA, 25 bp, Homo sapien
ctcagaggcgggggcgagtacggag

SEQ ID NO: 5069797 - DNA, 25 bp, Homo sapien
agaggcgggggcgagtacggagaag

SEQ ID NO: 5069798 - DNA, 25 bp, Homo sapien
ccacttccccggcagtcgacacggc

SEQ ID NO: 5069799 - DNA, 25 bp, Homo sapien
ttccccggcagtcgacacggcggcc

SEQ ID NO: 5069800 - DNA, 25 bp, Homo sapien
cagtcgacacggcggccccaaaggg

SEQ ID NO: 5069801 - DNA, 25 bp, Homo sapien
cgcaggaccgacccgtcctccaaca

SEQ ID NO: 5069802 - DNA, 25 bp, Homo sapien
tgcagagaccgaactcatccatttc

SEQ ID NO: 5069803 - DNA, 25 bp, Homo sapien
taggtgagcactaagatctgtgcct

SEQ ID NO: 5069804 - DNA, 25 bp, Homo sapien
cttgtaggagggatcggtgagggcc

SEQ ID NO: 5069805 - DNA, 25 bp, Homo sapien
gccatagttgccgatcagaggatag

SEQ ID NO: 5069806 - DNA, 25 bp, Homo sapien
cagaaagtttatgtgggagggatca

SEQ ID NO: 5069807 - DNA, 25 bp, Homo sapien
ggaacctgcattctgagactgtcca

SEQ ID NO: 5069808 - DNA, 25 bp, Homo sapien
tgatgaacagtttaaggaacctgca

SEQ ID NO: 5069809 - DNA, 25 bp, Homo sapien
ccatttatatgtgcgagtggctcca

SEQ ID NO: 5069810 - DNA, 25 bp, Homo sapien
ggagtaggacagcactctcccacta

SEQ ID NO: 5069811 - DNA, 25 bp, Homo sapien
tcccactaccagtgctgctacgtgg

SEQ ID NO: 5069812 - DNA, 25 bp, Homo sapien
ctcatgcagggtgcgggtggcactc

SEQ ID NO: 5069813 - DNA, 25 bp, Homo sapien
cgtggatgcccgaggattcaaacca

SEQ ID NO: 5069814 - DNA, 25 bp, Homo sapien
tcttggtcagctcccgagtgtctac

SEQ ID NO: 5069815 - DNA, 25 bp, Homo sapien
cctgttcccgcaacttcttggtcag

SEQ ID NO: 5069816 - DNA, 25 bp, Homo sapien
ttaatggagacctctggtaccaggg

SEQ ID NO: 5069817 - DNA, 25 bp, Homo sapien
ccaagaatggcagggatgaaggttc

SEQ ID NO: 5069818 - DNA, 25 bp, Homo sapien
ccccacgctggcagaggcatcggat

SEQ ID NO: 5069819 - DNA, 25 bp, Homo sapien
tctagtgcatggtcccagggtacca

SEQ ID NO: 5069820 - DNA, 25 bp, Homo sapien
tgattatacttgaggccacagtcca

SEQ ID NO: 5069821 - DNA, 25 bp, Homo sapien
cccctgtattgaatacccgtggagt

SEQ ID NO: 5069822 - DNA, 25 bp, Homo sapien
aacacggctcagtgtggatacgaca

SEQ ID NO: 5069823 - DNA, 25 bp, Homo sapien
ggtcaccaggcccattacttaagaa

SEQ ID NO: 5069824 - DNA, 25 bp, Homo sapien
tcttgtaagtcttggccccaatggc

SEQ ID NO: 5069825 - DNA, 25 bp, Homo sapien
ggctaaggccaatagctggtgtccc

SEQ ID NO: 5069826 - DNA, 25 bp, Homo sapien
gggatgtcagaaagcagcgcccaga

SEQ ID NO: 5069827 - DNA, 25 bp, Homo sapien
aagaaaggcaagctgttgtgcacaa

SEQ ID NO: 5069828 - DNA, 25 bp, Homo sapien
tgtctccacagcaaacccatggttc

SEQ ID NO: 5069829 - DNA, 25 bp, Homo sapien
caacaagcagggctggttatggcct

SEQ ID NO: 5069830 - DNA, 25 bp, Homo sapien
cagctgtggcctctttcacagtttc

SEQ ID NO: 5069831 - DNA, 25 bp, Homo sapien
cagtttccagaaagatatcgaaaag

SEQ ID NO: 5069832 - DNA, 25 bp, Homo sapien
agctgtggcctctttcacagtttcc

SEQ ID NO: 5069833 - DNA, 25 bp, Homo sapien
tccagaaagatatcgaaaagcagtt

SEQ ID NO: 5069834 - DNA, 25 bp, Homo sapien
aggcgctcagtcagccgctctctaa

SEQ ID NO: 5069835 - DNA, 25 bp, Homo sapien
cctttcgtggtggtggaagtccaga

SEQ ID NO: 5069836 - DNA, 25 bp, Homo sapien
tcagaacctttcgtggtggtggaag

SEQ ID NO: 5069837 - DNA, 25 bp, Homo sapien
tccagagccgggagtgggaatccca

SEQ ID NO: 5069838 - DNA, 25 bp, Homo sapien
ctgagagcccgagtagtcaaattct

SEQ ID NO: 5069839 - DNA, 25 bp, Homo sapien
gcccgagtagtcaaattctccagct

SEQ ID NO: 5069840 - DNA, 25 bp, Homo sapien
gagcccgagtagtcaaattctccag

SEQ ID NO: 5069841 - DNA, 25 bp, Homo sapien
gagagcccgagtagtcaaattctcc

SEQ ID NO: 5069842 - DNA, 25 bp, Homo sapien
ggcaatattggggttgatcagcaac

SEQ ID NO: 5069843 - DNA, 25 bp, Homo sapien
ggaagaaaatagaccttgtcggcca

SEQ ID NO: 5069844 - DNA, 25 bp, Homo sapien
cagcaacgtctggatgttttcctcc

SEQ ID NO: 5069845 - DNA, 25 bp, Homo sapien
acataatgaggtgttatgggaagaa

SEQ ID NO: 5069846 - DNA, 25 bp, Homo sapien
aagagaatttgctgcctcgctcggg

SEQ ID NO: 5069847 - DNA, 25 bp, Homo sapien
caaaagtcagtaacacaccatcggg

SEQ ID NO: 5069848 - DNA, 25 bp, Homo sapien
aatggtctccactggtgtgcccagg

SEQ ID NO: 5069849 - DNA, 25 bp, Homo sapien
gtcagctccacaccacagttcagag

SEQ ID NO: 5069850 - DNA, 25 bp, Homo sapien
cgtgacacagttgccataggcgtct

SEQ ID NO: 5069851 - DNA, 25 bp, Homo sapien
cacttggctggtatgggcaaaagct

SEQ ID NO: 5069852 - DNA, 25 bp, Homo sapien
gagagctcctccctgttagaggcaa

SEQ ID NO: 5069853 - DNA, 25 bp, Homo sapien
ccatcccttcagagacttgtctact

SEQ ID NO: 5069854 - DNA, 25 bp, Homo sapien
cccagtgggtccaagttctccatgt

SEQ ID NO: 5069855 - DNA, 25 bp, Homo sapien
tgtctgcctcaggagctgatactcc

SEQ ID NO: 5069856 - DNA, 25 bp, Homo sapien
ccactatggactcaccagtgtggat

SEQ ID NO: 5069857 - DNA, 25 bp, Homo sapien
gactcagggttcaaggcatactgca

SEQ ID NO: 5069858 - DNA, 25 bp, Homo sapien
cagagctgcgagagagcctggcatt

SEQ ID NO: 5069859 - DNA, 25 bp, Homo sapien
tgctagcttggctgccacataagcc

SEQ ID NO: 5069860 - DNA, 25 bp, Homo sapien
tggataacctgtggccttactggcc

SEQ ID NO: 5069861 - DNA, 25 bp, Homo sapien
ggcaaagggatgcccaatgctagct

SEQ ID NO: 5069862 - DNA, 25 bp, Homo sapien
cactgtgatatctccctcatcctcg

SEQ ID NO: 5069863 - DNA, 25 bp, Homo sapien
ccactgtgatatctccctcatcctc

SEQ ID NO: 5069864 - DNA, 25 bp, Homo sapien
cccactgtgatatctccctcatcct

SEQ ID NO: 5069865 - DNA, 25 bp, Homo sapien
aaggacagtgaaggaagcataaagg

SEQ ID NO: 5069866 - DNA, 25 bp, Homo sapien
agcataaagggtgagcttccggata

SEQ ID NO: 5069867 - DNA, 25 bp, Homo sapien
gaagcataaagggtgagcttccgga

SEQ ID NO: 5069868 - DNA, 25 bp, Homo sapien
cataaagggtgagcttccggatagc

SEQ ID NO: 5069869 - DNA, 25 bp, Homo sapien
agctcccaatctttgtgctgactcg

SEQ ID NO: 5069870 - DNA, 25 bp, Homo sapien
ccacacaataatccacgctgggttc

SEQ ID NO: 5069871 - DNA, 25 bp, Homo sapien
ggtcccatcgaggaatcttcaccac

SEQ ID NO: 5069872 - DNA, 25 bp, Homo sapien
tgctgactcgcaggaacttgctaag

SEQ ID NO: 5069873 - DNA, 25 bp, Homo sapien
catatcgctgactggtttcactgtg

SEQ ID NO: 5069874 - DNA, 25 bp, Homo sapien
gtgatcaaagcccacacagttctca

SEQ ID NO: 5069875 - DNA, 25 bp, Homo sapien
aatgaacgcccaatgcccatgactt

SEQ ID NO: 5069876 - DNA, 25 bp, Homo sapien
acagttctcatccaccatgcgcagg

SEQ ID NO: 5069877 - DNA, 25 bp, Homo sapien
acggtgttgttctagcagctgggca

SEQ ID NO: 5069878 - DNA, 25 bp, Homo sapien
tgagctcatacaggcggtccactga

SEQ ID NO: 5069879 - DNA, 25 bp, Homo sapien
gatacgcttcattcggtgcaggaac

SEQ ID NO: 5069880 - DNA, 25 bp, Homo sapien
ccagcggtcgatgcgtgtgagctca

SEQ ID NO: 5069881 - DNA, 25 bp, Homo sapien
tgaaacacaggcccagagagtaggg

SEQ ID NO: 5069882 - DNA, 25 bp, Homo sapien
ctgaaacacaggcccagagagtagg

SEQ ID NO: 5069883 - DNA, 25 bp, Homo sapien
gctagagccaatacggtagacgcca

SEQ ID NO: 5069884 - DNA, 25 bp, Homo sapien
gcagcttgcgaacagccagctctgt

SEQ ID NO: 5069885 - DNA, 25 bp, Homo sapien
tggtgccccaatacgttaggtatag

SEQ ID NO: 5069886 - DNA, 25 bp, Homo sapien
ccaaggactaggacatgaggtgttc

SEQ ID NO: 5069887 - DNA, 25 bp, Homo sapien
tgccaagcaattgctagagatgaac

SEQ ID NO: 5069888 - DNA, 25 bp, Homo sapien
tctatgaccaaagtaagggacggca

SEQ ID NO: 5069889 - DNA, 25 bp, Homo sapien
gggacggcaattaataggaaatgcc

SEQ ID NO: 5069890 - DNA, 25 bp, Homo sapien
aaatgccaggattagtgccaagcaa

SEQ ID NO: 5069891 - DNA, 25 bp, Homo sapien
ctgactgtctctgggttatagttca

SEQ ID NO: 5069892 - DNA, 25 bp, Homo sapien
catcaaagtagagtcgatcacacat

SEQ ID NO: 5069893 - DNA, 25 bp, Homo sapien
gatcacacatgtcatagtcggtgct

SEQ ID NO: 5069894 - DNA, 25 bp, Homo sapien
actgtctctgggttatagttcacca

SEQ ID NO: 5069895 - DNA, 25 bp, Homo sapien
ccaatggtgtcaaggagccgggaaa

SEQ ID NO: 5069896 - DNA, 25 bp, Homo sapien
gaaacggttctcagccgagtcaatg

SEQ ID NO: 5069897 - DNA, 25 bp, Homo sapien
caccttcagggttctcgagctcata

SEQ ID NO: 5069898 - DNA, 25 bp, Homo sapien
cagctgtccacccatggataggatc

SEQ ID NO: 5069899 - DNA, 25 bp, Homo sapien
agctgagttgttcacactttccccc

SEQ ID NO: 5069900 - DNA, 25 bp, Homo sapien
tagctgagttgttcacactttcccc

SEQ ID NO: 5069901 - DNA, 25 bp, Homo sapien
gaccacgggatgctctttggagacg

SEQ ID NO: 5069902 - DNA, 25 bp, Homo sapien
cacggtctggcagaattggcgagca

SEQ ID NO: 5069903 - DNA, 25 bp, Homo sapien
ggtctccatccgtgtaggccacatt

SEQ ID NO: 5069904 - DNA, 25 bp, Homo sapien
gatgaacttggagatgaccacggga

SEQ ID NO: 5069905 - DNA, 25 bp, Homo sapien
gcatcacctgaatgcacacctgcat

SEQ ID NO: 5069906 - DNA, 25 bp, Homo sapien
ccagggttttggcagtgatatcttg

SEQ ID NO: 5069907 - DNA, 25 bp, Homo sapien
caatggctttgatccgctccagggt

SEQ ID NO: 5069908 - DNA, 25 bp, Homo sapien
ctgcagattgaagggtcctgtgacc

SEQ ID NO: 5069909 - DNA, 25 bp, Homo sapien
tgtcataagccccaacaccatgagc

SEQ ID NO: 5069910 - DNA, 25 bp, Homo sapien
tggccttgctgacactatctatagg

SEQ ID NO: 5069911 - DNA, 25 bp, Homo sapien
agggcttcatggcactgtggccagc

SEQ ID NO: 5069912 - DNA, 25 bp, Homo sapien
tataggcctagactcttcctctccg

SEQ ID NO: 5069913 - DNA, 25 bp, Homo sapien
atgatgacccgcgtggccaaggcta

SEQ ID NO: 5069914 - DNA, 25 bp, Homo sapien
gcattcaataactttcagctggtca

SEQ ID NO: 5069915 - DNA, 25 bp, Homo sapien
gtcattagccccacaggttccactt

SEQ ID NO: 5069916 - DNA, 25 bp, Homo sapien
aaggagcgagagacacgtacgttgc

SEQ ID NO: 5069917 - DNA, 25 bp, Homo sapien
cagtgcttagcatggccttgaggta

SEQ ID NO: 5069918 - DNA, 25 bp, Homo sapien
tcttaaagccagtgcttagcatggc

SEQ ID NO: 5069919 - DNA, 25 bp, Homo sapien
ttgaggtatgcctcacagcggctct

SEQ ID NO: 5069920 - DNA, 25 bp, Homo sapien
tggtcagcaggatattcttcttggg

SEQ ID NO: 5069921 - DNA, 25 bp, Homo sapien
cagttgggagcagctcgcttttgtt

SEQ ID NO: 5069922 - DNA, 25 bp, Homo sapien
cttgacgccatgctcagtgtagaag

SEQ ID NO: 5069923 - DNA, 25 bp, Homo sapien
caggctctccagtagccgcacagtt

SEQ ID NO: 5069924 - DNA, 25 bp, Homo sapien
gagactggcatagaggctgtagccc

SEQ ID NO: 5069925 - DNA, 25 bp, Homo sapien
gggtaggttgccagagttcctgcac

SEQ ID NO: 5069926 - DNA, 25 bp, Homo sapien
gcagcagtggggtaggttgccagag

SEQ ID NO: 5069927 - DNA, 25 bp, Homo sapien
aagggcagcagtggggtaggttgcc

SEQ ID NO: 5069928 - DNA, 25 bp, Homo sapien
agcagtggggtaggttgccagagtt

SEQ ID NO: 5069929 - DNA, 25 bp, Homo sapien
cccagataattctttggtgcagtat

SEQ ID NO: 5069930 - DNA, 25 bp, Homo sapien
gatgctccgctgtggtgggcactca

SEQ ID NO: 5069931 - DNA, 25 bp, Homo sapien
caaagtttttctcagctagctgctc

SEQ ID NO: 5069932 - DNA, 25 bp, Homo sapien
ccagctccacgcattgacaggttaa

SEQ ID NO: 5069933 - DNA, 25 bp, Homo sapien
tgcggtagcccttggtgacaaagga

SEQ ID NO: 5069934 - DNA, 25 bp, Homo sapien
cgcacaagcttttgggaggtcatac

SEQ ID NO: 5069935 - DNA, 25 bp, Homo sapien
gtcaacatgcaccttcaaaggaggg

SEQ ID NO: 5069936 - DNA, 25 bp, Homo sapien
ggaggtcatacagtcaacatgcacc

SEQ ID NO: 5069937 - DNA, 25 bp, Homo sapien
gcttttgggaggtcatacagtcaac

SEQ ID NO: 5069938 - DNA, 25 bp, Homo sapien
accatggtgatacccccagccaggg

SEQ ID NO: 5069939 - DNA, 25 bp, Homo sapien
ttcccgcaggtgcacatggacatca

SEQ ID NO: 5069940 - DNA, 25 bp, Homo sapien
agcaaagtcctccttatgtgtccca

SEQ ID NO: 5069941 - DNA, 25 bp, Homo sapien
ggccgggtattaggcatggcacaca

SEQ ID NO: 5069942 - DNA, 25 bp, Homo sapien
gctgtccagccgcagctcagagaag

SEQ ID NO: 5069943 - DNA, 25 bp, Homo sapien
tcattgaggtaaagcttcagcccgg

SEQ ID NO: 5069944 - DNA, 25 bp, Homo sapien
cctgcattttcagacgaggccccaa

SEQ ID NO: 5069945 - DNA, 25 bp, Homo sapien
gaggccccaaggaatagcgcaaagt

SEQ ID NO: 5069946 - DNA, 25 bp, Homo sapien
ggtgggagggccatgtctcgaaatg

SEQ ID NO: 5069947 - DNA, 25 bp, Homo sapien
tgacatatgtgcactgagcgctgag

SEQ ID NO: 5069948 - DNA, 25 bp, Homo sapien
gctgctctgcgtgagccacaatggg

SEQ ID NO: 5069949 - DNA, 25 bp, Homo sapien
acagcagccacggtttgctgctctg

SEQ ID NO: 5069950 - DNA, 25 bp, Homo sapien
tcatggcttaggaacaggtggtggg

SEQ ID NO: 5069951 - DNA, 25 bp, Homo sapien
aagccccgtgcctttgcagctttaa

SEQ ID NO: 5069952 - DNA, 25 bp, Homo sapien
catggtctgaggcaaagcagtcgat

SEQ ID NO: 5069953 - DNA, 25 bp, Homo sapien
acatcctggcgggagccaagctcag

SEQ ID NO: 5069954 - DNA, 25 bp, Homo sapien
ggcagcatggtctctaaccctggga

SEQ ID NO: 5069955 - DNA, 25 bp, Homo sapien
tacagccgtcaggagtagtggcagc

SEQ ID NO: 5069956 - DNA, 25 bp, Homo sapien
cgccgaggattgtggtgcaatcgct

SEQ ID NO: 5069957 - DNA, 25 bp, Homo sapien
tgcaatcgctgcagcaggtcgtcca

SEQ ID NO: 5069958 - DNA, 25 bp, Homo sapien
gcggacggtgcccttcactttctgc

SEQ ID NO: 5069959 - DNA, 25 bp, Homo sapien
atataggcaacctcccctcgcagga

SEQ ID NO: 5069960 - DNA, 25 bp, Homo sapien
tggctgggaattgtccactcatgct

SEQ ID NO: 5069961 - DNA, 25 bp, Homo sapien
ccttcaaaaggtgtccagtgggcct

SEQ ID NO: 5069962 - DNA, 25 bp, Homo sapien
ttccgtacatcctgtccatagcccg

SEQ ID NO: 5069963 - DNA, 25 bp, Homo sapien
tggccacttccgtacatcctgtcca

SEQ ID NO: 5069964 - DNA, 25 bp, Homo sapien
tacatcctgtccatagcccgggggt

SEQ ID NO: 5069965 - DNA, 25 bp, Homo sapien
catcctgtccatagcccgggggtac

SEQ ID NO: 5069966 - DNA, 25 bp, Homo sapien
gccccctagcccagtagtgtggata

SEQ ID NO: 5069967 - DNA, 25 bp, Homo sapien
aatgttcaagctgttcatcctgccc

SEQ ID NO: 5069968 - DNA, 25 bp, Homo sapien
caattgttcctgaaccaccaatgaa

SEQ ID NO: 5069969 - DNA, 25 bp, Homo sapien
tgacccaaccccacttcaaattcag

SEQ ID NO: 5069970 - DNA, 25 bp, Homo sapien
cagtggcgtgaccttctgggttcaa

SEQ ID NO: 5069971 - DNA, 25 bp, Homo sapien
gcagtggcgtgaccttctgggttca

SEQ ID NO: 5069972 - DNA, 25 bp, Homo sapien
tacagatgtgcaccaccacgcctgg

SEQ ID NO: 5069973 - DNA, 25 bp, Homo sapien
gattacagatgtgcaccaccacgcc

SEQ ID NO: 5069974 - DNA, 25 bp, Homo sapien
ggatgccacggcggggtctttcagg

SEQ ID NO: 5069975 - DNA, 25 bp, Homo sapien
ctgggatgccacggcggggtctttc

SEQ ID NO: 5069976 - DNA, 25 bp, Homo sapien
gatgccacggcggggtctttcaggt

SEQ ID NO: 5069977 - DNA, 25 bp, Homo sapien
tgccacggcggggtctttcaggtgt

SEQ ID NO: 5069978 - DNA, 25 bp, Homo sapien
ttcggggcggcagatggaagcggcc

SEQ ID NO: 5069979 - DNA, 25 bp, Homo sapien
gggtcggaggctcgatggattcggg

SEQ ID NO: 5069980 - DNA, 25 bp, Homo sapien
gattcggggcggcagatggaagcgg

SEQ ID NO: 5069981 - DNA, 25 bp, Homo sapien
ctgggtcggaggctcgatggattcg

SEQ ID NO: 5069982 - DNA, 25 bp, Homo sapien
ctgccccgtgggatcccagctcctg

SEQ ID NO: 5069983 - DNA, 25 bp, Homo sapien
tccgagaggacttctcctttggctc

SEQ ID NO: 5069984 - DNA, 25 bp, Homo sapien
ctggctcggctaccttccgagagga

SEQ ID NO: 5069985 - DNA, 25 bp, Homo sapien
gctaccttccgagaggacttctcct

SEQ ID NO: 5069986 - DNA, 25 bp, Homo sapien
gctcggctaccttccgagaggactt

SEQ ID NO: 5069987 - DNA, 25 bp, Homo sapien
tcggtactggtggtggagggtagca

SEQ ID NO: 5069988 - DNA, 25 bp, Homo sapien
tggcccactaatgagtgcagcaggg

SEQ ID NO: 5069989 - DNA, 25 bp, Homo sapien
ctggacggacaggatatgttggccc

SEQ ID NO: 5069990 - DNA, 25 bp, Homo sapien
agatgcctgtctcggtactggtggt

SEQ ID NO: 5069991 - DNA, 25 bp, Homo sapien
gtgccacattgaacaggtgagacat

SEQ ID NO: 5069992 - DNA, 25 bp, Homo sapien
catcatacgcagtgtgtgtgccaca

SEQ ID NO: 5069993 - DNA, 25 bp, Homo sapien
ggatgtcgaggctccgctccttctg

SEQ ID NO: 5069994 - DNA, 25 bp, Homo sapien
ttctgcaccatcatacgcagtgtgt

SEQ ID NO: 5069995 - DNA, 25 bp, Homo sapien
cagggattcgcccttctggacggac

SEQ ID NO: 5069996 - DNA, 25 bp, Homo sapien
catagcagctcatggtctgcacgga

SEQ ID NO: 5069997 - DNA, 25 bp, Homo sapien
tctgcacggagtcagccagggattc

SEQ ID NO: 5069998 - DNA, 25 bp, Homo sapien
gcacgacgacgtcggcatagcagct

SEQ ID NO: 5069999 - DNA, 25 bp, Homo sapien
cagcattgatcactggcctccggca

SEQ ID NO: 5070000 - DNA, 25 bp, Homo sapien
acagttcccagctcctcacggatgg

SEQ ID NO: 5070001 - DNA, 25 bp, Homo sapien
catccccagcattgatcactggcct

SEQ ID NO: 5070002 - DNA, 25 bp, Homo sapien
cgtcatgccattgacagttcccagc

SEQ ID NO: 5070003 - DNA, 25 bp, Homo sapien
tactgtgcgtccgtgcttcaggtca

SEQ ID NO: 5070004 - DNA, 25 bp, Homo sapien
cacagtgggtggcatgcgcaggctg

SEQ ID NO: 5070005 - DNA, 25 bp, Homo sapien
tgacacgatactgggtgagcaggca

SEQ ID NO: 5070006 - DNA, 25 bp, Homo sapien
aggtgccacgtagcgcaggctgaca

SEQ ID NO: 5070007 - DNA, 25 bp, Homo sapien
ggtgaggagagccatggtggatgca

SEQ ID NO: 5070008 - DNA, 25 bp, Homo sapien
tctggattcgagtcatgtagagcac

SEQ ID NO: 5070009 - DNA, 25 bp, Homo sapien
tcatgtagagcacatcagtgtcagg

SEQ ID NO: 5070010 - DNA, 25 bp, Homo sapien
cagtgtcaggcagcgcctcctcaat

SEQ ID NO: 5070011 - DNA, 25 bp, Homo sapien
cctgggtagagccaaatcgttcctt

SEQ ID NO: 5070012 - DNA, 25 bp, Homo sapien
cttatctcgttgacacggggcatcg

SEQ ID NO: 5070013 - DNA, 25 bp, Homo sapien
acggggcatcgggtgcatcaccacc

SEQ ID NO: 5070014 - DNA, 25 bp, Homo sapien
atctcgttgacacggggcatcgggt

SEQ ID NO: 5070015 - DNA, 25 bp, Homo sapien
ttcttggcccgggtcatgatgtggg

SEQ ID NO: 5070016 - DNA, 25 bp, Homo sapien
agtctctgactctgatgctgcacca

SEQ ID NO: 5070017 - DNA, 25 bp, Homo sapien
ctaagtctcctcccgtccaccagcc

SEQ ID NO: 5070018 - DNA, 25 bp, Homo sapien
agccccgaggcagtctctgactctg

SEQ ID NO: 5070019 - DNA, 25 bp, Homo sapien
tccaccagccccgaggcagtctctg

SEQ ID NO: 5070020 - DNA, 25 bp, Homo sapien
gcagcccatggatggcttgtccagg

SEQ ID NO: 5070021 - DNA, 25 bp, Homo sapien
gaagtgttatcgtgcagcccatgga

SEQ ID NO: 5070022 - DNA, 25 bp, Homo sapien
tatcgtgcagcccatggatggcttg

SEQ ID NO: 5070023 - DNA, 25 bp, Homo sapien
aaaaaggaagtgttatcgtgcagcc

SEQ ID NO: 5070024 - DNA, 25 bp, Homo sapien
ctaacagagccatgcggatgtacat

SEQ ID NO: 5070025 - DNA, 25 bp, Homo sapien
cgttctcagcctggcggaagtaggc

SEQ ID NO: 5070026 - DNA, 25 bp, Homo sapien
gatgtacatgccgttctcagcctgg

SEQ ID NO: 5070027 - DNA, 25 bp, Homo sapien
ctgcgcggggatccgagtccacttc

SEQ ID NO: 5070028 - DNA, 25 bp, Homo sapien
gctccagtccagagcctgaagtgtg

SEQ ID NO: 5070029 - DNA, 25 bp, Homo sapien
caggtttaaggtgcaggaatgaaga

SEQ ID NO: 5070030 - DNA, 25 bp, Homo sapien
caggaatatctaagtgtgctgcccc

SEQ ID NO: 5070031 - DNA, 25 bp, Homo sapien
ggtcagcacatgtgagctatctgga

SEQ ID NO: 5070032 - DNA, 25 bp, Homo sapien
gcacatggtgctttgtacccacaga

SEQ ID NO: 5070033 - DNA, 25 bp, Homo sapien
gaatacgctgttactctctggatga

SEQ ID NO: 5070034 - DNA, 25 bp, Homo sapien
tatctgtgctgacctcttctggaaa

SEQ ID NO: 5070035 - DNA, 25 bp, Homo sapien
tgccgagtcccaaagagtcacgagt

SEQ ID NO: 5070036 - DNA, 25 bp, Homo sapien
aaagaaaggctcaggacaggaacat

SEQ ID NO: 5070037 - DNA, 25 bp, Homo sapien
ttctacttgagggtgaggctatcca

SEQ ID NO: 5070038 - DNA, 25 bp, Homo sapien
gaatctgtgtgcgagtcccaagtac

SEQ ID NO: 5070039 - DNA, 25 bp, Homo sapien
aatgcgtccgctacttggcagaaaa

SEQ ID NO: 5070040 - DNA, 25 bp, Homo sapien
cgttataattagtctggccctccat

SEQ ID NO: 5070041 - DNA, 25 bp, Homo sapien
tccctgatttcctcgttataattag

SEQ ID NO: 5070042 - DNA, 25 bp, Homo sapien
ttacctcttacagctgtttccctga

SEQ ID NO: 5070043 - DNA, 25 bp, Homo sapien
cttctcatgttacctcttacagctg

SEQ ID NO: 5070044 - DNA, 25 bp, Homo sapien
tatgaccattagtcaccgaatcctg

SEQ ID NO: 5070045 - DNA, 25 bp, Homo sapien
cactcatatgaccattagtcaccga

SEQ ID NO: 5070046 - DNA, 25 bp, Homo sapien
cattagtcaccgaatcctgcagcat

SEQ ID NO: 5070047 - DNA, 25 bp, Homo sapien
tcttcactcatatgaccattagtca

SEQ ID NO: 5070048 - DNA, 25 bp, Homo sapien
gaagcttcgacttgaggctcggcca

SEQ ID NO: 5070049 - DNA, 25 bp, Homo sapien
ccccaaatgaggcagaatgcggtaa

SEQ ID NO: 5070050 - DNA, 25 bp, Homo sapien
ggctcggccaccgactttgctgtaa

SEQ ID NO: 5070051 - DNA, 25 bp, Homo sapien
gactttgctgtaagtcgctccctcc

SEQ ID NO: 5070052 - DNA, 25 bp, Homo sapien
tgccgcatccgagccgcggagtgcg

SEQ ID NO: 5070053 - DNA, 25 bp, Homo sapien
cgccagggtcactacgggccaggct

SEQ ID NO: 5070054 - DNA, 25 bp, Homo sapien
gagccgcggagtgcgcggtggccgc

SEQ ID NO: 5070055 - DNA, 25 bp, Homo sapien
gccaggctgccgcatccgagccgcg

SEQ ID NO: 5070056 - DNA, 25 bp, Homo sapien
gcgccctcggtttctggaggcggca

SEQ ID NO: 5070057 - DNA, 25 bp, Homo sapien
ttccccgcctggtggctcccggcag

SEQ ID NO: 5070058 - DNA, 25 bp, Homo sapien
caagtgaaggttggtattcccaccg

SEQ ID NO: 5070059 - DNA, 25 bp, Homo sapien
cacgtttggccacgcgctgcgaggc

SEQ ID NO: 5070060 - DNA, 25 bp, Homo sapien
tttgcaaagatgttcacagggccat

SEQ ID NO: 5070061 - DNA, 25 bp, Homo sapien
caggtggaagcatcctgtttcgccg

SEQ ID NO: 5070062 - DNA, 25 bp, Homo sapien
cattcgcgaggaccctttgcaaaga

SEQ ID NO: 5070063 - DNA, 25 bp, Homo sapien
cagggccatttgatagctctttgag

SEQ ID NO: 5070064 - DNA, 25 bp, Homo sapien
ttttggtggtttgtctcatgccaaa

SEQ ID NO: 5070065 - DNA, 25 bp, Homo sapien
tggtggtttgtctcatgccaaattt

SEQ ID NO: 5070066 - DNA, 25 bp, Homo sapien
ggtggtttgtctcatgccaaatttc

SEQ ID NO: 5070067 - DNA, 25 bp, Homo sapien
ttggtggtttgtctcatgccaaatt

SEQ ID NO: 5070068 - DNA, 25 bp, Homo sapien
tagcagaaggaggatttgtatcccc

SEQ ID NO: 5070069 - DNA, 25 bp, Homo sapien
ttctttgcaagagcactcaatggct

SEQ ID NO: 5070070 - DNA, 25 bp, Homo sapien
ctacaggaggtagtgtttgcatcac

SEQ ID NO: 5070071 - DNA, 25 bp, Homo sapien
caatggctcctgtaacatgtagtag

SEQ ID NO: 5070072 - DNA, 25 bp, Homo sapien
tgaaacttcacaccggccgggtcca

SEQ ID NO: 5070073 - DNA, 25 bp, Homo sapien
tctgggcaggtcgttttttggcgcc

SEQ ID NO: 5070074 - DNA, 25 bp, Homo sapien
gttctcttaagccaggtgggtgccc

SEQ ID NO: 5070075 - DNA, 25 bp, Homo sapien
cagcagttgactgcgcttgtgcgca

SEQ ID NO: 5070076 - DNA, 25 bp, Homo sapien
ctggagtaaacacctctgggtctgt

SEQ ID NO: 5070077 - DNA, 25 bp, Homo sapien
ctctgggtctgtccaagctcactgc

SEQ ID NO: 5070078 - DNA, 25 bp, Homo sapien
ctgaacggacaggatcaggaatcag

SEQ ID NO: 5070079 - DNA, 25 bp, Homo sapien
cagcctgaacggacaggatcaggaa

SEQ ID NO: 5070080 - DNA, 25 bp, Homo sapien
agaggagaagcagcatctgtgagaa

SEQ ID NO: 5070081 - DNA, 25 bp, Homo sapien
ctgagccagaggagaagcagcatct

SEQ ID NO: 5070082 - DNA, 25 bp, Homo sapien
ggagaagcagcatctgtgagaactt

SEQ ID NO: 5070083 - DNA, 25 bp, Homo sapien
tgagccagaggagaagcagcatctg

SEQ ID NO: 5070084 - DNA, 25 bp, Homo sapien
tccagcactgcatagaggctcatct

SEQ ID NO: 5070085 - DNA, 25 bp, Homo sapien
gtgaggcgcccttcttaagatccag

SEQ ID NO: 5070086 - DNA, 25 bp, Homo sapien
cacttttggacagccggtgtgctgc

SEQ ID NO: 5070087 - DNA, 25 bp, Homo sapien
gctcatctcacttttggacagccgg

SEQ ID NO: 5070088 - DNA, 25 bp, Homo sapien
gagggtggggaagcaatgcggaatg

SEQ ID NO: 5070089 - DNA, 25 bp, Homo sapien
aggtgatactcaaaaggagggtggg

SEQ ID NO: 5070090 - DNA, 25 bp, Homo sapien
ccaggtgatactcaaaaggagggtg

SEQ ID NO: 5070091 - DNA, 25 bp, Homo sapien
ctacccaggtgatactcaaaaggag

SEQ ID NO: 5070092 - DNA, 25 bp, Homo sapien
gggatgataccgcaaggccagtttc

SEQ ID NO: 5070093 - DNA, 25 bp, Homo sapien
gccatgctggtcgtaaattttccgc

SEQ ID NO: 5070094 - DNA, 25 bp, Homo sapien
gatatattcccaatgagccatgctg

SEQ ID NO: 5070095 - DNA, 25 bp, Homo sapien
gtatctgacgccttcttcaccaaag

SEQ ID NO: 5070096 - DNA, 25 bp, Homo sapien
gactgctcaagcttccctccctcaa

SEQ ID NO: 5070097 - DNA, 25 bp, Homo sapien
tccttattcttaaaggacctggaga

SEQ ID NO: 5070098 - DNA, 25 bp, Homo sapien
cagttttctatatgactgctcaagc

SEQ ID NO: 5070099 - DNA, 25 bp, Homo sapien
cgagaatggcctcagtccagcagtt

SEQ ID NO: 5070100 - DNA, 25 bp, Homo sapien
ggtttaagtgctccacagcaaaaac

SEQ ID NO: 5070101 - DNA, 25 bp, Homo sapien
gtgagcagagtacacaggatgacaa

SEQ ID NO: 5070102 - DNA, 25 bp, Homo sapien
cactatcctgctcaggtggtggttt

SEQ ID NO: 5070103 - DNA, 25 bp, Homo sapien
gctcaggtggtggtttaagtgctcc

SEQ ID NO: 5070104 - DNA, 25 bp, Homo sapien
tattttcctcgcttctaaaatcaca

SEQ ID NO: 5070105 - DNA, 25 bp, Homo sapien
ttaaaaatcatcttcgctattttcc

SEQ ID NO: 5070106 - DNA, 25 bp, Homo sapien
ttcgctattttcctcgcttctaaaa

SEQ ID NO: 5070107 - DNA, 25 bp, Homo sapien
catcttcgctattttcctcgcttct

SEQ ID NO: 5070108 - DNA, 25 bp, Homo sapien
cagaaggcaccctcactgggtcagc

SEQ ID NO: 5070109 - DNA, 25 bp, Homo sapien
caaatcagggtcaatgtcaggacag

SEQ ID NO: 5070110 - DNA, 25 bp, Homo sapien
tctcttcaatgtgtccaggggactg

SEQ ID NO: 5070111 - DNA, 25 bp, Homo sapien
tcaggacagggctacttgctcctct

SEQ ID NO: 5070112 - DNA, 25 bp, Homo sapien
tgggatcaacgtcatcagtgcttct

SEQ ID NO: 5070113 - DNA, 25 bp, Homo sapien
gatggaatgactacccctaagcctc

SEQ ID NO: 5070114 - DNA, 25 bp, Homo sapien
gatgaaaccaactccatacaggcgt

SEQ ID NO: 5070115 - DNA, 25 bp, Homo sapien
caactgaaaggaagagtagctgggc

SEQ ID NO: 5070116 - DNA, 25 bp, Homo sapien
tgaggaggatacgaaacagcagcac

SEQ ID NO: 5070117 - DNA, 25 bp, Homo sapien
cttcctcgcttagatggcctctgga

SEQ ID NO: 5070118 - DNA, 25 bp, Homo sapien
cagatagcagtcttcggacagtctc

SEQ ID NO: 5070119 - DNA, 25 bp, Homo sapien
caacttgtctcgtcccagatagcag

SEQ ID NO: 5070120 - DNA, 25 bp, Homo sapien
ccctcgccaggctcacgtagtttta

SEQ ID NO: 5070121 - DNA, 25 bp, Homo sapien
actggtttggagaacatctccaggc

SEQ ID NO: 5070122 - DNA, 25 bp, Homo sapien
ctggaagacgtcgttggcacatttg

SEQ ID NO: 5070123 - DNA, 25 bp, Homo sapien
ccactggtttggagaacatctccag

SEQ ID NO: 5070124 - DNA, 25 bp, Homo sapien
catttgcggcacaggttgtgttggc

SEQ ID NO: 5070125 - DNA, 25 bp, Homo sapien
cagctctgacctgatcagtccccca

SEQ ID NO: 5070126 - DNA, 25 bp, Homo sapien
gctctgacctgatcagtcccccaca

SEQ ID NO: 5070127 - DNA, 25 bp, Homo sapien
agctctgacctgatcagtcccccac

SEQ ID NO: 5070128 - DNA, 25 bp, Homo sapien
ctctgacctgatcagtcccccacag

SEQ ID NO: 5070129 - DNA, 25 bp, Homo sapien
ggctcttataaagcccggtgtggga

SEQ ID NO: 5070130 - DNA, 25 bp, Homo sapien
tccacaatgctctcgaagtctgaaa

SEQ ID NO: 5070131 - DNA, 25 bp, Homo sapien
ttgctctgggatttgcttggacccc

SEQ ID NO: 5070132 - DNA, 25 bp, Homo sapien
tccagctgccgtctatgcacaggct

SEQ ID NO: 5070133 - DNA, 25 bp, Homo sapien
cctgattcacaagtccaatttctcc

SEQ ID NO: 5070134 - DNA, 25 bp, Homo sapien
tattttgcgtgtagctttcatcccc

SEQ ID NO: 5070135 - DNA, 25 bp, Homo sapien
ccagagtcccctcctgattcacaag

SEQ ID NO: 5070136 - DNA, 25 bp, Homo sapien
tgacaccacagtcccgtattttgcg

SEQ ID NO: 5070137 - DNA, 25 bp, Homo sapien
caactatgcaactgtggactaaagc

SEQ ID NO: 5070138 - DNA, 25 bp, Homo sapien
cctgtgtgggcctctatggtagata

SEQ ID NO: 5070139 - DNA, 25 bp, Homo sapien
cggattctgcgtgaaaaatactcca

SEQ ID NO: 5070140 - DNA, 25 bp, Homo sapien
tgtgtgccatggagctctataaggg

SEQ ID NO: 5070141 - DNA, 25 bp, Homo sapien
tgcaggccgtagacaccgtgtctgt

SEQ ID NO: 5070142 - DNA, 25 bp, Homo sapien
cactagcaggtttcgctgcaggccg

SEQ ID NO: 5070143 - DNA, 25 bp, Homo sapien
ggatgactcctgcttgtaaatgtcg

SEQ ID NO: 5070144 - DNA, 25 bp, Homo sapien
ggacaacctcatgcctgcacgatgg

SEQ ID NO: 5070145 - DNA, 25 bp, Homo sapien
gaggagtgggcagggggaggtggac

SEQ ID NO: 5070146 - DNA, 25 bp, Homo sapien
agagaggagtgggcagggggaggtg

SEQ ID NO: 5070147 - DNA, 25 bp, Homo sapien
ctagagaggagtgggcagggggagg

SEQ ID NO: 5070148 - DNA, 25 bp, Homo sapien
agaggagtgggcagggggaggtgga

SEQ ID NO: 5070149 - DNA, 25 bp, Homo sapien
gctcctcgcacatgaggtgctgctc

SEQ ID NO: 5070150 - DNA, 25 bp, Homo sapien
cacagtccttgtgggcaccgaagac

SEQ ID NO: 5070151 - DNA, 25 bp, Homo sapien
ttgtgggcaccgaagaccttgcaga

SEQ ID NO: 5070152 - DNA, 25 bp, Homo sapien
cttctggcgtttgtaaatggtgggc

SEQ ID NO: 5070153 - DNA, 25 bp, Homo sapien
taatcttagtgttctgcgaggctaa

SEQ ID NO: 5070154 - DNA, 25 bp, Homo sapien
ttagtgttctgcgaggctaagatgg

SEQ ID NO: 5070155 - DNA, 25 bp, Homo sapien
tataatcttagtgttctgcgaggct

SEQ ID NO: 5070156 - DNA, 25 bp, Homo sapien
atctataatcttagtgttctgcgag

SEQ ID NO: 5070157 - DNA, 25 bp, Homo sapien
cgcctggcttaatctgcttgatttt

SEQ ID NO: 5070158 - DNA, 25 bp, Homo sapien
cacgcctggcttaatctgcttgatt

SEQ ID NO: 5070159 - DNA, 25 bp, Homo sapien
acgcctggcttaatctgcttgattt

SEQ ID NO: 5070160 - DNA, 25 bp, Homo sapien
ctagctcagtgacattgccagcact

SEQ ID NO: 5070161 - DNA, 25 bp, Homo sapien
ggaatcttagctgcaggtacccctc

SEQ ID NO: 5070162 - DNA, 25 bp, Homo sapien
tttggaggaatagtctggtctctct

SEQ ID NO: 5070163 - DNA, 25 bp, Homo sapien
tagctgcaggtacccctccttttag

SEQ ID NO: 5070164 - DNA, 25 bp, Homo sapien
gaaggcttgaaccatcaagaggtac

SEQ ID NO: 5070165 - DNA, 25 bp, Homo sapien
cagggttgcctaggagagggctggc

SEQ ID NO: 5070166 - DNA, 25 bp, Homo sapien
caagaggtacggaagcacattctag

SEQ ID NO: 5070167 - DNA, 25 bp, Homo sapien
ccccataagggcatctacagcaatc

SEQ ID NO: 5070168 - DNA, 25 bp, Homo sapien
gcttgcacgcggtcattgcctgcca

SEQ ID NO: 5070169 - DNA, 25 bp, Homo sapien
ctgtgtgatcactgcttgcacgcgg

SEQ ID NO: 5070170 - DNA, 25 bp, Homo sapien
tcgcgatgccatcgctgagctcact

SEQ ID NO: 5070171 - DNA, 25 bp, Homo sapien
gcatcgcgatgccatcgctgagctc

SEQ ID NO: 5070172 - DNA, 25 bp, Homo sapien
gcacagggtactcacagagaaccaa

SEQ ID NO: 5070173 - DNA, 25 bp, Homo sapien
tccgtagtgacactgtgagttagtg

SEQ ID NO: 5070174 - DNA, 25 bp, Homo sapien
agcacagggtactcacagagaacca

SEQ ID NO: 5070175 - DNA, 25 bp, Homo sapien
gagacccggtggctgggaaagcaca

SEQ ID NO: 5070176 - DNA, 25 bp, Homo sapien
gaggcctccaggtggtcgccatact

SEQ ID NO: 5070177 - DNA, 25 bp, Homo sapien
catactgacggatgaggccgcggac

SEQ ID NO: 5070178 - DNA, 25 bp, Homo sapien
cagactccaccagcttagaggaggc

SEQ ID NO: 5070179 - DNA, 25 bp, Homo sapien
gcgcacaggctctcaaacctctggt

SEQ ID NO: 5070180 - DNA, 25 bp, Homo sapien
gtcgatggtccgcagcatttcggcc

SEQ ID NO: 5070181 - DNA, 25 bp, Homo sapien
tgccagctccaccttcgacatggcc

SEQ ID NO: 5070182 - DNA, 25 bp, Homo sapien
gtccgcagcatttcggccacgtgct

SEQ ID NO: 5070183 - DNA, 25 bp, Homo sapien
ccttacggtgaattgctccatgctc

SEQ ID NO: 5070184 - DNA, 25 bp, Homo sapien
aaggcccatccggccgctcttcctc

SEQ ID NO: 5070185 - DNA, 25 bp, Homo sapien
ttaaggcccatccggccgctcttcc

SEQ ID NO: 5070186 - DNA, 25 bp, Homo sapien
taaggcccatccggccgctcttcct

SEQ ID NO: 5070187 - DNA, 25 bp, Homo sapien
agttctttattgagatcctcccggg

SEQ ID NO: 5070188 - DNA, 25 bp, Homo sapien
gagacagcggctttcagccaggtca

SEQ ID NO: 5070189 - DNA, 25 bp, Homo sapien
cccgttggcttttgtcgtagaggca

SEQ ID NO: 5070190 - DNA, 25 bp, Homo sapien
tacgggtctgggacgctcgagttct

SEQ ID NO: 5070191 - DNA, 25 bp, Homo sapien
ccccaccccagagttgggatgcggg

SEQ ID NO: 5070192 - DNA, 25 bp, Homo sapien
gcgccgagcagaaccgcatcatatt

SEQ ID NO: 5070193 - DNA, 25 bp, Homo sapien
tattcgactcggtgggcaagtgatg

SEQ ID NO: 5070194 - DNA, 25 bp, Homo sapien
acctgctgcggaccctgctggagct

SEQ ID NO: 5070195 - DNA, 25 bp, Homo sapien
cctcaaagtgggcataccagtttcc

SEQ ID NO: 5070196 - DNA, 25 bp, Homo sapien
tgatgcagcttgaccctggaacggt

SEQ ID NO: 5070197 - DNA, 25 bp, Homo sapien
tggaaggcacatcggctctaagcct

SEQ ID NO: 5070198 - DNA, 25 bp, Homo sapien
tcagagcttaagaggactagcaccc

SEQ ID NO: 5070199 - DNA, 25 bp, Homo sapien
ggccgttgtccaatgtgttgctgtt

SEQ ID NO: 5070200 - DNA, 25 bp, Homo sapien
cttaggttggccgttgtccaatgtg

SEQ ID NO: 5070201 - DNA, 25 bp, Homo sapien
ggttggccgttgtccaatgtgttgc

SEQ ID NO: 5070202 - DNA, 25 bp, Homo sapien
tgttccttaggttggccgttgtcca

SEQ ID NO: 5070203 - DNA, 25 bp, Homo sapien
gaaagaacagtgtctaggaatccag

SEQ ID NO: 5070204 - DNA, 25 bp, Homo sapien
tacaaatagagatcccctagaccaa

SEQ ID NO: 5070205 - DNA, 25 bp, Homo sapien
tactggttatgtgagaccctggact

SEQ ID NO: 5070206 - DNA, 25 bp, Homo sapien
gcattggccctgcacttactggtta

SEQ ID NO: 5070207 - DNA, 25 bp, Homo sapien
tgtaatggcgtgatcactgcagcct

SEQ ID NO: 5070208 - DNA, 25 bp, Homo sapien
aatggcgtgatcactgcagcctgga

SEQ ID NO: 5070209 - DNA, 25 bp, Homo sapien
ggcagcagtgtaatggcgtgatcac

SEQ ID NO: 5070210 - DNA, 25 bp, Homo sapien
gcagcagtgtaatggcgtgatcact

SEQ ID NO: 5070211 - DNA, 25 bp, Homo sapien
tgcccacgagggtgatagtaattcg

SEQ ID NO: 5070212 - DNA, 25 bp, Homo sapien
gacaccctaccgatagaacagtggc

SEQ ID NO: 5070213 - DNA, 25 bp, Homo sapien
ggtaaccatcatgtatgcccacgag

SEQ ID NO: 5070214 - DNA, 25 bp, Homo sapien
gatcttacttgctcctgcttacgaa

SEQ ID NO: 5070215 - DNA, 25 bp, Homo sapien
cactgggccaccgtatgcagcttga

SEQ ID NO: 5070216 - DNA, 25 bp, Homo sapien
gaagtcggtcaagaacaaatggccc

SEQ ID NO: 5070217 - DNA, 25 bp, Homo sapien
tcaatgctatgttccaaccatcctc

SEQ ID NO: 5070218 - DNA, 25 bp, Homo sapien
gaaagccgagcccacttcaatgcta

SEQ ID NO: 5070219 - DNA, 25 bp, Homo sapien
aaagtactgctattcagtctacccc

SEQ ID NO: 5070220 - DNA, 25 bp, Homo sapien
tgctggctcagcaacccccaggtga

SEQ ID NO: 5070221 - DNA, 25 bp, Homo sapien
gccccggttgggtctcttggctctg

SEQ ID NO: 5070222 - DNA, 25 bp, Homo sapien
agtctaccccatccggaggccctgc

SEQ ID NO: 5070223 - DNA, 25 bp, Homo sapien
ttagctcgatcacagcacatccaga

SEQ ID NO: 5070224 - DNA, 25 bp, Homo sapien
gcctcgcaatatgtggctcttttct

SEQ ID NO: 5070225 - DNA, 25 bp, Homo sapien
gcaggagcctcgcaatatgtggctc

SEQ ID NO: 5070226 - DNA, 25 bp, Homo sapien
tttttctctagatttagctcgatca

SEQ ID NO: 5070227 - DNA, 25 bp, Homo sapien
gatggcaccctctaccgaataaaca

SEQ ID NO: 5070228 - DNA, 25 bp, Homo sapien
tgttttctgtacaacgtgaagggct

SEQ ID NO: 5070229 - DNA, 25 bp, Homo sapien
gaagattgcacatccgccctttttt

SEQ ID NO: 5070230 - DNA, 25 bp, Homo sapien
tgaagggctacctgaagatggcacc

SEQ ID NO: 5070231 - DNA, 25 bp, Homo sapien
tatctgagctgtaagttgaagcaac

SEQ ID NO: 5070232 - DNA, 25 bp, Homo sapien
cattcatactgggagtttgctgagt

SEQ ID NO: 5070233 - DNA, 25 bp, Homo sapien
gactgtgcggctgtagaatccctct

SEQ ID NO: 5070234 - DNA, 25 bp, Homo sapien
tctgtagcttaggaagggtgacacc

SEQ ID NO: 5070235 - DNA, 25 bp, Homo sapien
aggtgcttggtagctaattggagct

SEQ ID NO: 5070236 - DNA, 25 bp, Homo sapien
tgtttctcagctgcgctagccacat

SEQ ID NO: 5070237 - DNA, 25 bp, Homo sapien
gctaattggagctagcaactggcat

SEQ ID NO: 5070238 - DNA, 25 bp, Homo sapien
gaggcaagagctctagaactcttta

SEQ ID NO: 5070239 - DNA, 25 bp, Homo sapien
tattccaccacgcctggctaatttt

SEQ ID NO: 5070240 - DNA, 25 bp, Homo sapien
tttggccaggctggtcgggaactcc

SEQ ID NO: 5070241 - DNA, 25 bp, Homo sapien
gacggggtttcatcgcttttggcca

SEQ ID NO: 5070242 - DNA, 25 bp, Homo sapien
attccaccacgcctggctaattttt

SEQ ID NO: 5070243 - DNA, 25 bp, Homo sapien
aggcggcgccatcttcgaacttaga

SEQ ID NO: 5070244 - DNA, 25 bp, Homo sapien
gatttcgtcataagaccgcgaccag

SEQ ID NO: 5070245 - DNA, 25 bp, Homo sapien
tattgggaacaaactcctggctccg

SEQ ID NO: 5070246 - DNA, 25 bp, Homo sapien
gagaaatctaccttcacgcccagga

SEQ ID NO: 5070247 - DNA, 25 bp, Homo sapien
tttgtctcccagactccgccttggg

SEQ ID NO: 5070248 - DNA, 25 bp, Homo sapien
tctggtctagctggctcttccggcc

SEQ ID NO: 5070249 - DNA, 25 bp, Homo sapien
ccggcggcgaggacttctttgtctc

SEQ ID NO: 5070250 - DNA, 25 bp, Homo sapien
gaaaggccggattcagggatccaga

SEQ ID NO: 5070251 - DNA, 25 bp, Homo sapien
atacccagccaaagtcatgcttttc

SEQ ID NO: 5070252 - DNA, 25 bp, Homo sapien
catacccagccaaagtcatgctttt

SEQ ID NO: 5070253 - DNA, 25 bp, Homo sapien
ccatacccagccaaagtcatgcttt

SEQ ID NO: 5070254 - DNA, 25 bp, Homo sapien
tggtcaacataacgagaccccatct

SEQ ID NO: 5070255 - DNA, 25 bp, Homo sapien
acctgtgatcgcagcactatgggag

SEQ ID NO: 5070256 - DNA, 25 bp, Homo sapien
gcaagaggatcacttcaggtcaggt

SEQ ID NO: 5070257 - DNA, 25 bp, Homo sapien
aagaggatcacttcaggtcaggtgt

SEQ ID NO: 5070258 - DNA, 25 bp, Homo sapien
caatggtgtaggatgagtagctgat

SEQ ID NO: 5070259 - DNA, 25 bp, Homo sapien
tagaggcagagaagtagatcagtga

SEQ ID NO: 5070260 - DNA, 25 bp, Homo sapien
tgctttagaaagataaccgggccag

SEQ ID NO: 5070261 - DNA, 25 bp, Homo sapien
ggatcgcttgcgctcagtagtgtga

SEQ ID NO: 5070262 - DNA, 25 bp, Homo sapien
tctccatgaccagatgcaacagtta

SEQ ID NO: 5070263 - DNA, 25 bp, Homo sapien
aaagaatctccatgaccagatgcaa

SEQ ID NO: 5070264 - DNA, 25 bp, Homo sapien
catgaccagatgcaacagttatcaa

SEQ ID NO: 5070265 - DNA, 25 bp, Homo sapien
agcgtaaaagtagaactatacaaag

SEQ ID NO: 5070266 - DNA, 25 bp, Homo sapien
tatggtccagaccttgtgactgagc

SEQ ID NO: 5070267 - DNA, 25 bp, Homo sapien
caagagaagattgtgctagcagctc

SEQ ID NO: 5070268 - DNA, 25 bp, Homo sapien
gaacttcgagcagccattgatcggt

SEQ ID NO: 5070269 - DNA, 25 bp, Homo sapien
gaatgatctgaagaagggactaccc

SEQ ID NO: 5070270 - DNA, 25 bp, Homo sapien
tgtcagcgagcatgcacaacgccat

SEQ ID NO: 5070271 - DNA, 25 bp, Homo sapien
gttgtattatagcttcctgactcag

SEQ ID NO: 5070272 - DNA, 25 bp, Homo sapien
taacaaggaaatcaccagtgtgggc

SEQ ID NO: 5070273 - DNA, 25 bp, Homo sapien
aacgccatcaagttccttaacaagg

SEQ ID NO: 5070274 - DNA, 25 bp, Homo sapien
ttttgggagccctgcgatccgatgt

SEQ ID NO: 5070275 - DNA, 25 bp, Homo sapien
ttctgggacgcaatcgcctgggcat

SEQ ID NO: 5070276 - DNA, 25 bp, Homo sapien
gcaagagccacctgtccggataggg

SEQ ID NO: 5070277 - DNA, 25 bp, Homo sapien
actgtagtctaaagggcaagagcca

SEQ ID NO: 5070278 - DNA, 25 bp, Homo sapien
tccggactgtgagggccgcagcggc

SEQ ID NO: 5070279 - DNA, 25 bp, Homo sapien
cgcagcggctctgcacgctccccct

SEQ ID NO: 5070280 - DNA, 25 bp, Homo sapien
gcacggcacggccgggctccggact

SEQ ID NO: 5070281 - DNA, 25 bp, Homo sapien
ccctccgctgctcagcgagtccccg

SEQ ID NO: 5070282 - DNA, 25 bp, Homo sapien
cggtttcgggaatggaaaagtgcat

SEQ ID NO: 5070283 - DNA, 25 bp, Homo sapien
cgctgtccccgctgcgggactcggt

SEQ ID NO: 5070284 - DNA, 25 bp, Homo sapien
cgctgcgggactcggtttcgggaat

SEQ ID NO: 5070285 - DNA, 25 bp, Homo sapien
tgcgggactcggtttcgggaatgga

SEQ ID NO: 5070286 - DNA, 25 bp, Homo sapien
gcacccgacagtgcaggactccatt

SEQ ID NO: 5070287 - DNA, 25 bp, Homo sapien
ctccattcacgtgaatgttataggc

SEQ ID NO: 5070288 - DNA, 25 bp, Homo sapien
gactccattcacgtgaatgttatag

SEQ ID NO: 5070289 - DNA, 25 bp, Homo sapien
ggctgtagcgcacccgacagtgcag

SEQ ID NO: 5070290 - DNA, 25 bp, Homo sapien
ctcaaggcaggggtgctagtcccac

SEQ ID NO: 5070291 - DNA, 25 bp, Homo sapien
cagcctacgggaacaagaagagcgg

SEQ ID NO: 5070292 - DNA, 25 bp, Homo sapien
gcgggtaaagggagacactgatgtc

SEQ ID NO: 5070293 - DNA, 25 bp, Homo sapien
tgattaaaggggaactacagcctac

SEQ ID NO: 5070294 - DNA, 25 bp, Homo sapien
tgcaggaagcacattggccccatac

SEQ ID NO: 5070295 - DNA, 25 bp, Homo sapien
aaaagcttctttggggggaatgcag

SEQ ID NO: 5070296 - DNA, 25 bp, Homo sapien
gggaatgcaggaagcacattggccc

SEQ ID NO: 5070297 - DNA, 25 bp, Homo sapien
gaatgcaggaagcacattggcccca

SEQ ID NO: 5070298 - DNA, 25 bp, Homo sapien
ctcatagatgttagtgcccaaattg

SEQ ID NO: 5070299 - DNA, 25 bp, Homo sapien
ccaaattgttttgctagtacacaga

SEQ ID NO: 5070300 - DNA, 25 bp, Homo sapien
caaacaagagccttcctagatctag

SEQ ID NO: 5070301 - DNA, 25 bp, Homo sapien
cacagagttacacatcctcgtacac

SEQ ID NO: 5070302 - DNA, 25 bp, Homo sapien
ccttggctgccatctaggtgagtcc

SEQ ID NO: 5070303 - DNA, 25 bp, Homo sapien
tgcataaattcttcacctgccccac

SEQ ID NO: 5070304 - DNA, 25 bp, Homo sapien
atctaggtgagtccagtctatagaa

SEQ ID NO: 5070305 - DNA, 25 bp, Homo sapien
gtttgcataaattcttcacctgccc

SEQ ID NO: 5070306 - DNA, 25 bp, Homo sapien
tgtgcccgacgcaggaaactgttga

SEQ ID NO: 5070307 - DNA, 25 bp, Homo sapien
tgttgaaagtctcgctgctcccaag

SEQ ID NO: 5070308 - DNA, 25 bp, Homo sapien
gaaactgttgaaagtctcgctgctc

SEQ ID NO: 5070309 - DNA, 25 bp, Homo sapien
ctgttgtgcccgacgcaggaaactg

SEQ ID NO: 5070310 - DNA, 25 bp, Homo sapien
actgccttgtcccttgccttgacct

SEQ ID NO: 5070311 - DNA, 25 bp, Homo sapien
gctgcttaaatataggctgtgattt

SEQ ID NO: 5070312 - DNA, 25 bp, Homo sapien
gacctatgcccaactctatttctag

SEQ ID NO: 5070313 - DNA, 25 bp, Homo sapien
tcagctgcttaaatataggctgtga

SEQ ID NO: 5070314 - DNA, 25 bp, Homo sapien
gatctgaagttagcacgttgaccag

SEQ ID NO: 5070315 - DNA, 25 bp, Homo sapien
tctgaagttagcacgttgaccagaa

SEQ ID NO: 5070316 - DNA, 25 bp, Homo sapien
agttagcacgttgaccagaactttc

SEQ ID NO: 5070317 - DNA, 25 bp, Homo sapien
tgaagttagcacgttgaccagaact

SEQ ID NO: 5070318 - DNA, 25 bp, Homo sapien
aaggggcagtgctgaacaagcgcct

SEQ ID NO: 5070319 - DNA, 25 bp, Homo sapien
gggatagggatagaagtacagctca

SEQ ID NO: 5070320 - DNA, 25 bp, Homo sapien
gggcagtgctgaacaagcgcctcac

SEQ ID NO: 5070321 - DNA, 25 bp, Homo sapien
agctcatcatactggctggttccaa

SEQ ID NO: 5070322 - DNA, 25 bp, Homo sapien
taagaatagactaaagtatccaatc

SEQ ID NO: 5070323 - DNA, 25 bp, Homo sapien
ctaaagtatccaatcaagtcatctg

SEQ ID NO: 5070324 - DNA, 25 bp, Homo sapien
tctttttctcgaactaagaatagac

SEQ ID NO: 5070325 - DNA, 25 bp, Homo sapien
atctggaagatccagctttgcagct

SEQ ID NO: 5070326 - DNA, 25 bp, Homo sapien
ccttagcacaatcttatactcttga

SEQ ID NO: 5070327 - DNA, 25 bp, Homo sapien
ggtgacagacacataaggcagctca

SEQ ID NO: 5070328 - DNA, 25 bp, Homo sapien
gacagacacataaggcagctcaaac

SEQ ID NO: 5070329 - DNA, 25 bp, Homo sapien
cttgactccgaaggctggtgacaga

SEQ ID NO: 5070330 - DNA, 25 bp, Homo sapien
catgacatcgtcatcataggcagag

SEQ ID NO: 5070331 - DNA, 25 bp, Homo sapien
catcgtcatcataggcagagtccca

SEQ ID NO: 5070332 - DNA, 25 bp, Homo sapien
ccggttctccatgacatcgtcatca

SEQ ID NO: 5070333 - DNA, 25 bp, Homo sapien
gcaggttcaggccaacccggttctc

SEQ ID NO: 5070334 - DNA, 25 bp, Homo sapien
gatccacccacgctcaatatctgat

SEQ ID NO: 5070335 - DNA, 25 bp, Homo sapien
ccggtgctgttccttggtgaccaag

SEQ ID NO: 5070336 - DNA, 25 bp, Homo sapien
gagatttgagttgccggtgctgttc

SEQ ID NO: 5070337 - DNA, 25 bp, Homo sapien
tcttggagactttctcttgcagaga

SEQ ID NO: 5070338 - DNA, 25 bp, Homo sapien
gccacacaggcatcaaagcgcaagt

SEQ ID NO: 5070339 - DNA, 25 bp, Homo sapien
gagccttctcggagttgctggccag

SEQ ID NO: 5070340 - DNA, 25 bp, Homo sapien
accaccacaggacagtccttttctg

SEQ ID NO: 5070341 - DNA, 25 bp, Homo sapien
gccagcatcgcatgcgggtgacccg

SEQ ID NO: 5070342 - DNA, 25 bp, Homo sapien
ttcaaaagccagttccaggcgcacc

SEQ ID NO: 5070343 - DNA, 25 bp, Homo sapien
tagtgatggtgacccactgtagccg

SEQ ID NO: 5070344 - DNA, 25 bp, Homo sapien
tgtagccggtccttgctcatgaggt

SEQ ID NO: 5070345 - DNA, 25 bp, Homo sapien
tcgtgcttccactgggcaatggtac

SEQ ID NO: 5070346 - DNA, 25 bp, Homo sapien
gccgccagatttcttcaccatcagt

SEQ ID NO: 5070347 - DNA, 25 bp, Homo sapien
cttcctgatactgccgccagatttc

SEQ ID NO: 5070348 - DNA, 25 bp, Homo sapien
tcatcaaccatggactgcaagcaga

SEQ ID NO: 5070349 - DNA, 25 bp, Homo sapien
tgcaagcagatgctcatcatgatag

SEQ ID NO: 5070350 - DNA, 25 bp, Homo sapien
ctgctcactgctcagtccacacttg

SEQ ID NO: 5070351 - DNA, 25 bp, Homo sapien
gctcactgctcagtccacacttgct

SEQ ID NO: 5070352 - DNA, 25 bp, Homo sapien
tgctcagtccacacttgctgcctac

SEQ ID NO: 5070353 - DNA, 25 bp, Homo sapien
tgctcactgctcagtccacacttgc

SEQ ID NO: 5070354 - DNA, 25 bp, Homo sapien
cctccctctcaagacaagcctcaca

SEQ ID NO: 5070355 - DNA, 25 bp, Homo sapien
tcacatctaggacaaaaggcaaggg

SEQ ID NO: 5070356 - DNA, 25 bp, Homo sapien
gggacagacacaaggtgccggtgag

SEQ ID NO: 5070357 - DNA, 25 bp, Homo sapien
caaggtgccggtgagggcaggatca

SEQ ID NO: 5070358 - DNA, 25 bp, Homo sapien
aagcagtggtggggacttcactgct

SEQ ID NO: 5070359 - DNA, 25 bp, Homo sapien
gctggctgtctgagcgtctcagagt

SEQ ID NO: 5070360 - DNA, 25 bp, Homo sapien
ggctgtctgagcgtctcagagtacc

SEQ ID NO: 5070361 - DNA, 25 bp, Homo sapien
ctgtctgagcgtctcagagtacccc

SEQ ID NO: 5070362 - DNA, 25 bp, Homo sapien
ggtgtcagaaactcactaggagagg

SEQ ID NO: 5070363 - DNA, 25 bp, Homo sapien
tttgaccatagactcccgggtggca

SEQ ID NO: 5070364 - DNA, 25 bp, Homo sapien
tgagagtttgaccatagactcccgg

SEQ ID NO: 5070365 - DNA, 25 bp, Homo sapien
gagtttgaccatagactcccgggtg

SEQ ID NO: 5070366 - DNA, 25 bp, Homo sapien
tgaccatagactcccgggtggcatc

SEQ ID NO: 5070367 - DNA, 25 bp, Homo sapien
gggtcagagatcttgggcgtgcaag

SEQ ID NO: 5070368 - DNA, 25 bp, Homo sapien
gagatcttgggcgtgcaagatcccc

SEQ ID NO: 5070369 - DNA, 25 bp, Homo sapien
gggtggggtcagagatcttgggcgt

SEQ ID NO: 5070370 - DNA, 25 bp, Homo sapien
tgcaagatcccccaacaaacagcaa

SEQ ID NO: 5070371 - DNA, 25 bp, Homo sapien
gcaagctcacggcactcagcttact

SEQ ID NO: 5070372 - DNA, 25 bp, Homo sapien
tctccaatgccctcgaaggcgaaat

SEQ ID NO: 5070373 - DNA, 25 bp, Homo sapien
tgtgctgggactgccaattccccgc

SEQ ID NO: 5070374 - DNA, 25 bp, Homo sapien
ttgccgtggacatcactggcactgg

SEQ ID NO: 5070375 - DNA, 25 bp, Homo sapien
gaaggggcaatcctctgtgcagcca

SEQ ID NO: 5070376 - DNA, 25 bp, Homo sapien
ggtaggatacgaggcccctggccaa

SEQ ID NO: 5070377 - DNA, 25 bp, Homo sapien
gacaaggaaaggtaggatacgaggc

SEQ ID NO: 5070378 - DNA, 25 bp, Homo sapien
caggcacagggcaagtttctgtaaa

SEQ ID NO: 5070379 - DNA, 25 bp, Homo sapien
ccagaagcggcccagagggagatat

SEQ ID NO: 5070380 - DNA, 25 bp, Homo sapien
accaaacacagacctctgcccatcc

SEQ ID NO: 5070381 - DNA, 25 bp, Homo sapien
gcccagagggagatatggttcctcc

SEQ ID NO: 5070382 - DNA, 25 bp, Homo sapien
aaatgctaatttggcatcgagggcc

SEQ ID NO: 5070383 - DNA, 25 bp, Homo sapien
taacgtaggcactataaggaccagc

SEQ ID NO: 5070384 - DNA, 25 bp, Homo sapien
tttatacagacggaccagaagccac

SEQ ID NO: 5070385 - DNA, 25 bp, Homo sapien
catctggataacctgaaacggcacc

SEQ ID NO: 5070386 - DNA, 25 bp, Homo sapien
gaacctcaaacgtcacatgctgcgg

SEQ ID NO: 5070387 - DNA, 25 bp, Homo sapien
gcggaagcgagtacggaggtaccag

SEQ ID NO: 5070388 - DNA, 25 bp, Homo sapien
ctacgcgtcccgtgcgtctctgcgg

SEQ ID NO: 5070389 - DNA, 25 bp, Homo sapien
ccgtgcgtctctgcggcggcggaag

SEQ ID NO: 5070390 - DNA, 25 bp, Homo sapien
cggcggaagcggaagcgagtacgga

SEQ ID NO: 5070391 - DNA, 25 bp, Homo sapien
gaaaatggcaacagcgacaagaaga

SEQ ID NO: 5070392 - DNA, 25 bp, Homo sapien
cctttagccttagcagtgggtatga

SEQ ID NO: 5070393 - DNA, 25 bp, Homo sapien
gaaggccaagcgagactagcagtca

SEQ ID NO: 5070394 - DNA, 25 bp, Homo sapien
ttcactccgcccattccaaagaggg

SEQ ID NO: 5070395 - DNA, 25 bp, Homo sapien
catagttgtgcctaagcataatttt

SEQ ID NO: 5070396 - DNA, 25 bp, Homo sapien
tgatgtatcatagttgtgcctaagc

SEQ ID NO: 5070397 - DNA, 25 bp, Homo sapien
gatatttttcagttgatgtatcata

SEQ ID NO: 5070398 - DNA, 25 bp, Homo sapien
tcagttgatgtatcatagttgtgcc

SEQ ID NO: 5070399 - DNA, 25 bp, Homo sapien
tcggccatgtgggaagaggcacctt

SEQ ID NO: 5070400 - DNA, 25 bp, Homo sapien
ttgacagtgaaaggaaccccgggca

SEQ ID NO: 5070401 - DNA, 25 bp, Homo sapien
ttagtgtgggagtaaagacgcaaat

SEQ ID NO: 5070402 - DNA, 25 bp, Homo sapien
gagctttggcgccatcctctcgtgc

SEQ ID NO: 5070403 - DNA, 25 bp, Homo sapien
cctaagctcggaacaaatactggtc

SEQ ID NO: 5070404 - DNA, 25 bp, Homo sapien
tcttctcatataggcctcgcatggc

SEQ ID NO: 5070405 - DNA, 25 bp, Homo sapien
tgaaaacactggaggacgggctgaa

SEQ ID NO: 5070406 - DNA, 25 bp, Homo sapien
cgtcagacaaaacgccaagaggctg

SEQ ID NO: 5070407 - DNA, 25 bp, Homo sapien
agcagtcttgaagagtagatgctgt

SEQ ID NO: 5070408 - DNA, 25 bp, Homo sapien
gatgctgtatgtctgtcttgcagat

SEQ ID NO: 5070409 - DNA, 25 bp, Homo sapien
agatgctgtatgtctgtcttgcaga

SEQ ID NO: 5070410 - DNA, 25 bp, Homo sapien
tgctgtatgtctgtcttgcagatga

SEQ ID NO: 5070411 - DNA, 25 bp, Homo sapien
gcagatcacgaggtcaggagattga

SEQ ID NO: 5070412 - DNA, 25 bp, Homo sapien
ccagcactttgggaggccgaggcag

SEQ ID NO: 5070413 - DNA, 25 bp, Homo sapien
aagattgatgttacttgggccaggc

SEQ ID NO: 5070414 - DNA, 25 bp, Homo sapien
ggtgactcatgactgtaatcccagc

SEQ ID NO: 5070415 - DNA, 25 bp, Homo sapien
gaaagagctgttcagtaatcccgaa

SEQ ID NO: 5070416 - DNA, 25 bp, Homo sapien
tcccgaatgctgaagtgatcatgga

SEQ ID NO: 5070417 - DNA, 25 bp, Homo sapien
caaagagcccttacaagccagaaag

SEQ ID NO: 5070418 - DNA, 25 bp, Homo sapien
ccagtagcgagaggatgaaattaac

SEQ ID NO: 5070419 - DNA, 25 bp, Homo sapien
tattaatctgcgaaaactaagcgcg

SEQ ID NO: 5070420 - DNA, 25 bp, Homo sapien
gatggaagttcactctgcccttaga

SEQ ID NO: 5070421 - DNA, 25 bp, Homo sapien
actaagcgcggagccttcaggatgg

SEQ ID NO: 5070422 - DNA, 25 bp, Homo sapien
gagccaagtctagaatccgaaacag

SEQ ID NO: 5070423 - DNA, 25 bp, Homo sapien
cagatggttctgctggacgcagaga

SEQ ID NO: 5070424 - DNA, 25 bp, Homo sapien
ccggcaggtttccattgggtgacgt

SEQ ID NO: 5070425 - DNA, 25 bp, Homo sapien
cctcttcttgaaggcgccatgacag

SEQ ID NO: 5070426 - DNA, 25 bp, Homo sapien
tggacgcagagagggcctcctacct

SEQ ID NO: 5070427 - DNA, 25 bp, Homo sapien
agctgcgctccgcagcgcaaccgaa

SEQ ID NO: 5070428 - DNA, 25 bp, Homo sapien
gcagcgcaaccgaactgcgggcccc

SEQ ID NO: 5070429 - DNA, 25 bp, Homo sapien
gcgcaaccgaactgcgggccccgcc

SEQ ID NO: 5070430 - DNA, 25 bp, Homo sapien
cagcgcaaccgaactgcgggccccg

SEQ ID NO: 5070431 - DNA, 25 bp, Homo sapien
gttccggggccccggatcacagcga

SEQ ID NO: 5070432 - DNA, 25 bp, Homo sapien
ggggccccggatcacagcgactccc

SEQ ID NO: 5070433 - DNA, 25 bp, Homo sapien
cggggccccggatcacagcgactcc

SEQ ID NO: 5070434 - DNA, 25 bp, Homo sapien
tccggggccccggatcacagcgact

SEQ ID NO: 5070435 - DNA, 25 bp, Homo sapien
ggcggccacctcatcaaaggccgga

SEQ ID NO: 5070436 - DNA, 25 bp, Homo sapien
tttcacactccaacaggtcgcatgc

SEQ ID NO: 5070437 - DNA, 25 bp, Homo sapien
cagtccagtcggaaataaaaccgct

SEQ ID NO: 5070438 - DNA, 25 bp, Homo sapien
aaaggccggaccgacagcgcagtca

SEQ ID NO: 5070439 - DNA, 25 bp, Homo sapien
ctgtctgggactccccctccgacat

SEQ ID NO: 5070440 - DNA, 25 bp, Homo sapien
gtactgtctgggactccccctccga

SEQ ID NO: 5070441 - DNA, 25 bp, Homo sapien
agccactgctaagtactgtctggga

SEQ ID NO: 5070442 - DNA, 25 bp, Homo sapien
gggtctgagccactgctaagtactg

SEQ ID NO: 5070443 - DNA, 25 bp, Homo sapien
tcacaggaggtgacactgatgtcag

SEQ ID NO: 5070444 - DNA, 25 bp, Homo sapien
tgacactgatgtcaggccaggagct

SEQ ID NO: 5070445 - DNA, 25 bp, Homo sapien
ctgaggttgtggaggtcacaggagg

SEQ ID NO: 5070446 - DNA, 25 bp, Homo sapien
caggagctgaagatgaggattctac

SEQ ID NO: 5070447 - DNA, 25 bp, Homo sapien
tgccagcgcccacagggcgactctt

SEQ ID NO: 5070448 - DNA, 25 bp, Homo sapien
ggcgactcttccaaaatctcagact

SEQ ID NO: 5070449 - DNA, 25 bp, Homo sapien
ccacagggcgactcttccaaaatct

SEQ ID NO: 5070450 - DNA, 25 bp, Homo sapien
agggcgactcttccaaaatctcaga

SEQ ID NO: 5070451 - DNA, 25 bp, Homo sapien
gagaactgtacctcattccacacaa

SEQ ID NO: 5070452 - DNA, 25 bp, Homo sapien
gcagcttgtagttcttgcgttcaga

SEQ ID NO: 5070453 - DNA, 25 bp, Homo sapien
tacctggtacattccgttgattcac

SEQ ID NO: 5070454 - DNA, 25 bp, Homo sapien
tggccaggtatgcactgtcaatacc

SEQ ID NO: 5070455 - DNA, 25 bp, Homo sapien
tcagattatcaaacacagcacgaac

SEQ ID NO: 5070456 - DNA, 25 bp, Homo sapien
caatatttgtgaaacttaacaatgt

SEQ ID NO: 5070457 - DNA, 25 bp, Homo sapien
tgttaagatgctccaattgaatcag

SEQ ID NO: 5070458 - DNA, 25 bp, Homo sapien
tctttaatgtcagcccaatatttgt

SEQ ID NO: 5070459 - DNA, 25 bp, Homo sapien
cttcttcagaaattgcttcagactc

SEQ ID NO: 5070460 - DNA, 25 bp, Homo sapien
tcattcatcgtcttgtggttctttt

SEQ ID NO: 5070461 - DNA, 25 bp, Homo sapien
cttttcattcatcgtcttgtggttc

SEQ ID NO: 5070462 - DNA, 25 bp, Homo sapien
cagatgacatgtattctgtgataaa

SEQ ID NO: 5070463 - DNA, 25 bp, Homo sapien
cttagggcagagaggatttgtgtgc

SEQ ID NO: 5070464 - DNA, 25 bp, Homo sapien
gcagagaggatttgtgtgcaccaac

SEQ ID NO: 5070465 - DNA, 25 bp, Homo sapien
tgggggcactgggctgttagagggg

SEQ ID NO: 5070466 - DNA, 25 bp, Homo sapien
gggcactgggctgttagaggggcca

SEQ ID NO: 5070467 - DNA, 25 bp, Homo sapien
tggtgtcacaggtcaggttcccatg

SEQ ID NO: 5070468 - DNA, 25 bp, Homo sapien
tgtcacaggtcaggttcccatggat

SEQ ID NO: 5070469 - DNA, 25 bp, Homo sapien
tcccatggatgatgggggggtcaca

SEQ ID NO: 5070470 - DNA, 25 bp, Homo sapien
gatgggggggtcacaggagtgcagg

SEQ ID NO: 5070471 - DNA, 25 bp, Homo sapien
agagccaatcttgatgagtccgttg

SEQ ID NO: 5070472 - DNA, 25 bp, Homo sapien
cagagccaatcttgatgagtccgtt

SEQ ID NO: 5070473 - DNA, 25 bp, Homo sapien
catggttcccaaattcccgaggctc

SEQ ID NO: 5070474 - DNA, 25 bp, Homo sapien
ccatggttcccaaattcccgaggct

SEQ ID NO: 5070475 - DNA, 25 bp, Homo sapien
gaaaagttgtgagcgatggagcagc

SEQ ID NO: 5070476 - DNA, 25 bp, Homo sapien
cagagcagcccgtaagcgggaggga

SEQ ID NO: 5070477 - DNA, 25 bp, Homo sapien
aaacagagaaaagttgtgagcgatg

SEQ ID NO: 5070478 - DNA, 25 bp, Homo sapien
acagagcagcccgtaagcgggaggg

SEQ ID NO: 5070479 - DNA, 25 bp, Homo sapien
tatgatctgggaactagcctgatga

SEQ ID NO: 5070480 - DNA, 25 bp, Homo sapien
cctaatctgggacaattggagacct

SEQ ID NO: 5070481 - DNA, 25 bp, Homo sapien
tctgccacagagctgaacgaggaac

SEQ ID NO: 5070482 - DNA, 25 bp, Homo sapien
aatccaggaggtaagtggccagcca

SEQ ID NO: 5070483 - DNA, 25 bp, Homo sapien
caagtcttcacatgattgttgatag

SEQ ID NO: 5070484 - DNA, 25 bp, Homo sapien
tactctggtgcaaagaagtgtagat

SEQ ID NO: 5070485 - DNA, 25 bp, Homo sapien
tctggtgcaaagaagtgtagattct

SEQ ID NO: 5070486 - DNA, 25 bp, Homo sapien
tgattgttgatagtgtcaggagcca

SEQ ID NO: 5070487 - DNA, 25 bp, Homo sapien
gtgcacacatgccaaaggagtagat

SEQ ID NO: 5070488 - DNA, 25 bp, Homo sapien
tgcacacatgccaaaggagtagatg

SEQ ID NO: 5070489 - DNA, 25 bp, Homo sapien
tccagtgcacacatgccaaaggagt

SEQ ID NO: 5070490 - DNA, 25 bp, Homo sapien
cagtgcacacatgccaaaggagtag

SEQ ID NO: 5070491 - DNA, 25 bp, Homo sapien
ttcctgtggcacatatgaggactct

SEQ ID NO: 5070492 - DNA, 25 bp, Homo sapien
ttatgttccctagctcttaggagca

SEQ ID NO: 5070493 - DNA, 25 bp, Homo sapien
agggagtgatcctgaagatccttac

SEQ ID NO: 5070494 - DNA, 25 bp, Homo sapien
tatagatttttcgtgtcctttctgt

SEQ ID NO: 5070495 - DNA, 25 bp, Homo sapien
cagaagacatttgaaggtcagttga

SEQ ID NO: 5070496 - DNA, 25 bp, Homo sapien
ttgaaggctaacaaggtcacatacc

SEQ ID NO: 5070497 - DNA, 25 bp, Homo sapien
tgtcccatgacaattaacctgcttt

SEQ ID NO: 5070498 - DNA, 25 bp, Homo sapien
gctttattagtcaactcactgccta

SEQ ID NO: 5070499 - DNA, 25 bp, Homo sapien
ggattcctctaacgattctgcctta

SEQ ID NO: 5070500 - DNA, 25 bp, Homo sapien
attatatgaaagataccatccactg

SEQ ID NO: 5070501 - DNA, 25 bp, Homo sapien
aatgcacctgaaagggcttcaaaaa

SEQ ID NO: 5070502 - DNA, 25 bp, Homo sapien
ggcatctggcaagcccccagtgtgt

SEQ ID NO: 5070503 - DNA, 25 bp, Homo sapien
tatgaaagataccatccactgcctt

SEQ ID NO: 5070504 - DNA, 25 bp, Homo sapien
ttggtctgcgagcaggctcagactg

SEQ ID NO: 5070505 - DNA, 25 bp, Homo sapien
ctggctgttggtctgcgagcaggct

SEQ ID NO: 5070506 - DNA, 25 bp, Homo sapien
ggtctgcgagcaggctcagactgca

SEQ ID NO: 5070507 - DNA, 25 bp, Homo sapien
ctgttggtctgcgagcaggctcaga

SEQ ID NO: 5070508 - DNA, 25 bp, Homo sapien
ccacaatgcagtgggccgcaaggag

SEQ ID NO: 5070509 - DNA, 25 bp, Homo sapien
ttgagcgagggcacttcaaacaatg

SEQ ID NO: 5070510 - DNA, 25 bp, Homo sapien
caaggagtttgagcgagggcacttc

SEQ ID NO: 5070511 - DNA, 25 bp, Homo sapien
gtgtcccacaatgcagtgggccgca

SEQ ID NO: 5070512 - DNA, 25 bp, Homo sapien
ccagattggaagactattccccata

SEQ ID NO: 5070513 - DNA, 25 bp, Homo sapien
gctccagattggaagactattcccc

SEQ ID NO: 5070514 - DNA, 25 bp, Homo sapien
gggctccagattggaagactattcc

SEQ ID NO: 5070515 - DNA, 25 bp, Homo sapien
acagggctccagattggaagactat

SEQ ID NO: 5070516 - DNA, 25 bp, Homo sapien
gatagtcagattaaatgtcaaagaa

SEQ ID NO: 5070517 - DNA, 25 bp, Homo sapien
tattatgaagggatagtcagattaa

SEQ ID NO: 5070518 - DNA, 25 bp, Homo sapien
agtgggatattatgaagggatagtc

SEQ ID NO: 5070519 - DNA, 25 bp, Homo sapien
catgatggagtgggatattatgaag

SEQ ID NO: 5070520 - DNA, 25 bp, Homo sapien
ttggtgatctcctctagagcgttct

SEQ ID NO: 5070521 - DNA, 25 bp, Homo sapien
agggatttcagccagtacggcacta

SEQ ID NO: 5070522 - DNA, 25 bp, Homo sapien
gcactagtatccatgtttttggtga

SEQ ID NO: 5070523 - DNA, 25 bp, Homo sapien
ttttggtgatctcctctagagcgtt

SEQ ID NO: 5070524 - DNA, 25 bp, Homo sapien
aatagcaaattcaagcattcccaga

SEQ ID NO: 5070525 - DNA, 25 bp, Homo sapien
gagcctcaagagtggtcgtgaccaa

SEQ ID NO: 5070526 - DNA, 25 bp, Homo sapien
ggtcgtgaccaatctgcccctttca

SEQ ID NO: 5070527 - DNA, 25 bp, Homo sapien
cctttcagaccctctcagttactca

SEQ ID NO: 5070528 - DNA, 25 bp, Homo sapien
attccagagctggtgactgagagta

SEQ ID NO: 5070529 - DNA, 25 bp, Homo sapien
ctgacatcttcaaggaatttatcta

SEQ ID NO: 5070530 - DNA, 25 bp, Homo sapien
ttccagagctggtgactgagagtac

SEQ ID NO: 5070531 - DNA, 25 bp, Homo sapien
aggaatttatctaattccagagctg

SEQ ID NO: 5070532 - DNA, 25 bp, Homo sapien
cagctggttcaggtgtcggagtctt

SEQ ID NO: 5070533 - DNA, 25 bp, Homo sapien
gttcaggtgtcggagtcttgacaga

SEQ ID NO: 5070534 - DNA, 25 bp, Homo sapien
aaaggctgtcagaggatagatccca

SEQ ID NO: 5070535 - DNA, 25 bp, Homo sapien
cccaaaggctgtcagaggatagatc

SEQ ID NO: 5070536 - DNA, 25 bp, Homo sapien
ctcctccaccgactcaatgttgcac

SEQ ID NO: 5070537 - DNA, 25 bp, Homo sapien
ccctcctccaccgactcaatgttgc

SEQ ID NO: 5070538 - DNA, 25 bp, Homo sapien
tcctccaccgactcaatgttgcact

SEQ ID NO: 5070539 - DNA, 25 bp, Homo sapien
cctcctccaccgactcaatgttgca

SEQ ID NO: 5070540 - DNA, 25 bp, Homo sapien
aggtcacagctcaggtgccggttca

SEQ ID NO: 5070541 - DNA, 25 bp, Homo sapien
tcacagctcaggtgccggttcagtt

SEQ ID NO: 5070542 - DNA, 25 bp, Homo sapien
acagctcaggtgccggttcagtttg

SEQ ID NO: 5070543 - DNA, 25 bp, Homo sapien
ggtcacagctcaggtgccggttcag

SEQ ID NO: 5070544 - DNA, 25 bp, Homo sapien
gataaggctcatagactctccatcc

SEQ ID NO: 5070545 - DNA, 25 bp, Homo sapien
cccactagggctaaactgtcagtca

SEQ ID NO: 5070546 - DNA, 25 bp, Homo sapien
cacccctgaatatgtccctaaaaga

SEQ ID NO: 5070547 - DNA, 25 bp, Homo sapien
gtcagatccacccactgctttaggg

SEQ ID NO: 5070548 - DNA, 25 bp, Homo sapien
agccgccaactcggggatattctca

SEQ ID NO: 5070549 - DNA, 25 bp, Homo sapien
cagccgccaactcggggatattctc

SEQ ID NO: 5070550 - DNA, 25 bp, Homo sapien
gccgccaactcggggatattctcat

SEQ ID NO: 5070551 - DNA, 25 bp, Homo sapien
ctcagtaagatgggggctgagagaa

SEQ ID NO: 5070552 - DNA, 25 bp, Homo sapien
cagtaagatgggggctgagagaaga

SEQ ID NO: 5070553 - DNA, 25 bp, Homo sapien
tcagtaagatgggggctgagagaag

SEQ ID NO: 5070554 - DNA, 25 bp, Homo sapien
actgttcctggcaaaattgaacttg

SEQ ID NO: 5070555 - DNA, 25 bp, Homo sapien
cggctgagttgagggtactgttcct

SEQ ID NO: 5070556 - DNA, 25 bp, Homo sapien
taagaggagacggtgacagcggctg

SEQ ID NO: 5070557 - DNA, 25 bp, Homo sapien
tctagcagagaagtcaaccggctct

SEQ ID NO: 5070558 - DNA, 25 bp, Homo sapien
agccacagcgcagatcagggcctgg

SEQ ID NO: 5070559 - DNA, 25 bp, Homo sapien
cagccacagcgcagatcagggcctg

SEQ ID NO: 5070560 - DNA, 25 bp, Homo sapien
cctcctgaataataaaggagggaag

SEQ ID NO: 5070561 - DNA, 25 bp, Homo sapien
gaaggggcttcacagggtaatactg

SEQ ID NO: 5070562 - DNA, 25 bp, Homo sapien
gatgatgctcagaaccagggagccc

SEQ ID NO: 5070563 - DNA, 25 bp, Homo sapien
ccagccctcctgaataataaaggag

SEQ ID NO: 5070564 - DNA, 25 bp, Homo sapien
ccccaactagaaggcggctgctgag

SEQ ID NO: 5070565 - DNA, 25 bp, Homo sapien
tgtagaattcggctcccctagtgcc

SEQ ID NO: 5070566 - DNA, 25 bp, Homo sapien
agatcagcgactagcccccaactag

SEQ ID NO: 5070567 - DNA, 25 bp, Homo sapien
caactgaggcgaatcgaatggcccc

SEQ ID NO: 5070568 - DNA, 25 bp, Homo sapien
gcgccagccgcagggccgctgtacc

SEQ ID NO: 5070569 - DNA, 25 bp, Homo sapien
gaaagcgcagagactgcagcgcctc

SEQ ID NO: 5070570 - DNA, 25 bp, Homo sapien
aagcgcagagactgcagcgcctcat

SEQ ID NO: 5070571 - DNA, 25 bp, Homo sapien
aaagcgcagagactgcagcgcctca

SEQ ID NO: 5070572 - DNA, 25 bp, Homo sapien
cgaaagcgcagagactgcagcgcct

SEQ ID NO: 5070573 - DNA, 25 bp, Homo sapien
gagaggcggctcgcggcgggttaac

SEQ ID NO: 5070574 - DNA, 25 bp, Homo sapien
agacgagacgccagggcccggaagt

SEQ ID NO: 5070575 - DNA, 25 bp, Homo sapien
taaccgcgggcagtaggacggggca

SEQ ID NO: 5070576 - DNA, 25 bp, Homo sapien
tagccccagggtaaggagacgagac

SEQ ID NO: 5070577 - DNA, 25 bp, Homo sapien
cagccgcctgggcccccgggcggcg

SEQ ID NO: 5070578 - DNA, 25 bp, Homo sapien
gtgtactccggcgtgacagcgccgc

SEQ ID NO: 5070579 - DNA, 25 bp, Homo sapien
acgtgccgcaggacggtgccatgca

SEQ ID NO: 5070580 - DNA, 25 bp, Homo sapien
ccccgagccgacagagatgacattg

SEQ ID NO: 5070581 - DNA, 25 bp, Homo sapien
ttcacgtggcccaccaagatcagcg

SEQ ID NO: 5070582 - DNA, 25 bp, Homo sapien
ccccgcccgggtcgcctgccgcgct

SEQ ID NO: 5070583 - DNA, 25 bp, Homo sapien
ggaagacacaaagcctttggcctgc

SEQ ID NO: 5070584 - DNA, 25 bp, Homo sapien
aagacacaaagcctttggcctgctg

SEQ ID NO: 5070585 - DNA, 25 bp, Homo sapien
cgcccgggtcgcctgccgcgctcac

SEQ ID NO: 5070586 - DNA, 25 bp, Homo sapien
tcctggacgccaggagggccacaag

SEQ ID NO: 5070587 - DNA, 25 bp, Homo sapien
tggacgccaggagggccacaagtcc

SEQ ID NO: 5070588 - DNA, 25 bp, Homo sapien
cgaagaaggttcctggacgccagga

SEQ ID NO: 5070589 - DNA, 25 bp, Homo sapien
cagtggagggcgaagaaggttcctg

SEQ ID NO: 5070590 - DNA, 25 bp, Homo sapien
gacaagagcaggttcaccagagcta

SEQ ID NO: 5070591 - DNA, 25 bp, Homo sapien
agcaggttcaccagagctagtgcca

SEQ ID NO: 5070592 - DNA, 25 bp, Homo sapien
cggcggccaccgttggccacagtga

SEQ ID NO: 5070593 - DNA, 25 bp, Homo sapien
agcaggcaacggacaagagcaggtt

SEQ ID NO: 5070594 - DNA, 25 bp, Homo sapien
tgtggggtcaaaggggcagtcagta

SEQ ID NO: 5070595 - DNA, 25 bp, Homo sapien
gcagtcagtatgtcccggcccctca

SEQ ID NO: 5070596 - DNA, 25 bp, Homo sapien
tggggtcaaaggggcagtcagtatg

SEQ ID NO: 5070597 - DNA, 25 bp, Homo sapien
ggcagtcagtatgtcccggcccctc

SEQ ID NO: 5070598 - DNA, 25 bp, Homo sapien
ctgaagtccgtccttcctgcagggc

SEQ ID NO: 5070599 - DNA, 25 bp, Homo sapien
cacgtagagtgagtgcagccacaca

SEQ ID NO: 5070600 - DNA, 25 bp, Homo sapien
agatagagcagcctcccctgcagac

SEQ ID NO: 5070601 - DNA, 25 bp, Homo sapien
tgcagggcccaactccacgtagagt

SEQ ID NO: 5070602 - DNA, 25 bp, Homo sapien
gcacccggccggtcagcatcttttc

SEQ ID NO: 5070603 - DNA, 25 bp, Homo sapien
agtctctgtggaatgaacccttcct

SEQ ID NO: 5070604 - DNA, 25 bp, Homo sapien
ctgtggaatgaacccttcctgtttg

SEQ ID NO: 5070605 - DNA, 25 bp, Homo sapien
tggaatgaacccttcctgtttgcct

SEQ ID NO: 5070606 - DNA, 25 bp, Homo sapien
tgaatgataggtcagcatctttttt

SEQ ID NO: 5070607 - DNA, 25 bp, Homo sapien
ctgaatgataggtcagcatcttttt

SEQ ID NO: 5070608 - DNA, 25 bp, Homo sapien
gaagatagagttagacaccctcgcc

SEQ ID NO: 5070609 - DNA, 25 bp, Homo sapien
tgattttgatccagtagctgctcat

SEQ ID NO: 5070610 - DNA, 25 bp, Homo sapien
ctgccttttacatttaggagattca

SEQ ID NO: 5070611 - DNA, 25 bp, Homo sapien
gattttgatccagtagctgctcatt

SEQ ID NO: 5070612 - DNA, 25 bp, Homo sapien
tttgatccagtagctgctcattttc

SEQ ID NO: 5070613 - DNA, 25 bp, Homo sapien
cagcatggcaagacctagacccagt

SEQ ID NO: 5070614 - DNA, 25 bp, Homo sapien
ctaagagcacttccttgtccccgct

SEQ ID NO: 5070615 - DNA, 25 bp, Homo sapien
atggcaagacctagacccagttcta

SEQ ID NO: 5070616 - DNA, 25 bp, Homo sapien
gagcacttccttgtccccgctctta

SEQ ID NO: 5070617 - DNA, 25 bp, Homo sapien
tcagggccccttgcttagtgggaaa

SEQ ID NO: 5070618 - DNA, 25 bp, Homo sapien
ccctttaggactgagtctcggaaca

SEQ ID NO: 5070619 - DNA, 25 bp, Homo sapien
tattacaatttgttatctcatcccg

SEQ ID NO: 5070620 - DNA, 25 bp, Homo sapien
ttatctcatcccgaggtcagggccc

SEQ ID NO: 5070621 - DNA, 25 bp, Homo sapien
agcttgctcactcccatttgcatct

SEQ ID NO: 5070622 - DNA, 25 bp, Homo sapien
tgtagacaaagccttctatgaagca

SEQ ID NO: 5070623 - DNA, 25 bp, Homo sapien
gagtgtagggctgatgttacggagg

SEQ ID NO: 5070624 - DNA, 25 bp, Homo sapien
ggaggatgtagtcctcctatgtctt

SEQ ID NO: 5070625 - DNA, 25 bp, Homo sapien
caggatcattggtctggtagctcag

SEQ ID NO: 5070626 - DNA, 25 bp, Homo sapien
ctttaatcccaggaaaccgtggctg

SEQ ID NO: 5070627 - DNA, 25 bp, Homo sapien
gagaatccagagcagtttaataata

SEQ ID NO: 5070628 - DNA, 25 bp, Homo sapien
tctgtggctgccttacaggatcatt

SEQ ID NO: 5070629 - DNA, 25 bp, Homo sapien
aggacctgccgtttgcctctctttc

SEQ ID NO: 5070630 - DNA, 25 bp, Homo sapien
gcacagcctaataaggacctgccgt

SEQ ID NO: 5070631 - DNA, 25 bp, Homo sapien
cagcctaataaggacctgccgtttg

SEQ ID NO: 5070632 - DNA, 25 bp, Homo sapien
agcctaataaggacctgccgtttgc

SEQ ID NO: 5070633 - DNA, 25 bp, Homo sapien
aatcgccaatttaccatacttcagc

SEQ ID NO: 5070634 - DNA, 25 bp, Homo sapien
caatttaccatacttcagcatcaca

SEQ ID NO: 5070635 - DNA, 25 bp, Homo sapien
gccaatttaccatacttcagcatca

SEQ ID NO: 5070636 - DNA, 25 bp, Homo sapien
tttcaaaatcgccaatttaccatac

SEQ ID NO: 5070637 - DNA, 25 bp, Homo sapien
caaatactatcctctcgtggcccaa

SEQ ID NO: 5070638 - DNA, 25 bp, Homo sapien
cagtgtgacacagatatcgcccttc

SEQ ID NO: 5070639 - DNA, 25 bp, Homo sapien
aagtgagtctctagctgtgttccag

SEQ ID NO: 5070640 - DNA, 25 bp, Homo sapien
tttccgcagcacgaggcaatgcagt

SEQ ID NO: 5070641 - DNA, 25 bp, Homo sapien
tgctgcactgcactactccaatgtc

SEQ ID NO: 5070642 - DNA, 25 bp, Homo sapien
ggagagtcactagttgtaccctact

SEQ ID NO: 5070643 - DNA, 25 bp, Homo sapien
ggaattgtctgaccctagaggcaga

SEQ ID NO: 5070644 - DNA, 25 bp, Homo sapien
tgggtactcctcttaccccagcaaa

SEQ ID NO: 5070645 - DNA, 25 bp, Homo sapien
cacgctgtggatacactgttcctcc

SEQ ID NO: 5070646 - DNA, 25 bp, Homo sapien
ggtcccacgctgtggatacactgtt

SEQ ID NO: 5070647 - DNA, 25 bp, Homo sapien
cccacgctgtggatacactgttcct

SEQ ID NO: 5070648 - DNA, 25 bp, Homo sapien
tcccacgctgtggatacactgttcc

SEQ ID NO: 5070649 - DNA, 25 bp, Homo sapien
caggctccggggtctcaatgacatg

SEQ ID NO: 5070650 - DNA, 25 bp, Homo sapien
gctccggggtctcaatgacatgttg

SEQ ID NO: 5070651 - DNA, 25 bp, Homo sapien
aatgacatgttgaaaccgttttgtg

SEQ ID NO: 5070652 - DNA, 25 bp, Homo sapien
gggtctcaatgacatgttgaaaccg

SEQ ID NO: 5070653 - DNA, 25 bp, Homo sapien
tcctgggtcagtgggtttgacttct

SEQ ID NO: 5070654 - DNA, 25 bp, Homo sapien
acattgccctagcagtcgaacaatg

SEQ ID NO: 5070655 - DNA, 25 bp, Homo sapien
gacttctccgtgattggcacagctg

SEQ ID NO: 5070656 - DNA, 25 bp, Homo sapien
attgccctagcagtcgaacaatgtt

SEQ ID NO: 5070657 - DNA, 25 bp, Homo sapien
ccatggtggtcagaatggattcgct

SEQ ID NO: 5070658 - DNA, 25 bp, Homo sapien
tcagaatggattcgctgtagagtct

SEQ ID NO: 5070659 - DNA, 25 bp, Homo sapien
agccacctgtaccatggtggtcaga

SEQ ID NO: 5070660 - DNA, 25 bp, Homo sapien
cacctgtaccatggtggtcagaatg

SEQ ID NO: 5070661 - DNA, 25 bp, Homo sapien
gaatgccatccggccagaggtgccc

SEQ ID NO: 5070662 - DNA, 25 bp, Homo sapien
gaggaatgccatccggccagaggtg

SEQ ID NO: 5070663 - DNA, 25 bp, Homo sapien
cccctccactcagcacaaccagccc

SEQ ID NO: 5070664 - DNA, 25 bp, Homo sapien
cgacatgaggaatgccatccggcca

SEQ ID NO: 5070665 - DNA, 25 bp, Homo sapien
aagaaaactggagaccagggtgctc

SEQ ID NO: 5070666 - DNA, 25 bp, Homo sapien
gaaaactggagaccagggtgctcac

SEQ ID NO: 5070667 - DNA, 25 bp, Homo sapien
ggaagaaaactggagaccagggtgc

SEQ ID NO: 5070668 - DNA, 25 bp, Homo sapien
cagaagtggagggggaagaaaactg

SEQ ID NO: 5070669 - DNA, 25 bp, Homo sapien
ctgtcaccacctgcaatgaggtagg

SEQ ID NO: 5070670 - DNA, 25 bp, Homo sapien
gacctttcatcagctgattaaagga

SEQ ID NO: 5070671 - DNA, 25 bp, Homo sapien
agaggtttctgtcccagacctttca

SEQ ID NO: 5070672 - DNA, 25 bp, Homo sapien
cctgcaatgaggtaggtgtaaagag

SEQ ID NO: 5070673 - DNA, 25 bp, Homo sapien
cagttcctcaatcccgtgcaaggca

SEQ ID NO: 5070674 - DNA, 25 bp, Homo sapien
tcaatcccgtgcaaggcactatctt

SEQ ID NO: 5070675 - DNA, 25 bp, Homo sapien
ccgtgcaaggcactatcttctgtcc

SEQ ID NO: 5070676 - DNA, 25 bp, Homo sapien
cttcagttcctcaatcccgtgcaag

SEQ ID NO: 5070677 - DNA, 25 bp, Homo sapien
atgacaatcactctcttcttcccgg

SEQ ID NO: 5070678 - DNA, 25 bp, Homo sapien
cagaaatgccaatgacaatcactct

SEQ ID NO: 5070679 - DNA, 25 bp, Homo sapien
agagagtcccacagaaatgccaatg

SEQ ID NO: 5070680 - DNA, 25 bp, Homo sapien
aatcactctcttcttcccggcagcc

SEQ ID NO: 5070681 - DNA, 25 bp, Homo sapien
gctcactggattgaagccaaccagg

SEQ ID NO: 5070682 - DNA, 25 bp, Homo sapien
tggattgaagccaaccaggactggc

SEQ ID NO: 5070683 - DNA, 25 bp, Homo sapien
cactggattgaagccaaccaggact

SEQ ID NO: 5070684 - DNA, 25 bp, Homo sapien
catgctcactggattgaagccaacc

SEQ ID NO: 5070685 - DNA, 25 bp, Homo sapien
gacagtgagagatctgaggatcctc

SEQ ID NO: 5070686 - DNA, 25 bp, Homo sapien
cagtgagagatctgaggatcctcgg

SEQ ID NO: 5070687 - DNA, 25 bp, Homo sapien
catagagaataagagggaggtgatt

SEQ ID NO: 5070688 - DNA, 25 bp, Homo sapien
tgaaataagagtgaccactgacata

SEQ ID NO: 5070689 - DNA, 25 bp, Homo sapien
gatggcaggattgagcacaaaagct

SEQ ID NO: 5070690 - DNA, 25 bp, Homo sapien
catccgctctgctacttgtcggaat

SEQ ID NO: 5070691 - DNA, 25 bp, Homo sapien
gtcggaatgttgaactccagtcttc

SEQ ID NO: 5070692 - DNA, 25 bp, Homo sapien
cccgatggcaggattgagcacaaaa

SEQ ID NO: 5070693 - DNA, 25 bp, Homo sapien
ggtccacagtcttatgggctgctaa

SEQ ID NO: 5070694 - DNA, 25 bp, Homo sapien
gctgctaataacagggtttccagca

SEQ ID NO: 5070695 - DNA, 25 bp, Homo sapien
gctgcaatgccctggtccacagtct

SEQ ID NO: 5070696 - DNA, 25 bp, Homo sapien
ttccacctttcatccgggaggagcc

SEQ ID NO: 5070697 - DNA, 25 bp, Homo sapien
tgtccgcaagatttccaggaggcat

SEQ ID NO: 5070698 - DNA, 25 bp, Homo sapien
ggctgtaggtcacctgatgagctcg

SEQ ID NO: 5070699 - DNA, 25 bp, Homo sapien
tcttcatcagggtggcaatcttggg

SEQ ID NO: 5070700 - DNA, 25 bp, Homo sapien
tgagctcgctcaaatgtccgcaaga

SEQ ID NO: 5070701 - DNA, 25 bp, Homo sapien
aggtgtggatgcactctactccatc

SEQ ID NO: 5070702 - DNA, 25 bp, Homo sapien
caaccaggtacacgtggcctttctt

SEQ ID NO: 5070703 - DNA, 25 bp, Homo sapien
gatgcactctactccatccatgatg

SEQ ID NO: 5070704 - DNA, 25 bp, Homo sapien
gggtctgccagccaaccaggtacac

SEQ ID NO: 5070705 - DNA, 25 bp, Homo sapien
ctggttggtgagctcagccttctgg

SEQ ID NO: 5070706 - DNA, 25 bp, Homo sapien
agaaagccacggacatctcggaaat

SEQ ID NO: 5070707 - DNA, 25 bp, Homo sapien
tctggttaaacatgtcactgtgatc

SEQ ID NO: 5070708 - DNA, 25 bp, Homo sapien
cactgtgatcaccaatgagaaagcc

SEQ ID NO: 5070709 - DNA, 25 bp, Homo sapien
tccccaagtcctgttcttctccgac

SEQ ID NO: 5070710 - DNA, 25 bp, Homo sapien
cagcttccccaagtcctgttcttct

SEQ ID NO: 5070711 - DNA, 25 bp, Homo sapien
ccccagcttccccaagtcctgttct

SEQ ID NO: 5070712 - DNA, 25 bp, Homo sapien
cttccccaagtcctgttcttctccg

SEQ ID NO: 5070713 - DNA, 25 bp, Homo sapien
gggtccctcccatgaaaacactcta

SEQ ID NO: 5070714 - DNA, 25 bp, Homo sapien
taagccaaagcctcatgacttctga

SEQ ID NO: 5070715 - DNA, 25 bp, Homo sapien
taacaagtcagtggactagggccaa

SEQ ID NO: 5070716 - DNA, 25 bp, Homo sapien
aaaggtacagtgttttgcccaagat

SEQ ID NO: 5070717 - DNA, 25 bp, Homo sapien
cagtatcgatttccgtgagagaggg

SEQ ID NO: 5070718 - DNA, 25 bp, Homo sapien
aatgaagaccacagtatcgatttcc

SEQ ID NO: 5070719 - DNA, 25 bp, Homo sapien
gaccacagtatcgatttccgtgaga

SEQ ID NO: 5070720 - DNA, 25 bp, Homo sapien
tatcgatttccgtgagagagggaag

SEQ ID NO: 5070721 - DNA, 25 bp, Homo sapien
cagcaaggtctgacccacggtgctg

SEQ ID NO: 5070722 - DNA, 25 bp, Homo sapien
tccactatagtctgcacctccgtga

SEQ ID NO: 5070723 - DNA, 25 bp, Homo sapien
aaggtctgacccacggtgctgtgtg

SEQ ID NO: 5070724 - DNA, 25 bp, Homo sapien
tatagtctgcacctccgtgaggttg

SEQ ID NO: 5070725 - DNA, 25 bp, Homo sapien
ctggatgaagttcccttcatattca

SEQ ID NO: 5070726 - DNA, 25 bp, Homo sapien
cttcatattcaaagaaaagcagtgg

SEQ ID NO: 5070727 - DNA, 25 bp, Homo sapien
tcccttcatattcaaagaaaagcag

SEQ ID NO: 5070728 - DNA, 25 bp, Homo sapien
gaagttcccttcatattcaaagaaa

SEQ ID NO: 5070729 - DNA, 25 bp, Homo sapien
atggtagatttggagtgattttttc

SEQ ID NO: 5070730 - DNA, 25 bp, Homo sapien
tctgtaatttgtaacgtctttacta

SEQ ID NO: 5070731 - DNA, 25 bp, Homo sapien
aatacagtgttttggctaggcgtag

SEQ ID NO: 5070732 - DNA, 25 bp, Homo sapien
catttctgtaatttgtaacgtcttt

SEQ ID NO: 5070733 - DNA, 25 bp, Homo sapien
ttgctaatccgaaggtccaacatgt

SEQ ID NO: 5070734 - DNA, 25 bp, Homo sapien
catttggtgcttagctcacgctgga

SEQ ID NO: 5070735 - DNA, 25 bp, Homo sapien
gaagcacatgagcacctgtactcac

SEQ ID NO: 5070736 - DNA, 25 bp, Homo sapien
tttgtaggatcttaccaagaagcac

SEQ ID NO: 5070737 - DNA, 25 bp, Homo sapien
gagatgggagcagcccgaatatcat

SEQ ID NO: 5070738 - DNA, 25 bp, Homo sapien
tcggaggaggctctcgatgcatcga

SEQ ID NO: 5070739 - DNA, 25 bp, Homo sapien
gatgcatcgagccttggactgtcca

SEQ ID NO: 5070740 - DNA, 25 bp, Homo sapien
tctcatgtgcaacctggacatggca

SEQ ID NO: 5070741 - DNA, 25 bp, Homo sapien
agtgccgaacaaacttcctgacaca

SEQ ID NO: 5070742 - DNA, 25 bp, Homo sapien
aacccagtgccgaacaaacttcctg

SEQ ID NO: 5070743 - DNA, 25 bp, Homo sapien
gccgaacaaacttcctgacacactg

SEQ ID NO: 5070744 - DNA, 25 bp, Homo sapien
ccagtgccgaacaaacttcctgaca

SEQ ID NO: 5070745 - DNA, 25 bp, Homo sapien
gtccgcagtgcgcttctgacctggc

SEQ ID NO: 5070746 - DNA, 25 bp, Homo sapien
gatcgagcaccggaataggaggctc

SEQ ID NO: 5070747 - DNA, 25 bp, Homo sapien
tctgacctggcccagcaagagcact

SEQ ID NO: 5070748 - DNA, 25 bp, Homo sapien
cactgaacgtcaggctctaggatct

SEQ ID NO: 5070749 - DNA, 25 bp, Homo sapien
tagaaaccactaggtcgagagcaag

SEQ ID NO: 5070750 - DNA, 25 bp, Homo sapien
cagaataagtcggtgagagtagaaa

SEQ ID NO: 5070751 - DNA, 25 bp, Homo sapien
gagcaagaactctcccccaaagtgg

SEQ ID NO: 5070752 - DNA, 25 bp, Homo sapien
gagaatatttctccctaccctgggc

SEQ ID NO: 5070753 - DNA, 25 bp, Homo sapien
tttccattggatcttaggcattttg

SEQ ID NO: 5070754 - DNA, 25 bp, Homo sapien
ctgtccaattgggtccaaccctaag

SEQ ID NO: 5070755 - DNA, 25 bp, Homo sapien
taagtttccattggatcttaggcat

SEQ ID NO: 5070756 - DNA, 25 bp, Homo sapien
tccaaccctaagtttccattggatc

SEQ ID NO: 5070757 - DNA, 25 bp, Homo sapien
ccagctccgattcctggaaaacagt

SEQ ID NO: 5070758 - DNA, 25 bp, Homo sapien
aacagtgtccaaagccgccaaataa

SEQ ID NO: 5070759 - DNA, 25 bp, Homo sapien
aaattggtgccatttctcaacccca

SEQ ID NO: 5070760 - DNA, 25 bp, Homo sapien
tgatggcagtgggacgtccatcccc

SEQ ID NO: 5070761 - DNA, 25 bp, Homo sapien
ctgttaatttctggatctttttcaa

SEQ ID NO: 5070762 - DNA, 25 bp, Homo sapien
ttttcaatctatgctgctttgaagt

SEQ ID NO: 5070763 - DNA, 25 bp, Homo sapien
ctgaagagtaaaggataggatctct

SEQ ID NO: 5070764 - DNA, 25 bp, Homo sapien
agagtaaaggataggatctctctga

SEQ ID NO: 5070765 - DNA, 25 bp, Homo sapien
gagtaaaggataggatctctctgac

SEQ ID NO: 5070766 - DNA, 25 bp, Homo sapien
gaagagtaaaggataggatctctct

SEQ ID NO: 5070767 - DNA, 25 bp, Homo sapien
aggttagcttcagtgcaagccatcc

SEQ ID NO: 5070768 - DNA, 25 bp, Homo sapien
agtgcaagccatcctgaggttttct

SEQ ID NO: 5070769 - DNA, 25 bp, Homo sapien
ttagcttcagtgcaagccatcctga

SEQ ID NO: 5070770 - DNA, 25 bp, Homo sapien
ttcagtgcaagccatcctgaggttt

SEQ ID NO: 5070771 - DNA, 25 bp, Homo sapien
ggatgcaacagtgtatgtcaatgta

SEQ ID NO: 5070772 - DNA, 25 bp, Homo sapien
tctaggtatcggaagatctgttgaa

SEQ ID NO: 5070773 - DNA, 25 bp, Homo sapien
gtatatattcctgggtccagcccac

SEQ ID NO: 5070774 - DNA, 25 bp, Homo sapien
ggctccgctccattgaccagagtat

SEQ ID NO: 5070775 - DNA, 25 bp, Homo sapien
gcgctttctaggtatcggaagatct

SEQ ID NO: 5070776 - DNA, 25 bp, Homo sapien
gaaaaaagtggccatttcaaatgca

SEQ ID NO: 5070777 - DNA, 25 bp, Homo sapien
aaaaagtggccatttcaaatgcaaa

SEQ ID NO: 5070778 - DNA, 25 bp, Homo sapien
aaaaaagtggccatttcaaatgcaa

SEQ ID NO: 5070779 - DNA, 25 bp, Homo sapien
acgaaaaaagtggccatttcaaatg

SEQ ID NO: 5070780 - DNA, 25 bp, Homo sapien
gaattcataccttgcagctgcgggc

SEQ ID NO: 5070781 - DNA, 25 bp, Homo sapien
taagtttcaagactgggctccactc

SEQ ID NO: 5070782 - DNA, 25 bp, Homo sapien
cataccttgtaaatacggccctggg

SEQ ID NO: 5070783 - DNA, 25 bp, Homo sapien
catcttgcaagaatagtcctgggct

SEQ ID NO: 5070784 - DNA, 25 bp, Homo sapien
ctgagagagcaattccatagtttct

SEQ ID NO: 5070785 - DNA, 25 bp, Homo sapien
tggtagcttttctctggagttaatc

SEQ ID NO: 5070786 - DNA, 25 bp, Homo sapien
atagtttctaggatttggtagcttt

SEQ ID NO: 5070787 - DNA, 25 bp, Homo sapien
atcctaagaattttgagccttgatc

SEQ ID NO: 5070788 - DNA, 25 bp, Homo sapien
cattgtgttgtctgcccgggaaaga

SEQ ID NO: 5070789 - DNA, 25 bp, Homo sapien
taatgcttgagttccggagtaatcc

SEQ ID NO: 5070790 - DNA, 25 bp, Homo sapien
ggaactcgatgtcctaacccaggtg

SEQ ID NO: 5070791 - DNA, 25 bp, Homo sapien
gaagactctgactttaccaggacag

SEQ ID NO: 5070792 - DNA, 25 bp, Homo sapien
gaatcactctgtgagtcctcacttt

SEQ ID NO: 5070793 - DNA, 25 bp, Homo sapien
ggaaagataatttggcttgagggag

SEQ ID NO: 5070794 - DNA, 25 bp, Homo sapien
tgggaatcactctgtgagtcctcac

SEQ ID NO: 5070795 - DNA, 25 bp, Homo sapien
tgggaaagataatttggcttgaggg

SEQ ID NO: 5070796 - DNA, 25 bp, Homo sapien
gcacatcggggggtatttgactcct

SEQ ID NO: 5070797 - DNA, 25 bp, Homo sapien
gtatttgactccttaagagttttgc

SEQ ID NO: 5070798 - DNA, 25 bp, Homo sapien
ctgaagctagaggtggaggcacatc

SEQ ID NO: 5070799 - DNA, 25 bp, Homo sapien
tgcagatcttctagcaactggaact

SEQ ID NO: 5070800 - DNA, 25 bp, Homo sapien
gatagataagaagataaggccccga

SEQ ID NO: 5070801 - DNA, 25 bp, Homo sapien
gcaattaagtcctgaacatcggcca

SEQ ID NO: 5070802 - DNA, 25 bp, Homo sapien
taaagccaagatgcaaccgaacctc

SEQ ID NO: 5070803 - DNA, 25 bp, Homo sapien
ccatggccttcaggagtgcgtacaa

SEQ ID NO: 5070804 - DNA, 25 bp, Homo sapien
tatgacgggtctatctctttcacga

SEQ ID NO: 5070805 - DNA, 25 bp, Homo sapien
gatatagggcttctccgtatgacgg

SEQ ID NO: 5070806 - DNA, 25 bp, Homo sapien
tctactaagtcaggcctgctgcgtt

SEQ ID NO: 5070807 - DNA, 25 bp, Homo sapien
cactctctggtaggttgtgaacttg

SEQ ID NO: 5070808 - DNA, 25 bp, Homo sapien
tcattggatattttgaatcagaggt

SEQ ID NO: 5070809 - DNA, 25 bp, Homo sapien
tcctgcttaatggttgagcctgctg

SEQ ID NO: 5070810 - DNA, 25 bp, Homo sapien
ggaatgcccgctttaggctctgaaa

SEQ ID NO: 5070811 - DNA, 25 bp, Homo sapien
gagcctgctggcgttagcttgtcag

SEQ ID NO: 5070812 - DNA, 25 bp, Homo sapien
aaattgtctggccttgtcccgtcca

SEQ ID NO: 5070813 - DNA, 25 bp, Homo sapien
tttggaaagcaataccactttggga

SEQ ID NO: 5070814 - DNA, 25 bp, Homo sapien
ctcctggctggaggtttcatttcta

SEQ ID NO: 5070815 - DNA, 25 bp, Homo sapien
ctgggttggaaagagtaagctcttc

SEQ ID NO: 5070816 - DNA, 25 bp, Homo sapien
ctggtgtggacaagttcttagactc

SEQ ID NO: 5070817 - DNA, 25 bp, Homo sapien
tgtctttaagatgtcggtgccaggt

SEQ ID NO: 5070818 - DNA, 25 bp, Homo sapien
tggttatgctccttgtgtgtgagtt

SEQ ID NO: 5070819 - DNA, 25 bp, Homo sapien
cgtggggttctctccctatagaagc

SEQ ID NO: 5070820 - DNA, 25 bp, Homo sapien
cttcctcgggcctgaactctggttc

SEQ ID NO: 5070821 - DNA, 25 bp, Homo sapien
ctccaaggaactgcgttggcttctc

SEQ ID NO: 5070822 - DNA, 25 bp, Homo sapien
ttatgacgggttctctcagaaggac

SEQ ID NO: 5070823 - DNA, 25 bp, Homo sapien
aaggaactgcgttggcttctctcag

SEQ ID NO: 5070824 - DNA, 25 bp, Homo sapien
caagaggggttatgacgggttctct

SEQ ID NO: 5070825 - DNA, 25 bp, Homo sapien
caagagactgtgacggctcctctcc

SEQ ID NO: 5070826 - DNA, 25 bp, Homo sapien
agactgtgacggctcctctccaagg

SEQ ID NO: 5070827 - DNA, 25 bp, Homo sapien
tcctccgagcgggactgcgatggct

SEQ ID NO: 5070828 - DNA, 25 bp, Homo sapien
agcgggactgcgatggcttctctta

SEQ ID NO: 5070829 - DNA, 25 bp, Homo sapien
cttctctcagagggactgtgacagg

SEQ ID NO: 5070830 - DNA, 25 bp, Homo sapien
tcagaaatcctacgatggctcctct

SEQ ID NO: 5070831 - DNA, 25 bp, Homo sapien
tctcagagggactgcaacggcttct

SEQ ID NO: 5070832 - DNA, 25 bp, Homo sapien
atcctacgatggctcctctcaaagg

SEQ ID NO: 5070833 - DNA, 25 bp, Homo sapien
gactgcaatggttcctcccagaggg

SEQ ID NO: 5070834 - DNA, 25 bp, Homo sapien
tcatctcagagggactgtgacgggt

SEQ ID NO: 5070835 - DNA, 25 bp, Homo sapien
tcatcgagtagcttcaggcctccac

SEQ ID NO: 5070836 - DNA, 25 bp, Homo sapien
tctagacaaactatggctgggcctc

SEQ ID NO: 5070837 - DNA, 25 bp, Homo sapien
ggcgcaggaattggaggcagtggct

SEQ ID NO: 5070838 - DNA, 25 bp, Homo sapien
aattacagacccattctcacccgcc

SEQ ID NO: 5070839 - DNA, 25 bp, Homo sapien
caatgaataataggggcggacctcg

SEQ ID NO: 5070840 - DNA, 25 bp, Homo sapien
gaaatggaagcctttccacgctggg

SEQ ID NO: 5070841 - DNA, 25 bp, Homo sapien
aatttcacccaagggctccggccag

SEQ ID NO: 5070842 - DNA, 25 bp, Homo sapien
ccctctccacgcctaacaatttcac

SEQ ID NO: 5070843 - DNA, 25 bp, Homo sapien
cacgcctaacaatttcacccaaggg

SEQ ID NO: 5070844 - DNA, 25 bp, Homo sapien
agaccaacgccacttccgctctcct

SEQ ID NO: 5070845 - DNA, 25 bp, Homo sapien
gggtaacaataccagagccttcgtc

SEQ ID NO: 5070846 - DNA, 25 bp, Homo sapien
tccagcagtgcaaaggcgggtaaca

SEQ ID NO: 5070847 - DNA, 25 bp, Homo sapien
tcccctatgcccagaagaaatgaag

SEQ ID NO: 5070848 - DNA, 25 bp, Homo sapien
cacacgagtgagtgctagggacctc

SEQ ID NO: 5070849 - DNA, 25 bp, Homo sapien
ttcttagctcccacgatcctcgtgc

SEQ ID NO: 5070850 - DNA, 25 bp, Homo sapien
cctctgctgcttaaaggttgtgggt

SEQ ID NO: 5070851 - DNA, 25 bp, Homo sapien
tctgctgcttaaaggttgtgggtcc

SEQ ID NO: 5070852 - DNA, 25 bp, Homo sapien
gctgcttaaaggttgtgggtcccga

SEQ ID NO: 5070853 - DNA, 25 bp, Homo sapien
ctggacagcgctggccacaaaatca

SEQ ID NO: 5070854 - DNA, 25 bp, Homo sapien
gctcaaaatccacaccgggttagtg

SEQ ID NO: 5070855 - DNA, 25 bp, Homo sapien
tccgatagccacgagctacaggtgg

SEQ ID NO: 5070856 - DNA, 25 bp, Homo sapien
ttttcgtcacaagaagttccactgg

SEQ ID NO: 5070857 - DNA, 25 bp, Homo sapien
tggccaaagccagaaacccatagac

SEQ ID NO: 5070858 - DNA, 25 bp, Homo sapien
gatggccaaagccagaaacccatag

SEQ ID NO: 5070859 - DNA, 25 bp, Homo sapien
ggccaaagccagaaacccatagaca

SEQ ID NO: 5070860 - DNA, 25 bp, Homo sapien
ctgatggccaaagccagaaacccat

SEQ ID NO: 5070861 - DNA, 25 bp, Homo sapien
atataccacaaaggaaggtctggag

SEQ ID NO: 5070862 - DNA, 25 bp, Homo sapien
gagtcatcatgagggatagtgtact

SEQ ID NO: 5070863 - DNA, 25 bp, Homo sapien
gcagacgatgaaccacttaaggagt

SEQ ID NO: 5070864 - DNA, 25 bp, Homo sapien
ggttcacacgaagatgcagacgatg

SEQ ID NO: 5070865 - DNA, 25 bp, Homo sapien
tattatcctttatggagcactgggt

SEQ ID NO: 5070866 - DNA, 25 bp, Homo sapien
tagattttcggaaagatgctggaaa

SEQ ID NO: 5070867 - DNA, 25 bp, Homo sapien
gtagattttcggaaagatgctggaa

SEQ ID NO: 5070868 - DNA, 25 bp, Homo sapien
catgagaagtagcagctggcttgat

SEQ ID NO: 5070869 - DNA, 25 bp, Homo sapien
gaagtagcagctggcttgattcttc

SEQ ID NO: 5070870 - DNA, 25 bp, Homo sapien
tagcagctggcttgattcttctcat

SEQ ID NO: 5070871 - DNA, 25 bp, Homo sapien
cttcgacatgagaagtagcagctgg

SEQ ID NO: 5070872 - DNA, 25 bp, Homo sapien
tcttctgaggaaattctcgatagtc

SEQ ID NO: 5070873 - DNA, 25 bp, Homo sapien
ataaagcttatgcttcttctgagga

SEQ ID NO: 5070874 - DNA, 25 bp, Homo sapien
gaaattctcgatagtcttcatcttc

SEQ ID NO: 5070875 - DNA, 25 bp, Homo sapien
cataaagcttatgcttcttctgagg

SEQ ID NO: 5070876 - DNA, 25 bp, Homo sapien
ggatttgggattgggctgagtttta

SEQ ID NO: 5070877 - DNA, 25 bp, Homo sapien
ggctgagttttaggccgttgcttcc

SEQ ID NO: 5070878 - DNA, 25 bp, Homo sapien
cttccgaatacgacgggcctgggat

SEQ ID NO: 5070879 - DNA, 25 bp, Homo sapien
cctgggatttgggattgggctgagt

SEQ ID NO: 5070880 - DNA, 25 bp, Homo sapien
gcctttatcaacgatttctaagtac

SEQ ID NO: 5070881 - DNA, 25 bp, Homo sapien
atcaacgatttctaagtaccattgc

SEQ ID NO: 5070882 - DNA, 25 bp, Homo sapien
ctaagtaccattgctcctccaaact

SEQ ID NO: 5070883 - DNA, 25 bp, Homo sapien
gacactgcctttatcaacgatttct

SEQ ID NO: 5070884 - DNA, 25 bp, Homo sapien
gacatgatacttcatccctgccagt

SEQ ID NO: 5070885 - DNA, 25 bp, Homo sapien
attatgatttgccatgacatgatac

SEQ ID NO: 5070886 - DNA, 25 bp, Homo sapien
catccctgccagtgaacgaagttgt

SEQ ID NO: 5070887 - DNA, 25 bp, Homo sapien
aacgaagttgtttcccacaatgatg

SEQ ID NO: 5070888 - DNA, 25 bp, Homo sapien
acgcatgcacctgagctttcccagt

SEQ ID NO: 5070889 - DNA, 25 bp, Homo sapien
agtctctttagaactgttcggagcc

SEQ ID NO: 5070890 - DNA, 25 bp, Homo sapien
tttcatctccggctttcaaaatggg

SEQ ID NO: 5070891 - DNA, 25 bp, Homo sapien
tagaactgttcggagcctttccctc

SEQ ID NO: 5070892 - DNA, 25 bp, Homo sapien
gtccagccttcgacctatatggttt

SEQ ID NO: 5070893 - DNA, 25 bp, Homo sapien
cagccttcgacctatatggttttcc

SEQ ID NO: 5070894 - DNA, 25 bp, Homo sapien
ccacattttctgacatggtagagat

SEQ ID NO: 5070895 - DNA, 25 bp, Homo sapien
gacatggtagagatatcccatgatg

SEQ ID NO: 5070896 - DNA, 25 bp, Homo sapien
ggtatacagctatcttggcagaacg

SEQ ID NO: 5070897 - DNA, 25 bp, Homo sapien
cagctcctgtaggtggtatacagct

SEQ ID NO: 5070898 - DNA, 25 bp, Homo sapien
tgactctaggttcatctcctttaag

SEQ ID NO: 5070899 - DNA, 25 bp, Homo sapien
tggcagaacgtctctgaactcggcc

SEQ ID NO: 5070900 - DNA, 25 bp, Homo sapien
aggtaccaggtcctgaagcaccttc

SEQ ID NO: 5070901 - DNA, 25 bp, Homo sapien
acccggccacaactatattattaag

SEQ ID NO: 5070902 - DNA, 25 bp, Homo sapien
tgagtttggttatctttggaggtaa

SEQ ID NO: 5070903 - DNA, 25 bp, Homo sapien
aattatctgtagtaagaaagaaggg

SEQ ID NO: 5070904 - DNA, 25 bp, Homo sapien
taagtgggaacacagtagaaagaaa

SEQ ID NO: 5070905 - DNA, 25 bp, Homo sapien
tcttccatttatgtagtacttcctg

SEQ ID NO: 5070906 - DNA, 25 bp, Homo sapien
ggagccctggacgagtatattttaa

SEQ ID NO: 5070907 - DNA, 25 bp, Homo sapien
tggttaggacactgaatacgatgat

SEQ ID NO: 5070908 - DNA, 25 bp, Homo sapien
ttcctggctgaaggtagggagccct

SEQ ID NO: 5070909 - DNA, 25 bp, Homo sapien
cccaggtgagctttaaggccagata

SEQ ID NO: 5070910 - DNA, 25 bp, Homo sapien
ggtgagctttaaggccagatacact

SEQ ID NO: 5070911 - DNA, 25 bp, Homo sapien
gctttaaggccagatacactgctgt

SEQ ID NO: 5070912 - DNA, 25 bp, Homo sapien
gagctttaaggccagatacactgct

SEQ ID NO: 5070913 - DNA, 25 bp, Homo sapien
ccatggctggtaggttgtaggacac

SEQ ID NO: 5070914 - DNA, 25 bp, Homo sapien
tcaaatgcccaaaattcaccagagg

SEQ ID NO: 5070915 - DNA, 25 bp, Homo sapien
tcccgagaggccagtatggttcaga

SEQ ID NO: 5070916 - DNA, 25 bp, Homo sapien
gatctactgtcgcaaaaagtgcctt

SEQ ID NO: 5070917 - DNA, 25 bp, Homo sapien
tcagcatggacggagttgatgtgat

SEQ ID NO: 5070918 - DNA, 25 bp, Homo sapien
gatgtgatacttgacaccactctct

SEQ ID NO: 5070919 - DNA, 25 bp, Homo sapien
gttgatgtgatacttgacaccactc

SEQ ID NO: 5070920 - DNA, 25 bp, Homo sapien
cagcatggacggagttgatgtgata

SEQ ID NO: 5070921 - DNA, 25 bp, Homo sapien
gggacaaagtctacctctcttgtgg

SEQ ID NO: 5070922 - DNA, 25 bp, Homo sapien
ctttagagatactttccttgacagc

SEQ ID NO: 5070923 - DNA, 25 bp, Homo sapien
taactctaatggctctggtaaccac

SEQ ID NO: 5070924 - DNA, 25 bp, Homo sapien
catatcaggcccacaggattacaaa

SEQ ID NO: 5070925 - DNA, 25 bp, Homo sapien
gaaggcatgaatgtatagagatcac

SEQ ID NO: 5070926 - DNA, 25 bp, Homo sapien
catgactacaactatcacctttggg

SEQ ID NO: 5070927 - DNA, 25 bp, Homo sapien
tacttcatccctaaacactttggca

SEQ ID NO: 5070928 - DNA, 25 bp, Homo sapien
ggttgctggaagacattagaatgct

SEQ ID NO: 5070929 - DNA, 25 bp, Homo sapien
tatatacatggctcacagtactttt

SEQ ID NO: 5070930 - DNA, 25 bp, Homo sapien
tttaggtataatgatgtttgtggtc

SEQ ID NO: 5070931 - DNA, 25 bp, Homo sapien
gattggccatacactgatgattgct

SEQ ID NO: 5070932 - DNA, 25 bp, Homo sapien
tcaaaagtccttatctcttacagat

SEQ ID NO: 5070933 - DNA, 25 bp, Homo sapien
tgtctcgggaagctcaatgccaggc

SEQ ID NO: 5070934 - DNA, 25 bp, Homo sapien
tctgtctcgggaagctcaatgccag

SEQ ID NO: 5070935 - DNA, 25 bp, Homo sapien
gctctgtctcgggaagctcaatgcc

SEQ ID NO: 5070936 - DNA, 25 bp, Homo sapien
tcgggaagctcaatgccaggctgct

SEQ ID NO: 5070937 - DNA, 25 bp, Homo sapien
cttcctcgtttatgattagtctttg

SEQ ID NO: 5070938 - DNA, 25 bp, Homo sapien
tcctcgtttatgattagtctttggg

SEQ ID NO: 5070939 - DNA, 25 bp, Homo sapien
tccttcctcgtttatgattagtctt

SEQ ID NO: 5070940 - DNA, 25 bp, Homo sapien
tttccttcctcgtttatgattagtc

SEQ ID NO: 5070941 - DNA, 25 bp, Homo sapien
gatcatagctatggatgaggcctcg

SEQ ID NO: 5070942 - DNA, 25 bp, Homo sapien
caagaggacttgacgaggaatagca

SEQ ID NO: 5070943 - DNA, 25 bp, Homo sapien
tggagcagctactaaatcaatggag

SEQ ID NO: 5070944 - DNA, 25 bp, Homo sapien
ccttagtggcactaccaggagcact

SEQ ID NO: 5070945 - DNA, 25 bp, Homo sapien
ggtcggcgtcaaagaacactggaaa

SEQ ID NO: 5070946 - DNA, 25 bp, Homo sapien
tcttcttacccccatacagtgtcaa

SEQ ID NO: 5070947 - DNA, 25 bp, Homo sapien
tacccccatacagtgtcaaggagtc

SEQ ID NO: 5070948 - DNA, 25 bp, Homo sapien
caaggagtcatgcagcaggtcggcg

SEQ ID NO: 5070949 - DNA, 25 bp, Homo sapien
caccgcatgggtagagaaacttccg

SEQ ID NO: 5070950 - DNA, 25 bp, Homo sapien
cgcatgggtagagaaacttccgcaa

SEQ ID NO: 5070951 - DNA, 25 bp, Homo sapien
gtagagaaacttccgcaatgttctg

SEQ ID NO: 5070952 - DNA, 25 bp, Homo sapien
atagagacaccgcatgggtagagaa

SEQ ID NO: 5070953 - DNA, 25 bp, Homo sapien
cagacacactgggtgccgcggaccc

SEQ ID NO: 5070954 - DNA, 25 bp, Homo sapien
agacacactgggtgccgcggacccc

SEQ ID NO: 5070955 - DNA, 25 bp, Homo sapien
gccattcccaacaccaacagacaca

SEQ ID NO: 5070956 - DNA, 25 bp, Homo sapien
ttcccggatcccgccattcccaaca

SEQ ID NO: 5070957 - DNA, 25 bp, Homo sapien
gctggatccaggttgatcacatacg

SEQ ID NO: 5070958 - DNA, 25 bp, Homo sapien
caatattggcaggaaagggaacttc

SEQ ID NO: 5070959 - DNA, 25 bp, Homo sapien
gatcacatacggtggagtgccttgg

SEQ ID NO: 5070960 - DNA, 25 bp, Homo sapien
gagtgccttgggcatgcaggtgtcc

SEQ ID NO: 5070961 - DNA, 25 bp, Homo sapien
catgaagaatgttagggctaggagc

SEQ ID NO: 5070962 - DNA, 25 bp, Homo sapien
ggctaggagctctaaagttgtggca

SEQ ID NO: 5070963 - DNA, 25 bp, Homo sapien
agttgtggcaaagagttttgtctcc

SEQ ID NO: 5070964 - DNA, 25 bp, Homo sapien
gaataaatgccaagtaaatcatgaa

SEQ ID NO: 5070965 - DNA, 25 bp, Homo sapien
ccactttcacactggtttccttcct

SEQ ID NO: 5070966 - DNA, 25 bp, Homo sapien
tccactttcacactggtttccttcc

SEQ ID NO: 5070967 - DNA, 25 bp, Homo sapien
ctccactttcacactggtttccttc

SEQ ID NO: 5070968 - DNA, 25 bp, Homo sapien
cactttcacactggtttccttcctt

SEQ ID NO: 5070969 - DNA, 25 bp, Homo sapien
taaggccacctgtataacacctccg

SEQ ID NO: 5070970 - DNA, 25 bp, Homo sapien
tgtaatacaggtgcatcaggcagtg

SEQ ID NO: 5070971 - DNA, 25 bp, Homo sapien
ggtgaccaacagatgatcctccaag

SEQ ID NO: 5070972 - DNA, 25 bp, Homo sapien
gacttgcctacggagagagtacaca

SEQ ID NO: 5070973 - DNA, 25 bp, Homo sapien
agacaccaagttgaggactgaaatc

SEQ ID NO: 5070974 - DNA, 25 bp, Homo sapien
ctagacaccaagttgaggactgaaa

SEQ ID NO: 5070975 - DNA, 25 bp, Homo sapien
gacaccaagttgaggactgaaatcg

SEQ ID NO: 5070976 - DNA, 25 bp, Homo sapien
tagacaccaagttgaggactgaaat

SEQ ID NO: 5070977 - DNA, 25 bp, Homo sapien
gccgccattgggtccaagtccatat

SEQ ID NO: 5070978 - DNA, 25 bp, Homo sapien
caaatctggtagcaaagagattgag

SEQ ID NO: 5070979 - DNA, 25 bp, Homo sapien
ttgagtgaggtcactatgccgccat

SEQ ID NO: 5070980 - DNA, 25 bp, Homo sapien
ctgatcaaatctggtagcaaagaga

SEQ ID NO: 5070981 - DNA, 25 bp, Homo sapien
taaggaatttaagagtcacagattt

SEQ ID NO: 5070982 - DNA, 25 bp, Homo sapien
ttctgggccttctcaataaatttca

SEQ ID NO: 5070983 - DNA, 25 bp, Homo sapien
gggccttctcaataaatttcatcac

SEQ ID NO: 5070984 - DNA, 25 bp, Homo sapien
ttggacatgttctgggccttctcaa

SEQ ID NO: 5070985 - DNA, 25 bp, Homo sapien
tctgggccttctcaataaatttcat

SEQ ID NO: 5070986 - DNA, 25 bp, Homo sapien
gtgaatacctcaatctgtccaggtg

SEQ ID NO: 5070987 - DNA, 25 bp, Homo sapien
tccaggtgtgtcaatcaacacatat

SEQ ID NO: 5070988 - DNA, 25 bp, Homo sapien
atctgtccaggtgtgtcaatcaaca

SEQ ID NO: 5070989 - DNA, 25 bp, Homo sapien
agctgaccaggtgaatacctcaatc

SEQ ID NO: 5070990 - DNA, 25 bp, Homo sapien
tgtccattacatagatgacaactgt

SEQ ID NO: 5070991 - DNA, 25 bp, Homo sapien
gcaggcatagagcatgttggacatg

SEQ ID NO: 5070992 - DNA, 25 bp, Homo sapien
ggtacttctcgatgtgtccattaca

SEQ ID NO: 5070993 - DNA, 25 bp, Homo sapien
catgaaggtcactgggttggtactt

SEQ ID NO: 5070994 - DNA, 25 bp, Homo sapien
atgaccacaatgaaaggcagcttgg

SEQ ID NO: 5070995 - DNA, 25 bp, Homo sapien
catgaccacaatgaaaggcagcttg

SEQ ID NO: 5070996 - DNA, 25 bp, Homo sapien
ttcatgaccacaatgaaaggcagct

SEQ ID NO: 5070997 - DNA, 25 bp, Homo sapien
ttattcatgaccacaatgaaaggca

SEQ ID NO: 5070998 - DNA, 25 bp, Homo sapien
gctgtaaaactcatctaacaccagg

SEQ ID NO: 5070999 - DNA, 25 bp, Homo sapien
tctcttgattcaaggcatcttggaa

SEQ ID NO: 5071000 - DNA, 25 bp, Homo sapien
caggctcattgaacgagtcaggtta

SEQ ID NO: 5071001 - DNA, 25 bp, Homo sapien
tcaggttactgacgtatgtagtctc

SEQ ID NO: 5071002 - DNA, 25 bp, Homo sapien
ggtaacttgcacaaagagttcatct

SEQ ID NO: 5071003 - DNA, 25 bp, Homo sapien
cttgcacaaagagttcatctaatcc

SEQ ID NO: 5071004 - DNA, 25 bp, Homo sapien
cacaaagagttcatctaatccagta

SEQ ID NO: 5071005 - DNA, 25 bp, Homo sapien
agcactggtaacttgcacaaagagt

SEQ ID NO: 5071006 - DNA, 25 bp, Homo sapien
tcagacgttcatattcaggacgata

SEQ ID NO: 5071007 - DNA, 25 bp, Homo sapien
cagtgattttttcagacgttcatat

SEQ ID NO: 5071008 - DNA, 25 bp, Homo sapien
cagacgttcatattcaggacgatac

SEQ ID NO: 5071009 - DNA, 25 bp, Homo sapien
acgttcatattcaggacgatactcc

SEQ ID NO: 5071010 - DNA, 25 bp, Homo sapien
ctctgctgttggctctctgcgttgg

SEQ ID NO: 5071011 - DNA, 25 bp, Homo sapien
ccctgcatccaaggctacagaaccc

SEQ ID NO: 5071012 - DNA, 25 bp, Homo sapien
tctctgctgttggctctctgcgttg

SEQ ID NO: 5071013 - DNA, 25 bp, Homo sapien
tacagaacccatatcttttcgaagg

SEQ ID NO: 5071014 - DNA, 25 bp, Homo sapien
tcagtatcgctgtctgcttcctcat

SEQ ID NO: 5071015 - DNA, 25 bp, Homo sapien
tgtggtcaatgtcatcagtatcgct

SEQ ID NO: 5071016 - DNA, 25 bp, Homo sapien
ttcatccaaggttcctcgagtcagg

SEQ ID NO: 5071017 - DNA, 25 bp, Homo sapien
gatcaaatcagaagggtgcagcaca

SEQ ID NO: 5071018 - DNA, 25 bp, Homo sapien
tgtgccatcgattcttgcataaaat

SEQ ID NO: 5071019 - DNA, 25 bp, Homo sapien
tctcttccagtattgtgccatcgat

SEQ ID NO: 5071020 - DNA, 25 bp, Homo sapien
tattgtgccatcgattcttgcataa

SEQ ID NO: 5071021 - DNA, 25 bp, Homo sapien
ccagtattgtgccatcgattcttgc

SEQ ID NO: 5071022 - DNA, 25 bp, Homo sapien
aacttacagtgcagggtcaagagca

SEQ ID NO: 5071023 - DNA, 25 bp, Homo sapien
tacaatacaaactgggcctagctct

SEQ ID NO: 5071024 - DNA, 25 bp, Homo sapien
tatttagtcagtatgtgcacgtggg

SEQ ID NO: 5071025 - DNA, 25 bp, Homo sapien
aacagttctttcacgtggaggtcca

SEQ ID NO: 5071026 - DNA, 25 bp, Homo sapien
gcatggcaatcagaccaaagcactg

SEQ ID NO: 5071027 - DNA, 25 bp, Homo sapien
gcactgtccccaattgttgtcttaa

SEQ ID NO: 5071028 - DNA, 25 bp, Homo sapien
tatgactagacatgttatacagcca

SEQ ID NO: 5071029 - DNA, 25 bp, Homo sapien
gacctaccttgtagagatgtgagga

SEQ ID NO: 5071030 - DNA, 25 bp, Homo sapien
tatgatggccctagcgatgttcctg

SEQ ID NO: 5071031 - DNA, 25 bp, Homo sapien
ccacgcgggctttgactgtgctaat

SEQ ID NO: 5071032 - DNA, 25 bp, Homo sapien
gggaacctgtgactgaactcagctg

SEQ ID NO: 5071033 - DNA, 25 bp, Homo sapien
tggcagcaccgcatcaaggactatc

SEQ ID NO: 5071034 - DNA, 25 bp, Homo sapien
tgattgagaagaagcgcttccggcg

SEQ ID NO: 5071035 - DNA, 25 bp, Homo sapien
caaaacggttatcgggatgctgtgc

SEQ ID NO: 5071036 - DNA, 25 bp, Homo sapien
cagcagtgaatagtgtggtacctcc

SEQ ID NO: 5071037 - DNA, 25 bp, Homo sapien
gcttccggcggtcttagatcactaa

SEQ ID NO: 5071038 - DNA, 25 bp, Homo sapien
tccttcacgacctggagcgttgcga

SEQ ID NO: 5071039 - DNA, 25 bp, Homo sapien
ggtgcaacttcgaaatccgctcctt

SEQ ID NO: 5071040 - DNA, 25 bp, Homo sapien
caagctcccagtggcgtctgtaggc

SEQ ID NO: 5071041 - DNA, 25 bp, Homo sapien
gagagagaatgtcagccatcctcaa

SEQ ID NO: 5071042 - DNA, 25 bp, Homo sapien
taaaatcaccgcagtccggctgagg

SEQ ID NO: 5071043 - DNA, 25 bp, Homo sapien
cagaattggagtcctgcaacgcagt

SEQ ID NO: 5071044 - DNA, 25 bp, Homo sapien
cagatcgtagaggtagaagcccggc

SEQ ID NO: 5071045 - DNA, 25 bp, Homo sapien
tacgggtgccaaggatagtgccgcc

SEQ ID NO: 5071046 - DNA, 25 bp, Homo sapien
gattctgcctctcggtcttcctctg

SEQ ID NO: 5071047 - DNA, 25 bp, Homo sapien
gcttgcgcaattccttcaactgtgt

SEQ ID NO: 5071048 - DNA, 25 bp, Homo sapien
tcatcttggctaccagcatttatct

SEQ ID NO: 5071049 - DNA, 25 bp, Homo sapien
tcaactgtgttactgttaactcgga

SEQ ID NO: 5071050 - DNA, 25 bp, Homo sapien
agacaatagggttctcttcagcatc

SEQ ID NO: 5071051 - DNA, 25 bp, Homo sapien
tcctgctgaaactctaagacaatag

SEQ ID NO: 5071052 - DNA, 25 bp, Homo sapien
ccctttcctgctgaaactctaagac

SEQ ID NO: 5071053 - DNA, 25 bp, Homo sapien
ctctaagacaatagggttctcttca

SEQ ID NO: 5071054 - DNA, 25 bp, Homo sapien
gatgacagcttgagttaaggagcgc

SEQ ID NO: 5071055 - DNA, 25 bp, Homo sapien
gcttgagttaaggagcgcgaaacca

SEQ ID NO: 5071056 - DNA, 25 bp, Homo sapien
taaggagcgcgaaaccagtctgtgc

SEQ ID NO: 5071057 - DNA, 25 bp, Homo sapien
gttaaggagcgcgaaaccagtctgt

SEQ ID NO: 5071058 - DNA, 25 bp, Homo sapien
gccaagtgctatgtccctgttcatc

SEQ ID NO: 5071059 - DNA, 25 bp, Homo sapien
ccaagtgctatgtccctgttcatca

SEQ ID NO: 5071060 - DNA, 25 bp, Homo sapien
agagccaagtgctatgtccctgttc

SEQ ID NO: 5071061 - DNA, 25 bp, Homo sapien
gagccaagtgctatgtccctgttca

SEQ ID NO: 5071062 - DNA, 25 bp, Homo sapien
ggcctcagccaccagttgttttcca

SEQ ID NO: 5071063 - DNA, 25 bp, Homo sapien
gttttccagttgaatcgtccacagg

SEQ ID NO: 5071064 - DNA, 25 bp, Homo sapien
gaatccgacaagcttccaatgagca

SEQ ID NO: 5071065 - DNA, 25 bp, Homo sapien
gcttcctgccgaagcaatcccaaag

SEQ ID NO: 5071066 - DNA, 25 bp, Homo sapien
cttctcaatcaggccagtcctatca

SEQ ID NO: 5071067 - DNA, 25 bp, Homo sapien
caatcaggccagtcctatcaagaaa

SEQ ID NO: 5071068 - DNA, 25 bp, Homo sapien
atcaggccagtcctatcaagaaatg

SEQ ID NO: 5071069 - DNA, 25 bp, Homo sapien
tctcaatcaggccagtcctatcaag

SEQ ID NO: 5071070 - DNA, 25 bp, Homo sapien
cttggcttgaggctttcaatctctc

SEQ ID NO: 5071071 - DNA, 25 bp, Homo sapien
ctcagaaatttcagaaagttccctt

SEQ ID NO: 5071072 - DNA, 25 bp, Homo sapien
tttcagaaagttccctttcagcatc

SEQ ID NO: 5071073 - DNA, 25 bp, Homo sapien
ggcttgaggctttcaatctctcaga

SEQ ID NO: 5071074 - DNA, 25 bp, Homo sapien
aatgtactgcctgatttcatttctg

SEQ ID NO: 5071075 - DNA, 25 bp, Homo sapien
ggaatctctgctggctttacaattt

SEQ ID NO: 5071076 - DNA, 25 bp, Homo sapien
catttctgacatgaacgcatctaaa

SEQ ID NO: 5071077 - DNA, 25 bp, Homo sapien
tcaggtgaagtttcttccgggacac

SEQ ID NO: 5071078 - DNA, 25 bp, Homo sapien
ccaaatagaggcaatgtaagctttt

SEQ ID NO: 5071079 - DNA, 25 bp, Homo sapien
tgcacctgtagtctgagtttcagtc

SEQ ID NO: 5071080 - DNA, 25 bp, Homo sapien
tagaggcaatgtaagctttttagct

SEQ ID NO: 5071081 - DNA, 25 bp, Homo sapien
tctgcacctgtagtctgagtttcag

SEQ ID NO: 5071082 - DNA, 25 bp, Homo sapien
tagttctacttaatgacaacaagag

SEQ ID NO: 5071083 - DNA, 25 bp, Homo sapien
accatgaacaagtagttctacttaa

SEQ ID NO: 5071084 - DNA, 25 bp, Homo sapien
gaacaagtagttctacttaatgaca

SEQ ID NO: 5071085 - DNA, 25 bp, Homo sapien
caagtagttctacttaatgacaaca

SEQ ID NO: 5071086 - DNA, 25 bp, Homo sapien
tactgaggcttccatcctccagttt

SEQ ID NO: 5071087 - DNA, 25 bp, Homo sapien
tgctgcttctggctctatctctggc

SEQ ID NO: 5071088 - DNA, 25 bp, Homo sapien
tctggctgtggcctactgaggcttc

SEQ ID NO: 5071089 - DNA, 25 bp, Homo sapien
ctcattagagttggagggagttctg

SEQ ID NO: 5071090 - DNA, 25 bp, Homo sapien
tgactggcggtcaaaggaagaagac

SEQ ID NO: 5071091 - DNA, 25 bp, Homo sapien
gtatgtttccttgctacagagtcag

SEQ ID NO: 5071092 - DNA, 25 bp, Homo sapien
ggcagcagctcaggattattccaca

SEQ ID NO: 5071093 - DNA, 25 bp, Homo sapien
ttatccggagaccacctgatcaggc

SEQ ID NO: 5071094 - DNA, 25 bp, Homo sapien
tcatcagcttcaactaatcttaagg

SEQ ID NO: 5071095 - DNA, 25 bp, Homo sapien
cactagccaacattgaggtaaaact

SEQ ID NO: 5071096 - DNA, 25 bp, Homo sapien
tacatactccttggcctagaaattc

SEQ ID NO: 5071097 - DNA, 25 bp, Homo sapien
gaaagagaagctaagtacataatca

SEQ ID NO: 5071098 - DNA, 25 bp, Homo sapien
tcctcgctaagttgagacatgtttt

SEQ ID NO: 5071099 - DNA, 25 bp, Homo sapien
cctgcgcacaatgaagtggttttgc

SEQ ID NO: 5071100 - DNA, 25 bp, Homo sapien
ggtcctgcgcacaatgaagtggttt

SEQ ID NO: 5071101 - DNA, 25 bp, Homo sapien
tattctgttcttcctcgctaagttg

SEQ ID NO: 5071102 - DNA, 25 bp, Homo sapien
agagcagcaatgaaggctgccgtac

SEQ ID NO: 5071103 - DNA, 25 bp, Homo sapien
attcacctctgcttttctcatattc

SEQ ID NO: 5071104 - DNA, 25 bp, Homo sapien
caattcacctctgcttttctcatat

SEQ ID NO: 5071105 - DNA, 25 bp, Homo sapien
cttcaattcacctctgcttttctca

SEQ ID NO: 5071106 - DNA, 25 bp, Homo sapien
tcaattcacctctgcttttctcata

SEQ ID NO: 5071107 - DNA, 25 bp, Homo sapien
tcagtgcctgaaatattctccaaga

SEQ ID NO: 5071108 - DNA, 25 bp, Homo sapien
tctggctaacgttgcaaaatctcta

SEQ ID NO: 5071109 - DNA, 25 bp, Homo sapien
taccagaccagacctacaagaaatg

SEQ ID NO: 5071110 - DNA, 25 bp, Homo sapien
aatggaagccaaatgcaagcagcag

SEQ ID NO: 5071111 - DNA, 25 bp, Homo sapien
gggtcatcttcaggatatttggaag

SEQ ID NO: 5071112 - DNA, 25 bp, Homo sapien
atacttgtcattaagatgggttctg

SEQ ID NO: 5071113 - DNA, 25 bp, Homo sapien
tacttgtcattaagatgggttctgc

SEQ ID NO: 5071114 - DNA, 25 bp, Homo sapien
cttgtcattaagatgggttctgcca

SEQ ID NO: 5071115 - DNA, 25 bp, Homo sapien
acttgtcattaagatgggttctgcc

SEQ ID NO: 5071116 - DNA, 25 bp, Homo sapien
acatatggttccctttttacataca

SEQ ID NO: 5071117 - DNA, 25 bp, Homo sapien
tcaaatgcatgagaatcatatgggc

SEQ ID NO: 5071118 - DNA, 25 bp, Homo sapien
ttttaataggatcatgtctctcact

SEQ ID NO: 5071119 - DNA, 25 bp, Homo sapien
cttctctggccattcaatttgatac

SEQ ID NO: 5071120 - DNA, 25 bp, Homo sapien
gatcatgccactgcagtaagctgtg

SEQ ID NO: 5071121 - DNA, 25 bp, Homo sapien
aaaaaaatgaggttccagtgctttg

SEQ ID NO: 5071122 - DNA, 25 bp, Homo sapien
catggcaagacttcatctctccaaa

SEQ ID NO: 5071123 - DNA, 25 bp, Homo sapien
aaaaatgaggttccagtgctttggg

SEQ ID NO: 5071124 - DNA, 25 bp, Homo sapien
ttttgcaagactcggacacccaggt

SEQ ID NO: 5071125 - DNA, 25 bp, Homo sapien
gcaagactcggacacccaggtttaa

SEQ ID NO: 5071126 - DNA, 25 bp, Homo sapien
agccttttgcaagactcggacaccc

SEQ ID NO: 5071127 - DNA, 25 bp, Homo sapien
cggacacccaggtttaacatccact

SEQ ID NO: 5071128 - DNA, 25 bp, Homo sapien
gcagcttactgtgcggggccgaccc

SEQ ID NO: 5071129 - DNA, 25 bp, Homo sapien
cccaggcagcttactgtgcggggcc

SEQ ID NO: 5071130 - DNA, 25 bp, Homo sapien
caggcagcttactgtgcggggccga

SEQ ID NO: 5071131 - DNA, 25 bp, Homo sapien
gcggggccgaccccagcagaggagc

SEQ ID NO: 5071132 - DNA, 25 bp, Homo sapien
tcagacaccaggcaaacgggtgaag

SEQ ID NO: 5071133 - DNA, 25 bp, Homo sapien
gaaggtgcagaggtcggcggtgagg

SEQ ID NO: 5071134 - DNA, 25 bp, Homo sapien
acaccaggcaaacgggtgaaggtgc

SEQ ID NO: 5071135 - DNA, 25 bp, Homo sapien
aggtgcagaggtcggcggtgaggag

SEQ ID NO: 5071136 - DNA, 25 bp, Homo sapien
cacatatgtgcgtgggcagggccct

SEQ ID NO: 5071137 - DNA, 25 bp, Homo sapien
gccctggagcacgaaccaatgcgat

SEQ ID NO: 5071138 - DNA, 25 bp, Homo sapien
ccttatgattctgtttggcaagtca

SEQ ID NO: 5071139 - DNA, 25 bp, Homo sapien
tcataagctgttagccccagggcaa

SEQ ID NO: 5071140 - DNA, 25 bp, Homo sapien
gagacagcaatacagtgaatgagtc

SEQ ID NO: 5071141 - DNA, 25 bp, Homo sapien
gcccctttcagggctctgacgaagg

SEQ ID NO: 5071142 - DNA, 25 bp, Homo sapien
ctgagcagaaatggtccagaggatg

SEQ ID NO: 5071143 - DNA, 25 bp, Homo sapien
gaatgagtcatagagctgagtcaga

SEQ ID NO: 5071144 - DNA, 25 bp, Homo sapien
tgaagtctgtgtctgcacgagaacc

SEQ ID NO: 5071145 - DNA, 25 bp, Homo sapien
gaagtctgtgtctgcacgagaaccc

SEQ ID NO: 5071146 - DNA, 25 bp, Homo sapien
cattactggagcagccataacctac

SEQ ID NO: 5071147 - DNA, 25 bp, Homo sapien
tcattcattactggagcagccataa

SEQ ID NO: 5071148 - DNA, 25 bp, Homo sapien
cattcattactggagcagccataac

SEQ ID NO: 5071149 - DNA, 25 bp, Homo sapien
ttcattactggagcagccataacct

SEQ ID NO: 5071150 - DNA, 25 bp, Homo sapien
ctctccccaggcaccatattcaggg

SEQ ID NO: 5071151 - DNA, 25 bp, Homo sapien
cagggggttcagatcacctgtgggg

SEQ ID NO: 5071152 - DNA, 25 bp, Homo sapien
ggttcagatcacctgtggggtcctt

SEQ ID NO: 5071153 - DNA, 25 bp, Homo sapien
cagatcacctgtggggtccttttca

SEQ ID NO: 5071154 - DNA, 25 bp, Homo sapien
ctgccttctctcttgaggagaaagc

SEQ ID NO: 5071155 - DNA, 25 bp, Homo sapien
tctggggagaccctaactaacatcc

SEQ ID NO: 5071156 - DNA, 25 bp, Homo sapien
ttctctcttgaggagaaagctgtga

SEQ ID NO: 5071157 - DNA, 25 bp, Homo sapien
tgggaccgggcccatacagctgcct

SEQ ID NO: 5071158 - DNA, 25 bp, Homo sapien
taatgcataggtgccagaggtcaga

SEQ ID NO: 5071159 - DNA, 25 bp, Homo sapien
taacagcacgtaaagatggccctca

SEQ ID NO: 5071160 - DNA, 25 bp, Homo sapien
tggagacagccccaataaatgttga

SEQ ID NO: 5071161 - DNA, 25 bp, Homo sapien
tatcagctggagataggctccctaa

SEQ ID NO: 5071162 - DNA, 25 bp, Homo sapien
accgcttagtgcagagatatttgta

SEQ ID NO: 5071163 - DNA, 25 bp, Homo sapien
cctgcctaggcaaccgcttagtgca

SEQ ID NO: 5071164 - DNA, 25 bp, Homo sapien
gagatatttgtagaagaggattttg

SEQ ID NO: 5071165 - DNA, 25 bp, Homo sapien
taggcaaccgcttagtgcagagata

SEQ ID NO: 5071166 - DNA, 25 bp, Homo sapien
gggcaggagcatccatgcactactc

SEQ ID NO: 5071167 - DNA, 25 bp, Homo sapien
gcaggagcatccatgcactactcat

SEQ ID NO: 5071168 - DNA, 25 bp, Homo sapien
ggcaggagcatccatgcactactca

SEQ ID NO: 5071169 - DNA, 25 bp, Homo sapien
cttcatcagatactggcgggaggca

SEQ ID NO: 5071170 - DNA, 25 bp, Homo sapien
tcagatactggcgggaggcaccctc

SEQ ID NO: 5071171 - DNA, 25 bp, Homo sapien
tcatcagatactggcgggaggcacc

SEQ ID NO: 5071172 - DNA, 25 bp, Homo sapien
agatactggcgggaggcaccctcct

SEQ ID NO: 5071173 - DNA, 25 bp, Homo sapien
gatagctggtccaaggatttggact

SEQ ID NO: 5071174 - DNA, 25 bp, Homo sapien
ggatagctggtccaaggatttggac

SEQ ID NO: 5071175 - DNA, 25 bp, Homo sapien
caggtcagcaggttcccggttgaac

SEQ ID NO: 5071176 - DNA, 25 bp, Homo sapien
tcagaatgggtcaagaaagcagcca

SEQ ID NO: 5071177 - DNA, 25 bp, Homo sapien
ggtgttgacatgggactccagggta

SEQ ID NO: 5071178 - DNA, 25 bp, Homo sapien
gcaggttcccggttgaactcaatta

SEQ ID NO: 5071179 - DNA, 25 bp, Homo sapien
gacactctctgatccttctggctgg

SEQ ID NO: 5071180 - DNA, 25 bp, Homo sapien
ggaggaagtttccagatcttctgac

SEQ ID NO: 5071181 - DNA, 25 bp, Homo sapien
ccagatcttctgacactctctgatc

SEQ ID NO: 5071182 - DNA, 25 bp, Homo sapien
ttctgacactctctgatccttctgg

SEQ ID NO: 5071183 - DNA, 25 bp, Homo sapien
atgttccgtgtgccttgagagtcat

SEQ ID NO: 5071184 - DNA, 25 bp, Homo sapien
tgatgttccgtgtgccttgagagtc

SEQ ID NO: 5071185 - DNA, 25 bp, Homo sapien
gatgttccgtgtgccttgagagtca

SEQ ID NO: 5071186 - DNA, 25 bp, Homo sapien
tttgacaaatacagaccgaaccttc

SEQ ID NO: 5071187 - DNA, 25 bp, Homo sapien
gacaaatacagaccgaaccttctct

SEQ ID NO: 5071188 - DNA, 25 bp, Homo sapien
cttctctactaagggactgtgcctt

SEQ ID NO: 5071189 - DNA, 25 bp, Homo sapien
cagaccgaaccttctctactaaggg

SEQ ID NO: 5071190 - DNA, 25 bp, Homo sapien
tcttgcctacagaatcagtgatcct

SEQ ID NO: 5071191 - DNA, 25 bp, Homo sapien
catcttgcttgacttgtgattggga

SEQ ID NO: 5071192 - DNA, 25 bp, Homo sapien
agtgatcctggctccctgacctgtc

SEQ ID NO: 5071193 - DNA, 25 bp, Homo sapien
agcccattgtcacacctacatcttg

SEQ ID NO: 5071194 - DNA, 25 bp, Homo sapien
tttgcttttgtcgtgctggaggttg

SEQ ID NO: 5071195 - DNA, 25 bp, Homo sapien
gcagtctccgtcaccggccaaaagg

SEQ ID NO: 5071196 - DNA, 25 bp, Homo sapien
ggaacctgcctccagtcgtctggct

SEQ ID NO: 5071197 - DNA, 25 bp, Homo sapien
tggctcgttcctcggtttctcagag

SEQ ID NO: 5071198 - DNA, 25 bp, Homo sapien
taggtgggctgcaaattctgaggtc

SEQ ID NO: 5071199 - DNA, 25 bp, Homo sapien
tcagccaagggtaaagaagagcact

SEQ ID NO: 5071200 - DNA, 25 bp, Homo sapien
ggcaattgaatccagacaccgcaga

SEQ ID NO: 5071201 - DNA, 25 bp, Homo sapien
taaggtgcaagtattcgcgctgcag

SEQ ID NO: 5071202 - DNA, 25 bp, Homo sapien
tcttatgcaaagttcatataaatat

SEQ ID NO: 5071203 - DNA, 25 bp, Homo sapien
tgtagacaggaagggttggaaaaga

SEQ ID NO: 5071204 - DNA, 25 bp, Homo sapien
catataaatatcagtaataaccaaa

SEQ ID NO: 5071205 - DNA, 25 bp, Homo sapien
gaggtgtcactcaagtaactattcc

SEQ ID NO: 5071206 - DNA, 25 bp, Homo sapien
catataaggatgtactgggagcagc

SEQ ID NO: 5071207 - DNA, 25 bp, Homo sapien
ggattcccgtagtgagctccagaca

SEQ ID NO: 5071208 - DNA, 25 bp, Homo sapien
aaatacagcacagcccaatggtttg

SEQ ID NO: 5071209 - DNA, 25 bp, Homo sapien
tgggagcagctagactaacaaatcc

SEQ ID NO: 5071210 - DNA, 25 bp, Homo sapien
cataatgcaaaagagtcagtttttc

SEQ ID NO: 5071211 - DNA, 25 bp, Homo sapien
aacctgtcccagcttcgctcaccat

SEQ ID NO: 5071212 - DNA, 25 bp, Homo sapien
ttggtgttgaagcagaaacctgtcc

SEQ ID NO: 5071213 - DNA, 25 bp, Homo sapien
actggatcataatgcaaaagagtca

SEQ ID NO: 5071214 - DNA, 25 bp, Homo sapien
atttgaacaccataaaaacagcaag

SEQ ID NO: 5071215 - DNA, 25 bp, Homo sapien
aatttgaacaccataaaaacagcaa

SEQ ID NO: 5071216 - DNA, 25 bp, Homo sapien
catatgaggaatcatcctgaaattc

SEQ ID NO: 5071217 - DNA, 25 bp, Homo sapien
tatgaggaatcatcctgaaattcag

SEQ ID NO: 5071218 - DNA, 25 bp, Homo sapien
caccatatgaggaatcatcctgaaa

SEQ ID NO: 5071219 - DNA, 25 bp, Homo sapien
tccaccatatgaggaatcatcctga

SEQ ID NO: 5071220 - DNA, 25 bp, Homo sapien
gattgatcctcctaaaactccaagg

SEQ ID NO: 5071221 - DNA, 25 bp, Homo sapien
taaaactactcaattgatgggcagc

SEQ ID NO: 5071222 - DNA, 25 bp, Homo sapien
agtacatcatgaggtgcccacacaa

SEQ ID NO: 5071223 - DNA, 25 bp, Homo sapien
acaaatgtccagtaaaccccagagg

SEQ ID NO: 5071224 - DNA, 25 bp, Homo sapien
gagctggactccagaaagagagcag

SEQ ID NO: 5071225 - DNA, 25 bp, Homo sapien
taatgtccactcttgtaggaggtaa

SEQ ID NO: 5071226 - DNA, 25 bp, Homo sapien
cctctacttcccagagatgggttaa

SEQ ID NO: 5071227 - DNA, 25 bp, Homo sapien
tggaagagtaatagacactaaacct

SEQ ID NO: 5071228 - DNA, 25 bp, Homo sapien
aatacatatcagaccataagccctc

SEQ ID NO: 5071229 - DNA, 25 bp, Homo sapien
gatatgaagatggagctgatttgca

SEQ ID NO: 5071230 - DNA, 25 bp, Homo sapien
ggctatagggccactagctaatcag

SEQ ID NO: 5071231 - DNA, 25 bp, Homo sapien
gcagcatccttggtatgccacaagt

SEQ ID NO: 5071232 - DNA, 25 bp, Homo sapien
tcttttccacgaagaggactctttg

SEQ ID NO: 5071233 - DNA, 25 bp, Homo sapien
tccacgaagaggactctttgtttca

SEQ ID NO: 5071234 - DNA, 25 bp, Homo sapien
ttccacgaagaggactctttgtttc

SEQ ID NO: 5071235 - DNA, 25 bp, Homo sapien
cttttccacgaagaggactctttgt

SEQ ID NO: 5071236 - DNA, 25 bp, Homo sapien
atttctgaatcagtatccccgccct

SEQ ID NO: 5071237 - DNA, 25 bp, Homo sapien
aggatttctgaatcagtatccccgc

SEQ ID NO: 5071238 - DNA, 25 bp, Homo sapien
ctgaatcagtatccccgccctcagt

SEQ ID NO: 5071239 - DNA, 25 bp, Homo sapien
tctgaatcagtatccccgccctcag

SEQ ID NO: 5071240 - DNA, 25 bp, Homo sapien
gtgatgcaatgatatctgtcctaat

SEQ ID NO: 5071241 - DNA, 25 bp, Homo sapien
aaatgtgatgcaatgatatctgtcc

SEQ ID NO: 5071242 - DNA, 25 bp, Homo sapien
gataaataaatgtgatgcaatgata

SEQ ID NO: 5071243 - DNA, 25 bp, Homo sapien
tgatatctgtcctaatatgaagaac

SEQ ID NO: 5071244 - DNA, 25 bp, Homo sapien
acttcagcttagtgttgtcaacgcc

SEQ ID NO: 5071245 - DNA, 25 bp, Homo sapien
tcaacgcctctggttttgtaaggga

SEQ ID NO: 5071246 - DNA, 25 bp, Homo sapien
taatgccccatgtgcaccatatggc

SEQ ID NO: 5071247 - DNA, 25 bp, Homo sapien
gacaacagtgtctagagtcagagca

SEQ ID NO: 5071248 - DNA, 25 bp, Homo sapien
tcagtaagaagtcatgttgatcata

SEQ ID NO: 5071249 - DNA, 25 bp, Homo sapien
gaaaatgacatttcacctctgtggt

SEQ ID NO: 5071250 - DNA, 25 bp, Homo sapien
ccagggttaacaccatcagtaagaa

SEQ ID NO: 5071251 - DNA, 25 bp, Homo sapien
catatgtgcccttaatatgatgtga

SEQ ID NO: 5071252 - DNA, 25 bp, Homo sapien
gacaaacacgagcaggtattgctct

SEQ ID NO: 5071253 - DNA, 25 bp, Homo sapien
tttctcaggacgttttctgtttcca

SEQ ID NO: 5071254 - DNA, 25 bp, Homo sapien
gctctgtccaaaggcacaggtccac

SEQ ID NO: 5071255 - DNA, 25 bp, Homo sapien
gcaggtattgctctgtccaaaggca

SEQ ID NO: 5071256 - DNA, 25 bp, Homo sapien
cttggagactttcatcacttggggg

SEQ ID NO: 5071257 - DNA, 25 bp, Homo sapien
ttttcccagctacacttcataccca

SEQ ID NO: 5071258 - DNA, 25 bp, Homo sapien
tggagactttcatcacttgggggtt

SEQ ID NO: 5071259 - DNA, 25 bp, Homo sapien
ggtttttcccagctacacttcatac

SEQ ID NO: 5071260 - DNA, 25 bp, Homo sapien
tgccccaggagtatccctagctgag

SEQ ID NO: 5071261 - DNA, 25 bp, Homo sapien
cagtggtacttgatctgtgagaatc

SEQ ID NO: 5071262 - DNA, 25 bp, Homo sapien
ggctgtgagcttatcttcagtggta

SEQ ID NO: 5071263 - DNA, 25 bp, Homo sapien
tgttttataattgcgggctgtgagc

SEQ ID NO: 5071264 - DNA, 25 bp, Homo sapien
accagggccaaatctaaggctgttt

SEQ ID NO: 5071265 - DNA, 25 bp, Homo sapien
actttgaggaattgaaccagggcca

SEQ ID NO: 5071266 - DNA, 25 bp, Homo sapien
ttgaaccagggccaaatctaaggct

SEQ ID NO: 5071267 - DNA, 25 bp, Homo sapien
catcttcactttgaggaattgaacc

SEQ ID NO: 5071268 - DNA, 25 bp, Homo sapien
tgcttggtcttcagttgatggatta

SEQ ID NO: 5071269 - DNA, 25 bp, Homo sapien
ggtatttggtagttcacgtacttca

SEQ ID NO: 5071270 - DNA, 25 bp, Homo sapien
tcggccaataggtgatgcctcatgt

SEQ ID NO: 5071271 - DNA, 25 bp, Homo sapien
tgtaaaagggatcggccaataggtg

SEQ ID NO: 5071272 - DNA, 25 bp, Homo sapien
ttgcctcctagttgagtggctgcac

SEQ ID NO: 5071273 - DNA, 25 bp, Homo sapien
aatgatgtgagttccgcccaggaca

SEQ ID NO: 5071274 - DNA, 25 bp, Homo sapien
tacagagtcttcactcttgacgacg

SEQ ID NO: 5071275 - DNA, 25 bp, Homo sapien
tgttgtgtcacatgatgctgtccag

SEQ ID NO: 5071276 - DNA, 25 bp, Homo sapien
attcacaaatgttgatgatggtgcg

SEQ ID NO: 5071277 - DNA, 25 bp, Homo sapien
tgatggtgcgaactaggacagtagt

SEQ ID NO: 5071278 - DNA, 25 bp, Homo sapien
cacttagtgctaaagtcagatttaa

SEQ ID NO: 5071279 - DNA, 25 bp, Homo sapien
tcttgaagacaggaagacctatttg

SEQ ID NO: 5071280 - DNA, 25 bp, Homo sapien
gttgacctctatgaaaacgcagaag

SEQ ID NO: 5071281 - DNA, 25 bp, Homo sapien
gggtctgacctcctagggcactaca

SEQ ID NO: 5071282 - DNA, 25 bp, Homo sapien
tccaacccggagatataaatttcag

SEQ ID NO: 5071283 - DNA, 25 bp, Homo sapien
gagacgtgcttaatacaaacctatg

SEQ ID NO: 5071284 - DNA, 25 bp, Homo sapien
taataggccagggtttagtgaaagc

SEQ ID NO: 5071285 - DNA, 25 bp, Homo sapien
ccagttactcagtctgcggctcggg

SEQ ID NO: 5071286 - DNA, 25 bp, Homo sapien
tctccagggatagacagtgctagct

SEQ ID NO: 5071287 - DNA, 25 bp, Homo sapien
gctatgcgcccagtggagcttttgg

SEQ ID NO: 5071288 - DNA, 25 bp, Homo sapien
gccatatcaggagggccctgttacg

SEQ ID NO: 5071289 - DNA, 25 bp, Homo sapien
tagtccgatcggtaaccggcgacta

SEQ ID NO: 5071290 - DNA, 25 bp, Homo sapien
tgaggctgtgcaccgagactattcc

SEQ ID NO: 5071291 - DNA, 25 bp, Homo sapien
acgaggagcgcggagtctcgccata

SEQ ID NO: 5071292 - DNA, 25 bp, Homo sapien
ctatattaccgaattgttcttctgt

SEQ ID NO: 5071293 - DNA, 25 bp, Homo sapien
aaacagtttgtagcatccagtccca

SEQ ID NO: 5071294 - DNA, 25 bp, Homo sapien
tccggaccacgctagatatgaaagg

SEQ ID NO: 5071295 - DNA, 25 bp, Homo sapien
tattcggttcaaggccacttctggg

SEQ ID NO: 5071296 - DNA, 25 bp, Homo sapien
ggagagcattggagatattcggttc

SEQ ID NO: 5071297 - DNA, 25 bp, Homo sapien
gatgagatgatgacttggtgggttt

SEQ ID NO: 5071298 - DNA, 25 bp, Homo sapien
atgagatgatgacttggtgggtttc

SEQ ID NO: 5071299 - DNA, 25 bp, Homo sapien
gagatgatgacttggtgggtttctg

SEQ ID NO: 5071300 - DNA, 25 bp, Homo sapien
cagcttcatttgtggatgccatatc

SEQ ID NO: 5071301 - DNA, 25 bp, Homo sapien
cttgccctagtgtccaatacctatg

SEQ ID NO: 5071302 - DNA, 25 bp, Homo sapien
aagaaggtaccttgagcatggcccc

SEQ ID NO: 5071303 - DNA, 25 bp, Homo sapien
tcaggacgccctgtaccaggtcagt

SEQ ID NO: 5071304 - DNA, 25 bp, Homo sapien
agagctttgatctcaccctgattag

SEQ ID NO: 5071305 - DNA, 25 bp, Homo sapien
tcaagggaatgtactagcagagctt

SEQ ID NO: 5071306 - DNA, 25 bp, Homo sapien
cttggcatgctccaatagctctgat

SEQ ID NO: 5071307 - DNA, 25 bp, Homo sapien
ccaatagctctgattctcaagggaa

SEQ ID NO: 5071308 - DNA, 25 bp, Homo sapien
tggcacacaggaagtacctgaaagc

SEQ ID NO: 5071309 - DNA, 25 bp, Homo sapien
cacacaggaagtacctgaaagctat

SEQ ID NO: 5071310 - DNA, 25 bp, Homo sapien
caggaagtacctgaaagctatttca

SEQ ID NO: 5071311 - DNA, 25 bp, Homo sapien
gaagtacctgaaagctatttcataa

SEQ ID NO: 5071312 - DNA, 25 bp, Homo sapien
tgatagtgacgtttgtgctaaacca

SEQ ID NO: 5071313 - DNA, 25 bp, Homo sapien
ggcatgtgtcctacatagcttcctg

SEQ ID NO: 5071314 - DNA, 25 bp, Homo sapien
tgtgtcctacatagcttcctgtttt

SEQ ID NO: 5071315 - DNA, 25 bp, Homo sapien
accatttggcatgtgtcctacatag

SEQ ID NO: 5071316 - DNA, 25 bp, Homo sapien
cacactcaggcgcatgagagcaaga

SEQ ID NO: 5071317 - DNA, 25 bp, Homo sapien
cccacactcaggcgcatgagagcaa

SEQ ID NO: 5071318 - DNA, 25 bp, Homo sapien
cactcaggcgcatgagagcaagaat

SEQ ID NO: 5071319 - DNA, 25 bp, Homo sapien
ctggcagataaggcccacactcagg

SEQ ID NO: 5071320 - DNA, 25 bp, Homo sapien
aacattcacttcacagtcttcagtg

SEQ ID NO: 5071321 - DNA, 25 bp, Homo sapien
tcttcagtgaggagacagtgttctg

SEQ ID NO: 5071322 - DNA, 25 bp, Homo sapien
gaggagacagtgttctgtgatgtgg

SEQ ID NO: 5071323 - DNA, 25 bp, Homo sapien
tgtgggagttgagcagagtgtagcc

SEQ ID NO: 5071324 - DNA, 25 bp, Homo sapien
tagcctttttctggtaccagatggt

SEQ ID NO: 5071325 - DNA, 25 bp, Homo sapien
tagatttggcacaccataactttca

SEQ ID NO: 5071326 - DNA, 25 bp, Homo sapien
ctttccttccacaaaggttcagtgc

SEQ ID NO: 5071327 - DNA, 25 bp, Homo sapien
cttccacaaaggttcagtgcttcct

SEQ ID NO: 5071328 - DNA, 25 bp, Homo sapien
taatgtctctccagcatatggtatg

SEQ ID NO: 5071329 - DNA, 25 bp, Homo sapien
ttaaatcggtcacagttgggcccag

SEQ ID NO: 5071330 - DNA, 25 bp, Homo sapien
actttaatgtctctccagcatatgg

SEQ ID NO: 5071331 - DNA, 25 bp, Homo sapien
gtatgtgcagtttaaatcggtcaca

SEQ ID NO: 5071332 - DNA, 25 bp, Homo sapien
taggagataacaactaacagccgga

SEQ ID NO: 5071333 - DNA, 25 bp, Homo sapien
cacataaaaattaccgggcatgcct

SEQ ID NO: 5071334 - DNA, 25 bp, Homo sapien
taaatcagtgacaagtcgtggcgca

SEQ ID NO: 5071335 - DNA, 25 bp, Homo sapien
tattgagtattacgtaaaagccgcc

SEQ ID NO: 5071336 - DNA, 25 bp, Homo sapien
gtgagctataatgcactccaggctg

SEQ ID NO: 5071337 - DNA, 25 bp, Homo sapien
tcacttgagccagtgaggtcagagc

SEQ ID NO: 5071338 - DNA, 25 bp, Homo sapien
gatcacttgagccagtgaggtcaga

SEQ ID NO: 5071339 - DNA, 25 bp, Homo sapien
cagtgagctataatgcactccaggc

SEQ ID NO: 5071340 - DNA, 25 bp, Homo sapien
tcaaaatgtatggtatgggcaaggt

SEQ ID NO: 5071341 - DNA, 25 bp, Homo sapien
tcacaacggccagcttttggaccta

SEQ ID NO: 5071342 - DNA, 25 bp, Homo sapien
aaaaatgccaacagctatagtcaca

SEQ ID NO: 5071343 - DNA, 25 bp, Homo sapien
cctagcggccaaggttcaaaatgta

SEQ ID NO: 5071344 - DNA, 25 bp, Homo sapien
ggtatttgggaagtataatgggcaa

SEQ ID NO: 5071345 - DNA, 25 bp, Homo sapien
acttggcttgttgttagctgagctc

SEQ ID NO: 5071346 - DNA, 25 bp, Homo sapien
ctgagctctaactgggaggctggaa

SEQ ID NO: 5071347 - DNA, 25 bp, Homo sapien
tgtcctgctaaagccaaaacagtgt

SEQ ID NO: 5071348 - DNA, 25 bp, Homo sapien
ttccatccccagttcttttagagta

SEQ ID NO: 5071349 - DNA, 25 bp, Homo sapien
cttcttcttccatccccagttcttt

SEQ ID NO: 5071350 - DNA, 25 bp, Homo sapien
gagtatgattatcagcaattatctg

SEQ ID NO: 5071351 - DNA, 25 bp, Homo sapien
ttcttccatccccagttcttttaga

SEQ ID NO: 5071352 - DNA, 25 bp, Homo sapien
atttggagttcaccaaatagtgagt

SEQ ID NO: 5071353 - DNA, 25 bp, Homo sapien
ttggagttcaccaaatagtgagtca

SEQ ID NO: 5071354 - DNA, 25 bp, Homo sapien
tttggagttcaccaaatagtgagtc

SEQ ID NO: 5071355 - DNA, 25 bp, Homo sapien
gagcccactgaatgccataaatgat

SEQ ID NO: 5071356 - DNA, 25 bp, Homo sapien
agccacgagcccactgaatgccata

SEQ ID NO: 5071357 - DNA, 25 bp, Homo sapien
gaatgccataaatgattcacaggct

SEQ ID NO: 5071358 - DNA, 25 bp, Homo sapien
tgaatgccataaatgattcacaggc

SEQ ID NO: 5071359 - DNA, 25 bp, Homo sapien
aaatcacatgtttgctggcacacac

SEQ ID NO: 5071360 - DNA, 25 bp, Homo sapien
aaagcccatcgaaggtcccagagca

SEQ ID NO: 5071361 - DNA, 25 bp, Homo sapien
tcccagagcactacttgaccaaaaa

SEQ ID NO: 5071362 - DNA, 25 bp, Homo sapien
tgaccaaaaatcacatgtttgctgg

SEQ ID NO: 5071363 - DNA, 25 bp, Homo sapien
cgtggcagaaggcaaggcggagcaa

SEQ ID NO: 5071364 - DNA, 25 bp, Homo sapien
gaagcctcacacaatcgtggcagaa

SEQ ID NO: 5071365 - DNA, 25 bp, Homo sapien
tggggaagcctcacacaatcgtggc

SEQ ID NO: 5071366 - DNA, 25 bp, Homo sapien
gggaagcctcacacaatcgtggcag

SEQ ID NO: 5071367 - DNA, 25 bp, Homo sapien
ggagagcaggcacatcacaagatga

SEQ ID NO: 5071368 - DNA, 25 bp, Homo sapien
tgaagggagagcaggcacatcacaa

SEQ ID NO: 5071369 - DNA, 25 bp, Homo sapien
aagggagagcaggcacatcacaaga

SEQ ID NO: 5071370 - DNA, 25 bp, Homo sapien
ggcaggaggtgaagggagagcaggc

SEQ ID NO: 5071371 - DNA, 25 bp, Homo sapien
tgcttctggcaaagacctcagcaag

SEQ ID NO: 5071372 - DNA, 25 bp, Homo sapien
gcatctgcttctggcaaagacctca

SEQ ID NO: 5071373 - DNA, 25 bp, Homo sapien
tctgcttctggcaaagacctcagca

SEQ ID NO: 5071374 - DNA, 25 bp, Homo sapien
atctgcttctggcaaagacctcagc

SEQ ID NO: 5071375 - DNA, 25 bp, Homo sapien
gaatcagctcttatcattatgctaa

SEQ ID NO: 5071376 - DNA, 25 bp, Homo sapien
tcagctcttatcattatgctaatac

SEQ ID NO: 5071377 - DNA, 25 bp, Homo sapien
cccaagaatcagctcttatcattat

SEQ ID NO: 5071378 - DNA, 25 bp, Homo sapien
caagaatcagctcttatcattatgc

SEQ ID NO: 5071379 - DNA, 25 bp, Homo sapien
ttcttttctgaattcttctgtagct

SEQ ID NO: 5071380 - DNA, 25 bp, Homo sapien
cttttctgaattcttctgtagctcc

SEQ ID NO: 5071381 - DNA, 25 bp, Homo sapien
ttttctgaattcttctgtagctccc

SEQ ID NO: 5071382 - DNA, 25 bp, Homo sapien
ttctgaattcttctgtagctccctt

SEQ ID NO: 5071383 - DNA, 25 bp, Homo sapien
ggagaaaagtagaagcagccacatc

SEQ ID NO: 5071384 - DNA, 25 bp, Homo sapien
gatggcatgcctagcagtgtccagc

SEQ ID NO: 5071385 - DNA, 25 bp, Homo sapien
tattgtgacgataaaaagagatggc

SEQ ID NO: 5071386 - DNA, 25 bp, Homo sapien
taagcctttacgaagactgattctg

SEQ ID NO: 5071387 - DNA, 25 bp, Homo sapien
gcagttctgggtattgggcattgaa

SEQ ID NO: 5071388 - DNA, 25 bp, Homo sapien
ataaaatcgggaggcagttctgggt

SEQ ID NO: 5071389 - DNA, 25 bp, Homo sapien
aaaatcgggaggcagttctgggtat

SEQ ID NO: 5071390 - DNA, 25 bp, Homo sapien
tattgggcattgaaaatgatatccc

SEQ ID NO: 5071391 - DNA, 25 bp, Homo sapien
cattcaagcaagtctgcagtactca

SEQ ID NO: 5071392 - DNA, 25 bp, Homo sapien
tcattcaagcaagtctgcagtactc

SEQ ID NO: 5071393 - DNA, 25 bp, Homo sapien
attcaagcaagtctgcagtactcac

SEQ ID NO: 5071394 - DNA, 25 bp, Homo sapien
aaccctgactggattaaagtgacca

SEQ ID NO: 5071395 - DNA, 25 bp, Homo sapien
ctctctctggaagaagactgcgtta

SEQ ID NO: 5071396 - DNA, 25 bp, Homo sapien
tctgaagtatgttgtgggccaaggc

SEQ ID NO: 5071397 - DNA, 25 bp, Homo sapien
tgaagagcactatcccagaacagaa

SEQ ID NO: 5071398 - DNA, 25 bp, Homo sapien
cagctcctctcaagactttgatgaa

SEQ ID NO: 5071399 - DNA, 25 bp, Homo sapien
ctttgatgaattctggcgtagccca

SEQ ID NO: 5071400 - DNA, 25 bp, Homo sapien
gaggaaccattggagcttttggcag

SEQ ID NO: 5071401 - DNA, 25 bp, Homo sapien
gaattctggcgtagcccaggtcaga

SEQ ID NO: 5071402 - DNA, 25 bp, Homo sapien
gggacatttgcaaatttagggtaca

SEQ ID NO: 5071403 - DNA, 25 bp, Homo sapien
gacatttgcaaatttagggtacagg

SEQ ID NO: 5071404 - DNA, 25 bp, Homo sapien
catttgcaaatttagggtacaggag

SEQ ID NO: 5071405 - DNA, 25 bp, Homo sapien
atttgcaaatttagggtacaggagg

SEQ ID NO: 5071406 - DNA, 25 bp, Homo sapien
agatcagcactctcaataagaacaa

SEQ ID NO: 5071407 - DNA, 25 bp, Homo sapien
tccaggtgggacgaagtagctctgt

SEQ ID NO: 5071408 - DNA, 25 bp, Homo sapien
tattcttaccaaggtgtaatacatg

SEQ ID NO: 5071409 - DNA, 25 bp, Homo sapien
tgtattttatgatctgctgaagtct

SEQ ID NO: 5071410 - DNA, 25 bp, Homo sapien
attgtttgaagaagtgtagcacccc

SEQ ID NO: 5071411 - DNA, 25 bp, Homo sapien
taaaactattcgcaccccaagctag

SEQ ID NO: 5071412 - DNA, 25 bp, Homo sapien
taagagtaatatcagcgtgagcaga

SEQ ID NO: 5071413 - DNA, 25 bp, Homo sapien
tactaggagatactaggaagagcct

SEQ ID NO: 5071414 - DNA, 25 bp, Homo sapien
aatcactgattgtctgggtaataca

SEQ ID NO: 5071415 - DNA, 25 bp, Homo sapien
acattatgggttattcaaaatgggc

SEQ ID NO: 5071416 - DNA, 25 bp, Homo sapien
gaaacctctcctatttattgcaccc

SEQ ID NO: 5071417 - DNA, 25 bp, Homo sapien
gattataaactatgggaggacagga

SEQ ID NO: 5071418 - DNA, 25 bp, Homo sapien
tcacccagttgctaggtaagccaaa

SEQ ID NO: 5071419 - DNA, 25 bp, Homo sapien
cagaggaattctagggcatgttcaa

SEQ ID NO: 5071420 - DNA, 25 bp, Homo sapien
tctcaattttgtgccagggtgtcag

SEQ ID NO: 5071421 - DNA, 25 bp, Homo sapien
caagagatgacctactggtggaatc

SEQ ID NO: 5071422 - DNA, 25 bp, Homo sapien
tttagctagcagaatagtgtgcctt

SEQ ID NO: 5071423 - DNA, 25 bp, Homo sapien
ttagctagcagaatagtgtgccttt

SEQ ID NO: 5071424 - DNA, 25 bp, Homo sapien
ctttagctagcagaatagtgtgcct

SEQ ID NO: 5071425 - DNA, 25 bp, Homo sapien
gaacaatattaagtctccctccagc

SEQ ID NO: 5071426 - DNA, 25 bp, Homo sapien
gcccaactctctagcatatcgataa

SEQ ID NO: 5071427 - DNA, 25 bp, Homo sapien
taatatatgcacacggtaaaacgaa

SEQ ID NO: 5071428 - DNA, 25 bp, Homo sapien
caagcccattagtgttaaggaagta

SEQ ID NO: 5071429 - DNA, 25 bp, Homo sapien
tacactccatcacgtacctatgtgc

SEQ ID NO: 5071430 - DNA, 25 bp, Homo sapien
tttctctctcgtaaatacactccat

SEQ ID NO: 5071431 - DNA, 25 bp, Homo sapien
tgctccaagttcatgtgacccctca

SEQ ID NO: 5071432 - DNA, 25 bp, Homo sapien
gctcccctgtctaggctgcctgaca

SEQ ID NO: 5071433 - DNA, 25 bp, Homo sapien
ttagttatttggcaagttacaggcc

SEQ ID NO: 5071434 - DNA, 25 bp, Homo sapien
tggcaacataccttaccaacttgaa

SEQ ID NO: 5071435 - DNA, 25 bp, Homo sapien
ggatataacagcaccgtatagaact

SEQ ID NO: 5071436 - DNA, 25 bp, Homo sapien
taccagtcctcattccctactagag

SEQ ID NO: 5071437 - DNA, 25 bp, Homo sapien
tcccggaggcggctacattggaatt

SEQ ID NO: 5071438 - DNA, 25 bp, Homo sapien
gacattcaggatttgaaggattcca

SEQ ID NO: 5071439 - DNA, 25 bp, Homo sapien
tccttcaccacaagtaagagacatt

SEQ ID NO: 5071440 - DNA, 25 bp, Homo sapien
ttggtgatattgttgcacaagttcc

SEQ ID NO: 5071441 - DNA, 25 bp, Homo sapien
tgtggctcctccagtaatgtctggt

SEQ ID NO: 5071442 - DNA, 25 bp, Homo sapien
catgttctctccatactgtggctcc

SEQ ID NO: 5071443 - DNA, 25 bp, Homo sapien
ttccatgttctctccatactgtggc

SEQ ID NO: 5071444 - DNA, 25 bp, Homo sapien
tttcccagcataaatttccatgttc

SEQ ID NO: 5071445 - DNA, 25 bp, Homo sapien
tattatggatgaagtcatctttttt

SEQ ID NO: 5071446 - DNA, 25 bp, Homo sapien
tattttattatggatgaagtcatct

SEQ ID NO: 5071447 - DNA, 25 bp, Homo sapien
gattattttattatggatgaagtca

SEQ ID NO: 5071448 - DNA, 25 bp, Homo sapien
tttattatggatgaagtcatctttt

SEQ ID NO: 5071449 - DNA, 25 bp, Homo sapien
gacacactggttcttctgatacaca

SEQ ID NO: 5071450 - DNA, 25 bp, Homo sapien
gagagagattgacctaagcgagcat

SEQ ID NO: 5071451 - DNA, 25 bp, Homo sapien
gaactggcggctttacaagaagaga

SEQ ID NO: 5071452 - DNA, 25 bp, Homo sapien
tcaagaaggctcttatcagatgcag

SEQ ID NO: 5071453 - DNA, 25 bp, Homo sapien
ctagagtcacacaaaaagaacgggt

SEQ ID NO: 5071454 - DNA, 25 bp, Homo sapien
cattgaagcggcacttattgagcac

SEQ ID NO: 5071455 - DNA, 25 bp, Homo sapien
tatctccaggaaagtgacacatgga

SEQ ID NO: 5071456 - DNA, 25 bp, Homo sapien
caaggtccagacaacaatgtagtta

SEQ ID NO: 5071457 - DNA, 25 bp, Homo sapien
ccgacattaaggtaaacactccctg

SEQ ID NO: 5071458 - DNA, 25 bp, Homo sapien
tcacatgtttgactagaagctcctg

SEQ ID NO: 5071459 - DNA, 25 bp, Homo sapien
taatgcaaagtacaaatgtgagcca

SEQ ID NO: 5071460 - DNA, 25 bp, Homo sapien
tgtattggacagcatagttctagac

SEQ ID NO: 5071461 - DNA, 25 bp, Homo sapien
gaaattgactgctcttaccacttag

SEQ ID NO: 5071462 - DNA, 25 bp, Homo sapien
ggtgacaaactggtaaggctgattc

SEQ ID NO: 5071463 - DNA, 25 bp, Homo sapien
aatggactctgaaaaccagtgagcc

SEQ ID NO: 5071464 - DNA, 25 bp, Homo sapien
caagttatagtacgttggcaagcaa

SEQ ID NO: 5071465 - DNA, 25 bp, Homo sapien
tgcagctcagcctggtattttgaca

SEQ ID NO: 5071466 - DNA, 25 bp, Homo sapien
cctgtctcactgcaagtgtgcagct

SEQ ID NO: 5071467 - DNA, 25 bp, Homo sapien
tcactgcaagtgtgcagctcagcct

SEQ ID NO: 5071468 - DNA, 25 bp, Homo sapien
gcagctcagcctggtattttgacat

SEQ ID NO: 5071469 - DNA, 25 bp, Homo sapien
aaggtatgtggggatattgctgaaa

SEQ ID NO: 5071470 - DNA, 25 bp, Homo sapien
ggtatgtggggatattgctgaaatc

SEQ ID NO: 5071471 - DNA, 25 bp, Homo sapien
aaatctacgggcagcttcaaaagga

SEQ ID NO: 5071472 - DNA, 25 bp, Homo sapien
caaaaggaaacgagctgaaaattca

SEQ ID NO: 5071473 - DNA, 25 bp, Homo sapien
ctgctgattgatgaaaatggagtaa

SEQ ID NO: 5071474 - DNA, 25 bp, Homo sapien
tgctgattgatgaaaatggagtaat

SEQ ID NO: 5071475 - DNA, 25 bp, Homo sapien
gctgattgatgaaaatggagtaatg

SEQ ID NO: 5071476 - DNA, 25 bp, Homo sapien
tgctttattgctctggccaggcccc

SEQ ID NO: 5071477 - DNA, 25 bp, Homo sapien
gatgtacttctatcaggttgaggaa

SEQ ID NO: 5071478 - DNA, 25 bp, Homo sapien
gcacctgtgtttatgagacagatgc

SEQ ID NO: 5071479 - DNA, 25 bp, Homo sapien
tcagcctaccttacatccctgggat

SEQ ID NO: 5071480 - DNA, 25 bp, Homo sapien
ttttttctagaccatcatcacactg

SEQ ID NO: 5071481 - DNA, 25 bp, Homo sapien
gaattgtgccagatctatatgccaa

SEQ ID NO: 5071482 - DNA, 25 bp, Homo sapien
aaaatcaattgtccacgtatgtgtg

SEQ ID NO: 5071483 - DNA, 25 bp, Homo sapien
tatcttacgagattaagtcttccag

SEQ ID NO: 5071484 - DNA, 25 bp, Homo sapien
acagccttaacaaggcttctaagtc

SEQ ID NO: 5071485 - DNA, 25 bp, Homo sapien
taatgacgtaattgtttagaggtgc

SEQ ID NO: 5071486 - DNA, 25 bp, Homo sapien
tgtttagaggtgctaataaagtttc

SEQ ID NO: 5071487 - DNA, 25 bp, Homo sapien
taagtcttgccctttaatgacgtaa

SEQ ID NO: 5071488 - DNA, 25 bp, Homo sapien
aagttgaactttcagctgtgtgccc

SEQ ID NO: 5071489 - DNA, 25 bp, Homo sapien
cagagcagtctgaccggatcaggaa

SEQ ID NO: 5071490 - DNA, 25 bp, Homo sapien
tgtgtgccctcaagtaaatggttct

SEQ ID NO: 5071491 - DNA, 25 bp, Homo sapien
taatacgtggcattaaagaggcacc

SEQ ID NO: 5071492 - DNA, 25 bp, Homo sapien
cagaggcgatattaaggagaaccac

SEQ ID NO: 5071493 - DNA, 25 bp, Homo sapien
caaggagtggctcctgtcacggcca

SEQ ID NO: 5071494 - DNA, 25 bp, Homo sapien
tcaggcttagaataacagaggcgat

SEQ ID NO: 5071495 - DNA, 25 bp, Homo sapien
gagcacagttctttacggcattata

SEQ ID NO: 5071496 - DNA, 25 bp, Homo sapien
gaacagaataattgcagaagcccaa

SEQ ID NO: 5071497 - DNA, 25 bp, Homo sapien
acctgtagctccagagcagtcacct

SEQ ID NO: 5071498 - DNA, 25 bp, Homo sapien
ccaagggccatcttcgtccacacct

SEQ ID NO: 5071499 - DNA, 25 bp, Homo sapien
aagggccatcttcgtccacacctgt

SEQ ID NO: 5071500 - DNA, 25 bp, Homo sapien
gattaatctgaacacggaaatggaa

SEQ ID NO: 5071501 - DNA, 25 bp, Homo sapien
cactctgtcatttggctatgtcatg

SEQ ID NO: 5071502 - DNA, 25 bp, Homo sapien
caaggatttacaaggaactacatgc

SEQ ID NO: 5071503 - DNA, 25 bp, Homo sapien
ttgtggcaaatacaagcactctgtc

SEQ ID NO: 5071504 - DNA, 25 bp, Homo sapien
tgaagactttcctgttaggccccat

SEQ ID NO: 5071505 - DNA, 25 bp, Homo sapien
ctcggttgtgaggactactagattc

SEQ ID NO: 5071506 - DNA, 25 bp, Homo sapien
gattcaaaccaatctagccctgaac

SEQ ID NO: 5071507 - DNA, 25 bp, Homo sapien
aatgtatgacaataggtttccaagc

SEQ ID NO: 5071508 - DNA, 25 bp, Homo sapien
tatcgggaaatagcaaacctgaatg

SEQ ID NO: 5071509 - DNA, 25 bp, Homo sapien
tataattcatcacgcaaagagggac

SEQ ID NO: 5071510 - DNA, 25 bp, Homo sapien
tggacaacttacaacaacagagtga

SEQ ID NO: 5071511 - DNA, 25 bp, Homo sapien
tgtactgcataactagacacaagga

SEQ ID NO: 5071512 - DNA, 25 bp, Homo sapien
caaaacatctgctctacaaaggcac

SEQ ID NO: 5071513 - DNA, 25 bp, Homo sapien
tatgagtcagatggctgatagcctt

SEQ ID NO: 5071514 - DNA, 25 bp, Homo sapien
caaaggcacaactgctccaatccat

SEQ ID NO: 5071515 - DNA, 25 bp, Homo sapien
tttattatgagtcagatggctgata

SEQ ID NO: 5071516 - DNA, 25 bp, Homo sapien
cgtacggtaaagcaataacggccat

SEQ ID NO: 5071517 - DNA, 25 bp, Homo sapien
cacacgtacggtaaagcaataacgg

SEQ ID NO: 5071518 - DNA, 25 bp, Homo sapien
ctgacacacgtacggtaaagcaata

SEQ ID NO: 5071519 - DNA, 25 bp, Homo sapien
gcactgacacacgtacggtaaagca

SEQ ID NO: 5071520 - DNA, 25 bp, Homo sapien
tcctaacatcttattagtgtcaagc

SEQ ID NO: 5071521 - DNA, 25 bp, Homo sapien
taacatcttattagtgtcaagctca

SEQ ID NO: 5071522 - DNA, 25 bp, Homo sapien
catcttattagtgtcaagctcacag

SEQ ID NO: 5071523 - DNA, 25 bp, Homo sapien
acatcttattagtgtcaagctcaca

SEQ ID NO: 5071524 - DNA, 25 bp, Homo sapien
aaacaagaagtgaaaacacaacatc

SEQ ID NO: 5071525 - DNA, 25 bp, Homo sapien
agaagtgaaaacacaacatcagcac

SEQ ID NO: 5071526 - DNA, 25 bp, Homo sapien
acaagaagtgaaaacacaacatcag

SEQ ID NO: 5071527 - DNA, 25 bp, Homo sapien
ttaaacaagaagtgaaaacacaaca

SEQ ID NO: 5071528 - DNA, 25 bp, Homo sapien
cttctccagggtcttcatttacatc

SEQ ID NO: 5071529 - DNA, 25 bp, Homo sapien
caagtacagcttggggtacacctgg

SEQ ID NO: 5071530 - DNA, 25 bp, Homo sapien
gctcaattcgaggtgacaagtacag

SEQ ID NO: 5071531 - DNA, 25 bp, Homo sapien
tcaaaactaacagagaggagggcca

SEQ ID NO: 5071532 - DNA, 25 bp, Homo sapien
taagcatcgtaagggcgtgcagcca

SEQ ID NO: 5071533 - DNA, 25 bp, Homo sapien
tgccagggacaccagacaactattc

SEQ ID NO: 5071534 - DNA, 25 bp, Homo sapien
catagaaatgcgcagtgggagaccg

SEQ ID NO: 5071535 - DNA, 25 bp, Homo sapien
gagtacaagcctcagctagggcaag

SEQ ID NO: 5071536 - DNA, 25 bp, Homo sapien
atgtaaccttaaaactcacagcttt

SEQ ID NO: 5071537 - DNA, 25 bp, Homo sapien
gatgtaaccttaaaactcacagctt

SEQ ID NO: 5071538 - DNA, 25 bp, Homo sapien
tgggttcactacaacaactgccaac

SEQ ID NO: 5071539 - DNA, 25 bp, Homo sapien
tttgggttcactacaacaactgcca

SEQ ID NO: 5071540 - DNA, 25 bp, Homo sapien
ttgggttcactacaacaactgccaa

SEQ ID NO: 5071541 - DNA, 25 bp, Homo sapien
ctttgggttcactacaacaactgcc

SEQ ID NO: 5071542 - DNA, 25 bp, Homo sapien
ggttgattctcattgggtttctgtt

SEQ ID NO: 5071543 - DNA, 25 bp, Homo sapien
gtggttgattctcattgggtttctg

SEQ ID NO: 5071544 - DNA, 25 bp, Homo sapien
atgtggttgattctcattgggtttc

SEQ ID NO: 5071545 - DNA, 25 bp, Homo sapien
ttgattctcattgggtttctgttgc

SEQ ID NO: 5071546 - DNA, 25 bp, Homo sapien
taggattatctcagtgactcgagaa

SEQ ID NO: 5071547 - DNA, 25 bp, Homo sapien
tccaatttatccgaatgtaatatcc

SEQ ID NO: 5071548 - DNA, 25 bp, Homo sapien
cttttttgagaagactgatacggat

SEQ ID NO: 5071549 - DNA, 25 bp, Homo sapien
tcagcctaagagatctggaaggtct

SEQ ID NO: 5071550 - DNA, 25 bp, Homo sapien
tgtaaagaggcataaaggctgttgt

SEQ ID NO: 5071551 - DNA, 25 bp, Homo sapien
cctggtcccactacctatggcttgg

SEQ ID NO: 5071552 - DNA, 25 bp, Homo sapien
gggcacatggtccacagcaggctgt

SEQ ID NO: 5071553 - DNA, 25 bp, Homo sapien
tagttacacttcctccaaattaaga

SEQ ID NO: 5071554 - DNA, 25 bp, Homo sapien
ttttaataccctagagccttgctcc

SEQ ID NO: 5071555 - DNA, 25 bp, Homo sapien
aacattgatgttagaccgttcctcc

SEQ ID NO: 5071556 - DNA, 25 bp, Homo sapien
gaacaacatgagcttaatgaggtca

SEQ ID NO: 5071557 - DNA, 25 bp, Homo sapien
gaggtcatggtcctaacacaagagg

SEQ ID NO: 5071558 - DNA, 25 bp, Homo sapien
gtaaaacatcgcctactccacaagg

SEQ ID NO: 5071559 - DNA, 25 bp, Homo sapien
cttagcttgtctgaactagagtgtc

SEQ ID NO: 5071560 - DNA, 25 bp, Homo sapien
tgcagggtagcttgtctgaactaca

SEQ ID NO: 5071561 - DNA, 25 bp, Homo sapien
agacttggaatcagagaaggctaga

SEQ ID NO: 5071562 - DNA, 25 bp, Homo sapien
tgaagtgacttaccagcctcgggtc

SEQ ID NO: 5071563 - DNA, 25 bp, Homo sapien
aactgcagttgctgggaggaccatc

SEQ ID NO: 5071564 - DNA, 25 bp, Homo sapien
tgagaggtagaaaccagcgccagaa

SEQ ID NO: 5071565 - DNA, 25 bp, Homo sapien
ggtgatgtctacgaactggtcctcc

SEQ ID NO: 5071566 - DNA, 25 bp, Homo sapien
ttcacagtaaaaccgaggaagactc

SEQ ID NO: 5071567 - DNA, 25 bp, Homo sapien
cttcacagtaaaaccgaggaagact

SEQ ID NO: 5071568 - DNA, 25 bp, Homo sapien
tcctccttcccgttatcagctcctg

SEQ ID NO: 5071569 - DNA, 25 bp, Homo sapien
cagctcctccttcccgttatcagct

SEQ ID NO: 5071570 - DNA, 25 bp, Homo sapien
atacactaagctccatgcacgggcc

SEQ ID NO: 5071571 - DNA, 25 bp, Homo sapien
cccgaggaggattagctatcacata

SEQ ID NO: 5071572 - DNA, 25 bp, Homo sapien
agcccgaggaggattagctatcaca

SEQ ID NO: 5071573 - DNA, 25 bp, Homo sapien
agctatcacataaccatacactaag

SEQ ID NO: 5071574 - DNA, 25 bp, Homo sapien
gtgacctgcctcaagacaagaaaaa

SEQ ID NO: 5071575 - DNA, 25 bp, Homo sapien
tccccagcaccatgtgtacattttc

SEQ ID NO: 5071576 - DNA, 25 bp, Homo sapien
tctggcattctattagatatctggc

SEQ ID NO: 5071577 - DNA, 25 bp, Homo sapien
ctccccttaggcataaagctctctg

SEQ ID NO: 5071578 - DNA, 25 bp, Homo sapien
cttgctctatcatccgatttactcc

SEQ ID NO: 5071579 - DNA, 25 bp, Homo sapien
ttgctctatcatccgatttactcca

SEQ ID NO: 5071580 - DNA, 25 bp, Homo sapien
ttctttctggctgggttcacaactt

SEQ ID NO: 5071581 - DNA, 25 bp, Homo sapien
tctggctgggttcacaacttctctt

SEQ ID NO: 5071582 - DNA, 25 bp, Homo sapien
cattggtcaccaagtcccttcttga

SEQ ID NO: 5071583 - DNA, 25 bp, Homo sapien
tcccagcgcaaacggcatcatttaa

SEQ ID NO: 5071584 - DNA, 25 bp, Homo sapien
ggaattagtcacacaatcagaatga

SEQ ID NO: 5071585 - DNA, 25 bp, Homo sapien
ctagtgacggtgcaagtattcagtc

SEQ ID NO: 5071586 - DNA, 25 bp, Homo sapien
gaaagtctttccaggtattagcgaa

SEQ ID NO: 5071587 - DNA, 25 bp, Homo sapien
aatcttagccatcaaagtgttgcct

SEQ ID NO: 5071588 - DNA, 25 bp, Homo sapien
tcaccttataggagtagaaatacag

SEQ ID NO: 5071589 - DNA, 25 bp, Homo sapien
tattcagataaatagaacttggctc

SEQ ID NO: 5071590 - DNA, 25 bp, Homo sapien
ggaagtgctttccactgggctcctt

SEQ ID NO: 5071591 - DNA, 25 bp, Homo sapien
tggaagtgctttccactgggctcct

SEQ ID NO: 5071592 - DNA, 25 bp, Homo sapien
cttttagttggaagtgctttccact

SEQ ID NO: 5071593 - DNA, 25 bp, Homo sapien
ttagttggaagtgctttccactggg

SEQ ID NO: 5071594 - DNA, 25 bp, Homo sapien
tattttatgcattcgacacaggcag

SEQ ID NO: 5071595 - DNA, 25 bp, Homo sapien
cctccagaagaagtaggctatggct

SEQ ID NO: 5071596 - DNA, 25 bp, Homo sapien
tacaaagcagatcgggcaagctcct

SEQ ID NO: 5071597 - DNA, 25 bp, Homo sapien
tgagcctaggagagatgggccttcc

SEQ ID NO: 5071598 - DNA, 25 bp, Homo sapien
ttgttttagtacagataagccttgt

SEQ ID NO: 5071599 - DNA, 25 bp, Homo sapien
ccctactacgcctagctattgtttt

SEQ ID NO: 5071600 - DNA, 25 bp, Homo sapien
cctactacgcctagctattgttttt

SEQ ID NO: 5071601 - DNA, 25 bp, Homo sapien
gttttagtacagataagccttgtta

SEQ ID NO: 5071602 - DNA, 25 bp, Homo sapien
catagaaggacacgcatacataact

SEQ ID NO: 5071603 - DNA, 25 bp, Homo sapien
ttcatagaaggacacgcatacataa

SEQ ID NO: 5071604 - DNA, 25 bp, Homo sapien
tagaaggacacgcatacataactga

SEQ ID NO: 5071605 - DNA, 25 bp, Homo sapien
aaggacacgcatacataactgactg

SEQ ID NO: 5071606 - DNA, 25 bp, Homo sapien
tataagaccggaaaccagacagttc

SEQ ID NO: 5071607 - DNA, 25 bp, Homo sapien
tgggaagagccagtcctcagggtac

SEQ ID NO: 5071608 - DNA, 25 bp, Homo sapien
caagtgccggatgcgtctagtcagc

SEQ ID NO: 5071609 - DNA, 25 bp, Homo sapien
gctctaaaccgtaggacatcccagg

SEQ ID NO: 5071610 - DNA, 25 bp, Homo sapien
tactgttgaagctcatgaataaata

SEQ ID NO: 5071611 - DNA, 25 bp, Homo sapien
tgttgaagctcatgaataaatattt

SEQ ID NO: 5071612 - DNA, 25 bp, Homo sapien
ctgttgaagctcatgaataaatatt

SEQ ID NO: 5071613 - DNA, 25 bp, Homo sapien
actgttgaagctcatgaataaatat

SEQ ID NO: 5071614 - DNA, 25 bp, Homo sapien
gagccctggtaagcatttactgtag

SEQ ID NO: 5071615 - DNA, 25 bp, Homo sapien
cctttcactttcaggtgtagagccc

SEQ ID NO: 5071616 - DNA, 25 bp, Homo sapien
tcagtacttcgaataggccattttc

SEQ ID NO: 5071617 - DNA, 25 bp, Homo sapien
ctttgctgagcatagtatacttggc

SEQ ID NO: 5071618 - DNA, 25 bp, Homo sapien
tactttttgacgtaagcatttattg

SEQ ID NO: 5071619 - DNA, 25 bp, Homo sapien
ttcaagaaattttgtgatttcctcc

SEQ ID NO: 5071620 - DNA, 25 bp, Homo sapien
cagtggttcttcaggagcatgttat

SEQ ID NO: 5071621 - DNA, 25 bp, Homo sapien
ctgtatctcataggttgtggtgtgc

SEQ ID NO: 5071622 - DNA, 25 bp, Homo sapien
gggtctagtttcgttccgtggcata

SEQ ID NO: 5071623 - DNA, 25 bp, Homo sapien
tgaggccacagacttaaaatctttg

SEQ ID NO: 5071624 - DNA, 25 bp, Homo sapien
tcttggtggcattgtcaaaaaccag

SEQ ID NO: 5071625 - DNA, 25 bp, Homo sapien
ggagatccagttttccatgcactat

SEQ ID NO: 5071626 - DNA, 25 bp, Homo sapien
gtttcacttaacacttaacctgcag

SEQ ID NO: 5071627 - DNA, 25 bp, Homo sapien
ttacttctgtaccaacctaaatctg

SEQ ID NO: 5071628 - DNA, 25 bp, Homo sapien
cattgttaacaagagtaccctactc

SEQ ID NO: 5071629 - DNA, 25 bp, Homo sapien
actgaaattacttctgtaccaacct

SEQ ID NO: 5071630 - DNA, 25 bp, Homo sapien
tgggaaccctgaatgacatacagac

SEQ ID NO: 5071631 - DNA, 25 bp, Homo sapien
tctgaacacgggaggatgtctctgt

SEQ ID NO: 5071632 - DNA, 25 bp, Homo sapien
gtacatgtgaatttgcagtccgcag

SEQ ID NO: 5071633 - DNA, 25 bp, Homo sapien
taatcacagcagagtcaacattcgt

SEQ ID NO: 5071634 - DNA, 25 bp, Homo sapien
gtttgttacactgtcctcatgtcct

SEQ ID NO: 5071635 - DNA, 25 bp, Homo sapien
accctggccctcttgatagacttct

SEQ ID NO: 5071636 - DNA, 25 bp, Homo sapien
tttagaattctcatgtcatagagat

SEQ ID NO: 5071637 - DNA, 25 bp, Homo sapien
tgagtttgttacactgtcctcatgt

SEQ ID NO: 5071638 - DNA, 25 bp, Homo sapien
taacagtatccttgagatattgcat

SEQ ID NO: 5071639 - DNA, 25 bp, Homo sapien
ggcactattaacagtatccttgaga

SEQ ID NO: 5071640 - DNA, 25 bp, Homo sapien
caccttgctggcactattaacagta

SEQ ID NO: 5071641 - DNA, 25 bp, Homo sapien
gctggcactattaacagtatccttg

SEQ ID NO: 5071642 - DNA, 25 bp, Homo sapien
agactcctgatagagccaaatgtta

SEQ ID NO: 5071643 - DNA, 25 bp, Homo sapien
tcctgatagagccaaatgttaagag

SEQ ID NO: 5071644 - DNA, 25 bp, Homo sapien
actcctgatagagccaaatgttaag

SEQ ID NO: 5071645 - DNA, 25 bp, Homo sapien
ctgatagagccaaatgttaagagtt

SEQ ID NO: 5071646 - DNA, 25 bp, Homo sapien
ctcctgtgtcttgccagaggctttg

SEQ ID NO: 5071647 - DNA, 25 bp, Homo sapien
tgccagcgtctttataagtcttaag

SEQ ID NO: 5071648 - DNA, 25 bp, Homo sapien
tcattttgcaacctgttcctgctga

SEQ ID NO: 5071649 - DNA, 25 bp, Homo sapien
gatgcaccgcagtttcttgccagcg

SEQ ID NO: 5071650 - DNA, 25 bp, Homo sapien
ggagggtccccacaaatgactctag

SEQ ID NO: 5071651 - DNA, 25 bp, Homo sapien
tgactctagccctggcacatactgt

SEQ ID NO: 5071652 - DNA, 25 bp, Homo sapien
catactgtgggtaactgctgagtcc

SEQ ID NO: 5071653 - DNA, 25 bp, Homo sapien
tttcccaccgagtgaaacttcaggc

SEQ ID NO: 5071654 - DNA, 25 bp, Homo sapien
gttgtaagagtagtaaacactggca

SEQ ID NO: 5071655 - DNA, 25 bp, Homo sapien
gacttctaatagagcagcagttttg

SEQ ID NO: 5071656 - DNA, 25 bp, Homo sapien
gacttggagtctgaacgactggctt

SEQ ID NO: 5071657 - DNA, 25 bp, Homo sapien
caaggacttgtaagagtagtggcaa

SEQ ID NO: 5071658 - DNA, 25 bp, Homo sapien
catgctccatcaacctgaacttcag

SEQ ID NO: 5071659 - DNA, 25 bp, Homo sapien
gaacttcagatcaataggtctgtta

SEQ ID NO: 5071660 - DNA, 25 bp, Homo sapien
gatcaataggtctgttatactgcat

SEQ ID NO: 5071661 - DNA, 25 bp, Homo sapien
acgtacacatgctccatcaacctga

SEQ ID NO: 5071662 - DNA, 25 bp, Homo sapien
tctgtgtaaaaggaataagacagtt

SEQ ID NO: 5071663 - DNA, 25 bp, Homo sapien
tgtgtaaaaggaataagacagttcc

SEQ ID NO: 5071664 - DNA, 25 bp, Homo sapien
gacagttccttgttctattcttgca

SEQ ID NO: 5071665 - DNA, 25 bp, Homo sapien
aatgtaaacaattagggaatctgtg

SEQ ID NO: 5071666 - DNA, 25 bp, Homo sapien
aagaatcatcaatggctgtcaaaac

SEQ ID NO: 5071667 - DNA, 25 bp, Homo sapien
taataaacgtagtaagaaagatgca

SEQ ID NO: 5071668 - DNA, 25 bp, Homo sapien
taaacgtagtaagaaagatgcagct

SEQ ID NO: 5071669 - DNA, 25 bp, Homo sapien
caatggctgtcaaaactagtgggtg

SEQ ID NO: 5071670 - DNA, 25 bp, Homo sapien
tctagacttgaaacagagattgggc

SEQ ID NO: 5071671 - DNA, 25 bp, Homo sapien
gggctaactcaggacaacttgcttt

SEQ ID NO: 5071672 - DNA, 25 bp, Homo sapien
gaaactgttaagctgcaggcatgct

SEQ ID NO: 5071673 - DNA, 25 bp, Homo sapien
cctaggcaggcgaaggactgaagac

SEQ ID NO: 5071674 - DNA, 25 bp, Homo sapien
tacgatcaagtcaaggcggtgaaca

SEQ ID NO: 5071675 - DNA, 25 bp, Homo sapien
gcctggccccagttctaccttgaag

SEQ ID NO: 5071676 - DNA, 25 bp, Homo sapien
taaaaggacagactacctgactgcc

SEQ ID NO: 5071677 - DNA, 25 bp, Homo sapien
gcccaataagcagagagtacgatca

SEQ ID NO: 5071678 - DNA, 25 bp, Homo sapien
tgtcttgagcaccattcaggcacgc

SEQ ID NO: 5071679 - DNA, 25 bp, Homo sapien
tgcagttatcacaaaagggcttgcg

SEQ ID NO: 5071680 - DNA, 25 bp, Homo sapien
tactgttaaccttaggctaggcctg

SEQ ID NO: 5071681 - DNA, 25 bp, Homo sapien
caaactgaagtacgaagcatcccac

SEQ ID NO: 5071682 - DNA, 25 bp, Homo sapien
atttcatatttcaggctgcccaggg

SEQ ID NO: 5071683 - DNA, 25 bp, Homo sapien
cgagcagctttttgcccattgagaa

SEQ ID NO: 5071684 - DNA, 25 bp, Homo sapien
gatagatcctgatgcgatgccaatg

SEQ ID NO: 5071685 - DNA, 25 bp, Homo sapien
tgcctactggtgaggggtatctacc

SEQ ID NO: 5071686 - DNA, 25 bp, Homo sapien
gacctgttgttagctctcaactcat

SEQ ID NO: 5071687 - DNA, 25 bp, Homo sapien
aactcattttatagattcaactttg

SEQ ID NO: 5071688 - DNA, 25 bp, Homo sapien
tcattttatagattcaactttgagc

SEQ ID NO: 5071689 - DNA, 25 bp, Homo sapien
gcattttctagacctgttgttagct

SEQ ID NO: 5071690 - DNA, 25 bp, Homo sapien
cttgctctgttgtctgtgtggtggc

SEQ ID NO: 5071691 - DNA, 25 bp, Homo sapien
ctctgttgtctgtgtggtggcgtga

SEQ ID NO: 5071692 - DNA, 25 bp, Homo sapien
tgctctgttgtctgtgtggtggcgt

SEQ ID NO: 5071693 - DNA, 25 bp, Homo sapien
tctgttgtctgtgtggtggcgtgat

SEQ ID NO: 5071694 - DNA, 25 bp, Homo sapien
tctcaccagttcagtgggatagcac

SEQ ID NO: 5071695 - DNA, 25 bp, Homo sapien
cagaagggctagtgattcgcaatca

SEQ ID NO: 5071696 - DNA, 25 bp, Homo sapien
cctgtctgaaagcttggcttgggac

SEQ ID NO: 5071697 - DNA, 25 bp, Homo sapien
gattctgacccattatgaaacagca

SEQ ID NO: 5071698 - DNA, 25 bp, Homo sapien
agcagaggtgtgaagagatccaaag

SEQ ID NO: 5071699 - DNA, 25 bp, Homo sapien
gcagaggtgtgaagagatccaaagg

SEQ ID NO: 5071700 - DNA, 25 bp, Homo sapien
ggcatacttgaggaacgtaatcaat

SEQ ID NO: 5071701 - DNA, 25 bp, Homo sapien
tgaggaacgtaatcaatgagacatc

SEQ ID NO: 5071702 - DNA, 25 bp, Homo sapien
cttgttggtgagcaggtggcatact

SEQ ID NO: 5071703 - DNA, 25 bp, Homo sapien
acgtaatcaatgagacatcctcctc

SEQ ID NO: 5071704 - DNA, 25 bp, Homo sapien
gaaactgagcagtcggtccgagaag

SEQ ID NO: 5071705 - DNA, 25 bp, Homo sapien
tgaactgctcccagatatgacggga

SEQ ID NO: 5071706 - DNA, 25 bp, Homo sapien
taggcacaggactctggtgaactgc

SEQ ID NO: 5071707 - DNA, 25 bp, Homo sapien
ttgggaatcttacccctaggcacag

SEQ ID NO: 5071708 - DNA, 25 bp, Homo sapien
ccgatcagttttgcaggagggcaga

SEQ ID NO: 5071709 - DNA, 25 bp, Homo sapien
gatttgaaggcagtgcaaagcccca

SEQ ID NO: 5071710 - DNA, 25 bp, Homo sapien
tcatctgactgagtataagaccagc

SEQ ID NO: 5071711 - DNA, 25 bp, Homo sapien
tgcactctggcaactaaacaaactg

SEQ ID NO: 5071712 - DNA, 25 bp, Homo sapien
tgtgatacccttgaatcacgtactg

SEQ ID NO: 5071713 - DNA, 25 bp, Homo sapien
tcttttgtgatacccttgaatcacg

SEQ ID NO: 5071714 - DNA, 25 bp, Homo sapien
tcttcttttgtgatacccttgaatc

SEQ ID NO: 5071715 - DNA, 25 bp, Homo sapien
gatacccttgaatcacgtactgcac

SEQ ID NO: 5071716 - DNA, 25 bp, Homo sapien
agtgagttttgtaaagccttctgca

SEQ ID NO: 5071717 - DNA, 25 bp, Homo sapien
ttctgcatcatattccacgacacct

SEQ ID NO: 5071718 - DNA, 25 bp, Homo sapien
acatcagcagcagagtgagttttgt

SEQ ID NO: 5071719 - DNA, 25 bp, Homo sapien
acaaaaatctttccacatcagcagc

SEQ ID NO: 5071720 - DNA, 25 bp, Homo sapien
tatccctgagtcttgacagtaccgg

SEQ ID NO: 5071721 - DNA, 25 bp, Homo sapien
gcctcctaggcaacgttatatctgt

SEQ ID NO: 5071722 - DNA, 25 bp, Homo sapien
tcagcttggaatgatcttatggccc

SEQ ID NO: 5071723 - DNA, 25 bp, Homo sapien
aacatttaggagactggaaaccact

SEQ ID NO: 5071724 - DNA, 25 bp, Homo sapien
tctttcagtacatcctaggtcgggc

SEQ ID NO: 5071725 - DNA, 25 bp, Homo sapien
tactagctatgggacttctggcaag

SEQ ID NO: 5071726 - DNA, 25 bp, Homo sapien
tcatctactggaaggcaagggttca

SEQ ID NO: 5071727 - DNA, 25 bp, Homo sapien
taggtcgggccatctcaggaatttg

SEQ ID NO: 5071728 - DNA, 25 bp, Homo sapien
cactggtcagtacacccttgggtca

SEQ ID NO: 5071729 - DNA, 25 bp, Homo sapien
caaagctggcaatacccaggagtca

SEQ ID NO: 5071730 - DNA, 25 bp, Homo sapien
ggagaattctggtcaagccctacct

SEQ ID NO: 5071731 - DNA, 25 bp, Homo sapien
gagactgaggctgatctaacacact

SEQ ID NO: 5071732 - DNA, 25 bp, Homo sapien
agtttggatggagtctgtttccctt

SEQ ID NO: 5071733 - DNA, 25 bp, Homo sapien
ccagtttggatggagtctgtttccc

SEQ ID NO: 5071734 - DNA, 25 bp, Homo sapien
cccagtttggatggagtctgtttcc

SEQ ID NO: 5071735 - DNA, 25 bp, Homo sapien
cacccagtttggatggagtctgttt

SEQ ID NO: 5071736 - DNA, 25 bp, Homo sapien
aacaccttagacatcccactgagag

SEQ ID NO: 5071737 - DNA, 25 bp, Homo sapien
taccacctgtgggatcttaggcaag

SEQ ID NO: 5071738 - DNA, 25 bp, Homo sapien
cattaactcggtgtgcctgcatctc

SEQ ID NO: 5071739 - DNA, 25 bp, Homo sapien
taaacctctctgctatagaacggca

SEQ ID NO: 5071740 - DNA, 25 bp, Homo sapien
caggctgtagcttaagcaaagactc

SEQ ID NO: 5071741 - DNA, 25 bp, Homo sapien
tactcctaacctctcacatgggcag

SEQ ID NO: 5071742 - DNA, 25 bp, Homo sapien
gaaaactatttctaacagcgcatga

SEQ ID NO: 5071743 - DNA, 25 bp, Homo sapien
tgtgtgagcccatgcgtaagctgtc

SEQ ID NO: 5071744 - DNA, 25 bp, Homo sapien
tgcatggatgctgggttcatgagct

SEQ ID NO: 5071745 - DNA, 25 bp, Homo sapien
aaccgaccccttgcttagtcatctt

SEQ ID NO: 5071746 - DNA, 25 bp, Homo sapien
tctgagagaaagtaccaaccgaccc

SEQ ID NO: 5071747 - DNA, 25 bp, Homo sapien
aaattctgagagaaagtaccaaccg

SEQ ID NO: 5071748 - DNA, 25 bp, Homo sapien
ctgttttctgactagctccttggtc

SEQ ID NO: 5071749 - DNA, 25 bp, Homo sapien
tctgaaatttaactaactcaaagag

SEQ ID NO: 5071750 - DNA, 25 bp, Homo sapien
tgttcctctttgatagcaattctga

SEQ ID NO: 5071751 - DNA, 25 bp, Homo sapien
tatgattgctgcctaaaatactgtt

SEQ ID NO: 5071752 - DNA, 25 bp, Homo sapien
atttgattaaggtgggtacatgggt

SEQ ID NO: 5071753 - DNA, 25 bp, Homo sapien
gacattaatattcacagacgcagaa

SEQ ID NO: 5071754 - DNA, 25 bp, Homo sapien
tgtgcccggcctgacaatgtgctat

SEQ ID NO: 5071755 - DNA, 25 bp, Homo sapien
tactaggtggtaaagctattgagaa

SEQ ID NO: 5071756 - DNA, 25 bp, Homo sapien
ctgtcatcattgtgtggctggattc

SEQ ID NO: 5071757 - DNA, 25 bp, Homo sapien
gagttgaggccccatcttgtgacca

SEQ ID NO: 5071758 - DNA, 25 bp, Homo sapien
ccctgaactacccagctctggattt

SEQ ID NO: 5071759 - DNA, 25 bp, Homo sapien
tgaccatgagggaaagtcagcctgt

SEQ ID NO: 5071760 - DNA, 25 bp, Homo sapien
tacagagactaaatcttggttggct

SEQ ID NO: 5071761 - DNA, 25 bp, Homo sapien
ttagaacctactgggtcaggtttga

SEQ ID NO: 5071762 - DNA, 25 bp, Homo sapien
gatggtctgcacctgtttagtagaa

SEQ ID NO: 5071763 - DNA, 25 bp, Homo sapien
catttgattcagttacttagtgtca

SEQ ID NO: 5071764 - DNA, 25 bp, Homo sapien
ctaggattacagacgcctgccgtca

SEQ ID NO: 5071765 - DNA, 25 bp, Homo sapien
gtcatgcccagctaattttttgtat

SEQ ID NO: 5071766 - DNA, 25 bp, Homo sapien
taggattacagacgcctgccgtcat

SEQ ID NO: 5071767 - DNA, 25 bp, Homo sapien
ttacagacgcctgccgtcatgccca

SEQ ID NO: 5071768 - DNA, 25 bp, Homo sapien
tatctcctaaatcagtgggagttcc

SEQ ID NO: 5071769 - DNA, 25 bp, Homo sapien
gatatggcaaccagactaccaggaa

SEQ ID NO: 5071770 - DNA, 25 bp, Homo sapien
taatggaacgcataaggtactactc

SEQ ID NO: 5071771 - DNA, 25 bp, Homo sapien
gatagtacaggctaattccaatcct

SEQ ID NO: 5071772 - DNA, 25 bp, Homo sapien
ttgggcctgggagtaaagctgtcca

SEQ ID NO: 5071773 - DNA, 25 bp, Homo sapien
tgataaacggactgaaatgtgagag

SEQ ID NO: 5071774 - DNA, 25 bp, Homo sapien
ttggctggtctcgagggaaaaacag

SEQ ID NO: 5071775 - DNA, 25 bp, Homo sapien
ccactgttggtaaagtgataaacgg

SEQ ID NO: 5071776 - DNA, 25 bp, Homo sapien
tggaaataacgacagattcacttac

SEQ ID NO: 5071777 - DNA, 25 bp, Homo sapien
ctgttggaaataacgacagattcac

SEQ ID NO: 5071778 - DNA, 25 bp, Homo sapien
gttggaaataacgacagattcactt

SEQ ID NO: 5071779 - DNA, 25 bp, Homo sapien
tgttggaaataacgacagattcact

SEQ ID NO: 5071780 - DNA, 25 bp, Homo sapien
tgcaagcagtagcttgccaacccct

SEQ ID NO: 5071781 - DNA, 25 bp, Homo sapien
gaactaacctgcaagcagtagcttg

SEQ ID NO: 5071782 - DNA, 25 bp, Homo sapien
gccaacccctggactagataaacaa

SEQ ID NO: 5071783 - DNA, 25 bp, Homo sapien
gcacagggcaggaactaacctgcaa

SEQ ID NO: 5071784 - DNA, 25 bp, Homo sapien
tctttagactggtgttaacataaag

SEQ ID NO: 5071785 - DNA, 25 bp, Homo sapien
aaatgtctcttgaaactctgaacca

SEQ ID NO: 5071786 - DNA, 25 bp, Homo sapien
ttttctttagactggtgttaacata

SEQ ID NO: 5071787 - DNA, 25 bp, Homo sapien
cagatgttttctttagactggtgtt

SEQ ID NO: 5071788 - DNA, 25 bp, Homo sapien
atttcttcttgctagcacgagctgc

SEQ ID NO: 5071789 - DNA, 25 bp, Homo sapien
tcttcttgctagcacgagctgctgg

SEQ ID NO: 5071790 - DNA, 25 bp, Homo sapien
ttgctagcacgagctgctggctttc

SEQ ID NO: 5071791 - DNA, 25 bp, Homo sapien
gggtggttactcagttcagctgaag

SEQ ID NO: 5071792 - DNA, 25 bp, Homo sapien
ctaggaaggctgagacaggacaatc

SEQ ID NO: 5071793 - DNA, 25 bp, Homo sapien
agctactaggaaggctgagacagga

SEQ ID NO: 5071794 - DNA, 25 bp, Homo sapien
tactaggaaggctgagacaggacaa

SEQ ID NO: 5071795 - DNA, 25 bp, Homo sapien
taggaaggctgagacaggacaatca

SEQ ID NO: 5071796 - DNA, 25 bp, Homo sapien
gataccaaagacctgacaaggacaa

SEQ ID NO: 5071797 - DNA, 25 bp, Homo sapien
taaaacaggataaaatcatgaccga

SEQ ID NO: 5071798 - DNA, 25 bp, Homo sapien
taatactaaatctgcacaaactctt

SEQ ID NO: 5071799 - DNA, 25 bp, Homo sapien
tcatgaccgagaagggtttatcttt

SEQ ID NO: 5071800 - DNA, 25 bp, Homo sapien
gcagagctggattcctccccatctc

SEQ ID NO: 5071801 - DNA, 25 bp, Homo sapien
cagagctggattcctccccatctct

SEQ ID NO: 5071802 - DNA, 25 bp, Homo sapien
agagctggattcctccccatctctg

SEQ ID NO: 5071803 - DNA, 25 bp, Homo sapien
tatgcaatttggagaggatgcctgg

SEQ ID NO: 5071804 - DNA, 25 bp, Homo sapien
gcaatttggagaggatgcctggatg

SEQ ID NO: 5071805 - DNA, 25 bp, Homo sapien
ctatgcaatttggagaggatgcctg

SEQ ID NO: 5071806 - DNA, 25 bp, Homo sapien
tgcaatttggagaggatgcctggat

SEQ ID NO: 5071807 - DNA, 25 bp, Homo sapien
cccagcccactcaattgttcttgaa

SEQ ID NO: 5071808 - DNA, 25 bp, Homo sapien
ttcttgaaagggcacacctgagtta

SEQ ID NO: 5071809 - DNA, 25 bp, Homo sapien
cctgacaaagatgtgctgaccttcc

SEQ ID NO: 5071810 - DNA, 25 bp, Homo sapien
aattttcctgacaaagatgtgctga

SEQ ID NO: 5071811 - DNA, 25 bp, Homo sapien
gtgtcaaggccccgctacctggcaa

SEQ ID NO: 5071812 - DNA, 25 bp, Homo sapien
gactttggattacagactaccctag

SEQ ID NO: 5071813 - DNA, 25 bp, Homo sapien
aagtgactttggattacagactacc

SEQ ID NO: 5071814 - DNA, 25 bp, Homo sapien
ggattacagactaccctagctcacc

SEQ ID NO: 5071815 - DNA, 25 bp, Homo sapien
taggaaaccactgttctgcccaatt

SEQ ID NO: 5071816 - DNA, 25 bp, Homo sapien
actaggaaaccactgttctgcccaa

SEQ ID NO: 5071817 - DNA, 25 bp, Homo sapien
ctaggaaaccactgttctgcccaat

SEQ ID NO: 5071818 - DNA, 25 bp, Homo sapien
tctcaagcagcgatggaccattcca

SEQ ID NO: 5071819 - DNA, 25 bp, Homo sapien
tgagtagttaatgccgtggacagcc

SEQ ID NO: 5071820 - DNA, 25 bp, Homo sapien
tgctttgcaattcggactgtactca

SEQ ID NO: 5071821 - DNA, 25 bp, Homo sapien
tccagaaatcaatcagtaggctttg

SEQ ID NO: 5071822 - DNA, 25 bp, Homo sapien
acatggattttcgagtaagagaaaa

SEQ ID NO: 5071823 - DNA, 25 bp, Homo sapien
cctatctgattaagtgggaagaaca

SEQ ID NO: 5071824 - DNA, 25 bp, Homo sapien
catggattttcgagtaagagaaaac

SEQ ID NO: 5071825 - DNA, 25 bp, Homo sapien
cattccctatctgattaagtgggaa

SEQ ID NO: 5071826 - DNA, 25 bp, Homo sapien
aaaagaaacatgggttagagatgga

SEQ ID NO: 5071827 - DNA, 25 bp, Homo sapien
aagaaacatgggttagagatggaac

SEQ ID NO: 5071828 - DNA, 25 bp, Homo sapien
aaacatgggttagagatggaacctc

SEQ ID NO: 5071829 - DNA, 25 bp, Homo sapien
gaaacatgggttagagatggaacct

SEQ ID NO: 5071830 - DNA, 25 bp, Homo sapien
tttggcttgggtttggcctgggtca

SEQ ID NO: 5071831 - DNA, 25 bp, Homo sapien
cttgggtttggcctgggtcatagat

SEQ ID NO: 5071832 - DNA, 25 bp, Homo sapien
tggcttgggtttggcctgggtcata

SEQ ID NO: 5071833 - DNA, 25 bp, Homo sapien
gcttgggtttggcctgggtcataga

SEQ ID NO: 5071834 - DNA, 25 bp, Homo sapien
taaaacctgcgcagtatgaacaaga

SEQ ID NO: 5071835 - DNA, 25 bp, Homo sapien
gaatttcgagcatgcattaaaggct

SEQ ID NO: 5071836 - DNA, 25 bp, Homo sapien
cacgattcctattttctggcctaga

SEQ ID NO: 5071837 - DNA, 25 bp, Homo sapien
gctagtggtgacacagcctcattct

SEQ ID NO: 5071838 - DNA, 25 bp, Homo sapien
tggtgctaaccagagaaccttgctg

SEQ ID NO: 5071839 - DNA, 25 bp, Homo sapien
gacacttgtgcaccgaatggtaggg

SEQ ID NO: 5071840 - DNA, 25 bp, Homo sapien
tgctgttgggcgagacctcaggatc

SEQ ID NO: 5071841 - DNA, 25 bp, Homo sapien
tgctggaacaccttgagagcgcgtt

SEQ ID NO: 5071842 - DNA, 25 bp, Homo sapien
gagccttcacaagcatcatcagagg

SEQ ID NO: 5071843 - DNA, 25 bp, Homo sapien
tctgctacgctgctttggagaagcc

SEQ ID NO: 5071844 - DNA, 25 bp, Homo sapien
caaactgtggacttggcacgggagc

SEQ ID NO: 5071845 - DNA, 25 bp, Homo sapien
tattaatccaaccacttagccagag

SEQ ID NO: 5071846 - DNA, 25 bp, Homo sapien
tgaatccagagctgcttgactccaa

SEQ ID NO: 5071847 - DNA, 25 bp, Homo sapien
cacagctaataggtggcaatgctag

SEQ ID NO: 5071848 - DNA, 25 bp, Homo sapien
caagtgtactgtccactgagtcggg

SEQ ID NO: 5071849 - DNA, 25 bp, Homo sapien
cctggctctgctatatcgtggtgaa

SEQ ID NO: 5071850 - DNA, 25 bp, Homo sapien
tggtgctaaatgaatgcctgcctgc

SEQ ID NO: 5071851 - DNA, 25 bp, Homo sapien
ggtcatccctgtaagtgcctagagg

SEQ ID NO: 5071852 - DNA, 25 bp, Homo sapien
tgacactgcgtatcctaatggcacg

SEQ ID NO: 5071853 - DNA, 25 bp, Homo sapien
tggcacgttagcataggtcatccct

SEQ ID NO: 5071854 - DNA, 25 bp, Homo sapien
aggaggaggagaagggagggccagc

SEQ ID NO: 5071855 - DNA, 25 bp, Homo sapien
gaggaggagaagggagggccagctg

SEQ ID NO: 5071856 - DNA, 25 bp, Homo sapien
gaaggaggaggagaagggagggcca

SEQ ID NO: 5071857 - DNA, 25 bp, Homo sapien
ctggtgcagcagatgagaaggagga

SEQ ID NO: 5071858 - DNA, 25 bp, Homo sapien
ggccaggacttgctcccacgggctg

SEQ ID NO: 5071859 - DNA, 25 bp, Homo sapien
aaaggccaggacttgctcccacggg

SEQ ID NO: 5071860 - DNA, 25 bp, Homo sapien
caggacttgctcccacgggctgcag

SEQ ID NO: 5071861 - DNA, 25 bp, Homo sapien
agccagtttttgcaactgcaaaggc

SEQ ID NO: 5071862 - DNA, 25 bp, Homo sapien
tttgctagagtcaggccaatgtggt

SEQ ID NO: 5071863 - DNA, 25 bp, Homo sapien
ggtaattgtaagatgagcctcatga

SEQ ID NO: 5071864 - DNA, 25 bp, Homo sapien
tctttgggtaattgtaagatgagcc

SEQ ID NO: 5071865 - DNA, 25 bp, Homo sapien
ggtaggagaagtggttcagggacac

SEQ ID NO: 5071866 - DNA, 25 bp, Homo sapien
tatttatcctgatgccccccgatca

SEQ ID NO: 5071867 - DNA, 25 bp, Homo sapien
caggacgttaggtttactacataat

SEQ ID NO: 5071868 - DNA, 25 bp, Homo sapien
cctctcaacccagcgcctacgtatt

SEQ ID NO: 5071869 - DNA, 25 bp, Homo sapien
gtgcaggacgttaggtttactacat

SEQ ID NO: 5071870 - DNA, 25 bp, Homo sapien
tatttaggaatcacatggctccggc

SEQ ID NO: 5071871 - DNA, 25 bp, Homo sapien
caggtgtactccttgtgtgtggtgt

SEQ ID NO: 5071872 - DNA, 25 bp, Homo sapien
gcagctcttcctagaagggtattta

SEQ ID NO: 5071873 - DNA, 25 bp, Homo sapien
aagagcagggtgttggttggcctgg

SEQ ID NO: 5071874 - DNA, 25 bp, Homo sapien
tcaggacctcaaagcccttatccat

SEQ ID NO: 5071875 - DNA, 25 bp, Homo sapien
cttatccattaacggcaccatgcca

SEQ ID NO: 5071876 - DNA, 25 bp, Homo sapien
gcactcaggacctcaaagcccttat

SEQ ID NO: 5071877 - DNA, 25 bp, Homo sapien
gctgtggtgtgacagagctccagac

SEQ ID NO: 5071878 - DNA, 25 bp, Homo sapien
gatcctgtgccatagggcaaagagc

SEQ ID NO: 5071879 - DNA, 25 bp, Homo sapien
atcctgtgccatagggcaaagagcc

SEQ ID NO: 5071880 - DNA, 25 bp, Homo sapien
cggggatcctgtgccatagggcaaa

SEQ ID NO: 5071881 - DNA, 25 bp, Homo sapien
gggatcctgtgccatagggcaaaga

SEQ ID NO: 5071882 - DNA, 25 bp, Homo sapien
agatatctcacctcagagcaatggc

SEQ ID NO: 5071883 - DNA, 25 bp, Homo sapien
cccgtgctcctggtcaccaggcttg

SEQ ID NO: 5071884 - DNA, 25 bp, Homo sapien
cacagtgacaccttacgtgtccaga

SEQ ID NO: 5071885 - DNA, 25 bp, Homo sapien
caggcttgccttctagccctgcccc

SEQ ID NO: 5071886 - DNA, 25 bp, Homo sapien
ccgcgggccacagtccatgcagcag

SEQ ID NO: 5071887 - DNA, 25 bp, Homo sapien
acatcagggcaccaatggcagtccc

SEQ ID NO: 5071888 - DNA, 25 bp, Homo sapien
catgggtaaccccacatcagggcac

SEQ ID NO: 5071889 - DNA, 25 bp, Homo sapien
gaggagacggacacatgggtaaccc

SEQ ID NO: 5071890 - DNA, 25 bp, Homo sapien
caaacgcacatgcagtctggtctac

SEQ ID NO: 5071891 - DNA, 25 bp, Homo sapien
aagcagggccacgttctacctcaga

SEQ ID NO: 5071892 - DNA, 25 bp, Homo sapien
tcaggcactgtacaaggcatcaggg

SEQ ID NO: 5071893 - DNA, 25 bp, Homo sapien
ggtctactggaaagaaagctaggct

SEQ ID NO: 5071894 - DNA, 25 bp, Homo sapien
ggcctggtccaagctacaagacagt

SEQ ID NO: 5071895 - DNA, 25 bp, Homo sapien
tgagatatctgcacttaggtccggc

SEQ ID NO: 5071896 - DNA, 25 bp, Homo sapien
ttttccgaggagatgcatgcagttc

SEQ ID NO: 5071897 - DNA, 25 bp, Homo sapien
tattcaaagggcctgtacgtgcacc

SEQ ID NO: 5071898 - DNA, 25 bp, Homo sapien
gagctttccattggcaaatgctgcc

SEQ ID NO: 5071899 - DNA, 25 bp, Homo sapien
tccattggcaaatgctgcctcctgg

SEQ ID NO: 5071900 - DNA, 25 bp, Homo sapien
ttccattggcaaatgctgcctcctg

SEQ ID NO: 5071901 - DNA, 25 bp, Homo sapien
ctagagctttccattggcaaatgct

SEQ ID NO: 5071902 - DNA, 25 bp, Homo sapien
gagtaacccgaagtgaagggctcta

SEQ ID NO: 5071903 - DNA, 25 bp, Homo sapien
tgctgacacgcatgtggacaggcag

SEQ ID NO: 5071904 - DNA, 25 bp, Homo sapien
ctgtgtgagcaaaacgctgccgtga

SEQ ID NO: 5071905 - DNA, 25 bp, Homo sapien
ccaggaagcggctgtatgtgctgac

SEQ ID NO: 5071906 - DNA, 25 bp, Homo sapien
taatttgtgagtttatttcttccaa

SEQ ID NO: 5071907 - DNA, 25 bp, Homo sapien
cataatttgtgagtttatttcttcc

SEQ ID NO: 5071908 - DNA, 25 bp, Homo sapien
accataatttgtgagtttatttctt

SEQ ID NO: 5071909 - DNA, 25 bp, Homo sapien
ttactgcaccataatttgtgagttt

SEQ ID NO: 5071910 - DNA, 25 bp, Homo sapien
ggaagaaaggcgtgggcattcctga

SEQ ID NO: 5071911 - DNA, 25 bp, Homo sapien
tttggaagaaaggcgtgggcattcc

SEQ ID NO: 5071912 - DNA, 25 bp, Homo sapien
aggcgtgggcattcctgaggcttta

SEQ ID NO: 5071913 - DNA, 25 bp, Homo sapien
cattcctgaggctttactttccccg

SEQ ID NO: 5071914 - DNA, 25 bp, Homo sapien
aacagcgaggggcatttaatcttag

SEQ ID NO: 5071915 - DNA, 25 bp, Homo sapien
gaagaacagcgaggggcatttaatc

SEQ ID NO: 5071916 - DNA, 25 bp, Homo sapien
aatcttagaacttaagaggtctcag

SEQ ID NO: 5071917 - DNA, 25 bp, Homo sapien
gcatttaatcttagaacttaagagg

SEQ ID NO: 5071918 - DNA, 25 bp, Homo sapien
caggtaactccttctcgccgtgaag

SEQ ID NO: 5071919 - DNA, 25 bp, Homo sapien
gaaatgcttgggtatgaaacacaca

SEQ ID NO: 5071920 - DNA, 25 bp, Homo sapien
gaaggactgccccagataggaaatg

SEQ ID NO: 5071921 - DNA, 25 bp, Homo sapien
tattgagcaacagccttaggtcagg

SEQ ID NO: 5071922 - DNA, 25 bp, Homo sapien
gagcattggctaaccagggtccctt

SEQ ID NO: 5071923 - DNA, 25 bp, Homo sapien
taatagagcatcatttgaggctggg

SEQ ID NO: 5071924 - DNA, 25 bp, Homo sapien
catttggctgtaggcgatgggtcct

SEQ ID NO: 5071925 - DNA, 25 bp, Homo sapien
ctttctagttcatgtctccacaaga

SEQ ID NO: 5071926 - DNA, 25 bp, Homo sapien
cctgaaacagcagttccggcaggca

SEQ ID NO: 5071927 - DNA, 25 bp, Homo sapien
gaaacagcagttccggcaggcaggc

SEQ ID NO: 5071928 - DNA, 25 bp, Homo sapien
ctgaaacagcagttccggcaggcag

SEQ ID NO: 5071929 - DNA, 25 bp, Homo sapien
tgcctgaaacagcagttccggcagg

SEQ ID NO: 5071930 - DNA, 25 bp, Homo sapien
ttctttctgatcagagttgggcagc

SEQ ID NO: 5071931 - DNA, 25 bp, Homo sapien
tcttctttctgatcagagttgggca

SEQ ID NO: 5071932 - DNA, 25 bp, Homo sapien
agctcttctttctgatcagagttgg

SEQ ID NO: 5071933 - DNA, 25 bp, Homo sapien
gctcttctttctgatcagagttggg

SEQ ID NO: 5071934 - DNA, 25 bp, Homo sapien
ctgcaaaggtgtgaagcgttgattg

SEQ ID NO: 5071935 - DNA, 25 bp, Homo sapien
tggtgtaagtggtcctccgggaatc

SEQ ID NO: 5071936 - DNA, 25 bp, Homo sapien
acagtcaggtgagcggtgataaggc

SEQ ID NO: 5071937 - DNA, 25 bp, Homo sapien
gggagacgctgacagggaggagact

SEQ ID NO: 5071938 - DNA, 25 bp, Homo sapien
ctgggcaggtaatgatgaagatacg

SEQ ID NO: 5071939 - DNA, 25 bp, Homo sapien
caggtaatgatgaagatacgaacat

SEQ ID NO: 5071940 - DNA, 25 bp, Homo sapien
ggcaggtaatgatgaagatacgaac

SEQ ID NO: 5071941 - DNA, 25 bp, Homo sapien
ctgctgggcaggtaatgatgaagat

SEQ ID NO: 5071942 - DNA, 25 bp, Homo sapien
gtgaggctctcccagggggccttca

SEQ ID NO: 5071943 - DNA, 25 bp, Homo sapien
tgtgaggctctcccagggggccttc

SEQ ID NO: 5071944 - DNA, 25 bp, Homo sapien
tgaggctctcccagggggccttcat

SEQ ID NO: 5071945 - DNA, 25 bp, Homo sapien
ttgtcctaaaaacgcctcatcacag

SEQ ID NO: 5071946 - DNA, 25 bp, Homo sapien
agctggggtgaacttgggggcttgt

SEQ ID NO: 5071947 - DNA, 25 bp, Homo sapien
gatggagccggcaggaaaagctggg

SEQ ID NO: 5071948 - DNA, 25 bp, Homo sapien
gggatggagccggcaggaaaagctg

SEQ ID NO: 5071949 - DNA, 25 bp, Homo sapien
ggttggttctatggcgccctgccat

SEQ ID NO: 5071950 - DNA, 25 bp, Homo sapien
tggttggttctatggcgccctgcca

SEQ ID NO: 5071951 - DNA, 25 bp, Homo sapien
tgtggttggttctatggcgccctgc

SEQ ID NO: 5071952 - DNA, 25 bp, Homo sapien
ttgtggttggttctatggcgccctg

SEQ ID NO: 5071953 - DNA, 25 bp, Homo sapien
cttgtatgtgggatcacgtcgagcc

SEQ ID NO: 5071954 - DNA, 25 bp, Homo sapien
tttcaagctatctttacgggagcag

SEQ ID NO: 5071955 - DNA, 25 bp, Homo sapien
agccttgggtgaaccaagggcagcc

SEQ ID NO: 5071956 - DNA, 25 bp, Homo sapien
cagcctttcaagctatctttacggg

SEQ ID NO: 5071957 - DNA, 25 bp, Homo sapien
atcttcagtctggttgggcagcaga

SEQ ID NO: 5071958 - DNA, 25 bp, Homo sapien
tccgcctcgtgctgcaccaggaagt

SEQ ID NO: 5071959 - DNA, 25 bp, Homo sapien
cattgaaggcactggaaagagggca

SEQ ID NO: 5071960 - DNA, 25 bp, Homo sapien
gtgcaccgggcagcccatcttcagt

SEQ ID NO: 5071961 - DNA, 25 bp, Homo sapien
aaggaacatccttgctggaagctgc

SEQ ID NO: 5071962 - DNA, 25 bp, Homo sapien
gaaggaacatccttgctggaagctg

SEQ ID NO: 5071963 - DNA, 25 bp, Homo sapien
gagagggcaggtccgagcaggctcc

SEQ ID NO: 5071964 - DNA, 25 bp, Homo sapien
gcgcgtttagggcttcattaaactc

SEQ ID NO: 5071965 - DNA, 25 bp, Homo sapien
tgtgcgcgtttagggcttcattaaa

SEQ ID NO: 5071966 - DNA, 25 bp, Homo sapien
actgtgcgcgtttagggcttcatta

SEQ ID NO: 5071967 - DNA, 25 bp, Homo sapien
ttaatgatacactgtcctctatatc

SEQ ID NO: 5071968 - DNA, 25 bp, Homo sapien
tcttaatgatacactgtcctctata

SEQ ID NO: 5071969 - DNA, 25 bp, Homo sapien
tctcttaatgatacactgtcctcta

SEQ ID NO: 5071970 - DNA, 25 bp, Homo sapien
aatgatacactgtcctctatatcca

SEQ ID NO: 5071971 - DNA, 25 bp, Homo sapien
gtctgttccattggcgcacgttgcc

SEQ ID NO: 5071972 - DNA, 25 bp, Homo sapien
ccagcgcccttggtctgttccattg

SEQ ID NO: 5071973 - DNA, 25 bp, Homo sapien
ccttggtctgttccattggcgcacg

SEQ ID NO: 5071974 - DNA, 25 bp, Homo sapien
tgccaaagatggtcatttgcgttag

SEQ ID NO: 5071975 - DNA, 25 bp, Homo sapien
actctttattctccagccctgtacc

SEQ ID NO: 5071976 - DNA, 25 bp, Homo sapien
aaaaagattaggagcccagcgagcc

SEQ ID NO: 5071977 - DNA, 25 bp, Homo sapien
cgatttcagacagggccaaaaaggc

SEQ ID NO: 5071978 - DNA, 25 bp, Homo sapien
tccctctaaaaagtcggcgcgtctc

SEQ ID NO: 5071979 - DNA, 25 bp, Homo sapien
gcggctcggatacttgactaggaga

SEQ ID NO: 5071980 - DNA, 25 bp, Homo sapien
gccgccgccgctggagtaggactcg

SEQ ID NO: 5071981 - DNA, 25 bp, Homo sapien
tgctgccccgggacgaggtgtcaaa

SEQ ID NO: 5071982 - DNA, 25 bp, Homo sapien
ctgccccgggacgaggtgtcaaagt

SEQ ID NO: 5071983 - DNA, 25 bp, Homo sapien
cggcgtgcgcaggagagccgctgct

SEQ ID NO: 5071984 - DNA, 25 bp, Homo sapien
acccagagagaagacgcggggcagg

SEQ ID NO: 5071985 - DNA, 25 bp, Homo sapien
gagtagttcttggaaggaggtaaca

SEQ ID NO: 5071986 - DNA, 25 bp, Homo sapien
cagtgggtgcaaagattttcttgtc

SEQ ID NO: 5071987 - DNA, 25 bp, Homo sapien
tcccaggatgtcgagaggtgccagt

SEQ ID NO: 5071988 - DNA, 25 bp, Homo sapien
tcgccctcgctccagattacttgaa

SEQ ID NO: 5071989 - DNA, 25 bp, Homo sapien
attacttgaaggagtccaaccatgt

SEQ ID NO: 5071990 - DNA, 25 bp, Homo sapien
cttcgcacctgattcccagagcggc

SEQ ID NO: 5071991 - DNA, 25 bp, Homo sapien
gaaggagtccaaccatgtttctggg

SEQ ID NO: 5071992 - DNA, 25 bp, Homo sapien
caaggtgctccttcgttcctggggg

SEQ ID NO: 5071993 - DNA, 25 bp, Homo sapien
acacaggcggcatgagccaaccaag

SEQ ID NO: 5071994 - DNA, 25 bp, Homo sapien
gatccttacagaagacgggtcggcg

SEQ ID NO: 5071995 - DNA, 25 bp, Homo sapien
agcctcctgtccgtgatccttacag

SEQ ID NO: 5071996 - DNA, 25 bp, Homo sapien
aatgggcaggcgtctatgcgaaacc

SEQ ID NO: 5071997 - DNA, 25 bp, Homo sapien
gaggccctattacactctgctggac

SEQ ID NO: 5071998 - DNA, 25 bp, Homo sapien
cagggtctatgctaaaccaggcagt

SEQ ID NO: 5071999 - DNA, 25 bp, Homo sapien
tttttgcttcggtaatgaggcccta

SEQ ID NO: 5072000 - DNA, 25 bp, Homo sapien
gaactgtctcatatggatcggtcca

SEQ ID NO: 5072001 - DNA, 25 bp, Homo sapien
gaaaggcccatccactaattgccag

SEQ ID NO: 5072002 - DNA, 25 bp, Homo sapien
taaagttaccttgagcccaagatcg

SEQ ID NO: 5072003 - DNA, 25 bp, Homo sapien
gatcggtccactgagatgccataaa

SEQ ID NO: 5072004 - DNA, 25 bp, Homo sapien
caagcagttcctagttaaccacggt

SEQ ID NO: 5072005 - DNA, 25 bp, Homo sapien
aaatttcccgtagagggcactagag

SEQ ID NO: 5072006 - DNA, 25 bp, Homo sapien
tgaggctagcttgggaatcacagtc

SEQ ID NO: 5072007 - DNA, 25 bp, Homo sapien
tcccagtctggtacagttggcaaaa

SEQ ID NO: 5072008 - DNA, 25 bp, Homo sapien
ccatcaagaatcagcggaacagaca

SEQ ID NO: 5072009 - DNA, 25 bp, Homo sapien
tgcactcagcgttttggataggaaa

SEQ ID NO: 5072010 - DNA, 25 bp, Homo sapien
gataagcatttagtctccccaagga

SEQ ID NO: 5072011 - DNA, 25 bp, Homo sapien
catagccgcagcattcagataagca

SEQ ID NO: 5072012 - DNA, 25 bp, Homo sapien
ccaagttattgacggcaaaggtgcc

SEQ ID NO: 5072013 - DNA, 25 bp, Homo sapien
tcgtgggcatgctctcccaggtaga

SEQ ID NO: 5072014 - DNA, 25 bp, Homo sapien
tgtatgtcagactcggctccaaaga

SEQ ID NO: 5072015 - DNA, 25 bp, Homo sapien
tacgctgaaagcaactgcaaaagag

SEQ ID NO: 5072016 - DNA, 25 bp, Homo sapien
caatgagaaagacggccgaaaacac

SEQ ID NO: 5072017 - DNA, 25 bp, Homo sapien
aaggatgcgtgtgctccttccactg

SEQ ID NO: 5072018 - DNA, 25 bp, Homo sapien
cctgctgtaccctgttgctagggtg

SEQ ID NO: 5072019 - DNA, 25 bp, Homo sapien
cactgccaatgagaaagacggccga

SEQ ID NO: 5072020 - DNA, 25 bp, Homo sapien
gtccgtggtgtgtgctccccggtat

SEQ ID NO: 5072021 - DNA, 25 bp, Homo sapien
tatacatcagccagattcctcgcag

SEQ ID NO: 5072022 - DNA, 25 bp, Homo sapien
agattcctcgcagcaatggcttggt

SEQ ID NO: 5072023 - DNA, 25 bp, Homo sapien
tgctccccggtatacatcagccaga

SEQ ID NO: 5072024 - DNA, 25 bp, Homo sapien
gctggtcgtgatggcgttgatggtg

SEQ ID NO: 5072025 - DNA, 25 bp, Homo sapien
tggctggtcgtgatggcgttgatgg

SEQ ID NO: 5072026 - DNA, 25 bp, Homo sapien
cctggctggtcgtgatggcgttgat

SEQ ID NO: 5072027 - DNA, 25 bp, Homo sapien
tcgtgatggcgttgatggtggggat

SEQ ID NO: 5072028 - DNA, 25 bp, Homo sapien
tcacgccaggtcttgggagggccat

SEQ ID NO: 5072029 - DNA, 25 bp, Homo sapien
ggtggtgccaatggtcttgatcacg

SEQ ID NO: 5072030 - DNA, 25 bp, Homo sapien
tgcgagcgagggtatgggttggaca

SEQ ID NO: 5072031 - DNA, 25 bp, Homo sapien
tgggttggacatggaggtgatcact

SEQ ID NO: 5072032 - DNA, 25 bp, Homo sapien
taattccaagtatcctggggtctgg

SEQ ID NO: 5072033 - DNA, 25 bp, Homo sapien
caacaagtagtggatacaagaccca

SEQ ID NO: 5072034 - DNA, 25 bp, Homo sapien
cccagctttgtcctcgcaggagcag

SEQ ID NO: 5072035 - DNA, 25 bp, Homo sapien
gaaccatgtttgaaaggtccgtata

SEQ ID NO: 5072036 - DNA, 25 bp, Homo sapien
ctccccaagtggctctgcaccgtgg

SEQ ID NO: 5072037 - DNA, 25 bp, Homo sapien
ctctgcaccgtggttctgccattaa

SEQ ID NO: 5072038 - DNA, 25 bp, Homo sapien
ggctctgcaccgtggttctgccatt

SEQ ID NO: 5072039 - DNA, 25 bp, Homo sapien
ccccaagtggctctgcaccgtggtt

SEQ ID NO: 5072040 - DNA, 25 bp, Homo sapien
aagcatgaactctgctctactgagc

SEQ ID NO: 5072041 - DNA, 25 bp, Homo sapien
ctctggttctacagagccctgcaga

SEQ ID NO: 5072042 - DNA, 25 bp, Homo sapien
cggaaagcatgaactctgctctact

SEQ ID NO: 5072043 - DNA, 25 bp, Homo sapien
aatgctctggttctacagagccctg

SEQ ID NO: 5072044 - DNA, 25 bp, Homo sapien
ctctcccgccggatgcgacgcttct

SEQ ID NO: 5072045 - DNA, 25 bp, Homo sapien
tcggttccggcacttggctgcagcc

SEQ ID NO: 5072046 - DNA, 25 bp, Homo sapien
cgccggatgcgacgcttctcctcct

SEQ ID NO: 5072047 - DNA, 25 bp, Homo sapien
gcgtcggttccggcacttggctgca

SEQ ID NO: 5072048 - DNA, 25 bp, Homo sapien
cagggggcagggctattccggggcg

SEQ ID NO: 5072049 - DNA, 25 bp, Homo sapien
tccggggcgggtggtgaggagcgcc

SEQ ID NO: 5072050 - DNA, 25 bp, Homo sapien
aggagcgccacatggggcacagctc

SEQ ID NO: 5072051 - DNA, 25 bp, Homo sapien
cgggtggtgaggagcgccacatggg

SEQ ID NO: 5072052 - DNA, 25 bp, Homo sapien
tggataaacgctaagccctaggctg

SEQ ID NO: 5072053 - DNA, 25 bp, Homo sapien
gacacagaagtaacgtgacagcccg

SEQ ID NO: 5072054 - DNA, 25 bp, Homo sapien
tttccaaagtcaccgagctagcagg

SEQ ID NO: 5072055 - DNA, 25 bp, Homo sapien
tcatcagtgaggacatacgggcaag

SEQ ID NO: 5072056 - DNA, 25 bp, Homo sapien
gaaagagagggatgtgagggacagc

SEQ ID NO: 5072057 - DNA, 25 bp, Homo sapien
ccacggaaagagagggatgtgaggg

SEQ ID NO: 5072058 - DNA, 25 bp, Homo sapien
ctgccacggaaagagagggatgtga

SEQ ID NO: 5072059 - DNA, 25 bp, Homo sapien
aaagagagggatgtgagggacagca

SEQ ID NO: 5072060 - DNA, 25 bp, Homo sapien
cgctcctcggggctaatcttgcaca

SEQ ID NO: 5072061 - DNA, 25 bp, Homo sapien
tctccttctgcaggcctgacttctc

SEQ ID NO: 5072062 - DNA, 25 bp, Homo sapien
taatcttgcacactgggccgtgagc

SEQ ID NO: 5072063 - DNA, 25 bp, Homo sapien
ggccgtgagccaccaacatgaactc

SEQ ID NO: 5072064 - DNA, 25 bp, Homo sapien
gggcttgatgacagagcgctgggcc

SEQ ID NO: 5072065 - DNA, 25 bp, Homo sapien
cctgtttcaccactacagcgcccac

SEQ ID NO: 5072066 - DNA, 25 bp, Homo sapien
cccgccgacgaggacgaggggctgt

SEQ ID NO: 5072067 - DNA, 25 bp, Homo sapien
agcaatgctgatgggcttgatgaca

SEQ ID NO: 5072068 - DNA, 25 bp, Homo sapien
ccaggacgctaggataggtgaagac

SEQ ID NO: 5072069 - DNA, 25 bp, Homo sapien
aaggagtctgatgattggtccccgc

SEQ ID NO: 5072070 - DNA, 25 bp, Homo sapien
tgaagacgaggttcgaggtgcccgg

SEQ ID NO: 5072071 - DNA, 25 bp, Homo sapien
tgcttctgcggtgagccttggagca

SEQ ID NO: 5072072 - DNA, 25 bp, Homo sapien
tccggagctggggagggaggtgcac

SEQ ID NO: 5072073 - DNA, 25 bp, Homo sapien
ctgggaaggaggagcgaggaggacc

SEQ ID NO: 5072074 - DNA, 25 bp, Homo sapien
gagcgaggaggaccccctccggagc

SEQ ID NO: 5072075 - DNA, 25 bp, Homo sapien
gcgaggaggaccccctccggagctg

SEQ ID NO: 5072076 - DNA, 25 bp, Homo sapien
ccagagccaggaagctccctggtgg

SEQ ID NO: 5072077 - DNA, 25 bp, Homo sapien
ctggagcgcttgaaggtgctggtcc

SEQ ID NO: 5072078 - DNA, 25 bp, Homo sapien
tggcaggtccccctcttgccctcac

SEQ ID NO: 5072079 - DNA, 25 bp, Homo sapien
tgctaagtcccacctgggtccccca

SEQ ID NO: 5072080 - DNA, 25 bp, Homo sapien
gacagtatggtaacaaagggacagg

SEQ ID NO: 5072081 - DNA, 25 bp, Homo sapien
gatgtccaagtctaccaaaccgagt

SEQ ID NO: 5072082 - DNA, 25 bp, Homo sapien
tcaagtcgagggaaggtgaaaccaa

SEQ ID NO: 5072083 - DNA, 25 bp, Homo sapien
aaccaagagggagtgaaactgacgc

SEQ ID NO: 5072084 - DNA, 25 bp, Homo sapien
agagctttaatattcagaccaccca

SEQ ID NO: 5072085 - DNA, 25 bp, Homo sapien
aatgaagagctttaatattcagacc

SEQ ID NO: 5072086 - DNA, 25 bp, Homo sapien
tgaagagctttaatattcagaccac

SEQ ID NO: 5072087 - DNA, 25 bp, Homo sapien
gaagagctttaatattcagaccacc

SEQ ID NO: 5072088 - DNA, 25 bp, Homo sapien
cttctggacaagtcagccccagcag

SEQ ID NO: 5072089 - DNA, 25 bp, Homo sapien
ggagatgatgactgggaggcgtcag

SEQ ID NO: 5072090 - DNA, 25 bp, Homo sapien
ggtagggaaggctctgtattgcact

SEQ ID NO: 5072091 - DNA, 25 bp, Homo sapien
gactgggaggcgtcagggtagggaa

SEQ ID NO: 5072092 - DNA, 25 bp, Homo sapien
tccagaagccgtctccgaaggtggg

SEQ ID NO: 5072093 - DNA, 25 bp, Homo sapien
tgagcctcccagtgatggcagcatc

SEQ ID NO: 5072094 - DNA, 25 bp, Homo sapien
ctgtcttctggccaagccgttcctc

SEQ ID NO: 5072095 - DNA, 25 bp, Homo sapien
gtcttctggccaagccgttcctcca

SEQ ID NO: 5072096 - DNA, 25 bp, Homo sapien
ggcgtttggcaaacccaacctgtgc

SEQ ID NO: 5072097 - DNA, 25 bp, Homo sapien
gcagtaattacaggagacgccctac

SEQ ID NO: 5072098 - DNA, 25 bp, Homo sapien
cacccgtgtggctttgttggcatgc

SEQ ID NO: 5072099 - DNA, 25 bp, Homo sapien
gcccggcagggacttggagtataat

SEQ ID NO: 5072100 - DNA, 25 bp, Homo sapien
tgctgcagacgccactccagtgacg

SEQ ID NO: 5072101 - DNA, 25 bp, Homo sapien
tcaacagacaaccaggaatggcgca

SEQ ID NO: 5072102 - DNA, 25 bp, Homo sapien
gacaaccaggaatggcgcatgagcc

SEQ ID NO: 5072103 - DNA, 25 bp, Homo sapien
caggaatggcgcatgagccacaagc

SEQ ID NO: 5072104 - DNA, 25 bp, Homo sapien
aaaccccttggttgatgtatggcca

SEQ ID NO: 5072105 - DNA, 25 bp, Homo sapien
tttacacgagctgatcagagcgccc

SEQ ID NO: 5072106 - DNA, 25 bp, Homo sapien
aattatctgcttggagccggctcca

SEQ ID NO: 5072107 - DNA, 25 bp, Homo sapien
gatgattacccctgtgagagctgag

SEQ ID NO: 5072108 - DNA, 25 bp, Homo sapien
tttttgagaatcaggacaggatctt

SEQ ID NO: 5072109 - DNA, 25 bp, Homo sapien
caatgtagatgtcttggcgaccact

SEQ ID NO: 5072110 - DNA, 25 bp, Homo sapien
ctcttacaatgtagatgtcttggcg

SEQ ID NO: 5072111 - DNA, 25 bp, Homo sapien
cccagaggaatgaaaatccaccttt

SEQ ID NO: 5072112 - DNA, 25 bp, Homo sapien
gaaggtctatttaggagactctcca

SEQ ID NO: 5072113 - DNA, 25 bp, Homo sapien
tatacaacttgtttgcctccagagt

SEQ ID NO: 5072114 - DNA, 25 bp, Homo sapien
tttgagcttgcggttctgcctggaa

SEQ ID NO: 5072115 - DNA, 25 bp, Homo sapien
tatatacacatctcccacggcagaa

SEQ ID NO: 5072116 - DNA, 25 bp, Homo sapien
taggagcctgaagtaatcagtttgg

SEQ ID NO: 5072117 - DNA, 25 bp, Homo sapien
gcttggagtaggagcctgaagtaat

SEQ ID NO: 5072118 - DNA, 25 bp, Homo sapien
tggagtaggagcctgaagtaatcag

SEQ ID NO: 5072119 - DNA, 25 bp, Homo sapien
ggagcctgaagtaatcagtttggtt

SEQ ID NO: 5072120 - DNA, 25 bp, Homo sapien
caatgcccatatcgagggtggccat

SEQ ID NO: 5072121 - DNA, 25 bp, Homo sapien
ccgcagcaagaagtaggctgtgaat

SEQ ID NO: 5072122 - DNA, 25 bp, Homo sapien
ctgccgcagcaagaagtaggctgtg

SEQ ID NO: 5072123 - DNA, 25 bp, Homo sapien
cagcaagaagtaggctgtgaatacc

SEQ ID NO: 5072124 - DNA, 25 bp, Homo sapien
aagaagtaggctgtgaatacccggg

SEQ ID NO: 5072125 - DNA, 25 bp, Homo sapien
taatgatgacctaacgaggctccca

SEQ ID NO: 5072126 - DNA, 25 bp, Homo sapien
gacttgtaggcaagagggtcagccc

SEQ ID NO: 5072127 - DNA, 25 bp, Homo sapien
cagaggagagacaactaattcagcc

SEQ ID NO: 5072128 - DNA, 25 bp, Homo sapien
ttgactgagtaaaaagagcgacctg

SEQ ID NO: 5072129 - DNA, 25 bp, Homo sapien
ccggacagccaccaatctgtgttct

SEQ ID NO: 5072130 - DNA, 25 bp, Homo sapien
taagcagccagtgtcgcttttcgcc

SEQ ID NO: 5072131 - DNA, 25 bp, Homo sapien
cccagtctggtaatggaataaatgg

SEQ ID NO: 5072132 - DNA, 25 bp, Homo sapien
ggcatttagcacattcacgacgctg

SEQ ID NO: 5072133 - DNA, 25 bp, Homo sapien
cattcttggtgcagaagcttcctga

SEQ ID NO: 5072134 - DNA, 25 bp, Homo sapien
tgcgcaggggccaatgtccagttgt

SEQ ID NO: 5072135 - DNA, 25 bp, Homo sapien
gaaagactgtcatccatccaggtcc

SEQ ID NO: 5072136 - DNA, 25 bp, Homo sapien
ttgcgatgctcttgcagtgccctgg

SEQ ID NO: 5072137 - DNA, 25 bp, Homo sapien
cacgtgcatagggtcctccactgtc

SEQ ID NO: 5072138 - DNA, 25 bp, Homo sapien
cagaaagtacagagtgatcccagat

SEQ ID NO: 5072139 - DNA, 25 bp, Homo sapien
ggattccacagtttacactaggatt

SEQ ID NO: 5072140 - DNA, 25 bp, Homo sapien
tttctttccatcaatgaacctgcac

SEQ ID NO: 5072141 - DNA, 25 bp, Homo sapien
ccccaagctgagcggttttgtaggc

SEQ ID NO: 5072142 - DNA, 25 bp, Homo sapien
cccaagctgagcggttttgtaggca

SEQ ID NO: 5072143 - DNA, 25 bp, Homo sapien
ccaagctgagcggttttgtaggcat

SEQ ID NO: 5072144 - DNA, 25 bp, Homo sapien
atctttcatgctgggaggagttctc

SEQ ID NO: 5072145 - DNA, 25 bp, Homo sapien
ggactggacagatctttcatgctgg

SEQ ID NO: 5072146 - DNA, 25 bp, Homo sapien
agctggactggacagatctttcatg

SEQ ID NO: 5072147 - DNA, 25 bp, Homo sapien
gacatctgagtacccgaatctggaa

SEQ ID NO: 5072148 - DNA, 25 bp, Homo sapien
tgactggtggaaatcctacagactt

SEQ ID NO: 5072149 - DNA, 25 bp, Homo sapien
gactggtggaaatcctacagacttg

SEQ ID NO: 5072150 - DNA, 25 bp, Homo sapien
ggtggaaatcctacagacttgcacc

SEQ ID NO: 5072151 - DNA, 25 bp, Homo sapien
ctggtggaaatcctacagacttgca

SEQ ID NO: 5072152 - DNA, 25 bp, Homo sapien
tcctcagtccgaagagtgccctgga

SEQ ID NO: 5072153 - DNA, 25 bp, Homo sapien
ccccgctgatgaggccctctgcctc

SEQ ID NO: 5072154 - DNA, 25 bp, Homo sapien
cctcctcctcagtccgaagagtgcc

SEQ ID NO: 5072155 - DNA, 25 bp, Homo sapien
cctcctcagtccgaagagtgccctg

SEQ ID NO: 5072156 - DNA, 25 bp, Homo sapien
tatctctgatattagcgccttgggc

SEQ ID NO: 5072157 - DNA, 25 bp, Homo sapien
tagaggcacgtacttcggtgtccca

SEQ ID NO: 5072158 - DNA, 25 bp, Homo sapien
caaggtggtgacgtcttagaggcac

SEQ ID NO: 5072159 - DNA, 25 bp, Homo sapien
gactctgcccgcaatcagacgtggg

SEQ ID NO: 5072160 - DNA, 25 bp, Homo sapien
tgtgctgggacccacctggtctagg

SEQ ID NO: 5072161 - DNA, 25 bp, Homo sapien
cctgggagtcagtagtttagcaaac

SEQ ID NO: 5072162 - DNA, 25 bp, Homo sapien
tgtgttagtcatcaagggcacccag

SEQ ID NO: 5072163 - DNA, 25 bp, Homo sapien
tagatttatctgtacaggtgaccgc

SEQ ID NO: 5072164 - DNA, 25 bp, Homo sapien
gagctgctcagaccaagtttccaat

SEQ ID NO: 5072165 - DNA, 25 bp, Homo sapien
caagtttccaattgttcctctctgt

SEQ ID NO: 5072166 - DNA, 25 bp, Homo sapien
tcctctctgttgaccttgagatcca

SEQ ID NO: 5072167 - DNA, 25 bp, Homo sapien
tttgcttctgagacagagctgctca

SEQ ID NO: 5072168 - DNA, 25 bp, Homo sapien
gctggccatcagctagttccagagc

SEQ ID NO: 5072169 - DNA, 25 bp, Homo sapien
agtccagctggccatcagctagttc

SEQ ID NO: 5072170 - DNA, 25 bp, Homo sapien
ttagtccagctggccatcagctagt

SEQ ID NO: 5072171 - DNA, 25 bp, Homo sapien
ccagctggccatcagctagttccag

SEQ ID NO: 5072172 - DNA, 25 bp, Homo sapien
tgctccagcagatggatgggctatc

SEQ ID NO: 5072173 - DNA, 25 bp, Homo sapien
gatggatgggctatcacacctcctc

SEQ ID NO: 5072174 - DNA, 25 bp, Homo sapien
gccccatgccagaatgctccaggtg

SEQ ID NO: 5072175 - DNA, 25 bp, Homo sapien
tgtgttctgatagagcacctgtcat

SEQ ID NO: 5072176 - DNA, 25 bp, Homo sapien
cctcctatactaatatcttccacaa

SEQ ID NO: 5072177 - DNA, 25 bp, Homo sapien
gactcctcctatactaatatcttcc

SEQ ID NO: 5072178 - DNA, 25 bp, Homo sapien
gccctgactcctcctatactaatat

SEQ ID NO: 5072179 - DNA, 25 bp, Homo sapien
cctgactcctcctatactaatatct

SEQ ID NO: 5072180 - DNA, 25 bp, Homo sapien
ccatggtgaagacgaacaagcagac

SEQ ID NO: 5072181 - DNA, 25 bp, Homo sapien
gaagacagtcccatggtgaagacga

SEQ ID NO: 5072182 - DNA, 25 bp, Homo sapien
tcccatggtgaagacgaacaagcag

SEQ ID NO: 5072183 - DNA, 25 bp, Homo sapien
gacagtcccatggtgaagacgaaca

SEQ ID NO: 5072184 - DNA, 25 bp, Homo sapien
cagtcatccaagttggacagggctg

SEQ ID NO: 5072185 - DNA, 25 bp, Homo sapien
tcagtcatccaagttggacagggct

SEQ ID NO: 5072186 - DNA, 25 bp, Homo sapien
gtcatccaagttggacagggctgtg

SEQ ID NO: 5072187 - DNA, 25 bp, Homo sapien
catccaagttggacagggctgtgac

SEQ ID NO: 5072188 - DNA, 25 bp, Homo sapien
tgcctgttcccacagtaccccaagg

SEQ ID NO: 5072189 - DNA, 25 bp, Homo sapien
cctgttcccacagtaccccaaggtg

SEQ ID NO: 5072190 - DNA, 25 bp, Homo sapien
tttcaccaggtacagtgcctgttcc

SEQ ID NO: 5072191 - DNA, 25 bp, Homo sapien
tctgctttcaccaggtacagtgcct

SEQ ID NO: 5072192 - DNA, 25 bp, Homo sapien
caatgtactctttctaggagaggta

SEQ ID NO: 5072193 - DNA, 25 bp, Homo sapien
agctgcccttccaatgtactctttc

SEQ ID NO: 5072194 - DNA, 25 bp, Homo sapien
tgcccttccaatgtactctttctag

SEQ ID NO: 5072195 - DNA, 25 bp, Homo sapien
ccttccaatgtactctttctaggag

SEQ ID NO: 5072196 - DNA, 25 bp, Homo sapien
catttataactccttctggacactt

SEQ ID NO: 5072197 - DNA, 25 bp, Homo sapien
ggttcatggagataacaagcccatt

SEQ ID NO: 5072198 - DNA, 25 bp, Homo sapien
tggagataacaagcccatttataac

SEQ ID NO: 5072199 - DNA, 25 bp, Homo sapien
ccagattccttcagataactcccaa

SEQ ID NO: 5072200 - DNA, 25 bp, Homo sapien
gcatgggaatggagaattcttcagg

SEQ ID NO: 5072201 - DNA, 25 bp, Homo sapien
gatttagaaggcatattcactccta

SEQ ID NO: 5072202 - DNA, 25 bp, Homo sapien
catattcactcctaatttatttggg

SEQ ID NO: 5072203 - DNA, 25 bp, Homo sapien
tttatttgggttgcatgggaatgga

SEQ ID NO: 5072204 - DNA, 25 bp, Homo sapien
acagctgcggaggtccagtctgttg

SEQ ID NO: 5072205 - DNA, 25 bp, Homo sapien
tggacagctgcggaggtccagtctg

SEQ ID NO: 5072206 - DNA, 25 bp, Homo sapien
gacagctgcggaggtccagtctgtt

SEQ ID NO: 5072207 - DNA, 25 bp, Homo sapien
gctgcggaggtccagtctgttggcc

SEQ ID NO: 5072208 - DNA, 25 bp, Homo sapien
aatttaatatcagaaggcttcagag

SEQ ID NO: 5072209 - DNA, 25 bp, Homo sapien
tggctgccacaaatttaatatcaga

SEQ ID NO: 5072210 - DNA, 25 bp, Homo sapien
aatttccagattgccaatggctgcc

SEQ ID NO: 5072211 - DNA, 25 bp, Homo sapien
tttccagattgccaatggctgccac

SEQ ID NO: 5072212 - DNA, 25 bp, Homo sapien
gtgcaagtcactgacgggcttaaag

SEQ ID NO: 5072213 - DNA, 25 bp, Homo sapien
tagagaccaacgctgggcggagatt

SEQ ID NO: 5072214 - DNA, 25 bp, Homo sapien
tccgagatgagaccaaggagtgcaa

SEQ ID NO: 5072215 - DNA, 25 bp, Homo sapien
caaagagctctttccgagatgagac

SEQ ID NO: 5072216 - DNA, 25 bp, Homo sapien
tcagtgcacagacaatgatcctggg

SEQ ID NO: 5072217 - DNA, 25 bp, Homo sapien
aggtcatcctgatggagtcgtgttc

SEQ ID NO: 5072218 - DNA, 25 bp, Homo sapien
gctgggaggtcatcctgatggagtc

SEQ ID NO: 5072219 - DNA, 25 bp, Homo sapien
ccgtcagtgcacagacaatgatcct

SEQ ID NO: 5072220 - DNA, 25 bp, Homo sapien
gatcgcccgtccctgggtctggagg

SEQ ID NO: 5072221 - DNA, 25 bp, Homo sapien
tctccagatcgcccgtccctgggtc

SEQ ID NO: 5072222 - DNA, 25 bp, Homo sapien
tccagatcgcccgtccctgggtctg

SEQ ID NO: 5072223 - DNA, 25 bp, Homo sapien
cagatcgcccgtccctgggtctgga

SEQ ID NO: 5072224 - DNA, 25 bp, Homo sapien
gagtgtcaggctgcatttgtgtcac

SEQ ID NO: 5072225 - DNA, 25 bp, Homo sapien
tgagtgtcaggctgcatttgtgtca

SEQ ID NO: 5072226 - DNA, 25 bp, Homo sapien
gtgagtgtcaggctgcatttgtgtc

SEQ ID NO: 5072227 - DNA, 25 bp, Homo sapien
ctgtcatcactcccatgcacacctg

SEQ ID NO: 5072228 - DNA, 25 bp, Homo sapien
cccatgcacacctgctgtggccttt

SEQ ID NO: 5072229 - DNA, 25 bp, Homo sapien
tcactcccatgcacacctgctgtgg

SEQ ID NO: 5072230 - DNA, 25 bp, Homo sapien
catcactcccatgcacacctgctgt

SEQ ID NO: 5072231 - DNA, 25 bp, Homo sapien
gagcacttgcattgtaatctacgtc

SEQ ID NO: 5072232 - DNA, 25 bp, Homo sapien
ttgttcattactcccatggagcacc

SEQ ID NO: 5072233 - DNA, 25 bp, Homo sapien
ggagcaccagctcagcagagcactt

SEQ ID NO: 5072234 - DNA, 25 bp, Homo sapien
gcattgtaatctacgtcttcttgct

SEQ ID NO: 5072235 - DNA, 25 bp, Homo sapien
catcgtggggtatgactctctttcc

SEQ ID NO: 5072236 - DNA, 25 bp, Homo sapien
ggcacacaggcattggaacagaagg

SEQ ID NO: 5072237 - DNA, 25 bp, Homo sapien
cacaggcattggaacagaaggactg

SEQ ID NO: 5072238 - DNA, 25 bp, Homo sapien
acagaaggactgaaatatctgatga

SEQ ID NO: 5072239 - DNA, 25 bp, Homo sapien
ttcttgagcctgaatccacaagtct

SEQ ID NO: 5072240 - DNA, 25 bp, Homo sapien
tgtttctcaccagttcttgagcctg

SEQ ID NO: 5072241 - DNA, 25 bp, Homo sapien
cagttcttgagcctgaatccacaag

SEQ ID NO: 5072242 - DNA, 25 bp, Homo sapien
ctttcatgtttctcaccagttcttg

SEQ ID NO: 5072243 - DNA, 25 bp, Homo sapien
gaacacattgatgagcttccagtca

SEQ ID NO: 5072244 - DNA, 25 bp, Homo sapien
tggcttgcattactgaagaacacat

SEQ ID NO: 5072245 - DNA, 25 bp, Homo sapien
aggggcacaggtaacactggcttgc

SEQ ID NO: 5072246 - DNA, 25 bp, Homo sapien
gagcttccagtcaaattgaaagtca

SEQ ID NO: 5072247 - DNA, 25 bp, Homo sapien
ctgtgagaggagaaccgtgctaagt

SEQ ID NO: 5072248 - DNA, 25 bp, Homo sapien
gtgagaggagaaccgtgctaagtga

SEQ ID NO: 5072249 - DNA, 25 bp, Homo sapien
agaggagaaccgtgctaagtgaggg

SEQ ID NO: 5072250 - DNA, 25 bp, Homo sapien
ggagaaccgtgctaagtgagggtgc

SEQ ID NO: 5072251 - DNA, 25 bp, Homo sapien
atcagctcatccacgccgcccgccg

SEQ ID NO: 5072252 - DNA, 25 bp, Homo sapien
catcagctcatccacgccgcccgcc

SEQ ID NO: 5072253 - DNA, 25 bp, Homo sapien
gagccaagtgccgtgatactgacga

SEQ ID NO: 5072254 - DNA, 25 bp, Homo sapien
gtgatactgacgagagacctctgca

SEQ ID NO: 5072255 - DNA, 25 bp, Homo sapien
cagagaggtccaccaggtttacaaa

SEQ ID NO: 5072256 - DNA, 25 bp, Homo sapien
ggtccaccaggtttacaaatgctct

SEQ ID NO: 5072257 - DNA, 25 bp, Homo sapien
cagccgggtggtctcctctgagcaa

SEQ ID NO: 5072258 - DNA, 25 bp, Homo sapien
gccagccgggtggtctcctctgagc

SEQ ID NO: 5072259 - DNA, 25 bp, Homo sapien
gccgggtggtctcctctgagcaatt

SEQ ID NO: 5072260 - DNA, 25 bp, Homo sapien
cgggtggtctcctctgagcaattac

SEQ ID NO: 5072261 - DNA, 25 bp, Homo sapien
gatggggtggtctcatagaagaaag

SEQ ID NO: 5072262 - DNA, 25 bp, Homo sapien
tgctcactgtacctgctggaggcca

SEQ ID NO: 5072263 - DNA, 25 bp, Homo sapien
gaaggactcctgctcactgtacctg

SEQ ID NO: 5072264 - DNA, 25 bp, Homo sapien
gctggaaaaccacggtgaaggactc

SEQ ID NO: 5072265 - DNA, 25 bp, Homo sapien
ctctggcatagagttggggcagcct

SEQ ID NO: 5072266 - DNA, 25 bp, Homo sapien
tcatcaataacaggggcacttatgg

SEQ ID NO: 5072267 - DNA, 25 bp, Homo sapien
tctcagcccctcatcaataacaggg

SEQ ID NO: 5072268 - DNA, 25 bp, Homo sapien
agctctctctggcatagagttgggg

SEQ ID NO: 5072269 - DNA, 25 bp, Homo sapien
gagatgccaggccagcgtggtagaa

SEQ ID NO: 5072270 - DNA, 25 bp, Homo sapien
gatgccaggccagcgtggtagaatc

SEQ ID NO: 5072271 - DNA, 25 bp, Homo sapien
catcctattccagagatgccaggcc

SEQ ID NO: 5072272 - DNA, 25 bp, Homo sapien
cagagatgccaggccagcgtggtag

SEQ ID NO: 5072273 - DNA, 25 bp, Homo sapien
cactggcctggctgcagcgcagaac

SEQ ID NO: 5072274 - DNA, 25 bp, Homo sapien
tcactggcctggctgcagcgcagaa

SEQ ID NO: 5072275 - DNA, 25 bp, Homo sapien
agggctgaggctcctgtgagacctt

SEQ ID NO: 5072276 - DNA, 25 bp, Homo sapien
ggaaaccagggctgaggctcctgtg

SEQ ID NO: 5072277 - DNA, 25 bp, Homo sapien
gaggctcctgtgagacctttgctgc

SEQ ID NO: 5072278 - DNA, 25 bp, Homo sapien
gctgaggctcctgtgagacctttgc

SEQ ID NO: 5072279 - DNA, 25 bp, Homo sapien
gtcccttttgactctcgttcctctg

SEQ ID NO: 5072280 - DNA, 25 bp, Homo sapien
ttcttggtgcgtggcccagcacaac

SEQ ID NO: 5072281 - DNA, 25 bp, Homo sapien
ttttgactctcgttcctctgggctg

SEQ ID NO: 5072282 - DNA, 25 bp, Homo sapien
tgcgtggcccagcacaacactgctg

SEQ ID NO: 5072283 - DNA, 25 bp, Homo sapien
ttctaagcccttgtgacactctctg

SEQ ID NO: 5072284 - DNA, 25 bp, Homo sapien
tggccttgagggtgagaccttccat

SEQ ID NO: 5072285 - DNA, 25 bp, Homo sapien
tctctgtgtcgcaggcctttggcct

SEQ ID NO: 5072286 - DNA, 25 bp, Homo sapien
cttccattcctgtgtacgtgctcat

SEQ ID NO: 5072287 - DNA, 25 bp, Homo sapien
ggaaaagctgcacagcagaggttga

SEQ ID NO: 5072288 - DNA, 25 bp, Homo sapien
ggcctcccgtgttttacactcaatg

SEQ ID NO: 5072289 - DNA, 25 bp, Homo sapien
cattggcctcccgtgttttacactc

SEQ ID NO: 5072290 - DNA, 25 bp, Homo sapien
ggacacttcattggcctcccgtgtt

SEQ ID NO: 5072291 - DNA, 25 bp, Homo sapien
cccgtgttttacactcaatggctca

SEQ ID NO: 5072292 - DNA, 25 bp, Homo sapien
tgtagctgaacagataggggctctc

SEQ ID NO: 5072293 - DNA, 25 bp, Homo sapien
gacatctgatttccgctccttctct

SEQ ID NO: 5072294 - DNA, 25 bp, Homo sapien
cgtatcggaggggtctttgtcagga

SEQ ID NO: 5072295 - DNA, 25 bp, Homo sapien
ggacatctgatttccgctccttctc

SEQ ID NO: 5072296 - DNA, 25 bp, Homo sapien
ctgaggtgggaaccgtatcggaggg

SEQ ID NO: 5072297 - DNA, 25 bp, Homo sapien
aaatcactgggtgcaagctgtgtac

SEQ ID NO: 5072298 - DNA, 25 bp, Homo sapien
gaattttaaaatcactgggtgcaag

SEQ ID NO: 5072299 - DNA, 25 bp, Homo sapien
ttcaggcctcgaatgaattttaaaa

SEQ ID NO: 5072300 - DNA, 25 bp, Homo sapien
ttggatgatttcaggcctcgaatga

SEQ ID NO: 5072301 - DNA, 25 bp, Homo sapien
ttcaggttatgtggaaagcccttac

SEQ ID NO: 5072302 - DNA, 25 bp, Homo sapien
tatacatacagagttatttctgttg

SEQ ID NO: 5072303 - DNA, 25 bp, Homo sapien
tgttgtccctgagaaaccactcggg

SEQ ID NO: 5072304 - DNA, 25 bp, Homo sapien
accactcgggagtatttcaggttat

SEQ ID NO: 5072305 - DNA, 25 bp, Homo sapien
agagccactcccaatgaggatttgc

SEQ ID NO: 5072306 - DNA, 25 bp, Homo sapien
gggagagccactcccaatgaggatt

SEQ ID NO: 5072307 - DNA, 25 bp, Homo sapien
gagagccactcccaatgaggatttg

SEQ ID NO: 5072308 - DNA, 25 bp, Homo sapien
gagccactcccaatgaggatttgct

SEQ ID NO: 5072309 - DNA, 25 bp, Homo sapien
gcaggaagccggattaacattgagt

SEQ ID NO: 5072310 - DNA, 25 bp, Homo sapien
atggagacatcttgtctaccttctt

SEQ ID NO: 5072311 - DNA, 25 bp, Homo sapien
caaggtctcgtctcctttcatggag

SEQ ID NO: 5072312 - DNA, 25 bp, Homo sapien
aaaacatactcaagggacttccagg

SEQ ID NO: 5072313 - DNA, 25 bp, Homo sapien
aagacaccttggataaaagatagga

SEQ ID NO: 5072314 - DNA, 25 bp, Homo sapien
agataggaaaaacccatccttgtca

SEQ ID NO: 5072315 - DNA, 25 bp, Homo sapien
ccaagacaccttggataaaagatag

SEQ ID NO: 5072316 - DNA, 25 bp, Homo sapien
gacaccttggataaaagataggaaa

SEQ ID NO: 5072317 - DNA, 25 bp, Homo sapien
ggaacaacttccaggataacaaaga

SEQ ID NO: 5072318 - DNA, 25 bp, Homo sapien
gaacaacttccaggataacaaagaa

SEQ ID NO: 5072319 - DNA, 25 bp, Homo sapien
ggaaaatggggcttccaggaaagca

SEQ ID NO: 5072320 - DNA, 25 bp, Homo sapien
ctaagaatataagcaggagtgagtg

SEQ ID NO: 5072321 - DNA, 25 bp, Homo sapien
caggaaagcactggacccatctact

SEQ ID NO: 5072322 - DNA, 25 bp, Homo sapien
gagtgagtggaaaatggggcttcca

SEQ ID NO: 5072323 - DNA, 25 bp, Homo sapien
cagggctccaattacgttgatgtca

SEQ ID NO: 5072324 - DNA, 25 bp, Homo sapien
ccaattacgttgatgtcagccggct

SEQ ID NO: 5072325 - DNA, 25 bp, Homo sapien
gtcacccagggctccaattacgttg

SEQ ID NO: 5072326 - DNA, 25 bp, Homo sapien
gatgtcagccggcttcagcctatga

SEQ ID NO: 5072327 - DNA, 25 bp, Homo sapien
caagacgttcccaggtgtggacccg

SEQ ID NO: 5072328 - DNA, 25 bp, Homo sapien
tcggtactgagtcaagacgtccaag

SEQ ID NO: 5072329 - DNA, 25 bp, Homo sapien
ggacaggcctcggtactgagtcaag

SEQ ID NO: 5072330 - DNA, 25 bp, Homo sapien
tcaagacgtccaagacgttcccagg

SEQ ID NO: 5072331 - DNA, 25 bp, Homo sapien
ggttaaaatcccagccacgccgaga

SEQ ID NO: 5072332 - DNA, 25 bp, Homo sapien
ccataggccagcacatccaaacaaa

SEQ ID NO: 5072333 - DNA, 25 bp, Homo sapien
agcaaaccagaatacgactcccctc

SEQ ID NO: 5072334 - DNA, 25 bp, Homo sapien
gagacccttcagacactagccagaa

SEQ ID NO: 5072335 - DNA, 25 bp, Homo sapien
tcgccagggtggtaacggtgccgat

SEQ ID NO: 5072336 - DNA, 25 bp, Homo sapien
ggtggtaacggtgccgatgttctca

SEQ ID NO: 5072337 - DNA, 25 bp, Homo sapien
gtgccgatgttctcatctccgccga

SEQ ID NO: 5072338 - DNA, 25 bp, Homo sapien
gtaacggtgccgatgttctcatctc

SEQ ID NO: 5072339 - DNA, 25 bp, Homo sapien
cagggggagcgggaagcgtgcaggg

SEQ ID NO: 5072340 - DNA, 25 bp, Homo sapien
ctgcagggggagcgggaagcgtgca

SEQ ID NO: 5072341 - DNA, 25 bp, Homo sapien
tgcaggggccgccccaaaccaaaca

SEQ ID NO: 5072342 - DNA, 25 bp, Homo sapien
agcgggaagcgtgcaggggccgccc

SEQ ID NO: 5072343 - DNA, 25 bp, Homo sapien
gcgccccctggtgaatttagcgggc

SEQ ID NO: 5072344 - DNA, 25 bp, Homo sapien
ccaactctaaggctttcgtcactgt

SEQ ID NO: 5072345 - DNA, 25 bp, Homo sapien
cctggtgaatttagcgggctcctgc

SEQ ID NO: 5072346 - DNA, 25 bp, Homo sapien
ggaagcggagctgggcggcagtctc

SEQ ID NO: 5072347 - DNA, 25 bp, Homo sapien
ccacagcctggtttaagaaggcatt

SEQ ID NO: 5072348 - DNA, 25 bp, Homo sapien
cacagcctggtttaagaaggcatta

SEQ ID NO: 5072349 - DNA, 25 bp, Homo sapien
atcaggtccaccagcctcctggcct

SEQ ID NO: 5072350 - DNA, 25 bp, Homo sapien
agcctcctggcctggacaggtagat

SEQ ID NO: 5072351 - DNA, 25 bp, Homo sapien
cgtgtcattcttcatcaggtccacc

SEQ ID NO: 5072352 - DNA, 25 bp, Homo sapien
cctcctggcctggacaggtagatcc

SEQ ID NO: 5072353 - DNA, 25 bp, Homo sapien
acagaggtcattgccgcctataaac

SEQ ID NO: 5072354 - DNA, 25 bp, Homo sapien
ggtcattgccgcctataaacagggt

SEQ ID NO: 5072355 - DNA, 25 bp, Homo sapien
tataaacagggttattatcttccag

SEQ ID NO: 5072356 - DNA, 25 bp, Homo sapien
tgccgcctataaacagggttattat

SEQ ID NO: 5072357 - DNA, 25 bp, Homo sapien
catggaggatgtccagggcctttcc

SEQ ID NO: 5072358 - DNA, 25 bp, Homo sapien
gatgtccagggcctttccaatgttg

SEQ ID NO: 5072359 - DNA, 25 bp, Homo sapien
cagcatggaggatgtccagggcctt

SEQ ID NO: 5072360 - DNA, 25 bp, Homo sapien
tccaatgttgtctgtgaagttctgg

SEQ ID NO: 5072361 - DNA, 25 bp, Homo sapien
cctgctccccctctatgcatttggg

SEQ ID NO: 5072362 - DNA, 25 bp, Homo sapien
tgggcagcctttcacctcggtttgg

SEQ ID NO: 5072363 - DNA, 25 bp, Homo sapien
agatctagggacttccatctgcccc

SEQ ID NO: 5072364 - DNA, 25 bp, Homo sapien
aaggcaaactcagtcaccaagagga

SEQ ID NO: 5072365 - DNA, 25 bp, Homo sapien
accaggttcacaaatgcccgaggaa

SEQ ID NO: 5072366 - DNA, 25 bp, Homo sapien
ccaggttcacaaatgcccgaggaac

SEQ ID NO: 5072367 - DNA, 25 bp, Homo sapien
gctccctcaggttgacgatctcaag

SEQ ID NO: 5072368 - DNA, 25 bp, Homo sapien
tcctggtacagctccctcaggttga

SEQ ID NO: 5072369 - DNA, 25 bp, Homo sapien
gaggatcatccttgggcagtagact

SEQ ID NO: 5072370 - DNA, 25 bp, Homo sapien
tgaggatcatccttgggcagtagac

SEQ ID NO: 5072371 - DNA, 25 bp, Homo sapien
gagttatcatcaaacttcaggacac

SEQ ID NO: 5072372 - DNA, 25 bp, Homo sapien
tgaattcgatgagggtagcaagttc

SEQ ID NO: 5072373 - DNA, 25 bp, Homo sapien
aagttctgttgagttatcatcaaac

SEQ ID NO: 5072374 - DNA, 25 bp, Homo sapien
cttcttgttgaattcgatgagggta

SEQ ID NO: 5072375 - DNA, 25 bp, Homo sapien
tccacgttttcaaagaacggctgca

SEQ ID NO: 5072376 - DNA, 25 bp, Homo sapien
ccactctcaatcagttggtgggtct

SEQ ID NO: 5072377 - DNA, 25 bp, Homo sapien
aaatcttcccttgtgtcatatcgcc

SEQ ID NO: 5072378 - DNA, 25 bp, Homo sapien
agaacggctgcacaaccacagtaaa

SEQ ID NO: 5072379 - DNA, 25 bp, Homo sapien
aagtggaaacagtcaggagcgaaga

SEQ ID NO: 5072380 - DNA, 25 bp, Homo sapien
tcaggagcgaagaaagagttgtcag

SEQ ID NO: 5072381 - DNA, 25 bp, Homo sapien
ctcgggagtgagacttgctgctgaa

SEQ ID NO: 5072382 - DNA, 25 bp, Homo sapien
agcactggctgctcgggagtgagac

SEQ ID NO: 5072383 - DNA, 25 bp, Homo sapien
ctggttcggacatgtgatattgatc

SEQ ID NO: 5072384 - DNA, 25 bp, Homo sapien
acttatgacgagtcgtcttctggcc

SEQ ID NO: 5072385 - DNA, 25 bp, Homo sapien
cttgttttcaaacttatgacgagtc

SEQ ID NO: 5072386 - DNA, 25 bp, Homo sapien
tgacgagtcgtcttctggccaacag

SEQ ID NO: 5072387 - DNA, 25 bp, Homo sapien
tgtaggtcctcagaaacggctggac

SEQ ID NO: 5072388 - DNA, 25 bp, Homo sapien
tcttgtaggtcctcagaaacggctg

SEQ ID NO: 5072389 - DNA, 25 bp, Homo sapien
ttgtaggtcctcagaaacggctgga

SEQ ID NO: 5072390 - DNA, 25 bp, Homo sapien
ttcttgtaggtcctcagaaacggct

SEQ ID NO: 5072391 - DNA, 25 bp, Homo sapien
tgaggtagggtgcaaggcagaaggg

SEQ ID NO: 5072392 - DNA, 25 bp, Homo sapien
gaaggggctctgtccctgcatggca

SEQ ID NO: 5072393 - DNA, 25 bp, Homo sapien
tgcatggcagccaggtcccatgacc

SEQ ID NO: 5072394 - DNA, 25 bp, Homo sapien
ctgaggtagggtgcaaggcagaagg

SEQ ID NO: 5072395 - DNA, 25 bp, Homo sapien
ggccctgggtcctgctgtgccatag

SEQ ID NO: 5072396 - DNA, 25 bp, Homo sapien
cagcatagcagcccctgtggagggg

SEQ ID NO: 5072397 - DNA, 25 bp, Homo sapien
tgggtcctgctgtgccatagggggc

SEQ ID NO: 5072398 - DNA, 25 bp, Homo sapien
tcctgctgtgccatagggggcttac

SEQ ID NO: 5072399 - DNA, 25 bp, Homo sapien
gccacaacttggatgtctgcaggtc

SEQ ID NO: 5072400 - DNA, 25 bp, Homo sapien
cagccacaacttggatgtctgcagg

SEQ ID NO: 5072401 - DNA, 25 bp, Homo sapien
ccacaacttggatgtctgcaggtct

SEQ ID NO: 5072402 - DNA, 25 bp, Homo sapien
agcagccacaacttggatgtctgca

SEQ ID NO: 5072403 - DNA, 25 bp, Homo sapien
tggagctggcctagttatccccaaa

SEQ ID NO: 5072404 - DNA, 25 bp, Homo sapien
cccgcacagggaggtttaggagaat

SEQ ID NO: 5072405 - DNA, 25 bp, Homo sapien
catatccgtttgagaaagtggccgc

SEQ ID NO: 5072406 - DNA, 25 bp, Homo sapien
ggtgttcaaaatctctgcccgcaga

SEQ ID NO: 5072407 - DNA, 25 bp, Homo sapien
gtctggtttggagccaattccattg

SEQ ID NO: 5072408 - DNA, 25 bp, Homo sapien
gaggtcgtctggtttggagccaatt

SEQ ID NO: 5072409 - DNA, 25 bp, Homo sapien
ctgtatgacagtccccgatactgtg

SEQ ID NO: 5072410 - DNA, 25 bp, Homo sapien
gacagtccccgatactgtgtggtga

SEQ ID NO: 5072411 - DNA, 25 bp, Homo sapien
aggagtctgataagaaccctggttt

SEQ ID NO: 5072412 - DNA, 25 bp, Homo sapien
caggagtctgataagaaccctggtt

SEQ ID NO: 5072413 - DNA, 25 bp, Homo sapien
ccaggagtctgataagaaccctggt

SEQ ID NO: 5072414 - DNA, 25 bp, Homo sapien
tgttggatttgctgacccaggagtc

SEQ ID NO: 5072415 - DNA, 25 bp, Homo sapien
taccaagtgtcaagctgtctctcag

SEQ ID NO: 5072416 - DNA, 25 bp, Homo sapien
cttgtggaaacgcagggaccttggc

SEQ ID NO: 5072417 - DNA, 25 bp, Homo sapien
tggaaatattcacagccgagcctct

SEQ ID NO: 5072418 - DNA, 25 bp, Homo sapien
tggttatggcctctcgaagtgtgcg

SEQ ID NO: 5072419 - DNA, 25 bp, Homo sapien
ctccagggagccgtcccctcctgca

SEQ ID NO: 5072420 - DNA, 25 bp, Homo sapien
taggtaaggtggtcacattctccag

SEQ ID NO: 5072421 - DNA, 25 bp, Homo sapien
tctccagggagccgtcccctcctgc

SEQ ID NO: 5072422 - DNA, 25 bp, Homo sapien
gtaaggtggtcacattctccaggga

SEQ ID NO: 5072423 - DNA, 25 bp, Homo sapien
gtgtcattggcatcacccgtgccca

SEQ ID NO: 5072424 - DNA, 25 bp, Homo sapien
ccacggcgtagcctgtgaggtttct

SEQ ID NO: 5072425 - DNA, 25 bp, Homo sapien
agcctttgctccgggaacagcttga

SEQ ID NO: 5072426 - DNA, 25 bp, Homo sapien
tgaggaatgcattcgtgtcattggc

SEQ ID NO: 5072427 - DNA, 25 bp, Homo sapien
tccctgctctgcaggctccctccct

SEQ ID NO: 5072428 - DNA, 25 bp, Homo sapien
ctatccacattccactccctgctct

SEQ ID NO: 5072429 - DNA, 25 bp, Homo sapien
cctgctctgcaggctccctccctcc

SEQ ID NO: 5072430 - DNA, 25 bp, Homo sapien
actccctgctctgcaggctccctcc

SEQ ID NO: 5072431 - DNA, 25 bp, Homo sapien
cttctgcatcagagtttggacttgg

SEQ ID NO: 5072432 - DNA, 25 bp, Homo sapien
ttctgcatcagagtttggacttggc

SEQ ID NO: 5072433 - DNA, 25 bp, Homo sapien
tctgcatcagagtttggacttggct

SEQ ID NO: 5072434 - DNA, 25 bp, Homo sapien
atcttctgcatcagagtttggactt

SEQ ID NO: 5072435 - DNA, 25 bp, Homo sapien
gtagtcacataaatcgctgcctccg

SEQ ID NO: 5072436 - DNA, 25 bp, Homo sapien
taaatcgctgcctccgatcagcact

SEQ ID NO: 5072437 - DNA, 25 bp, Homo sapien
tgcctccgatcagcactgtgatgac

SEQ ID NO: 5072438 - DNA, 25 bp, Homo sapien
cgaatctgtgcagtagtcacataaa

SEQ ID NO: 5072439 - DNA, 25 bp, Homo sapien
tgaacagttgactacttgctgttgt

SEQ ID NO: 5072440 - DNA, 25 bp, Homo sapien
ctgagatgaacagttgactacttgc

SEQ ID NO: 5072441 - DNA, 25 bp, Homo sapien
gggaagactggaaccttcagccaga

SEQ ID NO: 5072442 - DNA, 25 bp, Homo sapien
cagccagagctttggttcaggagca

SEQ ID NO: 5072443 - DNA, 25 bp, Homo sapien
ctctctatgcaggacgtccaaggca

SEQ ID NO: 5072444 - DNA, 25 bp, Homo sapien
acgtccaaggcattgcggagatggt

SEQ ID NO: 5072445 - DNA, 25 bp, Homo sapien
gcattgcggagatggtgaacaaagt

SEQ ID NO: 5072446 - DNA, 25 bp, Homo sapien
tatgcaggacgtccaaggcattgcg

SEQ ID NO: 5072447 - DNA, 25 bp, Homo sapien
gaacacctgccgcatgatagtgggg

SEQ ID NO: 5072448 - DNA, 25 bp, Homo sapien
agtccacgaggttgaccaggactct

SEQ ID NO: 5072449 - DNA, 25 bp, Homo sapien
ggaagtccacgaggttgaccaggac

SEQ ID NO: 5072450 - DNA, 25 bp, Homo sapien
cctgccgcatgatagtggggttcag

SEQ ID NO: 5072451 - DNA, 25 bp, Homo sapien
accactgcatgtgggccagaccagg

SEQ ID NO: 5072452 - DNA, 25 bp, Homo sapien
gcagaagtcctcctttacagacttg

SEQ ID NO: 5072453 - DNA, 25 bp, Homo sapien
tggacacatggatagaccaagtcac

SEQ ID NO: 5072454 - DNA, 25 bp, Homo sapien
atggatagaccaagtcacaaagacc

SEQ ID NO: 5072455 - DNA, 25 bp, Homo sapien
gcctggtatcatagaagttcctgcc

SEQ ID NO: 5072456 - DNA, 25 bp, Homo sapien
tggtatcatagaagttcctgccagg

SEQ ID NO: 5072457 - DNA, 25 bp, Homo sapien
tatcatagaagttcctgccaggcac

SEQ ID NO: 5072458 - DNA, 25 bp, Homo sapien
tgcctggtatcatagaagttcctgc

SEQ ID NO: 5072459 - DNA, 25 bp, Homo sapien
tctaggctatcctgtctctcaaaca

SEQ ID NO: 5072460 - DNA, 25 bp, Homo sapien
tgctttctgttacagtttgaccaca

SEQ ID NO: 5072461 - DNA, 25 bp, Homo sapien
atatgtctacttccctaaccactgc

SEQ ID NO: 5072462 - DNA, 25 bp, Homo sapien
catgttcacagtctaggctatcctg

SEQ ID NO: 5072463 - DNA, 25 bp, Homo sapien
atgcctggtacacaggaagttctgt

SEQ ID NO: 5072464 - DNA, 25 bp, Homo sapien
aaacaatgcctggtacacaggaagt

SEQ ID NO: 5072465 - DNA, 25 bp, Homo sapien
caatgcctggtacacaggaagttct

SEQ ID NO: 5072466 - DNA, 25 bp, Homo sapien
acaatgcctggtacacaggaagttc

SEQ ID NO: 5072467 - DNA, 25 bp, Homo sapien
gggtcagaacgcagttacacaaaac

SEQ ID NO: 5072468 - DNA, 25 bp, Homo sapien
cggtaggctcggctgaaggcctcca

SEQ ID NO: 5072469 - DNA, 25 bp, Homo sapien
gctcttgggagttctcccgcagggt

SEQ ID NO: 5072470 - DNA, 25 bp, Homo sapien
ttctcccgcagggtcagaacgcagt

SEQ ID NO: 5072471 - DNA, 25 bp, Homo sapien
aagtcctcctgcgtgtcatagcggc

SEQ ID NO: 5072472 - DNA, 25 bp, Homo sapien
tcctgcgtgtcatagcggcctgacc

SEQ ID NO: 5072473 - DNA, 25 bp, Homo sapien
tgaccccaccagctcgcgcatgctg

SEQ ID NO: 5072474 - DNA, 25 bp, Homo sapien
agagaagtcctcctgcgtgtcatag

SEQ ID NO: 5072475 - DNA, 25 bp, Homo sapien
tttatgcacatgctcgtggaagcaa

SEQ ID NO: 5072476 - DNA, 25 bp, Homo sapien
aggcgttcagggagcctgcacctgc

SEQ ID NO: 5072477 - DNA, 25 bp, Homo sapien
gcacatgctcgtggaagcaactggc

SEQ ID NO: 5072478 - DNA, 25 bp, Homo sapien
caggcgttcagggagcctgcacctg

SEQ ID NO: 5072479 - DNA, 25 bp, Homo sapien
catattggtccaaagggctctggcc

SEQ ID NO: 5072480 - DNA, 25 bp, Homo sapien
tattggtccaaagggctctggccag

SEQ ID NO: 5072481 - DNA, 25 bp, Homo sapien
aaagaaggacgtatctgggagccca

SEQ ID NO: 5072482 - DNA, 25 bp, Homo sapien
gggcaaagaaggacgtatctgggag

SEQ ID NO: 5072483 - DNA, 25 bp, Homo sapien
agggtctctgttttgcttccaagtg

SEQ ID NO: 5072484 - DNA, 25 bp, Homo sapien
tcaggtccagggtctctgttttgct

SEQ ID NO: 5072485 - DNA, 25 bp, Homo sapien
tctctgttttgcttccaagtggttc

SEQ ID NO: 5072486 - DNA, 25 bp, Homo sapien
ctgttttgcttccaagtggttcaag

SEQ ID NO: 5072487 - DNA, 25 bp, Homo sapien
gatggggtacgtgtagttactattc

SEQ ID NO: 5072488 - DNA, 25 bp, Homo sapien
agttactattccgaggggttctcag

SEQ ID NO: 5072489 - DNA, 25 bp, Homo sapien
gcttgatggggtacgtgtagttact

SEQ ID NO: 5072490 - DNA, 25 bp, Homo sapien
ccgaggggttctcaggaagggctca

SEQ ID NO: 5072491 - DNA, 25 bp, Homo sapien
tctgagagaggcagatgtgagtcag

SEQ ID NO: 5072492 - DNA, 25 bp, Homo sapien
ggaaatggtttgtgtctgagagagg

SEQ ID NO: 5072493 - DNA, 25 bp, Homo sapien
acacccgagcccctggcaggtggaa

SEQ ID NO: 5072494 - DNA, 25 bp, Homo sapien
cccctggcaggtggaaatggtttgt

SEQ ID NO: 5072495 - DNA, 25 bp, Homo sapien
ccactctgtacacaggaagtcactg

SEQ ID NO: 5072496 - DNA, 25 bp, Homo sapien
ggaacactattggaagccttccact

SEQ ID NO: 5072497 - DNA, 25 bp, Homo sapien
tccactctgtacacaggaagtcact

SEQ ID NO: 5072498 - DNA, 25 bp, Homo sapien
cagaggttggaacactattggaagc

SEQ ID NO: 5072499 - DNA, 25 bp, Homo sapien
gatgtctgctggtcggagctggtgg

SEQ ID NO: 5072500 - DNA, 25 bp, Homo sapien
ttgatgtctgctggtcggagctggt

SEQ ID NO: 5072501 - DNA, 25 bp, Homo sapien
tgatgtctgctggtcggagctggtg

SEQ ID NO: 5072502 - DNA, 25 bp, Homo sapien
atgtctgctggtcggagctggtgga

SEQ ID NO: 5072503 - DNA, 25 bp, Homo sapien
ctgcccatcctggttcatggctcac

SEQ ID NO: 5072504 - DNA, 25 bp, Homo sapien
gctgcccatcctggttcatggctca

SEQ ID NO: 5072505 - DNA, 25 bp, Homo sapien
ccacgggcaatacgctggcctcctg

SEQ ID NO: 5072506 - DNA, 25 bp, Homo sapien
tgttactcctgcacatgcctctttc

SEQ ID NO: 5072507 - DNA, 25 bp, Homo sapien
cctgccacgggcaatacgctggcct

SEQ ID NO: 5072508 - DNA, 25 bp, Homo sapien
tccagtttctgttactcctgcacat

SEQ ID NO: 5072509 - DNA, 25 bp, Homo sapien
ctccaagatgtgggtaggtcactgg

SEQ ID NO: 5072510 - DNA, 25 bp, Homo sapien
ttgtttggtcgagctcccactgctg

SEQ ID NO: 5072511 - DNA, 25 bp, Homo sapien
gagttgtttggtcgagctcccactg

SEQ ID NO: 5072512 - DNA, 25 bp, Homo sapien
cactggagttgtttggtcgagctcc

SEQ ID NO: 5072513 - DNA, 25 bp, Homo sapien
gcatcatcaatagagcatgcatcaa

SEQ ID NO: 5072514 - DNA, 25 bp, Homo sapien
ctctgagagagcatcatcaatagag

SEQ ID NO: 5072515 - DNA, 25 bp, Homo sapien
gagcatgcatcaagaacatcctcac

SEQ ID NO: 5072516 - DNA, 25 bp, Homo sapien
gagagagcatcatcaatagagcatg

SEQ ID NO: 5072517 - DNA, 25 bp, Homo sapien
cagtgtggtgtgagtctccaagttc

SEQ ID NO: 5072518 - DNA, 25 bp, Homo sapien
gtgtggtgtgagtctccaagttccc

SEQ ID NO: 5072519 - DNA, 25 bp, Homo sapien
gtggtgtgagtctccaagttcccat

SEQ ID NO: 5072520 - DNA, 25 bp, Homo sapien
tgtggtgtgagtctccaagttccca

SEQ ID NO: 5072521 - DNA, 25 bp, Homo sapien
gaggtaagggttgaacttcttcaga

SEQ ID NO: 5072522 - DNA, 25 bp, Homo sapien
ccacatttagtcctgctgtcccctc

SEQ ID NO: 5072523 - DNA, 25 bp, Homo sapien
tgctggtagagaagccaaggaggta

SEQ ID NO: 5072524 - DNA, 25 bp, Homo sapien
gctggtagagaagccaaggaggtaa

SEQ ID NO: 5072525 - DNA, 25 bp, Homo sapien
gaaaactcctgtgggtgatgaacac

SEQ ID NO: 5072526 - DNA, 25 bp, Homo sapien
taccgaataacatggatgcatcgca

SEQ ID NO: 5072527 - DNA, 25 bp, Homo sapien
tgagcgatatgaatgccaacggaac

SEQ ID NO: 5072528 - DNA, 25 bp, Homo sapien
ggacgaactattggtataccgaata

SEQ ID NO: 5072529 - DNA, 25 bp, Homo sapien
gaatgatgttaccagtacaaaggtc

SEQ ID NO: 5072530 - DNA, 25 bp, Homo sapien
tgccggctcaggagcgaggactcac

SEQ ID NO: 5072531 - DNA, 25 bp, Homo sapien
ctcacgacatgggattttggcctag

SEQ ID NO: 5072532 - DNA, 25 bp, Homo sapien
gaagagaggtgtttcaagaagaatg

SEQ ID NO: 5072533 - DNA, 25 bp, Homo sapien
tttcattcgctctaccaggtcccag

SEQ ID NO: 5072534 - DNA, 25 bp, Homo sapien
ttttcattcgctctaccaggtccca

SEQ ID NO: 5072535 - DNA, 25 bp, Homo sapien
tttttcattcgctctaccaggtccc

SEQ ID NO: 5072536 - DNA, 25 bp, Homo sapien
ggtgccacagcctgcgtctaggagt

SEQ ID NO: 5072537 - DNA, 25 bp, Homo sapien
taaggactgcttctccgaggatctt

SEQ ID NO: 5072538 - DNA, 25 bp, Homo sapien
ttttggctagcccaaagcaggaagt

SEQ ID NO: 5072539 - DNA, 25 bp, Homo sapien
ccttggtaaggactgcttctccgag

SEQ ID NO: 5072540 - DNA, 25 bp, Homo sapien
gaagagtgtgaccagcttccagtct

SEQ ID NO: 5072541 - DNA, 25 bp, Homo sapien
ccaatgaagagtgtgaccagcttcc

SEQ ID NO: 5072542 - DNA, 25 bp, Homo sapien
cacaagtcgttgaccccaatgaaga

SEQ ID NO: 5072543 - DNA, 25 bp, Homo sapien
cggattctcacagtaatgacacaag

SEQ ID NO: 5072544 - DNA, 25 bp, Homo sapien
ccttctcaggtccccatggggttgg

SEQ ID NO: 5072545 - DNA, 25 bp, Homo sapien
ctcaggtccccatggggttggtcgg

SEQ ID NO: 5072546 - DNA, 25 bp, Homo sapien
ttctcaggtccccatggggttggtc

SEQ ID NO: 5072547 - DNA, 25 bp, Homo sapien
cttccttctcaggtccccatggggt

SEQ ID NO: 5072548 - DNA, 25 bp, Homo sapien
cagggatggatgggcaaggatgttg

SEQ ID NO: 5072549 - DNA, 25 bp, Homo sapien
gatgggcaaggatgttgccagaggt

SEQ ID NO: 5072550 - DNA, 25 bp, Homo sapien
gatggatgggcaaggatgttgccag

SEQ ID NO: 5072551 - DNA, 25 bp, Homo sapien
caaggatgttgccagaggtcagcac

SEQ ID NO: 5072552 - DNA, 25 bp, Homo sapien
agcaggcaaatgtggttcccatgag

SEQ ID NO: 5072553 - DNA, 25 bp, Homo sapien
attggggaaccaatgcacctgctct

SEQ ID NO: 5072554 - DNA, 25 bp, Homo sapien
ttggggaaccaatgcacctgctctt

SEQ ID NO: 5072555 - DNA, 25 bp, Homo sapien
gcctggcatgtgtaaaccagggagg

SEQ ID NO: 5072556 - DNA, 25 bp, Homo sapien
ctagagtgtgggtggtcagggagag

SEQ ID NO: 5072557 - DNA, 25 bp, Homo sapien
agagtgtgggtggtcagggagagaa

SEQ ID NO: 5072558 - DNA, 25 bp, Homo sapien
tagagtgtgggtggtcagggagaga

SEQ ID NO: 5072559 - DNA, 25 bp, Homo sapien
cttaaatccccatgagttagggtca

SEQ ID NO: 5072560 - DNA, 25 bp, Homo sapien
acacagcaatacttaaatccccatg

SEQ ID NO: 5072561 - DNA, 25 bp, Homo sapien
aatccccatgagttagggtcacttc

SEQ ID NO: 5072562 - DNA, 25 bp, Homo sapien
gtccagaacacagcaatacttaaat

SEQ ID NO: 5072563 - DNA, 25 bp, Homo sapien
ctggtgcccgctctgagagaatggc

SEQ ID NO: 5072564 - DNA, 25 bp, Homo sapien
gggtactctctttagcccctggtgc

SEQ ID NO: 5072565 - DNA, 25 bp, Homo sapien
tgcccgctctgagagaatggcaaga

SEQ ID NO: 5072566 - DNA, 25 bp, Homo sapien
tggcaagagcataggagggctctgg

SEQ ID NO: 5072567 - DNA, 25 bp, Homo sapien
tccagggcctgttggatgtgctgaa

SEQ ID NO: 5072568 - DNA, 25 bp, Homo sapien
aacatattccgtggccaagtgggcc

SEQ ID NO: 5072569 - DNA, 25 bp, Homo sapien
ctgttggatgtgctgaacatattcc

SEQ ID NO: 5072570 - DNA, 25 bp, Homo sapien
gctgaacatattccgtggccaagtg

SEQ ID NO: 5072571 - DNA, 25 bp, Homo sapien
ccacgttgacgaaagcccttgggag

SEQ ID NO: 5072572 - DNA, 25 bp, Homo sapien
ggccctggtacaggctagccagctc

SEQ ID NO: 5072573 - DNA, 25 bp, Homo sapien
tccaccacgttgacgaaagcccttg

SEQ ID NO: 5072574 - DNA, 25 bp, Homo sapien
tgacctccaccacgttgacgaaagc

SEQ ID NO: 5072575 - DNA, 25 bp, Homo sapien
gtgagacagggagtgttgtattgag

SEQ ID NO: 5072576 - DNA, 25 bp, Homo sapien
tgtgagacagggagtgttgtattga

SEQ ID NO: 5072577 - DNA, 25 bp, Homo sapien
tgagacagggagtgttgtattgagg

SEQ ID NO: 5072578 - DNA, 25 bp, Homo sapien
agctttgcgagtgtctgaggcaagt

SEQ ID NO: 5072579 - DNA, 25 bp, Homo sapien
ggagctttgcgagtgtctgaggcaa

SEQ ID NO: 5072580 - DNA, 25 bp, Homo sapien
tccagggagctttgcgagtgtctga

SEQ ID NO: 5072581 - DNA, 25 bp, Homo sapien
tttgcgagtgtctgaggcaagtgca

SEQ ID NO: 5072582 - DNA, 25 bp, Homo sapien
gttttggaagaaaggctgcaccaca

SEQ ID NO: 5072583 - DNA, 25 bp, Homo sapien
cacgctgtgtgtattggtgccagta

SEQ ID NO: 5072584 - DNA, 25 bp, Homo sapien
caaccgcaaagtcctcacgctgtgt

SEQ ID NO: 5072585 - DNA, 25 bp, Homo sapien
aaaggctgcaccacaaccgcaaagt

SEQ ID NO: 5072586 - DNA, 25 bp, Homo sapien
tgcgatggccatctcggcatgcccg

SEQ ID NO: 5072587 - DNA, 25 bp, Homo sapien
aacagtcctcggagaagaaggtgag

SEQ ID NO: 5072588 - DNA, 25 bp, Homo sapien
catgttgttccagagtgcgatggcc

SEQ ID NO: 5072589 - DNA, 25 bp, Homo sapien
catgcccgcggtctgagaagtgaaa

SEQ ID NO: 5072590 - DNA, 25 bp, Homo sapien
gattgtgttacccactgagcctgga

SEQ ID NO: 5072591 - DNA, 25 bp, Homo sapien
tacaatccggagtcttgggctgaaa

SEQ ID NO: 5072592 - DNA, 25 bp, Homo sapien
gaaagtcaatattgtgagtcagccg

SEQ ID NO: 5072593 - DNA, 25 bp, Homo sapien
ttaactaggccaaggataaagccag

SEQ ID NO: 5072594 - DNA, 25 bp, Homo sapien
ggagatacaaacactggctgagagc

SEQ ID NO: 5072595 - DNA, 25 bp, Homo sapien
ctggggagatacaaacactggctga

SEQ ID NO: 5072596 - DNA, 25 bp, Homo sapien
acaaacactggctgagagcaggatt

SEQ ID NO: 5072597 - DNA, 25 bp, Homo sapien
caaacactggctgagagcaggattt

SEQ ID NO: 5072598 - DNA, 25 bp, Homo sapien
aatcatccacccagtttcttagacc

SEQ ID NO: 5072599 - DNA, 25 bp, Homo sapien
gtatcctgatacctctatgtggatg

SEQ ID NO: 5072600 - DNA, 25 bp, Homo sapien
ttccaaacttctgtatcctgatacc

SEQ ID NO: 5072601 - DNA, 25 bp, Homo sapien
tttctctacctgctcaatcatccac

SEQ ID NO: 5072602 - DNA, 25 bp, Homo sapien
gggcacttgagtttggctcggctgt

SEQ ID NO: 5072603 - DNA, 25 bp, Homo sapien
gctgtgggtgaagttgttggaggta

SEQ ID NO: 5072604 - DNA, 25 bp, Homo sapien
agtttggctcggctgtgggtgaagt

SEQ ID NO: 5072605 - DNA, 25 bp, Homo sapien
gttggaggtagtcttgcggcccact

SEQ ID NO: 5072606 - DNA, 25 bp, Homo sapien
ccccattcctgagatgctgcgataa

SEQ ID NO: 5072607 - DNA, 25 bp, Homo sapien
agccaagacttgcctagtccccatt

SEQ ID NO: 5072608 - DNA, 25 bp, Homo sapien
gctgcgataaccctgcacgttttca

SEQ ID NO: 5072609 - DNA, 25 bp, Homo sapien
aaaggatctccgtgaaccatccatc

SEQ ID NO: 5072610 - DNA, 25 bp, Homo sapien
ctgggacagcccagtagagcacctc

SEQ ID NO: 5072611 - DNA, 25 bp, Homo sapien
gcaatcggctgttccgcagggtgta

SEQ ID NO: 5072612 - DNA, 25 bp, Homo sapien
gcagggtgtagaggtaagggctctc

SEQ ID NO: 5072613 - DNA, 25 bp, Homo sapien
cctggtctgggagcaatcggctgtt

SEQ ID NO: 5072614 - DNA, 25 bp, Homo sapien
acagtgcgcaggctcattggaggat

SEQ ID NO: 5072615 - DNA, 25 bp, Homo sapien
gccacagtgcgcaggctcattggag

SEQ ID NO: 5072616 - DNA, 25 bp, Homo sapien
agtgcgcaggctcattggaggatct

SEQ ID NO: 5072617 - DNA, 25 bp, Homo sapien
tggaggatcttccctccggccacct

SEQ ID NO: 5072618 - DNA, 25 bp, Homo sapien
caggccccaagaagttgtgactgtc

SEQ ID NO: 5072619 - DNA, 25 bp, Homo sapien
cagagggcggtgaagagagtggcta

SEQ ID NO: 5072620 - DNA, 25 bp, Homo sapien
cctatggcaccaggcattgaagcat

SEQ ID NO: 5072621 - DNA, 25 bp, Homo sapien
gactgtcccctgggcttcctatggc

SEQ ID NO: 5072622 - DNA, 25 bp, Homo sapien
ctggaggcaggccacaaaaagtggc

SEQ ID NO: 5072623 - DNA, 25 bp, Homo sapien
gaaggtgagtgcttcacgcaggcaa

SEQ ID NO: 5072624 - DNA, 25 bp, Homo sapien
tggaggcaggccacaaaaagtggca

SEQ ID NO: 5072625 - DNA, 25 bp, Homo sapien
gtgcttcacgcaggcaaacccagga

SEQ ID NO: 5072626 - DNA, 25 bp, Homo sapien
atatgctcgtggtggcaggcagttt

SEQ ID NO: 5072627 - DNA, 25 bp, Homo sapien
tctggttggtcgtggcttgggcagc

SEQ ID NO: 5072628 - DNA, 25 bp, Homo sapien
tgcctttgaaatagtgggtttggtg

SEQ ID NO: 5072629 - DNA, 25 bp, Homo sapien
ggtttggtgacttgaggatatgctc

SEQ ID NO: 5072630 - DNA, 25 bp, Homo sapien
gattggactgaatggcaaccagcca

SEQ ID NO: 5072631 - DNA, 25 bp, Homo sapien
aatgacatgtgaaggttgctctccc

SEQ ID NO: 5072632 - DNA, 25 bp, Homo sapien
tagtagttacacatcatcacgtggc

SEQ ID NO: 5072633 - DNA, 25 bp, Homo sapien
tgcgacatgcacagcctaggaggca

SEQ ID NO: 5072634 - DNA, 25 bp, Homo sapien
tccacccatatgttattaccccatt

SEQ ID NO: 5072635 - DNA, 25 bp, Homo sapien
tccctgagaggaaggcgggcactct

SEQ ID NO: 5072636 - DNA, 25 bp, Homo sapien
cgggcactctccacccatatgttat

SEQ ID NO: 5072637 - DNA, 25 bp, Homo sapien
taaggtgatgaacctccctgagagg

SEQ ID NO: 5072638 - DNA, 25 bp, Homo sapien
tgacttggtcaccacgttttccagt

SEQ ID NO: 5072639 - DNA, 25 bp, Homo sapien
ggagcataagctgggatgtgtgact

SEQ ID NO: 5072640 - DNA, 25 bp, Homo sapien
cgggagcataagctgggatgtgtga

SEQ ID NO: 5072641 - DNA, 25 bp, Homo sapien
gtgtgacttggtcaccacgttttcc

SEQ ID NO: 5072642 - DNA, 25 bp, Homo sapien
tgtcgttatactgtctcaaaccagg

SEQ ID NO: 5072643 - DNA, 25 bp, Homo sapien
ttatactgtctcaaaccaggagtgt

SEQ ID NO: 5072644 - DNA, 25 bp, Homo sapien
ctttgtcgttatactgtctcaaacc

SEQ ID NO: 5072645 - DNA, 25 bp, Homo sapien
tcgttatactgtctcaaaccaggag

SEQ ID NO: 5072646 - DNA, 25 bp, Homo sapien
gaatccatgctgctttgaggtagga

SEQ ID NO: 5072647 - DNA, 25 bp, Homo sapien
taggagctgcgggaagaatagaaac

SEQ ID NO: 5072648 - DNA, 25 bp, Homo sapien
ctgtgggtgccgttctagctagact

SEQ ID NO: 5072649 - DNA, 25 bp, Homo sapien
gggcggtgaagcgaactccttgact

SEQ ID NO: 5072650 - DNA, 25 bp, Homo sapien
gcctgcacgggacacatcaggaggc

SEQ ID NO: 5072651 - DNA, 25 bp, Homo sapien
acacatcaggaggctcagccgtgtt

SEQ ID NO: 5072652 - DNA, 25 bp, Homo sapien
atcaggaggctcagccgtgttggct

SEQ ID NO: 5072653 - DNA, 25 bp, Homo sapien
catcaggaggctcagccgtgttggc

SEQ ID NO: 5072654 - DNA, 25 bp, Homo sapien
aactggagcacaccctggtcctggt

SEQ ID NO: 5072655 - DNA, 25 bp, Homo sapien
gtcactaactggagcacaccctggt

SEQ ID NO: 5072656 - DNA, 25 bp, Homo sapien
cctggtttacagtgagcattagcca

SEQ ID NO: 5072657 - DNA, 25 bp, Homo sapien
accctggtcctggtttacagtgagc

SEQ ID NO: 5072658 - DNA, 25 bp, Homo sapien
ttcctgccatctggctcaattcagc

SEQ ID NO: 5072659 - DNA, 25 bp, Homo sapien
cctgccatctggctcaattcagcca

SEQ ID NO: 5072660 - DNA, 25 bp, Homo sapien
ttttcctgccatctggctcaattca

SEQ ID NO: 5072661 - DNA, 25 bp, Homo sapien
gccatctggctcaattcagccacca

SEQ ID NO: 5072662 - DNA, 25 bp, Homo sapien
ttggggcaccaaagctaaagccttg

SEQ ID NO: 5072663 - DNA, 25 bp, Homo sapien
caccaaagctaaagccttgtgcagc

SEQ ID NO: 5072664 - DNA, 25 bp, Homo sapien
gctaaagccttgtgcagccaatgat

SEQ ID NO: 5072665 - DNA, 25 bp, Homo sapien
aaagccttgtgcagccaatgatgag

SEQ ID NO: 5072666 - DNA, 25 bp, Homo sapien
actggctgatctggtgtgttcttac

SEQ ID NO: 5072667 - DNA, 25 bp, Homo sapien
ctgttactggctgatctggtgtgtt

SEQ ID NO: 5072668 - DNA, 25 bp, Homo sapien
tactggctgatctggtgtgttctta

SEQ ID NO: 5072669 - DNA, 25 bp, Homo sapien
gttactggctgatctggtgtgttct

SEQ ID NO: 5072670 - DNA, 25 bp, Homo sapien
ggagcagttcagaaattccaggaac

SEQ ID NO: 5072671 - DNA, 25 bp, Homo sapien
caggagcagttcagaaattccagga

SEQ ID NO: 5072672 - DNA, 25 bp, Homo sapien
tcaggagcagttcagaaattccagg

SEQ ID NO: 5072673 - DNA, 25 bp, Homo sapien
agcagttcagaaattccaggaacct

SEQ ID NO: 5072674 - DNA, 25 bp, Homo sapien
ctcttgctgtaggtgaccgtgtcct

SEQ ID NO: 5072675 - DNA, 25 bp, Homo sapien
tcttgctgtaggtgaccgtgtcctt

SEQ ID NO: 5072676 - DNA, 25 bp, Homo sapien
cctcttgctgtaggtgaccgtgtcc

SEQ ID NO: 5072677 - DNA, 25 bp, Homo sapien
cttgctgtaggtgaccgtgtccttg

SEQ ID NO: 5072678 - DNA, 25 bp, Homo sapien
gcaggacctgaagactggcgtgctc

SEQ ID NO: 5072679 - DNA, 25 bp, Homo sapien
caggacctgaagactggcgtgctca

SEQ ID NO: 5072680 - DNA, 25 bp, Homo sapien
aggacctgaagactggcgtgctcag

SEQ ID NO: 5072681 - DNA, 25 bp, Homo sapien
ggacctgaagactggcgtgctcagg

SEQ ID NO: 5072682 - DNA, 25 bp, Homo sapien
tgtgggactacaagctgtcctgtac

SEQ ID NO: 5072683 - DNA, 25 bp, Homo sapien
tgccgtgtgggactacaagctgtcc

SEQ ID NO: 5072684 - DNA, 25 bp, Homo sapien
cgaccgactgccgtgtgggactaca

SEQ ID NO: 5072685 - DNA, 25 bp, Homo sapien
gtgcggttggccgaccgactgccgt

SEQ ID NO: 5072686 - DNA, 25 bp, Homo sapien
cagtttacaactctgtcacaggata

SEQ ID NO: 5072687 - DNA, 25 bp, Homo sapien
tctggcacagatgtaaatgacaggc

SEQ ID NO: 5072688 - DNA, 25 bp, Homo sapien
ggaagatgcctgttgactgtgacaa

SEQ ID NO: 5072689 - DNA, 25 bp, Homo sapien
ggtacaaagcctctgcagtttacaa

SEQ ID NO: 5072690 - DNA, 25 bp, Homo sapien
actccagcagactggaggtcgctca

SEQ ID NO: 5072691 - DNA, 25 bp, Homo sapien
tgtgtggaatgctggctccactcca

SEQ ID NO: 5072692 - DNA, 25 bp, Homo sapien
cagactggaggtcgctcacagctgt

SEQ ID NO: 5072693 - DNA, 25 bp, Homo sapien
ccttttggctgttgccgtgtgtgga

SEQ ID NO: 5072694 - DNA, 25 bp, Homo sapien
aaggtccttgcaaattcctctgagg

SEQ ID NO: 5072695 - DNA, 25 bp, Homo sapien
tccttttagcgagcacaggctgttc

SEQ ID NO: 5072696 - DNA, 25 bp, Homo sapien
aaaagcttaactttctccgagcagg

SEQ ID NO: 5072697 - DNA, 25 bp, Homo sapien
ttttggtacataagcaagccttgac

SEQ ID NO: 5072698 - DNA, 25 bp, Homo sapien
tataaagaaccaagatgatccagga

SEQ ID NO: 5072699 - DNA, 25 bp, Homo sapien
ctataaagaaccaagatgatccagg

SEQ ID NO: 5072700 - DNA, 25 bp, Homo sapien
cagtttgttgtctgttggctgtgct

SEQ ID NO: 5072701 - DNA, 25 bp, Homo sapien
aaggcagtttgttgtctgttggctg

SEQ ID NO: 5072702 - DNA, 25 bp, Homo sapien
tggatgaaaggccagcgccttggga

SEQ ID NO: 5072703 - DNA, 25 bp, Homo sapien
cagccttcggtggttttggatgaaa

SEQ ID NO: 5072704 - DNA, 25 bp, Homo sapien
gggagccctgcgtttgatttcaagt

SEQ ID NO: 5072705 - DNA, 25 bp, Homo sapien
ttaaggccggcactggtggagcaat

SEQ ID NO: 5072706 - DNA, 25 bp, Homo sapien
gcttgtagagttataccacttgccc

SEQ ID NO: 5072707 - DNA, 25 bp, Homo sapien
ttgctggaggtaggccacacatatg

SEQ ID NO: 5072708 - DNA, 25 bp, Homo sapien
caatcggagtaggtgttttggctaa

SEQ ID NO: 5072709 - DNA, 25 bp, Homo sapien
gactctcagttttctagcaaccaag

SEQ ID NO: 5072710 - DNA, 25 bp, Homo sapien
gtatttccatcacgtaatactgcct

SEQ ID NO: 5072711 - DNA, 25 bp, Homo sapien
caccaagtatttccatcacgtaata

SEQ ID NO: 5072712 - DNA, 25 bp, Homo sapien
ctcgactcagctcctagggaataaa

SEQ ID NO: 5072713 - DNA, 25 bp, Homo sapien
gctcctagggaataaaaacacatta

SEQ ID NO: 5072714 - DNA, 25 bp, Homo sapien
agcgccactcactccgcacgtccct

SEQ ID NO: 5072715 - DNA, 25 bp, Homo sapien
tccgcacgtcccttgcgcgccgccg

SEQ ID NO: 5072716 - DNA, 25 bp, Homo sapien
gccgacggccccacccgcagcgcca

SEQ ID NO: 5072717 - DNA, 25 bp, Homo sapien
actcactccgcacgtcccttgcgcg

SEQ ID NO: 5072718 - DNA, 25 bp, Homo sapien
gcgtcagacccaggccgccacctcc

SEQ ID NO: 5072719 - DNA, 25 bp, Homo sapien
taaacaagagaggccccctcgaaca

SEQ ID NO: 5072720 - DNA, 25 bp, Homo sapien
tcgaacagggccgcgtcagacccag

SEQ ID NO: 5072721 - DNA, 25 bp, Homo sapien
agaggccccctcgaacagggccgcg

SEQ ID NO: 5072722 - DNA, 25 bp, Homo sapien
cgggtagcgagagcgcgcgcacact

SEQ ID NO: 5072723 - DNA, 25 bp, Homo sapien
cctccccgccgggtagcgagagcgc

SEQ ID NO: 5072724 - DNA, 25 bp, Homo sapien
tcacgcggcgtttcgaccccggctc

SEQ ID NO: 5072725 - DNA, 25 bp, Homo sapien
ctacaagtcacgcggcgtttcgacc

SEQ ID NO: 5072726 - DNA, 25 bp, Homo sapien
cccagcagcgggaacaagggcttct

SEQ ID NO: 5072727 - DNA, 25 bp, Homo sapien
cggcgacggctcggcgttctctcac

SEQ ID NO: 5072728 - DNA, 25 bp, Homo sapien
cagcgggaacaagggcttctcggcg

SEQ ID NO: 5072729 - DNA, 25 bp, Homo sapien
cagcagcgggaacaagggcttctcg

SEQ ID NO: 5072730 - DNA, 25 bp, Homo sapien
ccacgttcagctccccgtccgccat

SEQ ID NO: 5072731 - DNA, 25 bp, Homo sapien
ggctgtccacgttcagctccccgtc

SEQ ID NO: 5072732 - DNA, 25 bp, Homo sapien
tgatgaggctgtccacgttcagctc

SEQ ID NO: 5072733 - DNA, 25 bp, Homo sapien
ctccagcagccgggtgatgaggctg

SEQ ID NO: 5072734 - DNA, 25 bp, Homo sapien
taagactgctggatggctttcacat

SEQ ID NO: 5072735 - DNA, 25 bp, Homo sapien
ttaagactgctggatggctttcaca

SEQ ID NO: 5072736 - DNA, 25 bp, Homo sapien
tggtgtcagacaagtccagttatgc

SEQ ID NO: 5072737 - DNA, 25 bp, Homo sapien
tatgcatcatttaccaaagggaaac

SEQ ID NO: 5072738 - DNA, 25 bp, Homo sapien
cacctcccaggataacgaagctttt

SEQ ID NO: 5072739 - DNA, 25 bp, Homo sapien
tcttaggctacaaagcatgatgcac

SEQ ID NO: 5072740 - DNA, 25 bp, Homo sapien
cctatagttcctggccaaaagcaag

SEQ ID NO: 5072741 - DNA, 25 bp, Homo sapien
gagtgtaagagggtctcaagactca

SEQ ID NO: 5072742 - DNA, 25 bp, Homo sapien
taactacgtatctgtaggactacag

SEQ ID NO: 5072743 - DNA, 25 bp, Homo sapien
aagtttaagatacactgccctatag

SEQ ID NO: 5072744 - DNA, 25 bp, Homo sapien
tcgaagtgactgaaaagttaccctc

SEQ ID NO: 5072745 - DNA, 25 bp, Homo sapien
gggagccaatcctcattcgaagtga

SEQ ID NO: 5072746 - DNA, 25 bp, Homo sapien
ggctctcgatgacaggtattaccaa

SEQ ID NO: 5072747 - DNA, 25 bp, Homo sapien
caggtattactgaaccacaggcatc

SEQ ID NO: 5072748 - DNA, 25 bp, Homo sapien
tgttaccagatggagcactcaccac

SEQ ID NO: 5072749 - DNA, 25 bp, Homo sapien
tatacagatgcagttacaacctggc

SEQ ID NO: 5072750 - DNA, 25 bp, Homo sapien
gctgagcagttgtgatggactacat

SEQ ID NO: 5072751 - DNA, 25 bp, Homo sapien
caacctggcagcgtcatgggtgtca

SEQ ID NO: 5072752 - DNA, 25 bp, Homo sapien
tttcctgagggctggtctgttttag

SEQ ID NO: 5072753 - DNA, 25 bp, Homo sapien
tgtacctctgaagtcagtcaatgac

SEQ ID NO: 5072754 - DNA, 25 bp, Homo sapien
ccttcaatcttaggcagtggtcatg

SEQ ID NO: 5072755 - DNA, 25 bp, Homo sapien
gactttagagggacctgactgcaga

SEQ ID NO: 5072756 - DNA, 25 bp, Homo sapien
ctttctccaaagaaggctgtttcct

SEQ ID NO: 5072757 - DNA, 25 bp, Homo sapien
aaagaaggctgtttccttttagcag

SEQ ID NO: 5072758 - DNA, 25 bp, Homo sapien
tttagcagcagcacagcagtaactc

SEQ ID NO: 5072759 - DNA, 25 bp, Homo sapien
tagcagcagcacagcagtaactcat

SEQ ID NO: 5072760 - DNA, 25 bp, Homo sapien
gcatatcctattttggtgaatgaaa

SEQ ID NO: 5072761 - DNA, 25 bp, Homo sapien
aaaacagcatatcctattttggtga

SEQ ID NO: 5072762 - DNA, 25 bp, Homo sapien
gaaatactgaattatggatacaaaa

SEQ ID NO: 5072763 - DNA, 25 bp, Homo sapien
tactgaattatggatacaaaattgt

SEQ ID NO: 5072764 - DNA, 25 bp, Homo sapien
atctgttctgtttgtcccatctgtt

SEQ ID NO: 5072765 - DNA, 25 bp, Homo sapien
tacagttgtcgtatttttgtttcca

SEQ ID NO: 5072766 - DNA, 25 bp, Homo sapien
tacacttttgactgattaccacccg

SEQ ID NO: 5072767 - DNA, 25 bp, Homo sapien
tcccacaagccacaactattatttt

SEQ ID NO: 5072768 - DNA, 25 bp, Homo sapien
cttctttacctctagtgttatttct

SEQ ID NO: 5072769 - DNA, 25 bp, Homo sapien
tgttcaaatctttatcctcgctgat

SEQ ID NO: 5072770 - DNA, 25 bp, Homo sapien
tatgtccgccaagtaggtcagggtg

SEQ ID NO: 5072771 - DNA, 25 bp, Homo sapien
tgttctactagttactgaaagaggg

SEQ ID NO: 5072772 - DNA, 25 bp, Homo sapien
gcaccatttatcataaagatcatcc

SEQ ID NO: 5072773 - DNA, 25 bp, Homo sapien
ctcttcatgctatcttttgatgaac

SEQ ID NO: 5072774 - DNA, 25 bp, Homo sapien
cattctataacccatctcaaattaa

SEQ ID NO: 5072775 - DNA, 25 bp, Homo sapien
taagcagatacccagttgattcagc

SEQ ID NO: 5072776 - DNA, 25 bp, Homo sapien
gatctcccgagacttgatacataag

SEQ ID NO: 5072777 - DNA, 25 bp, Homo sapien
cacaaattttcagcggtgcttccaa

SEQ ID NO: 5072778 - DNA, 25 bp, Homo sapien
caattccaaaagaataggctggctg

SEQ ID NO: 5072779 - DNA, 25 bp, Homo sapien
tctgcacaatctttcctggacgaca

SEQ ID NO: 5072780 - DNA, 25 bp, Homo sapien
ttttctctagatcttaaacatggga

SEQ ID NO: 5072781 - DNA, 25 bp, Homo sapien
gtatcgcctttctcttatttataag

SEQ ID NO: 5072782 - DNA, 25 bp, Homo sapien
ttatttagtaaagcctactgatctg

SEQ ID NO: 5072783 - DNA, 25 bp, Homo sapien
aaatagaactccttttatctgttga

SEQ ID NO: 5072784 - DNA, 25 bp, Homo sapien
ttgattttataagccaatagcaaac

SEQ ID NO: 5072785 - DNA, 25 bp, Homo sapien
gttggcttctggtgggaaacctcca

SEQ ID NO: 5072786 - DNA, 25 bp, Homo sapien
atctcagtaaatctgtatattgtcc

SEQ ID NO: 5072787 - DNA, 25 bp, Homo sapien
tgatgctagcacactcatggtttcc

SEQ ID NO: 5072788 - DNA, 25 bp, Homo sapien
gctgatgacctgctatttggctgga

SEQ ID NO: 5072789 - DNA, 25 bp, Homo sapien
taagcattggaagcctgatacagcc

SEQ ID NO: 5072790 - DNA, 25 bp, Homo sapien
gacagggaaggccaatcaatgctgg

SEQ ID NO: 5072791 - DNA, 25 bp, Homo sapien
tagtgcctgcacatataacataccc

SEQ ID NO: 5072792 - DNA, 25 bp, Homo sapien
aatcagcgggatttaaccattctgc

SEQ ID NO: 5072793 - DNA, 25 bp, Homo sapien
gctacgacaaagacaacctcaagtg

SEQ ID NO: 5072794 - DNA, 25 bp, Homo sapien
tacaactactaagctagggaaggga

SEQ ID NO: 5072795 - DNA, 25 bp, Homo sapien
cacaacctgccccttaatgagtaag

SEQ ID NO: 5072796 - DNA, 25 bp, Homo sapien
taaaactgttctcatcagttatctc

SEQ ID NO: 5072797 - DNA, 25 bp, Homo sapien
cagtgaaggtcttccacaatttaat

SEQ ID NO: 5072798 - DNA, 25 bp, Homo sapien
tataggcagacagttaaaacaatca

SEQ ID NO: 5072799 - DNA, 25 bp, Homo sapien
aaacaatcagtgaaggtcttccaca

SEQ ID NO: 5072800 - DNA, 25 bp, Homo sapien
ctataggcagacagttaaaacaatc

SEQ ID NO: 5072801 - DNA, 25 bp, Homo sapien
ctccatgacaacagaagatcttctc

SEQ ID NO: 5072802 - DNA, 25 bp, Homo sapien
catgacaacagaagatcttctcatc

SEQ ID NO: 5072803 - DNA, 25 bp, Homo sapien
tgacaacagaagatcttctcatcca

SEQ ID NO: 5072804 - DNA, 25 bp, Homo sapien
caacagaagatcttctcatccacaa

SEQ ID NO: 5072805 - DNA, 25 bp, Homo sapien
aaatctgtaaggcaaatttactagt

SEQ ID NO: 5072806 - DNA, 25 bp, Homo sapien
taggtattttccgaataatagaaga

SEQ ID NO: 5072807 - DNA, 25 bp, Homo sapien
cacagcctcttgattattataggta

SEQ ID NO: 5072808 - DNA, 25 bp, Homo sapien
ctgtaaggcaaatttactagtctac

SEQ ID NO: 5072809 - DNA, 25 bp, Homo sapien
tagtcaggccagttcttacacattc

SEQ ID NO: 5072810 - DNA, 25 bp, Homo sapien
caaactccgttgctcaatagtcaaa

SEQ ID NO: 5072811 - DNA, 25 bp, Homo sapien
gagtaacctaccaatctgccaaaga

SEQ ID NO: 5072812 - DNA, 25 bp, Homo sapien
tcgggcctaggcaagtgcatctatc

SEQ ID NO: 5072813 - DNA, 25 bp, Homo sapien
acagtcaccgaataaaaagcattta

SEQ ID NO: 5072814 - DNA, 25 bp, Homo sapien
gatgagacatagtactaacagctaa

SEQ ID NO: 5072815 - DNA, 25 bp, Homo sapien
ttaacagtcaccgaataaaaagcat

SEQ ID NO: 5072816 - DNA, 25 bp, Homo sapien
taaaaagatgagacatagtactaac

SEQ ID NO: 5072817 - DNA, 25 bp, Homo sapien
tccatagattgcaggtctggtgaca

SEQ ID NO: 5072818 - DNA, 25 bp, Homo sapien
ttctataattacaatcaaaaactgt

SEQ ID NO: 5072819 - DNA, 25 bp, Homo sapien
actagtgcaccaggcctaaaaacag

SEQ ID NO: 5072820 - DNA, 25 bp, Homo sapien
aaaataatcaacacaacaagtcgtg

SEQ ID NO: 5072821 - DNA, 25 bp, Homo sapien
tacaagcatgaactagtgcaccagg

SEQ ID NO: 5072822 - DNA, 25 bp, Homo sapien
cagtttacatctgaactataaacag

SEQ ID NO: 5072823 - DNA, 25 bp, Homo sapien
gcatatcacactagatcagtttaca

SEQ ID NO: 5072824 - DNA, 25 bp, Homo sapien
tgttgcagacactatcaaagatcaa

SEQ ID NO: 5072825 - DNA, 25 bp, Homo sapien
aagcctagcatatcacactagatca

SEQ ID NO: 5072826 - DNA, 25 bp, Homo sapien
atttcagtgagacaataaaactgta

SEQ ID NO: 5072827 - DNA, 25 bp, Homo sapien
gtctcgatctcaagaatctataatt

SEQ ID NO: 5072828 - DNA, 25 bp, Homo sapien
gtttgaggtttaggaaacatgacac

SEQ ID NO: 5072829 - DNA, 25 bp, Homo sapien
taatggtagcaacaacaatctggaa

SEQ ID NO: 5072830 - DNA, 25 bp, Homo sapien
ggatcagaccatagcaaatcacaga

SEQ ID NO: 5072831 - DNA, 25 bp, Homo sapien
gatcagaccatagcaaatcacagag

SEQ ID NO: 5072832 - DNA, 25 bp, Homo sapien
ctggatcagaccatagcaaatcaca

SEQ ID NO: 5072833 - DNA, 25 bp, Homo sapien
cagaccatagcaaatcacagagcaa

SEQ ID NO: 5072834 - DNA, 25 bp, Homo sapien
tcaaatctaaatcatgacgattcag

SEQ ID NO: 5072835 - DNA, 25 bp, Homo sapien
tgatgagctcgacaaatcaaatcta

SEQ ID NO: 5072836 - DNA, 25 bp, Homo sapien
tactgactacatcagctccaaaagt

SEQ ID NO: 5072837 - DNA, 25 bp, Homo sapien
aaagtaaaggaaacaccacgatcat

SEQ ID NO: 5072838 - DNA, 25 bp, Homo sapien
tactgctttccttgtacaactcatt

SEQ ID NO: 5072839 - DNA, 25 bp, Homo sapien
gataaaaggttaacaaatcactaga

SEQ ID NO: 5072840 - DNA, 25 bp, Homo sapien
tctcctactgctttccttgtacaac

SEQ ID NO: 5072841 - DNA, 25 bp, Homo sapien
ttgttaagtgtgagatccaggaact

SEQ ID NO: 5072842 - DNA, 25 bp, Homo sapien
gccacaatcaaattcttcaatggtc

SEQ ID NO: 5072843 - DNA, 25 bp, Homo sapien
gcactgagccacaatcaaattcttc

SEQ ID NO: 5072844 - DNA, 25 bp, Homo sapien
tcaaattcttcaatggtctcaaaaa

SEQ ID NO: 5072845 - DNA, 25 bp, Homo sapien
aatcaaattcttcaatggtctcaaa

SEQ ID NO: 5072846 - DNA, 25 bp, Homo sapien
caatctagttagtggtggcggacat

SEQ ID NO: 5072847 - DNA, 25 bp, Homo sapien
taaagacgacttgaattaactccca

SEQ ID NO: 5072848 - DNA, 25 bp, Homo sapien
taaaataattgataccggccaggag

SEQ ID NO: 5072849 - DNA, 25 bp, Homo sapien
cacactcaagtatgcattcctggaa

SEQ ID NO: 5072850 - DNA, 25 bp, Homo sapien
taagcacaatagaaggattttggca

SEQ ID NO: 5072851 - DNA, 25 bp, Homo sapien
agacagggtttcgtgtttcactgtg

SEQ ID NO: 5072852 - DNA, 25 bp, Homo sapien
ttgaaaagaccagtgaatgaagatc

SEQ ID NO: 5072853 - DNA, 25 bp, Homo sapien
caaaagaccatgcaaactagcgtag

SEQ ID NO: 5072854 - DNA, 25 bp, Homo sapien
tagcaaaattatccgacaccacttg

SEQ ID NO: 5072855 - DNA, 25 bp, Homo sapien
cctacctcagtactaggaacatgct

SEQ ID NO: 5072856 - DNA, 25 bp, Homo sapien
tatttatttacggtgggcaagatta

SEQ ID NO: 5072857 - DNA, 25 bp, Homo sapien
gcctggccttgatgagttaacattt

SEQ ID NO: 5072858 - DNA, 25 bp, Homo sapien
acacatcaaagtttcatccacactc

SEQ ID NO: 5072859 - DNA, 25 bp, Homo sapien
tgaaatgaacacatcaaagtttcat

SEQ ID NO: 5072860 - DNA, 25 bp, Homo sapien
tcgccacagtaatttggggctgaaa

SEQ ID NO: 5072861 - DNA, 25 bp, Homo sapien
cgccacagtaatttggggctgaaaa

SEQ ID NO: 5072862 - DNA, 25 bp, Homo sapien
attagctgttcgaggtggagtgaca

SEQ ID NO: 5072863 - DNA, 25 bp, Homo sapien
accatactggtatttagctttcttt

SEQ ID NO: 5072864 - DNA, 25 bp, Homo sapien
tggagtgacaggacgtccagaattc

SEQ ID NO: 5072865 - DNA, 25 bp, Homo sapien
ttttcttcggcggattagctgttcg

SEQ ID NO: 5072866 - DNA, 25 bp, Homo sapien
acatcataaagggtgtcaaatggct

SEQ ID NO: 5072867 - DNA, 25 bp, Homo sapien
tccttaagttaaaggtgtgacatca

SEQ ID NO: 5072868 - DNA, 25 bp, Homo sapien
tgttgactataacagagtatactta

SEQ ID NO: 5072869 - DNA, 25 bp, Homo sapien
tgtccttaacaaatctgatggtttc

SEQ ID NO: 5072870 - DNA, 25 bp, Homo sapien
tatcagctgtaaagtttgcccagtc

SEQ ID NO: 5072871 - DNA, 25 bp, Homo sapien
tgttccgtgcgaatgaaaacctaaa

SEQ ID NO: 5072872 - DNA, 25 bp, Homo sapien
taagcatgccaaaaggtgttccgtg

SEQ ID NO: 5072873 - DNA, 25 bp, Homo sapien
taaagccaaggtaccacataatcac

SEQ ID NO: 5072874 - DNA, 25 bp, Homo sapien
caaggcttgtcaaaaaaggattctc

SEQ ID NO: 5072875 - DNA, 25 bp, Homo sapien
gatgtccatccctatgaagcttaca

SEQ ID NO: 5072876 - DNA, 25 bp, Homo sapien
gttaagcacccaatacccatagttg

SEQ ID NO: 5072877 - DNA, 25 bp, Homo sapien
ctatggtagcacatatagaagggca

SEQ ID NO: 5072878 - DNA, 25 bp, Homo sapien
tacaaaagccagacaatgggataca

SEQ ID NO: 5072879 - DNA, 25 bp, Homo sapien
tatttcaagtcgtgttgccaagcaa

SEQ ID NO: 5072880 - DNA, 25 bp, Homo sapien
gaacacatttttatgactggaggct

SEQ ID NO: 5072881 - DNA, 25 bp, Homo sapien
gccaaaggcttattttctagacctg

SEQ ID NO: 5072882 - DNA, 25 bp, Homo sapien
tatggcagcatggatactgggtagc

SEQ ID NO: 5072883 - DNA, 25 bp, Homo sapien
tcattgcgtaaagtatgttgtccca

SEQ ID NO: 5072884 - DNA, 25 bp, Homo sapien
gatgccactagtacaatcaggcttg

SEQ ID NO: 5072885 - DNA, 25 bp, Homo sapien
tagctggctaggctctaaatacctg

SEQ ID NO: 5072886 - DNA, 25 bp, Homo sapien
gcttacggtctaagtcaaccaatgt

SEQ ID NO: 5072887 - DNA, 25 bp, Homo sapien
catgagaaggtaaattacaatgaga

SEQ ID NO: 5072888 - DNA, 25 bp, Homo sapien
aagcttacggtctaagtcaaccaat

SEQ ID NO: 5072889 - DNA, 25 bp, Homo sapien
cagcaatctgcatgagaaggtaaat

SEQ ID NO: 5072890 - DNA, 25 bp, Homo sapien
tgcaagtggctgtataacgcacaaa

SEQ ID NO: 5072891 - DNA, 25 bp, Homo sapien
tgatgaagacaacatggccttacct

SEQ ID NO: 5072892 - DNA, 25 bp, Homo sapien
cctataaatgggagaatgggccaag

SEQ ID NO: 5072893 - DNA, 25 bp, Homo sapien
tgggccaagaagcatcaactggttg

SEQ ID NO: 5072894 - DNA, 25 bp, Homo sapien
gcaacggcggtcaaggctccgtcgc

SEQ ID NO: 5072895 - DNA, 25 bp, Homo sapien
tcctggcctcagacggttgctcgtc

SEQ ID NO: 5072896 - DNA, 25 bp, Homo sapien
ctcagacggttgctcgtcggtcgct

SEQ ID NO: 5072897 - DNA, 25 bp, Homo sapien
gcggtcaaggctccgtcgcagcgct

SEQ ID NO: 5072898 - DNA, 25 bp, Homo sapien
cagggaccgggcacactcgaaactg

SEQ ID NO: 5072899 - DNA, 25 bp, Homo sapien
aaactggagattcgcctgcgaggcc

SEQ ID NO: 5072900 - DNA, 25 bp, Homo sapien
ccttctcatctaaggcgggcggtgg

SEQ ID NO: 5072901 - DNA, 25 bp, Homo sapien
tgtcgtcgccgcgaaggcagctgag

SEQ ID NO: 5072902 - DNA, 25 bp, Homo sapien
cattcctcccacaataaaggcggca

SEQ ID NO: 5072903 - DNA, 25 bp, Homo sapien
tctgagaaatgagctacgggcctgg

SEQ ID NO: 5072904 - DNA, 25 bp, Homo sapien
tggcctcaaggattcgcccaactcg

SEQ ID NO: 5072905 - DNA, 25 bp, Homo sapien
ggttttcgctgtgggctgctctcga

SEQ ID NO: 5072906 - DNA, 25 bp, Homo sapien
cttggtgttcaaggagtgaggtaca

SEQ ID NO: 5072907 - DNA, 25 bp, Homo sapien
ggagtgaggtacagattccccttcc

SEQ ID NO: 5072908 - DNA, 25 bp, Homo sapien
tgaggtacagattccccttcctgac

SEQ ID NO: 5072909 - DNA, 25 bp, Homo sapien
ccttggtgttcaaggagtgaggtac

SEQ ID NO: 5072910 - DNA, 25 bp, Homo sapien
cagtaggtggtgtctcacaacacat

SEQ ID NO: 5072911 - DNA, 25 bp, Homo sapien
tcctgacgctgtataaccagacaag

SEQ ID NO: 5072912 - DNA, 25 bp, Homo sapien
cctgattttacataaacagtgacag

SEQ ID NO: 5072913 - DNA, 25 bp, Homo sapien
ggacgcttcagagtaatgggctttt

SEQ ID NO: 5072914 - DNA, 25 bp, Homo sapien
caaataatttaaagaaagcagtcat

SEQ ID NO: 5072915 - DNA, 25 bp, Homo sapien
aaataatgatatcctctttgatcag

SEQ ID NO: 5072916 - DNA, 25 bp, Homo sapien
aataatgatatcctctttgatcaga

SEQ ID NO: 5072917 - DNA, 25 bp, Homo sapien
ataatgatatcctctttgatcagaa

SEQ ID NO: 5072918 - DNA, 25 bp, Homo sapien
ggtttactgaatatccaacagtatt

SEQ ID NO: 5072919 - DNA, 25 bp, Homo sapien
agactgtacgaaaaactactgcttt

SEQ ID NO: 5072920 - DNA, 25 bp, Homo sapien
tctgatttgccttaacatatggctc

SEQ ID NO: 5072921 - DNA, 25 bp, Homo sapien
tactgctttatccttcatcaagcca

SEQ ID NO: 5072922 - DNA, 25 bp, Homo sapien
acaagaaatcttgaattaaatcgtc

SEQ ID NO: 5072923 - DNA, 25 bp, Homo sapien
ccacaagaaatcttgaattaaatcg

SEQ ID NO: 5072924 - DNA, 25 bp, Homo sapien
catccacaagaaatcttgaattaaa

SEQ ID NO: 5072925 - DNA, 25 bp, Homo sapien
caagaaatcttgaattaaatcgtca

SEQ ID NO: 5072926 - DNA, 25 bp, Homo sapien
tccagaaattcatgtgtaaagcttc

SEQ ID NO: 5072927 - DNA, 25 bp, Homo sapien
tctatgctatatgctaattccagaa

SEQ ID NO: 5072928 - DNA, 25 bp, Homo sapien
gcagtgcaggctagctcttattttt

SEQ ID NO: 5072929 - DNA, 25 bp, Homo sapien
gagctgccacacctgttttgatttc

SEQ ID NO: 5072930 - DNA, 25 bp, Homo sapien
tatagtaaatttagccctcttgaaa

SEQ ID NO: 5072931 - DNA, 25 bp, Homo sapien
tagtaaatttagccctcttgaaata

SEQ ID NO: 5072932 - DNA, 25 bp, Homo sapien
ataaacaaaggtcatagccaaaaga

SEQ ID NO: 5072933 - DNA, 25 bp, Homo sapien
ttatagtaaatttagccctcttgaa

SEQ ID NO: 5072934 - DNA, 25 bp, Homo sapien
taaagaaatttatcctggtatgctc

SEQ ID NO: 5072935 - DNA, 25 bp, Homo sapien
aagaaatttatcctggtatgctcac

SEQ ID NO: 5072936 - DNA, 25 bp, Homo sapien
agagcaataaagaaatttatcctgg

SEQ ID NO: 5072937 - DNA, 25 bp, Homo sapien
aataaagaaatttatcctggtatgc

SEQ ID NO: 5072938 - DNA, 25 bp, Homo sapien
catcgcctgcttacaatagccctat

SEQ ID NO: 5072939 - DNA, 25 bp, Homo sapien
tcgcctgcttacaatagccctatag

SEQ ID NO: 5072940 - DNA, 25 bp, Homo sapien
caatagccctatagtcaattctatc

SEQ ID NO: 5072941 - DNA, 25 bp, Homo sapien
agtcaattctatcccagagctggtc

SEQ ID NO: 5072942 - DNA, 25 bp, Homo sapien
ctcaagaggtagtataatataggtg

SEQ ID NO: 5072943 - DNA, 25 bp, Homo sapien
gcactgactgtcaaaaccaacccag

SEQ ID NO: 5072944 - DNA, 25 bp, Homo sapien
gtctgtgatctcaagaggtagtata

SEQ ID NO: 5072945 - DNA, 25 bp, Homo sapien
agtataatataggtgttaaaagcac

SEQ ID NO: 5072946 - DNA, 25 bp, Homo sapien
tgtgatgaacagaacgttctctttg

SEQ ID NO: 5072947 - DNA, 25 bp, Homo sapien
tgccagatataatgggttggtgcaa

SEQ ID NO: 5072948 - DNA, 25 bp, Homo sapien
tactggtgtggcactaggtccccgg

SEQ ID NO: 5072949 - DNA, 25 bp, Homo sapien
gaacagaacgttctctttgccagat

SEQ ID NO: 5072950 - DNA, 25 bp, Homo sapien
ttctttttttaccacagagtgaaca

SEQ ID NO: 5072951 - DNA, 25 bp, Homo sapien
tcccagtctaacatatcttcttttt

SEQ ID NO: 5072952 - DNA, 25 bp, Homo sapien
cccagtctaacatatcttctttttt

SEQ ID NO: 5072953 - DNA, 25 bp, Homo sapien
ctttttttaccacagagtgaacaat

SEQ ID NO: 5072954 - DNA, 25 bp, Homo sapien
tgagttgtatgagtcctgagaatgt

SEQ ID NO: 5072955 - DNA, 25 bp, Homo sapien
gagaaggatcacctattatgtccat

SEQ ID NO: 5072956 - DNA, 25 bp, Homo sapien
tcagaaccagtataagcttgagaag

SEQ ID NO: 5072957 - DNA, 25 bp, Homo sapien
gagtcctgagaatgtttttctgtca

SEQ ID NO: 5072958 - DNA, 25 bp, Homo sapien
aaatctgtttaggtgggtcaccaca

SEQ ID NO: 5072959 - DNA, 25 bp, Homo sapien
gttttcaacttaacataggtcacat

SEQ ID NO: 5072960 - DNA, 25 bp, Homo sapien
aaattattatgtatccccgccagaa

SEQ ID NO: 5072961 - DNA, 25 bp, Homo sapien
gccagaaaggactgactagagctca

SEQ ID NO: 5072962 - DNA, 25 bp, Homo sapien
ccacctccttagtagtctgctagaa

SEQ ID NO: 5072963 - DNA, 25 bp, Homo sapien
gattgcatcaaaagggcagtagacc

SEQ ID NO: 5072964 - DNA, 25 bp, Homo sapien
tctgctgagtggaggtatagtattc

SEQ ID NO: 5072965 - DNA, 25 bp, Homo sapien
tctgctagaaggcttccgtggcagc

SEQ ID NO: 5072966 - DNA, 25 bp, Homo sapien
ctgaccttaagtgatccatccacct

SEQ ID NO: 5072967 - DNA, 25 bp, Homo sapien
acaggtatgtgccatcacgcccggc

SEQ ID NO: 5072968 - DNA, 25 bp, Homo sapien
cgagtacctgtgattacaggtatgt

SEQ ID NO: 5072969 - DNA, 25 bp, Homo sapien
accttaagtgatccatccacctgcc

SEQ ID NO: 5072970 - DNA, 25 bp, Homo sapien
atctgggctacagtaaataatgggg

SEQ ID NO: 5072971 - DNA, 25 bp, Homo sapien
atacatcttataatggcttgtatat

SEQ ID NO: 5072972 - DNA, 25 bp, Homo sapien
tctgggctacagtaaataatggggg

SEQ ID NO: 5072973 - DNA, 25 bp, Homo sapien
cttataatggcttgtatatgtctta

SEQ ID NO: 5072974 - DNA, 25 bp, Homo sapien
cttcctgtaaaccactccatagatt

SEQ ID NO: 5072975 - DNA, 25 bp, Homo sapien
tcctgtaaaccactccatagatttg

SEQ ID NO: 5072976 - DNA, 25 bp, Homo sapien
tgtaaaccactccatagatttgtct

SEQ ID NO: 5072977 - DNA, 25 bp, Homo sapien
aaccactccatagatttgtctttct

SEQ ID NO: 5072978 - DNA, 25 bp, Homo sapien
cagtacactggcaacctggtcatac

SEQ ID NO: 5072979 - DNA, 25 bp, Homo sapien
cttgtcaagttgaggaaggtcaaac

SEQ ID NO: 5072980 - DNA, 25 bp, Homo sapien
ggatcatttccctatgttgctagac

SEQ ID NO: 5072981 - DNA, 25 bp, Homo sapien
aaggtcaaaccacaacttaactgag

SEQ ID NO: 5072982 - DNA, 25 bp, Homo sapien
tgctgctggaattcttgaaagaact

SEQ ID NO: 5072983 - DNA, 25 bp, Homo sapien
aactgagtttaggtctttgtcatat

SEQ ID NO: 5072984 - DNA, 25 bp, Homo sapien
cagttgatttatgatataggcttat

SEQ ID NO: 5072985 - DNA, 25 bp, Homo sapien
tttaggccatgaacaagttttcaag

SEQ ID NO: 5072986 - DNA, 25 bp, Homo sapien
ggatgttttatatttagatcactga

SEQ ID NO: 5072987 - DNA, 25 bp, Homo sapien
tattttacttgtcacaaggagcttg

SEQ ID NO: 5072988 - DNA, 25 bp, Homo sapien
caaggagcttggtttgtgaaataat

SEQ ID NO: 5072989 - DNA, 25 bp, Homo sapien
tttacttgtcacaaggagcttggtt

SEQ ID NO: 5072990 - DNA, 25 bp, Homo sapien
gcagccacgtgttcgtccgtgcgca

SEQ ID NO: 5072991 - DNA, 25 bp, Homo sapien
agccacgtgttcgtccgtgcgcagg

SEQ ID NO: 5072992 - DNA, 25 bp, Homo sapien
cgctgcagccacgtgttcgtccgtg

SEQ ID NO: 5072993 - DNA, 25 bp, Homo sapien
ccacgtgttcgtccgtgcgcaggcg

SEQ ID NO: 5072994 - DNA, 25 bp, Homo sapien
ccatactcgtaagtgaccgtcggta

SEQ ID NO: 5072995 - DNA, 25 bp, Homo sapien
aaggcacgtactcctggtgcagccg

SEQ ID NO: 5072996 - DNA, 25 bp, Homo sapien
acaggtgcaggtaccactgaggtgc

SEQ ID NO: 5072997 - DNA, 25 bp, Homo sapien
caaagcgaagtaggcctggctgtgc

SEQ ID NO: 5072998 - DNA, 25 bp, Homo sapien
cgatgccggaccacgcgccacccgg

SEQ ID NO: 5072999 - DNA, 25 bp, Homo sapien
gccgctgagagccacgcgcgatgcc

SEQ ID NO: 5073000 - DNA, 25 bp, Homo sapien
cgacgccgcctccaagccttctggc

SEQ ID NO: 5073001 - DNA, 25 bp, Homo sapien
gccccgcgcagtcccgctcgcttta

SEQ ID NO: 5073002 - DNA, 25 bp, Homo sapien
taaacatgttattcctgtgatcaaa

SEQ ID NO: 5073003 - DNA, 25 bp, Homo sapien
ccaagagtttagtgctactgattat

SEQ ID NO: 5073004 - DNA, 25 bp, Homo sapien
taatgaaaactgatactccaagtat

SEQ ID NO: 5073005 - DNA, 25 bp, Homo sapien
catcagaccagaagtgtatataacc

SEQ ID NO: 5073006 - DNA, 25 bp, Homo sapien
tcagtctggttactcattcctacag

SEQ ID NO: 5073007 - DNA, 25 bp, Homo sapien
aatgctaccaactgctgtgccaaga

SEQ ID NO: 5073008 - DNA, 25 bp, Homo sapien
tcattcctacagcttctgatttcct

SEQ ID NO: 5073009 - DNA, 25 bp, Homo sapien
tgtgccaagagccaataagtcagtc

SEQ ID NO: 5073010 - DNA, 25 bp, Homo sapien
caacagtggtaatgcccaacagcag

SEQ ID NO: 5073011 - DNA, 25 bp, Homo sapien
tgatttcccagctcgatccataggt

SEQ ID NO: 5073012 - DNA, 25 bp, Homo sapien
cactcctatatacagaagtccagcg

SEQ ID NO: 5073013 - DNA, 25 bp, Homo sapien
tatccaaccctaggagaaccaatct

SEQ ID NO: 5073014 - DNA, 25 bp, Homo sapien
tatcccagaaggtccaaatgaaatc

SEQ ID NO: 5073015 - DNA, 25 bp, Homo sapien
ctatcccagaaggtccaaatgaaat

SEQ ID NO: 5073016 - DNA, 25 bp, Homo sapien
tcatctgaacaactatataaacagc

SEQ ID NO: 5073017 - DNA, 25 bp, Homo sapien
tgtctgtacgttccattccacaata

SEQ ID NO: 5073018 - DNA, 25 bp, Homo sapien
taaacagccactgtcttgatgccac

SEQ ID NO: 5073019 - DNA, 25 bp, Homo sapien
tcttgatgccactgtatgcagttga

SEQ ID NO: 5073020 - DNA, 25 bp, Homo sapien
tactgtactcggctgacaaatagtc

SEQ ID NO: 5073021 - DNA, 25 bp, Homo sapien
tacggccaacctcaggatcaggtgg

SEQ ID NO: 5073022 - DNA, 25 bp, Homo sapien
tcctagaaggtccaactgaaatccc

SEQ ID NO: 5073023 - DNA, 25 bp, Homo sapien
tgagggtcctcaactacacagtagg

SEQ ID NO: 5073024 - DNA, 25 bp, Homo sapien
tgggctgatacatagggaactgaca

SEQ ID NO: 5073025 - DNA, 25 bp, Homo sapien
ctgatacatagggaactgacactgc

SEQ ID NO: 5073026 - DNA, 25 bp, Homo sapien
cactgctattgtcgcctttccattt

SEQ ID NO: 5073027 - DNA, 25 bp, Homo sapien
aactgacactgctattgtcgccttt

SEQ ID NO: 5073028 - DNA, 25 bp, Homo sapien
tccaaaacccatagtttgattgttc

SEQ ID NO: 5073029 - DNA, 25 bp, Homo sapien
ccatagtttgattgttcgaccagct

SEQ ID NO: 5073030 - DNA, 25 bp, Homo sapien
caaaacccatagtttgattgttcga

SEQ ID NO: 5073031 - DNA, 25 bp, Homo sapien
aacccatagtttgattgttcgacca

SEQ ID NO: 5073032 - DNA, 25 bp, Homo sapien
gaaactggcgttgcatgtcctgtga

SEQ ID NO: 5073033 - DNA, 25 bp, Homo sapien
taagtaaccggtcatgtactgctcc

SEQ ID NO: 5073034 - DNA, 25 bp, Homo sapien
tgtaattccatcaaagggctggctc

SEQ ID NO: 5073035 - DNA, 25 bp, Homo sapien
gtactgctccagataagaaataaag

SEQ ID NO: 5073036 - DNA, 25 bp, Homo sapien
caatatagacaggttcatcggtaac

SEQ ID NO: 5073037 - DNA, 25 bp, Homo sapien
gtaactgtaaatgacatcactgcac

SEQ ID NO: 5073038 - DNA, 25 bp, Homo sapien
ggttcatcggtaactgtaaatgaca

SEQ ID NO: 5073039 - DNA, 25 bp, Homo sapien
gacaaagttaagtcaatatagacag

SEQ ID NO: 5073040 - DNA, 25 bp, Homo sapien
ttaatatgtgttcaaaaagatggac

SEQ ID NO: 5073041 - DNA, 25 bp, Homo sapien
taatatgtgttcaaaaagatggact

SEQ ID NO: 5073042 - DNA, 25 bp, Homo sapien
gcctttcccaggtgttgctatctga

SEQ ID NO: 5073043 - DNA, 25 bp, Homo sapien
caaaaaccagcagctagaataggga

SEQ ID NO: 5073044 - DNA, 25 bp, Homo sapien
caactgccatatacaagcaacaatg

SEQ ID NO: 5073045 - DNA, 25 bp, Homo sapien
acaatgacattttgtctgagcaaaa

SEQ ID NO: 5073046 - DNA, 25 bp, Homo sapien
tcttcgtaactaggcaaaattcaac

SEQ ID NO: 5073047 - DNA, 25 bp, Homo sapien
gctgaggatcatacgaagtaaacgc

SEQ ID NO: 5073048 - DNA, 25 bp, Homo sapien
gtacatgcttacgataactcagaag

SEQ ID NO: 5073049 - DNA, 25 bp, Homo sapien
gaagtcttcaagaaacgtctctagt

SEQ ID NO: 5073050 - DNA, 25 bp, Homo sapien
tttgttatagctgtttctactttgg

SEQ ID NO: 5073051 - DNA, 25 bp, Homo sapien
tgaaatatctcttactaaacacata

SEQ ID NO: 5073052 - DNA, 25 bp, Homo sapien
ggcccagcagtttgaaatatctctt

SEQ ID NO: 5073053 - DNA, 25 bp, Homo sapien
ctaaacacatatgaggttctctgga

SEQ ID NO: 5073054 - DNA, 25 bp, Homo sapien
agaaaggtgtcatctctgaaactca

SEQ ID NO: 5073055 - DNA, 25 bp, Homo sapien
aactcagccagcagcgaaaccatat

SEQ ID NO: 5073056 - DNA, 25 bp, Homo sapien
gaaaccatatggatgtcatcatagc

SEQ ID NO: 5073057 - DNA, 25 bp, Homo sapien
caagagaaaggtgtcatctctgaaa

SEQ ID NO: 5073058 - DNA, 25 bp, Homo sapien
tggaggagcgggcttgatagctgca

SEQ ID NO: 5073059 - DNA, 25 bp, Homo sapien
tctctacttgctcggtttgtggagg

SEQ ID NO: 5073060 - DNA, 25 bp, Homo sapien
ctgcatgatgaccaggaatcccagg

SEQ ID NO: 5073061 - DNA, 25 bp, Homo sapien
ctacttgctcggtttgtggaggagc

SEQ ID NO: 5073062 - DNA, 25 bp, Homo sapien
actggaactcagcaacatgcgaaac

SEQ ID NO: 5073063 - DNA, 25 bp, Homo sapien
caacatgcgaaacccaatgatagtc

SEQ ID NO: 5073064 - DNA, 25 bp, Homo sapien
gaaacccaatgatagtcatcacagc

SEQ ID NO: 5073065 - DNA, 25 bp, Homo sapien
tcactggaactcagcaacatgcgaa

SEQ ID NO: 5073066 - DNA, 25 bp, Homo sapien
aaacaacggcccaagaagcacatag

SEQ ID NO: 5073067 - DNA, 25 bp, Homo sapien
tagatttacacctcaaccctagaaa

SEQ ID NO: 5073068 - DNA, 25 bp, Homo sapien
gccaatgttggagacaaacatctgc

SEQ ID NO: 5073069 - DNA, 25 bp, Homo sapien
tgtgttaccagacaagacttaaagt

SEQ ID NO: 5073070 - DNA, 25 bp, Homo sapien
ctaagccctgggtaagaagaactgg

SEQ ID NO: 5073071 - DNA, 25 bp, Homo sapien
gctcccagacgttcttcaatgctaa

SEQ ID NO: 5073072 - DNA, 25 bp, Homo sapien
tagcatttcaaaatcgttactttct

SEQ ID NO: 5073073 - DNA, 25 bp, Homo sapien
tggaaagctattcgtctggaggtct

SEQ ID NO: 5073074 - DNA, 25 bp, Homo sapien
cctggcaaacgcagtgaagtcctgt

SEQ ID NO: 5073075 - DNA, 25 bp, Homo sapien
caatgtgagcaacacagcagaccct

SEQ ID NO: 5073076 - DNA, 25 bp, Homo sapien
catgttgtatccctgtcactgctca

SEQ ID NO: 5073077 - DNA, 25 bp, Homo sapien
gctattctatgccagcactttgtga

SEQ ID NO: 5073078 - DNA, 25 bp, Homo sapien
tagaagcacaccttctggcacaggt

SEQ ID NO: 5073079 - DNA, 25 bp, Homo sapien
cacagagcagatcagttccggtcct

SEQ ID NO: 5073080 - DNA, 25 bp, Homo sapien
tctccacactgggttacagcaaagg

SEQ ID NO: 5073081 - DNA, 25 bp, Homo sapien
tgaaagggtttagttccagagagtc

SEQ ID NO: 5073082 - DNA, 25 bp, Homo sapien
tattacgtcttgtgcttaacagaca

SEQ ID NO: 5073083 - DNA, 25 bp, Homo sapien
gattattaagatgagcatactgaca

SEQ ID NO: 5073084 - DNA, 25 bp, Homo sapien
tactgacaaaccaaggacatcacag

SEQ ID NO: 5073085 - DNA, 25 bp, Homo sapien
agcacagtctttgggtatcagtaaa

SEQ ID NO: 5073086 - DNA, 25 bp, Homo sapien
tataaggtttacattcctagtttga

SEQ ID NO: 5073087 - DNA, 25 bp, Homo sapien
ctcttgtaacaacggaataatagta

SEQ ID NO: 5073088 - DNA, 25 bp, Homo sapien
taatagtatgcaggggcatccttaa

SEQ ID NO: 5073089 - DNA, 25 bp, Homo sapien
gggcatccttaatacagtcttcttt

SEQ ID NO: 5073090 - DNA, 25 bp, Homo sapien
tgccatgtgtccttacgtattacaa

SEQ ID NO: 5073091 - DNA, 25 bp, Homo sapien
taactcatggcattaggatgctgaa

SEQ ID NO: 5073092 - DNA, 25 bp, Homo sapien
tacaaatccatttctctaactactg

SEQ ID NO: 5073093 - DNA, 25 bp, Homo sapien
tccattactcactctaaatgccatg

SEQ ID NO: 5073094 - DNA, 25 bp, Homo sapien
taggatgtccttgtaacctctttgt

SEQ ID NO: 5073095 - DNA, 25 bp, Homo sapien
ctattaggatgtccttgtaacctct

SEQ ID NO: 5073096 - DNA, 25 bp, Homo sapien
ttaggatgtccttgtaacctctttg

SEQ ID NO: 5073097 - DNA, 25 bp, Homo sapien
tattaggatgtccttgtaacctctt

SEQ ID NO: 5073098 - DNA, 25 bp, Homo sapien
gtggacaggtatgatgcatgaactg

SEQ ID NO: 5073099 - DNA, 25 bp, Homo sapien
cgtggacaggtatgatgcatgaact

SEQ ID NO: 5073100 - DNA, 25 bp, Homo sapien
tagccactgaaccattagcacagca

SEQ ID NO: 5073101 - DNA, 25 bp, Homo sapien
tacattttatcctcctgggacaagg

SEQ ID NO: 5073102 - DNA, 25 bp, Homo sapien
tttccataggtaatcaagagctgac

SEQ ID NO: 5073103 - DNA, 25 bp, Homo sapien
catttaaaacctgccgtgcctgtgt

SEQ ID NO: 5073104 - DNA, 25 bp, Homo sapien
taaaggaagcatctaacggctgaag

SEQ ID NO: 5073105 - DNA, 25 bp, Homo sapien
tctgggctctaagaacaacgctggc

SEQ ID NO: 5073106 - DNA, 25 bp, Homo sapien
tatttggaacacaacacgactgata

SEQ ID NO: 5073107 - DNA, 25 bp, Homo sapien
gctcccatgttgctctcatcagagt

SEQ ID NO: 5073108 - DNA, 25 bp, Homo sapien
gactgataaaggtctggctcctcca

SEQ ID NO: 5073109 - DNA, 25 bp, Homo sapien
aaagttttgactctgctttccatta

SEQ ID NO: 5073110 - DNA, 25 bp, Homo sapien
tttccattaactggtagagtgtccc

SEQ ID NO: 5073111 - DNA, 25 bp, Homo sapien
aataagctttccatgaaggtgtgaa

SEQ ID NO: 5073112 - DNA, 25 bp, Homo sapien
aactggtagagtgtccccagctggg

SEQ ID NO: 5073113 - DNA, 25 bp, Homo sapien
ttctgtccaggggaagttgctccct

SEQ ID NO: 5073114 - DNA, 25 bp, Homo sapien
ctgtccaggggaagttgctcccttt

SEQ ID NO: 5073115 - DNA, 25 bp, Homo sapien
tctgtccaggggaagttgctccctt

SEQ ID NO: 5073116 - DNA, 25 bp, Homo sapien
cttctgtccaggggaagttgctccc

SEQ ID NO: 5073117 - DNA, 25 bp, Homo sapien
catgagccgctcaaagagttctggg

SEQ ID NO: 5073118 - DNA, 25 bp, Homo sapien
tggtcactgggatacacacaagcac

SEQ ID NO: 5073119 - DNA, 25 bp, Homo sapien
tgaaaagcggaggacatcatgagcc

SEQ ID NO: 5073120 - DNA, 25 bp, Homo sapien
tagcctcccacagatgaccgattga

SEQ ID NO: 5073121 - DNA, 25 bp, Homo sapien
tccagatgaagttcccttacatgcc

SEQ ID NO: 5073122 - DNA, 25 bp, Homo sapien
actgggcattggataaaactaagga

SEQ ID NO: 5073123 - DNA, 25 bp, Homo sapien
cccatgatgcaaaactcgagtctag

SEQ ID NO: 5073124 - DNA, 25 bp, Homo sapien
tcgagtctagtttgggaaaaacagc

SEQ ID NO: 5073125 - DNA, 25 bp, Homo sapien
tcatcatcagactcctcttcagaag

SEQ ID NO: 5073126 - DNA, 25 bp, Homo sapien
agaatccttatctgctatttcatca

SEQ ID NO: 5073127 - DNA, 25 bp, Homo sapien
tcatcagactcctcttcagaagact

SEQ ID NO: 5073128 - DNA, 25 bp, Homo sapien
tatctgctatttcatcatcagactc

SEQ ID NO: 5073129 - DNA, 25 bp, Homo sapien
tacagagtatgaggatataaaggcc

SEQ ID NO: 5073130 - DNA, 25 bp, Homo sapien
aggccgatgtatatacagggaacaa

SEQ ID NO: 5073131 - DNA, 25 bp, Homo sapien
tatgaggatataaaggccgatgtat

SEQ ID NO: 5073132 - DNA, 25 bp, Homo sapien
tataaaggccgatgtatatacaggg

SEQ ID NO: 5073133 - DNA, 25 bp, Homo sapien
cttcaacgtcctcatctttttcact

SEQ ID NO: 5073134 - DNA, 25 bp, Homo sapien
tcttcaacgtcctcatctttttcac

SEQ ID NO: 5073135 - DNA, 25 bp, Homo sapien
gagccagagtttatatagtttgacc

SEQ ID NO: 5073136 - DNA, 25 bp, Homo sapien
ccagagtttatatagtttgaccggc

SEQ ID NO: 5073137 - DNA, 25 bp, Homo sapien
tatatagtttgaccggcttgctttg

SEQ ID NO: 5073138 - DNA, 25 bp, Homo sapien
ggcaaggtgagccagagtttatata

SEQ ID NO: 5073139 - DNA, 25 bp, Homo sapien
gggatccactgctgtgaatttggaa

SEQ ID NO: 5073140 - DNA, 25 bp, Homo sapien
tttggaaatgtgcagcggtccttgg

SEQ ID NO: 5073141 - DNA, 25 bp, Homo sapien
ttggaaatgtgcagcggtccttggc

SEQ ID NO: 5073142 - DNA, 25 bp, Homo sapien
ggcatgggatccactgctgtgaatt

SEQ ID NO: 5073143 - DNA, 25 bp, Homo sapien
tattaacatttgaatgaaacactct

SEQ ID NO: 5073144 - DNA, 25 bp, Homo sapien
taacatttgaatgaaacactcttat

SEQ ID NO: 5073145 - DNA, 25 bp, Homo sapien
taaagtttattaacatttgaatgaa

SEQ ID NO: 5073146 - DNA, 25 bp, Homo sapien
agtttattaacatttgaatgaaaca

SEQ ID NO: 5073147 - DNA, 25 bp, Homo sapien
agttcttgaactcctatgggaaagg

SEQ ID NO: 5073148 - DNA, 25 bp, Homo sapien
cccaagatgcttatatggctctggc

SEQ ID NO: 5073149 - DNA, 25 bp, Homo sapien
tagtgagcactaagccaatatcggc

SEQ ID NO: 5073150 - DNA, 25 bp, Homo sapien
tccatgtgcatgtcccctagtgagc

SEQ ID NO: 5073151 - DNA, 25 bp, Homo sapien
ctgttacactgctacggcttctcat

SEQ ID NO: 5073152 - DNA, 25 bp, Homo sapien
cgggcgtcctcagtctgaatgacgc

SEQ ID NO: 5073153 - DNA, 25 bp, Homo sapien
tgctaatcctgttacactgctacgg

SEQ ID NO: 5073154 - DNA, 25 bp, Homo sapien
tgaatgacgcctgctaatcctgtta

SEQ ID NO: 5073155 - DNA, 25 bp, Homo sapien
cagcaccatgcgaagacgaagcact

SEQ ID NO: 5073156 - DNA, 25 bp, Homo sapien
cagagtcagccagcaccatgcgaag

SEQ ID NO: 5073157 - DNA, 25 bp, Homo sapien
tcagccagcaccatgcgaagacgaa

SEQ ID NO: 5073158 - DNA, 25 bp, Homo sapien
catgcgaagacgaagcactacccac

SEQ ID NO: 5073159 - DNA, 25 bp, Homo sapien
acaaaaggagagtggtcagcaggca

SEQ ID NO: 5073160 - DNA, 25 bp, Homo sapien
agggtcaccacccaacgagaacatc

SEQ ID NO: 5073161 - DNA, 25 bp, Homo sapien
actgagaggaatgttacttgtcgca

SEQ ID NO: 5073162 - DNA, 25 bp, Homo sapien
cagtaagacgacctagcacaacaca

SEQ ID NO: 5073163 - DNA, 25 bp, Homo sapien
acatccaaattccagccagtcaact

SEQ ID NO: 5073164 - DNA, 25 bp, Homo sapien
aaaacatccaaattccagccagtca

SEQ ID NO: 5073165 - DNA, 25 bp, Homo sapien
ctcaaaacatccaaattccagccag

SEQ ID NO: 5073166 - DNA, 25 bp, Homo sapien
catccaaattccagccagtcaactg

SEQ ID NO: 5073167 - DNA, 25 bp, Homo sapien
gaaaataatcccttagccagacgct

SEQ ID NO: 5073168 - DNA, 25 bp, Homo sapien
actatgagaaagcaccctgaccagc

SEQ ID NO: 5073169 - DNA, 25 bp, Homo sapien
tcttacagcatccatgagacaggtg

SEQ ID NO: 5073170 - DNA, 25 bp, Homo sapien
gatgttcaacgtgtacccacagatg

SEQ ID NO: 5073171 - DNA, 25 bp, Homo sapien
atgcagttggtgtatgatgtggtta

SEQ ID NO: 5073172 - DNA, 25 bp, Homo sapien
aattgatgcagttggtgtatgatgt

SEQ ID NO: 5073173 - DNA, 25 bp, Homo sapien
ggatttcatggacaaagtctatggg

SEQ ID NO: 5073174 - DNA, 25 bp, Homo sapien
tggtgtatgatgtggttaatttctt

SEQ ID NO: 5073175 - DNA, 25 bp, Homo sapien
gtgtcccaaaaagatgatataaatc

SEQ ID NO: 5073176 - DNA, 25 bp, Homo sapien
aagatgatataaatctttctcttcc

SEQ ID NO: 5073177 - DNA, 25 bp, Homo sapien
cccaaaaagatgatataaatctttc

SEQ ID NO: 5073178 - DNA, 25 bp, Homo sapien
gatgatataaatctttctcttcctt

SEQ ID NO: 5073179 - DNA, 25 bp, Homo sapien
gaggagttaataggtgagtaaataa

SEQ ID NO: 5073180 - DNA, 25 bp, Homo sapien
taggtgagtaaataactccagaagc

SEQ ID NO: 5073181 - DNA, 25 bp, Homo sapien
taaataactccagaagctaatggca

SEQ ID NO: 5073182 - DNA, 25 bp, Homo sapien
gaagctaatggcaaaaaagaatttg

SEQ ID NO: 5073183 - DNA, 25 bp, Homo sapien
catgggtggaaaccgctgaggcaaa

SEQ ID NO: 5073184 - DNA, 25 bp, Homo sapien
gcagtgaggtgtgacatccacatga

SEQ ID NO: 5073185 - DNA, 25 bp, Homo sapien
catgaaatccccgaggtaaggagca

SEQ ID NO: 5073186 - DNA, 25 bp, Homo sapien
gcaggccagtcgaggagcatgggtg

SEQ ID NO: 5073187 - DNA, 25 bp, Homo sapien
cactgctggcgtgctccagctctca

SEQ ID NO: 5073188 - DNA, 25 bp, Homo sapien
agctctccttgaataaacaaggctg

SEQ ID NO: 5073189 - DNA, 25 bp, Homo sapien
ggctgggtggccacgagctccactg

SEQ ID NO: 5073190 - DNA, 25 bp, Homo sapien
agctccactgctggcgtgctccagc

SEQ ID NO: 5073191 - DNA, 25 bp, Homo sapien
ggtccttggtctctatagagacgtt

SEQ ID NO: 5073192 - DNA, 25 bp, Homo sapien
gtctctatagagacgttgatgctca

SEQ ID NO: 5073193 - DNA, 25 bp, Homo sapien
ctatagagacgttgatgctcatggg

SEQ ID NO: 5073194 - DNA, 25 bp, Homo sapien
ccttggtctctatagagacgttgat

SEQ ID NO: 5073195 - DNA, 25 bp, Homo sapien
tctctgtccagaggccaaacccctg

SEQ ID NO: 5073196 - DNA, 25 bp, Homo sapien
ctctctgtccagaggccaaacccct

SEQ ID NO: 5073197 - DNA, 25 bp, Homo sapien
cagacaaagggacaaacagtgccag

SEQ ID NO: 5073198 - DNA, 25 bp, Homo sapien
ggttaatactcctgtagccactctg

SEQ ID NO: 5073199 - DNA, 25 bp, Homo sapien
ctcagacaatatagggtgcagccag

SEQ ID NO: 5073200 - DNA, 25 bp, Homo sapien
cctctcccatcgtgagatcaggtgg

SEQ ID NO: 5073201 - DNA, 25 bp, Homo sapien
accagtcctcggaccctggaggaag

SEQ ID NO: 5073202 - DNA, 25 bp, Homo sapien
gagcaccagtcctcggaccctggag

SEQ ID NO: 5073203 - DNA, 25 bp, Homo sapien
agatgggagcaccagtcctcggacc

SEQ ID NO: 5073204 - DNA, 25 bp, Homo sapien
gccagatgggagcaccagtcctcgg

SEQ ID NO: 5073205 - DNA, 25 bp, Homo sapien
gaggcagcagctatttctgggcagt

SEQ ID NO: 5073206 - DNA, 25 bp, Homo sapien
gggcagtgagtacagtccttggggg

SEQ ID NO: 5073207 - DNA, 25 bp, Homo sapien
gcagcagctatttctgggcagtgag

SEQ ID NO: 5073208 - DNA, 25 bp, Homo sapien
cagtgagtacagtccttgggggtct

SEQ ID NO: 5073209 - DNA, 25 bp, Homo sapien
tcggggacatcgtcacgggtgccca

SEQ ID NO: 5073210 - DNA, 25 bp, Homo sapien
cggggacatcgtcacgggtgcccat

SEQ ID NO: 5073211 - DNA, 25 bp, Homo sapien
ttcggggacatcgtcacgggtgccc

SEQ ID NO: 5073212 - DNA, 25 bp, Homo sapien
cttcggggacatcgtcacgggtgcc

SEQ ID NO: 5073213 - DNA, 25 bp, Homo sapien
gcccagcactggtccgagggatgct

SEQ ID NO: 5073214 - DNA, 25 bp, Homo sapien
ttctccatgaggcagactggagttg

SEQ ID NO: 5073215 - DNA, 25 bp, Homo sapien
cagactggagttgatgcttccaggc

SEQ ID NO: 5073216 - DNA, 25 bp, Homo sapien
gggatgctcccgcagtacacggcca

SEQ ID NO: 5073217 - DNA, 25 bp, Homo sapien
tgctggtagctcgagaacacagccg

SEQ ID NO: 5073218 - DNA, 25 bp, Homo sapien
agctcgagaacacagccggcatcta

SEQ ID NO: 5073219 - DNA, 25 bp, Homo sapien
tgaccaggtgaggtcttcccatctc

SEQ ID NO: 5073220 - DNA, 25 bp, Homo sapien
actcactccccgctccaggatgagg

SEQ ID NO: 5073221 - DNA, 25 bp, Homo sapien
tccacgcaggagctgtgacggttcc

SEQ ID NO: 5073222 - DNA, 25 bp, Homo sapien
gttcctcgttgttcagcagggctct

SEQ ID NO: 5073223 - DNA, 25 bp, Homo sapien
tcctggggtgaccattccttgcctg

SEQ ID NO: 5073224 - DNA, 25 bp, Homo sapien
agctgtccgagtccacgcaggagct

SEQ ID NO: 5073225 - DNA, 25 bp, Homo sapien
tgagcttgtccttaatctggatggt

SEQ ID NO: 5073226 - DNA, 25 bp, Homo sapien
ctcgggaagacgctgccaagccctc

SEQ ID NO: 5073227 - DNA, 25 bp, Homo sapien
ttaatctggatggtgtccctggcca

SEQ ID NO: 5073228 - DNA, 25 bp, Homo sapien
cttgtccttaatctggatggtgtcc

SEQ ID NO: 5073229 - DNA, 25 bp, Homo sapien
ctgcctccataatgtgcagccagga

SEQ ID NO: 5073230 - DNA, 25 bp, Homo sapien
ttctaaggaagcttctcgggcattc

SEQ ID NO: 5073231 - DNA, 25 bp, Homo sapien
acaccccacggctccagggagaggc

SEQ ID NO: 5073232 - DNA, 25 bp, Homo sapien
cagaggctccctggcattgtcctgg

SEQ ID NO: 5073233 - DNA, 25 bp, Homo sapien
tctcaactcgtgaggacccggaatg

SEQ ID NO: 5073234 - DNA, 25 bp, Homo sapien
tgctctggatgagaggcatcggcct

SEQ ID NO: 5073235 - DNA, 25 bp, Homo sapien
ctgagcaccgggtctcaactcgtga

SEQ ID NO: 5073236 - DNA, 25 bp, Homo sapien
gaatgctccccggtaggtccaggcc

SEQ ID NO: 5073237 - DNA, 25 bp, Homo sapien
gatgggtgggatcacgatggcgccc

SEQ ID NO: 5073238 - DNA, 25 bp, Homo sapien
ctcaggcctgtgaggactccctggc

SEQ ID NO: 5073239 - DNA, 25 bp, Homo sapien
gtcgctgcaaccgtcctggcctttg

SEQ ID NO: 5073240 - DNA, 25 bp, Homo sapien
catcttctcatcattgcagtgcagg

SEQ ID NO: 5073241 - DNA, 25 bp, Homo sapien
taacccgatttatgccaacacaaag

SEQ ID NO: 5073242 - DNA, 25 bp, Homo sapien
tagagcactgtcttacttacaagcc

SEQ ID NO: 5073243 - DNA, 25 bp, Homo sapien
gacattgttcgtgatgccattgacc

SEQ ID NO: 5073244 - DNA, 25 bp, Homo sapien
gatgttgctggccatctagagcact

SEQ ID NO: 5073245 - DNA, 25 bp, Homo sapien
ggcaaacagtcctggaacaattttg

SEQ ID NO: 5073246 - DNA, 25 bp, Homo sapien
ggaagacttgggcacacataagggc

SEQ ID NO: 5073247 - DNA, 25 bp, Homo sapien
gacttgggcacacataagggcccca

SEQ ID NO: 5073248 - DNA, 25 bp, Homo sapien
tggaacaattttgggaatggcagaa

SEQ ID NO: 5073249 - DNA, 25 bp, Homo sapien
atgacactgagacttgaaggccaag

SEQ ID NO: 5073250 - DNA, 25 bp, Homo sapien
gaaggtctgcaccttgacagcaatg

SEQ ID NO: 5073251 - DNA, 25 bp, Homo sapien
aaggccaagaagaaggtctgcacct

SEQ ID NO: 5073252 - DNA, 25 bp, Homo sapien
caagaagaaggtctgcaccttgaca

SEQ ID NO: 5073253 - DNA, 25 bp, Homo sapien
tgcaggggtcttctcccgaggccca

SEQ ID NO: 5073254 - DNA, 25 bp, Homo sapien
agagatgcaggggtcttctcccgag

SEQ ID NO: 5073255 - DNA, 25 bp, Homo sapien
gatgcaggggtcttctcccgaggcc

SEQ ID NO: 5073256 - DNA, 25 bp, Homo sapien
ccagagatgcaggggtcttctcccg

SEQ ID NO: 5073257 - DNA, 25 bp, Homo sapien
aggtcacccaggtcctctgcccagg

SEQ ID NO: 5073258 - DNA, 25 bp, Homo sapien
tctggggcccgtgcagagctcccag

SEQ ID NO: 5073259 - DNA, 25 bp, Homo sapien
ctctggggcccgtgcagagctccca

SEQ ID NO: 5073260 - DNA, 25 bp, Homo sapien
cccaggtcacccaggtcctctgccc

SEQ ID NO: 5073261 - DNA, 25 bp, Homo sapien
ctgaggggttgagaacaggggtgga

SEQ ID NO: 5073262 - DNA, 25 bp, Homo sapien
tgaggggttgagaacaggggtggag

SEQ ID NO: 5073263 - DNA, 25 bp, Homo sapien
gatgggtgaggccaaaggttttggc

SEQ ID NO: 5073264 - DNA, 25 bp, Homo sapien
atgggtgaggccaaaggttttggct

SEQ ID NO: 5073265 - DNA, 25 bp, Homo sapien
tgatgggtgaggccaaaggttttgg

SEQ ID NO: 5073266 - DNA, 25 bp, Homo sapien
ctgatgggtgaggccaaaggttttg

SEQ ID NO: 5073267 - DNA, 25 bp, Homo sapien
tgtcagcgtgggagcagactgagaa

SEQ ID NO: 5073268 - DNA, 25 bp, Homo sapien
cttctctggcacagtcaaaggagaa

SEQ ID NO: 5073269 - DNA, 25 bp, Homo sapien
agtcaaaggagaaggctgtcagcgt

SEQ ID NO: 5073270 - DNA, 25 bp, Homo sapien
ttctttcagcggagggcaggcttct

SEQ ID NO: 5073271 - DNA, 25 bp, Homo sapien
ttagtacttgggtggctgcctcggg

SEQ ID NO: 5073272 - DNA, 25 bp, Homo sapien
ggtcccactcttgaatacttcagac

SEQ ID NO: 5073273 - DNA, 25 bp, Homo sapien
tacttcagacacttgcttgccttcc

SEQ ID NO: 5073274 - DNA, 25 bp, Homo sapien
cactcttgaatacttcagacacttg

SEQ ID NO: 5073275 - DNA, 25 bp, Homo sapien
tgcatcttctcccgggcagacttgg

SEQ ID NO: 5073276 - DNA, 25 bp, Homo sapien
gggcacagacagtgtcccgctgccc

SEQ ID NO: 5073277 - DNA, 25 bp, Homo sapien
ggatgatgctgacgtcgtttctgca

SEQ ID NO: 5073278 - DNA, 25 bp, Homo sapien
catgggccgctcagcctagtgggca

SEQ ID NO: 5073279 - DNA, 25 bp, Homo sapien
cccacttcctcaggatgatgctgac

SEQ ID NO: 5073280 - DNA, 25 bp, Homo sapien
acatgaatgcccagtatacaaaaaa

SEQ ID NO: 5073281 - DNA, 25 bp, Homo sapien
gaaactctgaaccaagctgactgtt

SEQ ID NO: 5073282 - DNA, 25 bp, Homo sapien
gattcctgaggtgccctggtagaag

SEQ ID NO: 5073283 - DNA, 25 bp, Homo sapien
aaaatgaggcaacatagaagctcct

SEQ ID NO: 5073284 - DNA, 25 bp, Homo sapien
ctttccagtcatgttcgtatttgtg

SEQ ID NO: 5073285 - DNA, 25 bp, Homo sapien
tttccagtcatgttcgtatttgtgc

SEQ ID NO: 5073286 - DNA, 25 bp, Homo sapien
tgattttcaccacagtacatctgga

SEQ ID NO: 5073287 - DNA, 25 bp, Homo sapien
acagtacatctggaggtcctaggca

SEQ ID NO: 5073288 - DNA, 25 bp, Homo sapien
caccaggatgattttcaccacagta

SEQ ID NO: 5073289 - DNA, 25 bp, Homo sapien
gtacatctggaggtcctaggcaagt

SEQ ID NO: 5073290 - DNA, 25 bp, Homo sapien
ttcccattcaggagaccccaacgtg

SEQ ID NO: 5073291 - DNA, 25 bp, Homo sapien
agaccccaacgtgagcaccgcaggt

SEQ ID NO: 5073292 - DNA, 25 bp, Homo sapien
ttcaggagaccccaacgtgagcacc

SEQ ID NO: 5073293 - DNA, 25 bp, Homo sapien
cgtgagcaccgcaggtaatgagtta

SEQ ID NO: 5073294 - DNA, 25 bp, Homo sapien
tcagccccagctccgggttcgagaa

SEQ ID NO: 5073295 - DNA, 25 bp, Homo sapien
gctccgggttcgagaaaggcctcaa

SEQ ID NO: 5073296 - DNA, 25 bp, Homo sapien
cctcaactccttacaggctctaaga

SEQ ID NO: 5073297 - DNA, 25 bp, Homo sapien
gaggcactggagtgcatccctcagc

SEQ ID NO: 5073298 - DNA, 25 bp, Homo sapien
gcagcttcccggtgaggacctctga

SEQ ID NO: 5073299 - DNA, 25 bp, Homo sapien
accaccaagcacacgtcgtgcagct

SEQ ID NO: 5073300 - DNA, 25 bp, Homo sapien
gctgccaagcgctggatgctcacca

SEQ ID NO: 5073301 - DNA, 25 bp, Homo sapien
aagcgctggatgctcaccagaccct

SEQ ID NO: 5073302 - DNA, 25 bp, Homo sapien
tagacacccgccgaggtgaggacca

SEQ ID NO: 5073303 - DNA, 25 bp, Homo sapien
tctctggatgaactcgttggtgtcc

SEQ ID NO: 5073304 - DNA, 25 bp, Homo sapien
gagactggccggctgctctctggat

SEQ ID NO: 5073305 - DNA, 25 bp, Homo sapien
tctgcagcaagcagcgggcgatctc

SEQ ID NO: 5073306 - DNA, 25 bp, Homo sapien
cttaatgcatgtttgctgaactgaa

SEQ ID NO: 5073307 - DNA, 25 bp, Homo sapien
agcctcaccaggttgtgcaccaaca

SEQ ID NO: 5073308 - DNA, 25 bp, Homo sapien
tcctggttggagtcctgtgccagcc

SEQ ID NO: 5073309 - DNA, 25 bp, Homo sapien
cagccgcgtatttccggatcaaggg

SEQ ID NO: 5073310 - DNA, 25 bp, Homo sapien
gagaggtgctcagccgcgtatttcc

SEQ ID NO: 5073311 - DNA, 25 bp, Homo sapien
tcaacagataagtaggagttcacaa

SEQ ID NO: 5073312 - DNA, 25 bp, Homo sapien
taagtaggagttcacaagttgggtg

SEQ ID NO: 5073313 - DNA, 25 bp, Homo sapien
tgggatttgggatacgtcggaggaa

SEQ ID NO: 5073314 - DNA, 25 bp, Homo sapien
gatttgggatacgtcggaggaacag

SEQ ID NO: 5073315 - DNA, 25 bp, Homo sapien
ggcaggtgagggaatcaaggagggc

SEQ ID NO: 5073316 - DNA, 25 bp, Homo sapien
ggtggcaggtgagggaatcaaggag

SEQ ID NO: 5073317 - DNA, 25 bp, Homo sapien
ctgatgaacagtggtggcaggtgag

SEQ ID NO: 5073318 - DNA, 25 bp, Homo sapien
agtggtggcaggtgagggaatcaag

SEQ ID NO: 5073319 - DNA, 25 bp, Homo sapien
ttgctttacagctttacataatctt

SEQ ID NO: 5073320 - DNA, 25 bp, Homo sapien
tacagctttacataatcttcctaat

SEQ ID NO: 5073321 - DNA, 25 bp, Homo sapien
gagcaagataaagaaacagcctctg

SEQ ID NO: 5073322 - DNA, 25 bp, Homo sapien
agagcaagataaagaaacagcctct

SEQ ID NO: 5073323 - DNA, 25 bp, Homo sapien
ttaatggccgccatgaccttctgca

SEQ ID NO: 5073324 - DNA, 25 bp, Homo sapien
caagtcgtaagatgggagagattgc

SEQ ID NO: 5073325 - DNA, 25 bp, Homo sapien
tagtgttcgccatcaagatattcac

SEQ ID NO: 5073326 - DNA, 25 bp, Homo sapien
gatattcaccatcttccggccataa

SEQ ID NO: 5073327 - DNA, 25 bp, Homo sapien
tgacccacatgaaggctaccaggct

SEQ ID NO: 5073328 - DNA, 25 bp, Homo sapien
tcagatgtcacagttgagccttcca

SEQ ID NO: 5073329 - DNA, 25 bp, Homo sapien
tccctggttaacagatgaaggcatg

SEQ ID NO: 5073330 - DNA, 25 bp, Homo sapien
aaaaggccatgacccacttatgccc

SEQ ID NO: 5073331 - DNA, 25 bp, Homo sapien
acaccaccagactcctcaacacctt

SEQ ID NO: 5073332 - DNA, 25 bp, Homo sapien
ttgatgggcagcccgttctcacaca

SEQ ID NO: 5073333 - DNA, 25 bp, Homo sapien
ttctcacacaccaccagactcctca

SEQ ID NO: 5073334 - DNA, 25 bp, Homo sapien
tcaacaccttgcggcctttggcaga

SEQ ID NO: 5073335 - DNA, 25 bp, Homo sapien
taaggagttcagatgggatcagccc

SEQ ID NO: 5073336 - DNA, 25 bp, Homo sapien
tcagttttaagcacaggcgtgacca

SEQ ID NO: 5073337 - DNA, 25 bp, Homo sapien
gagagtccaaccaccgatgctagtg

SEQ ID NO: 5073338 - DNA, 25 bp, Homo sapien
tctaagcgaacgaggaaacactgag

SEQ ID NO: 5073339 - DNA, 25 bp, Homo sapien
tctactgagagccaagagctgtgct

SEQ ID NO: 5073340 - DNA, 25 bp, Homo sapien
tgccgttaggagctcacagaccaag

SEQ ID NO: 5073341 - DNA, 25 bp, Homo sapien
cagaccaagggaagatagatacatc

SEQ ID NO: 5073342 - DNA, 25 bp, Homo sapien
gaaccgtgagatgagagcacagcct

SEQ ID NO: 5073343 - DNA, 25 bp, Homo sapien
gcagagacaagagtgtcacctgcag

SEQ ID NO: 5073344 - DNA, 25 bp, Homo sapien
tatgtaagcaatgggggaagtcaga

SEQ ID NO: 5073345 - DNA, 25 bp, Homo sapien
taggtaaggagcgtggcgtctgaac

SEQ ID NO: 5073346 - DNA, 25 bp, Homo sapien
ccctccacctacagcttgttgccca

SEQ ID NO: 5073347 - DNA, 25 bp, Homo sapien
ggcagtgacaagctccgtcttggcc

SEQ ID NO: 5073348 - DNA, 25 bp, Homo sapien
tgtcagctcccgtagctgctccacc

SEQ ID NO: 5073349 - DNA, 25 bp, Homo sapien
accagccttgggccattgcagctga

SEQ ID NO: 5073350 - DNA, 25 bp, Homo sapien
cacgccttccatccgggaccggaag

SEQ ID NO: 5073351 - DNA, 25 bp, Homo sapien
gatcatcttggcgaaggactccagc

SEQ ID NO: 5073352 - DNA, 25 bp, Homo sapien
cacggcagcagcgtaaatccctgag

SEQ ID NO: 5073353 - DNA, 25 bp, Homo sapien
cactttcttgttggaatcctgaagc

SEQ ID NO: 5073354 - DNA, 25 bp, Homo sapien
gagttgaggttgtctgcaacagtga

SEQ ID NO: 5073355 - DNA, 25 bp, Homo sapien
gtgacatccagcaccgcacggccac

SEQ ID NO: 5073356 - DNA, 25 bp, Homo sapien
catccagcaccgcacggccactcag

SEQ ID NO: 5073357 - DNA, 25 bp, Homo sapien
tccagcaccgcacggccactcagga

SEQ ID NO: 5073358 - DNA, 25 bp, Homo sapien
agcaccgcacggccactcaggaaac

SEQ ID NO: 5073359 - DNA, 25 bp, Homo sapien
gagaacagaaatctgccaggagatg

SEQ ID NO: 5073360 - DNA, 25 bp, Homo sapien
gggattatttcaggtctaagataac

SEQ ID NO: 5073361 - DNA, 25 bp, Homo sapien
taactgggtgaatggttcaaccaca

SEQ ID NO: 5073362 - DNA, 25 bp, Homo sapien
gaacagaaatctgccaggagatggg

SEQ ID NO: 5073363 - DNA, 25 bp, Homo sapien
catcgggagtctagggaacagagtc

SEQ ID NO: 5073364 - DNA, 25 bp, Homo sapien
taacagaagacctatggagaagctc

SEQ ID NO: 5073365 - DNA, 25 bp, Homo sapien
tctgaaatcggaaatgccccaatgt

SEQ ID NO: 5073366 - DNA, 25 bp, Homo sapien
tcagccctggaatgaagtcacttgg

SEQ ID NO: 5073367 - DNA, 25 bp, Homo sapien
ttttgggtcaccccagcattcccca

SEQ ID NO: 5073368 - DNA, 25 bp, Homo sapien
gcattccccaggaaaggatcctggg

SEQ ID NO: 5073369 - DNA, 25 bp, Homo sapien
ctggggtaaagggcttggaggagct

SEQ ID NO: 5073370 - DNA, 25 bp, Homo sapien
ccagcattccccaggaaaggatcct

SEQ ID NO: 5073371 - DNA, 25 bp, Homo sapien
gctgaaaagggtatgagctgccagt

SEQ ID NO: 5073372 - DNA, 25 bp, Homo sapien
ctgtcagtggccttgcggctgcctc

SEQ ID NO: 5073373 - DNA, 25 bp, Homo sapien
gctgcctcccaaggactctgagtct

SEQ ID NO: 5073374 - DNA, 25 bp, Homo sapien
ggacatgccgctctacagcttgagg

SEQ ID NO: 5073375 - DNA, 25 bp, Homo sapien
aaatataccatgtacatctggaact

SEQ ID NO: 5073376 - DNA, 25 bp, Homo sapien
ccatgtacatctggaactctaaggg

SEQ ID NO: 5073377 - DNA, 25 bp, Homo sapien
aagtaaccaggagaatagtccatca

SEQ ID NO: 5073378 - DNA, 25 bp, Homo sapien
ggaaagtaaccaggagaatagtcca

SEQ ID NO: 5073379 - DNA, 25 bp, Homo sapien
gaacccaactcattgaagacccatg

SEQ ID NO: 5073380 - DNA, 25 bp, Homo sapien
ggaggaacccaccacagatcaatct

SEQ ID NO: 5073381 - DNA, 25 bp, Homo sapien
gaggagcacagctttcatcttcccg

SEQ ID NO: 5073382 - DNA, 25 bp, Homo sapien
tagagttagaaaccaaggactgtcc

SEQ ID NO: 5073383 - DNA, 25 bp, Homo sapien
tgcttccattgtcaacctgttggga

SEQ ID NO: 5073384 - DNA, 25 bp, Homo sapien
cctgttgggatctcacacctcatgt

SEQ ID NO: 5073385 - DNA, 25 bp, Homo sapien
catctggcttaatataagatgaccg

SEQ ID NO: 5073386 - DNA, 25 bp, Homo sapien
taagatgaccggattctcagctctg

SEQ ID NO: 5073387 - DNA, 25 bp, Homo sapien
ggcacactgctaatggaaatgtaaa

SEQ ID NO: 5073388 - DNA, 25 bp, Homo sapien
aagaattgaaatcagtctgcctggc

SEQ ID NO: 5073389 - DNA, 25 bp, Homo sapien
catctctctactgggtgtataacca

SEQ ID NO: 5073390 - DNA, 25 bp, Homo sapien
gaggactaccatgtgatcccgccat

SEQ ID NO: 5073391 - DNA, 25 bp, Homo sapien
tttccacctcacaaggcttggttcc

SEQ ID NO: 5073392 - DNA, 25 bp, Homo sapien
gagaacattgcgaagagaaatgtga

SEQ ID NO: 5073393 - DNA, 25 bp, Homo sapien
cttttccacctcacaaggcttggtt

SEQ ID NO: 5073394 - DNA, 25 bp, Homo sapien
ctgacagcaagagaacattgcgaag

SEQ ID NO: 5073395 - DNA, 25 bp, Homo sapien
caggcagcacgaacacaataatggc

SEQ ID NO: 5073396 - DNA, 25 bp, Homo sapien
acaggcagcacgaacacaataatgg

SEQ ID NO: 5073397 - DNA, 25 bp, Homo sapien
agccagcgtccccacaggcagcacg

SEQ ID NO: 5073398 - DNA, 25 bp, Homo sapien
gcagcacgaacacaataatggcatt

SEQ ID NO: 5073399 - DNA, 25 bp, Homo sapien
tctttctcaccaagagtacagattg

SEQ ID NO: 5073400 - DNA, 25 bp, Homo sapien
tacagattgttcagcgtgttggttg

SEQ ID NO: 5073401 - DNA, 25 bp, Homo sapien
aggcccctgtgcagatccaattaca

SEQ ID NO: 5073402 - DNA, 25 bp, Homo sapien
ctcagtgtcacgtagaaaaagaatt

SEQ ID NO: 5073403 - DNA, 25 bp, Homo sapien
catgttgagggattctcttggatgc

SEQ ID NO: 5073404 - DNA, 25 bp, Homo sapien
cacattgttgaatcgggtggagcac

SEQ ID NO: 5073405 - DNA, 25 bp, Homo sapien
tcttggatgcattccagcttgtcca

SEQ ID NO: 5073406 - DNA, 25 bp, Homo sapien
caaaatagttgctaggagcagtcac

SEQ ID NO: 5073407 - DNA, 25 bp, Homo sapien
taaaaggcctaatccgtgctacacc

SEQ ID NO: 5073408 - DNA, 25 bp, Homo sapien
gccgagcgtggtcaagagtacatcc

SEQ ID NO: 5073409 - DNA, 25 bp, Homo sapien
cccaaggaccagacagggtgaaact

SEQ ID NO: 5073410 - DNA, 25 bp, Homo sapien
tgaaactgtgcacctaaagtcgtga

SEQ ID NO: 5073411 - DNA, 25 bp, Homo sapien
gcgctggggactcggtggggacgga

SEQ ID NO: 5073412 - DNA, 25 bp, Homo sapien
gaggaggcagcgcgcgcctgcgctg

SEQ ID NO: 5073413 - DNA, 25 bp, Homo sapien
gcagcgcgcgcctgcgctggctcgc

SEQ ID NO: 5073414 - DNA, 25 bp, Homo sapien
gactcggtggggacggaggaggcag

SEQ ID NO: 5073415 - DNA, 25 bp, Homo sapien
gaggaaaggccgagaggcgcgctcc

SEQ ID NO: 5073416 - DNA, 25 bp, Homo sapien
gccggcgctgtctcccgtggccgcc

SEQ ID NO: 5073417 - DNA, 25 bp, Homo sapien
ccacgcggggtgggcgcgcgcgcag

SEQ ID NO: 5073418 - DNA, 25 bp, Homo sapien
ctcccgccggcgctgtctcccgtgg

SEQ ID NO: 5073419 - DNA, 25 bp, Homo sapien
aaagggccttactgaagccaggaga

SEQ ID NO: 5073420 - DNA, 25 bp, Homo sapien
ctccttggtccatgctttaacacag

SEQ ID NO: 5073421 - DNA, 25 bp, Homo sapien
taaatggggatgtccactagcatct

SEQ ID NO: 5073422 - DNA, 25 bp, Homo sapien
ctgtctggaccccataaaagggcct

SEQ ID NO: 5073423 - DNA, 25 bp, Homo sapien
ctaatggaaaatctggaaggtcctc

SEQ ID NO: 5073424 - DNA, 25 bp, Homo sapien
tccttctaatggaaaatctggaagg

SEQ ID NO: 5073425 - DNA, 25 bp, Homo sapien
cttctaatggaaaatctggaaggtc

SEQ ID NO: 5073426 - DNA, 25 bp, Homo sapien
gaaaagataactggggtatcagaag

SEQ ID NO: 5073427 - DNA, 25 bp, Homo sapien
gaacagtacatagtttcacagggta

SEQ ID NO: 5073428 - DNA, 25 bp, Homo sapien
catgcctcaactctggtttctgtgg

SEQ ID NO: 5073429 - DNA, 25 bp, Homo sapien
gcatgaactgattctgaaggcattt

SEQ ID NO: 5073430 - DNA, 25 bp, Homo sapien
cacagggtaatcaccttgagagtca

SEQ ID NO: 5073431 - DNA, 25 bp, Homo sapien
tgtaacagcatgcataagtagtggg

SEQ ID NO: 5073432 - DNA, 25 bp, Homo sapien
tctagagtcagcataactaaaagat

SEQ ID NO: 5073433 - DNA, 25 bp, Homo sapien
gagaggcaccaaactaaagacacat

SEQ ID NO: 5073434 - DNA, 25 bp, Homo sapien
gtacacatagttcttacttctagag

SEQ ID NO: 5073435 - DNA, 25 bp, Homo sapien
tggacctgaggaacccactgtctca

SEQ ID NO: 5073436 - DNA, 25 bp, Homo sapien
caatgttttgttggacctgaggaac

SEQ ID NO: 5073437 - DNA, 25 bp, Homo sapien
tttcctggcatgatgcatcattagg

SEQ ID NO: 5073438 - DNA, 25 bp, Homo sapien
tcctggcatgatgcatcattaggat

SEQ ID NO: 5073439 - DNA, 25 bp, Homo sapien
gattattccaaaggtaatctggcac

SEQ ID NO: 5073440 - DNA, 25 bp, Homo sapien
tattcttaaagactacattcaagcc

SEQ ID NO: 5073441 - DNA, 25 bp, Homo sapien
acatactggtcaaggaaccctccct

SEQ ID NO: 5073442 - DNA, 25 bp, Homo sapien
aatctggcactccaaatatgttcct

SEQ ID NO: 5073443 - DNA, 25 bp, Homo sapien
tctgtcaatccatctctatcattca

SEQ ID NO: 5073444 - DNA, 25 bp, Homo sapien
atctgtcaatccatctctatcattc

SEQ ID NO: 5073445 - DNA, 25 bp, Homo sapien
ctgtcaatccatctctatcattcac

SEQ ID NO: 5073446 - DNA, 25 bp, Homo sapien
gatttgcaggtataatgtaaaagag

SEQ ID NO: 5073447 - DNA, 25 bp, Homo sapien
agatttgcaggtataatgtaaaaga

SEQ ID NO: 5073448 - DNA, 25 bp, Homo sapien
ttgtgaaagtatcagttcatgatga

SEQ ID NO: 5073449 - DNA, 25 bp, Homo sapien
gtgaaagtatcagttcatgatgagt

SEQ ID NO: 5073450 - DNA, 25 bp, Homo sapien
gggaaaaaggagtccatcaccacca

SEQ ID NO: 5073451 - DNA, 25 bp, Homo sapien
ggaaaaaggagtccatcaccaccag

SEQ ID NO: 5073452 - DNA, 25 bp, Homo sapien
aattttacagctgtttccacatcac

SEQ ID NO: 5073453 - DNA, 25 bp, Homo sapien
gctgagttgcaaattttacagctgt

SEQ ID NO: 5073454 - DNA, 25 bp, Homo sapien
ctgctcccaggtcaataagctgagt

SEQ ID NO: 5073455 - DNA, 25 bp, Homo sapien
tcaataagctgagttgcaaatttta

SEQ ID NO: 5073456 - DNA, 25 bp, Homo sapien
agcattcatgtttgtccagcgactc

SEQ ID NO: 5073457 - DNA, 25 bp, Homo sapien
taagttcagggacatcaaaataagc

SEQ ID NO: 5073458 - DNA, 25 bp, Homo sapien
tgtccagcgactccgcaaactaatg

SEQ ID NO: 5073459 - DNA, 25 bp, Homo sapien
caaaataagcagcataatgcaaagc

SEQ ID NO: 5073460 - DNA, 25 bp, Homo sapien
tttggtttcgatgttttcaaaatca

SEQ ID NO: 5073461 - DNA, 25 bp, Homo sapien
ttggtttcgatgttttcaaaatcac

SEQ ID NO: 5073462 - DNA, 25 bp, Homo sapien
cctgcacacaagttgtatgctgcaa

SEQ ID NO: 5073463 - DNA, 25 bp, Homo sapien
caagttgtatgctgcaatatgcaaa

SEQ ID NO: 5073464 - DNA, 25 bp, Homo sapien
tgtatgctgcaatatgcaaagctgt

SEQ ID NO: 5073465 - DNA, 25 bp, Homo sapien
tgctccaagaggcacttcacagcac

SEQ ID NO: 5073466 - DNA, 25 bp, Homo sapien
tacttgctcatgtaagagttcttct

SEQ ID NO: 5073467 - DNA, 25 bp, Homo sapien
catcactctttacatgtggcacaaa

SEQ ID NO: 5073468 - DNA, 25 bp, Homo sapien
gaagactttactttcctgaatggga

SEQ ID NO: 5073469 - DNA, 25 bp, Homo sapien
gaatgggacttatcaatataaaagg

SEQ ID NO: 5073470 - DNA, 25 bp, Homo sapien
atacatcaaactcctaaatgaaaga

SEQ ID NO: 5073471 - DNA, 25 bp, Homo sapien
acatcaaactcctaaatgaaagata

SEQ ID NO: 5073472 - DNA, 25 bp, Homo sapien
tacatcaaactcctaaatgaaagat

SEQ ID NO: 5073473 - DNA, 25 bp, Homo sapien
taagcattgccttgccagtgacatg

SEQ ID NO: 5073474 - DNA, 25 bp, Homo sapien
cagaggcaccgcatctagaagcatc

SEQ ID NO: 5073475 - DNA, 25 bp, Homo sapien
catatctactgggtctggaacaaca

SEQ ID NO: 5073476 - DNA, 25 bp, Homo sapien
tcaggccaagtgacgtaagcattgc

SEQ ID NO: 5073477 - DNA, 25 bp, Homo sapien
gtactggacttttccaacacttcca

SEQ ID NO: 5073478 - DNA, 25 bp, Homo sapien
gcaaattcagttgttccacaaaatc

SEQ ID NO: 5073479 - DNA, 25 bp, Homo sapien
ttccacaaaatcttaatgtaccaac

SEQ ID NO: 5073480 - DNA, 25 bp, Homo sapien
cactgcccacttgcaaattcagttg

SEQ ID NO: 5073481 - DNA, 25 bp, Homo sapien
tgggcggcctctattactcagttac

SEQ ID NO: 5073482 - DNA, 25 bp, Homo sapien
tcaggctaactgaagtattgatagg

SEQ ID NO: 5073483 - DNA, 25 bp, Homo sapien
aaatctcgacatgtaactgtaaggc

SEQ ID NO: 5073484 - DNA, 25 bp, Homo sapien
taaagcaatgactggatgcatagca

SEQ ID NO: 5073485 - DNA, 25 bp, Homo sapien
ccactgcatgtcctatgatgagagg

SEQ ID NO: 5073486 - DNA, 25 bp, Homo sapien
tgccaacttacaactcctttggaag

SEQ ID NO: 5073487 - DNA, 25 bp, Homo sapien
caaataacagtgagccatagagcat

SEQ ID NO: 5073488 - DNA, 25 bp, Homo sapien
gacacagtacttaccctcaaagagc

SEQ ID NO: 5073489 - DNA, 25 bp, Homo sapien
tatattcttccttcgaccttttgct

SEQ ID NO: 5073490 - DNA, 25 bp, Homo sapien
acgtcaattttctgggacctgatga

SEQ ID NO: 5073491 - DNA, 25 bp, Homo sapien
tgatgagaggtacagcagcttttgt

SEQ ID NO: 5073492 - DNA, 25 bp, Homo sapien
tacttttgacgtcacatgagctacg

SEQ ID NO: 5073493 - DNA, 25 bp, Homo sapien
caggaggcaatgaaagtgttgactc

SEQ ID NO: 5073494 - DNA, 25 bp, Homo sapien
ctgctgacagatccaagcagggcaa

SEQ ID NO: 5073495 - DNA, 25 bp, Homo sapien
aagggaagggcttttgctcattgtc

SEQ ID NO: 5073496 - DNA, 25 bp, Homo sapien
gtcttcttgttactgctgattgcat

SEQ ID NO: 5073497 - DNA, 25 bp, Homo sapien
agcactggctctggatgaaagggaa

SEQ ID NO: 5073498 - DNA, 25 bp, Homo sapien
tgtctgtgttccaaagaagatgtag

SEQ ID NO: 5073499 - DNA, 25 bp, Homo sapien
agataaaaaacaccaagaaagcctg

SEQ ID NO: 5073500 - DNA, 25 bp, Homo sapien
caccaagaaagcctggttgaaaaag

SEQ ID NO: 5073501 - DNA, 25 bp, Homo sapien
caagaaagcctggttgaaaaagcca

SEQ ID NO: 5073502 - DNA, 25 bp, Homo sapien
gcctggttgaaaaagccatagatac

SEQ ID NO: 5073503 - DNA, 25 bp, Homo sapien
ataacaatgggatatgatgaggccg

SEQ ID NO: 5073504 - DNA, 25 bp, Homo sapien
gatgaggccgaggtccctacctttc

SEQ ID NO: 5073505 - DNA, 25 bp, Homo sapien
taacaatgggatatgatgaggccga

SEQ ID NO: 5073506 - DNA, 25 bp, Homo sapien
tatgatgaggccgaggtccctacct

SEQ ID NO: 5073507 - DNA, 25 bp, Homo sapien
gagccttgtcccatcagtacataaa

SEQ ID NO: 5073508 - DNA, 25 bp, Homo sapien
ctgtgaccagccaaaagtagtgtga

SEQ ID NO: 5073509 - DNA, 25 bp, Homo sapien
aactaaaccttgaaatgcccactat

SEQ ID NO: 5073510 - DNA, 25 bp, Homo sapien
cactgccctgtcaacctgattcaaa

SEQ ID NO: 5073511 - DNA, 25 bp, Homo sapien
gtagatgttgctgaggaattcaaac

SEQ ID NO: 5073512 - DNA, 25 bp, Homo sapien
taacactctctctccgaggcggagt

SEQ ID NO: 5073513 - DNA, 25 bp, Homo sapien
agttccccctcgcaacggctattat

SEQ ID NO: 5073514 - DNA, 25 bp, Homo sapien
tgttgtcccaaagaacctaatggtg

SEQ ID NO: 5073515 - DNA, 25 bp, Homo sapien
taatggtgcccagtctctgtcctac

SEQ ID NO: 5073516 - DNA, 25 bp, Homo sapien
caaaactcttatgctactatacaaa

SEQ ID NO: 5073517 - DNA, 25 bp, Homo sapien
gggaagatcatgatactcattaaga

SEQ ID NO: 5073518 - DNA, 25 bp, Homo sapien
ctatacaaaaccaaagtcgaggtgt

SEQ ID NO: 5073519 - DNA, 25 bp, Homo sapien
ccaaaatgagggaagatcatgatac

SEQ ID NO: 5073520 - DNA, 25 bp, Homo sapien
cctggatgggggagcaaatattcca

SEQ ID NO: 5073521 - DNA, 25 bp, Homo sapien
cttggagaacagctaaaatactgca

SEQ ID NO: 5073522 - DNA, 25 bp, Homo sapien
actgaaccatcattcttgccatggg

SEQ ID NO: 5073523 - DNA, 25 bp, Homo sapien
gggtttttcaagctctataccatac

SEQ ID NO: 5073524 - DNA, 25 bp, Homo sapien
gagctacaatcagagcatatcttta

SEQ ID NO: 5073525 - DNA, 25 bp, Homo sapien
tagtgtctctattaaccactgcaga

SEQ ID NO: 5073526 - DNA, 25 bp, Homo sapien
gaaagaagacatgagctacaatcag

SEQ ID NO: 5073527 - DNA, 25 bp, Homo sapien
aattagtgtctctattaaccactgc

SEQ ID NO: 5073528 - DNA, 25 bp, Homo sapien
tctcactgtacttagctgcaaacgc

SEQ ID NO: 5073529 - DNA, 25 bp, Homo sapien
tgcaaacgccacttctaatagccta

SEQ ID NO: 5073530 - DNA, 25 bp, Homo sapien
tgacagattaagcttgctgctctca

SEQ ID NO: 5073531 - DNA, 25 bp, Homo sapien
cacatactcatagggtttgcaaatg

SEQ ID NO: 5073532 - DNA, 25 bp, Homo sapien
caagactcccagattgcgatcgtag

SEQ ID NO: 5073533 - DNA, 25 bp, Homo sapien
gcgatcgtaggtctagtctcatgaa

SEQ ID NO: 5073534 - DNA, 25 bp, Homo sapien
tgccaggagatagtcacaacagtct

SEQ ID NO: 5073535 - DNA, 25 bp, Homo sapien
tgtaaaacttcaatctgccaggaga

SEQ ID NO: 5073536 - DNA, 25 bp, Homo sapien
agtggcttgacaacgtaaaggagga

SEQ ID NO: 5073537 - DNA, 25 bp, Homo sapien
agaaagtggcttgacaacgtaaagg

SEQ ID NO: 5073538 - DNA, 25 bp, Homo sapien
taaaaaacgtgtgctccagaaacaa

SEQ ID NO: 5073539 - DNA, 25 bp, Homo sapien
gtaaaaaacgtgtgctccagaaaca

SEQ ID NO: 5073540 - DNA, 25 bp, Homo sapien
caggataagaatggttctgtttatt

SEQ ID NO: 5073541 - DNA, 25 bp, Homo sapien
agaaatttctgaaagggtatccagg

SEQ ID NO: 5073542 - DNA, 25 bp, Homo sapien
gaagaaatttctgaaagggtatcca

SEQ ID NO: 5073543 - DNA, 25 bp, Homo sapien
tctgaaagggtatccagggaatctg

SEQ ID NO: 5073544 - DNA, 25 bp, Homo sapien
gcaaagaaatattgattaggaacac

SEQ ID NO: 5073545 - DNA, 25 bp, Homo sapien
aatattgattaggaacacaaaactg

SEQ ID NO: 5073546 - DNA, 25 bp, Homo sapien
ggaacacaaaactgtgtagtcttac

SEQ ID NO: 5073547 - DNA, 25 bp, Homo sapien
gaaagcaaagaaatattgattagga

SEQ ID NO: 5073548 - DNA, 25 bp, Homo sapien
cagaagttgtgctaaaacttctcct

SEQ ID NO: 5073549 - DNA, 25 bp, Homo sapien
agaagttgtgctaaaacttctccta

SEQ ID NO: 5073550 - DNA, 25 bp, Homo sapien
gcagaagttgtgctaaaacttctcc

SEQ ID NO: 5073551 - DNA, 25 bp, Homo sapien
gcaatgcaaaagatacagcactcca

SEQ ID NO: 5073552 - DNA, 25 bp, Homo sapien
ttaattgcgcttgcaaaggagggag

SEQ ID NO: 5073553 - DNA, 25 bp, Homo sapien
ggaagaacgcttctcaatacactta

SEQ ID NO: 5073554 - DNA, 25 bp, Homo sapien
cgtgttaaaactctaccaagcaatg

SEQ ID NO: 5073555 - DNA, 25 bp, Homo sapien
taacagttctgacctctatgaagat

SEQ ID NO: 5073556 - DNA, 25 bp, Homo sapien
ttaacagttctgacctctatgaaga

SEQ ID NO: 5073557 - DNA, 25 bp, Homo sapien
attaacagttctgacctctatgaag

SEQ ID NO: 5073558 - DNA, 25 bp, Homo sapien
acagttctgacctctatgaagataa

SEQ ID NO: 5073559 - DNA, 25 bp, Homo sapien
aatcagctaagaggaagacgtctct

SEQ ID NO: 5073560 - DNA, 25 bp, Homo sapien
gattcaaggtatgtcaaagctcaaa

SEQ ID NO: 5073561 - DNA, 25 bp, Homo sapien
gagagctctgtttactcattcaaaa

SEQ ID NO: 5073562 - DNA, 25 bp, Homo sapien
gaaacgcagagatcgtcatctgaga

SEQ ID NO: 5073563 - DNA, 25 bp, Homo sapien
aaacattgcaaaagtcacgctgaag

SEQ ID NO: 5073564 - DNA, 25 bp, Homo sapien
taaacaatatgggaatatgagcacg

SEQ ID NO: 5073565 - DNA, 25 bp, Homo sapien
tgttttcgtatcacagcacagtctt

SEQ ID NO: 5073566 - DNA, 25 bp, Homo sapien
gaaagctttgaaatgggcatatgga

SEQ ID NO: 5073567 - DNA, 25 bp, Homo sapien
tgagctgagaccttctaaaacggcc

SEQ ID NO: 5073568 - DNA, 25 bp, Homo sapien
acctgataatgaggcatgggactcc

SEQ ID NO: 5073569 - DNA, 25 bp, Homo sapien
gccactaacactaacgagggtctga

SEQ ID NO: 5073570 - DNA, 25 bp, Homo sapien
tccttacagtgtgcaagaacgtctc

SEQ ID NO: 5073571 - DNA, 25 bp, Homo sapien
gtgctgctccaactgcgacgcaaag

SEQ ID NO: 5073572 - DNA, 25 bp, Homo sapien
tcattggagctcgtgagcaggacct

SEQ ID NO: 5073573 - DNA, 25 bp, Homo sapien
gctcccttcaatgccacctgcggtg

SEQ ID NO: 5073574 - DNA, 25 bp, Homo sapien
agtggggcccacatacctaacagta

SEQ ID NO: 5073575 - DNA, 25 bp, Homo sapien
tggcgcttcggagctcaagtccaag

SEQ ID NO: 5073576 - DNA, 25 bp, Homo sapien
cttacaggtgaaatagcgcttgtca

SEQ ID NO: 5073577 - DNA, 25 bp, Homo sapien
gaaatagcgcttgtcacccactgac

SEQ ID NO: 5073578 - DNA, 25 bp, Homo sapien
tttcccttggcgcttcggagctcaa

SEQ ID NO: 5073579 - DNA, 25 bp, Homo sapien
cgataggtcactctgctcggtcgaa

SEQ ID NO: 5073580 - DNA, 25 bp, Homo sapien
tcggtcgaactaagactccatggtt

SEQ ID NO: 5073581 - DNA, 25 bp, Homo sapien
taattccccgataggtcactctgct

SEQ ID NO: 5073582 - DNA, 25 bp, Homo sapien
tgacccattaattccccgataggtc

SEQ ID NO: 5073583 - DNA, 25 bp, Homo sapien
ttgagcttatttaatattttagaag

SEQ ID NO: 5073584 - DNA, 25 bp, Homo sapien
tatttgagcttatttaatattttag

SEQ ID NO: 5073585 - DNA, 25 bp, Homo sapien
tgagcttatttaatattttagaagc

SEQ ID NO: 5073586 - DNA, 25 bp, Homo sapien
tcatccagatgaagcagtcaagcag

SEQ ID NO: 5073587 - DNA, 25 bp, Homo sapien
gtaagacgggcttccatttcagtat

SEQ ID NO: 5073588 - DNA, 25 bp, Homo sapien
gcaagaaatgcaacagctggtcacc

SEQ ID NO: 5073589 - DNA, 25 bp, Homo sapien
ccacaagtgaggagacccacagtct

SEQ ID NO: 5073590 - DNA, 25 bp, Homo sapien
aatattccttgattacaaagcagcc

SEQ ID NO: 5073591 - DNA, 25 bp, Homo sapien
tatttctaagcacaaggcaagctcc

SEQ ID NO: 5073592 - DNA, 25 bp, Homo sapien
taaaaaggcagcgaagtgacagaat

SEQ ID NO: 5073593 - DNA, 25 bp, Homo sapien
ggcagaactctgcaacaattagaga

SEQ ID NO: 5073594 - DNA, 25 bp, Homo sapien
cacagcacttggatggttaaacctt

SEQ ID NO: 5073595 - DNA, 25 bp, Homo sapien
cagtacaggatagttagcttgctca

SEQ ID NO: 5073596 - DNA, 25 bp, Homo sapien
tctgtctacgtggaataaagtcatg

SEQ ID NO: 5073597 - DNA, 25 bp, Homo sapien
gaacaaaacgcatggcttgaagctg

SEQ ID NO: 5073598 - DNA, 25 bp, Homo sapien
taaaaaatgtcgtgagtagttccag

SEQ ID NO: 5073599 - DNA, 25 bp, Homo sapien
gcatacattccaagtgctttgagta

SEQ ID NO: 5073600 - DNA, 25 bp, Homo sapien
tccagtagtatagcagaagtgtgta

SEQ ID NO: 5073601 - DNA, 25 bp, Homo sapien
taaagcaccaatacagatccagaga

SEQ ID NO: 5073602 - DNA, 25 bp, Homo sapien
tgtagtaaagacgtctctggagtgt

SEQ ID NO: 5073603 - DNA, 25 bp, Homo sapien
gaaggcctccatcaaacatggtaac

SEQ ID NO: 5073604 - DNA, 25 bp, Homo sapien
gctatgtgagctcagcaagtccctc

SEQ ID NO: 5073605 - DNA, 25 bp, Homo sapien
tggagtgtctaccactgctatccgt

SEQ ID NO: 5073606 - DNA, 25 bp, Homo sapien
taaatagtatcctagtagccagttg

SEQ ID NO: 5073607 - DNA, 25 bp, Homo sapien
cagaaccatcatgaaaccagttgaa

SEQ ID NO: 5073608 - DNA, 25 bp, Homo sapien
catgaatctcctacctgaacccgtt

SEQ ID NO: 5073609 - DNA, 25 bp, Homo sapien
caacttaaaccttctggatcaggtc

SEQ ID NO: 5073610 - DNA, 25 bp, Homo sapien
tgttggcccatgtggaattcctagg

SEQ ID NO: 5073611 - DNA, 25 bp, Homo sapien
gccctactgccctgtgtgtcctaaa

SEQ ID NO: 5073612 - DNA, 25 bp, Homo sapien
ggaaactgatagactcgtgaggcca

SEQ ID NO: 5073613 - DNA, 25 bp, Homo sapien
ccatgaggaatccacgggaaactga

SEQ ID NO: 5073614 - DNA, 25 bp, Homo sapien
gagcacactgtatacctaagaatat

SEQ ID NO: 5073615 - DNA, 25 bp, Homo sapien
tgaaagacctgacgaagaaaaccga

SEQ ID NO: 5073616 - DNA, 25 bp, Homo sapien
tgctattttgcttaggtgcccaaag

SEQ ID NO: 5073617 - DNA, 25 bp, Homo sapien
tgtggtgctagaactcagcaaagaa

SEQ ID NO: 5073618 - DNA, 25 bp, Homo sapien
ttggggccataatgatcgaggacag

SEQ ID NO: 5073619 - DNA, 25 bp, Homo sapien
gggccataatgatcgaggacaggag

SEQ ID NO: 5073620 - DNA, 25 bp, Homo sapien
tcttggggccataatgatcgaggac

SEQ ID NO: 5073621 - DNA, 25 bp, Homo sapien
ggggccataatgatcgaggacagga

SEQ ID NO: 5073622 - DNA, 25 bp, Homo sapien
agggacgtgggagcagagtccctgg

SEQ ID NO: 5073623 - DNA, 25 bp, Homo sapien
cttgatgataagggacgtgggagca

SEQ ID NO: 5073624 - DNA, 25 bp, Homo sapien
gcaaggctgaggggactttggcagg

SEQ ID NO: 5073625 - DNA, 25 bp, Homo sapien
tgatgataagggacgtgggagcaga

SEQ ID NO: 5073626 - DNA, 25 bp, Homo sapien
gcattgaagagcgtcttttattact

SEQ ID NO: 5073627 - DNA, 25 bp, Homo sapien
gatgctgtcaataacaacactctcc

SEQ ID NO: 5073628 - DNA, 25 bp, Homo sapien
ctattcaatttttatcaccgacaga

SEQ ID NO: 5073629 - DNA, 25 bp, Homo sapien
tctcattttatgtgggatgctgtca

SEQ ID NO: 5073630 - DNA, 25 bp, Homo sapien
ttcctttgtagatccacctttctcc

SEQ ID NO: 5073631 - DNA, 25 bp, Homo sapien
ctttgtagatccacctttctcctca

SEQ ID NO: 5073632 - DNA, 25 bp, Homo sapien
tttgtagatccacctttctcctcat

SEQ ID NO: 5073633 - DNA, 25 bp, Homo sapien
tcctttgtagatccacctttctcct

SEQ ID NO: 5073634 - DNA, 25 bp, Homo sapien
cgcctccaaacttggtcctattgca

SEQ ID NO: 5073635 - DNA, 25 bp, Homo sapien
ctgccgcctccaaacttggtcctat

SEQ ID NO: 5073636 - DNA, 25 bp, Homo sapien
gccgcctccaaacttggtcctattg

SEQ ID NO: 5073637 - DNA, 25 bp, Homo sapien
tgccgcctccaaacttggtcctatt

SEQ ID NO: 5073638 - DNA, 25 bp, Homo sapien
cagaaggctaaggatgccatagcct

SEQ ID NO: 5073639 - DNA, 25 bp, Homo sapien
aaggctaaggatgccatagccttca

SEQ ID NO: 5073640 - DNA, 25 bp, Homo sapien
ctctcttttgcccggcctgattggc

SEQ ID NO: 5073641 - DNA, 25 bp, Homo sapien
ccctgggtggccagtccagttctct

SEQ ID NO: 5073642 - DNA, 25 bp, Homo sapien
tgtgtgcctctccacactccggata

SEQ ID NO: 5073643 - DNA, 25 bp, Homo sapien
gaattgcctgtctgatccatgtgtc

SEQ ID NO: 5073644 - DNA, 25 bp, Homo sapien
tgtttggcagctcatggacagcctt

SEQ ID NO: 5073645 - DNA, 25 bp, Homo sapien
tattaattcattctcacttctcgac

SEQ ID NO: 5073646 - DNA, 25 bp, Homo sapien
taggagctcagtcaccatccgaatg

SEQ ID NO: 5073647 - DNA, 25 bp, Homo sapien
gacatgaggatagccacatcttgta

SEQ ID NO: 5073648 - DNA, 25 bp, Homo sapien
atcttgtagcttcaggtccccagcc

SEQ ID NO: 5073649 - DNA, 25 bp, Homo sapien
catccgaatgacttggcgctcatga

SEQ ID NO: 5073650 - DNA, 25 bp, Homo sapien
tgtggcttttgtcattgtcgatctc

SEQ ID NO: 5073651 - DNA, 25 bp, Homo sapien
tagtttatgtggcttttgtcattgt

SEQ ID NO: 5073652 - DNA, 25 bp, Homo sapien
tggcttttgtcattgtcgatctcac

SEQ ID NO: 5073653 - DNA, 25 bp, Homo sapien
ttatgtggcttttgtcattgtcgat

SEQ ID NO: 5073654 - DNA, 25 bp, Homo sapien
aacaagcctgcatattccagtccag

SEQ ID NO: 5073655 - DNA, 25 bp, Homo sapien
caacaagcctgcatattccagtcca

SEQ ID NO: 5073656 - DNA, 25 bp, Homo sapien
acaagcctgcatattccagtccaga

SEQ ID NO: 5073657 - DNA, 25 bp, Homo sapien
aagcctgcatattccagtccagatt

SEQ ID NO: 5073658 - DNA, 25 bp, Homo sapien
ggaagagacatcaccggtcaggctc

SEQ ID NO: 5073659 - DNA, 25 bp, Homo sapien
caaaggaagacctcataaacggaag

SEQ ID NO: 5073660 - DNA, 25 bp, Homo sapien
cataaacggaagagacatcaccggt

SEQ ID NO: 5073661 - DNA, 25 bp, Homo sapien
ggaagacctcataaacggaagagac

SEQ ID NO: 5073662 - DNA, 25 bp, Homo sapien
ccatgaattgggtaccctcccagct

SEQ ID NO: 5073663 - DNA, 25 bp, Homo sapien
tactagctgtgtacctgggactcta

SEQ ID NO: 5073664 - DNA, 25 bp, Homo sapien
taaatatggcagtttgaggatccca

SEQ ID NO: 5073665 - DNA, 25 bp, Homo sapien
tttgaatgccaacccagcctactag

SEQ ID NO: 5073666 - DNA, 25 bp, Homo sapien
tgaagccgctaatgcaaggaatggg

SEQ ID NO: 5073667 - DNA, 25 bp, Homo sapien
ctgcttattcatccgcacagaggag

SEQ ID NO: 5073668 - DNA, 25 bp, Homo sapien
tcgcgggccccactcttaaatggct

SEQ ID NO: 5073669 - DNA, 25 bp, Homo sapien
tcgtaaagggtgacaaagcagaaag

SEQ ID NO: 5073670 - DNA, 25 bp, Homo sapien
ttttgcaaagcaagacattccatga

SEQ ID NO: 5073671 - DNA, 25 bp, Homo sapien
tgccctgggatgaacgtggaatgat
